(19) United States
(12) Patent Application Publication
(10) Pub. No.: US 2003/0165843 A1
(43) Pub. Date: Sep. 4, 2003

(54) Oligonucleotide library for detecting RNA transcripts and splice variants that populate a transcriptome

(76) Inventors: Avi Shoshan, New York, NY (US); Alon Wasserman, New York, NY (US); Eli Mintz, Kendall Park, NJ (US); Liat Mintz, Kendall Park, NJ (US); Simchon Faigler, Edison, NJ (US)

Correspondence Address: Sol Sheinbein, G E EHRLICH (1995) LTD, C/O Anthony Castorina, 2001 Jefferson Davis Highway Suite 207, Arlington, VA, 22202, US

(21) Appl. No.: 09/908,975

(22) Filed: Jul. 20, 2001

Related U.S. Application Data
(60) Provisional application No. 60/287,724, filed on May 2, 2001.
(60) Provisional application No. 60/221,607, filed on Jul. 28, 2000.

(51) Int. Cl. C12Q 1/68; C07H 21/04

(52) U.S. Cl. 435/6; 536/23.1; 536/24.3

(57) ABSTRACT

The present invention provides oligonucleotide libraries capable of detecting RNA transcripts and RNA splice variants which populate a transcriptome and which are transcribed from genes or transcription units that populate the corresponding genome. The present invention also provides oligonucleotide arrays generated from the oligonucleotide libraries and methods of using the oligonucleotide libraries in various oligonucleotide detection systems and expression profiling studies. Antisense molecules and double-stranded interfering RNAs, which are types of oligonucleotides, based on the oligonucleotides disclosed herein also are provided.

### CROSS REFERENCE TO RELATED APPLICATIONS

[0001] Incorporated by reference are U.S. Serial No. 60/287,724, filed May 2, 2001; U.S. Provisional Application Ser. No. 60/221,607, filed on Jul. 28, 2000; and U.S. application Ser. No. 09/133,987, filed on Aug. 13, 1998. This application claims priority to U.S. Serial No. 60/287,724, filed May 2, 2001 and U.S. Provisional Application Ser. No. 60/221,607, filed on Jul. 28, 2000.

### BACKGROUND OF THE INVENTION

[0002] 1. Field of the Invention

[0003] The present invention provides oligonucleotide libraries that are useful for detecting messenger RNAs from a biological sample. More specifically, the present invention provides oligonucleotide libraries capable of detecting RNA transcripts, including RNA splice variants, which populate a transcriptome and which are transcribed from genes or transcription units that populate the corresponding genome. The present invention also provides oligonucleotide arrays generated from the oligonucleotide libraries and methods of using the oligonucleotide libraries in various oligonucleotide detection systems and expression profiling studies.

[0004] 2. Description of the Field

[0005] Understanding biological functions and processes, normal or abnormal, in a cell, a tissue, an organ, and an organism hinges upon the knowledge of genes operative in the biological locale of interest, the messenger RNAs transcribed from these genes, and ultimately the set of proteins produced from the RNA transcripts. At the species level, the repertoire of all DNA molecules makes up the genome of that species; among these DNA molecules, the ones that are transcribed into RNA molecules are referred to as genes or transcription units. Correspondingly, the repertoire of all messenger RNA molecules transcribed from transcription units (hence “RNA transcripts” or “transcripts”) in a genome makes up a transcriptome; and, the repertoire of all proteins translated from messenger RNA molecules makes up a proteome.

[0006] Studies on a transcriptome of a species shed light on researchers' understanding of the corresponding genome and proteome of that species. Various techniques for identifying RNA transcripts and determining their levels of abundance in a biological sample have thus been instrumental in deciphering transcriptomes of a variety of species and thereby facilitating discoveries relating to the corresponding genomes and proteomes. These techniques include both gel-based procedures such as Northern Blot analysis, Dot Blot analysis, Primer Extension analysis, Substrate Enrichment Hybridization Analysis, Differential Display analysis, Polymerase Chain Reaction (PCR) based analysis and, most recently, chip-based procedures such as DNA microarray analysis.

[0007] The completion of whole genome sequencing for a number of species promises better efficiency, reliability, and comprehension in studying these genomes and their corresponding transcriptomes and proteomes. It is estimated that the total number of expressed genes or transcription units in a human genome is around 30,000-40,000 (Venter G. et al., Science 2000, Vol, 291: 1304-1351; The Genome International Sequencing Consortium, Nature 2000, Vol. 409: 360-921). However, the number of proteins encoded in a human proteome is expected to significantly exceed this estimate because, in many cases, more than one RNA splice variant is transcribed from a transcription unit or a gene. Estimates vary, but some researchers believe that a human transcriptome may contain up to 500,000 RNA transcripts and that, more than 30% of genes or transcription units in the human genome produce several RNA splice variants. (Mironov et al. 1999, Genome Research 9:1288-1293). These numbers are considered by others to be conservative. Alternative splicing also occurs in rat and mouse with similar frequencies, for example, and in lower organisms, such as Drosophila melanogaster and Caenorhabditis elegans. It should be noted that a special case of alternative splicing is alternative polyadenylation and that a significant number of genes or transcription units have alternative polyadenylation sites.

[0008] Proteins translated from different RNA splice variants may have significantly different biological functions. Different splice variants may be expressed in different tissues, different developmental stages, and different disease states. The detection of RNA transcripts and RNA splice variants from a transcription unit and the determination of (i) level of abundance of all RNA transcripts, including the splice variants from the transcription unit and (ii) levels of abundance of a subset of the splice variants or one splice variant are, therefore, desirable in accurately capturing the state of a transcriptome and hence, the corresponding proteome. And yet, the qualitative and quantitative detection of RNA splice variants remains an unmet challenge in the field of molecular biology, particularly on the scale of a transcriptome.

[0009] Oligonucleotide libraries have been used in both gel based and chip based systems to detect RNA molecules and measure their levels of abundance. However, oligonucleotides (“oligos”) of these libraries, which are used as oligo probes for hybridizing to target RNAs, are typically incapable of accurately detecting splice variants. That is, they typically do not contain oligos capable of hybridizing (thus recognizing) one or more specific splice variants, and therefore cannot effectively identify and/or distinguish alternatively spliced RNA transcripts or determine the levels of abundance of different splice variants.

### SUMMARY OF THE INVENTION

[0010] It is therefore an object of this invention to provide oligonucleotide libraries that are capable of detecting RNA transcripts and RNA splice variants transcribed from transcription units in a genome, thereby qualitatively and quantitatively characterizing the corresponding transcriptome. It is another object of this invention to provide oligonucleotide arrays that are generated from the oligonucleotide libraries and methods of using the oligonucleotide libraries to study a transcriptome of interest and, methods of using the oligonucleotide libraries in expression profiling studies.

[0011] In accordance with the present invention, there is provided, in an embodiment, an oligonucleotide library for detecting messenger RNAs that populate a transcriptome, wherein the transcriptome comprises messenger RNAs transcribed from a multiplicity of transcription units that populate a genome, wherein the library comprises a plurality of oligonucleotides, wherein each oligonucleotide in the plurality is capable of hybridizing selectively to a set of messenger RNAs transcribed from a given transcription unit of the genome, wherein at least one transcription unit of the genome encodes one or more messenger RNA splice variants.

[0012] According to another embodiment of the invention, the oligonucleotide library is capable of detecting RNA transcripts and splice variants of a human transcriptome. According to another embodiment, the oligonucleotide library of the present invention is capable of detecting RNA transcripts and splice variants of a rat transcriptome. According to yet another embodiment, the oligonucleotide library of this invention is capable of detecting RNA transcripts and splice variants of a mouse transcriptome. According to a further embodiment, the oligonucleotide library of this invention is capable of detecting RNA transcripts and splice variants of a arabadopsis transcriptome. According to a still further embodiment, the oligonucleotide library of this invention is capable of detecting RNA transcripts and splice variants of a drosophila melanogaster transcriptome.

[0013] In accordance with the present invention, there is provided, in another embodiment, an oligonucleotide library for detecting messenger RNAs that populate a sub transcriptome (a portion of a transcriptome that bears certain biological origin, structure, or function traits, e.g., tissue specificity, disease specificity, developmental specificity, etc.) of a tissue origin, wherein the sub transcriptome comprises messenger RNAs transcribed from a multiplicity of transcription units that populate a sub genome of the tissue origin, wherein the library comprises a plurality of oligonucleotides, wherein each oligonucleotide in the plurality is capable of hybridizing selectively to a set of messenger RNAs transcribed from a given transcription unit of the sub genome, wherein at least one transcription unit of the sub genome encodes one or more messenger RNA splice variants.

[0014] According to the invention, the tissue origin of the oligonucleotide library may be kidney, brain, heart, lung, bone, liver or other tissue of interest in various embodiments.

[0015] In accordance with the present invention, there is provided, in yet another embodiment, an oligonucleotide library for detecting messenger RNAs that populate a sub transcriptome of a pathological tissue origin, wherein the sub transcriptome comprises messenger RNAs transcribed from a multiplicity of transcription units that populate a sub genome (a portion of a genome that bears certain biological origin, structure, or function traits, e.g., tissue specificity, disease specificity, developmental specificity, etc.) of the pathological tissue origin, wherein the library comprises a plurality of oligonucleotides, wherein each oligonucleotide in the plurality is capable of hybridizing selectively to a set of messenger RNAs transcribed from a given transcription unit of the sub genome, wherein at least one transcription unit of the sub genome encodes one or more messenger RNA splice variants.

[0016] According to the invention, the pathological tissue origin may be cancer tissue, such as colon cancer tissue, breast cancer tissue, lung cancer tissue, bone cancer tissue, prostate cancer tissue, brain cancer tissue, or liver cancer tissue, in various embodiments. The pathological tissue origin, according to the invention, may also be abnormal heart tissue, abnormal neuronal tissue, abnormal liver tissue or abnormal kidney tissue in various embodiments, for example.

[0017] In accordance with the present invention, there is provided, in still another embodiment, an oligonucleotide library for detecting messenger RNAs that populate a sub transcriptome of a developmental stage, wherein the sub transcriptome comprises messenger RNAs transcribed from a multiplicity of transcription units that populate a sub genome of the developmental stage, wherein the library comprises a plurality of oligonucleotides, wherein each oligonucleotide in the plurality is capable of hybridizing selectively to a set of messenger RNAs transcribed from a given transcription unit of the sub genome, wherein at least one transcription unit of the sub genome encodes one or more messenger RNA splice variants.

[0018] According to the invention, the developmental stage may be human neural induction, mouse mesoderm induction, human erythrocyte differentiation, human or rat stem cell development, or other specific developmental biology states in various species.

[0019] In accordance with the present invention, there is provided, in a further embodiment, an oligonucleotide library for detecting messenger RNAs that populate a transcriptome of patients suffering from a disorder, wherein the transcriptome comprises messenger RNAs transcribed from a multiplicity of transcription units that populate a genome of patients suffering from the disorder, wherein the library comprises a plurality of oligonucleotides, wherein each oligonucleotide in the plurality is capable of hybridizing selectively to a set of messenger RNAs (one or more RNA transcripts) transcribed from a given transcription unit of the genome, wherein at least one transcription unit of the genome encodes one or more messenger RNA splice variants.

[0020] According to the invention, the disorder may be cancer, such as colon cancer, breast cancer, lung cancer, bone cancer, prostate cancer, brain cancer, or liver cancer, in various embodiments. The disorder, according to the invention, may also be Alzheimer's disease, Parkinson's disease, osteoporosis, diabetes, rheumatoid arthritis, or other disease of interest, in various embodiments.

[0021] In accordance with the present invention, there is provided, in a still further embodiment, an oligonucleotide library for detecting messenger RNAs that populate a transcriptome, wherein the transcriptome comprises messenger RNAs transcribed from a multiplicity of transcription units that populate a genome, wherein the library comprises a plurality of oligonucleotides, wherein each oligonucleotide in the plurality is capable of hybridizing selectively to one or a subset of messenger RNAs transcribed from a given transcription unit of the genome, wherein at least one transcription unit of the genome encodes one or more messenger RNA splice variants.

[0022] According to one embodiment of the invention, the oligonucleotide library is capable of detecting RNA transcripts and splice variants of a human transcriptome. According to another embodiment, the oligonucleotide library of the present invention is capable of detecting RNA transcripts and splice variants of a rat transcriptome. According to yet another embodiment, the oligonucleotide library of this invention is capable of detecting RNA transcripts and splice variants of a mouse transcriptome.

[0023] In accordance with the present invention, there is provided, in another embodiment, an oligonucleotide library for detecting messenger RNAs that populate a sub transcriptome of a tissue origin, wherein the sub transcriptome comprises messenger RNAs transcribed from a multiplicity of transcription units that populate a sub genome of the tissue origin, wherein the library comprises a plurality of oligonucleotides, wherein each oligonucleotide in the plurality is capable of hybridizing selectively to one or a subset of messenger RNAs transcribed from a given transcription unit of the sub genome, wherein at least one transcription unit of the sub genome encodes one or more messenger RNA splice variants.

[0024] According to the invention, the tissue origin of the oligonucleotide library may be kidney, brain, heart, lung, bone, liver or other tissue of interest in various embodiments.

[0025] In accordance with the present invention, there is provided, in yet another embodiment, an oligonucleotide library for detecting messenger RNAs that populate a sub transcriptome of a pathological tissue origin, wherein the sub transcriptome comprises messenger RNAs transcribed from a multiplicity of transcription units that populate a sub genome of the pathological tissue origin, wherein the library comprises a plurality of oligonucleotides, wherein each oligonucleotide in the plurality is capable of hybridizing selectively to one or a subset of messenger RNAs transcribed from a given transcription unit of the sub genome, wherein at least one transcription unit of the sub genome encodes one or more messenger RNA splice variants.

[0026] According to the invention, the pathological tissue origin may be cancer tissue, such as colon cancer tissue, breast cancer tissue, lung cancer tissue, bone cancer tissue, prostate cancer tissue, brain cancer tissue, or liver cancer tissue, in various embodiments. The pathological tissue origin, according to the invention, may also be abnormal heart tissue, abnormal neuronal tissue, abnormal liver tissue or abnormal kidney tissue in various embodiments.

[0027] In accordance with the present invention, there is provided, in still another embodiment, an oligonucleotide library for detecting messenger RNAs that populate a sub transcriptome of a developmental stage, wherein the sub transcriptome comprises messenger RNAs transcribed from a multiplicity of transcription units that populate a sub genome of the developmental stage, wherein the library comprises a plurality of oligonucleotides, wherein each oligonucleotide in the plurality is capable of hybridizing selectively to one or a subset of messenger RNAs transcribed from a given transcription unit of the sub genome, wherein at least one transcription unit of the sub genome encodes one or more messenger RNA splice variants.

[0028] According to the invention, the developmental stage may be human neural induction, mouse mesoderm induction, human erythrocyte differentiation, or other specific developmental states in various species.

[0029] In accordance with the present invention, there is provided, in a further embodiment, an oligonucleotide library for detecting messenger RNAs that populate a transcriptome of patients suffering from a disorder, wherein the transcriptome comprises messenger RNAs transcribed from a multiplicity of transcription units that populate a genome of patients suffering from the disorder, wherein the library comprises a plurality of oligonucleotides, wherein each oligonucleotide in the plurality is capable of hybridizing selectively to one or a subset of messenger RNAs transcribed from a given transcription unit of the genome, wherein at least one transcription unit of the genome encodes one or more messenger RNA splice variants.

[0030] According to the invention, the disorder may be cancer, such as colon cancer, breast cancer, lung cancer, bone cancer, prostate cancer, brain cancer, or liver cancer, in various embodiments. The disorder, according to the invention, may also be Alzheimer's disease, Parkinson's disease, osteoporosis, diabetes, rheumatoid arthritis, or other disease of interest, in various embodiments.

[0031] The oligonucleotide libraries of the present invention may have at least 95, 200, 400, 600, 800, or 1000 oligonucleotides in various embodiments. The oligenucleotides in the library of the present invention may be 75, 65, 60, 55, 50, 45, 40, 35, 30, or 20 bases in length, or any integer thereabout or therebetween, in various embodiments of the invention, although smaller and larger oligonucleotides may be employed according to the invention.

[0032] In accordance with the present invention, in a still further embodiment, each oligonucleotide of the aforementioned oligonucleotide libraries of the invention in various embodiments contains a modification that enables attachment to a solid surface. The attachment may be covalent or electrostatic, for example.

[0033] In accordance with the present invention, there is provided, in another embodiment, a DNA microarray having spotted thereon a plurality of oligonucleotide sequences, wherein said plurality is provided by the aforementioned oligonucleotide libraries of the invention in various embodiments.

[0034] In accordance with the present invention, there is provided, in yet another embodiment, a method for expression profiling a cell or tissue sample that contains two or more RNAs of various abundances, comprising measuring hybridization signals of said sample to a plurality of oligonucleotide sequences, thereby determining the levels of said two or more RNAs in said sample and, where a RNA is transcribed from a transcription unit that has a set of splice variants, determining (i) the total level of the set of splice variants, (ii) the total level of a subset thereof, or (iii) the level of one splice variant thereof, wherein said plurality is provided by the aforementioned oligonucleotide library the invention in various embodiments.

[0035] According to the invention, the method for expression profiling may, in various embodiments, employ a nucleotide chip, a membrane or filter, an electrophoresis gel and a filter or membrane imprinted therefrom, or other similar platforms, on which hybridization is carried out.

[0036] In accordance with yet another aspect of the invention, there are provided methods of inhibiting or preventing translation using the oligonucleotides of the present invention or DNA constructs based on the oligonucleotides, wherein the constructs can yield antisense RNA at the cellular level.

[0037] In accordance with still another aspect of the invention, the oligonucleotides of the libraries can be single stranded, double stranded or partially double stranded.

[0038] In accordance with a still further aspect of the invention, there are provided double stranded oligonucleotides that can cause post-transcriptional silencing of specific genes. In one embodiment, these oligonucleotides are short double-stranded RNAs

### BRIEF DESCRIPTION OF DRAWINGS

[0039] FIG. 1. This is a diagram demonstrating a transcription unit with three exons and, transcribed therefrom, two alternatively spliced transcripts.

[0040] FIG. 2. This is a diagram demonstrating a transcription unit with three exons and, transcribed therefrom, two different splice variants.

[0041] FIG. 3. This is a diagram demonstrating a transcription unit with five exons and, transcribed therefrom, four alternatively spliced transcripts.

### DETAIL DESCRIPTIONS OF PREFERRED EMBODIMENTS

[0042] Libraries, Oligonucleotides, and Modifications Thereof

[0043] To characterize a transcriptome or a portion thereof, oligonucleotides used as probes to test hybridization to messenger RNA samples must be representative of the total population of RNA transcripts or a portion thereof that is of interest. To generate this type of oligonucleotide information, the approach outlined in U.S. patent application Ser. No. 09/133,987 (“the '987 application”) can be employed.

[0044] The large pool of publicly known nucleotide sequences, sequence fragments, or expressed sequence tags (“EST”), e.g., GenBank, EMBL, DBest sequence collections, are subject to rigorous clustering and assembly procedures to obtain sequence clusters and longer contigs (contiguous sequences, i.e., longer sequences assembled from shorter ESTs). These procedures give rise to sequences that are better representations of genes or transcription units compared to the large pool of ESTs and other sequence fragments.

[0045] A representative sequence for a given gene or transcription unit is chosen and from this sequence one or more oligonucleotide (or oligo, oligo probe) is derived. The representative sequence has high specificity to the target gene or transcription unit (i.e., it shares little homology to sequences from other genes or transcription unit therefore the frequency of non-specific binding is minimized); the sequence quality is good (i.e., the gene sequence information is accurate). The oligonucleotide probe has high sensitivity, i.e., the affinity of hybridization of the probe to the target gene or transcription unit is high. The probe preferably recognizes a sequence close to the 3′ terminus of the target gene or transcription unit such that in certain procedures where target gene sample is prepared the yield of which is maximized. Additionally, the oligonucleotide lacks secondary structure (e.g., hairpin) or tendency to form the same, such that hybridization is not hampered.

[0046] Most importantly, a representative sequence is chosen and one or more oligonucleotides are designed taking into account alternative splicing of the target gene and transcription unit. As such, the oligonucleotide may be used to hybridize, and hence detect, either (i) all the splice variants of a particular gene or transcription unit, (ii) a subset of all the splice variants, or (iii) one of the splice variant of the gene or transcription unit.

[0047] Referring to FIG. 1, a transcription unit or gene has, for example, three exons: A, B, and C, and is alternatively spliced in transcription giving rise to two variants: transcript 1 (AC) and transcript 2 (BC). An oligo complimentary to sequence A, or a fragment thereof, would therefore only detect transcript 1, not transcript 2. An oligo complimentary to sequence B or a fragment thereof, by contrast, would only detect transcript 2, not transcript 1.

[0048] The scenario shown in FIG. 2 is slightly different. The transcription unit has three exons: A, B, and C, which are transcribed into two splice variants, transcript 1 (AC) and transcript 2 (ABC). An oligo complementary to sequence A or a fragment thereof would be able to detect both transcript 1 and transcript 2 and, collectively, measure the level of abundances of both. In contrast, the oligo complementary to sequence B or a fragment thereof would be able to detect transcript 2 not transcript 1, thereby providing direct information on the abundance of transcript 2.

[0049] FIG. 4 demonstrates a transcription unit or a gene that has 5 exons: A, B, 20 C, D, and E. There are four alternatively spliced transcripts: transcript 1 (ACD), 2 (ACE), 3 (BCD), and 4 (BCE). This is a more complex scheme but the principle remains the same: An oligo complementary to sequence A or a fragment thereof would be able to only detect transcripts 1 and 2 (hence “1+2=A”); an oligo complementary to sequence B would be able to only detect transcripts 3 and 4 (hence “3+4=B”); an oligo complementary to sequence D would be able to only detect transcripts 1 and 3 (hence “1+3=D”); and an oligo complimentary to sequence E would be able to only detect transcripts 2 and 4 (hence “2+4=E”) Therefore, we have a number of oligos that can specifically detect a subset of the splice variants. And, additionally, resolving the four polyvariance equations above would reveal the level of abundance of each splice variant (A, B, D, and E). Moreover, an oligo complementary to sequence C or a fragment thereof would be able to detect all four transcripts and thus measure the total level of abundances of these splice variants.

[0050] Analogously, according to the present invention, alternative polyadenylation is taken into account such that a representative sequence and one or more oligonucleotide probe are generated for a particular gene or transcription unit that has alternative polyadenylation sites. These probes may be used to hybridize, and hence detect, either (i) all the alternative polyadenylated transcripts, (ii) a subset of these alternative polyadenylated transcripts, or (iii) one of the polyadenylated sites of the target gene or transcript.

[0051] The oligonucleotides of the present invention may be modified at the termini to facilitate their application in a gel-based system or attachment on a chip or array-based system for RNA detection. For example, in one embodiment, the oligonucleotides are modified at the 5′ terminus: A 5′ C6-amino modification is performed to enable covalent attachment of oligonucleotides on a glass array surface. The carbons function as a spacer and the reactive amine group interacts with aldehydes that are covalently attached to a glass surface. Pre-processed glasses are commercially available from a number of vendors, e.g., ArrayIt.com (http://arrayit.com), Corning (http://www.corning.com), Clontech (http://www.clontech.com). These glasses, and other similar ones, are suitable for oligonucleotide binding and thereby for making oligo arrays using the oligonucleotide libraries according to this invention. The attachment may be covalent or electrostatic, for example. One example is binding of oligos on poly-L-lysine glass, which is electrostatic: poly-L-lysine is positively charged whereas phosphate backbone of DNA is negatively charged. Another example is binding of oligos on aldehyde glass, which is covalent.

[0052] Oligonucleotides Used with Gel-Based and Array-Based Platforms

[0053] As mentioned above, various detection platforms may be used according to the present invention to measure RNA species in a transcriptome. In one embodiment, a gel-based platform is used; in another embodiment, a chip or array-based platform is used. When a gel-based platform is used, techniques such as Northern Blot analysis, Dot Blot analysis, Primer Extension analysis, Substrate Enrichment Hybridization Analysis, Differential Display analysis, Polymerase Chain Reaction (PCR) based analysis, or other similar procedures may be employed. Arrays also can be made by spotting directly on a substrate like nitrocellulose. Essentially, oligonucleotides of this invention are labeled (via radioactive-labeling, fluorescent-labeling, or using other suitable labeling methods and capture moieties known in the art) and are hybridized to a filter or membrane imprinted from the gel in which RNA or cDNA samples have been run. Hybridization signals indicate the identity and abundance of the RNA transcripts (and splice variant(s) thereof) that the oligonucleotide probes represent. These gel-based nucleotide hybridization and detection procedures are well known to a skilled molecular biologist. See generally, Sambrook J. and Russell, 2001, Molecular Cloning, a Laboratory Manual, 3rd Ed. In some cases, where separation of nucleotides is not involved, nucleotide probes and samples may be directly applied to a membrane or filter for hybridization without the use of an electrophoresis gel.

[0054] When certain chip or array-based platforms are used, the oligonucleotides of the present invention are spotted or printed on a solid surface, e.g., a glass slide, via various attachment chemistries as discussed above or via other suitable attachment procedures. The slide is then treated in a manner similar to a filter or membrane in a typical gel-based separation and hybridization experiment and, subsequently, probed with labeled (via radioactive-labeling, fluorescent-labeling, or by other suitable labeling methods) cDNA or RNA molecules that are derived from a biological sample such as a tissue or cell line of interest. In some cases, labeled clones or total genomic DNA may be used instead. Following hybridization, the slide is washed and scanned to read and record the hybridization signals. These signals represent the identity and abundance of the RNA transcripts (and splice variant(s) thereof) that the oligonucleotide probes correspond to and detect. Such measurement of RNA transcripts and their splice variants in a particular biological sample therefore provides a snapshot of the transcriptome under a particular biological state—normal, pathological, or treated—and hence helps to elucidate the characteristics and interactions in different biological states.

[0055] According to the invention all oligonucleotides of a library, or a portion thereof, may be spotted on a single microarray and, therefore, a single hybridization procedure may test a multiplicity of transcripts or their corresponding genes. As a variation, in another embodiment, oligonucleotides may be directly synthesized on the surface of an array. Methods of oligo synthesis on a solid surface are known in the art. See, e.g., U.S. Pat. No. 5,593,839. In this embodiment, the oligonucleotides in the library preferably are around 20 or 25 bases in length, since in situ synthesis of longer sequences is often error prone. The libraries of the present invention that are directly synthesized on an array thus may be useful as specialized or mini libraries designed to detect transcripts of a sub-transcriptome under a particular biological state.

[0056] Uses for Oligonucleotide Libraries

[0057] Whether gel-based, array-based, or other suitable detection systems are employed, according to the present invention, the oligonucleotide library may be constructed to detect RNA transcripts and splice variants of the transcriptome of a given species, such as a human transcriptome, a mouse transcriptome, or a rat transcriptome. The library also may be constructed to detect RNA transcripts and splice variants of a sub-transcriptome that is of a specific biological or pathological origin or in a specific biological or pathological state.

[0058] For example, in one embodiment of this invention, the sub-transcriptome is of a specific tissue origin. That is, it may be a kidney sub-transcriptome, a brain tissue sub-transcriptome, a heart tissue sub-transcriptome, a lung tissue sub-transcriptome, a bone tissue sub-transcriptome, a liver tissue sub-transcriptome, etc. The libraries of the invention can thus be used to specifically detect RNA transcripts and splice variants that populate the sub-transcriptome of a tissue of interest. Tissue-specific expression of certain genes (i.e., certain RNA transcripts or splice variants that exist only in some sub-transcriptome(s) but not in others) or differential expression of certain genes in a tissue-specific manner (i.e., certain RNA transcripts or splice variants are more—or less—abundant in some sub-transcriptome(s) than in another) therefore can be detected and monitored using the oligonucleotide library of the present invention. The presence or absence of a transcript or specific splice variant and the differences in their abundance may be evaluated under a statistical significance standard. Suitable statistical evaluations are known in the art.

[0059] In another embodiment, the sub-transcriptome is of a particular pathological origin. That is, it may be a cancer tissue sub-transcriptome, e.g., a colon cancer tissue sub-transcriptome, a breast cancer tissue sub-transcriptome, a lung cancer tissue sub-transcriptome, a bone cancer tissue sub-transcriptome, a prostate cancer tissue sub-transcriptome, a brain cancer tissue sub-transcriptome, or a liver cancer tissue sub-transcriptome. It may also be an abnormal heart tissue sub-transcriptome, an abnormal neuronal tissue sub-transcriptome, an abnormal liver tissue sub-transcriptome, or an abnormal kidney tissue sub-transcriptome, etc.

[0060] The libraries of the invention can therefore be used to specifically detect RNA transcripts and splice variants that populate the sub-transcriptome of a pathological origin of interest. This application, therefore, allows detection of tissue- and pathology-specific genes, i.e., genes that are only expressed in a specific tissue and under a specific pathological condition, since the corresponding transcripts and splice variants can only be found in the specific sub-transcriptome. Additionally, this application further permits detection of genes, that are differentially expressed in a tissue- and pathology-specific manner, i.e., genes that are expressed at a different level in a specific tissue and under a specific pathological condition than in other tissues or under normal or other conditions, because the corresponding transcripts and splice variants are more—or less—abundant in the specific sub-transcriptome. The presence or absence of a transcript or splice variant and the differences in their abundance may be evaluated under a statistical significance standard.

[0061] In yet another embodiment, the sub-transcriptome is of a certain developmental stage. That is, it may be a sub-transcriptome from human neural induction, mouse mesoderm induction, human erythrocyte differentiation, or other specific developmental biology states in various species. The libraries of the invention can therefore be used to specifically detect RNA transcripts and splice variants that populate the sub-transcriptome of a developmental biology stage of interest. This application allows detection of developmental specific genes, i.e., genes that are only expressed in a specific developmental state, since the corresponding transcripts and splice variants can only be found in the specific sub-transcriptome. Additionally, this application also allows detection of genes that are differentially expressed in a developmental-dependent manner, i.e., genes that are expressed at a different level in a specific developmental state than in other state, because the corresponding transcripts and splice variants are more—or less—abundant in the specific sub-transcriptome. The presence and absence of a transcript or splice variant and the differences in their abundance may be evaluated under a statistical significance standard.

[0062] In a further embodiment, the oligonucleotide library is constructed to detect RNA transcripts and splice variants of a transcriptome of a patient suffering from a particular disorder. That is, it may be the transcriptome of a cancer patient, e.g., a colon cancer patient, a breast cancer patient, a lung cancer patient, a bone cancer patient, a prostate cancer patient, a brain cancer patient, or a liver cancer patient. It may also be the transcriptome of an Alzheimer patient, a Parkinson's patient, an osteoporosis patient, a diabetes patient, a rheumatoid arthritis, or a patient of other disease of interest.

[0063] The present invention allows detection of disease specific genes, i.e., genes that are only expressed in patients afflicted with a specific disease, since the corresponding transcripts and splice variants can only be found in the transcriptome of such patients. Additionally, the present invention allows detection of genes that are differentially expressed in patients of a specific disease, i.e., genes that are expressed at a different level in patients of a specific disease than in normal or healthy individuals, because the corresponding transcripts and splice variants are more—or less—in the transcriptome of such patients. The presence and absence of a transcript or splice variant and the differences in their abundance may be evaluated under a statistical significance standard, e.g., requiring a specific p score. Furthermore, this application allows individualized characterization of expression patterns or profiles (the compilation of the identity and abundance of transcripts and splice variants of a given patient) of patients suffering from a particular disease and therefore provides a basis for development of individualized therapeutics.

[0064] To summarize, the oligonucleotide libraries of the present invention may be used in a variety of functional contexts to detect RNA transcripts and splice variants and thereby characterize a transcriptome or sub-transcriptome of interest. In this connection, the scope of the sub-transcriptome may also be delimited by protein functions. For example, an oligonucleotide library may be used to detect RNA transcripts and splice variants of a sub-transcriptome that corresponds to cell surface antigens. A list of more than 40 protein functional groups, as set forth below (see also, U.S. Provisional Application Ser. No. 60/221,607), is useful in the present invention, for example, for constructing oligonucleotide libraries capable of characterizing sub-transcriptomes that give rise to sub-proteomes or proteins of specific functions and abnormality thereof.

[0065] Group 1. Adaptor-binding proteins. These are proteins that are associated to other cell components—binding to or interacting with—in maintaining their structural integrity and performing its functional activities.

[0066] Group 2. Adhesion molecules. These are proteins involved in modulation of adhesion between adjoining cells.

[0067] Group 3. Apolipoproteins. These are proteins that are part of lipoprotein particles and that function in cellular signaling in binding and internalization of these particles. Apolipoprotein defects are found in diseases which involve abnormally high or low levels of lipoprotein and cholesterol, as well as conditions involved in the formation or arteriosclerosis.

[0068] Group 4. Apoptosis related proteins. These are proteins and enzymes that are involved in the apoptosis pathway, in an inhibitory or stimulatory manner. Abnormalities of these proteins cause diseases which are involved in premature death of cells, such as degenerative diseases, for example neurodegenerative diseases or conditions associated with aging, or alternatively, diseases wherein required apoptosis does not take place. Example of such diseases are cancerous diseases and loss of cardiac function after myocardial infarction.

[0069] Group 5. Cancer related proteins. These proteins, including DNA repair proteins, tumor markers and antigens, tumor suppressors, and messenger molecules participating tumorigenesis, etc., are involved in various kind of cancers and the treatment and detection of the corresponding metastasis states.

[0070] Group 6. Carboxylases. Abnormality of these proteins causes mal-regulation of enzymatic reactions that remove CO₂ groups from other moieties.

[0071] Group 7. Cell surface antigens. Proteins expressed on the surface of cells. Abnormalities of these proteins can be seen in autoimmune disease, e.g., AIDS and cancers that involve cell surface antigens, for example.

[0072] Group 8. Proteins controlling cell growth. These proteins have defective structure or function in degenerative diseases (low growth) or cancerous diseases (uncontrolled growth).

[0073] Group 9. Coagulation—related proteins. Abnormality of these proteins may cause hemophilia or stroke and blockage of blood vessels, for example.

[0074] Group 10. Converting enzymes. These enzymes convert one protein to another by specific cleavage of the precursor protein.

[0075] Group 11. Cyclase enzymes. These enzymes convert triphosphate to cyclic monophosphate. Abnormality of these enzymes causes insufficient or excessive conversion of triphosphate to cyclic monophosphate thereby affecting cellular signaling.

[0076] Group 12. Proteins involved in protein degradation. Abnormalities of these proteins may cause abnormal degradation of other proteins, which may lead to abnormal accumulation of various proteinaceous product in cells.

[0077] Group 13. Proteins involved in development. Abnormalities of these proteins are manifested in genetic diseases involving abnormal development of a fetus, for example.

[0078] Group 14. Domain proteins. These are proteins that are involved in protein-protein interactions.

[0079] Group 15. Esterase. These proteins cleave an ester bond.

[0080] Group 16. Growth factors. Examples of these proteins include cytokines, interleukins, interferon, and lymphokines, etc. These proteins are implicated in autoimmune diseases, inflammation related disease, Graft vs. Host disease, diseases caused by infectious agents, and cancer, to name a few.

[0081] Group 17. Hormones and poietin proteins. Abnormality of these proteins are seen in various endocrine disorders.

[0082] Group 18. Housekeeping proteins. Examples are homeobox proteins, heat shock proteins, and chaperoning, etc.

[0083] Group 19. Hydrolases. These enzymes modify hydroxyl groups; examples are hydrogenase, dehydrogenase, hydrolase, and hydroxylase.

[0084] Group 20. Immunology-related genes. These are proteins that are involved in the immune system, including antigens, antibodies, and their associated proteins. These proteins are important in pathological conditions such as inflammation, autoimmune diseases, infectious diseases, and cancerous processes.

[0085] Group 21. Inhibitors. These proteins inhibit the function of other proteins in cellular processes.

[0086] Group 22. Kinases. Abnormality of these proteins may lead to defective cellular signaling.

[0087] Group 23. Lipases, phospholipases, and lysophospholipases. These proteins are implicated in abnormal lipid metabolism.

[0088] Group 24. Cell matrix and cytoskeleton proteins.

[0089] Group 25. Modifying enzymes. These proteins include a number of miscellaneous enzymes such as paraoxonase, GTPase, ATPase, and anhydrase. Malfunctions of these enzymes are implicated in a variety of cellular processes.

[0090] Group 26. Mutases and superoxidedismutases. These proteins are implicated in cancer and various other pathological processes involved in aging.

[0091] Group 27. Neurology related proteins. These proteins are involved in central nervous system disorders, including various types of dementia, neurodegenerative diseases, epilepsy, psychiatric disorders, etc.

[0092] Group 28. Oxidases and peroxidases. Abnormalities of these enzymes may cause metabolic problems involving peroxide, for example.

[0093] Group 29. Oxygenases, mono- and di-oxygenases.

[0094] Group 30. Phosphatases and phosphorylases.

[0095] Group 31. Phosphoproteins and phospholipids.

[0096] Group 32. Proteases, peptidases, and proteinases.

[0097] Group 33. Receptors.

[0098] Group 34. Reductases.

[0099] Group 35. Secreted proteins. These proteins include hormones, neurotransmitters, and various other proteins secreted by cells to the extracellular environment.

[0100] Group 36. Signal-transduction proteins. A G protein is one example of this group of proteins.

[0101] Group 37. Sub-cellular proteins. Examples of these proteins include ribosomal proteins.

[0102] Group 38. Synthases and synthetases.

[0103] Group 39. Proteins involved in nucleotide interactions. These include transcription factors, RNA and DNA binding proteins, zinc fingers, helicase, isomerase, histones, nucleases.

[0104] Group 40. Transferases. These are enzymes involved in transfer of protein functional groups.

[0105] Group 41. Translational-factors. These are proteins and enzymes involved in the translational process, such as elongation and initiation factors. Abnormalities in these proteins may impair cellular protein production.

[0106] Group 42. Transporters. These proteins mediate the transport of molecules and macromolecules, including channels, exchangers, and pumps.

[0107] Expression Profiling Using Oligonucleotide Libraries

[0108] One application of the oligonucleotide libraries according to this invention is expression profiling, which is mentioned supra in various places but which warrants some additional discussion. Expression profiling, also termed gene expression profiling, as used in this invention, means quantitative and qualitative determination of RNA transcripts and splice variants in a biological sample. The biological sample may be a tissue or a cell line sample, a normal or diseased tissue sample, a diseased tissue sample or a tissue sample after some period of treatment, a sample taken from different developmental biology state, a biological tissue or fluid sample taken from a patient at various time points in the course of application of a drug or a treatment regime. Expression profiling establishes expression profiles or expression patterns, which are compilations of identity and abundance of RNA transcripts and slice variants, for a particular biological source or a particular physiological or pathological state.

[0109] Expression profiling may be performed via a gel (and/or membrane)-based or array-based system according to the present invention, as discussed supra. Essentially, expression profiling of a biological sample that contains two or more RNAs of various abundances is preformed by measuring hybridization signals of the sample to a plurality of oligonucleotide sequences, thereby determining the levels of the RNA transcripts in the sample and, where an RNA is transcribed from a transcription unit that has a set of splice variants, determining (i) the total level of the set of splice variants, (ii) the total level of a subset thereof, or (iii) the level of one splice variant thereof. The plurality of oligonucleotides is provided by the oligonucleotide library of the present invention in various embodiments discussed above.

[0110] Accordingly, the present invention encompasses oligonucleotide libraries and sub-libraries thereof, custom or modified oligonucleotides, oligonucleotide arrays having spotted thereon the oligonucleotides from the libraries, methods of using oligonucleotides in various nucleotide detection systems, and methods of expression profiling using the oligonucleotide libraries.

[0111] Antisense Uses and RNA Interference

[0112] Because the oligonucleotides of the present invention are able to bind to one or more splice variants of the transcriptome, these oligonucleotides have uses in in situ and in vivo antisense contexts. For example, single-stranded antisense DNA oligonucleotides themselves, or double stranded DNA oligonucleotides in denaturing contexts, can be injected into a cell, such as a mammalian cell (including human cells) and the body, such as a mammalian body (including humans), and be expected to bind to mRNA transcripts, which would inhibit or prevent translation of the mRNA into protein. Moreover, the sense strand of an double-stranded oligonucleotide or a single-stranded sense oligonucleotide can be used as an initial design template for creation of antisense RNA. Using approaches known in the art for in vivo expression of antisense RNA molecules, an antisense RNA based upon the oligonucleotides of the present invention can be employed to inhibit or prevent translation of an mRNA at the cellular level.

[0113] The oligonucleotides of the library also can be employed in an RNA interference context. The phenomenon of RNA interference is discussed in Bass, Nature 411: 428-29 (2001); Elbahir et al., Nature 411: 494-98 (2001); and Fire et al., Nature 391: 806-11 (1998), where methods of making interfering RNA also are discussed. The double-stranded RNA based upon a sequence disclosed herein is less than 100 base pairs (“bps”) in length and constituency and preferably is about 30 bps or shorter, and can be made be approaches known in the art, including the use of complementary DNA strands or synthetic approaches. The RNAs that are capable of causing interference can be referred to a small interfering RNAs (“siRNA”), and can cause cause post-transcriptional silencing of specific genes in cells, such as mammalian cells (including human cells) and in the body, such as mammalian bodies (including humans). Exemplary siRNAs according to the invention could have up to 29 bps, 25 bps, 22 bps, 21 bps, 20 bps, 15 bps, 10 bps or any number thereabout or therebetween.

### EXAMPLE 1

### Oligonucleotide Libraries for Detecting all Alternatively Spliced Transcripts: Human, Rat, and Mouse Libraries

[0114] Oligonucleotides either 60 bases or 65 bases in length are synthesized, each of which is modified at the 5′ terminus with a C6-amino addition to enable subsequent covalent attachment to aldehyde glass surface. Each oligonucleotide is complementary to a portion of a RNA transcript that is common among the existing RNA splice variants transcribed from a particular transcription unit or gene. Each oligonucleotide is also specific or unique to the RNA transcripts and/or the RNA splice variants to which it is complementary, i.e., its binding to RNA transcripts or splice variants from other transcription units or genes is negligible. In other words, a single oligo is selected for each gene or transcription unit. Each oligo is derived from a sequence segment that is common to a practically maximal number of splice variants known or predicted for each gene or transcription unit. Additionally, the oligos are designed and synthesized in such a manner that high accuracy of sequence quality is maintained by avoiding sequencing errors, that the secondary structure is avoided to promote effective hybridization, and that the melting temperature is normalized to be consistent across the entire oligo collection in the library.

[0115] In some representative embodiments, the human oligo library comprises 18,861 human oligonucleotides, each 60 bases in length; the rat oligo library comprises 4,854 rat oligonucleotides, each 65 bases in length; and the mouse oligo library comprises 7,524 oligonucleotides, each 65 bases in length. The sequences of the 18,861 human oligos, the 4,854 rat oligos, and the 7,524 mouse oligos are contained in CRF, PC/MS-DOS PATENTIN 3.0, and copies comprising 32,337 sequences in Patentin 3.0 filed along with this application on CD-R media, file size 5.78 MB, file name Shoshan, with Attorney Docket No. 36688-0005, the entirety of which is hereby incorporated by reference, which contains the sequences set forth in the Sequence Listing (CRF and copies) comprising 32,337 sequences in Patentin 3.0 filed along with this application on CD-R media, file size 5.78 MB, file name Shoshan, with Attorney Docket No. 36688-0004, the entirety of which is hereby incorporated by reference, which was filed in U.S. Serial No. 60/287,724, filed May 2, 2001. Also provided herewith are the 32,337 sequences used in the sequence listing, which are in a MS Word format on a CD-R disk labeled Raw Sequences, PC/MS-DOS PATENTIN 3.0 for the 5.78 MB sequence listing, with Attorney Docket No. 36688-0005, the entirety of which is hereby incorporated by reference. Each oligo in these libraries represents a RNA transcript and/or all existing or predicted RNA splice variants that are transcribed from a transcription unit or gene encoding a certain functional protein. The name, GenBank accession number, and other annotative information of the corresponding gene or transcription unit for the oligo sequences in many cases are specified. The number of sequences above are not absolute, and therefore other libraries can be made according to applicants' teachings that contain different numbers of sequences.

[0116] The oligos of the library may be arranged on plates, e.g., in 384 or 96 well format. They are made spot or print-ready, and thus can conveniently be applied in microarray analysis.

[0117] Oligonucleotide libraries for other species, such as bovine, porcine, or arabadopsis may be similarly constructed according to the present invention; those libraries may be readily used in microarray analysis and, in other RNA or cDNA detection systems known in the art.

### EXAMPLE 2

### Mini Oligonucleotide Library for Detecting all RNA Transcripts or Distinct Splice Variants

[0118] Human oligo mini-libraries are constructed for human cancer/apoptosis genes, obesity/diabetes genes, and toxicology genes. Oligonucleotides 60 bases in length are designed or selected for genes implicated in cancer/apoptosis, obesity/diabetes, and toxicology, respectively, using approaches outlined in U.S. application Ser. No. 09/133,987, also taking into account the phenomenon of alternative splicing. These oligos are then synthesized taking into account the similar considerations as discussed in Example 1 supra.

[0119] The oligonucleotides in the human oligo mini-library capable of detecting distinct splice variants of human cancer/apoptosis genes and/or their transcripts comprise 201 sequences. The oligonucleotides in the human oligo mini-library capable of detecting all existing or predicted splice variants from human cancer/apoptosis genes comprise 280 sequences. The oligonucleotides in the human oligo mini-library capable of detecting distinct splice variants of genes implicated in toxicology comprise 234 sequences; and the oligonucleotides in the human oligo mini-library capable of detecting all existing or predicted splice variants from human toxicology genes comprise 96 sequences. The oligonucleotides in the human oligo mini-library capable of detecting distinct splice variants of human obesity/diabetes genes comprise 195 sequences; and the oligonucleotides in the human oligo mini-library capable of detecting all existing or predicted splice variants from human obesity/diabetes genes comprise 92 sequences. Again, the number of sequences above are not absolute, and therefore other libraries can be made according to applicants' teachings that contain different numbers of sequences.

[0120] The sequences of all the oligos in the six mini-libraries are enclosed in the Sequence Listing filed along with this application. These oligos may be arranged on plates, e.g., in 384 or 96 well format. They are made print-ready, and thus can conveniently applied in microarray analysis. Disease specific or differentially expressed genes can therefore be detected or monitored using these oligo libraries and microarrays for human toxicology, diabetes/obesity, and cancer/apoptosis conditions, respectively.

[0121] It is to be understood that while the invention has been described in detail by way of example and illustration for the purpose of clarity of teaching, the foregoing description is not intended to limit the scope of the invention. Other aspects, advantages, and modifications that are apparent to one of skill in the art in light of the teachings of this invention are within the scope of the following claims.

What is claimed is:

1. An oligonucleotide library for detecting messenger RNAs that populate a transcriptome, wherein the transcriptome comprises messenger RNAs transcribed from a multiplicity of transcription units that populate a genome, wherein the library comprises a plurality of oligonucleotides, wherein each oligonucleotide in the plurality is capable of hybridizing selectively to a set of messenger RNAs transcribed from a given transcription unit of the genome, wherein at least one transcription unit of the genome encodes one or more messenger RNA splice variants.

2. The oligonucleotide library of claim 1, wherein said transcriptome is a human transcriptome.

3. The oligonucleotide library of claim 1, wherein said transcriptome is a rat transcriptome.

4. The oligonucleotide library of claim 1, wherein said transcriptome is a mouse transcriptome.

5. An oligonucleotide library for detecting messenger RNAs that populate a sub transcriptome of a tissue origin, wherein the sub transcriptome comprises messenger RNAs transcribed from a multiplicity of transcription units that populate a sub genome of the tissue origin, wherein the library comprises a plurality of oligonucleotides, wherein each oligonucleotide in the plurality is capable of hybridizing selectively to a set of messenger RNAs transcribed from a given transcription unit of the sub genome, wherein at least one transcription unit of the sub genome encodes one or more messenger RNA splice variants.

6. An oligonucleotide library for detecting messenger RNAs that populate a sub transcriptome of a pathological tissue origin, wherein the sub transcriptome comprises messenger RNAs transcribed from a multiplicity of transcription units that populate a sub genome of the pathological tissue origin, wherein the library comprises a plurality of oligonucleotides, wherein each oligonucleotide in the plurality is capable of hybridizing selectively to a set of messenger RNAs transcribed from a given transcription unit of the sub genome, wherein at least one transcription unit of the sub genome encodes one or more messenger RNA splice variants.

7. The oligonucleotide library of claim 6, wherein said pathological tissue origin is cancer tissue.

8. An oligonucleotide library for detecting messenger RNAs that populate a sub transcriptome of a developmental stage, wherein the sub transcriptome comprises messenger RNAs transcribed from a multiplicity of transcription units that populate a sub genome of the developmental stage, wherein the library comprises a plurality of oligonucleotides, wherein each oligonucleotide in the plurality is capable of hybridizing selectively to a set of messenger RNAs transcribed from a given transcription unit of the sub genome, wherein at least one transcription unit of the sub genome encodes one or more messenger RNA splice variants.

9. An oligonucleotide library for detecting messenger RNAs that populate a transcriptome of patients suffering from a disorder, wherein the transcriptome comprises messenger RNAs transcribed from a multiplicity of transcription units that populate a genome of patients suffering from the disorder, wherein the library comprises a plurality of oligonucleotides, wherein each oligonucleotide in the plurality is capable of hybridizing selectively to a set of messenger RNAs transcribed from a given transcription unit of the genome, wherein at least one transcription unit of the genome encodes one or more messenger RNA splice variants.

10. The oligonucleotide library of claim 9, wherein said disorder is cancer.

11. A DNA microarray having spotted thereon a plurality of oligonucleotide sequences, wherein said plurality is provided by the oligonucleotide library of claim 1 or a subset thereof.

12. A DNA microarray having spotted thereon a plurality of oligonucleotide sequences, wherein said plurality is provided by the oligonucleotide library of claim 5 or a subset thereof.

13. A DNA microarray having spotted thereon a plurality of oligonucleotide sequences, wherein said plurality is provided by the oligonucleotide library of claim 6 or a subset thereof.

14. A DNA microarray having spotted thereon a plurality of oligonucleotide sequences, wherein said plurality is provided by the oligonucleotide library of claim 8 or a subset thereof.

15. A DNA microarray having spotted thereon a plurality of oligonucleotide sequences, wherein said plurality is provided by the oligonucleotide library of claim 9 or a subset thereof.

16. A method for expression profiling a cell or tissue sample that contains two or more RNAs of various abundances, comprising measuring hybridization signals of said sample to a plurality of oligonucleotide sequences, thereby determining the levels of said two or more RNAs in said sample and, where a RNA is transcribed from a transcription unit that has a set of splice variants, determining the total level of the set of splice variants, wherein said plurality is provided by the oligonucleotide library of claim 1 or a subset thereof.

17. The method of claim 16, wherein said hybridization signals are obtained from a nucleotide chip.

18. The method of claim 16, wherein said hybridization signals are obtained from an electrophoresis gel.

19. A method for expression profiling a cell or tissue sample that contains two or more RNAs of various abundances, comprising measuring hybridization signals of said sample to a plurality of oligonucleotide sequences, thereby determining the levels of said two or more RNAs in said sample and, where a RNA is transcribed from a transcription unit that has a set of splice variants, determining the total level of the set of splice variants, wherein said plurality is provided by the oligonucleotide library of claim 5 or a subset thereof.

20. The method of claim 19, wherein said hybridization signals are obtained from a nucleotide chip.

21. The method of claim 19, wherein said hybridization signals are obtained from an electrophoresis gel.

22. A method for expression profiling a cell or tissue sample that contains two or more RNAs of various abundances, comprising measuring hybridization signals of said sample to a plurality of oligonucleotide sequences, thereby determining the levels of said two or more RNAs in said sample and, where a RNA is transcribed from a transcription unit that has a set of splice variants, determining the total level of the set of splice variants, wherein said plurality is provided by the oligonucleotide library of claim 6 or a subset thereof.

23. The method of claim 22, wherein said hybridization signals are obtained from a nucleotide chip.

24. The method of claim 22, wherein said hybridization signals are obtained from an electrophoresis gel.

25. A method for expression profiling a cell or tissue sample that contains two or more RNAs of various abundances, comprising measuring hybridization signals of said sample to a plurality of oligonucleotide sequences, thereby determining the levels of said two or more RNAs in said sample and, where a RNA is transcribed from a transcription unit that has a set of splice variants, determining the total level of the set of splice variants, wherein said plurality is provided by the oligonucleotide library of claim 8 or a subset thereof

26. The method of claim 25, wherein said hybridization signals are obtained from a nucleotide chip.

27. The method of claim 25, wherein said hybridization signals are obtained from an electrophoresis gel.

28. A method for expression profiling a cell or tissue sample that contains two or more RNAs of various abundances, comprising measuring hybridization signals of said sample to a plurality of oligonucleotide sequences, thereby determining the levels of said two or more RNAs in said sample and, where a RNA is transcribed from a transcription unit that has a set of splice variants, determining the total level of the set of splice variants, wherein said plurality is provided by the oligonucleotide library of claim 9 or a subset thereof.

29. An oligonucleotide library for detecting messenger RNAs that populate a transcriptome, wherein the transcriptome comprises messenger RNAs transcribed from a multiplicity of transcription units that populate a genome, wherein the library comprises a plurality of oligonucleotides, wherein each oligonucleotide in the plurality is capable of hybridizing selectively to one or a subset of messenger RNAs transcribed from a given transcription unit of the genome, wherein at least one transcription unit of the genome encodes one or more messenger RNA splice variants.

30. The oligonucleotide library of claim 29, wherein said transcriptome is a human transcriptome.

31. The oligonucleotide library of claim 29, wherein said transcriptome is rat transcriptome.

32. The oligonucleotide library of claim 29, wherein said transcriptome is a mouse transcriptome.

33. An oligonucleotide library for detecting messenger RNAs that populate a sub transcriptome of a tissue origin, wherein the sub transcriptome comprises messenger RNAs transcribed from a multiplicity of transcription units that populate a sub genome of the tissue origin, wherein the library comprises a plurality of oligonucleotides, wherein each oligonucleotide in the plurality is capable of hybridizing selectively to one or a subset of messenger RNAs transcribed from a given transcription unit of the sub genome, wherein at least one transcription unit of the sub genome encodes one or more messenger RNA splice variants.

34. An oligonucleotide library for detecting messenger RNAs that populate a sub transcriptome of a pathological tissue origin, wherein the sub transcriptome comprises messenger RNAs transcribed from a multiplicity of transcription units that populate a sub genome of the pathological tissue origin, wherein the library comprises a plurality of oligonucleotides, wherein each oligonucleotide in the plurality is capable of hybridizing selectively to one or a subset of messenger RNAs transcribed from a given transcription unit of the sub genome, wherein at least one transcription unit of the sub genome encodes one or more messenger RNA splice variants.

35. The oligonucleotide library of claim 34, wherein said pathological tissue origin is cancer tissue.

36. An oligonucleotide library for detecting messenger RNAs that populate a sub transcriptome of a developmental stage, wherein the sub transcriptome comprises messenger RNAs transcribed from a multiplicity of transcription units that populate a sub genome of the developmental stage, wherein the library comprises a plurality of oligonucleotides, wherein each oligonucleotide in the plurality is capable of hybridizing selectively to one or a subset of messenger RNAs transcribed from a given transcription unit of the sub genome, wherein at least one transcription unit of the sub genome encodes one or more messenger RNA splice variants.

37. An oligonucleotide library for detecting messenger RNAs that populate a transcriptome of patients suffering from a disorder, wherein the transcriptome comprises messenger RNAs transcribed from a multiplicity of transcription units that populate a genome of patients suffering from the disorder, wherein the library comprises a plurality of oligonucleotides, wherein each oligonucleotide in the plurality is capable of hybridizing selectively to one or a subset of messenger RNAs transcribed from a given transcription unit of the genome, wherein at least one transcription unit of the genome encodes one or more messenger RNA splice variants.

38. The oligonucleotide library of claim 37, wherein said disorder is cancer.

39. A DNA microarray having spotted thereon a plurality of oligonucleotide sequences, wherein said plurality is provided by the oligonucleotide library of claim 29 or a subset thereof.

40. A DNA microarray having spotted thereon a plurality of oligonucleotide sequences, wherein said plurality is provided by the oligonucleotide library of claim 33 or a subset thereof.

41. A DNA microarray having spotted thereon a plurality of oligonucleotide sequences, wherein said plurality is provided by the oligonucleotide library of claim 34 or a subset thereof.

42. A DNA microarray having spotted thereon a plurality of oligonucleotide sequences, wherein said plurality is provided by the oligonucleotide library of claim 36 or a subset thereof.

43. A DNA microarray having spotted thereon a plurality of oligonucleotide sequences, wherein said plurality is provided by the oligonucleotide library of claim 37 or a subset thereof.

44. A method for expression profiling a cell or tissue sample that contains two or more RNAs of various abundances, comprising measuring hybridization signals of said sample to a plurality of oligonucleotide sequences, thereby determining the levels of said two or more RNAs in said sample and, where a RNA is transcribed from a transcription unit that has a set of splice variants, determining the total level of the set of splice variants, wherein said plurality is provided by the oligonucleotide library of claim 29 or a subset thereof.

45. The method of claim 44, wherein said hybridization signals are obtained from a nucleotide chip.

46. The method of claim 44, wherein said hybridization signals are obtained from an electrophoresis gel.

47. A method for expression profiling a cell or tissue sample that contains two or more RNAs of various abundances, comprising measuring hybridization signals of said sample to a plurality of oligonucleotide sequences, thereby determining the levels of said two or more RNAs in said sample and, where a RNA is transcribed from a transcription unit that has a set of splice variants, determining the total level of the set of splice variants, wherein said plurality is provided by the oligonucleotide library of claim 33 or a subset thereof.

48. The method of claim 47, wherein said hybridization signals are obtained from a nucleotide chip.

49. The method of claim 47, wherein said hybridization signals are obtained from an electrophoresis gel.

50. A method for expression profiling a cell or tissue sample that contains two or more RNAs of various abundances, comprising measuring hybridization signals of said sample to a plurality of oligonucleotide sequences, thereby determining the levels of said two or more RNAs in said sample and, where a RNA is transcribed from a transcription unit that has a set of splice variants, determining the total level of the set of splice variants, wherein said plurality is provided by the oligonucleotide library of claim 34 or a subset thereof.

51. The method of claim 50, wherein said hybridization signals are obtained from a nucleotide chip.

52. The method of claim 50, wherein said hybridization signals are obtained from an electrophoresis gel.

53. A method for expression profiling a cell or tissue sample that contains two or more RNAs of various abundances, comprising measuring hybridization signals of said sample to a plurality of oligonucleotide sequences, thereby determining the levels of said two or more RNAs in said sample and, where a RNA is transcribed from a transcription unit that has a set of splice variants, determining the total level of the set of splice variants, wherein said plurality is provided by the oligonucleotide library of claim 36 or a subset thereof.

54. The method of claim 53, wherein said hybridization signals are obtained from a nucleotide chip.

55. The method of claim 53, wherein said hybridization signals are obtained from an electrophoresis gel.

56. A method for expression profiling a cell or tissue sample that contains two or more RNAs of various abundances, comprising measuring hybridization signals of said sample to a plurality of oligonucleotide sequences, thereby determining the levels of said two or more RNAs in said sample and, where a RNA is transcribed from a transcription unit that has a set of splice variants, determining the total level of the set of splice variants, wherein said plurality is provided by the oligonucleotide library of claim 37 or a subset thereof.

57. The method of claim 56, wherein said hybridization signals are obtained from a nucleotide chip.

58. The method of claim 56, wherein said hybridization signals are obtained from an electrophoresis gel.

59. A double stranded RNA molecule based on an oligonucleotide selected from an oligonucleotide library for detecting messenger RNAs that populate a transcriptome, wherein the transcriptome comprises messenger RNAs transcribed from a multiplicity of transcription units that populate a genome, wherein the library comprises a plurality of oligonucleotides, wherein each oligonucleotide in the plurality is capable of hybridizing selectively to a set of messenger RNAs transcribed from a given transcription unit of the genome, wherein at least one transcription unit of the genome encodes one or more messenger RNA splice variants, wherein
the double-stranded RNA molecule comprises no more than 30 basepairs, wherein the double-stranded RNA molecule can interfere with translation of an mRNA.

60. An antisense molecule based on an oligonucleotide selected from an oligonucleotide library for detecting messenger RNAs that populate a transcriptome, wherein the transcriptome comprises messenger RNAs transcribed from a multiplicity of transcription units that populate a genome, wherein the library comprises a plurality of oligonucleotides, wherein each oligonucleotide in the plurality is capable of hybridizing selectively to a set of messenger RNAs transcribed from a given transcription unit of the genome, wherein at least one transcription unit of the genome encodes one or more messenger RNA splice variants, wherein
the antisense molecule comprises no more than 30 bases, wherein the double-stranded RNA molecule can interfere with translation of an mRNA.

The application's sequence listing, which the Patent Office published only in electronic form, follows.

SEQUENCE LISTING (32337 sequences)

SEQ ID NO: 1 - DNA, 65 bp, Rattus norvegicus
tcctggtatgacaatgaatatggctacagcaacagggtggtggacctcatggcctacatggcctc

SEQ ID NO: 2 - DNA, 65 bp, Rattus norvegicus
ctcaagatgcaagtccgtgagctgagaaccatcatcgagaccatgaaggaccagcagaaacgtga

SEQ ID NO: 3 - DNA, 65 bp, Rattus norvegicus
actaatccggggagattccatggtggatgggaactacactctgtacgtgttagacaaccagaacc

SEQ ID NO: 4 - DNA, 65 bp, Rattus norvegicus
taccttgatgactgatcactttcctgctgctgtcttgtgggagctgctttgatggactctaggag

SEQ ID NO: 5 - DNA, 65 bp, Rattus norvegicus
ctctcgtcaagaatgctatcgagttgtctgtagaacagctggttaacgaaatggtttctgaggat

SEQ ID NO: 6 - DNA, 65 bp, Rattus norvegicus
tttcttgagaacctattgcttgtcacttgaatcctgtagctgtcaaacatctccggtataagcaa

SEQ ID NO: 7 - DNA, 65 bp, Rattus norvegicus
accgaagacaccttagagagataccgacttaagctaccctaagcggacagcacggtagtcttaag

SEQ ID NO: 8 - DNA, 65 bp, Rattus norvegicus
gccaagagtggaggagactagaaggcttccagtcaaccacagaggctcaagggacacctctctgt

SEQ ID NO: 9 - DNA, 65 bp, Rattus norvegicus
gtgcactggtattacatctggcatagccaaactgaattccaaggcagaagtacacaactattggt

SEQ ID NO: 10 - DNA, 65 bp, Rattus norvegicus
aggaaggagcctccctcagggtttcgggaactagacctctcaccggaaagaccgattaaccatgt

SEQ ID NO: 11 - DNA, 65 bp, Rattus norvegicus
tggaaatcaatgggatcagtcccaaacgtcgaggtgacctgggcaccatccatgacatgaaccga

SEQ ID NO: 12 - DNA, 65 bp, Rattus norvegicus
aagaccccgcatctcctgctaatgttgttgccctcctacagactggagtcccagcagtccagccg

SEQ ID NO: 13 - DNA, 65 bp, Rattus norvegicus
ggggaccacttgtggcttcccgtgtggctgtacatagttgtcatttcagacctttctccctgccg

SEQ ID NO: 14 - DNA, 65 bp, Rattus norvegicus
gcccattttcacagcttataacacttggtaatgatggatgctggggtctgtgcatgttgacattc

SEQ ID NO: 15 - DNA, 65 bp, Rattus norvegicus
cctcaagcggcatactagaaacagggcctaaagcatggcatggatgggtatttctcttacatttc

SEQ ID NO: 16 - DNA, 65 bp, Rattus norvegicus
gcagctggtaaaaccagaggctacatccagtattactgctaagagacattcttcatccaccaatg

SEQ ID NO: 17 - DNA, 65 bp, Rattus norvegicus
cctggcgactttcaggagaactgaattcacataaagtgtggggaactcgcctgcctctggtcatt

SEQ ID NO: 18 - DNA, 65 bp, Rattus norvegicus
gctgtagtcccttaaacatctgctgagtacctactggatactcggtcacttgtgtgctaggcaac

SEQ ID NO: 19 - DNA, 65 bp, Rattus norvegicus
ccgtttgaactccgtcagttatgaaaccatagtaagtggcttgtgtttgtgacatcctggccttg

SEQ ID NO: 20 - DNA, 65 bp, Rattus norvegicus
actagtccgtcacaatgtgacacggtgggaaactttcgatgtgagccctgcagtccttcgatgga

SEQ ID NO: 21 - DNA, 65 bp, Rattus norvegicus
cactcaatgacacggagacaaggaaactgatggaagagtgcaagcgacttcagggagaaatgatg

SEQ ID NO: 22 - DNA, 65 bp, Rattus norvegicus
cctaagcctagcacctcaacagccatacctacatcaactaactctgctaacagctcttcctctac

SEQ ID NO: 23 - DNA, 65 bp, Rattus norvegicus
gataccactgcaaagatggtttcattcagcgtcaccttccaactatccggtgcctaggaaatggg

SEQ ID NO: 24 - DNA, 65 bp, Rattus norvegicus
ccatggccttcacaactcacagctggaaggaacacacaacagtgactgactttcatctctgaaaa

SEQ ID NO: 25 - DNA, 65 bp, Rattus norvegicus
ctggacgcagatgtaaacacgtacgatgcacacgattcccatttctatccccattggttctgtgc

SEQ ID NO: 26 - DNA, 65 bp, Rattus norvegicus
gtattggtaactcctggttagagttgtcctgatagtgggcagaaaagggcaaatcccatgattct

SEQ ID NO: 27 - DNA, 65 bp, Rattus norvegicus
acagcctgtctcacggtcatggacagatagtgctgaccagggaggcaactccaaacggccatcga

SEQ ID NO: 28 - DNA, 65 bp, Rattus norvegicus
ttccggacccagctaaagggcaagttaggagcgagaagcagagggtagatgggcagagctaagaa

SEQ ID NO: 29 - DNA, 65 bp, Rattus norvegicus
gtaattcaagctcttcagagttcgagacccatgaaccagcccagtggtccacgctagtttctcga

SEQ ID NO: 30 - DNA, 65 bp, Rattus norvegicus
ccccgctcttacaaggctccctgtacttgcggtggtggagacaacgaccagtatgtgctcatgag

SEQ ID NO: 31 - DNA, 65 bp, Rattus norvegicus
gacatcaaagcaagtactgtagcactcggagagacagtgagaaagcttccttgtcacagagagcg

SEQ ID NO: 32 - DNA, 65 bp, Rattus norvegicus
atgagaagacctggtttgtggaggatgtgaaccgagtacaggcagaggacctgctttatgggaag

SEQ ID NO: 33 - DNA, 65 bp, Rattus norvegicus
ctgtggttcctggagtacctcactctgctcagtaacaggaccttgctaattgggttgtcacccaa

SEQ ID NO: 34 - DNA, 65 bp, Rattus norvegicus
taccgcggctcctactacgtgagcgagagtatcgccttcccctggatcgggaatgtgatctagat

SEQ ID NO: 35 - DNA, 65 bp, Rattus norvegicus
tacagagccttgtcaatgaactagtgaatcgcagtgtgcctcagctttcctgtgtcccttataag

SEQ ID NO: 36 - DNA, 65 bp, Rattus norvegicus
aagacgcgtacagaggtgttccagatctcgcggaacctcatcgatcgcaccaatgccaacttcct

SEQ ID NO: 37 - DNA, 65 bp, Rattus norvegicus
agatgtcctcataactgcaccgaaagtcagccatggtgatgcgtgcaagttgagaggcaggaatg

SEQ ID NO: 38 - DNA, 65 bp, Rattus norvegicus
atgaacttaggactcagcttgggatggaccctgggaaaggcgcttctccattggcatctttcatg

SEQ ID NO: 39 - DNA, 65 bp, Rattus norvegicus
attgagaaacttgccaagaacaaacagaagcctattactccagagactgctgaaaagctggcgcg

SEQ ID NO: 40 - DNA, 65 bp, Rattus norvegicus
tgacctgttacagctctgtaattgtgtgggcttccgcatttctatacccagcagcgtagatttca

SEQ ID NO: 41 - DNA, 65 bp, Rattus norvegicus
gggaaggattcctctgtgtcttctctatcacagagatggagtcctttgcagctacagcggacttc

SEQ ID NO: 42 - DNA, 65 bp, Rattus norvegicus
cagaggttatggaatccaaggtctgatccctggaaacttgtgtcacttccaaagaatcatgggct

SEQ ID NO: 43 - DNA, 65 bp, Rattus norvegicus
gaaccaagaggcactgaggatggccagtgtggcagaaaacagcagcagtgaccagaggcaggcct

SEQ ID NO: 44 - DNA, 65 bp, Rattus norvegicus
tgagaatgggcatgatcttgctgtaaccttcccaggaccaggagaagatgggctgaatccctttt

SEQ ID NO: 45 - DNA, 65 bp, Rattus norvegicus
gtccttctgggcagagccaaaatcagggattagaaaccgaaggttccagcacgggcaacaaaagt

SEQ ID NO: 46 - DNA, 65 bp, Rattus norvegicus
cccagtccttcccaccttgtactaaagtcaccagactacaaatgttgtgtgaaaacctgtcccca

SEQ ID NO: 47 - DNA, 65 bp, Rattus norvegicus
tcccaaccaagaagtcctcctgaggccagcaggacgtgtactttagtccaagtggcttgaattct

SEQ ID NO: 48 - DNA, 65 bp, Rattus norvegicus
tttgaagccaggagaacagaagccaagaagtggcagaatgcacccagagttactactggacccac

SEQ ID NO: 49 - DNA, 65 bp, Rattus norvegicus
taatagcatgtgatggctcaggctgaagaactgggtgctggttaagtccccgctgttatctggtg

SEQ ID NO: 50 - DNA, 65 bp, Rattus norvegicus
gtccctactgatgagtttctcacatctgcagagctccagatttttcgggaacaaatgcaggaagc

SEQ ID NO: 51 - DNA, 65 bp, Rattus norvegicus
gctggaaggatggtgctgtcagatggacaaggagaccaaagagaacaacctctctgaagaagtct

SEQ ID NO: 52 - DNA, 65 bp, Rattus norvegicus
gctgcagtgctgttccttgaatcctggcaatggagcatgtcagcgagcattctactattgacttg

SEQ ID NO: 53 - DNA, 65 bp, Rattus norvegicus
tacgaagcctccacaggtagcacacatcactgtgagccctggtatctctggggtttcatcaccag

SEQ ID NO: 54 - DNA, 65 bp, Rattus norvegicus
cccagaaccaaatgctttgcacgtctcccgtcaactgcttggactcagtttgttgcacttcgata

SEQ ID NO: 55 - DNA, 65 bp, Rattus norvegicus
gatcgcccttcaccacatctccacagatcacaagctaaggtgaatctggaatatatcgtctgcac

SEQ ID NO: 56 - DNA, 65 bp, Rattus norvegicus
cactgacttgggtttgggctacgaaaccaaggaggaactgatctttcgatattgtagcggttcct

SEQ ID NO: 57 - DNA, 65 bp, Rattus norvegicus
aaggtgtccaggcctcagtgtccaaggctgcttccagcaacttggggttcctgagcatctggctg

SEQ ID NO: 58 - DNA, 65 bp, Rattus norvegicus
ctctcggcctgggccacagctccgacgagctgatacgtttccgcttctgcagcggttcgtgccgc

SEQ ID NO: 59 - DNA, 65 bp, Rattus norvegicus
actgacacatagcttcgatttcaatggcgggtgctttagagagcagagcaggcaacatcacaacc

SEQ ID NO: 60 - DNA, 65 bp, Rattus norvegicus
gctgtttgtataccttcttagtgtgcataaatgaggtgtgtgctgctgcttggtctaggcaagcc

SEQ ID NO: 61 - DNA, 65 bp, Rattus norvegicus
ctgggaagagcctcgaatcacttgcacagaccccaacacctacaagcacaggctacagaagcgga

SEQ ID NO: 62 - DNA, 65 bp, Rattus norvegicus
tacagtgcctctctctcaaggccccaaaccagtcacaatcagttttgccaatcacacttcctgcc

SEQ ID NO: 63 - DNA, 65 bp, Rattus norvegicus
ctcccaggccatattggagcaaatcccgtatacagtgcggtgtccaacacagatctgatggattt

SEQ ID NO: 64 - DNA, 65 bp, Rattus norvegicus
acatgtgccacacaacgtctggcaaacttcttggttcgctccagcaacaaccttggtccagtcct

SEQ ID NO: 65 - DNA, 65 bp, Rattus norvegicus
ataacccacctatgactaactctaggagatccatgatctccacagacgccacacgcatccacatg

SEQ ID NO: 66 - DNA, 65 bp, Rattus norvegicus
acctgcagcacttctgatgtactgaggaagaatatccaccatcgtccccagtgactgagctctct

SEQ ID NO: 67 - DNA, 65 bp, Rattus norvegicus
tctctgcaggctaagcccagctctatcgactcagttcctaggagcttcggagcatttgcttttgt

SEQ ID NO: 68 - DNA, 65 bp, Rattus norvegicus
attcgtgagaaaaccagtgtcagcagccaggctaaggacaaggagcgctgtgtcatcagttagga

SEQ ID NO: 69 - DNA, 65 bp, Rattus norvegicus
atactgactttctctacaagcccgtgtgtactgaccaggcccacagtccagtgccgaggagacat

SEQ ID NO: 70 - DNA, 65 bp, Rattus norvegicus
aagagtcacagtttgagatggacatttaagggaccagccataggacgcagtgatgcttctgggcc

SEQ ID NO: 71 - DNA, 65 bp, Rattus norvegicus
acaaagagaaggtgcttgctaacagagggacaccgctgccatgtcccaacaagctgttcagttta

SEQ ID NO: 72 - DNA, 65 bp, Rattus norvegicus
gttggaagacgtatatgtcagacttatcctgatgagatttgtgcctgggttgtagtaaccactcg

SEQ ID NO: 73 - DNA, 65 bp, Rattus norvegicus
aatagcacaattgacagtgaggatggggagcagtttgacagcatgaccgatggagttgccgatcc

SEQ ID NO: 74 - DNA, 65 bp, Rattus norvegicus
tttcatggttacctgacgacgtcccttgctctaatgggaagtgaagtcctatcccacacctgcct

SEQ ID NO: 75 - DNA, 65 bp, Rattus norvegicus
aatactcactggtagacgatgacgaggatttgccccaccatgatgagaagacgtggaatgtgggg

SEQ ID NO: 76 - DNA, 65 bp, Rattus norvegicus
tctggggtatgagggtcctgcaaacccgaggcttcggctcggactcgtcggagagcatggattcg

SEQ ID NO: 77 - DNA, 65 bp, Rattus norvegicus
aaacaacggagtagagacctttccagcctaccaaatctggagccaggagagggctgctattttga

SEQ ID NO: 78 - DNA, 65 bp, Rattus norvegicus
tggtacaagtagaggttcaagagccctgttaagtccccagttactacactacaggtgcccttgcc

SEQ ID NO: 79 - DNA, 65 bp, Rattus norvegicus
ctccagggagacaatgctcacgagatggagaactcagaggacacctatgagagacggatcatggt

SEQ ID NO: 80 - DNA, 65 bp, Rattus norvegicus
ggcgagccatccccattaaacagagtttcctgctaaagcgaagtggcaattccttgaacaaagag

SEQ ID NO: 81 - DNA, 65 bp, Rattus norvegicus
tactcctacatcaaccactactcagacatcaagtccaacccctacaaccacagggactccaccct

SEQ ID NO: 82 - DNA, 65 bp, Rattus norvegicus
cgaaaactccatgtaagaaccagagtccggcgattgtccaagaattcctcacagcaatgaagagc

SEQ ID NO: 83 - DNA, 65 bp, Rattus norvegicus
atccccagaggaagcgcagaggtttcgcagataaatgctgtgctatagggtgctccaaagaggag

SEQ ID NO: 84 - DNA, 65 bp, Rattus norvegicus
gttcaagggtgtgagaacatgtgcccatctatgaacctcttctctcatggaacaagaatgcaaat

SEQ ID NO: 85 - DNA, 65 bp, Rattus norvegicus
tagcatcagttaaggagaagcataagacggataaagactcaacctcctccaaacttgagcggagg

SEQ ID NO: 86 - DNA, 65 bp, Rattus norvegicus
agcacgagctcaagttccgaggtcccttcactgatgttgtcactaccaacctaaagctgggcaac

SEQ ID NO: 87 - DNA, 65 bp, Rattus norvegicus
gcgtgtcgctgcagctttacctggaatggaaagcacacaggacagaagcagagaagacatgattg

SEQ ID NO: 88 - DNA, 65 bp, Rattus norvegicus
actgtcacccctgtcggcttcatgctgctcgtgatgcttgctgcccttggtttcttctacagcaa

SEQ ID NO: 89 - DNA, 65 bp, Rattus norvegicus
atggagcctgaaggggaaagttacgaggactcaccccaggaggaatatcaggaatacgagccaga

SEQ ID NO: 90 - DNA, 65 bp, Rattus norvegicus
agccagacagggttgccataccccaccaccgtccccagccccgctctgttctgagctgggactct

SEQ ID NO: 91 - DNA, 65 bp, Rattus norvegicus
tcaagtcaacgaccagaaaaatctcaccttctccctgcccaaaaggacctttctgtacatgacac

SEQ ID NO: 92 - DNA, 65 bp, Rattus norvegicus
ctttgccaaccttaagtcatgctgtgtgcccaccaagctgagacccatgtccatgctgtattatg

SEQ ID NO: 93 - DNA, 65 bp, Rattus norvegicus
aacaatgtccgccttccaagagccttacctggtttgtgccggctgtggagcctgaccctaccagt

SEQ ID NO: 94 - DNA, 65 bp, Rattus norvegicus
tgtacggctatatgcctctcctgtacacacagtttagggtggactctgtgctcttcaagacccgc

SEQ ID NO: 95 - DNA, 65 bp, Rattus norvegicus
cacaaagaactctattgctgaaggattcgaagattttgcttgagcgggtgagtaaagctgccctg

SEQ ID NO: 96 - DNA, 65 bp, Rattus norvegicus
ttatggtttgctctctaccaagctgtttaagcaggagaatcaggattgtaggtggtgtgagggcc

SEQ ID NO: 97 - DNA, 65 bp, Rattus norvegicus; identical to SEQ ID NO: 1

SEQ ID NO: 98 - DNA, 65 bp, Rattus norvegicus
agtttggcttgtccgaattcattggaccatcgtgggaatttgccttggggccagatttcgcccga

SEQ ID NO: 99 - DNA, 65 bp, Rattus norvegicus
tcactgtttcatggggcttttctgcttctttgtgaatgccaaccagcttgcccaggagattgggg

SEQ ID NO: 100 - DNA, 65 bp, Rattus norvegicus
tttatggcaggggttaggctgggttgtatggaactggagaagagctggacctcaagtcccaaatg

SEQ ID NO: 101 - DNA, 65 bp, Rattus norvegicus
tggttcacgtctcggagaagagcctgtcagagattgagaatgtccacgggtttgtctctcactct

SEQ ID NO: 102 - DNA, 65 bp, Rattus norvegicus
aaatgagccagaaacaaagtgtggtctggggacctctgtgcttcggggccttttcaaggggtttt

SEQ ID NO: 103 - DNA, 65 bp, Rattus norvegicus
ctctctcactcaccatctcgacatcctcccctagtcttccttcccacatagccaacacatgattt

SEQ ID NO: 104 - DNA, 65 bp, Rattus norvegicus
tgtctatttcaactatgggccttttgataggatgctcaccgagcaaaaccaagaacaaccaggag

SEQ ID NO: 105 - DNA, 65 bp, Rattus norvegicus
gattacagacccgtattgccatgcctgccgtcatgctatcatgagcggaaaagaatcactggcat

SEQ ID NO: 106 - DNA, 65 bp, Rattus norvegicus
tgattcctcagatcatgcccagcatatctagcagagatgttcagcctgttgcctatgaagagccc

SEQ ID NO: 107 - DNA, 65 bp, Rattus norvegicus
caggcagcgagatgctctgggctcctgggtaaaggggcttcctgggcattaactgaccaataaaa

SEQ ID NO: 108 - DNA, 65 bp, Rattus norvegicus
tgctatgctgccccattgcctgctctgtctcttccagctgtaccgcctcagaaacacctcaggaa

SEQ ID NO: 109 - DNA, 65 bp, Rattus norvegicus
ggaaatctgagatagctgttgaccaagaaggcaaggatcaggccagaggaggtcacatgcagcta

SEQ ID NO: 110 - DNA, 65 bp, Rattus norvegicus
ctttgaaactaggatgaatgtttgttctgtggtgcttagagcatttcatgtaaccaaaggtgggg

SEQ ID NO: 111 - DNA, 65 bp, Rattus norvegicus
aaagagacagtagtgagtcatcatccagtgggagttctagcgagagcagtggtgactagaccccg

SEQ ID NO: 112 - DNA, 65 bp, Rattus norvegicus
aagatcatctctgccagttctcaaactctcaaaggacacattctctgcaggaccactatgaaaga

SEQ ID NO: 113 - DNA, 65 bp, Rattus norvegicus
cctagagaagctggtgaggaaggttctaaagaacatgaacgaccctgcttgggatgagaccaatc

SEQ ID NO: 114 - DNA, 65 bp, Rattus norvegicus
catttctgacatccaagaagcactcttaccaggtcagtactaggtctcaatacaaaagatatgct

SEQ ID NO: 115 - DNA, 65 bp, Rattus norvegicus
gctgagagaagtcctattgcaggtgtgacagtgtttgggactaccacgggtttccttcagacttc

SEQ ID NO: 116 - DNA, 65 bp, Rattus norvegicus
aatacaaaggcggcaacaagaagggcttgtccaaaggctgctttggcctcaagctggaccggatc

SEQ ID NO: 117 - DNA, 65 bp, Rattus norvegicus
gctgccaagaaaatctatcagaacattcaggatggaagcctggatctgaatgctgccgagtctgg

SEQ ID NO: 118 - DNA, 65 bp, Rattus norvegicus
gtggaagtgcttttatccacattcaacgcaccagacaagccatgagcaagcttcctccctgaccc

SEQ ID NO: 119 - DNA, 65 bp, Rattus norvegicus
aactgggcttccccaaactcagtcctggcaccacctcaactgtgacaatcagcaaagcctcgcct

SEQ ID NO: 120 - DNA, 65 bp, Rattus norvegicus
gacatagtgctttgtcttcagcagaagcgagacgtgttttcagatgttacttcagtaagcttcca

SEQ ID NO: 121 - DNA, 65 bp, Rattus norvegicus
acaaggagttcaagttcaacttatcccagattcccgagggtgaggcagtgacggctgcagagttc

SEQ ID NO: 122 - DNA, 65 bp, Rattus norvegicus
cccggaatgctgggatcgaggcccaggtgtggaaaccttccttctgcttcaagtaacacatccca

SEQ ID NO: 123 - DNA, 65 bp, Rattus norvegicus
ttcaaagaccctctggatgcctttgcccgaggggaagtcttcattggcagcaaggaaagtggtta

SEQ ID NO: 124 - DNA, 65 bp, Rattus norvegicus
ctctatctggtgtctttgccctctggtgtgatggagaagggtagaggagtctttgtactgtgaat

SEQ ID NO: 125 - DNA, 65 bp, Rattus norvegicus
catgctagctgccaccattgttcacttcaaggtctctgcccaaggaatcacactgactgacaatc

SEQ ID NO: 126 - DNA, 65 bp, Rattus norvegicus
ttcccagcagcaccaacccatctcaaatgacctcacaggtgtccaacccaacagcctcttcatat

SEQ ID NO: 127 - DNA, 65 bp, Rattus norvegicus
tcgagggtagcaagccacgtctatcaagcccatgaaggcttacccactgattcctaacaacctca

SEQ ID NO: 128 - DNA, 65 bp, Rattus norvegicus
caagaggaaagtggtgtcatggatagatgtttatgcacgtgccacatgccagccaagggaggtgg

SEQ ID NO: 129 - DNA, 65 bp, Rattus norvegicus
tatgtgtgacattactagcactaatcctcagagggcttgaaggtgggcagctgactcaggcagga

SEQ ID NO: 130 - DNA, 65 bp, Rattus norvegicus
actgtctcccattcagtacagttatccagccacccaaacgttccattcaaggtctgtgcatttta

SEQ ID NO: 131 - DNA, 65 bp, Rattus norvegicus
tgtccctatccgatgccctgaagggtgttacggataacgtggtagacactgtggtacactatgtc

SEQ ID NO: 132 - DNA, 65 bp, Rattus norvegicus
gtgtgaactccatgatttcagactgagttttagtcagctcaaatgggacaactggatcgtggccc

SEQ ID NO: 133 - DNA, 65 bp, Rattus norvegicus
ctgcacccctaccaagatgtccccaatcaacatgctctacttcaatgacaagcagcagattatct

SEQ ID NO: 134 - DNA, 65 bp, Rattus norvegicus
tctctaaacatgtccactggctccctcagcgatgtagaagaccttcaagaggtggagatgctgga

SEQ ID NO: 135 - DNA, 65 bp, Rattus norvegicus
ttgggaaaaccgataaagaacacgaattgctcaatgcatgagtctgcaaccttcaacaggggagc

SEQ ID NO: 136 - DNA, 65 bp, Rattus norvegicus
gcctgctgcagagcctgagtgtattccacctgaggaagcaagctgcctgtcatccttgaagataa

SEQ ID NO: 137 - DNA, 65 bp, Rattus norvegicus
agaagagaagtctggaagaactgttctgacaggcacatcagtgcaggcccagccagtgctgccca

SEQ ID NO: 138 - DNA, 65 bp, Rattus norvegicus
gctcaaagcttccaacatcgaaaccaagcaggaatggatcaagaacattcgggaagtgattcagg

SEQ ID NO: 139 - DNA, 65 bp, Rattus norvegicus
ctgcattgcactctttgtttccttcatcatcaatgtctttgtcgtctccgtctttgctgaagcat

SEQ ID NO: 140 - DNA, 65 bp, Rattus norvegicus
agtggagggagctgggaacattgctgctgccactggttttgtcaagaaggaccagatgggcaagg

SEQ ID NO: 141 - DNA, 65 bp, Rattus norvegicus
tggtagtcatacccagcctcatcactcagcagtgccttcctccatgagaccaagtggcatcgttg

SEQ ID NO: 142 - DNA, 65 bp, Rattus norvegicus
gcctctctttgctaacgtatgcccttcctgtccttgcaggtacattgtagctcactcgtgatgaa

SEQ ID NO: 143 - DNA, 65 bp, Rattus norvegicus
agcgactgtacacacgaggctgtcaaaaccaactactgcaccaagccacagacattctatctggg

SEQ ID NO: 144 - DNA, 65 bp, Rattus norvegicus
aataatttccggaccaactcagagtcttgccgtacacctccacccagtttactaaaccccgtttt

SEQ ID NO: 145 - DNA, 65 bp, Rattus norvegicus
ggggatggtcacgtgtgtttagggcagtgacaagtttgagagattggcagacaagtgccattttg

SEQ ID NO: 146 - DNA, 65 bp, Rattus norvegicus
gctcacagcatggttctgtgtatccctctgagctctgtgtgtccattgcttttgaaggaagcaga

SEQ ID NO: 147 - DNA, 65 bp, Rattus norvegicus
ttctctattgaacacaggggatatgggcctcaaagctgtacactctggtaagccagggtgtgcct

SEQ ID NO: 148 - DNA, 65 bp, Rattus norvegicus
caccttacacagaaggagaaccttgtgacagttgtcctggtaattgtgaagatgggctgtgcacc

SEQ ID NO: 149 - DNA, 65 bp, Rattus norvegicus
atgctgctttggagggaaggattactctgaaatgtacgtgacatgtgccagggatgggatgagcg

SEQ ID NO: 150 - DNA, 65 bp, Rattus norvegicus
cccttgccgtgctctctgcactgtagacagtggacgctccaattcctagtttgctgagctcgagc

SEQ ID NO: 151 - DNA, 65 bp, Rattus norvegicus
agcacacaacttctcctgtctcagaaggtccagcagttcttcaggctgtgtcagcaaagcttgga

SEQ ID NO: 152 - DNA, 65 bp, Rattus norvegicus
tagtcattccagaaggccaaaggacaacgtggtgcacaccttcacaccaaggacaacttcaggag

SEQ ID NO: 153 - DNA, 65 bp, Rattus norvegicus
cagaagacagtgcttttgcagtttatcccatcttgggcactcagaaaggttgccggcttgatgtc

SEQ ID NO: 154 - DNA, 65 bp, Rattus norvegicus
atattcagtccgtcatgtgtccttctgagtcgctgtagtggctgctgtggtgacgagggtctgca

SEQ ID NO: 155 - DNA, 65 bp, Rattus norvegicus
atgcagagcagaaacccaaggtggaaggtctgtggaactatggagccctgttcctaaccctgcta

SEQ ID NO: 156 - DNA, 65 bp, Rattus norvegicus
ttcagtccacagcgatcagatcctttctcaaccacctaagagctgaggtgacaggcacaccatca

SEQ ID NO: 157 - DNA, 65 bp, Rattus norvegicus
ggccctgccgtctcagtagctctgactgtgggggtcccaggactcaaccaatgacctgtgacctt

SEQ ID NO: 158 - DNA, 65 bp, Rattus norvegicus
atccgcttgcctggaggaactaagctacagtctctcgcggctgctggcctggatatggaccctga

SEQ ID NO: 159 - DNA, 65 bp, Rattus norvegicus
tgacctctgtgaccaaccgttggatggagaagctgacaggccttggtaacaagctgttgatatca

SEQ ID NO: 160 - DNA, 65 bp, Rattus norvegicus
ttttggtgctccatctcctactacgagctgaaccagcgagttggggagacattccacgcttcaca

SEQ ID NO: 161 - DNA, 65 bp, Rattus norvegicus
tactgatggacagcaagatgctgagtcctctgatggaactagtgatgccgttgatggtgatgcgc

SEQ ID NO: 162 - DNA, 65 bp, Rattus norvegicus
cctaacatgacagtagactcttgtgcttgtagataacctagcagagaacacactcaaacgctcca

SEQ ID NO: 163 - DNA, 65 bp, Rattus norvegicus
tgtctctcctgccctttctcagatccactctgaagtttcctctcctgtcctgctcacgtgtgtga

SEQ ID NO: 164 - DNA, 65 bp, Rattus norvegicus
cacctcaaccacctcaccaaccacatcaccaatcacttcaccaaccacctcaaccacctcaccaa

SEQ ID NO: 165 - DNA, 65 bp, Rattus norvegicus
ttttctctggattgatgcttggtgacttggctcatgaagcacccgctgcttggagtgggtgacct

SEQ ID NO: 166 - DNA, 65 bp, Rattus norvegicus
ccaaagtaactgtagtttatgcagagaatggcacggtgttgcaaggtacgacagtcgctgctgtg

SEQ ID NO: 167 - DNA, 65 bp, Rattus norvegicus
caggattggcgcttttgggtacatggagtgttcagcaaagaccaaagacggagtgagagaggttt

SEQ ID NO: 168 - DNA, 65 bp, Rattus norvegicus
atgggagggtgggaaggaattggttctgttagtttcgtgttcatcctggtggggccacttaagat

SEQ ID NO: 169 - DNA, 65 bp, Rattus norvegicus
acctaactggcatagagatctggtacgcgtgtgtgaaaacatccccattgtattgtgtggcaaca

SEQ ID NO: 170 - DNA, 65 bp, Rattus norvegicus
gctgtgccctgaatgctggtttaactggaaactgtatggaaagatctgctccctgtatgtgcctt

SEQ ID NO: 171 - DNA, 65 bp, Rattus norvegicus
aaaagtgggtgcctgtggcagctccttgaggaagtctgcatggtcaaagttctgtgtcttactac

SEQ ID NO: 172 - DNA, 65 bp, Rattus norvegicus
acagcgaggggacttccctggaacatatgtggagttcctaggacctgtggctctggctcgaccag

SEQ ID NO: 173 - DNA, 65 bp, Rattus norvegicus
gacctttctgtttgccaattgcctggagctttgctctcagctgttgagtggtccgaattaggaac

SEQ ID NO: 174 - DNA, 65 bp, Rattus norvegicus
aaacgtctctctcaggaaaagcagtgaaggcaacagcatcctgggaggaagtgatgagccatcca

SEQ ID NO: 175 - DNA, 65 bp, Rattus norvegicus
ggagagcattccatcattggccgtactatggtggtccacgagaaacaagatgacttgggcaaagg

SEQ ID NO: 176 - DNA, 65 bp, Rattus norvegicus
ctgtccacgatgttttcaagcaagccctccatactgttactgacaaatgaggacaacgcgctcag

SEQ ID NO: 177 - DNA, 65 bp, Rattus norvegicus
acttggacattgctgtcgagtttgcacaccatggagtcttctaccatcaaggccaatgctgcgtc

SEQ ID NO: 178 - DNA, 65 bp, Rattus norvegicus
aagagaaaaccccttcaccaaagcgtcttgggccaagaaagtcaggatttgataaacagggcagg

SEQ ID NO: 179 - DNA, 65 bp, Rattus norvegicus
aacatcttcctgcagagggagcctcaagcccttgcttgtataggcctaaagggcagataggcatt

SEQ ID NO: 180 - DNA, 65 bp, Rattus norvegicus
caggcaatgaatggtggggcagcagagcatagagtgtatgaacgagctgagtttacttttggcat

SEQ ID NO: 181 - DNA, 65 bp, Rattus norvegicus
ggcaaaccgtattcatgaactgcatgttggaaaatgctactattgcccaaaatgatgctaatcac

SEQ ID NO: 182 - DNA, 65 bp, Rattus norvegicus
agaaggctcaccaggcttggctttggtcttctcattgcctgaaagcaagttttcccctgagacag

SEQ ID NO: 183 - DNA, 65 bp, Rattus norvegicus
ggcgagaagggtccaagtatggcattgacgaatatctagaggtcaaatatgtgtgttatggaggc

SEQ ID NO: 184 - DNA, 65 bp, Rattus norvegicus
gaaagcttactagataaaaggtcaagcagtgacagaaaggaacacactgtgaacagaaggatttt

SEQ ID NO: 185 - DNA, 65 bp, Rattus norvegicus
ttgttggctacggagttactttgtcaatggcttacaggctgctcaggagcagactgtacttgtaa

SEQ ID NO: 186 - DNA, 65 bp, Rattus norvegicus
gagccagaggttagtgaattaaaaagcgtgcagtcctctaaccatggcatctaccttcctccgga

SEQ ID NO: 187 - DNA, 65 bp, Rattus norvegicus
ttctgttttcatctgtttcccatatggtgcctgcaccccaaggagagcagctcctccgagagtat

SEQ ID NO: 188 - DNA, 65 bp, Rattus norvegicus
tcatgccagtgccttccctctaaaagaagacagcgttgggacctcattgaacatggctccaatga

SEQ ID NO: 189 - DNA, 65 bp, Rattus norvegicus
ttcatagagttctgcaagctttctgactttgcagctgccctggatcctcccctcctcatcgcaaa

SEQ ID NO: 190 - DNA, 65 bp, Rattus norvegicus
gtgtagagcattgcagcactgtggctgagctgttgtaatcttcattgatgcctatccacatatgt

SEQ ID NO: 191 - DNA, 65 bp, Rattus norvegicus
agaagtgatctgttatctcacctggcacatgaagcccattcctggaactatgcaaagggcagagg

SEQ ID NO: 192 - DNA, 65 bp, Rattus norvegicus
aacatagctggcttttcttccaagcactggtacacaggaaaggagacatgatgtcttgcttcctg

SEQ ID NO: 193 - DNA, 65 bp, Rattus norvegicus; identical to SEQ ID NO: 1

SEQ ID NO: 194 - DNA, 65 bp, Rattus norvegicus
ctggggcgattcgaaagcaagaacaaaccactgtctctgcttctgcttctgaaacgagaatctgg

SEQ ID NO: 195 - DNA, 65 bp, Rattus norvegicus
ggagtcactaggacaaatgccccagttcactatccatagtgtcaacgttccgggtagcaaatgct

SEQ ID NO: 196 - DNA, 65 bp, Rattus norvegicus
ccttctgtttgtgaccagagacgtgattcaccaacttctcggagccagagacacatagcaaagac

SEQ ID NO: 197 - DNA, 65 bp, Rattus norvegicus
ctttaagaaggaaggctgtgatctgtggtcgtgatgggcatgactactccctttattgctggaac

SEQ ID NO: 198 - DNA, 65 bp, Rattus norvegicus
agtacacagcagtcatcacctacccgtgtctccatgttgtgttctggtgtgcctgagcgttaaag

SEQ ID NO: 199 - DNA, 65 bp, Rattus norvegicus
tgaagttctatggagcctctgtggcctatgaaaacgcccttcgagtgttcaacattgtcttcacc

SEQ ID NO: 200 - DNA, 65 bp, Rattus norvegicus
atgttttgctggctgtcttgtccttgaggagttgctcatggagcctcatcctggcttattcccac

SEQ ID NO: 201 - DNA, 65 bp, Rattus norvegicus
gcagcctacagaaagtacacagaacagatcaccagtgagaagctggagttggtcaaattggaacc

SEQ ID NO: 202 - DNA, 65 bp, Rattus norvegicus
gcagaatcttccgctggcttggacctaagggttcagactgtggcattgtgaacgtcaatattcct

SEQ ID NO: 203 - DNA, 65 bp, Rattus norvegicus
cgggtgttcctaccagcatcacagaattgggtgtatgactcaaacctaaaagcatgactctgact

SEQ ID NO: 204 - DNA, 65 bp, Rattus norvegicus
gcagccctgaatgagtacctgcggatcaagactgtgacttttgagtactgaagccaagtctgtga

SEQ ID NO: 205 - DNA, 65 bp, Rattus norvegicus
gccaaacattgtgtccttcctacacagaagatgtgatataatgtgcccatctactgcttttatga

SEQ ID NO: 206 - DNA, 65 bp, Rattus norvegicus
cagcctggtacaggagccgacttccttgactgttgcctggttatctttcgttccatcatggctcc

SEQ ID NO: 207 - DNA, 65 bp, Rattus norvegicus
cagtcataatcgctggcttcatggttccagcaggatgggtcttatcccacttggagagctataag

SEQ ID NO: 208 - DNA, 65 bp, Rattus norvegicus
tgacgccatggacattctgaacatggtcttcacgggggtcttcaccgttgagatggttttgaaag

SEQ ID NO: 209 - DNA, 65 bp, Rattus norvegicus
gattggattcctactttcctgtgtggcagtcactgtagtccttgctctaaagtgctttttatttg

SEQ ID NO: 210 - DNA, 65 bp, Rattus norvegicus
ttttcacgttccgaagacgggaccaaggctctgaggcggacttcgcagatgacgagaacagcact

SEQ ID NO: 211 - DNA, 65 bp, Rattus norvegicus
aatggcttcctcccctggattctcagaccagtgtggccttcccagtgttagtcattcctcactgt

SEQ ID NO: 212 - DNA, 65 bp, Rattus norvegicus
cacttgcgtatgtacaaccatgtttgctgagtaacctgttccaccgttgaggctgtctgaagtgt

SEQ ID NO: 213 - DNA, 65 bp, Rattus norvegicus
gaatccgatcattcacaagttcctttacacagctgagtacagcgacagctcctacttcagcagcg

SEQ ID NO: 214 - DNA, 65 bp, Rattus norvegicus
cagacaacaggatagggaggaagttttccatcatgaatcagtcgctgctcagcattccaggctcg

SEQ ID NO: 215 - DNA, 65 bp, Rattus norvegicus
tatctccagcaggaccctgtttctggcctgagtggtcggagtggatacccttcaatgagtccact

SEQ ID NO: 216 - DNA, 65 bp, Rattus norvegicus
ggtgtttcgttgtccctcgtgactatgcaggttctacaagagctccaggtcagaaagaactgaga

SEQ ID NO: 217 - DNA, 65 bp, Rattus norvegicus
ggctgacaccaacaagaatcgcattgacattgccaatacaagagcaaagaaactcattgacagct

SEQ ID NO: 218 - DNA, 65 bp, Rattus norvegicus
ccgctcctttgtggggaagcagttctcagcaaacgataaagtctacacggtggagaaagctgata

SEQ ID NO: 219 - DNA, 65 bp, Rattus norvegicus
cctctggactcttgaatccagctcttgggtctgttccttgggagtatacagagagtttggtctct

SEQ ID NO: 220 - DNA, 65 bp, Rattus norvegicus
atccatatgcaggggattggctgcgatgagatgcttcagggcttcgctgtagcagtgaaaatggg

SEQ ID NO: 221 - DNA, 65 bp, Rattus norvegicus
tgcacagagacaccaccttgttgaaagagctccatgtttacctggcagtgtagagcagtctgctc

SEQ ID NO: 222 - DNA, 65 bp, Rattus norvegicus
ggtaccatgagccaggacaccgaagtggacatgaaagatgtggagctgaacgagctggaaccgga

SEQ ID NO: 223 - DNA, 65 bp, Rattus norvegicus
cctgtttccagaaactctagttatcggtgagaagtttcctatggcagccatttccccacctagga

SEQ ID NO: 224 - DNA, 65 bp, Rattus norvegicus
tcagagacttctgaagggggccagggtttggtcctatcaaccattcacctttagctcttacaatt

SEQ ID NO: 225 - DNA, 65 bp, Rattus norvegicus
ttctaaggctgtatgaggctcatggcagccatgtggactgctggctacacacatcattgcctgtt

SEQ ID NO: 226 - DNA, 65 bp, Rattus norvegicus
ccccatggaaggagtacacttcgtcgtttatgttctgtaatcgcacaatgtactgtaacccaaat

SEQ ID NO: 227 - DNA, 65 bp, Rattus norvegicus
acttgcagtgccttaggctcagtaatgtgtcctgctgagaagtgtcccaggtcatttctgtcagg

SEQ ID NO: 228 - DNA, 65 bp, Rattus norvegicus
gatgaaagaaggaacaaaattcacctgtcctgacaaagacccctcggactccatccccacaacag

SEQ ID NO: 229 - DNA, 65 bp, Rattus norvegicus
aagaaatgctagcttgtgctacaaatgcatcctggatgccactgctcagcagggtgaaaaggatt

SEQ ID NO: 230 - DNA, 65 bp, Rattus norvegicus
aggctgtgcggaagccgtctcccgagtcctcaacaagctgggaggagtggagttcaacattgact

SEQ ID NO: 231 - DNA, 65 bp, Rattus norvegicus
atgggtatccccacctttggaaagagcttcactctggcatcttctgagaatcaagtgggagctcc

SEQ ID NO: 232 - DNA, 65 bp, Rattus norvegicus
aaaagtgaactgatcgcaggagctcaaggatagagggcccagtgtgctgctgtctcttaaggatt

SEQ ID NO: 233 - DNA, 65 bp, Rattus norvegicus
tgcctagtgactgcccttcttctcagtcttctgctgcagtgacaaggacaagaatggactcactg

SEQ ID NO: 234 - DNA, 65 bp, Rattus norvegicus
cgtcctgcctcttagcttctgtacctgcttgtcacatttgcacctatgagtcaagacatgtttgt

SEQ ID NO: 235 - DNA, 65 bp, Rattus norvegicus
ggaacatggttgccttcaggaatgtagtcaacggtcagccttttgcaaactggtgggataatggc

SEQ ID NO: 236 - DNA, 65 bp, Rattus norvegicus
gtggttgatgtgccatttggaggtgctaaagcaggcgttaagatcaatcccaagaactatacaga

SEQ ID NO: 237 - DNA, 65 bp, Rattus norvegicus
gccggtcccagcagtggcttcttcgaaatgtcacccttccagaaatattctgagaccaaattaca

SEQ ID NO: 238 - DNA, 65 bp, Rattus norvegicus
atgtggaacgcgaactgtctggactactcagatgacgctctagccagagagcaaacggaggaaat

SEQ ID NO: 239 - DNA, 65 bp, Rattus norvegicus
atcatcggaaacctccgtcatatggccctagacatgggcaatgagattgacacccagaatcgcca

SEQ ID NO: 240 - DNA, 65 bp, Rattus norvegicus
ccctgcgtctggtatgcttgccatcacacatgcaagggcctcaggaatggcatcagttcttagat

SEQ ID NO: 241 - DNA, 65 bp, Rattus norvegicus
actgaccagaaaggagtctgggtccttccagcctattttccccagagtccagcagctcatgtgat

SEQ ID NO: 242 - DNA, 65 bp, Rattus norvegicus
aataacatccacagtgtgtgacgggaacggaagaagccaacagtccacctgcggacaagtacatt

SEQ ID NO: 243 - DNA, 65 bp, Rattus norvegicus
caaattatgtggtaattctgcaatgtagtaccatcagtctgtgacctcctcttgagcagggacag

SEQ ID NO: 244 - DNA, 65 bp, Rattus norvegicus
ggccaccctttctgcatctgcccttctcaccatctaaccctctattaggactattgacctcatat

SEQ ID NO: 245 - DNA, 65 bp, Rattus norvegicus
tgctttccaaatccgtccaactgaacggtcaaaccctgaagatggtcgatgagcagaccctgcca

SEQ ID NO: 246 - DNA, 65 bp, Rattus norvegicus
ttatagagactttccaggacctgccttcagtggctcatccgtgtatgtgtggtatccgctcttta

SEQ ID NO: 247 - DNA, 65 bp, Rattus norvegicus
ccacctgaggtcaccctgcaaagcaggttgaactggactgggctctccaaggaagctttaactga

SEQ ID NO: 248 - DNA, 65 bp, Rattus norvegicus
agatctgagcttccacaccagaccccatacctgcctttgagtctgtttgcaattcccggaatcag

SEQ ID NO: 249 - DNA, 65 bp, Rattus norvegicus
cgatctgaagatctccctatctaaggagtccagcaatggggtcaacgccaatgggaagtaaatgc

SEQ ID NO: 250 - DNA, 65 bp, Rattus norvegicus
cccctgtacacctagctcttccagtgccacgtctcgtccgtagctctggattcttagacttcagt

SEQ ID NO: 251 - DNA, 65 bp, Rattus norvegicus
ggtcatctgctgccctgtgcatgaggtcccttgaagccataatacatgatcacccctctactatt

SEQ ID NO: 252 - DNA, 65 bp, Rattus norvegicus
gcagcctgtatttctgcgagcagtgggtcctttcctactgtatgtgagccacagacatctaaaga

SEQ ID NO: 253 - DNA, 65 bp, Rattus norvegicus
tgttggggaacattgaccagccaaagtatagacagatcattgtagagttactaatggttgtatcc

SEQ ID NO: 254 - DNA, 65 bp, Rattus norvegicus
gctcatctaaccttaatgaagaggcctgagttgggcatcacgttgactaaactccactgctggtc

SEQ ID NO: 255 - DNA, 65 bp, Rattus norvegicus
atacatttcctcgtggtcctcacaggccgtgtggtacacaccgtggcctacctgggcaaaatgaa

SEQ ID NO: 256 - DNA, 65 bp, Rattus norvegicus
tcttgggcaaaacggcaaggggagagtcaggattcctctctccaaaggtcactccgaagttactt

SEQ ID NO: 257 - DNA, 65 bp, Rattus norvegicus
ctgtgtccagatcactgatagtaacttgtagccaccgacatgtgtcaccgtactgtgatggtact

SEQ ID NO: 258 - DNA, 65 bp, Rattus norvegicus
tacaaagtgggggacaagatagccacacggaaagcctatggattggcccttgccaagctgggcca

SEQ ID NO: 259 - DNA, 65 bp, Rattus norvegicus
aggttttgcgtcctaggcagcatagccggatcggtgctccgtgcatcggctacttggacgtgcgt

SEQ ID NO: 260 - DNA, 65 bp, Rattus norvegicus
tttggcagagagaacggccgagtgacgattgagtactattcacagctgaagacggtgtgtgtgga

SEQ ID NO: 261 - DNA, 65 bp, Rattus norvegicus
ttttcaggtgttttacactgtctcactaattgtcatggcttcatggctttctgtctggatcttac

SEQ ID NO: 262 - DNA, 65 bp, Rattus norvegicus
ccataacctcaccatcttcttcgatgtcaaaggccatgcagatatggcttctgctgctctaaaga

SEQ ID NO: 263 - DNA, 65 bp, Rattus norvegicus
agtggtaggtgtaagcatgggccttaccatccttcgaagctatgaggagcgcctgagggaccagt

SEQ ID NO: 264 - DNA, 65 bp, Rattus norvegicus
actacaaggtgtggagcccagttgttgactctggtcgagcagatcctggcagagttccagctgca

SEQ ID NO: 265 - DNA, 65 bp, Rattus norvegicus
ccagctgcttgaccctactgtgtgggttcagaactcgtttgggcataacaactaagtctctttcc

SEQ ID NO: 266 - DNA, 65 bp, Rattus norvegicus
ctatctcacagcagagcagtttgatgagtgggtgaaacccaaggacatgctgggtccaaagtgac

SEQ ID NO: 267 - DNA, 65 bp, Rattus norvegicus
tatggacgagaaacacaactactacgcctccatcagcaaggatcggcgctatgcaggcttgaagc

SEQ ID NO: 268 - DNA, 65 bp, Rattus norvegicus
actcacatctgttccgcatctgtaacccacagagattctgggcagctgccacctcagtctcttct

SEQ ID NO: 269 - DNA, 65 bp, Rattus norvegicus
gtcgcgcaccttcctcctgcaacagaatggaatacggcacgggtcttacacagcctctcggaaaa

SEQ ID NO: 270 - DNA, 65 bp, Rattus norvegicus
ctttagcctccaaagcaagagagggtaaacttcagcctcacgagttccagggtgggacatttaca

SEQ ID NO: 271 - DNA, 65 bp, Rattus norvegicus
tgtgccctcaccctcacaacctccttctagcaaaccagtgtctgcaataaaacccactgctgccc

SEQ ID NO: 272 - DNA, 65 bp, Rattus norvegicus
cttcattctgggttactgacttactgtgcaggggttgataggtaagacagcttgctatacttgtc

SEQ ID NO: 273 - DNA, 65 bp, Rattus norvegicus
gggtaaagacaagcatgccacgctcaacaggttaccttcagaacagcgcttagctggcaagcaca

SEQ ID NO: 274 - DNA, 65 bp, Rattus norvegicus
aacatgccagagactgttgccttcatatacctccacccgagtggcttacagttctgggatgaacc

SEQ ID NO: 275 - DNA, 65 bp, Rattus norvegicus
cgaatgccttgcaatgcccaaggttgcctcgcctagatgctataatgccactgtatcaggtacta

SEQ ID NO: 276 - DNA, 65 bp, Rattus norvegicus
tgtattgtcgcttataccgcacttttgagcgcttccgccgtgtcgagcttctggatgcagcaaaa

SEQ ID NO: 277 - DNA, 65 bp, Rattus norvegicus
attctctaaccctcaatttgctcaggcgtttacaggagcactctgcagcaggttctacagcatcg

SEQ ID NO: 278 - DNA, 65 bp, Rattus norvegicus
aatcagctgttgaagtgcgagtatgagcacgtcacccagtagtctccgaacacctccagttcccc

SEQ ID NO: 279 - DNA, 65 bp, Rattus norvegicus
agtccactggaagcattgccaagcgcctgcagtccattggcaccgagaacaccgaggagaacagg

SEQ ID NO: 280 - DNA, 65 bp, Rattus norvegicus
aagcggatggtggtccctgctgccctcaaggttgtgcggctgaagcctaccagaaagtttgctta

SEQ ID NO: 281 - DNA, 65 bp, Rattus norvegicus
agcctgccatcccgtctggatgtatcgatgccacagaattgtgaattgtgtgtccgtccgtggag

SEQ ID NO: 282 - DNA, 65 bp, Rattus norvegicus
ttcctacactgctatcaaggaggctgtgaaagcagcagccaagggacctatggctggcatccttg

SEQ ID NO: 283 - DNA, 65 bp, Rattus norvegicus
gtcttgggacaaagtggcatcacagaccttgtgaaagtcaacatgaacaccgaggaggaagctct

SEQ ID NO: 284 - DNA, 65 bp, Rattus norvegicus
ctccaatgtgactaagtgaacctttagtcttcggccttgtacgtaggtcacagtttgcttcttcc

SEQ ID NO: 285 - DNA, 65 bp, Rattus norvegicus
ccacctctggaagatttagccaattacctctaccaccaaaatccaccatttgaagtccgtggtgc

SEQ ID NO: 286 - DNA, 65 bp, Rattus norvegicus
cgcgcgattgatcacgtgtcagttttctactgtaccgggtactactgtcttgtgctttaccatgt

SEQ ID NO: 287 - DNA, 65 bp, Rattus norvegicus
caagatgacctaggatgggaggttttgttagcatgggaaaggtcacagaaaggttagcaatggtt

SEQ ID NO: 288 - DNA, 65 bp, Rattus norvegicus
cgcaccttgagcatagacaagggtttctgagcttaccgatcaccctcgttcctgctctcccggac

SEQ ID NO: 289 - DNA, 65 bp, Rattus norvegicus; identical to SEQ ID NO: 1

SEQ ID NO: 290 - DNA, 65 bp, Rattus norvegicus
ccgagacaatgataagacccgcttcatggggaagggtgtctcaaaggctgttgagcacatcaata

SEQ ID NO: 291 - DNA, 65 bp, Rattus norvegicus
ggtcgtatcggtcgactggtgttgggtcgattacttgaagtcaaaagcaacatagacgttgtcgc

SEQ ID NO: 292 - DNA, 65 bp, Rattus norvegicus
gcttagctctcttcgctgtatgtagcctctggttagctttgtcactgttcatgacagcatggaaa

SEQ ID NO: 293 - DNA, 65 bp, Rattus norvegicus
tttgtggctttacctcacatggctgaatgtgtcatccacgagctacagaccttggggacaggagt

SEQ ID NO: 294 - DNA, 65 bp, Rattus norvegicus
ggaagccaatcacctcagaagacatcaagaacctggtggtaaagcgtcttggatatgataccagg

SEQ ID NO: 295 - DNA, 65 bp, Rattus norvegicus
ctctctgctcctccctgttctagagacagccgcatcttcttgtgcagtgccagcctcgtctcata

SEQ ID NO: 296 - DNA, 65 bp, Rattus norvegicus
cctcaatacagcaagtttgagtattgctgctgatggcagtgtgcaaggaccacaaagatgtcccc

SEQ ID NO: 297 - DNA, 65 bp, Rattus norvegicus
cacgaggagagacagccgcatcttcttgtgcagtgccagcctcgtctcatagacaagatggtgaa

SEQ ID NO: 298 - DNA, 65 bp, Rattus norvegicus
catccaagtataagtaagggctggcctaaatgataccccaccgtgtgaggtgaccgcatcttctt

SEQ ID NO: 299 - DNA, 65 bp, Rattus norvegicus
cttgatgccaagtttgggaaaggaacaaagaagacctcccactaggaaaagagaggcttcctcca

SEQ ID NO: 300 - DNA, 65 bp, Rattus norvegicus
ccctgctaagtggtacttgtgtagtggtaacctggttagtgtgacaatcccactgtctccaagac

SEQ ID NO: 301 - DNA, 65 bp, Rattus norvegicus
accttctctcttgggatcgggatgtgaaccctggcccagactcacgctctgagtacatagtgaat

SEQ ID NO: 302 - DNA, 65 bp, Rattus norvegicus
tagaaaagagactagagctcagcaagtaaatgtgcctgcagtcaagcctggtaacctgaatttga

SEQ ID NO: 303 - DNA, 65 bp, Rattus norvegicus
cttatcatggctgtgtaaagtggattcctggatccagtgcatgagggtaacgctttagagggcac

SEQ ID NO: 304 - DNA, 65 bp, Rattus norvegicus
aagctttgcatctgatcccattctctaccgacctgttgcggtggctctggatacaaagggacctg

SEQ ID NO: 305 - DNA, 65 bp, Rattus norvegicus
ctcggagacaaagctgtctttgctggacgaaagttccgtaatccaaaggccaaatgagaagctgg

SEQ ID NO: 306 - DNA, 65 bp, Rattus norvegicus
tccatggcggttctgtggtggaaatgcaaggagatgaaatgacacggatcatctgggaattgatt

SEQ ID NO: 307 - DNA, 65 bp, Rattus norvegicus
ctctagcttcactcccaagccctactggatgtgtgatgcagagattcagagtcttccggtctgaa

SEQ ID NO: 308 - DNA, 65 bp, Rattus norvegicus
cctcaagccagagttcgtccagatcgtcactactctcggtgatgtcaagaaatgagcttgtaacg

SEQ ID NO: 309 - DNA, 65 bp, Rattus norvegicus
aatacatctgcaaggcatagaacctgccccagatcacagtccctctgaccagccaaaatgtcctc

SEQ ID NO: 310 - DNA, 65 bp, Rattus norvegicus
gacgtcagcagacatcccaaggctgaggaatcaaaatgtcgtctttgagcctagtaccaaacagt

SEQ ID NO: 311 - DNA, 65 bp, Rattus norvegicus
aacatccttcgtaccagcctagacctctatgccaacgtcatccactgtaagagtctgccaggagt

SEQ ID NO: 312 - DNA, 65 bp, Rattus norvegicus
tctaagatggtgaccagacctgcttcttgccctccctatcctcagcccactgagtgaaccaacat

SEQ ID NO: 313 - DNA, 65 bp, Rattus norvegicus
aaagtgtgctatgagggccagccagtgggtgagatcatccgctgtctgcagaaccacccggaaca

SEQ ID NO: 314 - DNA, 65 bp, Rattus norvegicus
ggctggcttaccctgggatcatgttattcaattccagtcacctcttctgcaatcatgacctctcg

SEQ ID NO: 315 - DNA, 65 bp, Rattus norvegicus
ggagtctacgtcaagattgtgtcacgctgacatagaaggcaggtgtgaaagaggaagcactttgt

SEQ ID NO: 316 - DNA, 65 bp, Rattus norvegicus
gtgtacagaacatgtttcatcagaatgacttcatctatagtctgtcctctaatggccgcaaggcc

SEQ ID NO: 317 - DNA, 65 bp, Rattus norvegicus
gggaaatacccatcttatacgcacagaccctgttctgcgatgcacccttttcctggctgtttgta

SEQ ID NO: 318 - DNA, 65 bp, Rattus norvegicus
tcaactgctctagaaaccaggccccaagcacaactgacaccagatatgcaagaccctcatcagac

SEQ ID NO: 319 - DNA, 65 bp, Rattus norvegicus
agtgaatgagaatctcaagattatgagctccccatggatgcaggtctgcaatagttttccttcac

SEQ ID NO: 320 - DNA, 65 bp, Rattus norvegicus
gcctctctgccaccattttatgagctgtgcttcattcctctctaaagagatcaaattggctgggg

SEQ ID NO: 321 - DNA, 65 bp, Rattus norvegicus
tggaagggtctccatggatccagttgtggtcttgttgctcagtctgttctttctgcttttcctgt

SEQ ID NO: 322 - DNA, 65 bp, Rattus norvegicus
tctactgggacttaaggcagaagcgagacttcagcaagtaccctggtgtcctttatagcctcctg

SEQ ID NO: 323 - DNA, 65 bp, Rattus norvegicus
cgctctacccatgctgcctgtaatgtacagtgggacttgaaccccttggaaaagcacaatttcgt

SEQ ID NO: 324 - DNA, 65 bp, Rattus norvegicus
gtgggaggctttggaggcaaaagcatggacactgacagtctcctggaagacattctcttgtaaac

SEQ ID NO: 325 - DNA, 65 bp, Rattus norvegicus
tttctgattctgggagacctgctggagaccaggcccaaggttgctgagtcattcctcacttcttc

SEQ ID NO: 326 - DNA, 65 bp, Rattus norvegicus
tgtgggctttgccacaatcccaccaaactacactatgagtttcttgtcccgttgagccagcattg

SEQ ID NO: 327 - DNA, 65 bp, Rattus norvegicus
ctaattccagtccagctctacagggcaagctgagccacgtttaataaaccagtcttgaggctgct

SEQ ID NO: 328 - DNA, 65 bp, Rattus norvegicus
gctggaaatgacatgcaggttaagtgcccaaggttacctgttgggtaccacatgcttccctaaac

SEQ ID NO: 329 - DNA, 65 bp, Rattus norvegicus
cacatatccccatttccttcggatccagtgaacatcaaacctcattgagttgagttccctgagtc

SEQ ID NO: 330 - DNA, 65 bp, Rattus norvegicus
ctctgtcctgacacccaaggtcacacttctctgccagcagaattttttgtgggaggaggtcacac

SEQ ID NO: 331 - DNA, 65 bp, Rattus norvegicus
tcatctaagagaagtcgctctcattgctgtgctgagaccacgggtcaggagaggtgtctgcaaaa

SEQ ID NO: 332 - DNA, 65 bp, Rattus norvegicus
ctcctactgcagttctctaatccccagtgtgtgttcatctcctgtgaatggaatggagaaatcaa

SEQ ID NO: 333 - DNA, 65 bp, Rattus norvegicus
caggaggtgcgggagctgctgagggaccgagagcctgaggagattgaatgggacgacctggccca

SEQ ID NO: 334 - DNA, 65 bp, Rattus norvegicus
ccccaaccaatgagaagctgagcctgaagttcagaaatggcctcacactttctccagtcacgcac

SEQ ID NO: 335 - DNA, 65 bp, Rattus norvegicus
tcacttaattgagcctaatgtcagtatctgtgtgtgtcaatgtcgttaccacattctgatgaagc

SEQ ID NO: 336 - DNA, 65 bp, Rattus norvegicus
aggtacaaggcaaaatcttggagatcctgaaagggtggcagagaagcttagcggaataaggctgc

SEQ ID NO: 337 - DNA, 65 bp, Rattus norvegicus
ctcgaagccactattacggagtttgcctaatcatgctctgaaaagtgtgaccagctccagcaggt

SEQ ID NO: 338 - DNA, 65 bp, Rattus norvegicus
ttgatctagccccatcaattcaggaactacccatccagtcagctatcacacagcctcaagatggg

SEQ ID NO: 339 - DNA, 65 bp, Rattus norvegicus
tccgtgtgcctgaagcagtggcagatgtccgacagtctgttgacatgagcaagaattcctaagct

SEQ ID NO: 340 - DNA, 65 bp, Rattus norvegicus
cttcttcggtccgatcatacctagtagtttgagccctctaccttgagaaatccagatggatgaag

SEQ ID NO: 341 - DNA, 65 bp, Rattus norvegicus
gaggagtgccttttatgggaacagcatcatctacaatatgtcctctgatggccgtttgtcccgcc

SEQ ID NO: 342 - DNA, 65 bp, Rattus norvegicus
cattaagtagaaagccacttgtgagctcaatggtacagcttcacgactgacatcttgcagagaaa

SEQ ID NO: 343 - DNA, 65 bp, Rattus norvegicus
ctgggccttgacaaagtgtaaactcccttcgatgggcttcccaaggacttaactgctattgctac

SEQ ID NO: 344 - DNA, 65 bp, Rattus norvegicus
gaagacaggccaggctgctggattctcttacacagatgccaacaagaacaaaggtatcacctggg

SEQ ID NO: 345 - DNA, 65 bp, Rattus norvegicus
caagacagggccaaatctctggggcctttttggccgaaagactggacaagcaccaggattttctt

SEQ ID NO: 346 - DNA, 65 bp, Rattus norvegicus
ccatggcttcttgaatgcccatttctcatacacagaatgatgggtttcacggtgatgtcttcctt

SEQ ID NO: 347 - DNA, 65 bp, Rattus norvegicus
ccgcagctgtgctgggaagtacatcgccatggtgatgatgaaagttgtcctggttacacttttga

SEQ ID NO: 348 - DNA, 65 bp, Rattus norvegicus
gtctacgcattgccagttactccacagccttaccaactctgtgcagtggctcgctagcaggggca

SEQ ID NO: 349 - DNA, 65 bp, Rattus norvegicus
gaccctaaggatatcgacctcagtcctgtcacagttggctttggcagtatcccaccccaatttaa

SEQ ID NO: 350 - DNA, 65 bp, Rattus norvegicus
gattgaatctggaccatgtggtagaagggatgaccactcaccaggctctacccaccactttatct

SEQ ID NO: 351 - DNA, 65 bp, Rattus norvegicus
cttttgttctgaagggttctcgtgagactgaagggtctgctggctcacattccccgtgcttggtt

SEQ ID NO: 352 - DNA, 65 bp, Rattus norvegicus
tcacatgtcacgatgccagattcaacaggggacctctctgcccttcccatagacaccagacgtct

SEQ ID NO: 353 - DNA, 65 bp, Rattus norvegicus
ccaagatggttgaccagatatctatcctccttcaatgcaggaccagaatctgtccatcagcctga

SEQ ID NO: 354 - DNA, 65 bp, Rattus norvegicus
ggttagcacctagaggccacaactaacatccccgatccatacctcaacacccacagtacaatctt

SEQ ID NO: 355 - DNA, 65 bp, Rattus norvegicus
tgctcctccttgctctcctcgtgggcttcttgttactcttagtcaggggacacccaaagtcccgt

SEQ ID NO: 356 - DNA, 65 bp, Rattus norvegicus
ccctcaaggagttctgctgaattcttcagaaatgtggtgtctaagaacaccagaccctttaattt

SEQ ID NO: 357 - DNA, 65 bp, Rattus norvegicus
ccaaccagaaggacccatcatcctaaagcttgtgtcaagagattaaacccagatttggacagtga

SEQ ID NO: 358 - DNA, 65 bp, Rattus norvegicus
ccagataaaactgggacttaattgactgctcttgatgcatggttaaagatttggtacatttatgg

SEQ ID NO: 359 - DNA, 65 bp, Rattus norvegicus
ggaactcagaactgtgattggatgaatcaggactcaggatttctgccctcgatgtgggcatgtgt

SEQ ID NO: 360 - DNA, 65 bp, Rattus norvegicus
tcctgagccagacctgcagtcaacagcaagagcaggaagcgcataggaactacacctgcaaccaa

SEQ ID NO: 361 - DNA, 65 bp, Rattus norvegicus
ttgagcaccctaagttgtcagcccaacagagtttggtagaccttggggtacctggcttgtttctc

SEQ ID NO: 362 - DNA, 65 bp, Rattus norvegicus
tggcctatcgctttgttttgatgcccaaccctagactcgtcctcactatccggcctgtgagctag

SEQ ID NO: 363 - DNA, 65 bp, Rattus norvegicus
gtccaccggcctacttctgtcctgacgcccaaggtcacgcttctctgccagcagaaatcttgggg

SEQ ID NO: 364 - DNA, 65 bp, Rattus norvegicus
aaccagtatacagatatgttggtgagaaacatgaggcagggatcggaggaaggcaagcccaccag

SEQ ID NO: 365 - DNA, 65 bp, Rattus norvegicus
cctgcactcaacacccaccgtgccacttttgtctgacttttgtgtcattggactgtcctgaattg

SEQ ID NO: 366 - DNA, 65 bp, Rattus norvegicus
catagtctttcacacagatgactgagaccctgcttctacttgtgagcaaacaggtcctcctgtcc

SEQ ID NO: 367 - DNA, 65 bp, Rattus norvegicus
ctacagagggatttcttttgctggtcaccatcttcatcagagtatccacctcctgtcagggcagg

SEQ ID NO: 368 - DNA, 65 bp, Rattus norvegicus
tctgttgccgaaaccacagatgcgtggtcttctggccaagcgtctgcgggttcatattgttggcg

SEQ ID NO: 369 - DNA, 65 bp, Rattus norvegicus
tcatcgacacttaccttctgcgcatggagaaagtgagtcctgcatggatgagagaggagaagtcg

SEQ ID NO: 370 - DNA, 65 bp, Rattus norvegicus
gaaagtccaaaaggagattgatcaggtgatcggctcacagcggctaccaacccttgatgaccgca

SEQ ID NO: 371 - DNA, 65 bp, Rattus norvegicus
gtgatcccagccatctcagccctggtggtagctctgatgtatcgcctctacatggcagaagatta

SEQ ID NO: 372 - DNA, 65 bp, Rattus norvegicus
ttagatttcctccagaaaggcctcatgatctcgctgtcgaccgatgacccgatgcagttccattt

SEQ ID NO: 373 - DNA, 65 bp, Rattus norvegicus
taacgttcaaacaagggctagattacacagcactgagccataggcttcacgctacaacagcaaaa

SEQ ID NO: 374 - DNA, 65 bp, Rattus norvegicus
cgcagctggatcaagaaggccagtttcttgtgagaataatctacgatcattccaaaacctatgac

SEQ ID NO: 375 - DNA, 65 bp, Rattus norvegicus
ctgggacggagactaacagaatctggccttatgtttacacgctcttctccaacaagatcacaccc

SEQ ID NO: 376 - DNA, 65 bp, Rattus norvegicus
gctgtcctagaatccaggatcccagtcacaatgcctctgttcaaacttacaggtcaaggaaaaca

SEQ ID NO: 377 - DNA, 65 bp, Rattus norvegicus
atgtggtccccatccctaccctgactgagacctgtgaaaatgcagaatgacaggaaaggtcacca

SEQ ID NO: 378 - DNA, 65 bp, Rattus norvegicus
agagtagctgttttggactgtgaggaaaccatagccagggatctgcatgctgctgtaccagacac

SEQ ID NO: 379 - DNA, 65 bp, Rattus norvegicus
tgaggaacctccatcagtcgggatttagtctgtcaggcacccaagtggatgagggtgtccgctca

SEQ ID NO: 380 - DNA, 65 bp, Rattus norvegicus
gatgtatgatcacactcacctgtgtcacctgtgtacacacctggggcaaatggaggaactgtatc

SEQ ID NO: 381 - DNA, 65 bp, Rattus norvegicus
ggagtgagcatgcacaaggcagtgatggagaaaggtcaccctcaagacttacagacgaaaagaag

SEQ ID NO: 382 - DNA, 65 bp, Rattus norvegicus
ttatgtgggtggaaagcaggtcgttccattctccagctccgtgtaaggcccttggacatccatga

SEQ ID NO: 383 - DNA, 65 bp, Rattus norvegicus
ttttctctcagaagcaatagcagcctgcctcaccctgcctttgttgctgtggaagattgaggata

SEQ ID NO: 384 - DNA, 65 bp, Rattus norvegicus
ccgtacagagtaaagacaacacagacggagacgctcagacaagtgagtcacacacgtgaagaatg

SEQ ID NO: 385 - DNA, 65 bp, Rattus norvegicus; identical to SEQ ID NO: 1

SEQ ID NO: 386 - DNA, 65 bp, Rattus norvegicus
ctgccagccttccagtgttcacacagcgtatggaaggaaccatgtcatgccttactaggcaaata

SEQ ID NO: 387 - DNA, 65 bp, Rattus norvegicus
acagagaagcacgaatgggtaacagcaaaggatggtattggaacagtgggaatcagcaactttgc

SEQ ID NO: 388 - DNA, 65 bp, Rattus norvegicus
accacactcagaccactccgcttgtggaatactacaggaaacggggcattcactgcgccattgat

SEQ ID NO: 389 - DNA, 65 bp, Rattus norvegicus
gtgtagctggctgttggacggatttccaaggacacttccacaggcagaagccctggatagagttt

SEQ ID NO: 390 - DNA, 65 bp, Rattus norvegicus
gactataagtcttgtgcccatgactgggtgtatgagtagacgcggagaaaccagagtccttttca

SEQ ID NO: 391 - DNA, 65 bp, Rattus norvegicus
ggactgcacaggccagtcgtgggcatcactagccagtgaagaacttctctaatcacttgaggaga

SEQ ID NO: 392 - DNA, 65 bp, Rattus norvegicus
ggctgagcttgaggcttgccagacacagggatggtcctgattaagtcaccaatatgtcacatgtg

SEQ ID NO: 393 - DNA, 65 bp, Rattus norvegicus
ggtgcgttcagctctgttcgtaaaggtgattaattgcccagaaattcccaagcagttgtgtgttg

SEQ ID NO: 394 - DNA, 65 bp, Rattus norvegicus
gaaaacgcagtgcctgcctgtgtaaccagcatccacctggcttccttaataaacttcgtgctatc

SEQ ID NO: 395 - DNA, 65 bp, Rattus norvegicus
aaatgtcatggtgctaaggttgtatcaatcctgagacgacacatggccctgtgctttggccaccg

SEQ ID NO: 396 - DNA, 65 bp, Rattus norvegicus
gaactggaagaagcctctgggcgctgtgactccctgtgcagtgttaagtgccactggtagattaa

SEQ ID NO: 397 - DNA, 65 bp, Rattus norvegicus
tgaaggctcagtggacactgtcttctcccaggtctgcacctatcttgactccctgaagtaactgg

SEQ ID NO: 398 - DNA, 65 bp, Rattus norvegicus
tagaggtgcagacaatctcgtggccatcaacctcatcgtgcagcatatacaggacatcctgaacg

SEQ ID NO: 399 - DNA, 65 bp, Rattus norvegicus
tactaccactgaaataaccacgacacctgagagaccacgccgagtcatcccaggccttcctgatg

SEQ ID NO: 400 - DNA, 65 bp, Rattus norvegicus
tgcccacattggtgtcatggtggagttcagcatcgccctgatgagtaagctggacggcatcaaca

SEQ ID NO: 401 - DNA, 65 bp, Rattus norvegicus
aggcagaagcaactactcaatgagaacagcaactctggcatcatcaagagccattacaaccggcg

SEQ ID NO: 402 - DNA, 65 bp, Rattus norvegicus
cagcacgttgccatccatcaccagaattagtcctcacagcctaggaccagttttgtaccaaactc

SEQ ID NO: 403 - DNA, 65 bp, Rattus norvegicus
gcaactctgtacctacttcctgaacacagacctgacacgaaccggatctccctcagcatcctaga

SEQ ID NO: 404 - DNA, 65 bp, Rattus norvegicus
ttctctcctcacacctccatgcacacagacaatgccctgtacgggaaacaggactgttgataagg

SEQ ID NO: 405 - DNA, 65 bp, Rattus norvegicus
ctgcaccacagtgccagcctgtcgtgtcctctgagttaccgttgcccctctcctcaccagttgat

SEQ ID NO: 406 - DNA, 65 bp, Rattus norvegicus
ttctaagaccatccatgtgtgttcctggctgtgtgatgccctgtccagagtcgtgtcccacagtt

SEQ ID NO: 407 - DNA, 65 bp, Rattus norvegicus
tcctacgaatgtctgcctgccaccatgagtggtatgaggagctgctgtcttccctagtgactctg

SEQ ID NO: 408 - DNA, 65 bp, Rattus norvegicus
attctgcctccaaggattctgagccaggagtctgctgcaaaccagctctgtgaccctggaaagtt

SEQ ID NO: 409 - DNA, 65 bp, Rattus norvegicus
agcttcgtggaagaacagagctcaagggtaaaggcacagaggagaccttctggcttgttggaaaa

SEQ ID NO: 410 - DNA, 65 bp, Rattus norvegicus
ccctcaacttagctccactgtgacttatagggagggaattgccacctgaaggaaacagaaagagg

SEQ ID NO: 411 - DNA, 65 bp, Rattus norvegicus
gctgttggtacttggatgggcaatggtcactgtgtctccacttgacagaaacagacgtcatatga

SEQ ID NO: 412 - DNA, 65 bp, Rattus norvegicus
ggcgaaatcaccaagaagaaagcaacattgggaaacatcgagagctgcgggaagattccatcaga

SEQ ID NO: 413 - DNA, 65 bp, Rattus norvegicus
gctatttcctggagttaaggactggcccaaagccaccaaagccatccctgtcttcatcgagaata

SEQ ID NO: 414 - DNA, 65 bp, Rattus norvegicus
ctatctatccacccatgtgccagtccgtttgtctacccattcaccatccatctgaggattttatg

SEQ ID NO: 415 - DNA, 65 bp, Rattus norvegicus
ttgggttaaacaaccatttagtgtgggccaaacttcgagcgagcaaactgaacacgtggatatcc

SEQ ID NO: 416 - DNA, 65 bp, Rattus norvegicus
cactaatgccaagcattgcaggtgtgttcactcactctactagatcagaggggagacctatcttg

SEQ ID NO: 417 - DNA, 65 bp, Rattus norvegicus
gggatcgtgttggctcatacagatctgcgtctcttccaccactgaccttggctgacattgttaca

SEQ ID NO: 418 - DNA, 65 bp, Rattus norvegicus
caggtggctggcaagaagtgtggcttgcaggggtttgatggcattgtgtgagagatgagcggtgg

SEQ ID NO: 419 - DNA, 65 bp, Rattus norvegicus
gtagagccaaaccgcggtgagagtgcgaagatggcagctgcggacgagccgaagcccaagaagct

SEQ ID NO: 420 - DNA, 65 bp, Rattus norvegicus
agcctgtaggcagcctaccgtcaggtagattgtcacttcccttgtgagacagacagatctcttaa

SEQ ID NO: 421 - DNA, 65 bp, Rattus norvegicus
aattcgtgaaactggtccgatccaaatttcccgaacacaccatcatggcagggaacgtggtgacg

SEQ ID NO: 422 - DNA, 65 bp, Rattus norvegicus
tgagcttggtcagggagctgagtggccctggcactgatgcgtgcagttgtaccattggacatgaa

SEQ ID NO: 423 - DNA, 65 bp, Rattus norvegicus
gacatcttcctgattgattcctgtgaaggtacaaggaccagctttcttaatgttggtttaggttt

SEQ ID NO: 424 - DNA, 65 bp, Rattus norvegicus
atgaggagagtaaggcgcttccagatcgcccagtacaagtgcctggtcatcaagtatgccaaaga

SEQ ID NO: 425 - DNA, 65 bp, Rattus norvegicus
aggtggtcagaatctgagtcttcagcctgggttgtctggcctcacagacaccaagagtccaggta

SEQ ID NO: 426 - DNA, 65 bp, Rattus norvegicus
ggattcaagtggattcttaacacttctgcctgtgctgaagagaagcttcataaggaacaagcaag

SEQ ID NO: 427 - DNA, 65 bp, Rattus norvegicus
gatatgtgaggagccaacttgtcgcaatcgcattcgtcgtcttccccttcatttctcccgaaatg

SEQ ID NO: 428 - DNA, 65 bp, Rattus norvegicus
ttgcaactgcatcagggcccaacttctcactggcagatctggagagccccagttactacaacata

SEQ ID NO: 429 - DNA, 65 bp, Rattus norvegicus
caatgaagagtcacaggaagatgccactcagtctgatgagaaagagcaggatgccctagagactg

SEQ ID NO: 430 - DNA, 65 bp, Rattus norvegicus
tctgtatgctgaggctataggaaaggtacgtggcacttggtacaccccagcttagggaaagccat

SEQ ID NO: 431 - DNA, 65 bp, Rattus norvegicus
cacgtcccctgcaaacagtccctttgtgggattaggacggagggatcctcttgcgggacagtcct

SEQ ID NO: 432 - DNA, 65 bp, Rattus norvegicus
gagtctgaagtagccagcagtttggttcttgaacgatctttgaatcgtgttcagttacttgggcg

SEQ ID NO: 433 - DNA, 65 bp, Rattus norvegicus
cagaaccacgtcatgcttgggagcctctgttcttgaaaggcttccgtcgagaacgaaccatacta

SEQ ID NO: 434 - DNA, 65 bp, Rattus norvegicus
tggtcatggtcatcctgttcaagggtatcccactggagagcacggacggcgagcggctggtgaag

SEQ ID NO: 435 - DNA, 65 bp, Rattus norvegicus
tggaaatggttgggctgtgtgacatttgaagtgttccagtggtggtgtgagcagtaggtgaagcg

SEQ ID NO: 436 - DNA, 65 bp, Rattus norvegicus
taatcgaccatcaaggagccgtgtgtaagttctgtcagccacgggagtctgagctctatcagaag

SEQ ID NO: 437 - DNA, 65 bp, Rattus norvegicus
cgccgagacactgatgttccagctttccacttgtgggagacgtgccttagcctttgctagaacat

SEQ ID NO: 438 - DNA, 65 bp, Rattus norvegicus
ggtcctgcgaagtggactgagagtagaaatgcgacatagtcagctgtgctcaatgtgcttcacaa

SEQ ID NO: 439 - DNA, 65 bp, Rattus norvegicus
ctgtctgggaatgtgtggttatagttctgtgggagaaatagtttgtcagtgttcaccagcttgta

SEQ ID NO: 440 - DNA, 65 bp, Rattus norvegicus
gggataggagcatgtgttccttagggccacatatggctgtttcctgttgcatctggaaccaacta

SEQ ID NO: 441 - DNA, 65 bp, Rattus norvegicus
acaaacctgagtttgctacttttagcaggtaaatccgagctccctggagcagtgttcaggctctc

SEQ ID NO: 442 - DNA, 65 bp, Rattus norvegicus
cctccaccctcaccgttgccatttccaacgcaagctatccttcctccagcaccatcaagttactt

SEQ ID NO: 443 - DNA, 65 bp, Rattus norvegicus
atctgttagatgtggctgttttgcgtagcattgtgtgctgcccctgccccatccctgtgtgtgca

SEQ ID NO: 444 - DNA, 65 bp, Rattus norvegicus
ctggtgaagaagcctgtgcccaagctgatcgagaagtgctggacagaggatgaagtgaaacgctt

SEQ ID NO: 445 - DNA, 65 bp, Rattus norvegicus
gctacagcgagaaccaagacctttcccaaagctcagaatcctccgaaaagttgagacaatcgatg

SEQ ID NO: 446 - DNA, 65 bp, Rattus norvegicus
ggggcatgtacttttctggagaactcaaggtgctagatccctgatgcaaagagaagcatttctca

SEQ ID NO: 447 - DNA, 65 bp, Rattus norvegicus
gagaggacgcagactcagacagtgaggacagtaagaactcagagagtgacgtggatagtgaggat

SEQ ID NO: 448 - DNA, 65 bp, Rattus norvegicus
aggagcgttttgataacagcgacctctctgcgtgactttggcctcatttcctggacttgcacttg

SEQ ID NO: 449 - DNA, 65 bp, Rattus norvegicus
ccatggactgtaaaactccttctaacccaactgggatggaaaggaaatacgggattccccagggt

SEQ ID NO: 450 - DNA, 65 bp, Rattus norvegicus
ttcaaagcaatctcctctaggagttgtaggcaccagtgagaagagcagggagatgctaaggtggc

SEQ ID NO: 451 - DNA, 65 bp, Rattus norvegicus
gactacagaacttccagttagaacctggacacaggtatacaaggagcaggtcctagaacctatgc

SEQ ID NO: 452 - DNA, 65 bp, Rattus norvegicus
ttctgattcagagaggctatgactccgaccctgtgaaagcctggaaagaagctcagcagaaggtc

SEQ ID NO: 453 - DNA, 65 bp, Rattus norvegicus
cagagattagaagagcagctgatgaagctggaggttcaagccacagaccgagaggagaacaaaca

SEQ ID NO: 454 - DNA, 65 bp, Rattus norvegicus
ctgctctggcctctctagattcctccctggaaatggatctggaggggctagaagactactttagt

SEQ ID NO: 455 - DNA, 65 bp, Rattus norvegicus
gtatttgaacagtttctcgaaaacctggataaatctcggaaaggggcacttctcaagaagagcga

SEQ ID NO: 456 - DNA, 65 bp, Rattus norvegicus
ttgctgatgctgttcggtggcgttcccaagacaacaggggaaggaacctctcttcgtggggatat

SEQ ID NO: 457 - DNA, 65 bp, Rattus norvegicus
ttccgaaggacacatcatgacaactggcaagaacacaagcagcagttcactgatgaccagctgct

SEQ ID NO: 458 - DNA, 65 bp, Rattus norvegicus
gttgaaacaagagtccacctttagctgtggctgcctttacgtctgtgcctcccaagtgcctcttg

SEQ ID NO: 459 - DNA, 65 bp, Rattus norvegicus
tcgatgacaacaacccctttatgatgcagtgggtggtgtatgccgtgcgaaatctcactgaagac

SEQ ID NO: 460 - DNA, 65 bp, Rattus norvegicus
gacgatcgcttctgagatgccagcgtgttctgaggtcttttctgtcaccaagtttgtacctgagt

SEQ ID NO: 461 - DNA, 65 bp, Rattus norvegicus
ctcacccaagtcagaaaggcttaacattcctacctccaaggcaaacatcccaaatcaaagtcagg

SEQ ID NO: 462 - DNA, 65 bp, Rattus norvegicus
gggtggagattgagagaacatgcttactattggactggttgtgttgactggcgtgcaggtgctta

SEQ ID NO: 463 - DNA, 65 bp, Rattus norvegicus
ctgacctgtagctccaagtgatgttctgaggctccaagtgatggcctttctgaggcagtcaattt

SEQ ID NO: 464 - DNA, 65 bp, Rattus norvegicus
ggaggcttttccctaagccacctgcccctagaaccacagatgacctgtgtggaaacagggctttt

SEQ ID NO: 465 - DNA, 65 bp, Rattus norvegicus
gtcattacttcctcccctaaacctccaaagagccaaactctgcttcctgggtgacctttgtgtag

SEQ ID NO: 466 - DNA, 65 bp, Rattus norvegicus
taggttcctcaacacggaccttctagacagacaaggcatcactacatccaccatacgcttgctcc

SEQ ID NO: 467 - DNA, 65 bp, Rattus norvegicus
tctaatacagagagaggtctgactggttctagccattccggttgcaacacagccactgcaagctg

SEQ ID NO: 468 - DNA, 65 bp, Rattus norvegicus
gacgaggacgatgacgacgaccctttcatgagtggtagttgcccaagaagaaaccgaagataatg

SEQ ID NO: 469 - DNA, 65 bp, Rattus norvegicus
ggactcagaacacaaatgcttttgtggaagtgctgatctcagagggacactagcgcaggttgtga

SEQ ID NO: 470 - DNA, 65 bp, Rattus norvegicus
caagacaagctactgaaggagatgcatgaagaggaacttctcaacatacgcagaggactggagtc

SEQ ID NO: 471 - DNA, 65 bp, Rattus norvegicus
aacagagtgaagaaacaccaggtgatgatggctccaaccaagtcaattctgaatcggattccgat

SEQ ID NO: 472 - DNA, 65 bp, Rattus norvegicus
tcatggattgacctggattgagaaccaagtcaccccacagtccacactgcctctccaatacccct

SEQ ID NO: 473 - DNA, 65 bp, Rattus norvegicus
atctttcaggccatgaatctgggaggagagtggtctgtaagctccatcagccctgtcctgagaca

SEQ ID NO: 474 - DNA, 65 bp, Rattus norvegicus
tagatccaagagcccacataagaaacgctctaagtctagggagaggcggaagtcaaggagccggt

SEQ ID NO: 475 - DNA, 65 bp, Rattus norvegicus
ttgtgtcttgctaagagcactagagccattggagggcctagagaccatgcggcagcttcgaaact

SEQ ID NO: 476 - DNA, 65 bp, Rattus norvegicus
atccagactacgtcgaggtggacaggatactggacgagtctcacagtgtggacaaggataatggt

SEQ ID NO: 477 - DNA, 65 bp, Rattus norvegicus
cctcgttgggaggcagcgtagtaaacactgcttcggtgctccagacgcctaagggctttcgttac

SEQ ID NO: 478 - DNA, 65 bp, Rattus norvegicus
atctagtcatcagcaagatgaaccagctattgtccaggactcctgccctgtctccacagagacct

SEQ ID NO: 479 - DNA, 65 bp, Rattus norvegicus
acaagctctaccacaggggactgcctgagaggtacaaggctgaaatgggaacagattgaatgcca

SEQ ID NO: 480 - DNA, 65 bp, Rattus norvegicus
aatgcccaacagatcacacagacagaggtccaacaaggacagcagcagttcagccagttcacaga

SEQ ID NO: 481 - DNA, 65 bp, Rattus norvegicus; identical to SEQ ID NO: 1

SEQ ID NO: 482 - DNA, 65 bp, Rattus norvegicus
acacttctgccgcatctgtggcaatcacttcaagagtgacgggcacaaccggagatacccagtca

SEQ ID NO: 483 - DNA, 65 bp, Rattus norvegicus
ccctaaacccctagacaacccgtctctgggtcctgagtccatttctcacctttggaatctccaaa

SEQ ID NO: 484 - DNA, 65 bp, Rattus norvegicus
tcgtacaagcaaggtgattggggatgggatggaggcttatggacggaagccaggaaatgggaaaa

SEQ ID NO: 485 - DNA, 65 bp, Rattus norvegicus
tcggacagagaaggtcaatctagccaatgagccaaagtaccacatggacacagtgaacatcgagg

SEQ ID NO: 486 - DNA, 65 bp, Rattus norvegicus
attcgcagtgacggtgccattggcaattactctggaggaggacagactgtgaaagagtggcttct

SEQ ID NO: 487 - DNA, 65 bp, Rattus norvegicus
acaaatcacagatgaaggcctcatcaccatatgcagagggtgtcataagttgcagtctctctgtg

SEQ ID NO: 488 - DNA, 65 bp, Rattus norvegicus
atcctggagtagaatggccttaatttagttggtagcgtcctcacctgcctcgtctacgccttgca

SEQ ID NO: 489 - DNA, 65 bp, Rattus norvegicus
tttactccattcggaagcaatacatactggaggagtcagccctctcaggccagcagagtgacatg

SEQ ID NO: 490 - DNA, 65 bp, Rattus norvegicus
attattctggagttcctgtccaaggtcaagcaagtgcccttcactgacttgtcggaggagagcgt

SEQ ID NO: 491 - DNA, 65 bp, Rattus norvegicus
gaagaggccggaagagctttgtattctctggggtcaaaagaagacactatactaggtccctaggg

SEQ ID NO: 492 - DNA, 65 bp, Rattus norvegicus
tcacaagggttaggacagattaaccaagaaaggacaagtgacagagactgaaaggggctggaaaa

SEQ ID NO: 493 - DNA, 65 bp, Rattus norvegicus
caggggcaaaccaggacctttcttctggacggagatgaagtcatcataacaggtcactgccaggg

SEQ ID NO: 494 - DNA, 65 bp, Rattus norvegicus
cccgctggatctacagttgtaatgagaagcagaagttactcccccaccagctctatggggtggtg

SEQ ID NO: 495 - DNA, 65 bp, Rattus norvegicus
aatgtgctcgctcccaaggctttccagatacctaccggttattcggcaacatcctggacagacac

SEQ ID NO: 496 - DNA, 65 bp, Rattus norvegicus
agttgtgaccttaaaagctaatactcaggctaaacactgcccaactggaaacatgagacttgagt

SEQ ID NO: 497 - DNA, 65 bp, Rattus norvegicus
ggccctggatgtcagtgaccactttccagttgagtttaagctacagagttcaagagccttcacca

SEQ ID NO: 498 - DNA, 65 bp, Rattus norvegicus
ctaggatgtaggaaaggatacctatcacggtggaactgctctgttctctagttgatggttgcctg

SEQ ID NO: 499 - DNA, 65 bp, Rattus norvegicus
ggaaggcgcttatgctgactgggatgtagtgatgtcaaggcttcgtattctgagacagagagtca

SEQ ID NO: 500 - DNA, 65 bp, Rattus norvegicus
gtcaggcaggacaaaagctcatgatgtcccagagggagtcattgatgtcacatgcaatagaactg

SEQ ID NO: 501 - DNA, 65 bp, Rattus norvegicus
tttgccaactgagaaggacaagcagactgagctgggtctttgaagcacagtgcagcaagcccttt

SEQ ID NO: 502 - DNA, 65 bp, Rattus norvegicus
ggagccagctgaaggaacagatctctgacatagatgacgcagtaagaaagctgtaaagtctgagc

SEQ ID NO: 503 - DNA, 65 bp, Rattus norvegicus
cgcctcggctttgccaccgagaggtggagggccgctgtactgagggtggggtctagctgtgcctt

SEQ ID NO: 504 - DNA, 65 bp, Rattus norvegicus
ggaggacacactgccaagatttctgacttcagttggaaccccaatgaaccttgggtcatttgctc

SEQ ID NO: 505 - DNA, 65 bp, Rattus norvegicus
gttgggaaacaggagaaagcgaaaccagcagctgcaaaagccaaagaaactccgaaaacaacacc

SEQ ID NO: 506 - DNA, 65 bp, Rattus norvegicus
ttttgcagttggtcttaaagagggtgggcctaaggcttggcaaatgccacttctggcaaacttgg

SEQ ID NO: 507 - DNA, 65 bp, Rattus norvegicus
ccgtaaattacagagttacctggagacatctggaacatcctgagggtacaacaactggacgcatc

SEQ ID NO: 508 - DNA, 65 bp, Rattus norvegicus
cgccaagctgttttcacttgtattgactttatgttgtgtgattccaatctctgtttggcacttgt

SEQ ID NO: 509 - DNA, 65 bp, Rattus norvegicus
cccattctgcaaatagtgtctttcctggattacacatagtgtggtttcctgagggattctgacaa

SEQ ID NO: 510 - DNA, 65 bp, Rattus norvegicus
tacgacatcctcatggagaagctgtctatgatgctgagcacacggagcaaccagatcgagactct

SEQ ID NO: 511 - DNA, 65 bp, Rattus norvegicus
gctgaggcaatactggctgcagactttgaaattggtcactttttacgtgagcgtataatcccaag

SEQ ID NO: 512 - DNA, 65 bp, Rattus norvegicus
ttccacgatgccggaggtgtcggcaaaggggactactatttccaagaaagggttcaagaaagcag

SEQ ID NO: 513 - DNA, 65 bp, Rattus norvegicus
gctggcattgtccttgctaagcactgcgttccagaccgtgtctgacttagttaacctaggagatt

SEQ ID NO: 514 - DNA, 65 bp, Rattus norvegicus
gagtcagattcgagtacaatagagtggattggacaggctgagcatggttatgccaactgcatgca

SEQ ID NO: 515 - DNA, 65 bp, Rattus norvegicus
taatgccatctacaaaggacaactgctggtgtgaactggcagtgtgaactgaccgagaaggtggg

SEQ ID NO: 516 - DNA, 65 bp, Rattus norvegicus
agcactgtggctcaggagtgacaagttgctaatatgcagaagggatgggtgatacttcttgcttc

SEQ ID NO: 517 - DNA, 65 bp, Rattus norvegicus
aagtcgagtgccaagagagccagcaagaagaaatgacaatgaaggctttgcttggggacactcct

SEQ ID NO: 518 - DNA, 65 bp, Rattus norvegicus
ggttttgtacagacattatttccactctggtggataagctcaataaaggtcagatcccaaactag

SEQ ID NO: 519 - DNA, 65 bp, Rattus norvegicus
gaggagatcgaagaggaggtccggcagaagaaatcttcacgtaagcgtaagcgagacagcgaggc

SEQ ID NO: 520 - DNA, 65 bp, Rattus norvegicus
gtagggaatgcactgattgcatgttaccccaagcgtcatgaaaccttccgacacggtgacctatt

SEQ ID NO: 521 - DNA, 65 bp, Rattus norvegicus
aggcaaacgaaaacgctgtgtcgatggggaccaaggcagcagctgcaggtcctggggtgaggtcc

SEQ ID NO: 522 - DNA, 65 bp, Rattus norvegicus
agcaatttctccatcgggctgctcaagagagaaactggacctgcatgttaagacggactcatccc

SEQ ID NO: 523 - DNA, 65 bp, Rattus norvegicus
atggctcttctggaagggctgagattgaagtcaagctgaaccctgatgagactgtccttgggttc

SEQ ID NO: 524 - DNA, 65 bp, Rattus norvegicus
ggcggacttggtgaaatgtttgcactttggtcacaatgcttctactgcttggtgcaagcttacgc

SEQ ID NO: 525 - DNA, 65 bp, Rattus norvegicus
tttctgctaaggtggtgaggtagccaacactggcatgtctcggtagtggtttgggcaaatttccg

SEQ ID NO: 526 - DNA, 65 bp, Rattus norvegicus
agtgttagtcctgctcagtaaacattgagtttctcctgtactgactgaccctgactggcagtgtg

SEQ ID NO: 527 - DNA, 65 bp, Rattus norvegicus
ccctaccctctgcatcatatgcggctgaggcatattacagtggtttgccattagagtgttcattc

SEQ ID NO: 528 - DNA, 65 bp, Rattus norvegicus
ctgttttgtctgaagtgctgccactaagagatcagaattaagctctcctttccacatcagatgtg

SEQ ID NO: 529 - DNA, 65 bp, Rattus norvegicus
tgggtactgagtatcgacggtgagaacgccggaagcctcacacacattgaagcccagaacaagat

SEQ ID NO: 530 - DNA, 65 bp, Rattus norvegicus
tttcagatgatcactggccaccacttgttaaggctctagccagaagggagggttagggtggaaga

SEQ ID NO: 531 - DNA, 65 bp, Rattus norvegicus
ttcctcaactccaagcgtgagatcgtggaccgcaagtacagcatctgcaagagcggttgctttta

SEQ ID NO: 532 - DNA, 65 bp, Rattus norvegicus
agtgcttcatgtgtagcgactgtggcctgaatctcaagcagcgtgggtacttcttcctagacgaa

SEQ ID NO: 533 - DNA, 65 bp, Rattus norvegicus
tgcaggaggtcactgagcaagaaagtcattccatcactgggattgcatgacaccacgtaacctcc

SEQ ID NO: 534 - DNA, 65 bp, Rattus norvegicus
tggtcaggaacccagcttccaggcactgtagggaaggcatcagactggcagatgggaaactagtt

SEQ ID NO: 535 - DNA, 65 bp, Rattus norvegicus
gcaaagctccccaacagtgtgactggagaaaatactgaccccactgaaagtgcaaccagtaagtg

SEQ ID NO: 536 - DNA, 65 bp, Rattus norvegicus
acttttggggtctttgccatggagtgagactccctgactggacaggaaaggcagaggctttataa

SEQ ID NO: 537 - DNA, 65 bp, Rattus norvegicus
cttcaaaggccaggaaagattcgatttcgagaacaatggctgagggacattactgagaccaaaca

SEQ ID NO: 538 - DNA, 65 bp, Rattus norvegicus
tgataaggaggacttcaagcaggaggagtgcgaaaggtcacctcccaatcgaaagccgaggcttt

SEQ ID NO: 539 - DNA, 65 bp, Rattus norvegicus
ccaccctgacaggacaaagacaactgagtctgtctgccattcctcagtaaactgttaaagctggg

SEQ ID NO: 540 - DNA, 65 bp, Rattus norvegicus
gcagcagccagatcaaagcaagtttcagccatgactttacttacctcgttagcggttcagaagat

SEQ ID NO: 541 - DNA, 65 bp, Rattus norvegicus
tttaacatccatcaccgacttaaggaaggggtccgacatgggtgagggactacagcttcagcgat

SEQ ID NO: 542 - DNA, 65 bp, Rattus norvegicus
gcctcatctgttctgcaaagcagcagcaaaccatgctgagagtgtccattgatggagttgaatgg

SEQ ID NO: 543 - DNA, 65 bp, Rattus norvegicus
ggattggatgtagtttagtcgctcttcttcttagctcgctttgtagtttgtccttctggtagcct

SEQ ID NO: 544 - DNA, 65 bp, Rattus norvegicus
ttatcttagcaagactttatgaggcaggatcaaatcctagtgggcctgagctgatttcttaccct

SEQ ID NO: 545 - DNA, 65 bp, Rattus norvegicus
tcgtgcaaactggactcctcctcatagcactttgcgctgttgtacttttctgttcacccctcacc

SEQ ID NO: 546 - DNA, 65 bp, Rattus norvegicus
ccactcattccttagtgagcaatccaaaccttagtaaagaacaggcagacataggttgctgagta

SEQ ID NO: 547 - DNA, 65 bp, Rattus norvegicus
tagcatcatgagtgtctgttctgtcctgttggacctcagggtacctgcacttgaggcagcttgtt

SEQ ID NO: 548 - DNA, 65 bp, Rattus norvegicus
aacccaagactcaggagcagcgtggtgtggagcccagcacagaggacctttcagcccacatgcta

SEQ ID NO: 549 - DNA, 65 bp, Rattus norvegicus
aagttcacttggatcaaaaccaacggagtctccccgccctgtgccagatcaagtagtttggacat

SEQ ID NO: 550 - DNA, 65 bp, Rattus norvegicus
tttccatgaatagccaccacatggcccagtgtctctgccaaacacagttgcttctagtctggcca

SEQ ID NO: 551 - DNA, 65 bp, Rattus norvegicus
ctccttggctttgacttcatggtggatgaggagctgaaagtctggctcattgaggtcaacggtgc

SEQ ID NO: 552 - DNA, 65 bp, Rattus norvegicus
tggactcttggcctgtgcagaacatgggattttggagtgtgtgtgagctggccttgatgttagaa

SEQ ID NO: 553 - DNA, 65 bp, Rattus norvegicus
aagccaagaagccacagaagggcaagcaaaagacccaggtagatataggcacttaagagcccctg

SEQ ID NO: 554 - DNA, 65 bp, Rattus norvegicus
gagcttcactactaacaaggggcgagtggtcacctttggtgttagacgtggcttgtcctttaatg

SEQ ID NO: 555 - DNA, 65 bp, Rattus norvegicus
tcatgtcagacaacgaagacaatttcgatggcgatgactttgatgacgtggaggaggacgaaggg

SEQ ID NO: 556 - DNA, 65 bp, Rattus norvegicus
cctgacagaactccggacattcaaccatcaccacgctgagatgctgatgtcttggagggtgaatg

SEQ ID NO: 557 - DNA, 65 bp, Rattus norvegicus
agctccactgaaattcctgaattcccaattgcacctgaaattgcactggaactgctgatggccgc

SEQ ID NO: 558 - DNA, 65 bp, Rattus norvegicus
ggcacctatgtgacagtgcttcattcaagtgcccctttggccagtgctggagaccacctttaaat

SEQ ID NO: 559 - DNA, 65 bp, Rattus norvegicus
tttcgtactcagcaaggccgagactgacctttctcctcattgacaaagtcacccagcacctgtgg

SEQ ID NO: 560 - DNA, 65 bp, Rattus norvegicus
tttggaaaagactcaggcacaagtttcaacgctgttcccttgcaccccaacactgtcctccgttt

SEQ ID NO: 561 - DNA, 65 bp, Rattus norvegicus
ctggaagctctgggctccacctggcatgacacttgctttgtgtgctccgtgtgttgtgaaagttt

SEQ ID NO: 562 - DNA, 65 bp, Rattus norvegicus
taccgggccccgttcccgttgtacgcgcttcggatagaccccaagactggactgctcatcgctgc

SEQ ID NO: 563 - DNA, 65 bp, Rattus norvegicus
tttcccgacgataaacaggacttgccttggaggttgagtctggaagcaggactacagggactatg

SEQ ID NO: 564 - DNA, 65 bp, Rattus norvegicus
ttaacctggctgagtgtgcaggagatgctatatccatggcaacactggcagagatctacgtggca

SEQ ID NO: 565 - DNA, 65 bp, Rattus norvegicus
gatgactacttgggacttgtgagctgagtgagggagcctccagcttgctttgatcctgatttaga

SEQ ID NO: 566 - DNA, 65 bp, Rattus norvegicus
cagcctcttacttcagaagtccctctggttgtctccctaacaccccatacacactgacagagaca

SEQ ID NO: 567 - DNA, 65 bp, Rattus norvegicus
tggccttcttaatacgtggcagagcgtctggaccagaagactacactgtgcaaccaccatgagtc

SEQ ID NO: 568 - DNA, 65 bp, Rattus norvegicus
actgtactaccagtggtgttctggccttgactgcactcctgttcaagatggaagaagccaacctg

SEQ ID NO: 569 - DNA, 65 bp, Rattus norvegicus
gctaccagcactcctgcctctgaggttctcatgatacctgtctgcacctgtcttgcttacaattg

SEQ ID NO: 570 - DNA, 65 bp, Rattus norvegicus
gacacctttgaagcgctgcgtattgaacccttctccagccctccggagcttccagatgtgatgaa

SEQ ID NO: 571 - DNA, 65 bp, Rattus norvegicus
ttcagggcttctccgccaagtgggactacaacaagaatgaatggaagaagtgagagcctgctgct

SEQ ID NO: 572 - DNA, 65 bp, Rattus norvegicus
ctctgtgccttgtgtgatgtgggcagtgttacagggtctgcatgtgtacaggatgccttactatg

SEQ ID NO: 573 - DNA, 65 bp, Rattus norvegicus
ctttccgtcagaaaggtagtctaacattgcacgagagaatccacactggtcagaagccctttgag

SEQ ID NO: 574 - DNA, 65 bp, Rattus norvegicus
acatcttacagtgcacaagagaatccatacgggagaaagaccttacatgtgccaagagtgtggaa

SEQ ID NO: 575 - DNA, 65 bp, Rattus norvegicus
gcgggaagtcgttcctttatccctctttacttcaaatgcacgaacggactcacaccggggagaaa

SEQ ID NO: 576 - DNA, 65 bp, Rattus norvegicus
gctttgccagagtccggcaagtcgttcccctccaagtcagaactcactgtgcatcatagaattca

SEQ ID NO: 577 - DNA, 65 bp, Rattus norvegicus; identical to SEQ ID NO: 1

SEQ ID NO: 578 - DNA, 65 bp, Rattus norvegicus
aagctcctttgtcacctcatcgaacacagcttcgagggcatgggtggtactttcaagtgccccgt

SEQ ID NO: 579 - DNA, 65 bp, Rattus norvegicus
gctttgccggagtgcgggaagtcgttcagagaaagttcacacctcatcagacatcagaaaatcca

SEQ ID NO: 580 - DNA, 65 bp, Rattus norvegicus
ctttgtccggagtgtggaaagtcgtttacaaaatgttcatcgctcagaacacatcagaaaattca

SEQ ID NO: 581 - DNA, 65 bp, Rattus norvegicus
gcattgtgagaaaaccttcaccagttcttattatcgtaatattcatcaaagaatccacaccggtg

SEQ ID NO: 582 - DNA, 65 bp, Rattus norvegicus
ggattgcctgctattgatccattatcacatagcccaaatggcgatacagatgtgtgggaaagccc

SEQ ID NO: 583 - DNA, 65 bp, Rattus norvegicus
tgtccagaatgcgggaaatcgtttagtcagagtatgaaccttactgttcatcaaagaactcatac

SEQ ID NO: 584 - DNA, 65 bp, Rattus norvegicus
attatccatcccaattgaagtcacattatcaaatccataccggcgaaaaacctgcccggagtgtg

SEQ ID NO: 585 - DNA, 65 bp, Rattus norvegicus
gagtgtgggaaatcgttcaggcgagcctcacacctgtcccagcatcacactattcacactggtga

SEQ ID NO: 586 - DNA, 65 bp, Rattus norvegicus
aatatgtaagaagtccttcactcagcgcatatccctcaatctacatgaaagaagtcacacgggtg

SEQ ID NO: 587 - DNA, 65 bp, Rattus norvegicus
caaatgccatgactgtgggaaatcatatagtgtgaagtcgcacctacacgtgcatcatcgaattc

SEQ ID NO: 588 - DNA, 65 bp, Rattus norvegicus
gacaccccagtggacaaattaccccagctataagctgaggcaactaagtgtcacactcttaatgt

SEQ ID NO: 589 - DNA, 65 bp, Rattus norvegicus
tccagagtgcggaaagtccttcacccattatagcggctggtacagtcacgaaaggattcacacca

SEQ ID NO: 590 - DNA, 65 bp, Rattus norvegicus
gaagaatgtggcaaacacttcaatcaaacttcaaatcttgcaagacattggagggttcatactgg

SEQ ID NO: 591 - DNA, 65 bp, Rattus norvegicus
tttcaacagctggtctccttctccgagtcaggctccctaggcaactcctctggtagcgacgtgac

SEQ ID NO: 592 - DNA, 65 bp, Rattus norvegicus
agagtcgggaagtcgttccggcttctctcacagctcacacagcaccggagcatccacacgggcga

SEQ ID NO: 593 - DNA, 65 bp, Rattus norvegicus
gcttacccatcagaagattcacactggagagaagccttttgagtgcaaagactgtgggaaagctt

SEQ ID NO: 594 - DNA, 65 bp, Rattus norvegicus
ttctctcagttttccatgctcatcatacacgtgagaatccacactggtgagaagccgtacgagtg

SEQ ID NO: 595 - DNA, 65 bp, Rattus norvegicus
gacaggtcctcagaagaccctcactggcacgttgcgcagatgaagagtgctgccccaagggatga

SEQ ID NO: 596 - DNA, 65 bp, Rattus norvegicus
acccatacaggggagaagccttatcaatgtcaggaatgcaggaaggcattccagtgcaggtcaga

SEQ ID NO: 597 - DNA, 65 bp, Rattus norvegicus
aaaggccttcagtcagagttccagcctctgcatccaccagagagtgcacactggcgaaaagccct

SEQ ID NO: 598 - DNA, 65 bp, Rattus norvegicus
gccctttgtgtgtcaaaatcaaggttgtaactacagtgccatgagaaaggatgccctgtttaaac

SEQ ID NO: 599 - DNA, 65 bp, Rattus norvegicus
ttacacagagcttgaacataggtagattcacactggcgccaggccttatgggtgtcatgagaatg

SEQ ID NO: 600 - DNA, 65 bp, Rattus norvegicus
aagaatgtagcaaagcttttaactgttcttcgagtcttaaccaacaccgtagaattcacactggg

SEQ ID NO: 601 - DNA, 65 bp, Rattus norvegicus
agaagccctatagatgtgaccagtgtggaaaagctttcagtcagaaaggaagcttaattgttcac

SEQ ID NO: 602 - DNA, 65 bp, Rattus norvegicus
agtcagagtgcaaatcttgttgtgccatcaacgaatccacactggggagaagccctttgagtgtc

SEQ ID NO: 603 - DNA, 65 bp, Rattus norvegicus
cgaatagctcaaacctcactaaacaccgaacacacactggggagaagccttacgtgtgcaccaag

SEQ ID NO: 604 - DNA, 65 bp, Rattus norvegicus
ctttgcccagagtgcggaaagtcgtttactcaatgttcaagccttcagaaacaccaatgtcggca

SEQ ID NO: 605 - DNA, 65 bp, Rattus norvegicus
cctcattagacatcaaagaatccttactggggagaaaccgtatgcaaaggattgttggaaagctt

SEQ ID NO: 606 - DNA, 65 bp, Rattus norvegicus
tcgaatacacacaggggagagaccgtatgtgtgttctgtgtgtgggaaagccttcaaacagttct

SEQ ID NO: 607 - DNA, 65 bp, Rattus norvegicus
atgtggcaaagcattcagggataattcatcctttgctcgacatcggaaaatgcacaccggcgaga

SEQ ID NO: 608 - DNA, 65 bp, Rattus norvegicus
tccgccccgttgacgatggctggttcgctagccgggaatttgcaagaactctcagcccgttacct

SEQ ID NO: 609 - DNA, 65 bp, Rattus norvegicus
agctacaaactggggtcctcggcttttgagccctacagcagactagaacaacagaaagtaggcag

SEQ ID NO: 610 - DNA, 65 bp, Rattus norvegicus
tagccagagccagctgaccaccaccagctccacttcagcacattccttacaaacctactacatcc

SEQ ID NO: 611 - DNA, 65 bp, Rattus norvegicus
agcatgcccacttatcagaaaggaaaaaagatgccttaactatgtcagacggaagagtcggaccg

SEQ ID NO: 612 - DNA, 65 bp, Rattus norvegicus
gcctctcagtcaccatcttcagtttccagaccaagtttgacttcacctcctgtcacggtgtgcta

SEQ ID NO: 613 - DNA, 65 bp, Rattus norvegicus
cccaagaagccacagactatgtatttggctactgccaaggggagattgctcacatcacatgcagt

SEQ ID NO: 614 - DNA, 65 bp, Rattus norvegicus
gcagctgggaagttcacaggttttgaagctgacctttttctgcgaagttcactttaatacgagac

SEQ ID NO: 615 - DNA, 65 bp, Rattus norvegicus
ggagagttgaggtcatcagtgtctctagtccaagtgtaaggtgttatcagtgtgtagcagggtgg

SEQ ID NO: 616 - DNA, 65 bp, Rattus norvegicus
cactgggcgactctgtgcctcgcggaggaaaatcaactaaacatgggcaaaggagatcctaagaa

SEQ ID NO: 617 - DNA, 65 bp, Rattus norvegicus
gcagtgccgacagcagctttctcaatgaccatgaggaagagctgaacttggtaggcatagaatac

SEQ ID NO: 618 - DNA, 65 bp, Rattus norvegicus
ggggaaggatgtttcgtgtggttccagagtgagagtttggggaatgaagctgctgtaagtatcct

SEQ ID NO: 619 - DNA, 65 bp, Rattus norvegicus
taacaatgcctctgtctgcagctggctagcatttctcaggaaaaggacacaggagctcagcctgt

SEQ ID NO: 620 - DNA, 65 bp, Rattus norvegicus
atctctcttctgacgggcactgaaccccacaaagccaaggaccccactgtctcctagaggtttca

SEQ ID NO: 621 - DNA, 65 bp, Rattus norvegicus
gtgcaacaggaatcgagaagcccatggagtttccactgcaatccgtcattgaacaaactgatgca

SEQ ID NO: 622 - DNA, 65 bp, Rattus norvegicus
tccaaggcttgcgattacatccgggagctacgccagaccaaccagcgtatgcaggagaccttcaa

SEQ ID NO: 623 - DNA, 65 bp, Rattus norvegicus
cactggtttctaaccttctgagaggctctaagcttttcgccgtgagcatgcgcactgagaatgtt

SEQ ID NO: 624 - DNA, 65 bp, Rattus norvegicus
gtcctgtgcctaccaccaccagcactagcgtagtgtctccactcagttcttgaaggtacacaaaa

SEQ ID NO: 625 - DNA, 65 bp, Rattus norvegicus
cagccaccacaacagttcttacagacatctcggttgctccatgggaatccttcgacacagctcat

SEQ ID NO: 626 - DNA, 65 bp, Rattus norvegicus
tgtcatagactgagctttgactgccgctgactgagacagatgtgtgtctacaagttcctggagcc

SEQ ID NO: 627 - DNA, 65 bp, Rattus norvegicus
cccctttccatctaatgcaccatctcttcaatggggagatagcaaccaagcccgtaaatcagctc

SEQ ID NO: 628 - DNA, 65 bp, Rattus norvegicus
tgctaggcttccttaggagcagggatcaaattgcacctgtccctaactcagagcccagtcataga

SEQ ID NO: 629 - DNA, 65 bp, Rattus norvegicus
caactccaaactggagaaggccgacatcctggagatggccgtcagctacctgaagcacagcaaag

SEQ ID NO: 630 - DNA, 65 bp, Rattus norvegicus
atggagggagtacctgaggaagaactagattccatggcaaagcatgaatccaaggaagatcacat

SEQ ID NO: 631 - DNA, 65 bp, Rattus norvegicus
ggagtggggcaaggaaggtgtctgcactgtgggatgttaactgcgcttttgtcttgaagctattt

SEQ ID NO: 632 - DNA, 65 bp, Rattus norvegicus
cttcagtcttctggcgggaaggaacaagaacggtaggcattcagaatggccttcgagaaactcat

SEQ ID NO: 633 - DNA, 65 bp, Rattus norvegicus
ctgcctctgggactctttcctgggaccaatttagagaatcaggctcccaactgaggacaatgaaa

SEQ ID NO: 634 - DNA, 65 bp, Rattus norvegicus
cccatcctgggcttagtgagacaaccaaccctatgggtcatctgtaaacatcagccagttccaga

SEQ ID NO: 635 - DNA, 65 bp, Rattus norvegicus
tggctcaacgacgcagagactatgtctgtggattcaagcctacccagcccaaaccagctgagcag

SEQ ID NO: 636 - DNA, 65 bp, Rattus norvegicus
gatatgatgctggagatgctctgtgcaaagctgtgaaggcatgcagccactcaagtgcattttac

SEQ ID NO: 637 - DNA, 65 bp, Rattus norvegicus
tgttgttgatctgaactgggcagccgaggtgctgaaggtgcagaaacgacgcatctatgacatca

SEQ ID NO: 638 - DNA, 65 bp, Rattus norvegicus
ccatctgggacaagacaatcccctacgatggcgagtctttccacctagagtacatggacctggat

SEQ ID NO: 639 - DNA, 65 bp, Rattus norvegicus
atactcagtctcactaccccagtccaaggagctctgggagctgtgtaagctgtgttctctgcgat

SEQ ID NO: 640 - DNA, 65 bp, Rattus norvegicus
ctcgagctagtgtgtccctaactctctcatggcaaggagacaagcctagttaccatcagagtaac

SEQ ID NO: 641 - DNA, 65 bp, Rattus norvegicus
gtctgtcattctaagggcttacttaccctataactttaagaacctggaacagtccactgaacggc

SEQ ID NO: 642 - DNA, 65 bp, Rattus norvegicus
aacggcttttgatcagtgttgaaggtgggaagagcctttgcaggtctagaagagcagagcagagg

SEQ ID NO: 643 - DNA, 65 bp, Rattus norvegicus
cccattgtgcacttcagcgacgtgagcagcgatgatgatgaggacagacttgtcatagcaaccta

SEQ ID NO: 644 - DNA, 65 bp, Rattus norvegicus
tggagatcagacggaagacgacggtggggaagagagtcataagtgcctggagcgatcgctacaga

SEQ ID NO: 645 - DNA, 65 bp, Rattus norvegicus
gggcgatgagaacctacaggacacaaaatcttccgaggacaagaaactagacgacgacaagaagg

SEQ ID NO: 646 - DNA, 65 bp, Rattus norvegicus
gctgttcagttgccactaagagattgcacagtcaaaccgactctaaacacactagtttggattcc

SEQ ID NO: 647 - DNA, 65 bp, Rattus norvegicus
tttcactgcaagaaatacctgagtctgaccgagcgctcccagatcgcccacgccctcaagctcag

SEQ ID NO: 648 - DNA, 65 bp, Rattus norvegicus
gacatcaagcccttaccaggtctgcctgggatcggaaatatgaactacccatccaccagccccgg

SEQ ID NO: 649 - DNA, 65 bp, Rattus norvegicus
ttattcgcacacggtgaaaacagatgcgtcctgccacgatctctgactggaggaagcaaggaggt

SEQ ID NO: 650 - DNA, 65 bp, Rattus norvegicus
agaccttcccgttcgccttcaactcggtcaacgtggggcctctagcttcacaacctgtattctca

SEQ ID NO: 651 - DNA, 65 bp, Rattus norvegicus
aagagtgtggaatgttttcggttccgggtggggaagacgcagcccatcctgtttggcatctattt

SEQ ID NO: 652 - DNA, 65 bp, Rattus norvegicus
ggcggctgaagaatctatctggagaatgatagaacggacgccagagtgtgttctcatgacatacc

SEQ ID NO: 653 - DNA, 65 bp, Rattus norvegicus
ccaacctcctggctgtggtgggaagcgaaaggagcaggtctggtggatgcaaagcgactagctag

SEQ ID NO: 654 - DNA, 65 bp, Rattus norvegicus
gctgaagacctgctgctctgaaacagtacttgcagttactccccagctgttgtttggacagttca

SEQ ID NO: 655 - DNA, 65 bp, Rattus norvegicus
ctggccatgttgctccattcacgtgtactcttttgttgcccacatgttcccaagttcaagaacac

SEQ ID NO: 656 - DNA, 65 bp, Rattus norvegicus
ccttctgctgaacataggtcagagaaacactcgtgaatggcatcacatcgccaactgtctgcatc

SEQ ID NO: 657 - DNA, 65 bp, Rattus norvegicus
tccaggttatgcaagcacagtttgctcaggacaacaacccagacgcacagaccctccagaaactg

SEQ ID NO: 658 - DNA, 65 bp, Rattus norvegicus
ttactgcttagtggaacggcctgctgacctggacaactttgccagggttggacacctgtaaggaa

SEQ ID NO: 659 - DNA, 65 bp, Rattus norvegicus
ccacgagcttctcacaccagcctttgggttcccttccgaatttgcacagtcgtttgttgctattt

SEQ ID NO: 660 - DNA, 65 bp, Rattus norvegicus
ttatgtagcgcttggctctgctctgctgctccccacagggaccagaggcctgtaaacttcttgtt

SEQ ID NO: 661 - DNA, 65 bp, Rattus norvegicus
cagcggttcgcagttttccttctcaagattagccatattaggcacatggttgagggagtggctca

SEQ ID NO: 662 - DNA, 65 bp, Rattus norvegicus
ccaaacaaagctagttcttcaagggaatagatgagaaactgaatgtctgacaagtagactcagcg

SEQ ID NO: 663 - DNA, 65 bp, Rattus norvegicus
gcgctttgcgtcattgttcaacgtgaaggaccagacagtcatgttcctgagccgcacaacctaca

SEQ ID NO: 664 - DNA, 65 bp, Rattus norvegicus
ggactgccaactcaatgctcacaaggaccaccagtaccaattcttggaagatgcagtaaggaacc

SEQ ID NO: 665 - DNA, 65 bp, Rattus norvegicus
tgagcaacatgaaccagatgacaggccagatgagcatgacctcagtgacctctgtgcctacatca

SEQ ID NO: 666 - DNA, 65 bp, Rattus norvegicus
aaagttgcaacgggaacagcagcgagctaaggaccttgaaaaccggcagaagaagctggagcatg

SEQ ID NO: 667 - DNA, 65 bp, Rattus norvegicus
gaagcctgagcacgaacagagaaaggaacaggagcctaaaagacctcatattaagaagcctctga

SEQ ID NO: 668 - DNA, 65 bp, Rattus norvegicus
tccaacctgtccgatacaacagaaggagtaacccggatctggagaagcgacgcatccatttctgt

SEQ ID NO: 669 - DNA, 65 bp, Rattus norvegicus
atcaatcgagtccttcgggcactacaggaagaccagaggttacactggacacaacttagatctcc

SEQ ID NO: 670 - DNA, 65 bp, Rattus norvegicus
tttcgggacttgatgcaatccggatcaaacgtggctgagcgcgtgtggacacgggactgacgcaa

SEQ ID NO: 671 - DNA, 65 bp, Rattus norvegicus
cccagtttgaaagccatctcttccaaatgatgttggcgttctaagtgttttacaccgaacccaac

SEQ ID NO: 672 - DNA, 65 bp, Rattus norvegicus
gacctttctccgatccatccccttttgttgacctaacctgatgcctcggtcctgggaaagccctt

SEQ ID NO: 673 - DNA, 65 bp, Rattus norvegicus; identical to SEQ ID NO: 1

SEQ ID NO: 674 - DNA, 65 bp, Rattus norvegicus
cggcctgtctattggagatactgcaaagaaactgggggagatgtggtctgagcaatctgccaaag

SEQ ID NO: 675 - DNA, 65 bp, Rattus norvegicus
tgccaaggggtgacagggctgcatttctgtgccaccttctgtctactcattgttgcatgagccct

SEQ ID NO: 676 - DNA, 65 bp, Rattus norvegicus
agatcaagtgcccaactgcagaccaactacccctcctcagacaacagcctctacaccaacgccaa

SEQ ID NO: 677 - DNA, 65 bp, Rattus norvegicus
aaccctcatccgggatatgttactgtccggcagcagttttaactggccatacatggcaattcaat

SEQ ID NO: 678 - DNA, 65 bp, Rattus norvegicus
tagagactaagcggactcaccctgtaccaaggactcaaaagcctttggggatgctggtatcaggg

SEQ ID NO: 679 - DNA, 65 bp, Rattus norvegicus
attcaaggtaacatagagtacagctgcccggccacgaatgaatgtgagatcaccaagcgcagacg

SEQ ID NO: 680 - DNA, 65 bp, Rattus norvegicus
gggagcgagagcaagcgactgtctgaagagaagacaaatgaagcctaggagctcttccaaaagga

SEQ ID NO: 681 - DNA, 65 bp, Rattus norvegicus
gtgcctctcaagccattccttgccataattgctgaagtcatcctcttagtggccatcatcctgct

SEQ ID NO: 682 - DNA, 65 bp, Rattus norvegicus
cctgcaggctccagaaatgccttcaagctggcatgaacttaggagctcgaaagtcaaagaagctg

SEQ ID NO: 683 - DNA, 65 bp, Rattus norvegicus
atcgctgtggctacaataccaaccggtatgatcactacacggcacacctgaagcaccacctgaga

SEQ ID NO: 684 - DNA, 65 bp, Rattus norvegicus
tgtaacttagtcacggcaaagaggatgtgacaagagggaccagtcccagagcagccactgaaagg

SEQ ID NO: 685 - DNA, 65 bp, Rattus norvegicus
ttcaggggaggctttagagcacgatgaggaagagggctgagctgagctttggttctccagaatgt

SEQ ID NO: 686 - DNA, 65 bp, Rattus norvegicus
ggtctctcaagaactttgtacagcaagtccagcaagcctttggatgtgatgtctttgctttgggg

SEQ ID NO: 687 - DNA, 65 bp, Rattus norvegicus
cgtgggcacagatagtatttgggtaagaaagacagttcgggttaacaaagcaacactcctgggaa

SEQ ID NO: 688 - DNA, 65 bp, Rattus norvegicus
atggttaatctctgcaggtcactaccagccaccgagaccaaccgagtcagtgagtgctctgagca

SEQ ID NO: 689 - DNA, 65 bp, Rattus norvegicus
aaagatggagccgaagatgggcaggtggaagaagagcccctcaacagcgaagatgatgtaagtga

SEQ ID NO: 690 - DNA, 65 bp, Rattus norvegicus
ggcatatcagttatacagaaatacaactttggggaacagtcttcaagagagccttgatgagctca

SEQ ID NO: 691 - DNA, 65 bp, Rattus norvegicus
ccagggaactcaagggtttggggcaggtaggggctgtggatgttcttcctacaccccatgtcccc

SEQ ID NO: 692 - DNA, 65 bp, Rattus norvegicus
agacctcagttaggagaggctgctgtttatctgacaaaggaactcaattggggatagagggcagg

SEQ ID NO: 693 - DNA, 65 bp, Rattus norvegicus
ggatcctgaatctgagctgtacaccattagtagccaactagacttcaacacgacgtacgaccact

SEQ ID NO: 694 - DNA, 65 bp, Rattus norvegicus
acagggaccccggtagctgacgggcccaaggaggccgagaagaaagtggtggtcaagagcgaggc

SEQ ID NO: 695 - DNA, 65 bp, Rattus norvegicus
ttaatggaggacctttggttcccactatgtagactactgcttctcaaggcacctgcagattttga

SEQ ID NO: 696 - DNA, 65 bp, Rattus norvegicus
agacgtgactgccgtggaacaacccattgtacctcgtcctgctcccagacccaccgattatctct

SEQ ID NO: 697 - DNA, 65 bp, Rattus norvegicus
ctcctcccacatccttactttctgaatgagcacttctaagacttcctgctactgaaatggtggtg

SEQ ID NO: 698 - DNA, 65 bp, Rattus norvegicus
catttgggagtgttacgaaggtggccatgtcggacataccgtgaaggcaattagactggtgtact

SEQ ID NO: 699 - DNA, 65 bp, Rattus norvegicus
agccttaccttacagaaaacccatctgggagaagcaggccacttgcagtacccctgtttctagtt

SEQ ID NO: 700 - DNA, 65 bp, Rattus norvegicus
gctgctgtgtgtggaagggctaaaggtcaagatagacggtgagaccagcttacgtgaatagttgt

SEQ ID NO: 701 - DNA, 65 bp, Rattus norvegicus
acgcagctgaagcttactgactgcttcctagaggtggagcagactgaggagggcaaacattcctg

SEQ ID NO: 702 - DNA, 65 bp, Rattus norvegicus
gagggccgctctgcaggcagtattcctggggagagaagcacagataccactaagacgcacccaat

SEQ ID NO: 703 - DNA, 65 bp, Rattus norvegicus
cctccactgaatgtaggtgaagttctcactcctcctgaagccaatttccccatcttctctttgcc

SEQ ID NO: 704 - DNA, 65 bp, Rattus norvegicus
ttcctcccgagcttacacctcagcctaccacaccatgcaccttgagtggagagaggttagggcag

SEQ ID NO: 705 - DNA, 65 bp, Rattus norvegicus
tcccagtctacccactcgctcaccaccccagtggtttccgtggcaacaccaagtttactcagcca

SEQ ID NO: 706 - DNA, 65 bp, Rattus norvegicus
ctgtgcaccgctgctgtctcactggctgcacccagcaagaccttttgggtctgtgtccccactga

SEQ ID NO: 707 - DNA, 65 bp, Rattus norvegicus
atccccggccatgatcctggagaacatcgagcctgagaccgtgtatgcaggctacgacaattcca

SEQ ID NO: 708 - DNA, 65 bp, Rattus norvegicus
taccatgtccttcgaatgccagatcacagcacattcacagctccccagcatttcaccaatgcatt

SEQ ID NO: 709 - DNA, 65 bp, Rattus norvegicus
tcactggacaagccaatgtcgttagtctttgtaactcggcagatagctggatgattgtgcccaac

SEQ ID NO: 710 - DNA, 65 bp, Rattus norvegicus
gatccaaactcctaaatgtttgcacacatatttctcgatgacaacgatgggaaatacagcgacag

SEQ ID NO: 711 - DNA, 65 bp, Rattus norvegicus
caaggaggaggagattgctcgtatcgcccggaggctggacaaaatggtgaccaggaagaacgcgg

SEQ ID NO: 712 - DNA, 65 bp, Rattus norvegicus
ccaagtcctcatcctactttgctactttcctgactgtaggggcaaaactgcttcctgtcctgttc

SEQ ID NO: 713 - DNA, 65 bp, Rattus norvegicus
aagagtcttctcttgagtttgcacccaccaggcaactcgcatcaccacccctcagagcttcggca

SEQ ID NO: 714 - DNA, 65 bp, Rattus norvegicus
ccacaggagtttgtcaagctccaggtgacccacgaggagttcctctgtatgaaagtcttacttct

SEQ ID NO: 715 - DNA, 65 bp, Rattus norvegicus
gcggtcagacgaattagtccgccatcacaacatgcaccagagaaacatgaccaaactccagctgg

SEQ ID NO: 716 - DNA, 65 bp, Rattus norvegicus
tcaacccaactactcttggtgtccaagccaccaggacagagcttcactgcctcaaacagctgacc

SEQ ID NO: 717 - DNA, 65 bp, Rattus norvegicus
ggaccctgaggattgcttgactccacaagtttgaagagcaaatgttatggagctttccatctcag

SEQ ID NO: 718 - DNA, 65 bp, Rattus norvegicus
gaaggatatgccagggaatctggctaaagcctaatacaggagcatcttcatcccagtgttgatgc

SEQ ID NO: 719 - DNA, 65 bp, Rattus norvegicus
cagcaaacaggcagaagactacctgtactacaagcacgtgaatggggatgtgccctacaataacc

SEQ ID NO: 720 - DNA, 65 bp, Rattus norvegicus
ggatgtggaactgctcttgctcaccctcgctatttacagcaccacattaaataccaacatttgcg

SEQ ID NO: 721 - DNA, 65 bp, Rattus norvegicus
atatccaggggatgacaggaactcccatggtggctgctagtccggagagacatgatggtggttta

SEQ ID NO: 722 - DNA, 65 bp, Rattus norvegicus
ggcgtgagggttggactaggaaaatgcatagttcatgctttagtgtcaggacctagaacagtgag

SEQ ID NO: 723 - DNA, 65 bp, Rattus norvegicus
ccgtgacctacttgggaaagttcgctttcgactctccttccaactggtgccaggacaacatcatt

SEQ ID NO: 724 - DNA, 65 bp, Rattus norvegicus
gacccttgggttacatccttagagcctgcttatttggtctgtctgaatgtggtcattgtcatggg

SEQ ID NO: 725 - DNA, 65 bp, Rattus norvegicus
ccctgcctgtctctgtcccctcttcaaggacatgagccatccaaagaaacactatgttctctctg

SEQ ID NO: 726 - DNA, 65 bp, Rattus norvegicus
aaagaaaccctcccaaaacagggaaagttggagagtatggctacgtgggtcaacccaacgcagtg

SEQ ID NO: 727 - DNA, 65 bp, Rattus norvegicus
aggacagtggtgttgacgagtcgatcaacctggaggaagttgaaccccaattgcatcagcagtaa

SEQ ID NO: 728 - DNA, 65 bp, Rattus norvegicus
gctgcgctgaacagacttggagccatgaatatatttgatcggaagatcaactttgatgccctctt

SEQ ID NO: 729 - DNA, 65 bp, Rattus norvegicus
aacttccgagacctgtaccacatcctggagaatcacaagttcaccaaggagtctcacggcaagct

SEQ ID NO: 730 - DNA, 65 bp, Rattus norvegicus
acgcctgtgaagggaggctgcaagcttttgagtctgacttgagggtgagagcaacaggaagttgg

SEQ ID NO: 731 - DNA, 65 bp, Rattus norvegicus
atggactgacttccagttgggcactgacagtctcactctgccctttctcaggacagaaactactt

SEQ ID NO: 732 - DNA, 65 bp, Rattus norvegicus
atttggcagcattggtcaaccacctagggcttcccagtagccatgacagaaggccatccaggaat

SEQ ID NO: 733 - DNA, 65 bp, Rattus norvegicus
cctatggctcgggctagtgatggtcctttccaggacacatggaagctggggccttgtagggacca

SEQ ID NO: 734 - DNA, 65 bp, Rattus norvegicus
ccccttttagagagttggctaaatgatgcagagaacctctcatctgattctacagcatcattgcc

SEQ ID NO: 735 - DNA, 65 bp, Rattus norvegicus
attctctcctagaggcaagggacctgggctcgttcagtatccgctgctcattcgctcacatctgg

SEQ ID NO: 736 - DNA, 65 bp, Rattus norvegicus
agataagtgaggagagtggggagtgagcttgctggctagtccagtacctgagagacgctttgtgt

SEQ ID NO: 737 - DNA, 65 bp, Rattus norvegicus
cagaaacttctccactcagaccccagccacggattccccaaccctcctaacactggcaataaact

SEQ ID NO: 738 - DNA, 65 bp, Rattus norvegicus
tgcttgaaattgatgtcacaagcttcaggcaggtaccctgtctgtcctgtcccagtgctagacag

SEQ ID NO: 739 - DNA, 65 bp, Rattus norvegicus
ataaggccattgaacgactgctggatcgaaatcaggatgagactgaagacacagaattgcagggc

SEQ ID NO: 740 - DNA, 65 bp, Rattus norvegicus
ggatcatgagtgtcctactaccctcggggtgccctagccacgtgtacatacctgttttatctgtt

SEQ ID NO: 741 - DNA, 65 bp, Rattus norvegicus
gtcttggcgtgattccgtcctgcgtgtctgttctgcggaacagtaggcagttgttttccgtccgg

SEQ ID NO: 742 - DNA, 65 bp, Rattus norvegicus
tctccgaactgtatgcagaaccccatcagaccaggccagctgttgccagcaaaccgaaacacacc

SEQ ID NO: 743 - DNA, 65 bp, Rattus norvegicus
ctgggaatagacctggactgagacccaagagctactgagtggaaccacgctctcttagatcagta

SEQ ID NO: 744 - DNA, 65 bp, Rattus norvegicus
agtgtgacaggtcaaagatcacccctccaaacctcatcccaatccccatgtgctctacagacttg

SEQ ID NO: 745 - DNA, 65 bp, Rattus norvegicus
tctggacaaatggcaggacgagggcagctccaattcaggcaactcttcgtcttcatcaagcactt

SEQ ID NO: 746 - DNA, 65 bp, Rattus norvegicus
tacctacagaaaccacaccagaggtgaccaggagcccaagtccttgtaaatccccagatacacag

SEQ ID NO: 747 - DNA, 65 bp, Rattus norvegicus
aggagactgcaacatcccactcccctctcacttccacaccctgcctcaccttctacaacatcatt

SEQ ID NO: 748 - DNA, 65 bp, Rattus norvegicus
ttgaagtctgaaagacgtcggcagaggaccctttagacggcacaactgttactctagggagttga

SEQ ID NO: 749 - DNA, 65 bp, Rattus norvegicus
ggctgctacccgcagacagccacttcagaggcaggcaagaaaaggcacgctatggatcgttttct

SEQ ID NO: 750 - DNA, 65 bp, Rattus norvegicus
tatatccaggaactacgtcagagcaaccaccggctgtctgaagagctgcaggggttagatcagtt

SEQ ID NO: 751 - DNA, 65 bp, Rattus norvegicus
caagaaggtcatcgcaacgaaggttttgggaacagtaaaatggttcaatgtaaggaacggatacg

SEQ ID NO: 752 - DNA, 65 bp, Rattus norvegicus
tcagttcaacagtgatgttggttgcccctaacccctttgtaccaaggccatgcaggctaggagtc

SEQ ID NO: 753 - DNA, 65 bp, Rattus norvegicus
ccttgcttgtgttctgtaagctctgtcaccgagttgtatccccacctgaaagcagtgacttttgc

SEQ ID NO: 754 - DNA, 65 bp, Rattus norvegicus
gtacttataggtaaaccttgcaaatatgtaacctgtgttgcgcaaatgccgcatcaatttgagtg

SEQ ID NO: 755 - DNA, 65 bp, Rattus norvegicus
tctgcagcagaccagagatggcaacgtgttccttgttcccaagagcaagaagccagatacaaaga

SEQ ID NO: 756 - DNA, 65 bp, Rattus norvegicus
ctaaggtgactttctgaaactccccttgtgttccttctgtgaagaagccctgttctcgttgccct

SEQ ID NO: 757 - DNA, 65 bp, Rattus norvegicus
atctgaaaatgacatctttctcaaaacgtttcaccgagcgtcgctcctggacagagccgcagggg

SEQ ID NO: 758 - DNA, 65 bp, Rattus norvegicus
tctgtgaaggccccaaagctgttgcagctcctcgacctgatcggttggttaatcgcttaaagaac

SEQ ID NO: 759 - DNA, 65 bp, Rattus norvegicus
tggctgtgttctttcacgcgatggtgacttcggagagatcagagggagatgtgcaatagcatgag

SEQ ID NO: 760 - DNA, 65 bp, Rattus norvegicus
ccggcattcctcccacttgggggactagattgaccttagcccacaagcacagttgctacctggaa

SEQ ID NO: 761 - DNA, 65 bp, Rattus norvegicus
atcagaaagaaaggaattcatacggggatgtttgaacaatggaaacaaagattcatgtgtaaagc

SEQ ID NO: 762 - DNA, 65 bp, Rattus norvegicus
ctcagaggagccggcagcagttgtgggtggacgtagccaagatcagaggtaaccccaggaactca

SEQ ID NO: 763 - DNA, 65 bp, Rattus norvegicus
caatagtccccactcatgcattcctactgcttggagtagctgtgctggtgaatactactgtagga

SEQ ID NO: 764 - DNA, 65 bp, Rattus norvegicus
caagaagcgcctgaccctcagcgagatctgcgagttcatcagcggtcgcttcccttactaccggg

SEQ ID NO: 765 - DNA, 65 bp, Rattus norvegicus
agtagtgtgtgtgcagacaatcagtgaaacccgattattttctccatctggagacacagaggccg

SEQ ID NO: 766 - DNA, 65 bp, Rattus norvegicus
cggtgggatatggcatgtaccatctatcctaaagaagaccagatggacacactctaggatggatg

SEQ ID NO: 767 - DNA, 65 bp, Rattus norvegicus
tcctcccagctgttcgccaaggtgctccagaagatgacagacctcaggcagattgtcacagagca

SEQ ID NO: 768 - DNA, 65 bp, Rattus norvegicus
ctggagaaagagtttgagaggacccattatccagatgtgtttgcccgggaaagactagcagccaa

SEQ ID NO: 769 - DNA, 65 bp, Rattus norvegicus; identical to SEQ ID NO: 1

SEQ ID NO: 770 - DNA, 65 bp, Rattus norvegicus
tgtcagcattacggtgttcgcacttgtgagggctgcaaaggtttctttaagcgcacggtgcaaaa

SEQ ID NO: 771 - DNA, 65 bp, Rattus norvegicus
cttgtaaaggaccttgtggaagaccagaactgaaatccatgggcccttctgtcatagcccctgga

SEQ ID NO: 772 - DNA, 65 bp, Rattus norvegicus
ccatcgttcgagccttacctgctgccggaactgaccagatatgactgtgaggtgaacgtgcccga

SEQ ID NO: 773 - DNA, 65 bp, Rattus norvegicus
tataaagcaggctgtgagaggaattcaggtctgaacagctgctctagtggtgactcatgcttaaa

SEQ ID NO: 774 - DNA, 65 bp, Rattus norvegicus
ctcattaccaccaacatggtttcctcacagagcacagccactgactcaaacccactgaagaggaa

SEQ ID NO: 775 - DNA, 65 bp, Rattus norvegicus
gccagagaggaaacttcctttctcaccagaaacaacatgctgaagagagacccagtgagtctaag

SEQ ID NO: 776 - DNA, 65 bp, Rattus norvegicus
gcaatcaaaggaaagagttcatcttgagttgtggatcgactagcaggaggaattgtcacgttaag

SEQ ID NO: 777 - DNA, 65 bp, Rattus norvegicus
aggcacattacaacatcagcccacatctacagacagcccaagcctccggcctctaccatgaagat

SEQ ID NO: 778 - DNA, 65 bp, Rattus norvegicus
cccttacctgggtagggatgggagcatgaggctgtgcttcagggcagaattcctccagactttat

SEQ ID NO: 779 - DNA, 65 bp, Rattus norvegicus
gagtagtttctctggtggatgccttgtttctgaaactgctacgtacaacctatcctgtgtataac

SEQ ID NO: 780 - DNA, 65 bp, Rattus norvegicus
ctacttaaggggctgagtctggcagttcttggaagagtagccaagcctctgtacatataattatc

SEQ ID NO: 781 - DNA, 65 bp, Rattus norvegicus
tgttaaagccagaagagttgattatgagtgggcacagcgaccctgggaagctgggccaaaacatt

SEQ ID NO: 782 - DNA, 65 bp, Rattus norvegicus
cagtagggaccataactgctgtttacattcagtgggtatggctttcgtgggatacacagctaggg

SEQ ID NO: 783 - DNA, 65 bp, Rattus norvegicus
actccttgtcggtcaaaagtgaagcactgagcttgcccactgtcagagactggaccttagaagat

SEQ ID NO: 784 - DNA, 65 bp, Rattus norvegicus
ctgcccgtttcctggctgcggcaaggttttcgcacgttcagagaacctcaagatccacaaaagga

SEQ ID NO: 785 - DNA, 65 bp, Rattus norvegicus
tcatctctgtcggtcaatggtggagccagctacgggaatcacttgtctcaccctcctgaaatgaa

SEQ ID NO: 786 - DNA, 65 bp, Rattus norvegicus
aactggaaatgaggtgaggtgactgcctggatttctgtgtcctcctcggtactgcaagaaaccca

SEQ ID NO: 787 - DNA, 65 bp, Rattus norvegicus
attatgtcaccagtcgatcctggagtggctcaacccaacagtcgggtcctgggccaaaatgtact

SEQ ID NO: 788 - DNA, 65 bp, Rattus norvegicus
ccacaccagtgggagaaactgtgacaatgactggggccttgtctgctaaggaagattgagagatt

SEQ ID NO: 789 - DNA, 65 bp, Rattus norvegicus
cagatgccttgctgctgcagccctccccaatctgtccactgaagacatgaagtccttttgaatgc

SEQ ID NO: 790 - DNA, 65 bp, Rattus norvegicus
acatgaagaacaacatagctctttggaccctcagtcctgccagtgaccagatacttcaccgagcg

SEQ ID NO: 791 - DNA, 65 bp, Rattus norvegicus
tactaaagcagggttggtgactgtgctcatctgcaccttgggaccctctggaggttgtgtctaca

SEQ ID NO: 792 - DNA, 65 bp, Rattus norvegicus
ttattcgtgacccatgagcccgtgaccgtgtccgtgaatcagtgagtctgtggcctgtgccctcc

SEQ ID NO: 793 - DNA, 65 bp, Rattus norvegicus
gacactaaaccccttccatgtacagtctacctttgcctcgcaccctttgctccagcgatatctta

SEQ ID NO: 794 - DNA, 65 bp, Rattus norvegicus
accttcaccacgtatcaactgcacgagctggaacgtgcctttgagaagtcccactaccccgacgt

SEQ ID NO: 795 - DNA, 65 bp, Rattus norvegicus
tcagccaacatcagcacaaccaagtagccagcctgaggtctttcaagaaatgctgtccatgctgg

SEQ ID NO: 796 - DNA, 65 bp, Rattus norvegicus
gtattgcccgtcttgccaacagtggcatcaacgtcatgcaggtgacagagctgcagtccattaat

SEQ ID NO: 797 - DNA, 65 bp, Rattus norvegicus
cagcaatctggaacgggactattccccagaatgcaaagctctactggaaagcatcaagcaggcag

SEQ ID NO: 798 - DNA, 65 bp, Rattus norvegicus
gcaaacacgggtgcttgtggctgctttcagtttggttttctgagaaaataggacaggatttggtt

SEQ ID NO: 799 - DNA, 65 bp, Rattus norvegicus
tgacttggacatggccctgagtcagtacagccagcctgcacatctccccgaagaaaagccttttc

SEQ ID NO: 800 - DNA, 65 bp, Rattus norvegicus
gtcgcatgaagtacaagaaggaccagaaggccaagggcatcctgcattctcccgcaggccagtcc

SEQ ID NO: 801 - DNA, 65 bp, Rattus norvegicus
tatctgtggcaatttcactgaacaactttgaagccccttaaaatccaccgcattgccaaaataac

SEQ ID NO: 802 - DNA, 65 bp, Rattus norvegicus
tctgtgatgagctgagctgtactccctagctctgagaagcttttagctctggggtatccaagcct

SEQ ID NO: 803 - DNA, 65 bp, Rattus norvegicus
gaactctgaagccggaaaacttccctgtggatgcactctgccagcaaagagagcttgcttgtaaa

SEQ ID NO: 804 - DNA, 65 bp, Rattus norvegicus
gccaaactgtcctccaagagtcatttcgtgatgtgacaggagttccaggaaccaagaaccatcca

SEQ ID NO: 805 - DNA, 65 bp, Rattus norvegicus
cagtgctagctgtcaaccaagctgtgtgtaaaagcagctctctagctgctcctgtaccatgtgta

SEQ ID NO: 806 - DNA, 65 bp, Rattus norvegicus
ccagcaccaacgggaacagcctgcaagcgatttctggcatgattgtccctcccatgtgaaagaat

SEQ ID NO: 807 - DNA, 65 bp, Rattus norvegicus
gccttgtcaagtgactttgcacctctccagagggtcccgatccagaattgtacttcacaggtata

SEQ ID NO: 808 - DNA, 65 bp, Rattus norvegicus
ttcccttgacttctgccctcgatccgttgccaactttgattgaatgggtgctgcggatgtgatta

SEQ ID NO: 809 - DNA, 65 bp, Rattus norvegicus
ttcggtgagtatgacgactatgggaagtcacacccgaattccatgcaagacgtgggacatcctga

SEQ ID NO: 810 - DNA, 65 bp, Rattus norvegicus
agagcagtgccgagtgaccctggctcccaggcaccttcaccaccagcagggtgaccttaagaatt

SEQ ID NO: 811 - DNA, 65 bp, Rattus norvegicus
gggaagggcttcagtcagacctcacacttccgattaacagtctgatccaatgtaaacacagcagg

SEQ ID NO: 812 - DNA, 65 bp, Rattus norvegicus
ctataaaggaggtgacaaagacacggtttgagaggtggcttgttgggacaagagggccttaatgt

SEQ ID NO: 813 - DNA, 65 bp, Rattus norvegicus
gaaccactgactgaagcagaagccagtgaagccacactgttctacttatgtgaactcgctcctgc

SEQ ID NO: 814 - DNA, 65 bp, Rattus norvegicus
cctgtgcataagaagtagcctggagtggccatggtagcacctgactttcacctttgtactgtgaa

SEQ ID NO: 815 - DNA, 65 bp, Rattus norvegicus
ttgcctgaaggttggacgcgaaagcttaaacagaggaagtctggtcgctctgctggaaagtatga

SEQ ID NO: 816 - DNA, 65 bp, Rattus norvegicus
agaccagaggccaaaaggactagaggccatgagactcccatcagctgcttccggtcctgaaacca

SEQ ID NO: 817 - DNA, 65 bp, Rattus norvegicus
gtgttaatactagtcgtgactttagtgtctctgtgcatagtggcactagtgaagggagtgtgcgt

SEQ ID NO: 818 - DNA, 65 bp, Rattus norvegicus
ggtagtctcagggattctcttagcctcactttcccagttatgaggttgcaagatgcacagcagca

SEQ ID NO: 819 - DNA, 65 bp, Rattus norvegicus
aaagccaccctagaccccactctacaagctagcacaagaacactactgtaactacctactgaata

SEQ ID NO: 820 - DNA, 65 bp, Rattus norvegicus
ctgcgctctttgtcaaatgctatgattctgtgacacaggagacaatcgtccacttatagcggccg

SEQ ID NO: 821 - DNA, 65 bp, Rattus norvegicus
aacgtggcagatgtctgaggaatggtttgattgacgctgaggaggagctctgtgccttttcaacc

SEQ ID NO: 822 - DNA, 65 bp, Rattus norvegicus
gcttggcttggcttagctcctcccctggaggctaaaaacggtagtcatcctaactgcactttgcc

SEQ ID NO: 823 - DNA, 65 bp, Rattus norvegicus
gtaaattacccgcccggccaaaccacattgagaaggtagcagcaagctgagtctatgtttgggtt

SEQ ID NO: 824 - DNA, 65 bp, Rattus norvegicus
ccccacacataccctggacttgcacaagggtcaaagatctgagcaggatacttcatgtaggacat

SEQ ID NO: 825 - DNA, 65 bp, Rattus norvegicus
aagatgtgctctatcccgcccaagaatgagaaactgcaagctgtagaggtggtcatcacccacct

SEQ ID NO: 826 - DNA, 65 bp, Rattus norvegicus
ttgttcagaagcctgctcaggagactgaagagacatcctcgcaagagtccgcagaggaagattag

SEQ ID NO: 827 - DNA, 65 bp, Rattus norvegicus
tatgaaatccatcgcatccagggactgtctgctatgatgccgctgcttggggagatttgcagctg

SEQ ID NO: 828 - DNA, 65 bp, Rattus norvegicus
gggatgacgcagtctctacaggcagggaaactgactcacttgtgactgatctcacatgaactaga

SEQ ID NO: 829 - DNA, 65 bp, Rattus norvegicus
accaagcatgaactgttggcatcacctcctgtctgtctctcccggagtgtacccagcaccatcac

SEQ ID NO: 830 - DNA, 65 bp, Rattus norvegicus
cagacaccggcaaggaggatgccttttccgggacagattggatgttggagaaaatggacctgaaa

SEQ ID NO: 831 - DNA, 65 bp, Rattus norvegicus
tcatcaacaatggctcccctaccatcttgggcaagaggagctatgagcagcacaatggggtagat

SEQ ID NO: 832 - DNA, 65 bp, Rattus norvegicus
agtgaccatgtgggtgaagggatagaggcttggagaagggcacagacactgggtgtgctatggtt

SEQ ID NO: 833 - DNA, 65 bp, Rattus norvegicus
cggacactaaatacgaacttggactttaggagagacttttataagtcggtggttactttgttgct

SEQ ID NO: 834 - DNA, 65 bp, Rattus norvegicus
agctccgtgattgccttagggacaattacccagcctcctgagctgaagtaatgtgtgggacacat

SEQ ID NO: 835 - DNA, 65 bp, Rattus norvegicus
tatcagctggctaaaacatgacgcctgtcattggcttcctcccaccatgttgtgaggatgaggaa

SEQ ID NO: 836 - DNA, 65 bp, Rattus norvegicus
tcagtatgttccacggaagcacctgggtctttggatagctacctcgagggttaccgagcctgtct

SEQ ID NO: 837 - DNA, 65 bp, Rattus norvegicus
agtttgggggaaactatttggggacacccatggtgactgcagggactctatcaatcggtggcctg

SEQ ID NO: 838 - DNA, 65 bp, Rattus norvegicus
ggccaggtacatcgacttcctgtaccaggtcctgcagagcgacgagctggactccaagatggcaa

SEQ ID NO: 839 - DNA, 65 bp, Rattus norvegicus
gacctttctgaacttgatgtgaatgacctggacacagacagctttctgggtggattgaagtggtg

SEQ ID NO: 840 - DNA, 65 bp, Rattus norvegicus
atctctgcgtttgttgcgtcacccgatcctttcacactagggagaccctctccgaatatggagag

SEQ ID NO: 841 - DNA, 65 bp, Rattus norvegicus
tccgagtctatgaaggtggtggcagaatccatgggcattgctcagattcaggaggagacttgcca

SEQ ID NO: 842 - DNA, 65 bp, Rattus norvegicus
tggcaagagcttcaagaggtcatccacactgtccacacatctactcattcactcggatacccggc

SEQ ID NO: 843 - DNA, 65 bp, Rattus norvegicus
tgccatgtcttcatcaccagcaaacaccagggcctggctccctgtcctccgaactcaagccatca

SEQ ID NO: 844 - DNA, 65 bp, Rattus norvegicus
atctccacttccgccgcctccggtgtacaagccctgcttcgtctgccaggacaagtcatcgggct

SEQ ID NO: 845 - DNA, 65 bp, Rattus norvegicus
agaagcctttctcctgctcccactgcaaccgtgcctttgccgaccgctccaacctacgtgcccac

SEQ ID NO: 846 - DNA, 65 bp, Rattus norvegicus
gtgccttctgttttagcactttaagtctatcagtttgttgattctgacattccactttcctagag

SEQ ID NO: 847 - DNA, 65 bp, Rattus norvegicus
tagctctgtagaagacattaaggcaaaaatgcaagcaagtatagaaaaagcgcattgaacattcc

SEQ ID NO: 848 - DNA, 65 bp, Rattus norvegicus
aggacccacctgcacatctcaggcgcaagaggaactggatgcgtccacggctgtgacttttggca

SEQ ID NO: 849 - DNA, 65 bp, Rattus norvegicus
tttgctgacctgggcatgttccctccattttctgagtagcttcaggcaaagccaggcttctactg

SEQ ID NO: 850 - DNA, 65 bp, Rattus norvegicus
cagatcttcatcgaagccaaggcatccaaaatcttcaactgccggatggagtgggagaaggtaga

SEQ ID NO: 851 - DNA, 65 bp, Rattus norvegicus
ttcccccgggactatcagccagtgtggccctccatttccttgtggtactgagtgtccctaagact

SEQ ID NO: 852 - DNA, 65 bp, Rattus norvegicus
gctctgactggcctctttctaggctacggtgatcctgagcatcttttgttacctgctggtagaaa

SEQ ID NO: 853 - DNA, 65 bp, Rattus norvegicus
tgacatgccaacttaccagatccgagctcctactactgctttgccacaaggtgtggtgatggctg

SEQ ID NO: 854 - DNA, 65 bp, Rattus norvegicus
cgccatgcagaagaagtctggctatcatactgctgataaagatgacagctcagaagacctttccg

SEQ ID NO: 855 - DNA, 65 bp, Rattus norvegicus
agctctgctctgaccacagaggagctgaaatacgctgacatccgcaacattggggcgatgattgc

SEQ ID NO: 856 - DNA, 65 bp, Rattus norvegicus
ccctgcactctaacttaggcctgtagcaccactttcctttggtccttttgttccttgcccctgtc

SEQ ID NO: 857 - DNA, 65 bp, Rattus norvegicus
ttctcccgctatgatcaagagttctgtttctcacacaacgggaaccatgaacctctggcgctcct

SEQ ID NO: 858 - DNA, 65 bp, Rattus norvegicus
gtagctgtaacgtagcttcctgatgcctgactaattgaggtgttaattctgacttgagaatcttt

SEQ ID NO: 859 - DNA, 65 bp, Rattus norvegicus
cttaaatccggctttgagaaggtcaagggtgaaggatcagaaggtgttccagaactgtgagctca

SEQ ID NO: 860 - DNA, 65 bp, Rattus norvegicus
cagagactccatactggaggacagctttgccagtgcttacagtgtgggagaacctttacacgtgt

SEQ ID NO: 861 - DNA, 65 bp, Rattus norvegicus
tctctctctaccagcatgaggaaactatccagtccaggaaccacttcctcccagcagcaggcttg

SEQ ID NO: 862 - DNA, 65 bp, Rattus norvegicus
tgtccaccaggcttaccaaatgagctcctttgaacagcccttccgtgctccataccatggatcca

SEQ ID NO: 863 - DNA, 65 bp, Rattus norvegicus
agacttgtttcttgagcatgcgcacaacctcgcagacaatgtgcagcccatcagcacggaaacta

SEQ ID NO: 864 - DNA, 65 bp, Rattus norvegicus
aacccctccaaagaaacattccagcggaggacaaccttacggaaaagcgtctctctccgaaagac

SEQ ID NO: 865 - DNA, 65 bp, Rattus norvegicus; identical to SEQ ID NO: 1

SEQ ID NO: 866 - DNA, 65 bp, Rattus norvegicus
caccagcaggagcacctgcgcgagcagacggcgctgatgatgcagagcttcggagcctacagcct

SEQ ID NO: 867 - DNA, 65 bp, Rattus norvegicus
gtttagaaagcctgtcaccagagctgctgtaggctgaatgtatgtctgtgtcgtaaatgccagag

SEQ ID NO: 868 - DNA, 65 bp, Rattus norvegicus
gtgcccagagatgagaacgacccaggaaaaggcaattattggatgctggacccaaactgtgagaa

SEQ ID NO: 869 - DNA, 65 bp, Rattus norvegicus
cgtcgtctcacgctggcagccatctaccgcttcatcaccgagcgcttcgccttctaccgcgacag

SEQ ID NO: 870 - DNA, 65 bp, Rattus norvegicus
atggaagtacagtgacagctgacccaatcactctgtcaatcaaaccactcaggctagtttgtact

SEQ ID NO: 871 - DNA, 65 bp, Rattus norvegicus
ctgggtgccctgcttgtcttggagcaagatggggagtaagatgtccttttgcaacaccgagattt

SEQ ID NO: 872 - DNA, 65 bp, Rattus norvegicus
aaccgggaggatggctacctctcagggctgaacaacctcatcgacatcctgacagaaatgtccca

SEQ ID NO: 873 - DNA, 65 bp, Rattus norvegicus
cggccgcagtgactccatcgacactgtctctgtgccgtatgttttccggtactttgtagctgagc

SEQ ID NO: 874 - DNA, 65 bp, Rattus norvegicus
ttgcctctgactcttagggtatggggatctggtggggaggacctcacttcattagaggaaaactt

SEQ ID NO: 875 - DNA, 65 bp, Rattus norvegicus
ctataaggtcgctctggatagggaagtgtggtccagtacagcgaaagtcggaccaggtaaaacat

SEQ ID NO: 876 - DNA, 65 bp, Rattus norvegicus
ggaaccgtaatcctgtcacctgaacacatcatgcttaagattcagttgggagcatatcagacgct

SEQ ID NO: 877 - DNA, 65 bp, Rattus norvegicus
tgaagtccaagtacacagacatcactgccatgtttgaggagactcaggtgcctgcactgctggaa

SEQ ID NO: 878 - DNA, 65 bp, Rattus norvegicus
tcccatgtatggctctggctcccgaacacccatgtatggctcccagacacctctgcaggatggta

SEQ ID NO: 879 - DNA, 65 bp, Rattus norvegicus
ggcataatggttatgaaagccgcagtagatgatgacgcttcgggatgggagctcaatgtccctga

SEQ ID NO: 880 - DNA, 65 bp, Rattus norvegicus
tgctgtagcgcccaatgcctgccacaggcttgtacagtgtctgtttactgtgactcaatggattt

SEQ ID NO: 881 - DNA, 65 bp, Rattus norvegicus
ggtcggctcaggtagcactggccacatgggactgatacagcctgaaccctggcctctgatcttat

SEQ ID NO: 882 - DNA, 65 bp, Rattus norvegicus
aacaagagattgctaatgtagtgtgcctgcaccaagctgggaacctaatgcccaagtctgtgccc

SEQ ID NO: 883 - DNA, 65 bp, Rattus norvegicus
tattatggcaatgactctgacttcgaggtggtgtaccagcaatgccttaggtgctgcaaggcctt

SEQ ID NO: 884 - DNA, 65 bp, Rattus norvegicus
ttatgtcatggtccctgatgtgtgtcttaggaagaaggcttttccaggggttcattgggcggttg

SEQ ID NO: 885 - DNA, 65 bp, Rattus norvegicus
ggaaaatggttgtggatttctgagcatgtgcagactggtctagctagttcaggaactggtgcatg

SEQ ID NO: 886 - DNA, 65 bp, Rattus norvegicus
atggcccgtatccatacactctgaagttgtgcttctccaccgcacagcacgcctcctaattagat

SEQ ID NO: 887 - DNA, 65 bp, Rattus norvegicus
cagcctgtttatatccagtattccaatcaccgagaacttaagactgacaatctgcccaatcaggc

SEQ ID NO: 888 - DNA, 65 bp, Rattus norvegicus
gcctcagcagccaacggaaatgatagcaagaagttcaaaggtgataacaggagcacaggagttcc

SEQ ID NO: 889 - DNA, 65 bp, Rattus norvegicus
ccctacccattgatcatttcaagaaacctctggttactgtgcatcacccagacaagacgtgctcc

SEQ ID NO: 890 - DNA, 65 bp, Rattus norvegicus
ggatccgagagctcttttgtatcggccggtggaatctttggatgttcgagctgtattgccgcgac

SEQ ID NO: 891 - DNA, 65 bp, Rattus norvegicus
tggagatgccagacggttggttctgaggagagattttgcaacgcaatggagcgaggaagggatcg

SEQ ID NO: 892 - DNA, 65 bp, Rattus norvegicus
ccccagggtcaggttaccacagacctgtttgtttgttatgctgtttatggagtcttactggagcg

SEQ ID NO: 893 - DNA, 65 bp, Rattus norvegicus
gtgggatttggatggggttgggctggatttctttgtagatgtggaccaccaaggggttgttgaaa

SEQ ID NO: 894 - DNA, 65 bp, Rattus norvegicus
gaagtgacagggaagctacaggttacaacagatttgtgaactcagccaagcacagtggtggcagg

SEQ ID NO: 895 - DNA, 65 bp, Rattus norvegicus
atgacgctaaggatgccatgatggctatgaatgggaagtctgtggatgggaggcagatccgagtt

SEQ ID NO: 896 - DNA, 65 bp, Rattus norvegicus
tcctgttttaaggacgcgaggcgtaggaacggggtctccaccactgacccctccactcacttgag

SEQ ID NO: 897 - DNA, 65 bp, Rattus norvegicus
ccaagaaagctgcccgtgactacgacttagccaagaactacttcaagaaaagcctgagggacatg

SEQ ID NO: 898 - DNA, 65 bp, Rattus norvegicus
ccacccagtcaaagctgcgccccaataaagtggagccctggagaggccgccataaacatctgcct

SEQ ID NO: 899 - DNA, 65 bp, Rattus norvegicus
atcagcagagtggttatgggaaagtatccagacgaggtggtcatcaaaatagctacaaaccatac

SEQ ID NO: 900 - DNA, 65 bp, Rattus norvegicus
tcaggcagtccctatggtggtggctatggatctggaggtggaagtggtggatatggtagcagaag

SEQ ID NO: 901 - DNA, 65 bp, Rattus norvegicus
ggggagcaatactacaagagtaagcatctgagtatgtgccagaagcctggtgggcaatgagcttt

SEQ ID NO: 902 - DNA, 65 bp, Rattus norvegicus
gtttctactaagtctctaagttgctagactccttggctattggaccagagtgagatgcccggaga

SEQ ID NO: 903 - DNA, 65 bp, Rattus norvegicus
aacagaagtctcctcgtcacctttgtggactcttggctaagtggtgtcatcatcagggtctccct

SEQ ID NO: 904 - DNA, 65 bp, Rattus norvegicus
taatggcagtgcgttgatagacgatgcacgcagatggatgagaggctacaaggagactttctctg

SEQ ID NO: 905 - DNA, 65 bp, Rattus norvegicus
gatcaaggtggccggacattgtgtggtgtaatgaggattggcttggttgcaaaaggcttgctgat

SEQ ID NO: 906 - DNA, 65 bp, Rattus norvegicus
gaggtctccgccagtcaagaagccctcaaaagcattttaccatggatatagaagacgaagagaat

SEQ ID NO: 907 - DNA, 65 bp, Rattus norvegicus
aaccttctgcacctctgcctccaacttgtctcgggagattgagtctgcacatcaccagttgccat

SEQ ID NO: 908 - DNA, 65 bp, Rattus norvegicus
tagttgattggcattcttaatgagtgagtgttcctccttgacagctgagagggccttggacacca

SEQ ID NO: 909 - DNA, 65 bp, Rattus norvegicus
ctagatcagtgccactatacatatggaggagtgtagctttgtgctgactgctcagggactcagca

SEQ ID NO: 910 - DNA, 65 bp, Rattus norvegicus
cagtctctatgttctggggctacagagctgactgacgtcaccggattcaaaccaatcaactgtga

SEQ ID NO: 911 - DNA, 65 bp, Rattus norvegicus
atgtctacggaaagcccacctggcatctgatgagcagttggaacagttttcctcagttgcatgca

SEQ ID NO: 912 - DNA, 65 bp, Rattus norvegicus
acaacctcaactcacgtttttcacgattgctcttcaaagctgccattaccaaaggctaccacccc

SEQ ID NO: 913 - DNA, 65 bp, Rattus norvegicus
ccaggcaatgctggcccagtgatcatgtctcttgaggagaagatggaggctgatgcccgttccat

SEQ ID NO: 914 - DNA, 65 bp, Rattus norvegicus
aaatcacagatgatcaacaagaatctctgaacaaatggaagtcaaaaggaggtcatgcagcccgc

SEQ ID NO: 915 - DNA, 65 bp, Rattus norvegicus
tttacatgactccaacctacagatgactgtcttgatcagctgtcaccttccatggtcactgaaag

SEQ ID NO: 916 - DNA, 65 bp, Rattus norvegicus
ccatcttcctggaaatggatctctgttcttcctctggagctgcacatgcccgagttcattcaaga

SEQ ID NO: 917 - DNA, 65 bp, Rattus norvegicus
agttctggaagatggtggcattgagcacctccatgctgcctaaggacaagccacgctacctgatg

SEQ ID NO: 918 - DNA, 65 bp, Rattus norvegicus
acatcactctcctgctccaaagcctccctagtgctgtcacccacaagatagacacagggacatgt

SEQ ID NO: 919 - DNA, 65 bp, Rattus norvegicus
cgtcgccatgcctcggaaaattgaggaaatcaaggactttctactcacagcccggcggaaggatg

SEQ ID NO: 920 - DNA, 65 bp, Rattus norvegicus
cctccttcatgtcagctgttttcacatagtggctctaacacctcaagcgtttttaagggagtggc

SEQ ID NO: 921 - DNA, 65 bp, Rattus norvegicus
caaattccttgctgcaggaacccacttaggtggcaccaaccttgactttcagatggagcagtaca

SEQ ID NO: 922 - DNA, 65 bp, Rattus norvegicus
tggcaaaacaactggtgatgagacaggtgctaaggttgaacgagctgatggctatgaaccaccag

SEQ ID NO: 923 - DNA, 65 bp, Rattus norvegicus
tggagatgggatcttgtgtaacacctacatcgatagctacaaaggcactgtggactgcgtccagg

SEQ ID NO: 924 - DNA, 65 bp, Rattus norvegicus
ccatagtaccaaacgattccctggctatgactctgaaagcaaggagttcaatgcagaggtgcacc

SEQ ID NO: 925 - DNA, 65 bp, Rattus norvegicus
ctaaaggtcagaagggtcagaagaccccggcccagaaggcacctgctccaaaggcagctggcaag

SEQ ID NO: 926 - DNA, 65 bp, Rattus norvegicus
cacccttgactgcactcaccctgtagaagatggaatcatggatgctgccaattttgagcagttcc

SEQ ID NO: 927 - DNA, 65 bp, Rattus norvegicus
gaaaaggcaaaggctaaagaactcgccactaagctgggttaaatgtacacttaagttttctgtac

SEQ ID NO: 928 - DNA, 65 bp, Rattus norvegicus
cgtggatatcccccacatggacatcgaggcgctcaagaagcttaacaagaacaagaagttggtca

SEQ ID NO: 929 - DNA, 65 bp, Rattus norvegicus
tttgccatgaaggagatgggaactccagatgtgcgcatagacaccaggctcaataaagccgtctg

SEQ ID NO: 930 - DNA, 65 bp, Rattus norvegicus
tcgtgccaaattccgaagcaaccttcctgcaaaggccattggacacagaatccgtgtgatgctgt

SEQ ID NO: 931 - DNA, 65 bp, Rattus norvegicus
gcacgagggtgacgacctccctacgagaacatgcctctcgcaaaggatctccttcatccttctcc

SEQ ID NO: 932 - DNA, 65 bp, Rattus norvegicus
aaggtcgggatcgtcggaaaatacgggacccgctatggtgcctccctccggaaaatggtgaagaa

SEQ ID NO: 933 - DNA, 65 bp, Rattus norvegicus
gctgaagaccaagaagcagcagcggaaggagcggctgtacccactgcgcaagtacgcagtcaagg

SEQ ID NO: 934 - DNA, 65 bp, Rattus norvegicus
gtcgggccaagaggcgaatgcagtacaaccgacgctttgtcaatgttgtgcccacctttggcaag

SEQ ID NO: 935 - DNA, 65 bp, Rattus norvegicus
cgcagctgctgcactggcagccaaatcggagaagattgttccagagaagggggctggagacaaaa

SEQ ID NO: 936 - DNA, 65 bp, Rattus norvegicus
acaagatccctgactggttcttgaacagacagaaggacgtgaaggatgggaagtatagccaggtt

SEQ ID NO: 937 - DNA, 65 bp, Rattus norvegicus
cagccatggcgcccagccggaatggcatgatcctgaagccccacttccacaaggactggcagcag

SEQ ID NO: 938 - DNA, 65 bp, Rattus norvegicus
tcctaagggtgcaacctacggcaagcctgtccaccacggtgttaaccagctgaagtttgcccgaa

SEQ ID NO: 939 - DNA, 65 bp, Rattus norvegicus
gatttctggaacataaggaacatgcagatgctcagcctcctacgacagtaaatccactgctttac

SEQ ID NO: 940 - DNA, 65 bp, Rattus norvegicus
ggctgagcttccagaagaaatagatatctccacatacattgagcagagccggtaaccatgtgtgt

SEQ ID NO: 941 - DNA, 65 bp, Rattus norvegicus
gccctcaacagagttcctctgcgtaggacacaccagaagtttgtcatcgccacctctacaaaagt

SEQ ID NO: 942 - DNA, 65 bp, Rattus norvegicus
ctaccgccgtagcgtgcccacgtggctgaagttgacgtctgacgacgtgaaggaacaaatttaca

SEQ ID NO: 943 - DNA, 65 bp, Rattus norvegicus
cagattggcgacattgtcactgttggagagtgcaggcctctgagcaagactgttcgattcaatgt

SEQ ID NO: 944 - DNA, 65 bp, Rattus norvegicus
ctccaggtcactcagcctacggttgggatgaatttcaaaacaccacgtggagctgtttaatccat

SEQ ID NO: 945 - DNA, 65 bp, Rattus norvegicus
gcagtgggtgaaatggtctctaggagacatgctggaggagtatttgtactcaacacaacaagcct

SEQ ID NO: 946 - DNA, 65 bp, Rattus norvegicus
gtacgaattgtcaagcatgcctttgagatcatccacctgctcactggtgagaaccctctgcaggt

SEQ ID NO: 947 - DNA, 65 bp, Rattus norvegicus
agatggctatgtgctcgaaggcaaggagctggagttctatctgcggaagatcaaagcccggaaag

SEQ ID NO: 948 - DNA, 65 bp, Rattus norvegicus
tctgctgagacgacttgttcgaattggggtgctggatgagggcaagatgaagctggattacattc

SEQ ID NO: 949 - DNA, 65 bp, Rattus norvegicus
gtaagatgtgcgggtttctgtgtctttggaacagtgggaatcgatgtctctggttaaggccgctg

SEQ ID NO: 950 - DNA, 65 bp, Rattus norvegicus
ctgggtggctttgtccattatggtgaggtgaccaatgacttcatcatgctcaaaggctgtgtggt

SEQ ID NO: 951 - DNA, 65 bp, Rattus norvegicus
tttggcggtggtaaccaccagcacattggcaagccttccactatccgaagagatgccccagctgg

SEQ ID NO: 952 - DNA, 65 bp, Rattus norvegicus
ccggagggttcggatgaggacaggtgttgcttgttctgtctctcaagcccagaaggatgagttaa

SEQ ID NO: 953 - DNA, 65 bp, Rattus norvegicus
catagggagttctcagttgtgctaggttacagctctaggatgtcttccactttgtccaggaccag

SEQ ID NO: 954 - DNA, 65 bp, Rattus norvegicus
aagccggaggtcgtgaagacccaccttagggacatgatcattctgcccgagatggtcggcagcat

SEQ ID NO: 955 - DNA, 65 bp, Rattus norvegicus
atgacaccagccgctctatcatccgaaacgtcaaaggccctgttcgagagggtgatgtgctcacc

SEQ ID NO: 956 - DNA, 65 bp, Rattus norvegicus
aagccttagacaagcgccaagcccatctctgcgtgcttgcatccaactgtgatgagcccatgtat

SEQ ID NO: 957 - DNA, 65 bp, Rattus norvegicus
aagacaaggagtggatccccgttaccaagctgggccgcctggttaaggacatgaagatcaagtcc

SEQ ID NO: 958 - DNA, 65 bp, Rattus norvegicus
tctgggaagctccgaggacagagggccaagtccatgaagtttgtggatggtctgatgattcacag

SEQ ID NO: 959 - DNA, 65 bp, Rattus norvegicus
aacaagcggattctcatggagcacatccacaaactgaaggcagacaaggcccgcaagaagctact

SEQ ID NO: 960 - DNA, 65 bp, Rattus norvegicus
ggtgtctgggcttcttcttgtttggctttcttgaaaccactggcaagacttgggtgaaagttatg

SEQ ID NO: 961 - DNA, 65 bp, Rattus norvegicus; identical to SEQ ID NO: 1

SEQ ID NO: 962 - DNA, 65 bp, Rattus norvegicus
acaccatcgctgtgatccttctgaactaccaatcagccttaccccatgtgcagtcatcaggaagt

SEQ ID NO: 963 - DNA, 65 bp, Rattus norvegicus
tggaaaggcctcaggattacagtgaaactgaccatccagaacagacaggcccagattgaggtggt

SEQ ID NO: 964 - DNA, 65 bp, Rattus norvegicus
gaaggttgaacaagtgtggagttataagccctagatttgatgttcaactcaaagacctagagaag

SEQ ID NO: 965 - DNA, 65 bp, Rattus norvegicus
ccatcccctctgacagcactcgaaggaagggtggtcgtcggggtcgccgtctgtgaacaggactt

SEQ ID NO: 966 - DNA, 65 bp, Rattus norvegicus
ggggccattcgcaggatgggcgagtcagatgattctattctccgattggctaaggctgatggaat

SEQ ID NO: 967 - DNA, 65 bp, Rattus norvegicus
agccaaaggagtagttctacggtgacttgatgttctgctgtgatatgcaaatttctgagggtaaa

SEQ ID NO: 968 - DNA, 65 bp, Rattus norvegicus
aaaaaggagaaacaacggtcgtgccaaaaagggccgcggccatgtgcaaccaattcgctgcacga

SEQ ID NO: 969 - DNA, 65 bp, Rattus norvegicus
ctctgacagcaggttctgggccacagaccctagtgagcacagtggttctgacaagcccaaataaa

SEQ ID NO: 970 - DNA, 65 bp, Rattus norvegicus
gtaccgaatgcgaatctttgcacccaaccatgtggtggccaagtcccgcttctggtactttgtgt

SEQ ID NO: 971 - DNA, 65 bp, Rattus norvegicus
cgaagctacatggccaagggtcgtaggctctgccaaccaaagcccaaggttcaaaccaaggcaga

SEQ ID NO: 972 - DNA, 65 bp, Rattus norvegicus
ggccgcgcttgcggagctgtcaccatgcctctggctagagatctattacacccttccttggaaga

SEQ ID NO: 973 - DNA, 65 bp, Rattus norvegicus
ggccaagtcatcatgtctatccgaaccaagctgcagaataaggaacatgtgattgaggctctgcg

SEQ ID NO: 974 - DNA, 65 bp, Rattus norvegicus
gccatcacaggcgcttctctggctgatataatggccaagaggaatcagaaaccagaagttaggaa

SEQ ID NO: 975 - DNA, 65 bp, Rattus norvegicus
tgaaacgcagatccggtcagcgaaaacctgccacttcctacgtgaggaccaccatcaacaagaat

SEQ ID NO: 976 - DNA, 65 bp, Rattus norvegicus
agggtgcggagaagattcaagggccagatcctgatgcccaacattggttacgggagtaacaagaa

SEQ ID NO: 977 - DNA, 65 bp, Rattus norvegicus
ccatggccgtgggcctcaacaaaggccacaaagtgacgaaaaacgtcagcaagccgagacacagc

SEQ ID NO: 978 - DNA, 65 bp, Rattus norvegicus
gctaagaggcgaaacactaccgggactggtcggatgaggcacctaaagatcgtctaccgaagatt

SEQ ID NO: 979 - DNA, 65 bp, Rattus norvegicus
actgaatttcccctataagacctaataaggcttcttcggtgggtaaagtattgtttcctggcagc

SEQ ID NO: 980 - DNA, 65 bp, Rattus norvegicus
ccagaaatcctaccgataagccagtctcaaggatcagggtttacctttgtaataaacatcctggg

SEQ ID NO: 981 - DNA, 65 bp, Rattus norvegicus
ctggagttactgtaaaagacgttaaccagcaggagttcgtcagagctctggcagccttcctcaaa

SEQ ID NO: 982 - DNA, 65 bp, Rattus norvegicus
cttgatcagaggcgcaaaggagaagaatctgaaagtgaaaggaccagtgcgcatgcctaccaaga

SEQ ID NO: 983 - DNA, 65 bp, Rattus norvegicus
ccgccgcgatgttgatgcccaagaagaaccggattgccatctacgaactcctttttaaggaaggg

SEQ ID NO: 984 - DNA, 65 bp, Rattus norvegicus
ggacaacaacacgcttgtgttcattgtggatgttaaggccaacaagcaccagatcaaacaggccg

SEQ ID NO: 985 - DNA, 65 bp, Rattus norvegicus
agtcctggcagcaaaagcaagaaggctgagaacaggtctaggtccaaagagaaagcagaaggtgg

SEQ ID NO: 986 - DNA, 65 bp, Rattus norvegicus
caactgtcaacctggataaattatggacgttggtcagcgagcagacacgggtcaatgcagcaaaa

SEQ ID NO: 987 - DNA, 65 bp, Rattus norvegicus
cgggaactcaacatcaccgcggcaaaggaaatcgaagtcggtggtggtcgaaaagccatcataat

SEQ ID NO: 988 - DNA, 65 bp, Rattus norvegicus
tctatgtggtgctgggtaggccaggtttcagcatcgcagacaagaagcgcagaacaggctgcatt

SEQ ID NO: 989 - DNA, 65 bp, Rattus norvegicus
cgaaatcatgcaagtcaagaggctcaaaccttcgtgttcactttaagaacacccgggaaactgcc

SEQ ID NO: 990 - DNA, 65 bp, Rattus norvegicus
aggactaacggaaaggagcctgagctgctggagcccattccatacgaattcatggcctaatgtat

SEQ ID NO: 991 - DNA, 65 bp, Rattus norvegicus
aaaggtacatcctgcagtggtgattcgacaacgaaagtcatatcgaagaaaagacggggtgttcc

SEQ ID NO: 992 - DNA, 65 bp, Rattus norvegicus
gaccgaagcaagaaccgcaaacggcatttcaatgcaccatctcacattcggaggaagatcatgtc

SEQ ID NO: 993 - DNA, 65 bp, Rattus norvegicus
cgcccttacagccatgccctggtggctggaattgaccgctatcccagaaaagtgacagctgccat

SEQ ID NO: 994 - DNA, 65 bp, Rattus norvegicus
gcactcaggatggtccagcgtttgacataccgtcgtaggctttcctacaatacagcctctaacaa

SEQ ID NO: 995 - DNA, 65 bp, Rattus norvegicus
actggtctgagggtgtgcaggttccctctgtgcccatccagcagttccccacggaagactggagt

SEQ ID NO: 996 - DNA, 65 bp, Rattus norvegicus
aggggcactgtgctcttgtctggtcctcggaagggccgagaggtgtaccgacactttggcaaggc

SEQ ID NO: 997 - DNA, 65 bp, Rattus norvegicus
cactgtatgctaactaaagccattcaaccaggggtcaggtaggagcctgaagctcagtacttagc

SEQ ID NO: 998 - DNA, 65 bp, Rattus norvegicus
acatacaagttctgtgaacgcgtgcagaccgatgcctttgtctccaacgagctagatgaccctga

SEQ ID NO: 999 - DNA, 65 bp, Rattus norvegicus
ttgctgggtcggtgtttgctcagaaatgccttccagaccttttcctaggctgtgccaataaaagc

SEQ ID NO: 1000 - DNA, 65 bp, Rattus norvegicus
caggtcttagacacttaggaaggtcttgggcttctgttcattctggtgccaaaccagtgggattc

SEQ ID NO: 1001 - DNA, 65 bp, Rattus norvegicus
ggttattttgctttggttacaatggctcaagtagaaaagcggtcccatccatattaagacagtgt

SEQ ID NO: 1002 - DNA, 65 bp, Rattus norvegicus
acttaggtgtgttgacaccatccgctgtaagcgacgagctcatcaagctgtacctgtgagcagtg

SEQ ID NO: 1003 - DNA, 65 bp, Rattus norvegicus
gcgctgggatggaactttacccacacgctgtgttccttctacaagtacagagtgaagtgacagtg

SEQ ID NO: 1004 - DNA, 65 bp, Rattus norvegicus
ctggtgtcactacggaacaaagtccaagctattcctgctatttctgcctggatcctaaagaggcc

SEQ ID NO: 1005 - DNA, 65 bp, Rattus norvegicus
gtcgacattgcagccttcaacaagatctgaaagtccgagagtgtgtggtttcatgtgtgtgagca

SEQ ID NO: 1006 - DNA, 65 bp, Rattus norvegicus
ggagtgattacagggcaagacggaattgaggactatttcacgctctacgctgatgttcccctaaa

SEQ ID NO: 1007 - DNA, 65 bp, Rattus norvegicus
tctcaaggaccagttggccttagcgattgggacactgggagaaaacatgagtcttaagcgagctg

SEQ ID NO: 1008 - DNA, 65 bp, Rattus norvegicus
agcccgtccctcactcaggcagaatgggcaaggagaagacacacatcaacattgtggtcattggc

SEQ ID NO: 1009 - DNA, 65 bp, Rattus norvegicus
tctgtataaatcgcaacacacaggtcaattctgctgaagccaaattgagaagaccacagcgccag

SEQ ID NO: 1010 - DNA, 65 bp, Rattus norvegicus
gcctgccagacctaactcagaggtgctcctctctgggagtgaggatgcagatgatcctaataaac

SEQ ID NO: 1011 - DNA, 65 bp, Rattus norvegicus
aaagtcacccgcaaagatggcagtgccagtggcaccacgctgctggaagctttggactgcattct

SEQ ID NO: 1012 - DNA, 65 bp, Rattus norvegicus
tgaaggccctgagaaccagagtcagcaacctccccacagtgaagaagtttcttcagcctggcagc

SEQ ID NO: 1013 - DNA, 65 bp, Rattus norvegicus
tgcccagggaagacagggcgacctggaagtccaactacttccttaagatcatccaacttttggat

SEQ ID NO: 1014 - DNA, 65 bp, Rattus norvegicus
tccgccctcatcctgcacgacgacgaggtgacggtcacggaggataagatcaatgctctcattaa

SEQ ID NO: 1015 - DNA, 65 bp, Rattus norvegicus
cgtgggcatcgaggcggacgatgaacgactcaacaaggtcatcagtgagctgaatggaaagaata

SEQ ID NO: 1016 - DNA, 65 bp, Rattus norvegicus
ccgggtagacatccacctgctggaacttctcctctatgttgaagagtttgatgccagccttctga

SEQ ID NO: 1017 - DNA, 65 bp, Rattus norvegicus
ccatttgaaccgtcccatcaacggcaatggtaaacagtagtggacgaagggacaggaactccttg

SEQ ID NO: 1018 - DNA, 65 bp, Rattus norvegicus
agagactgtccacctgctgaccccgtcataaagcaaaagctgatgcccagagtgctgaccatgat

SEQ ID NO: 1019 - DNA, 65 bp, Rattus norvegicus
atagtatggtcttggctctgcaacgtctggaggacaagttcctcagggacagggccttcattgct

SEQ ID NO: 1020 - DNA, 65 bp, Rattus norvegicus
actggagcctgaggagctctaccagaccttccagcgcatcgtggagaacgtcaatgtcatcatct

SEQ ID NO: 1021 - DNA, 65 bp, Rattus norvegicus
ccatggagaggcatttcttgttggcaaccaactcagttgggcagacatacagctactagaagcca

SEQ ID NO: 1022 - DNA, 65 bp, Rattus norvegicus
ccacgaaagcctgaagcctcagtatttggaacaactgcctgcacagctgaaacagttctcgttgt

SEQ ID NO: 1023 - DNA, 65 bp, Rattus norvegicus
gcgtaggcatcttgccccagactacagagtgcatatcatctcgtttaaagaccccaatccaatgc

SEQ ID NO: 1024 - DNA, 65 bp, Rattus norvegicus
atgtacgtcagacctcaatgttccctcgtgacccgaagcgactcacgccttaaagccacactttt

SEQ ID NO: 1025 - DNA, 65 bp, Rattus norvegicus
ctgaaactcatgtgtaatgtgtgccaccaccttaagctgccaccaaaattgccaaacgactttaa

SEQ ID NO: 1026 - DNA, 65 bp, Rattus norvegicus
acggtcgtcagcgggctggtgaatcatgtccctctagaacagatgcaaaaccggatggtggtttt

SEQ ID NO: 1027 - DNA, 65 bp, Rattus norvegicus
atgtctacttggagtgcctaaaacccgttctgaatggagtggaccaggtagcagcagactgtgct

SEQ ID NO: 1028 - DNA, 65 bp, Rattus norvegicus
tgcccctgctcatgaaaatacaagaccacttcaatagcagtattaagcagctggacccagaagac

SEQ ID NO: 1029 - DNA, 65 bp, Rattus norvegicus
cccttcaactaaggccagcacaagggacgtgaacagcacttgctctgacaccatgagaggtcaga

SEQ ID NO: 1030 - DNA, 65 bp, Rattus norvegicus
gatttacttggtgtctggtggctgtcacctcttgaatggcacatgtcgctggcacttctctcctg

SEQ ID NO: 1031 - DNA, 65 bp, Rattus norvegicus
ttgggtttgagcactggagacgatagcttagtcggtagtgtgcttgcctggcatgtacaaagctg

SEQ ID NO: 1032 - DNA, 65 bp, Rattus norvegicus
tttccaagtccgttcttggcaggagcagtacatttccgtgaatgcctttccaaacccagctgtcc

SEQ ID NO: 1033 - DNA, 65 bp, Rattus norvegicus
acactggcagtgaatgctgcccaagactccactgacctggttgccaagttaagagcttttcacaa

SEQ ID NO: 1034 - DNA, 65 bp, Rattus norvegicus
ctgtggaggacgacattgacctcagtgatgtggagctcgatgacctagagaaggacgagttgtga

SEQ ID NO: 1035 - DNA, 65 bp, Rattus norvegicus
ggaaattgatggaaaatccctgctcttgatgacgagaaatgacgtgttgacgggacttcagttaa

SEQ ID NO: 1036 - DNA, 65 bp, Rattus norvegicus
caggagaggtgtccttggctactaggagtcagccatagacttctctgagttcccacagcctgtgg

SEQ ID NO: 1037 - DNA, 65 bp, Rattus norvegicus
gacattccctaagaagggtcagatatgcgtggtgcactacacagggatgctccagaatggcaaga

SEQ ID NO: 1038 - DNA, 65 bp, Rattus norvegicus
ggaggaagagatgaccaagtacaaaccggagtcagacgagctgacagctgagaagatcacacaat

SEQ ID NO: 1039 - DNA, 65 bp, Rattus norvegicus
tacccacagactcagaaacggaggtgcccactatagacagttgggtggcttcctcaggtcttaaa

SEQ ID NO: 1040 - DNA, 65 bp, Rattus norvegicus
gaggcgggcagtgaaggctccgaggcttgttcacattcggggaagcagaaaattgcctcatagtt

SEQ ID NO: 1041 - DNA, 65 bp, Rattus norvegicus
gtggcgttcagtgtcagacctcttaatgggccagtcactctttgaccttgtgtatgcagtagtga

SEQ ID NO: 1042 - DNA, 65 bp, Rattus norvegicus
aaacatgaatccagatggcatggttgctctcctggactaccgtgaagatggtgtgactccattca

SEQ ID NO: 1043 - DNA, 65 bp, Rattus norvegicus
cttggaaagtatgtcgactgaaatcactgttgaaatggtgtcacatgaagctgcccattccactg

SEQ ID NO: 1044 - DNA, 65 bp, Rattus norvegicus
ccctcagagcgatttgaaggtccctgcatagattccatcccttggacaacagaagagcagaaact

SEQ ID NO: 1045 - DNA, 65 bp, Rattus norvegicus
ttttggactttatcggacacatcttgacgtaacctcctgcatagtcccggatgggcacgagctcg

SEQ ID NO: 1046 - DNA, 65 bp, Rattus norvegicus
ttagcatcaggactgtagcgctgtgtcaccacatgagaagttcagaagcagcctttctgtggagg

SEQ ID NO: 1047 - DNA, 65 bp, Rattus norvegicus
agactcagcaaggaggtggtagcaatcccttccacagaagttgggactcatggcaagggttcaat

SEQ ID NO: 1048 - DNA, 65 bp, Rattus norvegicus
cctcttctacaggagaattggtgtgatggggatgattgtattgcacgtagttaagctgaagaaag

SEQ ID NO: 1049 - DNA, 65 bp, Rattus norvegicus
tcatggttcagaatgcaccattacatgtttcagtgcagcatggtcactaacattgtgtcagacta

SEQ ID NO: 1050 - DNA, 65 bp, Rattus norvegicus
taaccagatgacaggagtgggagacagagccttcattgacagttcgggaccatcagtgagcagtg

SEQ ID NO: 1051 - DNA, 65 bp, Rattus norvegicus
tacgccgaagaggacccaccatgggcaccaaggtcttacttggaaaaggtcgtggcaatctatga

SEQ ID NO: 1052 - DNA, 65 bp, Rattus norvegicus
tccctgtcccctcatcccatatccagtttcttcttcagttcttgctcagacttagtggtcctggc

SEQ ID NO: 1053 - DNA, 65 bp, Rattus norvegicus
agttccagtccggaagccggagaagactctgatcatgaggatggaaactattgccctcctgtcaa

SEQ ID NO: 1054 - DNA, 65 bp, Rattus norvegicus
cttcttctgttccgttcagccttaccttattgtagacaccctgcagatccagttttctaccacac

SEQ ID NO: 1055 - DNA, 65 bp, Rattus norvegicus
atgtcaacgccgatcgaggtcctctgcaaaggctacccctctgagttctcaacttacctcaactt

SEQ ID NO: 1056 - DNA, 65 bp, Rattus norvegicus
agacttctttgagaagccagactacgactacctgaggaagctcttcaccgacctcttcgaccgca

SEQ ID NO: 1057 - DNA, 65 bp, Rattus norvegicus; identical to SEQ ID NO: 1

SEQ ID NO: 1058 - DNA, 65 bp, Rattus norvegicus
ctgttccgcatcctcttcaggaccctgaaccaccagtatgactacacgtttgattggacgatgtt

SEQ ID NO: 1059 - DNA, 65 bp, Rattus norvegicus
tcttcaaacagctttccctagagggagctggactggccatcgaggagttcaaagagaacactcct

SEQ ID NO: 1060 - DNA, 65 bp, Rattus norvegicus
cgacactctgtgtcctttaaactgcccactatgggaaactttacgtacagctttctgcatgacaa

SEQ ID NO: 1061 - DNA, 65 bp, Rattus norvegicus
tcaccttcaggtgcagcagtgaacagcagtgagagtctccctccatcctcatctgtcaacgacat

SEQ ID NO: 1062 - DNA, 65 bp, Rattus norvegicus
tttaggtgcagcagtgatcaatggctctcagcatccggtctcttcgccgtctgtcaatgacatgt

SEQ ID NO: 1063 - DNA, 65 bp, Rattus norvegicus
cagatgcaaagtcattgctttcagggctcttgataaaggatccaaataaacgccttggtggaggg

SEQ ID NO: 1064 - DNA, 65 bp, Rattus norvegicus
cctcccccatttaacttccatctcccggtcacagtgggttttgtctttctatccaacaaaagtta

SEQ ID NO: 1065 - DNA, 65 bp, Rattus norvegicus
gtggccctggatttgctcagagaaatagctgattggcagagtaagtaaaccacagctctgccttt

SEQ ID NO: 1066 - DNA, 65 bp, Rattus norvegicus
tgttggatttgtacctcagaggaagacaagtgaccgatcttctgggactctcttctcgccagagg

SEQ ID NO: 1067 - DNA, 65 bp, Rattus norvegicus
ggattgctcatctcggtcctcaaagcattgagagccaacagcatcaccgcttgttttggactttg

SEQ ID NO: 1068 - DNA, 65 bp, Rattus norvegicus
cttccgggatttcgactttgtggcaggaggctattagccctaagcccctgccttgcccaagagtt

SEQ ID NO: 1069 - DNA, 65 bp, Rattus norvegicus
ggtcacttgagggagtattgctcaaggtggctttttctacacactacaggacattacctgtgggc

SEQ ID NO: 1070 - DNA, 65 bp, Rattus norvegicus
agacaagagtgctgtgggctttgactaccagggcaagacggagaagcacgagtcacagaaagatt

SEQ ID NO: 1071 - DNA, 65 bp, Rattus norvegicus
aggtcgccgaatacagcaacgaagatgcctttggaactgacccagagccgggtgcagaagatctg

SEQ ID NO: 1072 - DNA, 65 bp, Rattus norvegicus
cggagacgattttcggttcagtgaatacacagagtgggacctgcagtacaggaactatgagcagt

SEQ ID NO: 1073 - DNA, 65 bp, Rattus norvegicus
ttccacaccaggttggctagtctgtctgagaaaccaccagcgattgactgggcttactacagggc

SEQ ID NO: 1074 - DNA, 65 bp, Rattus norvegicus
cccgcatggatcatctgtacctgatggttttgtttctcggatgtgctggggaggaacctcgccag

SEQ ID NO: 1075 - DNA, 65 bp, Rattus norvegicus
tcctactctttatcacttcccaaccaactgtgaggcctgtatgaagccactgtggcacatgttta

SEQ ID NO: 1076 - DNA, 65 bp, Rattus norvegicus
agttacctgacaccctagaagactccaaatcatccgattctcacagcgattctgatgatgaacag

SEQ ID NO: 1077 - DNA, 65 bp, Rattus norvegicus
agaaagcagtggagaggaagacaatgacctctcccctgaagagcgagaaaagaagcggcagtttg

SEQ ID NO: 1078 - DNA, 65 bp, Rattus norvegicus
gatcccaaaatggggatgaaaccggcacctggcccaacaaccagttcgatacagagatgctgcaa

SEQ ID NO: 1079 - DNA, 65 bp, Rattus norvegicus
tgaggaagatgtggagcctgagtgcatcatggagaaggttgccaaggcttctggggctaattaca

SEQ ID NO: 1080 - DNA, 65 bp, Rattus norvegicus
ttgtcttctataccacacgagacgtcctcgcttgctgtgtcgtggtttagctactcagtggtgag

SEQ ID NO: 1081 - DNA, 65 bp, Rattus norvegicus
ccagtagtctgctgtaaggagggaagcactttgtcccatgtaatggaaggaggctgctttcagat

SEQ ID NO: 1082 - DNA, 65 bp, Rattus norvegicus
acatgaatggacgctgcatctgcccatccctgtcctactcaccagccagctccccacagtcctct

SEQ ID NO: 1083 - DNA, 65 bp, Rattus norvegicus
agccctacccaatgtacccagctacaacatccttggtgaatgtcgtgcccaaactcaatgccacg

SEQ ID NO: 1084 - DNA, 65 bp, Rattus norvegicus
agctatgaccgaggccaagcgtatgccaccgagtggtcagacgatgagagcggaaacccctttgg

SEQ ID NO: 1085 - DNA, 65 bp, Rattus norvegicus
cagcactatgtgtacatgttcctggttaagtggcaggacctgtcggagaaggtggtctacagaaa

SEQ ID NO: 1086 - DNA, 65 bp, Rattus norvegicus
ggatgactcaagatgcttcagttcccactgactgtctctagccagcatggtcttaaccagagaag

SEQ ID NO: 1087 - DNA, 65 bp, Rattus norvegicus
tctcagaggagcaatgatgaggtagcccgagagttcgtgaagctcaagtcagagtctcgatccat

SEQ ID NO: 1088 - DNA, 65 bp, Rattus norvegicus
atccaacaaagacccagaccatgcgagtgagacttgcttcccgaaatgtggagagccataccaag

SEQ ID NO: 1089 - DNA, 65 bp, Rattus norvegicus
tgtcatttctgttctcagtgttctgctagcattgtaggcggcttgaacgctgagcctaatgtcta

SEQ ID NO: 1090 - DNA, 65 bp, Rattus norvegicus
tcgttgtcactgcctccgaaactaacagcgtcgtcgtggaggaaccacacgttgacacaaagaat

SEQ ID NO: 1091 - DNA, 65 bp, Rattus norvegicus
aaagtgggtaccattctctcaggccttatgacaattggggtaactatgccaagcaggacagaggc

SEQ ID NO: 1092 - DNA, 65 bp, Rattus norvegicus
ggaaggcatgctcactgtcacctgttgttgagagctttggttggctttggttttgaatgtagcac

SEQ ID NO: 1093 - DNA, 65 bp, Rattus norvegicus
aacggtcaacagtggcatccatgatgcatcgccaagagacagtggagtgcttacgcaagttcaac

SEQ ID NO: 1094 - DNA, 65 bp, Rattus norvegicus
tcagtagacgagaagaagagtgtgaggaggggacatggaaccaggtgaagcctccaaatacactc

SEQ ID NO: 1095 - DNA, 65 bp, Rattus norvegicus
ccagcacacccacgcgtactgcagtgtgacagccatcgctcagcagtctgtgtccttgtccctgt

SEQ ID NO: 1096 - DNA, 65 bp, Rattus norvegicus
ccagaccagcaaatagatccaagagggagtctctgagggactgtagagatgacagcgatgggaaa

SEQ ID NO: 1097 - DNA, 65 bp, Rattus norvegicus
gctgtgcaagggctatccttctgaatttgccacatacctgaatttctgccgttccttacgttttg

SEQ ID NO: 1098 - DNA, 65 bp, Rattus norvegicus
tacctccagtgaagaagtccgtagcagctcccaaacaggtctcaattcctagccacaactaaggc

SEQ ID NO: 1099 - DNA, 65 bp, Rattus norvegicus
gccgcatccagagtggcctgggcgctctgagtcgcagccacgacaccaccagcaacaccttggcg

SEQ ID NO: 1100 - DNA, 65 bp, Rattus norvegicus
tttgctgtatgaacggtcaccatgcaggaacactcatgggtggctggtaacactcagaaccctca

SEQ ID NO: 1101 - DNA, 65 bp, Rattus norvegicus
gagccacaagtacaagactccaatggcccacgagatctgctattctgtgttgtgtctcttctcgt

SEQ ID NO: 1102 - DNA, 65 bp, Rattus norvegicus
atcacaaacagacaggctttcataactgctcagaatcatggctatgctctggacaacaccctccc

SEQ ID NO: 1103 - DNA, 65 bp, Rattus norvegicus
gcctactgagcggaaagactgtcccggagtgtgaaagcactctgaggagctggaacagtgtatta

SEQ ID NO: 1104 - DNA, 65 bp, Rattus norvegicus
agcttacaacacctgtgtcggctagtcatcaaccgactggtgaccgatgtggactgcctacccct

SEQ ID NO: 1105 - DNA, 65 bp, Rattus norvegicus
ccagaacctcctcagcctaccaaggaagatcctgagagacctgtgcttcaaatagagagcgcagc

SEQ ID NO: 1106 - DNA, 65 bp, Rattus norvegicus
tgtcaagaccagctgcagggctacgagaggaagaacatcgacctcacagccatcatttcagacct

SEQ ID NO: 1107 - DNA, 65 bp, Rattus norvegicus
ccggaatgggactgttcacctttacctgaccaaacctctgtatacatcagcaccgacgctgcagc

SEQ ID NO: 1108 - DNA, 65 bp, Rattus norvegicus
aaaatccagccccaatggtcggtagctcccagttagcccagcagaagataggcttcttcctcagg

SEQ ID NO: 1109 - DNA, 65 bp, Rattus norvegicus
aatcttctacaatttagcgcctgctgatggcaagctgagtggctctaaggccaaaacctggatgg

SEQ ID NO: 1110 - DNA, 65 bp, Rattus norvegicus
tctgatgaggccctacctgcaagttcagtgaacatttcttacgtgccatttctgagtaaagagtt

SEQ ID NO: 1111 - DNA, 65 bp, Rattus norvegicus
ccgcctgttaccatccccgaccattcatcagactcagtacaaaccaatcttccctccacattctt

SEQ ID NO: 1112 - DNA, 65 bp, Rattus norvegicus
tcagcaacaagggccagacactggtggtacagttcaccgtgaagcatgagcagaatatcgactgt

SEQ ID NO: 1113 - DNA, 65 bp, Rattus norvegicus
gggcttctcctttgtgaaccccaaatatgagcaattcctggaatagtgagctcccagacctgctt

SEQ ID NO: 1114 - DNA, 65 bp, Rattus norvegicus
tgaccagaaggccctctttggtccagactcaccaagatcacagatttgaactgcgtctgctctgt

SEQ ID NO: 1115 - DNA, 65 bp, Rattus norvegicus
aatcactccagggctcagcagacaccagggacttcctcctccgattgtggtttccagacatcttg

SEQ ID NO: 1116 - DNA, 65 bp, Rattus norvegicus
gacggcattctaagcagactgattcgcttcgaacaaaccgcagttgggcgtcttaagctccaact

SEQ ID NO: 1117 - DNA, 65 bp, Rattus norvegicus
ttcatctgatgggctctgctggctgcacaatgaacctgcgcaagacacacattctctgcaaggct

SEQ ID NO: 1118 - DNA, 65 bp, Rattus norvegicus
gccatgagcatctctgttgtggacacgtctgtgaatgaccctgtcactttacccttaactacagc

SEQ ID NO: 1119 - DNA, 65 bp, Rattus norvegicus
cccctcgagaaccgaggatactcttggaggaggagcaggagatgttccgcgattttgactacgtt

SEQ ID NO: 1120 - DNA, 65 bp, Rattus norvegicus
atgctcacaagtggtgcagaaagatccaggaggtttggaggcaacagtaccagagcagtccagat

SEQ ID NO: 1121 - DNA, 65 bp, Rattus norvegicus
ctcaggctagagtgtgtttgcatggtgaccaggatgcttgggagaggtggacaccgccctttgga

SEQ ID NO: 1122 - DNA, 65 bp, Rattus norvegicus
actggatactaaggatgaacagtaaagccaaccttcccttccatgcagccctacctggaaaggga

SEQ ID NO: 1123 - DNA, 65 bp, Rattus norvegicus
gactcttcaatccagggtgccatcagtaatcatgccactgttcacgagtgttgttagccaacccc

SEQ ID NO: 1124 - DNA, 65 bp, Rattus norvegicus
cggtctgtgattgaaccacttcctgttactccaactcgggatgtggctacatctcctatttctcc

SEQ ID NO: 1125 - DNA, 65 bp, Rattus norvegicus
gttcctaccctagcaacatctcagcgttcgtaaggattctcatgctgatggctgtaaactgacag

SEQ ID NO: 1126 - DNA, 65 bp, Rattus norvegicus
gggtagtgtgtccatcccctggcagaacgagatggtggagactgagtgcttccaggaactaaatg

SEQ ID NO: 1127 - DNA, 65 bp, Rattus norvegicus
cttaagatccgaggtggcaagcagtttgtcctgcagtgtgatagtgaccctgagctggtgcaatg

SEQ ID NO: 1128 - DNA, 65 bp, Rattus norvegicus
gacactcatgggatgacatcatcagtctcccacagttgtcactttgggttaaggcatggaaggct

SEQ ID NO: 1129 - DNA, 65 bp, Rattus norvegicus
agaactgtcccttggaactgtacaaccttatgcgcctatgttggagcaagctgcctgcagacaga

SEQ ID NO: 1130 - DNA, 65 bp, Rattus norvegicus
aagataaagcacgtgagcagcttcgtccggaagtattctgacacgatagccgagttacgggagct

SEQ ID NO: 1131 - DNA, 65 bp, Rattus norvegicus
gatgatgtcagagcaagtctgagtgtcagcacttggtgatctagcatgtagctgtcttaggcatc

SEQ ID NO: 1132 - DNA, 65 bp, Rattus norvegicus
tacacgatgctggcaggatacactccatttgccaatgggcccagtgataccccagaggagatcct

SEQ ID NO: 1133 - DNA, 65 bp, Rattus norvegicus
tgaggaagcaaagctaaaggccaaatatccaagcctaggacaaaagcctggaggctccgacttcc

SEQ ID NO: 1134 - DNA, 65 bp, Rattus norvegicus
ggaggggacaggatcaaaggctatgtcattgagaagaagacgattgatgggaaagcctggaccaa

SEQ ID NO: 1135 - DNA, 65 bp, Rattus norvegicus
agattctaggagggtagaaatgcagtcagctgcaggggagacagagcaggctttgtgtgagagga

SEQ ID NO: 1136 - DNA, 65 bp, Rattus norvegicus
gaaatgagctgatgtcaatgctatggactgcacagaagtcttgatgttccattcagtctgcagct

SEQ ID NO: 1137 - DNA, 65 bp, Rattus norvegicus
acctggatcttgtttgcctgcctcctgggagcagcttttgctatgcccctaccacctcatcctgg

SEQ ID NO: 1138 - DNA, 65 bp, Rattus norvegicus
tttgaggatgctcctaaactggagccttcaggttccaccaggaactccggttcaagacccttact

SEQ ID NO: 1139 - DNA, 65 bp, Rattus norvegicus
ggtgctgtggctgcactagtgggctcagcagtcatcataggtttcatctgttacctgcataagaa

SEQ ID NO: 1140 - DNA, 65 bp, Rattus norvegicus
ccaacagaacactgaccattcactgtgcagaccacaaagcaagaccctggtgttaagaaggaatc

SEQ ID NO: 1141 - DNA, 65 bp, Rattus norvegicus
ccttcaaacgtgctgacatctatgcaatgggcttagtattctgggaaatcgctcgacgctgttcc

SEQ ID NO: 1142 - DNA, 65 bp, Rattus norvegicus
tccagatgaagaggccacaaagcctgaaggctggttagatgatgaacccgagtatattccagacc

SEQ ID NO: 1143 - DNA, 65 bp, Rattus norvegicus
gctgaagaagcaaagttaaaagcaaggtatcctcatttgggacaaaagcctggtggttctgactt

SEQ ID NO: 1144 - DNA, 65 bp, Rattus norvegicus
aaaagaggctgggagtgagaggagacatccgccagcatcctttgtttcgagagatcaactgggaa

SEQ ID NO: 1145 - DNA, 65 bp, Rattus norvegicus
acgcgtccttggcccatgctcagatatcctcaagcgaaacatccagcagtacaacagctttgtgt

SEQ ID NO: 1146 - DNA, 65 bp, Rattus norvegicus
ggagcatgcatttttccggtatatcgactgggagaaactcgaacgcaaggagattcagccacctt

SEQ ID NO: 1147 - DNA, 65 bp, Rattus norvegicus
cccttggaacgggttccttcggaagagtcatgctggtaaagcataaagccactgagcagtactac

SEQ ID NO: 1148 - DNA, 65 bp, Rattus norvegicus
tgatgggtttgctgcatctcagcagttggatgttcttgcctctgacggtagcttgtttgctctgg

SEQ ID NO: 1149 - DNA, 65 bp, Rattus norvegicus
gtgtcaacgaccagccatctgggaatcttccatttctaaaacctgatgacattcagtactttgac

SEQ ID NO: 1150 - DNA, 65 bp, Rattus norvegicus
ctggtcagtgggacattgtcagctctgagtattgggtgcttcactgtctaataattgccatgtga

SEQ ID NO: 1151 - DNA, 65 bp, Rattus norvegicus
gcctgaacccgtccattcagaaagcttcaaattatagaaacaacactgtcctatacgagtgatcg

SEQ ID NO: 1152 - DNA, 65 bp, Rattus norvegicus
ctcacggcctggaaagaatgtgcagctgacagagaacgagatccgtggtctttgcctcaaatccc

SEQ ID NO: 1153 - DNA, 65 bp, Rattus norvegicus; identical to SEQ ID NO: 1

SEQ ID NO: 1154 - DNA, 65 bp, Rattus norvegicus
cctgtgagtccagttgacttccacttagctgtagcttactcagcatgactgtagatgaggatagc

SEQ ID NO: 1155 - DNA, 65 bp, Rattus norvegicus
acctgtttggcagtgatgtggtcgcccagttcaatgcagccaacgacattgatatgatctgccgt

SEQ ID NO: 1156 - DNA, 65 bp, Rattus norvegicus
gatgttgacctgcacattctgtatatttgtcctgacagtgttgcatcctccttgctgtactgaac

SEQ ID NO: 1157 - DNA, 65 bp, Rattus norvegicus
gcgagtgcggctggccatcattgaatacatgcctctgctggctggacagctcggtgtggaatttt

SEQ ID NO: 1158 - DNA, 65 bp, Rattus norvegicus
atcctagtgcaggtgaaggaagtcctctgcaagctgagcacgctggtggagacaacgctgaaaga

SEQ ID NO: 1159 - DNA, 65 bp, Rattus norvegicus
gtatggtcagatcctgaagatgtggacacttgggcaatcagtcccagaggagcaggttggctttt

SEQ ID NO: 1160 - DNA, 65 bp, Rattus norvegicus
ggtaagtgaaatgtgcaaggaaggaagttctacttgctgtctacccattggttggactgaggtag

SEQ ID NO: 1161 - DNA, 65 bp, Rattus norvegicus
tggatccctggccaaatctctctcgaccctttgtttgctacccgtgtgtccgaggtcaatgtgca

SEQ ID NO: 1162 - DNA, 65 bp, Rattus norvegicus
cctgcctgctgtataacgagtacattgtctacgacattgctcaggtgaatctgaagtacctactg

SEQ ID NO: 1163 - DNA, 65 bp, Rattus norvegicus
tgacccttcctatctgcctacacaacaagatgtgcttagagttcgagtccccaccacagggatca

SEQ ID NO: 1164 - DNA, 65 bp, Rattus norvegicus
ccaattcctccagcctagacccctggctttgtccaacaccagccctgacccaagtccaaatgttt

SEQ ID NO: 1165 - DNA, 65 bp, Rattus norvegicus
aaagatggtcctggagtgtgagagggagggttgatgttgaagctggggctctagtgtactgatga

SEQ ID NO: 1166 - DNA, 65 bp, Rattus norvegicus
gactgcttcatggactctttgctgttgatgttgatctcctggtagcatgacctttggcctttgta

SEQ ID NO: 1167 - DNA, 65 bp, Rattus norvegicus
accttctggaagacaagatcctgcactcacacttggtcgactacttccccgagttcgatgggcca

SEQ ID NO: 1168 - DNA, 65 bp, Rattus norvegicus
gtggtcagaactgctttgggaagcaagccacggtgatcagtgccttcattggcagcttttaccat

SEQ ID NO: 1169 - DNA, 65 bp, Rattus norvegicus
gatatcacgtatatctgggtacggttttcttggggaatggagggtagagttgctgatgttctaaa

SEQ ID NO: 1170 - DNA, 65 bp, Rattus norvegicus
ctgctgtgctgataggccgagcaggctccaggatgtgtgcagccttctcgcctctctgtacaaat

SEQ ID NO: 1171 - DNA, 65 bp, Rattus norvegicus
ctggggctcatgtatgtctactggactcagctcaacatgttccagaccctgaagtacctggccgt

SEQ ID NO: 1172 - DNA, 65 bp, Rattus norvegicus
gtgtgccaaggatggcctatccacagccaaacgtgctaacacccattaggaatgatgttcttgtc

SEQ ID NO: 1173 - DNA, 65 bp, Rattus norvegicus
ccccacagtgaactacattctgtccataagtgcttcatctggactcatcgccctcttgtctactg

SEQ ID NO: 1174 - DNA, 65 bp, Rattus norvegicus
ccggaataccagctcaagaactcagccacttactacctgaaggatctggagcacattgcacaatg

SEQ ID NO: 1175 - DNA, 65 bp, Rattus norvegicus
accacgaggacatctttggagtcaccctcagaacgtatgaagtgaccaaccgccttagatctgag

SEQ ID NO: 1176 - DNA, 65 bp, Rattus norvegicus
gctaggtccttcttgggtggtcctcagcctggagggaggtggggatttgtgccaaggtgaagagt

SEQ ID NO: 1177 - DNA, 65 bp, Rattus norvegicus
aagctaccctgaggatggtccctggatcctacacagctaatccaagccaataaagggctctcaca

SEQ ID NO: 1178 - DNA, 65 bp, Rattus norvegicus
aacgtggagatcactgagctctgtattcaacatggctggaccccaggaaatggccgctttgatgt

SEQ ID NO: 1179 - DNA, 65 bp, Rattus norvegicus
gactctaccacccagcacttttgctttcttctccatctctgaagatctgctcaagacgtccagca

SEQ ID NO: 1180 - DNA, 65 bp, Rattus norvegicus
cacacactcctgcccagctatgtgcgctgtttccttcttgtgaggaaaccagcctgattctagat

SEQ ID NO: 1181 - DNA, 65 bp, Rattus norvegicus
gtgagaaacacaggcttgacctgccatcttcagctttgcttgcaaaagtggattcctccgtgatc

SEQ ID NO: 1182 - DNA, 65 bp, Rattus norvegicus
agatagcaggaacaggatcaagccctccataccagggaccaggctaaaaccagattaccactgcc

SEQ ID NO: 1183 - DNA, 65 bp, Rattus norvegicus
ataatgcttgtactggccagggatgagctccacaacactattcagttttcttgtactgaggattc

SEQ ID NO: 1184 - DNA, 65 bp, Rattus norvegicus
atgctctctcttgttgttggagcctggagccttgctctctgggcacagagggttctgctctcctg

SEQ ID NO: 1185 - DNA, 65 bp, Rattus norvegicus
agagttccgtgatgtggtcagaaccatggagatccacaagaaattggtcgtgtttgtagatcacg

SEQ ID NO: 1186 - DNA, 65 bp, Rattus norvegicus
cttccagctcaagagccagaaacgttatcatgaggatatcttcggtgcggtcttttcctatggag

SEQ ID NO: 1187 - DNA, 65 bp, Rattus norvegicus
ctgcgggcaagaggatgggagtgtcagtgatagctactgaatcggggactgaaactactgaatcc

SEQ ID NO: 1188 - DNA, 65 bp, Rattus norvegicus
ccacccaggagagatccacctcactgtagctgtgctggcatacagaacccaggatgggctgggcc

SEQ ID NO: 1189 - DNA, 65 bp, Rattus norvegicus
ggtaggaactcaacctgagtctgcagtcacagacaaagtagacaggaagtctgcccatatcttcc

SEQ ID NO: 1190 - DNA, 65 bp, Rattus norvegicus
acctgtgtgaccctcaccgatacaacatacttgaggatgtggctgtctgcatggatctagacacc

SEQ ID NO: 1191 - DNA, 65 bp, Rattus norvegicus
ctacaggtggatcccctgatcttgcactgaagctggaggcattggctgtgaaggaagatgcaaaa

SEQ ID NO: 1192 - DNA, 65 bp, Rattus norvegicus
aacctccagcttgtgaaatcaccgtgtctctgacttgataagcaagtattaggcttcaggcggga

SEQ ID NO: 1193 - DNA, 65 bp, Rattus norvegicus
ccggtgaggaaccagagcctgactatgaagccatacagactctaaacagagaggacgacaaggtc

SEQ ID NO: 1194 - DNA, 65 bp, Rattus norvegicus
atgcgcctgacaccctgctgctcgagaagcatgctgattatatcgcctcgtacggctcaaagaaa

SEQ ID NO: 1195 - DNA, 65 bp, Rattus norvegicus
agctggtagagcgtgtgcctaggtttggtctctagcacggcataaatgtgtgtgccacttgggtt

SEQ ID NO: 1196 - DNA, 65 bp, Rattus norvegicus
ccctctaaccctgaactgggtaaagacgatgctttcctggagaactgcttccagactctaaagga

SEQ ID NO: 1197 - DNA, 65 bp, Rattus norvegicus
gctatcaaagcgacaaagtcaaggatggcagaaggaaccgcacctttattctcaccttcatccgc

SEQ ID NO: 1198 - DNA, 65 bp, Rattus norvegicus
gcctggctcacgtggataggaaactcgttaccagatcctacagttatgaagccttcactccaact

SEQ ID NO: 1199 - DNA, 65 bp, Rattus norvegicus
ctgcagtgcctctgactctgactttttgagagcatctctaagagctgtgacccaggctttctagt

SEQ ID NO: 1200 - DNA, 65 bp, Rattus norvegicus
tacgtgacctatgacctcctgcagtgcccttgaactaaggctcctcttttgcttcagcggtgcag

SEQ ID NO: 1201 - DNA, 65 bp, Rattus norvegicus
cctctgctaccacattgaccccagtgctagaagcataccttactggtgtattgtgggtactcagt

SEQ ID NO: 1202 - DNA, 65 bp, Rattus norvegicus
aggggcgaagaatctgcagtgatggtggtgcctcgaattcacaagttggctattttaggccttgg

SEQ ID NO: 1203 - DNA, 65 bp, Rattus norvegicus
tcaagtatgaagtcaaaggcagcagagccatcagttactgccatgagaccatgacagggtgggtc

SEQ ID NO: 1204 - DNA, 65 bp, Rattus norvegicus
tagggctaaaatagggtgctttgtcctggattgaagacatcttggggtccagtgggtactgcagg

SEQ ID NO: 1205 - DNA, 65 bp, Rattus norvegicus
ttgcctgctatacccatgactgctgggtcctacagggacttatcatcccgaacagagtgtgtgca

SEQ ID NO: 1206 - DNA, 65 bp, Rattus norvegicus
ctttcgaacaaccagactctagactacagatgccaaccactgaaagggtgaccctgacaaaacgt

SEQ ID NO: 1207 - DNA, 65 bp, Rattus norvegicus
tccgtcctccacctggtgttggctcttagaggaggtggtggtcttgggcaatgaagaaacttgat

SEQ ID NO: 1208 - DNA, 65 bp, Rattus norvegicus
catcaggcccagtgacagtgcaccaaagacacagagcctggaagggctgtcgggacatactttct

SEQ ID NO: 1209 - DNA, 65 bp, Rattus norvegicus
ccatgctgaaactgtacgcgcacaagctggaattcatgcacatcctcactcgtgttaaccggaag

SEQ ID NO: 1210 - DNA, 65 bp, Rattus norvegicus
ggtgtaaccctttgagaactatcagaccagcttacagagtcaggatgatcagtcttgcaatctgg

SEQ ID NO: 1211 - DNA, 65 bp, Rattus norvegicus
atggaaaatggccccgttcaagcgcttatggaagtacacgaagacttcttcttgtaccagcgagg

SEQ ID NO: 1212 - DNA, 65 bp, Rattus norvegicus
gtgttttgtcttgtcacctgtaagtggcaaggactcagctgttgtctgttgaatccacaacttca

SEQ ID NO: 1213 - DNA, 65 bp, Rattus norvegicus
agtggaaccgagcctgcatgggtgatcactggtttgacgtgtagagagggatgtcacttggcaat

SEQ ID NO: 1214 - DNA, 65 bp, Rattus norvegicus
ggccttagacattgaagtagtgagtagtgagatcatttgactgaccaactgagccaggtctgcca

SEQ ID NO: 1215 - DNA, 65 bp, Rattus norvegicus
aaaaggactgctgggctgcaatattacccctctccaaagatgactgcttcctgggagctgcagga

SEQ ID NO: 1216 - DNA, 65 bp, Rattus norvegicus
acgaggactgacggcctccgtctcgagatctggtctcctcggcttggcccactcctggcttccgg

SEQ ID NO: 1217 - DNA, 65 bp, Rattus norvegicus
gactgtgcatacagcagataccgcagattctcttcaggcatggtggctacaaggtcttcatgtgt

SEQ ID NO: 1218 - DNA, 65 bp, Rattus norvegicus
cgagcagggttgcgtacattggatggttctcgtctgtgctctttgtacgttgcttctacagctgt

SEQ ID NO: 1219 - DNA, 65 bp, Rattus norvegicus
ctgcagagggagccttcaaaaccagttctgcttttgctaagtaccgtgtttatgtctcgcaaagc

SEQ ID NO: 1220 - DNA, 65 bp, Rattus norvegicus
gccgcagtctctaaaatagcttggcatgtcatcaggaacagttaacaccctttcctctgctctca

SEQ ID NO: 1221 - DNA, 65 bp, Rattus norvegicus
aatgtttatacctcagtcctgtggtaccaacggcgtcgagatggcagttttgcgctacacatttt

SEQ ID NO: 1222 - DNA, 65 bp, Rattus norvegicus
catacatcgatcaggtggtgagggattaccaatcgaagttggccatgtccaagaagcaagagctg

SEQ ID NO: 1223 - DNA, 65 bp, Rattus norvegicus
ttaatgatggcttcttgacagaggatgagcgtctcacccctctctgagagttacagtcttgtaag

SEQ ID NO: 1224 - DNA, 65 bp, Rattus norvegicus
tgagtgtttctgtctgtcccaggatcaagccttccttgggccagcattaaaggagtccgaacctt

SEQ ID NO: 1225 - DNA, 65 bp, Rattus norvegicus
gggctgctggatgaggcagaagatgatgagttggagtacgatgatgagagctactcttaccaata

SEQ ID NO: 1226 - DNA, 65 bp, Rattus norvegicus
ttttctgctcggatccagtccatagatccaaggatgctgggtccaaggacctctcttccacagtg

SEQ ID NO: 1227 - DNA, 65 bp, Rattus norvegicus
ttttcctgtccctggacttctggattttgtgacaatagaccatcacttctgtgacctttgttgaa

SEQ ID NO: 1228 - DNA, 65 bp, Rattus norvegicus
accaaggacacgattgtcattgctgtgtcttccacggtcaccgtgtttgccgtgatgctgatcat

SEQ ID NO: 1229 - DNA, 65 bp, Rattus norvegicus
ggggccaggaaagcagtctcagctttgagtagtttctggcttgcaattagagagacaaacagaaa

SEQ ID NO: 1230 - DNA, 65 bp, Rattus norvegicus
tggtggcagcttctggtctagagagtcctgagagtcctaaaagggcctcccatgctccccttaga

SEQ ID NO: 1231 - DNA, 65 bp, Rattus norvegicus
cagaggtcatcacttcccagtacaacaacatgcgtgtggagttcaagtctgacaatactgtgtcc

SEQ ID NO: 1232 - DNA, 65 bp, Rattus norvegicus
accttccactccgactactccaatgagaagccattcacaggatttgaggccttctatgcagcgga

SEQ ID NO: 1233 - DNA, 65 bp, Rattus norvegicus
gtctctgggggctataaatgtggcatctccaacaaacctggagtctacaccctgttgactaagaa

SEQ ID NO: 1234 - DNA, 65 bp, Rattus norvegicus
aacctgccgaatgcttctgccttgacagaaaagagacacttggcaagctggattacagggcttgc

SEQ ID NO: 1235 - DNA, 65 bp, Rattus norvegicus
ctcaggtcttactatgccatcttcgacatgggcaacaacaaggtgggccttgccacttctgtcta

SEQ ID NO: 1236 - DNA, 65 bp, Rattus norvegicus
cctagcactcctattgcttccatgtcccaagggccctgtctcagttctgggaggatcacgcctgt

SEQ ID NO: 1237 - DNA, 65 bp, Rattus norvegicus
gtgctcctcagattctgtgttcagaaggatttgctgcattgagacttgaaacctttggatagggg

SEQ ID NO: 1238 - DNA, 65 bp, Rattus norvegicus
ggaacaagctgtgatagatgcagacagtttctggaatgagcaaacgcccttcctgagccacactt

SEQ ID NO: 1239 - DNA, 65 bp, Rattus norvegicus
ctcagttctgccagttttagggtgggtctactctggggtccatagggtgtggatacctgacaaaa

SEQ ID NO: 1240 - DNA, 65 bp, Rattus norvegicus
ttcagtctgcattactgacaccagcagtcccacctaatgcttaccacctctgcactgaccgtatg

SEQ ID NO: 1241 - DNA, 65 bp, Rattus norvegicus
ggatcctgagctttgacaagagttgtgccgtagctgagtatggtgtgtacgtgagggcaactgat

SEQ ID NO: 1242 - DNA, 65 bp, Rattus norvegicus
cacagaaattgaaagcatgtgcaaagataaagatttggggtagtggtagtggtcaaaaggggaca

SEQ ID NO: 1243 - DNA, 65 bp, Rattus norvegicus
aaaagagatgcagtgtgcgggtaccagtgatgggtccattgatgcctgcaaaggagactctggag

SEQ ID NO: 1244 - DNA, 65 bp, Rattus norvegicus
cagtgtctacaatcacaggcaactgtgagccaaacattggcatcagccatcctttctctagctag

SEQ ID NO: 1245 - DNA, 65 bp, Rattus norvegicus
tggaggcaaaatcaggcgatgtcgtggtggcctgcttaaacggtgatgtgttcgtcaaacgcctg

SEQ ID NO: 1246 - DNA, 65 bp, Rattus norvegicus
aaaggcagctaagtgcagagggtacagagagatccctgtggggaacgagaaagccctgaagagag

SEQ ID NO: 1247 - DNA, 65 bp, Rattus norvegicus
ctttgacgaactctgggataaacttcagatggcgattgagaacacgcagggctttgatggggttg

SEQ ID NO: 1248 - DNA, 65 bp, Rattus norvegicus
aagtatgcagtactgtttctgctgggtttatttgtgctggtccatcgtgagtaagaagccggcct

SEQ ID NO: 1249 - DNA, 65 bp, Rattus norvegicus; identical to SEQ ID NO: 1

SEQ ID NO: 1250 - DNA, 65 bp, Rattus norvegicus
cgagaaaggctggttgttcctctttagcatgtactcctccatgggctctgaagcagagaaggata

SEQ ID NO: 1251 - DNA, 65 bp, Rattus norvegicus
gctcttcttcattggtctcttcgtgattctctgtatggatctcggcacttagctcccaagatggc

SEQ ID NO: 1252 - DNA, 65 bp, Rattus norvegicus
tccgccaagattctggccgaccagcaggacaagtacatgaagtaacgtagggtttggaggtgcac

SEQ ID NO: 1253 - DNA, 65 bp, Rattus norvegicus
ccccatcctcccacaatcctcaactcttggggcatatccctttgtacacagtgtagatgtctttt

SEQ ID NO: 1254 - DNA, 65 bp, Rattus norvegicus
tcttgcactttgctcttggtaagctccaggatctgaccgaacagccaaacagtctcctaggctgt

SEQ ID NO: 1255 - DNA, 65 bp, Rattus norvegicus
ccaactatggattcccaaggagtgtccaagccattgatgcagctgtttcctataacgggaagaca

SEQ ID NO: 1256 - DNA, 65 bp, Rattus norvegicus
gtggcaacctacgtgccgtggattgaaaacgttctgagtggtaacgtgagtgttaacgtgacggc

SEQ ID NO: 1257 - DNA, 65 bp, Rattus norvegicus
gacttagtggactacataaccacacattataagggaccaagaatcgtgctggctgctgctggagg

SEQ ID NO: 1258 - DNA, 65 bp, Rattus norvegicus
atgaagaatatcacccttcagcacttcttcctgcctccgaagtccagcacaccagcagaatttgc

SEQ ID NO: 1259 - DNA, 65 bp, Rattus norvegicus
acaactatgggacgctgaccaagttcactctcgtcctatatggcacagcctctgagggtctctct

SEQ ID NO: 1260 - DNA, 65 bp, Rattus norvegicus
ctcggatggacccattgtgcgtcttttactgaaaactggctccccatcatgtatcctcctgatta

SEQ ID NO: 1261 - DNA, 65 bp, Rattus norvegicus
ggacaagcaaccccatgcaggccaccagatcactctacaaaccaagctcggcaacctagtgttaa

SEQ ID NO: 1262 - DNA, 65 bp, Rattus norvegicus
ctagaacacaaaacctgtgtctgggccaatgtccagcatcctggggtatggctatctgagtctta

SEQ ID NO: 1263 - DNA, 65 bp, Rattus norvegicus
gagaatggttcttggtgtcattgttcctggtcgtggatgtgccatcccaaatcgtcctggtattt

SEQ ID NO: 1264 - DNA, 65 bp, Rattus norvegicus
tctatcaagccagtgggagcactatcgattggacctacagccagggcatcaagtactctttcact

SEQ ID NO: 1265 - DNA, 65 bp, Rattus norvegicus
aaggcccagcataaattccacctcctccatgaagttctttcacatcttttccccaagccccacct

SEQ ID NO: 1266 - DNA, 65 bp, Rattus norvegicus
cctagttcttgcgtgtactttgaagaacagaactgtattagtcagcctgttagtgcaacttcaga

SEQ ID NO: 1267 - DNA, 65 bp, Rattus norvegicus
gagctctactttggccgttgaccagcctccaactgagaacctgctgtcattcactgatgaatcca

SEQ ID NO: 1268 - DNA, 65 bp, Rattus norvegicus
cagtgggaaaatgatgaccttggctgagcagcagctggtggattgtgcccagaacttcaacaatc

SEQ ID NO: 1269 - DNA, 65 bp, Rattus norvegicus
acttcatcctccagcctctggggacaggacctaagaacttccttcctggaccttcaagagcctta

SEQ ID NO: 1270 - DNA, 65 bp, Rattus norvegicus
aataagccaggagtgtatacgcgagtgacagcctaccgcaactggattaggcagcagactggaat

SEQ ID NO: 1271 - DNA, 65 bp, Rattus norvegicus
tctttacactcctaggaactgtcgctgctttccccactgaggataacgatgacagaattgttggg

SEQ ID NO: 1272 - DNA, 65 bp, Rattus norvegicus
ggagtctacaccaaaatctgtcgctacactaactggatcaagaagaccatgggcaagagggactg

SEQ ID NO: 1273 - DNA, 65 bp, Rattus norvegicus
cacagggagctcttaagttgggatctgaagatgagcagcttccggcaattctctccgctgtaaat

SEQ ID NO: 1274 - DNA, 65 bp, Rattus norvegicus
agttcaccttcctgtgccttcatgtgcagcagccaagatccctctgcaaaccaaagtacacctct

SEQ ID NO: 1275 - DNA, 65 bp, Rattus norvegicus
ggtggagacagcatttagtgccttccacttcacagtaaccagtctctcctgagtgctttcaacag

SEQ ID NO: 1276 - DNA, 65 bp, Rattus norvegicus
taggtagttgtccttggaaccattctcatgtaactgttgactctggacctcagcagatcacagtt

SEQ ID NO: 1277 - DNA, 65 bp, Rattus norvegicus
aaagaatggcctcctagactatagcaccagcactgtcacaaagcatctcatccattgcccagggt

SEQ ID NO: 1278 - DNA, 65 bp, Rattus norvegicus
ctcagctccgttgtgttcaacaaaccattgaaaccattgaagaaaacatacgatggatggataaa

SEQ ID NO: 1279 - DNA, 65 bp, Rattus norvegicus
tccattgatgtctcaactgcagctgaagcagaagccaccaccaggcaaaagctggttaagggtca

SEQ ID NO: 1280 - DNA, 65 bp, Rattus norvegicus
aacgaaaacgaggttcgtgagagagggtaggaacatgaccttccactgtggacagaagatcctac

SEQ ID NO: 1281 - DNA, 65 bp, Rattus norvegicus
caccaaaacattgagcagtacgagctggttcggttgttaggaagaatgtagtgaaggatgcttgc

SEQ ID NO: 1282 - DNA, 65 bp, Rattus norvegicus
ttgctgaccacaagtgcagcagccctgaggtgtatggtgccgacatcagccccaacatgctctgt

SEQ ID NO: 1283 - DNA, 65 bp, Rattus norvegicus
gtgatggacacattccaaattgagtgtctgaaggatggtgcatggagtaacaagattcccacctg

SEQ ID NO: 1284 - DNA, 65 bp, Rattus norvegicus
tacggcatctacacgaaggtcacggccttcctcaaatggattgacaggtccatgaaagccagggt

SEQ ID NO: 1285 - DNA, 65 bp, Rattus norvegicus
gccctgtggatcaaaggaaaagccgggagtttacacagatgtctgcactcatatcagatggatcc

SEQ ID NO: 1286 - DNA, 65 bp, Rattus norvegicus
ccccctgaatgggtacctattatccagcaggacattcagagccagcggaaggtgaaacctcagcc

SEQ ID NO: 1287 - DNA, 65 bp, Rattus norvegicus
cctctgcttgggagttgtgccaggtgcttcagcattggatcttagtttggatgttcaatggcaag

SEQ ID NO: 1288 - DNA, 65 bp, Rattus norvegicus
tgcaagagatgtgataacagctgcttgacatgcaatgggccaggattcaagaactgctccagctg

SEQ ID NO: 1289 - DNA, 65 bp, Rattus norvegicus
cagtggaagagacgtttcctcattctttttggagcaggtatggcagacaagaggtcagaccacag

SEQ ID NO: 1290 - DNA, 65 bp, Rattus norvegicus
gccagaggaacgctggctgcctatccatactgtggaaaccatcatgattagtgtcatttctatgc

SEQ ID NO: 1291 - DNA, 65 bp, Rattus norvegicus
tatgtgcaaaagaatcccttcaggaacgatgacctgtgcatactggctctccaaggcctggacat

SEQ ID NO: 1292 - DNA, 65 bp, Rattus norvegicus
agctccaagctcagcacctgctgctcctgcatgcctgttaccatgtggttcctgatcctgttcct

SEQ ID NO: 1293 - DNA, 65 bp, Rattus norvegicus
tttctcaccgaaggactccggttgtcggacatcactgcacgatgcatctggcctggcctatggat

SEQ ID NO: 1294 - DNA, 65 bp, Rattus norvegicus
tgatcacggctgcccactgctatagcaacaattaccatgttttgctgggccgaaacaacctattt

SEQ ID NO: 1295 - DNA, 65 bp, Rattus norvegicus
cataccccattgtatgagctactgcacagtgacaaggcaggagtggactggaatgtactgagcag

SEQ ID NO: 1296 - DNA, 65 bp, Rattus norvegicus
ggtatttgtacgtgctggccaacctctgtgagaagccatatccgattgacaggataaagatggcc

SEQ ID NO: 1297 - DNA, 65 bp, Rattus norvegicus
cataacaaagccctttccagagccttgcccttgatccctctgattttgaaggttttgcaatgtgt

SEQ ID NO: 1298 - DNA, 65 bp, Rattus norvegicus
acatcctttcctgaagaagcagtgggcttacctggggacagctcaagacacaggcacgcaataaa

SEQ ID NO: 1299 - DNA, 65 bp, Rattus norvegicus
ccatgggatgtagctattccaaacagagtaatcagaccaaacaaagcatgagagcccacccagcc

SEQ ID NO: 1300 - DNA, 65 bp, Rattus norvegicus
tgtccctgaactctggctaccacttctgtggaggttccctcatcaatgaccagtgggtggtgtct

SEQ ID NO: 1301 - DNA, 65 bp, Rattus norvegicus
tcttctagagctgaaaagagagcaaggacaacactctcgacggtgggacctaggtggccttccag

SEQ ID NO: 1302 - DNA, 65 bp, Rattus norvegicus
catcaaacgcacctcccaagagaatgcgtaagcagggagaggtattcacagcctcaccaaactaa

SEQ ID NO: 1303 - DNA, 65 bp, Rattus norvegicus
gtgggacacctacctttgagtcttcctctgatgccatgactgttgtgctgtctacagattatgcc

SEQ ID NO: 1304 - DNA, 65 bp, Rattus norvegicus
tgcgaactggacagtcacccttttgagaccaccctttcatgctcctccatgttcattagcccctt

SEQ ID NO: 1305 - DNA, 65 bp, Rattus norvegicus
agaaagaaaggctacgcaagcgcagttcctcagaagacgccctggttagggtacatacacacagg

SEQ ID NO: 1306 - DNA, 65 bp, Rattus norvegicus
accctggtgctatgtgcaaattggcctaaagcagtttgtccaagaatgcatggtgcaggactgct

SEQ ID NO: 1307 - DNA, 65 bp, Rattus norvegicus
ataaagggcaaggatctgaccagcctgagtctgcacgagtcagagtctccaagctagagaactct

SEQ ID NO: 1308 - DNA, 65 bp, Rattus norvegicus
gaacatgaggatgatccagctacacaatggggagtacagcaacgggaagcacggctttaccatgg

SEQ ID NO: 1309 - DNA, 65 bp, Rattus norvegicus
atttcatccaggaagctgaccccaggctaggaggagctctgcaagaccctgttctgtgtaagaaa

SEQ ID NO: 1310 - DNA, 65 bp, Rattus norvegicus
cagtccctgacatgatcctacactcaagtcccttaagatccatactatgatatgaactccaaagc

SEQ ID NO: 1311 - DNA, 65 bp, Rattus norvegicus
ctcccaacgagttagaagagtacaaccagatcctgctagacatggagacgacttacagtgtagcc

SEQ ID NO: 1312 - DNA, 65 bp, Rattus norvegicus
gcttccattcttcagtaccttagagttccactggttgaccgagccacatgccttaggtccacaaa

SEQ ID NO: 1313 - DNA, 65 bp, Rattus norvegicus
ctggtacctcagtcgcggtcaccctgacgttcatgagaccctcctatgatcagtgaataaaatac

SEQ ID NO: 1314 - DNA, 65 bp, Rattus norvegicus
cccaattgtaggcacaaggaggtcctgtgggattccccatcagtcacagtcactaatctgaaatc

SEQ ID NO: 1315 - DNA, 65 bp, Rattus norvegicus
tggcccaatgcagttctctggagaaaactacctttccccaaggcatctgcacccattgacaatgg

SEQ ID NO: 1316 - DNA, 65 bp, Rattus norvegicus
gccgggtgttccagtgtctcagtgtgaagaacaaggacttcatccatctcaacataaacgagttc

SEQ ID NO: 1317 - DNA, 65 bp, Rattus norvegicus
tgggccaggttaaacctcgtcaggggctcaactgtcatcactagggcaccccattgaatgcttta

SEQ ID NO: 1318 - DNA, 65 bp, Rattus norvegicus
agggaagttgaagtcctgtcttactggcttccttcaggaatatgggttgtctgtaatggtgaagg

SEQ ID NO: 1319 - DNA, 65 bp, Rattus norvegicus
cgaggttgactttctccttggactcttgacgccatgaacgaatgatgtgatacacccaagtggga

SEQ ID NO: 1320 - DNA, 65 bp, Rattus norvegicus
actgtcccaaggactctcccatgaaccctgtccataaatgctctgtgtggtgagcctgtctacct

SEQ ID NO: 1321 - DNA, 65 bp, Rattus norvegicus
gaatatcagagccctgaactcgtaaagggatctaagttaagggtcatagttgggcatactcatct

SEQ ID NO: 1322 - DNA, 65 bp, Rattus norvegicus
caggatctgctgatgatggagcaagtgaaagactttgctgccaacgtgtacgaagcattcagcac

SEQ ID NO: 1323 - DNA, 65 bp, Rattus norvegicus
tgtcatggaattcaggcatcgacaggttgtctgaaacactatgcagtcagggaacacagcctttt

SEQ ID NO: 1324 - DNA, 65 bp, Rattus norvegicus
agttgtccgactaatgcacttgacagacgcatagatggatgagaggacagtccttgcagccttgg

SEQ ID NO: 1325 - DNA, 65 bp, Rattus norvegicus
tgagcaaaattcctcacggggaccctcagagtctggacccaccagaagtcagcaacgcgaagctt

SEQ ID NO: 1326 - DNA, 65 bp, Rattus norvegicus
gtcattaggccagcaacaagagaagcgggaacagagaatatggctagaaacccaggtccaagcat

SEQ ID NO: 1327 - DNA, 65 bp, Rattus norvegicus
tgctcctcagcctcctgttgttattggtcctcgtactacttggtgccagctactggtaccgtgcc

SEQ ID NO: 1328 - DNA, 65 bp, Rattus norvegicus
cctgcccattatcacctttaagctaggaggccaaaactatgaactacacccagagaagtacatac

SEQ ID NO: 1329 - DNA, 65 bp, Rattus norvegicus
cctctggaagcagtgagtgggaagacgaacagtctgagtattccgacatccggaggtgaaatgaa

SEQ ID NO: 1330 - DNA, 65 bp, Rattus norvegicus
ctgtatgcatcccgtgaccgccatgctggtggggaaagatctgaaagtggattaaggaactgagt

SEQ ID NO: 1331 - DNA, 65 bp, Rattus norvegicus
aaatctgcaaacgttgatccagtccctccatacatcagtggacatctatctgacggataacaatc

SEQ ID NO: 1332 - DNA, 65 bp, Rattus norvegicus
gctgcgggataatggcaaccgagaggatgtctaactacactggaggcatctatactgagtaccag

SEQ ID NO: 1333 - DNA, 65 bp, Rattus norvegicus
gggcgcatacgtgttactgaaacgtgaatcctaacatgagaagcagttcctgggaccagactgaa

SEQ ID NO: 1334 - DNA, 65 bp, Rattus norvegicus
ggattcaggagactatggcgaacaactgagttctcttacctttcgtaaatcaccggttcactatc

SEQ ID NO: 1335 - DNA, 65 bp, Rattus norvegicus
gttccatgctgccacagctaaggacctgggccagtatctctcctggttaagttggctctggagag

SEQ ID NO: 1336 - DNA, 65 bp, Rattus norvegicus
tctgggcagtccgaggaaatgaagtccaagcaggttacccaaagaggatccacactcttggcttt

SEQ ID NO: 1337 - DNA, 65 bp, Rattus norvegicus
gtctagatttactggacaaagggtagcctagaaagagtctccctgaatgccttactactttcccc

SEQ ID NO: 1338 - DNA, 65 bp, Rattus norvegicus
tctatagcaacagctgggagtccctggagttaaggacacctgctcatggtagtgggtgaaatctg

SEQ ID NO: 1339 - DNA, 65 bp, Rattus norvegicus
aaggcaccacacaacgctgtcttttgcttcggcgttacagcatctcatagaggccctgaagatga

SEQ ID NO: 1340 - DNA, 65 bp, Rattus norvegicus
ttatagtatcctttgggttcaacatagtttgtccccaacctgtccccagctctctctttgaggct

SEQ ID NO: 1341 - DNA, 65 bp, Rattus norvegicus
acatcctcagcacaggaaatgtcatgaccttgaagtttctgagtgatgcgtccgtcacagccggt

SEQ ID NO: 1342 - DNA, 65 bp, Rattus norvegicus
cctacaatgactggatcaacgagaaaatacaactgtgaagaggccgttccagaagtctcgctgcc

SEQ ID NO: 1343 - DNA, 65 bp, Rattus norvegicus
tgagaagcacggtttgcatatctccctgcttaagtaccaggcaaatgacagctcctcttgggaga

SEQ ID NO: 1344 - DNA, 65 bp, Rattus norvegicus
tggagatgtgttcattcgggagttctacagtgtgtttgacagggccaacaatcgtgtcggactgg

SEQ ID NO: 1345 - DNA, 65 bp, Rattus norvegicus; identical to SEQ ID NO: 1

SEQ ID NO: 1346 - DNA, 65 bp, Rattus norvegicus
gggcatcgtcgcctatggatctaaaaatggttcagctccagaggccttcaccaaagtctcaactt

SEQ ID NO: 1347 - DNA, 65 bp, Rattus norvegicus
tcagacctggtcagttggttcaaggctcacagaggacctgggagtaaaatgctcagcgttcatgt

SEQ ID NO: 1348 - DNA, 65 bp, Rattus norvegicus
cagggtctccaactacatcgactggatcaactcggtgattgcaaagaactaagcaaaggcatctc

SEQ ID NO: 1349 - DNA, 65 bp, Rattus norvegicus
tgatcttcacaggaagtggagcatccatggcaggactcgccaaagccacagaaacaggaagtctt

SEQ ID NO: 1350 - DNA, 65 bp, Rattus norvegicus
atggacatgttccacacacgcttcaagcaggagggtgtgcttagccccaaggttggcatggatta

SEQ ID NO: 1351 - DNA, 65 bp, Rattus norvegicus
tacatttcctggatgaacaatgtcattgcctacaactgaacgtcttcctgagtccagtggcctcc

SEQ ID NO: 1352 - DNA, 65 bp, Rattus norvegicus
tgaaggcctgtaaggactataggcattatgacaatagattccagatctgcgtggggattcctcaa

SEQ ID NO: 1353 - DNA, 65 bp, Rattus norvegicus
taactctggatctcgggccagtgtgtgaggaaatctggagctggaatcgtgcaggttttctgtga

SEQ ID NO: 1354 - DNA, 65 bp, Rattus norvegicus
ttcctgagacccatccagggtcagggaagaaccaggcacctgctgtctttaactcactgcttcct

SEQ ID NO: 1355 - DNA, 65 bp, Rattus norvegicus
ggaggacccaagtgtgtcgtgatcagtgtgtacatactgtgctaactggcttacagcttgtttgt

SEQ ID NO: 1356 - DNA, 65 bp, Rattus norvegicus
acttctgagttgcatccagggtgacctctgttgtttccaacatgctgctttctgcctccctgctt

SEQ ID NO: 1357 - DNA, 65 bp, Rattus norvegicus
ggtggagcctttccctggaaagacaaccttctgcatcacctggatccatcctgctcttattcatg

SEQ ID NO: 1358 - DNA, 65 bp, Rattus norvegicus
gggtctgtgagtcccagttccaacgttcttacatcaaagcgagtgagatatgtgtgggagactca

SEQ ID NO: 1359 - DNA, 65 bp, Rattus norvegicus
cagatgttgcatccaagttcaatcagagactgcaagacttagacaagagcaaccccatattactg

SEQ ID NO: 1360 - DNA, 65 bp, Rattus norvegicus
accggaatgggaaatatggcttctacacgcacgtgttccgtctgaaaaggtggatgcagaaagtc

SEQ ID NO: 1361 - DNA, 65 bp, Rattus norvegicus
ctgtgcacttttgtgtgtcctaactgatgtgtgctctctacagttcacatgggttatctgtgcac

SEQ ID NO: 1362 - DNA, 65 bp, Rattus norvegicus
aaccagcaaaacccactagggctgaaaacctcctccatagcaccttcccagctagcaacccatat

SEQ ID NO: 1363 - DNA, 65 bp, Rattus norvegicus
ggtgtggacactgcataagaatagctagctctgtgaacagtgccaacagggaagctctggaaact

SEQ ID NO: 1364 - DNA, 65 bp, Rattus norvegicus
tctatgtcagtgccgactccaagaactccaacagcaatgtgatccaggtggaccagtccggcctt

SEQ ID NO: 1365 - DNA, 65 bp, Rattus norvegicus
gagcaattccctcacctccaaggcgactgcgctctaggaatcacattccgttcctttagaagaca

SEQ ID NO: 1366 - DNA, 65 bp, Rattus norvegicus
atactatctgcggaatggggaacgcatctccgtgtctgcagcctccaagctactttccaacatga

SEQ ID NO: 1367 - DNA, 65 bp, Rattus norvegicus
ggacccagagttccttcagagcgtcctagagaaccttcccggtgtggatcccaacaatgaagcca

SEQ ID NO: 1368 - DNA, 65 bp, Rattus norvegicus
tttgagcctccatccgagcaaacgggtgctgtgggccttgtggccatttgtcggagtccaataaa

SEQ ID NO: 1369 - DNA, 65 bp, Rattus norvegicus
acccctctggagctcgaggtgctagaagagattgttcagacaatggacacttcgtgaatggtgct

SEQ ID NO: 1370 - DNA, 65 bp, Rattus norvegicus
catctttgtaagcaggagctaactgatgtggggtcatttggtgtgtccgagatagagtgttaaca

SEQ ID NO: 1371 - DNA, 65 bp, Rattus norvegicus
cccaccttcagcgttcgggtcattgacaaagatggcatccacaatctggagaacattaccttcac

SEQ ID NO: 1372 - DNA, 65 bp, Rattus norvegicus
caggattcctgtgacactcaacatgaagatggtaatgccctcctggtttgacctgatggggctga

SEQ ID NO: 1373 - DNA, 65 bp, Rattus norvegicus
aggttggtgtaatgggcagaggtgaaatgggtatcagagaaacgcagtgcgtggagggaagcttc

SEQ ID NO: 1374 - DNA, 65 bp, Rattus norvegicus
acctctaccatgtgcgggaggatggctggatccgtgtctccagtgacaatgtagctgacttacat

SEQ ID NO: 1375 - DNA, 65 bp, Rattus norvegicus
tccgcaaagatgcagctgaaaccgatggagattaaccccgagatgctgaacaaagtgttggccaa

SEQ ID NO: 1376 - DNA, 65 bp, Rattus norvegicus
aatgtctgcaattcactgccaatgctcttgctttggctatggaacgggatggctccagtggagga

SEQ ID NO: 1377 - DNA, 65 bp, Rattus norvegicus
agtaacaacaaaccgacatcttagaggccctggattgaagatggaaactctcccactcctcctgc

SEQ ID NO: 1378 - DNA, 65 bp, Rattus norvegicus
tcagatccatctggagcttactttgcctggaaggccacagcaatgggaaagaactacgtgaacgg

SEQ ID NO: 1379 - DNA, 65 bp, Rattus norvegicus
ggtcttgaagaaagaccacagagaaaagcacagccttcacaggctgctgatgaacctgcagaaaa

SEQ ID NO: 1380 - DNA, 65 bp, Rattus norvegicus
cgccacactaacaagagagaatggaaagaccgtgatcagagtcctcaagcaaaaggaagtggaac

SEQ ID NO: 1381 - DNA, 65 bp, Rattus norvegicus
gaacctgtcattgctggcttggacccgaagacctttaagcccttcatttgctctctggacctcat

SEQ ID NO: 1382 - DNA, 65 bp, Rattus norvegicus
gaccaactgggacattgctcacatgatcagtggctttgaatgaaatccagatgaagtgtccagag

SEQ ID NO: 1383 - DNA, 65 bp, Rattus norvegicus
gacggagttacccaccgcattaaacagaggtctgagaggaggcgtttcagatacccgaatgtaaa

SEQ ID NO: 1384 - DNA, 65 bp, Rattus norvegicus
tgcagttcggagaagaagatgcagatccaggtgctatgtctcgtccctttggagtagcattgttg

SEQ ID NO: 1385 - DNA, 65 bp, Rattus norvegicus
ggttcctcaacccttcctgtccatgtagttctgactgcagcagtgtcactaaccaagtagtccat

SEQ ID NO: 1386 - DNA, 65 bp, Rattus norvegicus
ctgttgcttatgagcctcagatccaaagttggccagcatctccattctgcaccacttcctttgtg

SEQ ID NO: 1387 - DNA, 65 bp, Rattus norvegicus
gtgcagatgcgtttctcgccttatgccttcaacggaggtactgtattggcaattgctggagaaga

SEQ ID NO: 1388 - DNA, 65 bp, Rattus norvegicus
aacatttcaccatcctctggtgtccatttctgtgacagttgcatatggctagcaccatggattat

SEQ ID NO: 1389 - DNA, 65 bp, Rattus norvegicus
gtataatttacctcccagtaggaaggctagcaagttttaagtgccacgggttttaaggattctgc

SEQ ID NO: 1390 - DNA, 65 bp, Rattus norvegicus
accaaacttccagctgttggataatccagcacgggtcatgcctgcccagctgaaggtcttaagta

SEQ ID NO: 1391 - DNA, 65 bp, Rattus norvegicus
actgctcagaaggggtaaaggtccccaacctataagacaatgagatggcttttcagtggaagcca

SEQ ID NO: 1392 - DNA, 65 bp, Rattus norvegicus
ctatgatggtttgctagtcgccaacttctaggtctaaccccagccaaagatgacagcagaacaac

SEQ ID NO: 1393 - DNA, 65 bp, Rattus norvegicus
gctgagctgtcacatcaaaggaaacagcattattccagcagcatccattcttgtctaaaccttcc

SEQ ID NO: 1394 - DNA, 65 bp, Rattus norvegicus
cagcggccatcagtttggggatcgtttccattctaagggacatcaagacacagagggaagaatac

SEQ ID NO: 1395 - DNA, 65 bp, Rattus norvegicus
gcctacattcccgagggacagcgctattccattcagaatgcccaggctgcgttctgcttctcaga

SEQ ID NO: 1396 - DNA, 65 bp, Rattus norvegicus
gcgctgggcggtttgttccttcatcgcattcgttaacaggtcaaaatgcaaatcttcgtgaagac

SEQ ID NO: 1397 - DNA, 65 bp, Rattus norvegicus
agtgtcacacccatgtcctccagccaagtgcgcaccagcgacgcctatttgctcttctatgaact

SEQ ID NO: 1398 - DNA, 65 bp, Rattus norvegicus
gagaacaatgccttattcccttcaggtttctgtgccagcaagccatagacgcctcatctttgtct

SEQ ID NO: 1399 - DNA, 65 bp, Rattus norvegicus
tggacatcatcactgctggctccacagagggacaactcaatgtgggagtccagattcaactccac

SEQ ID NO: 1400 - DNA, 65 bp, Rattus norvegicus
tttctttgcaagtcgaaaaggctacagcagaaaagggtttgaccgagtgagcacagaggggagtg

SEQ ID NO: 1401 - DNA, 65 bp, Rattus norvegicus
cctaattttggcatgaaccccttgttccaaatgaagacggcatcgcgagtggctctgaggtgtgt

SEQ ID NO: 1402 - DNA, 65 bp, Rattus norvegicus
tacaaggctctcagacacctggacctagctattgtcatgggagccactgtgccagcatgattcca

SEQ ID NO: 1403 - DNA, 65 bp, Rattus norvegicus
ttgacggagtcaactacctggtggattgtgaaaagaagctggagagaggccaggacatcaaggtg

SEQ ID NO: 1404 - DNA, 65 bp, Rattus norvegicus
cccattctacttgccaaggacctgcctctcaatccctgtcctagtaaagactccacgttctgttg

SEQ ID NO: 1405 - DNA, 65 bp, Rattus norvegicus
ctgtgtgggagctttctaaggagaaacagatctatctgcatacagcctgcagagtcctgccgtaa

SEQ ID NO: 1406 - DNA, 65 bp, Rattus norvegicus
agggttgcaggggcttgtgtgacagaaggggctgagagagcagtgtcctgttaagcttgtaatgt

SEQ ID NO: 1407 - DNA, 65 bp, Rattus norvegicus
cctgacatcagtgccttctacatccagcacaggagtacaagcctatgagatttcatgggaaaacc

SEQ ID NO: 1408 - DNA, 65 bp, Rattus norvegicus
ctgacgcaacaaaccgagggtccttaggaaccctcagtatttctgattttgtctagggtctcggt

SEQ ID NO: 1409 - DNA, 65 bp, Rattus norvegicus
cagttctgggtctcagcctactcctctgtaggttgcctgtagggttttgattgtttctggcctct

SEQ ID NO: 1410 - DNA, 65 bp, Rattus norvegicus
gtcaagattcctcagcaggacagagcactagtagtacaagctggtctttcaatgccagaacccac

SEQ ID NO: 1411 - DNA, 65 bp, Rattus norvegicus
gaacccacagatgcgtggtcttctgcccaagcgtctgcgggttcatattgttggcgcattcgttg

SEQ ID NO: 1412 - DNA, 65 bp, Rattus norvegicus
tgacatcctcttcagtcaggtcggaagtcacctcagttgctgcctcacttcaggcaaacctcact

SEQ ID NO: 1413 - DNA, 65 bp, Rattus norvegicus
ttctccaacagccacaacacgcagaagctgcgcttcccggccgaggatgaattccctgatctgag

SEQ ID NO: 1414 - DNA, 65 bp, Rattus norvegicus
tccgaggtcgaacaggtgcagctggtggtggatggcgtaaagcttatggtggagatggagaagaa

SEQ ID NO: 1415 - DNA, 65 bp, Rattus norvegicus
gggataaagcctggtcactgtactacgctgggaatgtggttggaagctaagaggttggtaatgtc

SEQ ID NO: 1416 - DNA, 65 bp, Rattus norvegicus
ccaactcacctcattggcaccttcattgctgggtctcttgctagtccatcaggtttagtgcaaga

SEQ ID NO: 1417 - DNA, 65 bp, Rattus norvegicus
actggtatccgttcggagagtgagacagagtctgaagcttctgaaatcacaatccctcccagtga

SEQ ID NO: 1418 - DNA, 65 bp, Rattus norvegicus
tctgcataagctcctgggttcccaaaagcgacctttctaggaaacagtggccttgactgtgtgag

SEQ ID NO: 1419 - DNA, 65 bp, Rattus norvegicus
cgcatgaacgaggtgatcgtgggaaatgaccagctcatggagatctgaatcctgaacaagtctga

SEQ ID NO: 1420 - DNA, 65 bp, Rattus norvegicus
gactgatggtgactgccggatccatgcatctcattggctgtcctagcagatagggcaaaacaaga

SEQ ID NO: 1421 - DNA, 65 bp, Rattus norvegicus
aggagttgaaggctattcagtacggaaccagtgcccacgattggatgcttcgtgtgtgacgttag

SEQ ID NO: 1422 - DNA, 65 bp, Rattus norvegicus
caaagttcgtcagatcctggaaaggtgggactggagacttcaagatgggctgcaactatggatct

SEQ ID NO: 1423 - DNA, 65 bp, Rattus norvegicus
ggaagaggccaaggctacagccagcctagcagtggatgtgattgcttcaagttttggtcagacaa

SEQ ID NO: 1424 - DNA, 65 bp, Rattus norvegicus
aaatacacagtgatgtcaagtgtcaactcacggttggaagcaaaggcatctggagacgaggcctg

SEQ ID NO: 1425 - DNA, 65 bp, Rattus norvegicus
tagtgaatccaccctcagtgggcattgccaaccaggaactgtctgaggtggttagtagagctgtg

SEQ ID NO: 1426 - DNA, 65 bp, Rattus norvegicus
gaatttgttcgccactgcatcgacaagtcccaggaacgggtggaaggaaaggtgcaggtatctgt

SEQ ID NO: 1427 - DNA, 65 bp, Rattus norvegicus
caagctttccaaggttaccaggttacaatgaagactgctaaagtggctgcgtctgactggacgtt

SEQ ID NO: 1428 - DNA, 65 bp, Rattus norvegicus
ttactgggttgaaccccaagcaggtcgagtatttggtcaacgagaagcacatctatctgatgccg

SEQ ID NO: 1429 - DNA, 65 bp, Rattus norvegicus
tgggcgagaacagcgaagtgttgaaaagcggccggtttgtaactgtgcagaccatttccgggact

SEQ ID NO: 1430 - DNA, 65 bp, Rattus norvegicus
ctcagttaacctcccagtgtgggtttaggcccaggagggaacctgagctagggatggatggaggt

SEQ ID NO: 1431 - DNA, 65 bp, Rattus norvegicus
tcttcgggaagatcattcgcaaggaaatccccgccaaaatcatttatgaggatgaccagtgtctt

SEQ ID NO: 1432 - DNA, 65 bp, Rattus norvegicus
tgagtaattccgtgattgaattgctaacactgctcagggcagtgtgagaaagccacacagatgcc

SEQ ID NO: 1433 - DNA, 65 bp, Rattus norvegicus
cccgcactctgacccattacaagtcaactgccaaagcttagacgctctctacactcttgtgtaaa

SEQ ID NO: 1434 - DNA, 65 bp, Rattus norvegicus
aacccaactacagtcccaacattgtgaaggaagacctggttctagcccctagctcgggttaggtt

SEQ ID NO: 1435 - DNA, 65 bp, Rattus norvegicus
ggacctccatcaccttctccatgcaagatggtcctgaagctggacagactgtgaagcatgtacat

SEQ ID NO: 1436 - DNA, 65 bp, Rattus norvegicus
tgctccatctctgaggctaaggcacgcctgtctgcagcttcttcagtctgtgaggttgttaggag

SEQ ID NO: 1437 - DNA, 65 bp, Rattus norvegicus
gctgaggggacagccactgtttggggaattagattgcctgtacccaagcgttagctcatgatcat

SEQ ID NO: 1438 - DNA, 65 bp, Rattus norvegicus
tggccagtgtctgttcaggcccactgaggaagtgtgcagagaagtcttgaaagtctgtgcctgcc

SEQ ID NO: 1439 - DNA, 65 bp, Rattus norvegicus
gaattcagccacaatcccagagtctgacgatctttaacgggcttcctcgagaacaggcacatgtg

SEQ ID NO: 1440 - DNA, 65 bp, Rattus norvegicus
accccattttctctgaggtcatctcagaccaggaggctgtgactgctatcgagaagttcgtagac

SEQ ID NO: 1441 - DNA, 65 bp, Rattus norvegicus; identical to SEQ ID NO: 1

SEQ ID NO: 1442 - DNA, 65 bp, Rattus norvegicus
atggctgaccactctgacgtcttgaagggcattcagaagtttcccggcatcaactacccggtcct

SEQ ID NO: 1443 - DNA, 65 bp, Rattus norvegicus
ctcacgccctcagctgtaacagtgccgagggagtcactgaagaagagactgaatgaccagagtat

SEQ ID NO: 1444 - DNA, 65 bp, Rattus norvegicus
ggccagaccttctgaataactggacagaccattaaggagcatctgcagaacttcgcagtgaacat

SEQ ID NO: 1445 - DNA, 65 bp, Rattus norvegicus
atcgcaacaaggaccacccagccttcgcccccttatatttccccacggaactacaccggaaggaa

SEQ ID NO: 1446 - DNA, 65 bp, Rattus norvegicus
cacattcagatccataccgtggtgttggctggtgtgacctgtgtattgtggcgttcatggtgaac

SEQ ID NO: 1447 - DNA, 65 bp, Rattus norvegicus
caggtcatttgtggaatcaacattcctgctggtaaccagatttcttcagggcacagttactccag

SEQ ID NO: 1448 - DNA, 65 bp, Rattus norvegicus
ttggtctaccgcgatgtcctcaagcagctattgctgtgtgacctgtatgtgctagagcccttcat

SEQ ID NO: 1449 - DNA, 65 bp, Rattus norvegicus
tcatcatacgttgcctgtcatcagcttatactgcctgagggagagcctagcactcatttcagagc

SEQ ID NO: 1450 - DNA, 65 bp, Rattus norvegicus
atcgagccgatcaaagacaacgatgctgccatccgcaaccacggcattgagctggctgtgaactt

SEQ ID NO: 1451 - DNA, 65 bp, Rattus norvegicus
caaagggtagttttcaccttcgttcattatggctctgagaactgctttgttagcctgcttacata

SEQ ID NO: 1452 - DNA, 65 bp, Rattus norvegicus
ctggccccatgttgtctgtattcctgtttgtggtacgagataactagtcccgtttgtctcttacg

SEQ ID NO: 1453 - DNA, 65 bp, Rattus norvegicus
ggcagtggaaatttgccgtatcgcagcatccgacacaatgagcttatgtcacacaagcagcttgt

SEQ ID NO: 1454 - DNA, 65 bp, Rattus norvegicus
aggcctggctctagcaatggccttcgcaaatctgcgcaaaatactcatcagtgatagcctcgacc

SEQ ID NO: 1455 - DNA, 65 bp, Rattus norvegicus
aaatgaaggtgcgttccagtgacctgagacccacagctgtgaagtaaacgtcgtgcctgtacgga

SEQ ID NO: 1456 - DNA, 65 bp, Rattus norvegicus
ctaattggagaaagacagactgctattaactgctaggacaccctacgtgcattgttgcagcctgg

SEQ ID NO: 1457 - DNA, 65 bp, Rattus norvegicus
gtggacaacctatcattttccttctcaccaagaagaggatttgcctgtgtacctaaagcttagga

SEQ ID NO: 1458 - DNA, 65 bp, Rattus norvegicus
gagacctccccattttcttcgatgtcctcattcacgatcccagtcatttcctcaactactctgcc

SEQ ID NO: 1459 - DNA, 65 bp, Rattus norvegicus
tggaacaaagagatgggtgaccacctggtgaagcatggtgatggcgtaaaggacatcgcattcga

SEQ ID NO: 1460 - DNA, 65 bp, Rattus norvegicus
ggtgcagttaccgtttggcgatccctctcctgctaacatgccgttcgttgagttggaaacaaact

SEQ ID NO: 1461 - DNA, 65 bp, Rattus norvegicus
ggtgcaggtgtgaggctccatttgcctccctaactccttatcacccgaagtggcacctaataaag

SEQ ID NO: 1462 - DNA, 65 bp, Rattus norvegicus
ggtctttcttgccttcagatgatatctctggctgttaacttgtcctctgtgtggctaaatactta

SEQ ID NO: 1463 - DNA, 65 bp, Rattus norvegicus
aacatcaaggagtgacgactcctcagaaaaggccacctgcccttctcagccctgggtccttaatg

SEQ ID NO: 1464 - DNA, 65 bp, Rattus norvegicus
atgttccaaaccaagagtttgttaactcggacctccttgaaaagagcaaatatcgaaaaatctat

SEQ ID NO: 1465 - DNA, 65 bp, Rattus norvegicus
aatggtggcatcattggggtacagacatgacacagggccacaccaaagtacactcaggcaccaat

SEQ ID NO: 1466 - DNA, 65 bp, Rattus norvegicus
caggacgtggatagagataactgtgatctgtttcactctcgtcttcgtgttactgtggtgtatac

SEQ ID NO: 1467 - DNA, 65 bp, Rattus norvegicus
agaaccgtgaggacagagccgccctactccgaaccttcagctttcttggctttgagattgtgaga

SEQ ID NO: 1468 - DNA, 65 bp, Rattus norvegicus
gcgtggtctctgtggcatcagttttgccttctgcataggagaaaggttgtatgtaacacagcccg

SEQ ID NO: 1469 - DNA, 65 bp, Rattus norvegicus
taagtgccgccattgccaccactttactaaaggaagtttccgctcagaggagagtctgtacttcc

SEQ ID NO: 1470 - DNA, 65 bp, Rattus norvegicus
aaggaagaactaaggaaactgctgcagaagttaagggagtcctcgctgatgctcctagaccaggg

SEQ ID NO: 1471 - DNA, 65 bp, Rattus norvegicus
tactgacaagtgatgggtccatgctatgtatgtgggtatggaggcatgtgcccaccttaccacat

SEQ ID NO: 1472 - DNA, 65 bp, Rattus norvegicus
ggcttttcctttggtaataccagcacccttggacaaccaagcaccaatactatgggcctatttgg

SEQ ID NO: 1473 - DNA, 65 bp, Rattus norvegicus
cataatccagaggttgtaagaccactgatggttttagtggttagggcaacgtttgaaatgggaac

SEQ ID NO: 1474 - DNA, 65 bp, Rattus norvegicus
gtgggaacaaagtcttgatctcaggatgaggtctgtaaggataggcagagcggatggaaaagggg

SEQ ID NO: 1475 - DNA, 65 bp, Rattus norvegicus
gctgtctgcttgctacgtcaggccttctttacgatgaccacatggacaggaaaagggttcttttc

SEQ ID NO: 1476 - DNA, 65 bp, Rattus norvegicus
agcgtctatgccctcaagcaccatgcagctccttcttgctctactggcgctggcttacgtggccc

SEQ ID NO: 1477 - DNA, 65 bp, Rattus norvegicus
gacattcatgagggtgatgtcccaccacctttacactgcacccctccactcacttaaaagccagc

SEQ ID NO: 1478 - DNA, 65 bp, Rattus norvegicus
ccaaccattagtcagagaattgtcagtgctcagagcttggctgaggatgatgtggaatgagccag

SEQ ID NO: 1479 - DNA, 65 bp, Rattus norvegicus
acttcgtgagcgagtgaacaagagacgggtgaaggagatggtgaaggaatttacactgctgtgcc

SEQ ID NO: 1480 - DNA, 65 bp, Rattus norvegicus
cgccaccaaagcaagaattccgttctatggaagctataccgaaatggatcctgtcatcattgctt

SEQ ID NO: 1481 - DNA, 65 bp, Rattus norvegicus
atgaggtattcttgagtctgcccacttggaagagagccatggttctacacgccattcatgccact

SEQ ID NO: 1482 - DNA, 65 bp, Rattus norvegicus
tctctgaagtctggagtgccatatgttccctataaggcctgaagcccacagccctgaaacagtgg

SEQ ID NO: 1483 - DNA, 65 bp, Rattus norvegicus
ccagcatgacccttccctacagcctctgctcatatgttacgataaggttgcttccaagagcattg

SEQ ID NO: 1484 - DNA, 65 bp, Rattus norvegicus
atgaagacgtttccatcatcccaccactgttcacagtcagtgtggaccatcggggtacctggaat

SEQ ID NO: 1485 - DNA, 65 bp, Rattus norvegicus
atctctgcctggatgccgtctgtggttatctggttgaacttcagtcaatgagctcttcggtggca

SEQ ID NO: 1486 - DNA, 65 bp, Rattus norvegicus
ggcatctctctcttcattgcgactaatatctgtgagaccattgtatggaaggcattcagccccac

SEQ ID NO: 1487 - DNA, 65 bp, Rattus norvegicus
gccctacagagccatgagaacgagtctgtgtacaaggcctcgttgaacctaattgagaagtactt

SEQ ID NO: 1488 - DNA, 65 bp, Rattus norvegicus
gtagagactgcagaaccagaaaaggaggttgagcctgcattggagctgttggaacctattgacca

SEQ ID NO: 1489 - DNA, 65 bp, Rattus norvegicus
gtacaactgtggagactaaggaaccagagaaagaaatcagaccagctttggagctcttggaacca

SEQ ID NO: 1490 - DNA, 65 bp, Rattus norvegicus
tgtctttggagactccgggtattatgggatggaagccttctgactcaaacagaggcagacaggct

SEQ ID NO: 1491 - DNA, 65 bp, Rattus norvegicus
gaaatgggaaaatccaaggaatgtgctgacccctgcagattgagatggactgagaaaatgggaaa

SEQ ID NO: 1492 - DNA, 65 bp, Rattus norvegicus
cggaagtgaggagtgtgcacggatgctgaatgtttgggaatgagaggatgagtgagtgaggcttg

SEQ ID NO: 1493 - DNA, 65 bp, Rattus norvegicus
aacgagccaacatgtgaccaggacctgtgcctcacggtcggaactgttttccctaccagtaacgg

SEQ ID NO: 1494 - DNA, 65 bp, Rattus norvegicus
atttaggaagggattgtggttcagctcttttaaggcttgggtctcattgatgcaaaaggcagggg

SEQ ID NO: 1495 - DNA, 65 bp, Rattus norvegicus
ccttccagacccacgtcaacctctctatctcctgctgtaatggcagtggctgtaaccgccctaca

SEQ ID NO: 1496 - DNA, 65 bp, Rattus norvegicus
tgtaactctgaccttcgcaacaagacctatttctcccctcgaatcccacccctagtcctgctgcc

SEQ ID NO: 1497 - DNA, 65 bp, Rattus norvegicus
aacacagctgactgccatgtctctggattatgctcactgaactgaaactcccttgccctcaggtc

SEQ ID NO: 1498 - DNA, 65 bp, Rattus norvegicus
gagaagacgaggatacagctaggccggggaaggcctacctctactctctgttcctggatagttta

SEQ ID NO: 1499 - DNA, 65 bp, Rattus norvegicus
tttgatcctcgggatccacaccaaaggaaagaactctctcctgaaagttgtccatcggtgctcac

SEQ ID NO: 1500 - DNA, 65 bp, Rattus norvegicus
cgaggggaatgcatccaacatccaagtgtacctggtcagtgggaagttccatgaagactcataca

SEQ ID NO: 1501 - DNA, 65 bp, Rattus norvegicus
atgctccagggaacaagcaacatggaaatcagaaggacaacgagatcaccacctctcacagcgtg

SEQ ID NO: 1502 - DNA, 65 bp, Rattus norvegicus
tgggactgccatgaccccaaacttcatcagcaaggtcaacactactgttgccttaggctgtacct

SEQ ID NO: 1503 - DNA, 65 bp, Rattus norvegicus
ccggcagagcgcatggaacggtacatcctatacatggtgaacggcgagggccatgcctcctgtga

SEQ ID NO: 1504 - DNA, 65 bp, Rattus norvegicus
gctggtttgaatgcatgctctatggagtaagcacaggacctagtacagtgctacatcactgatct

SEQ ID NO: 1505 - DNA, 65 bp, Rattus norvegicus
cttgttccttctcattctcgtggtctaggctgggggaggggttacccacctgtagctctttcaat

SEQ ID NO: 1506 - DNA, 65 bp, Rattus norvegicus
gagatccaaggaggttcaagttgacagcccatagccagaacgtcgaggtactggggacgtgacac

SEQ ID NO: 1507 - DNA, 65 bp, Rattus norvegicus
actcccgattgcattcactcttaaccaagctccaataaacgtactaggaagcgagtcgccctgtg

SEQ ID NO: 1508 - DNA, 65 bp, Rattus norvegicus
ccccttcaatccatcacccttcacagggaccaagtaactcacattttcaggccttagcttgttcc

SEQ ID NO: 1509 - DNA, 65 bp, Rattus norvegicus
tagtcaggtctcctggtccaggatgggtgtgctctgtagttggtctgtgggtttcttaggcccat

SEQ ID NO: 1510 - DNA, 65 bp, Rattus norvegicus
ctacctggcaaaggcctcctccttatgacaacacttgctcacatcttgcaccatctaccacatga

SEQ ID NO: 1511 - DNA, 65 bp, Rattus norvegicus
ccaagacaacggtacgtcatccaacgagaacatctaaagacagaggagagtctaattcaggtggt

SEQ ID NO: 1512 - DNA, 65 bp, Rattus norvegicus
tccttgattgatgtttgatgtgggaccaagcccactatgggcagtaccatccctaggcaagtggt

SEQ ID NO: 1513 - DNA, 65 bp, Rattus norvegicus
gggcctaaagtgctacagttgcatagaagtcccacttaatgctaactgctcaacagctacctgcc

SEQ ID NO: 1514 - DNA, 65 bp, Rattus norvegicus
ctatcagggaaagtctgctctagcatgcacgacttctgtaagcatccaaggatctgactgggtca

SEQ ID NO: 1515 - DNA, 65 bp, Rattus norvegicus
gcccagctcttcatgcaataggagacatcagcctcatcatctctctcttagtggctttggcttca

SEQ ID NO: 1516 - DNA, 65 bp, Rattus norvegicus
cctcctgccatcccttcactttctacttccctacacctgctgttctgtgtgagaaaatctggagt

SEQ ID NO: 1517 - DNA, 65 bp, Rattus norvegicus
ggtcatagggtcattatagagaaggtgctctgtggaaactacccacatgccctgtgctttagtcg

SEQ ID NO: 1518 - DNA, 65 bp, Rattus norvegicus
tcccgcgtcaaccttttcagtgaccgctttatcaaggtccttactctagccaacttcaccaccaa

SEQ ID NO: 1519 - DNA, 65 bp, Rattus norvegicus
gtctttgtcctgctttgtgcccaaggatgacaatgtaagctatgctttgtacagagggagcatgc

SEQ ID NO: 1520 - DNA, 65 bp, Rattus norvegicus
aacccacaggagaagagactccaagcagatgacccggaagtgcaggttttgcacagcattggtca

SEQ ID NO: 1521 - DNA, 65 bp, Rattus norvegicus
ggcggctccaacctgaattatcccacatctctgaatattgcctgggctttgctagcttttactag

SEQ ID NO: 1522 - DNA, 65 bp, Rattus norvegicus
taaggaagaggctagcttctcatcactcctcagtctagtctgatggcaggacgaaggttgctgtg

SEQ ID NO: 1523 - DNA, 65 bp, Rattus norvegicus
tcaacaaggaactgaacttctgggccaagagagccaagcagagacacaacatcacactactgtgg

SEQ ID NO: 1524 - DNA, 65 bp, Rattus norvegicus
cagtcacaggctgtacacttgctgcccatgaatgggacagatcatctcaacatggtcttcagcaa

SEQ ID NO: 1525 - DNA, 65 bp, Rattus norvegicus
gctgtggtccactttctttgagaaaagcctgatgaaggaagccttccagaaaactctctcagatc

SEQ ID NO: 1526 - DNA, 65 bp, Rattus norvegicus
gaaatcgacactagtcagcttcacaaagtggtcagggttccagatgtccatggcccagtagtact

SEQ ID NO: 1527 - DNA, 65 bp, Rattus norvegicus
gagacatgttataccaggtcctggctgttgaggaacccagtgtgagggtgctgagctatgcccca

SEQ ID NO: 1528 - DNA, 65 bp, Rattus norvegicus
gcaaacccactgcccacatttgggctcagggttggccatttgctagttctgctgccctcttaaga

SEQ ID NO: 1529 - DNA, 65 bp, Rattus norvegicus
tggcccaatagtgcatatggggtcaccaagataggggtgacagtcctgtccagaatctatgccag

SEQ ID NO: 1530 - DNA, 65 bp, Rattus norvegicus
tgtttctacttgggcatgatcagtagttgctgtggtatcagaccactctgaggagtgtcccaggc

SEQ ID NO: 1531 - DNA, 65 bp, Rattus norvegicus
tgtgacattcattgtcctctctccgagccactcaccatagagatgacatttctgaagacgtcccc

SEQ ID NO: 1532 - DNA, 65 bp, Rattus norvegicus
tcaacctctagtgtcccaggattctctgaggtctctgctgttgctaccactgtgcaccctgaatt

SEQ ID NO: 1533 - DNA, 65 bp, Rattus norvegicus
tgcgggttctgtcgggccatctgctgggccggccccaggaggctccgagtaccaatgagtgcaaa

SEQ ID NO: 1534 - DNA, 65 bp, Rattus norvegicus
gggatgggcttaagagttcctgacggctgaaacacactaaaagggtagcagggttagcagaaaca

SEQ ID NO: 1535 - DNA, 65 bp, Rattus norvegicus
tacattttgcaagccaaaagaaagggttcttaactacagctcaagctcacaactcaggggccttg

SEQ ID NO: 1536 - DNA, 65 bp, Rattus norvegicus
gcacagacttcctggtcctcgtttgtacctcagtggctgatgtaaacctctttggctcaactgaa

SEQ ID NO: 1537 - DNA, 65 bp, Rattus norvegicus; identical to SEQ ID NO: 1

SEQ ID NO: 1538 - DNA, 65 bp, Rattus norvegicus
ttgcggtcaagccttgccagtgttcgagctttccgataatcacagcttctgctctctaagttcca

SEQ ID NO: 1539 - DNA, 65 bp, Rattus norvegicus
tgggtactcctggtgtggcctgcaaccttcaccagttgttggaagtcggtctctcacagttttct

SEQ ID NO: 1540 - DNA, 65 bp, Rattus norvegicus
accgcaaagtgaccctgatggaagagggctttaacccctcagtcatcaaagataccttgtatttc

SEQ ID NO: 1541 - DNA, 65 bp, Rattus norvegicus
ttgtaagcaactaggaactcctgaggcctggtgaagggtcttggaacagtcctgcctgatatttc

SEQ ID NO: 1542 - DNA, 65 bp, Rattus norvegicus
ttctatacagccagttgctttcaaagtgagagctggctgagccccaatacctcctgctgaataaa

SEQ ID NO: 1543 - DNA, 65 bp, Rattus norvegicus
gagcagtttacctcatttgaccttagttgcatgtgatcgaaatgtctgagtcctgcgtgcagagg

SEQ ID NO: 1544 - DNA, 65 bp, Rattus norvegicus
agcaatacaggtccttccaaaattgtcgtcctccatcgtccacgagatcgacagcattctgggca

SEQ ID NO: 1545 - DNA, 65 bp, Rattus norvegicus
tgtttcctagggctaggccttctcgctaatccagggcatgagccttctctccgccatttggtctc

SEQ ID NO: 1546 - DNA, 65 bp, Rattus norvegicus
gctgacctagtgtggtcttttctgctggtctccatccactccctgctcttttcccgtctgaataa

SEQ ID NO: 1547 - DNA, 65 bp, Rattus norvegicus
ttttaaaggcgctagccggtacgctctggaacttgattgcttccctcttctgagcttgctcccgc

SEQ ID NO: 1548 - DNA, 65 bp, Rattus norvegicus
ttttgctttcgtcctcttctgctcaagatggtggcgtcccgggcaattggcagtctcagtcgctt

SEQ ID NO: 1549 - DNA, 65 bp, Rattus norvegicus
ctggagctcggattgttgttcacttggctcatgccttgaagcaaggagaattcggtctggctagt

SEQ ID NO: 1550 - DNA, 65 bp, Rattus norvegicus
ccaggatatgcaggtctgtggacaacatagatgagtagcccaaggctgtaactgttcatacatgc

SEQ ID NO: 1551 - DNA, 65 bp, Rattus norvegicus
gaatctcataggcactttcaatgtgatccgcctggttgctggtgtgatgggccagaatgaaccag

SEQ ID NO: 1552 - DNA, 65 bp, Rattus norvegicus
gagacagcagctgtatgtgtggggtattggggtgcaggtagattagagctgtgaaatccatgtac

SEQ ID NO: 1553 - DNA, 65 bp, Rattus norvegicus
caccctctgtatccctttaatgacccatactgaggcccgtagtttctcagcttccctttcagttc

SEQ ID NO: 1554 - DNA, 65 bp, Rattus norvegicus
cggcctttcttggtcttcttcccacctggaggactttaacacgagtaccttttccaaccaaagag

SEQ ID NO: 1555 - DNA, 65 bp, Rattus norvegicus
ggaatacgcccaatctcggttccagttctacttccagcagaaggggcagctgaccagcttcctat

SEQ ID NO: 1556 - DNA, 65 bp, Rattus norvegicus
ttgcatgaagaggactacttcagtgagaaggagtacttggtcacagccaggaagttcacccgcca

SEQ ID NO: 1557 - DNA, 65 bp, Rattus norvegicus
actcaggattctacacagacactgaggaatgtggcggattggacccatcacactgtgaagagaga

SEQ ID NO: 1558 - DNA, 65 bp, Rattus norvegicus
gggtcggctacaccaaagattaccctgtggagaaattcttccgcgatgcgaagatcggtacaata

SEQ ID NO: 1559 - DNA, 65 bp, Rattus norvegicus
ctcgaagaagctggacaagctaggcatgaggggctccaacacctgtgagctagtctttgaagact

SEQ ID NO: 1560 - DNA, 65 bp, Rattus norvegicus
tcacttggccaggctacggaacacaggcgacctttgagtcagccctgctgtgacagtaaatgcat

SEQ ID NO: 1561 - DNA, 65 bp, Rattus norvegicus
atccctgagtgagggctacccgacagcacagcatgagaaaatgctctgtgatagttggtgcattg

SEQ ID NO: 1562 - DNA, 65 bp, Rattus norvegicus
catcgtctccaagtacttaggggttagatctcctttcctggacgaggtgctttcggaaccctgga

SEQ ID NO: 1563 - DNA, 65 bp, Rattus norvegicus
cgcattccttacaaggcagaagagtgggctctcactgtatgtgttcaaaggaggaggtaagacta

SEQ ID NO: 1564 - DNA, 65 bp, Rattus norvegicus
acctgatcaagcagcgagaggctgacatccagaacttcaccagtttcatctccagagactccatc

SEQ ID NO: 1565 - DNA, 65 bp, Rattus norvegicus
acagtgggctggtcagccgcgtgttcccagataaggacgtcatgctgaatgcagcctttgccctg

SEQ ID NO: 1566 - DNA, 65 bp, Rattus norvegicus
gatcgtcagtgacagctagacatctgcctacatcctgaaatcctactacatcacagctaatccgg

SEQ ID NO: 1567 - DNA, 65 bp, Rattus norvegicus
agaggtcaagtggccgcaggtggttctgtggctgtagagctgcctgtggtcaataaagctcacct

SEQ ID NO: 1568 - DNA, 65 bp, Rattus norvegicus
cccctgtggtccctgatggctttggcattgcatatgctgttcacgatgactggataggctgcaat

SEQ ID NO: 1569 - DNA, 65 bp, Rattus norvegicus
tttactcctcatcaggacaggactcctggagttttgggcaagtacctgtgagcttggttcttggc

SEQ ID NO: 1570 - DNA, 65 bp, Rattus norvegicus
ctaaatggagctcagaaaaaccatgcagagctgtagtgtctggtgaaaggaacagagtgtgggag

SEQ ID NO: 1571 - DNA, 65 bp, Rattus norvegicus
cgcggcaggttgccccggactcgagctgcagccatgggaaacaccaccagtgagcgggtgtccgg

SEQ ID NO: 1572 - DNA, 65 bp, Rattus norvegicus
ctcagtaccagaggagcaaagatggggctattccacaaaggatggctatttgccaaagatgaatc

SEQ ID NO: 1573 - DNA, 65 bp, Rattus norvegicus
aagaccatccaaagcctagttcaagaacacccagaggcgaccatgggactgtgtggatacctgag

SEQ ID NO: 1574 - DNA, 65 bp, Rattus norvegicus
gaaaaggtagtgatgactccatcaagatcagagatggaatccttgcctttattggggatgtgtca

SEQ ID NO: 1575 - DNA, 65 bp, Rattus norvegicus
tatgaacgggaggctctgccagcctcatcctcagggcagctcacatggaagatggttttggccaa

SEQ ID NO: 1576 - DNA, 65 bp, Rattus norvegicus
gctggctagagaccttggcactgtagtgaacagaatgtgtccacctttaagtcaccctgaaggca

SEQ ID NO: 1577 - DNA, 65 bp, Rattus norvegicus
ggccttttgcagcctacccctgccttctacaatcatgaaagaacggatctacataccttggacac

SEQ ID NO: 1578 - DNA, 65 bp, Rattus norvegicus
tatagtcacacgaggaatgttgaatctgattgggaaatccaagcccacctgcccttcctccggga

SEQ ID NO: 1579 - DNA, 65 bp, Rattus norvegicus
cctcttggatcaatggggcagtcattcgatttgacggtggagaggaagtgtttctgtcaggtgaa

SEQ ID NO: 1580 - DNA, 65 bp, Rattus norvegicus
ctcatccctgggaacgtgaccccagcatccgacgccaagatgccggctcacatactgcaagagat

SEQ ID NO: 1581 - DNA, 65 bp, Rattus norvegicus
ttgcacaaagcttcctgcaagtgccacaaggttcagcacatacatcccactcagtccttcccacc

SEQ ID NO: 1582 - DNA, 65 bp, Rattus norvegicus
attggtacaggctcctgtcacctgtcagcataggtaggcacaagctctgtggtgtccgctatttg

SEQ ID NO: 1583 - DNA, 65 bp, Rattus norvegicus
acagcccccttgtgggtgaaccatgggttttgtgctcctcaggcagatcctgatctctaagagat

SEQ ID NO: 1584 - DNA, 65 bp, Rattus norvegicus
ttctccagaagcccttgctgctgccccacagcctgtgccttcagaaagctctacagatgcagcca

SEQ ID NO: 1585 - DNA, 65 bp, Rattus norvegicus
taaatgacactacaccctgtggcacatgcaggcagctctaatcagactcagtgggaagttgggag

SEQ ID NO: 1586 - DNA, 65 bp, Rattus norvegicus
tcccacttctttcggtattctatgtcgtgcaggacatcgtagagcgtctcagctggtacgtcaca

SEQ ID NO: 1587 - DNA, 65 bp, Rattus norvegicus
tgcgaagggatggcaagctgtgattgaaaccaacctgactggcaccttctacatgtgcaaagcag

SEQ ID NO: 1588 - DNA, 65 bp, Rattus norvegicus
ccagaatggccttgaactctgatcctcacaacctggtaaatgctgggcctacaggtgtgcgccga

SEQ ID NO: 1589 - DNA, 65 bp, Rattus norvegicus
aacgcctgtttgagtgggctcagaagtacccagccaatactcaggagaaccctgcctataagaag

SEQ ID NO: 1590 - DNA, 65 bp, Rattus norvegicus
atgaccctgtctgagagaggcaaccctgggaatatttcctcccgtcttctggagaacgagaaggc

SEQ ID NO: 1591 - DNA, 65 bp, Rattus norvegicus
aactggagaagaagtgtgagcgcaaactgcaggactgactgaaccctggtactgtgggtgctgaa

SEQ ID NO: 1592 - DNA, 65 bp, Rattus norvegicus
ccaggacgtgaagctaaagcctgagtgtttgggagacatctctgtgggtaacgtacttgagccag

SEQ ID NO: 1593 - DNA, 65 bp, Rattus norvegicus
ggggtaaccatacgtctgtttaccggccacttgccactctgtacccatggactgtcagaatgtaa

SEQ ID NO: 1594 - DNA, 65 bp, Rattus norvegicus
ggcaacctcaggacatcaagatgagatgtgtggatacgtagaaatccacgtctccctgtcaggac

SEQ ID NO: 1595 - DNA, 65 bp, Rattus norvegicus
gtgtgttcctctgaggagggcagagaagagtatgataccatgaaggctgaaattcaacgtacaac

SEQ ID NO: 1596 - DNA, 65 bp, Rattus norvegicus
gcacagctccagcagccacagtgtcccagtttgtccacgcagtgcgtgttatgtccacagaataa

SEQ ID NO: 1597 - DNA, 65 bp, Rattus norvegicus
atgtcccagtggttcgagggaaatcaactttgcgtacgagaggtgtaacgacaccagcaataacc

SEQ ID NO: 1598 - DNA, 65 bp, Rattus norvegicus
gtcacactgtcaggagcaaagaaactgagtgggtacatcttggttgctctgtacggaaataatgg

SEQ ID NO: 1599 - DNA, 65 bp, Rattus norvegicus
ctgtgtaacctgctgcagagggttggtggtcaaatgaacacctgcttaggcttgcttgtggtaat

SEQ ID NO: 1600 - DNA, 65 bp, Rattus norvegicus
ttgggcttcggaacaaaccaaatgtcagggcaccttgacttcttccccaacggaggacagagcat

SEQ ID NO: 1601 - DNA, 65 bp, Rattus norvegicus
aaattctgtccgctgcaaggagcagtcagaggacacaaggaccaaatagcttgggagttgcggaa

SEQ ID NO: 1602 - DNA, 65 bp, Rattus norvegicus
aaatagcaagcaaggagcattctcagggatctggcctagcagctctcctcaagacctgtcacgga

SEQ ID NO: 1603 - DNA, 65 bp, Rattus norvegicus
ggaactgagaatgacaagcaaaacaaccaggccttcgagatttctctgtatggcacagtggctga

SEQ ID NO: 1604 - DNA, 65 bp, Rattus norvegicus
tgatgtgaccataacactcagttgtgcaatttcaaggtttgcagaaagacctcattctcctgggc

SEQ ID NO: 1605 - DNA, 65 bp, Rattus norvegicus
catcccagcttcctcagatcagttagaccactggcactacagaatcctttcttaaggcactttgc

SEQ ID NO: 1606 - DNA, 65 bp, Rattus norvegicus
gtgacctgaagtcaaaagactgaagaagcaaaagagcagatgagtcaagagacccaagcacaaaa

SEQ ID NO: 1607 - DNA, 65 bp, Rattus norvegicus
agacaggactcccattgttgggactttctgtaccgctcctctgccagtcaatgacagcaagaaga

SEQ ID NO: 1608 - DNA, 65 bp, Rattus norvegicus
tggcggaccaaggttcccaggtgaaggttgaggaagaatcctgacccagaactatgactctagag

SEQ ID NO: 1609 - DNA, 65 bp, Rattus norvegicus
gcaatgggtttgttctgttgagtcagggtttccgccagactgaacaggatccagtgggctatttt

SEQ ID NO: 1610 - DNA, 65 bp, Rattus norvegicus
cgctccaaaattccgttaggaacaacactgcatccctctccctaccctctagctgtctttatgga

SEQ ID NO: 1611 - DNA, 65 bp, Rattus norvegicus
ggggaacagatcaatggcagaatgactgtctgtgccgagttaagggcactgaaaatctcagctca

SEQ ID NO: 1612 - DNA, 65 bp, Rattus norvegicus
agatgtagagcagcagaaccagaaacatggtcaacatcatcagaaaccacctcctgcttctgatg

SEQ ID NO: 1613 - DNA, 65 bp, Rattus norvegicus
ccttgccagtatgattgtctttgccttttacagaccttgtgtcctcagtcttggcctgaagaatg

SEQ ID NO: 1614 - DNA, 65 bp, Rattus norvegicus
ccatggaacccgagtcttttctaagctggcttcttctgtcgtcccacctgtagtgccatatactt

SEQ ID NO: 1615 - DNA, 65 bp, Rattus norvegicus
gtttctgagcagagagaaggtgaacaaaagacagatgccttcaatatcattcctgtagaaaagtg

SEQ ID NO: 1616 - DNA, 65 bp, Rattus norvegicus
ggcatccaacttcctgctgcgtagtacctaagagggtcctgagaggctctcgcaagtaaagcaat

SEQ ID NO: 1617 - DNA, 65 bp, Rattus norvegicus
tgagaccctggcagagctcagagacacgaagcattaccaacacgactgtgtgtactaagtgtgga

SEQ ID NO: 1618 - DNA, 65 bp, Rattus norvegicus
tgcgggtcctgtgggtggacagggtcctagaggaatggggcctggaacgccagcaggatatggta

SEQ ID NO: 1619 - DNA, 65 bp, Rattus norvegicus
gtcctgcttacactgtctgcatgttagaaggctgctgatgtgtgaccaccaagtcccactgtaat

SEQ ID NO: 1620 - DNA, 65 bp, Rattus norvegicus
accagcccacgctgcttgggacttgaaatctgtggccgaaggaccgtcaccacataacttcaaaa

SEQ ID NO: 1621 - DNA, 65 bp, Rattus norvegicus
agcaaacaggttccccatgaggcacctctcctgatccatccgcactttactactccaggctgaaa

SEQ ID NO: 1622 - DNA, 65 bp, Rattus norvegicus
ggatgcacttctagaccagatacgacagggcattcagttgaaatccgtgtctgatggccaagagt

SEQ ID NO: 1623 - DNA, 65 bp, Rattus norvegicus
aaggtgtcctccacatgcccctctactcgtcacccatagtcaagaaccccttcatgtctcctctg

SEQ ID NO: 1624 - DNA, 65 bp, Rattus norvegicus
cccgtcccacctacagacgactcccaggttgttcctgtcccacctacagatgactctcagacaac

SEQ ID NO: 1625 - DNA, 65 bp, Rattus norvegicus
agactcaacctcgtcctcctctacctggtcaaggcaaccagaatcagcatcctcattctcctcta

SEQ ID NO: 1626 - DNA, 65 bp, Rattus norvegicus
tctgcgtaaacagtatgcagtgtaagagcagatgctgccaacatgacaccatcctgggcatcgcc

SEQ ID NO: 1627 - DNA, 65 bp, Rattus norvegicus
gagatgacggactcatgtatgtcaagcggcttcagaatactggagttcatgtgactcatcaccat

SEQ ID NO: 1628 - DNA, 65 bp, Rattus norvegicus
tgcttcgtctcctggcccaagatcagggccaaggcatccctctgccagagacagcaccctaagca

SEQ ID NO: 1629 - DNA, 65 bp, Rattus norvegicus
gcattgaatacagaagacagaacccatctcgttgctctgtttccctcagtaatgttgaggcaaga

SEQ ID NO: 1630 - DNA, 65 bp, Rattus norvegicus
ttccttgtgggtttgcacagacagttgctgtcatggcgacacctggtttgatgaaaggtcgaggc

SEQ ID NO: 1631 - DNA, 65 bp, Rattus norvegicus
aaagccaccaggttgcacaaaaggagctgacagggccatgagggacctttggaaagccggattgc

SEQ ID NO: 1632 - DNA, 65 bp, Rattus norvegicus
agcaagtctctctaggtgcaaggctgtgacctgtgacatcagcgaggatgaagaggactaacttt

SEQ ID NO: 1633 - DNA, 65 bp, Rattus norvegicus; identical to SEQ ID NO: 1

SEQ ID NO: 1634 - DNA, 65 bp, Rattus norvegicus
gaactccacctaaggcctgacatgcttctggctgtactttcttgtcactggcatgatgacactgt

SEQ ID NO: 1635 - DNA, 65 bp, Rattus norvegicus
ttcaaagagaccaagcagaagcgagcgtctgtcttagaactgagcaccactttcctacctcaggg

SEQ ID NO: 1636 - DNA, 65 bp, Rattus norvegicus
gccaactagatccttcccttaggcaagctcctctatcctgtcctgctctggaaacctccataata

SEQ ID NO: 1637 - DNA, 65 bp, Rattus norvegicus
ctccaaagaaatgagcatcacgtatgtggaagcctctggaaaatcactcttcaagaccagcctcc

SEQ ID NO: 1638 - DNA, 65 bp, Rattus norvegicus
ggaccttcacgggctagatcacaagaatgccaaagagctctaaggtagctggaagacagttggtt

SEQ ID NO: 1639 - DNA, 65 bp, Rattus norvegicus
gggaaattcacagagcttcagcacatgctacttcttcctgtcttcagtgacatagttcaggggcc

SEQ ID NO: 1640 - DNA, 65 bp, Rattus norvegicus
ccggcatcctcaaccattacctcatcttcttcttcggaagcgacttcgagaactacattagaact

SEQ ID NO: 1641 - DNA, 65 bp, Rattus norvegicus
ggagaagctgatggctacactgcccaaccctaatcagtctactctccagataaatgtcgtttggc

SEQ ID NO: 1642 - DNA, 65 bp, Rattus norvegicus
gtggctcctctcgtcctctaacgcaccaggcatgatcgctgactgtaacattcagaagtttacag

SEQ ID NO: 1643 - DNA, 65 bp, Rattus norvegicus
caaggcaatgaccattcttcagagcttcttatgccgaaggttgtggaaacaagcctcacctttcg

SEQ ID NO: 1644 - DNA, 65 bp, Rattus norvegicus
tgttgtgaacatcaacctgctgactgaacctgggaattcaggttaagtatgtgactgctgccgtg

SEQ ID NO: 1645 - DNA, 65 bp, Rattus norvegicus
ttagactctttccacagatgtggtagggaacaggtggactcatctacgattttggttgggagccg

SEQ ID NO: 1646 - DNA, 65 bp, Rattus norvegicus
cacagaaggcggcctcaacctcacctctaccttcctaaggaaaaaccagtgtgagaccaaggtga

SEQ ID NO: 1647 - DNA, 65 bp, Rattus norvegicus
atgcattgacaactgaacagacggtgagcgtggctgactgggatgtgcagtggcctgatggttca

SEQ ID NO: 1648 - DNA, 65 bp, Rattus norvegicus
tctcctcagtctgccaagtgatctgctgttcacctgtgagcacagactctggagatgaaggccct

SEQ ID NO: 1649 - DNA, 65 bp, Rattus norvegicus
cggcctcacagacagcattgctctactctgaccagatccactgagtatgggacacagaagccgct

SEQ ID NO: 1650 - DNA, 65 bp, Rattus norvegicus
ttgaggtagggcacctgtggcaggagtgaccaagagacccagggttctctccaacagcccaagaa

SEQ ID NO: 1651 - DNA, 65 bp, Rattus norvegicus
ctcggaccatggcttttcagaaacggacctatacatcctcaagcatgacttaacctgtgtgaagg

SEQ ID NO: 1652 - DNA, 65 bp, Rattus norvegicus
ctctgatgaatactaagatggcagccctagccatgagttctgctcgaagctcctttgtgtgatgc

SEQ ID NO: 1653 - DNA, 65 bp, Rattus norvegicus
tatagaagccaatggaggggactgatgggaaggtggcccaaacccaagaccccacattgttactc

SEQ ID NO: 1654 - DNA, 65 bp, Rattus norvegicus
aacctgtttattgtgcctcaaagcatggcataatcggattcacacgctcagcagcgatggctgct

SEQ ID NO: 1655 - DNA, 65 bp, Rattus norvegicus
ttgtagcagcgttacctctgtctagaggaaagcttgtgtgggtctggtgcatggttctctgaggt

SEQ ID NO: 1656 - DNA, 65 bp, Rattus norvegicus
ctcattaaggaagatcgggttactaatggcttgaagctcatgagaaaaggtacaactggggactg

SEQ ID NO: 1657 - DNA, 65 bp, Rattus norvegicus
ctgagatccagaaagtcgaaaggttcctcaagctgtctccacagatcaacgcctcgaacttctac

SEQ ID NO: 1658 - DNA, 65 bp, Rattus norvegicus
gatacctactatacaaccatgcacttttactgcacttacgcaaataacagataccttcactagcc

SEQ ID NO: 1659 - DNA, 65 bp, Rattus norvegicus
ggaatgtcaggaggggaagctgctggagtcacgttgggagtcatcatagcactaggaattgtcat

SEQ ID NO: 1660 - DNA, 65 bp, Rattus norvegicus
gaaattgtctggaacaacacttgagttctgcacagatattcagagtgcctaaacttcaacttgaa

SEQ ID NO: 1661 - DNA, 65 bp, Rattus norvegicus
catcaaggacaggagtctgtctgcaagcctcaatccagccaaaggaagatcagaaagcaaactgt

SEQ ID NO: 1662 - DNA, 65 bp, Rattus norvegicus
gcccagaatgagcgctttgatgcccactatgctaagacaatgacagattgtgacttcaagtttcg

SEQ ID NO: 1663 - DNA, 65 bp, Rattus norvegicus
ggaacagttacagcaaccattttatgcgaaatacctcactgtgacgaaccacacgccgttcacgt

SEQ ID NO: 1664 - DNA, 65 bp, Rattus norvegicus
cgaagagaagttgtgaagctgatagagttcctggagagagacccatcagcagagctagtagacag

SEQ ID NO: 1665 - DNA, 65 bp, Rattus norvegicus
gggacactgtggcctggtgatttcacctcctgaactgatacctgacacaatcttgctgacatgta

SEQ ID NO: 1666 - DNA, 65 bp, Rattus norvegicus
ctggaatcctaacagcacctacacaaagctatttataatgccagactatacttggtttgaaggaa

SEQ ID NO: 1667 - DNA, 65 bp, Rattus norvegicus
tgtcacctggccctcacgctgtataacccactgagggagtccaatttcaacccacagtacatttt

SEQ ID NO: 1668 - DNA, 65 bp, Rattus norvegicus
gtgtttcctgtggtaaaggctgaggcgagtcaggagtctgccagtgttcatactcccatgtacat

SEQ ID NO: 1669 - DNA, 65 bp, Rattus norvegicus
cactcaagtttagatcagagatctagggagtgtttgctcctcagtctcctttggcaggcactaaa

SEQ ID NO: 1670 - DNA, 65 bp, Rattus norvegicus
catgacccattttcctggagccatctctgacaagatctacatacactgaagagctgaagaggtcc

SEQ ID NO: 1671 - DNA, 65 bp, Rattus norvegicus
ggcccacagatacagcctgagtgagcctcttcagaaactaagtaatgtgctacagcaaattgaga

SEQ ID NO: 1672 - DNA, 65 bp, Rattus norvegicus
ctgagcaggcttctccagcagattcatgattatctgaatgcatctgactgggagagacaagtagc

SEQ ID NO: 1673 - DNA, 65 bp, Rattus norvegicus
cttttagtcccagcgaggagaggcaatgctactgactaggacttctacttcctttgcttttctcc

SEQ ID NO: 1674 - DNA, 65 bp, Rattus norvegicus
ggagaaggagatcctggaccacttttccaaagagattcaggagaactatggacaggaatatgtcc

SEQ ID NO: 1675 - DNA, 65 bp, Rattus norvegicus
gctgtctgcctgagctacttctacccagtgctcttcgtgctcttcatgttctttggaatggcttt

SEQ ID NO: 1676 - DNA, 65 bp, Rattus norvegicus
tttcggctctcttactacccacactgtttggcgtctttcacggagttggtccaagaagcctttgg

SEQ ID NO: 1677 - DNA, 65 bp, Rattus norvegicus
aagtgggccaaagtgtacatcaagaccagcaacatcctgtggtactgtgggatccagaagagcag

SEQ ID NO: 1678 - DNA, 65 bp, Rattus norvegicus
aggtgaacagacttggctctgacaacccagaatgtatcaccagttagtggcctcagccacacctt

SEQ ID NO: 1679 - DNA, 65 bp, Rattus norvegicus
aatcctccactttgggcaaacagctgaacctgaatctcctggacaactgggacactctgggttca

SEQ ID NO: 1680 - DNA, 65 bp, Rattus norvegicus
tgggttcaagaccaatgtcactaatatggagaggctatcagacaacctgaagaagctgtgggacc

SEQ ID NO: 1681 - DNA, 65 bp, Rattus norvegicus
attcttttggtacccactgtctcagtgctgcagtccagagtaaatccctcttgactggctcaaga

SEQ ID NO: 1682 - DNA, 65 bp, Rattus norvegicus
tgtagccctgtctgaactgtaactcataaagatccacctgcttctccttctgtgtgcaaccgcac

SEQ ID NO: 1683 - DNA, 65 bp, Rattus norvegicus
tcagttattcccagctcaagctgtgtgcgctgacatactttcttgcctaaaccacgtatgggctg

SEQ ID NO: 1684 - DNA, 65 bp, Rattus norvegicus
gcccatcctacctgccttacttgatgcccttactccaaatcctatcgattcagactccagagatg

SEQ ID NO: 1685 - DNA, 65 bp, Rattus norvegicus
gagctggaagaaaatgatgccatgggtgtcaaacgagcagcacagaggcgcttaaaggcggagct

SEQ ID NO: 1686 - DNA, 65 bp, Rattus norvegicus
gagcttccacctgactggtaagtccccacttgtactgtgctgtaatcattcttgcccacttcatc

SEQ ID NO: 1687 - DNA, 65 bp, Rattus norvegicus
atcaaacagtttgtggtcctgctgctgactcatttcgacctggagctggtcagtgaggacacaga

SEQ ID NO: 1688 - DNA, 65 bp, Rattus norvegicus
tgtcaggtggtctcggagctttgtgaattctctatctgcacctgtcagagctggtgaaataaatg

SEQ ID NO: 1689 - DNA, 65 bp, Rattus norvegicus
gcatagaagtgtccctgctctgaagtcacctgtgaccctggtgtcaggtttgagaagaatcacta

SEQ ID NO: 1690 - DNA, 65 bp, Rattus norvegicus
acagcagcaccacccaaagatttctcctgaagcagttctcagattacctgaagagcaacatcagc

SEQ ID NO: 1691 - DNA, 65 bp, Rattus norvegicus
tgaaccgcttcttccaagggaactatggcaatgcagctgtgtgggtgacactcatcattgggcaa

SEQ ID NO: 1692 - DNA, 65 bp, Rattus norvegicus
aggcctcctataatgaccatgatgagaatggccaagacccctcagactgtggctgggtacaccat

SEQ ID NO: 1693 - DNA, 65 bp, Rattus norvegicus
atctacttcaccgcattgcttatccatcgagaagcccgtgatgaacaccagtgcaggaggaagta

SEQ ID NO: 1694 - DNA, 65 bp, Rattus norvegicus
tttcctcaccatatgccttatctccattccagtcccctgctatgcaagtgtccctgtggcttgtc

SEQ ID NO: 1695 - DNA, 65 bp, Rattus norvegicus
ggagcattagttgttgtgaatgacttaggaggggacttcaaaggcgttgggaaaggctcttctgc

SEQ ID NO: 1696 - DNA, 65 bp, Rattus norvegicus
catgttgaccgaagcactggaaaggccacatgtgatcctagtgaacctggctagaatgctgattg

SEQ ID NO: 1697 - DNA, 65 bp, Rattus norvegicus
ggcaagcctcgcaatgttggcacggagcgttaaccacaccttactaatagcaaggggaataactt

SEQ ID NO: 1698 - DNA, 65 bp, Rattus norvegicus
gcttattatcagactgtgggctatcatagttcatgctcgtttcttaaagtttcccgagaatttct

SEQ ID NO: 1699 - DNA, 65 bp, Rattus norvegicus
ttgcacgaattgtgtgtggcactgtgatggctggtgagttgtccttgatggcagcattggcagca

SEQ ID NO: 1700 - DNA, 65 bp, Rattus norvegicus
tgctgaagccagacaggcatcagttgccgggtcttctgagacagcaggctgacacagtaggcctt

SEQ ID NO: 1701 - DNA, 65 bp, Rattus norvegicus
acagcagtgcctctgttgagactcaggccacagtttctttgagaagcctcctggtgagggtaggg

SEQ ID NO: 1702 - DNA, 65 bp, Rattus norvegicus
gtctgttgtcccagacacttacccatgactgcatcactgcacgaaataccagttttccagaaagg

SEQ ID NO: 1703 - DNA, 65 bp, Rattus norvegicus
gaagtatctggttcactgaaagggaaaccacatggaagtcattgggacttgaggaggatgtacat

SEQ ID NO: 1704 - DNA, 65 bp, Rattus norvegicus
cgggtgaaagcactgtacgaggagctggatctgcggagtgtgttcttcaagtacgaggaagacag

SEQ ID NO: 1705 - DNA, 65 bp, Rattus norvegicus
gaaagactgattacagagaaatgactgtgctctcacactgctcatccgagcctctgattgaggag

SEQ ID NO: 1706 - DNA, 65 bp, Rattus norvegicus
atcacagcgatatttctccttgctgttcttgtgccctctgcctcagactctgtctttaggatccg

SEQ ID NO: 1707 - DNA, 65 bp, Rattus norvegicus
tgtggttctgggtgttaccaggtcctccagctaggacagaggcacaatccaggtcctgatgccct

SEQ ID NO: 1708 - DNA, 65 bp, Rattus norvegicus
cagctatgatattgttagcttcctccctgaggatgccaacctgtatctggccacacctggattaa

SEQ ID NO: 1709 - DNA, 65 bp, Rattus norvegicus
agctatgggatttgccacactcaaagggccagagtcagaaaaggtagggaacatgcggagctact

SEQ ID NO: 1710 - DNA, 65 bp, Rattus norvegicus
gacatcacctaacttcatcctgtcatgcgggctagtggtggtgaaccattacctggcatttcagt

SEQ ID NO: 1711 - DNA, 65 bp, Rattus norvegicus
ccccatgatccctgaagtgatgtcctctcccacccgctaataaacggtcttttcaagattcccaa

SEQ ID NO: 1712 - DNA, 65 bp, Rattus norvegicus
tgtttgtaggtggggcttgagctcccacactagagtcaggaggcaaaaccatgctgaagttctat

SEQ ID NO: 1713 - DNA, 65 bp, Rattus norvegicus
ccagttccagaaagttcccagtcttctccacagacacgcttacgttgtgcctgttcaggggtgga

SEQ ID NO: 1714 - DNA, 65 bp, Rattus norvegicus
tacagctggctgggacacaagagtccgtggattctgccaagccccgggtctactgagccatcgcc

SEQ ID NO: 1715 - DNA, 65 bp, Rattus norvegicus
tccaaacattccaagagaggttgaggtgttccctaacctgtcttcgtttgcatccgctggtagca

SEQ ID NO: 1716 - DNA, 65 bp, Rattus norvegicus
ccaggagccaacagatcctgaagctgtatgtgatgtagaagcttgggtctttccatggggtcagg

SEQ ID NO: 1717 - DNA, 65 bp, Rattus norvegicus
ttatcagaggactgcagcctatggccactttggtagggacagcttcccctgggaagtgcccaaaa

SEQ ID NO: 1718 - DNA, 65 bp, Rattus norvegicus
ggaagctctcaccctcgcagcctctggcacacacagtactagcaggcagtaactggatacctttt

SEQ ID NO: 1719 - DNA, 65 bp, Rattus norvegicus
ggatcggtttagtggctggaacagagcgcagtagtgttgtagagagtcacaagtagcaaagagtc

SEQ ID NO: 1720 - DNA, 65 bp, Rattus norvegicus
ctaatagtgccactgtcctcgactgaaagacccgcaagttggataatcagattcgtcagcaataa

SEQ ID NO: 1721 - DNA, 65 bp, Rattus norvegicus
ggtctgtcagttgaaactgtggcaggaatggtctataaccctttctcaggttactggcattggac

SEQ ID NO: 1722 - DNA, 65 bp, Rattus norvegicus
gtgcatgtatctccctgtagaatgacactgtattttgaggcattgctctagtgtatggaaacgtg

SEQ ID NO: 1723 - DNA, 65 bp, Rattus norvegicus
catccacagcactgctttactgattcggaagtttctcttgaggatactccagatacacctgagac

SEQ ID NO: 1724 - DNA, 65 bp, Rattus norvegicus
taagcaaatggggagctgttggcctaaggggcgaatcagcagcttggatgatttcgagtccactt

SEQ ID NO: 1725 - DNA, 65 bp, Rattus norvegicus
accgtggcagtagaagagtctatcgctcatcactacaacaaccagatccgcatgctgatggagga

SEQ ID NO: 1726 - DNA, 65 bp, Rattus norvegicus
catccaaggaccagaaaagctatgattccattggaagagttctggagctccccagatttggagtg

SEQ ID NO: 1727 - DNA, 65 bp, Rattus norvegicus
acagatgccaagcgttgctcagagattgggcgggatatgctacaggaaggcggctccgtagtgga

SEQ ID NO: 1728 - DNA, 65 bp, Rattus norvegicus
tgaaaatcactttcaccaagatgagtctgttagcgggtttccattctgtctgttctcctgctccc

SEQ ID NO: 1729 - DNA, 65 bp, Rattus norvegicus; identical to SEQ ID NO: 1

SEQ ID NO: 1730 - DNA, 65 bp, Rattus norvegicus
acagaacgtgtattaagtggtctgtcaccagctgtggaaaacgtggtgcatgtaggctatataac

SEQ ID NO: 1731 - DNA, 65 bp, Rattus norvegicus
tagaaaagcgaagtacagtggaggtaaaagcgacccttcagactagacatccagcaaagtggatg

SEQ ID NO: 1732 - DNA, 65 bp, Rattus norvegicus
acaggcatcctcctcaacaacgagctactagacttatgctggagacacaagccaggttcaacggt

SEQ ID NO: 1733 - DNA, 65 bp, Rattus norvegicus
tgtgggtttatgtcttcctgggaaaccttctccgaggattaggggaaactcctatccaacccctg

SEQ ID NO: 1734 - DNA, 65 bp, Rattus norvegicus
gcactctggcattcaggtgcatcaagttgtgtgtcgtttcatgctgctacttggggtattttagg

SEQ ID NO: 1735 - DNA, 65 bp, Rattus norvegicus
gggccttacggggactcaaccctttggcggcgctgccacaggcgcatcttctactacgaaccgct

SEQ ID NO: 1736 - DNA, 65 bp, Rattus norvegicus
acctgttccggcagatggaggtcagccgtacctcctggagacagacacccatcttgttgatgaat

SEQ ID NO: 1737 - DNA, 65 bp, Rattus norvegicus
tgaggcggcagtgatcttgcttttctcttgtcgttgaggatgaataaagcttcattgtgtgatgc

SEQ ID NO: 1738 - DNA, 65 bp, Rattus norvegicus
tgctgtcccgacaggtgcggagtttcagcacatctgtggtcaggcccttttcgaagcttgtaagg

SEQ ID NO: 1739 - DNA, 65 bp, Rattus norvegicus
gcctctttatagacctttgcagagcatgtgggtgtgagcagagctatgagaatgttcagggctgc

SEQ ID NO: 1740 - DNA, 65 bp, Rattus norvegicus
agaaaacggtgtctgccatgcagcatgtcctgcagaggaccatccggtgtgcaaaagccgaagca

SEQ ID NO: 1741 - DNA, 65 bp, Rattus norvegicus
attggaagcccactagtgtgtccacagcccagtgaacctcaggaactaacgtgtgaagtagcccg

SEQ ID NO: 1742 - DNA, 65 bp, Rattus norvegicus
agcccaccgaaagcgaaagcctgtacgagctggaccgcttcgtggacgccatgatcgccatccgc

SEQ ID NO: 1743 - DNA, 65 bp, Rattus norvegicus
aaggagaatggtgtagatgctgtgcaccctggctatgggttcctctcagagagagcagactttgc

SEQ ID NO: 1744 - DNA, 65 bp, Rattus norvegicus
ggagtgtatcctatccctggttctgttcactcacgtgcttccgtgaataccgagtgtgactgttt

SEQ ID NO: 1745 - DNA, 65 bp, Rattus norvegicus
agagttcccaaggatgaacagggctctgcagctgactcagaggactccccaactattgaggctgt

SEQ ID NO: 1746 - DNA, 65 bp, Rattus norvegicus
ctgctcacgtggaagcgagtcgggctggaactgaagccacattcgtcagctgaatgcaacttctg

SEQ ID NO: 1747 - DNA, 65 bp, Rattus norvegicus
ggcatgggctttaccctgacatggacccagaacacgtaggagcctttgtggatgcagtacacaaa

SEQ ID NO: 1748 - DNA, 65 bp, Rattus norvegicus
ataagggtgggtaatgcggcactcaacagcaagatctgtgatcttctgctcgccaagcacagcat

SEQ ID NO: 1749 - DNA, 65 bp, Rattus norvegicus
gcctccatgactgcctttccctcagtagtttgtgggcttcatctctttagagaaagtccatgcca

SEQ ID NO: 1750 - DNA, 65 bp, Rattus norvegicus
ggtgagcagtggactcccattgagcctaaacccaaggagcggccgcaggttggaggcaccatcaa

SEQ ID NO: 1751 - DNA, 65 bp, Rattus norvegicus
ggggattgtaaatccttctgggaaacctgcctttagctgaatcttgctggttgacacttgcacaa

SEQ ID NO: 1752 - DNA, 65 bp, Rattus norvegicus
ctggctgggatgaatctcaggccaatcactttgctgtgcaccacgatgaggagaaagatgtgatt

SEQ ID NO: 1753 - DNA, 65 bp, Rattus norvegicus
ggtctttcatgttagatggctttggactgacgggtagccatgggttcatctgtcatgtctgcttc

SEQ ID NO: 1754 - DNA, 65 bp, Rattus norvegicus
ggagtcctaagacagattactctgaatgaccttcctgtgggtagatcagtggatgagacactgcg

SEQ ID NO: 1755 - DNA, 65 bp, Rattus norvegicus
gcctgaaagcgttgagagaagctagcatagactccagatccttccagacaattccacgttcattc

SEQ ID NO: 1756 - DNA, 65 bp, Rattus norvegicus
cgacattgagagtgtgaccccagattggtgtcttctgtgaagatggatactgatgggtgacattc

SEQ ID NO: 1757 - DNA, 65 bp, Rattus norvegicus
gccagctccttccatagctgtccttactagggacttcttgatggctaccaattctctacaagtgc

SEQ ID NO: 1758 - DNA, 65 bp, Rattus norvegicus
attatgcgctggtaccaccggaccacagtcagcaacgtgaagatggacatcctgtcctatatgag

SEQ ID NO: 1759 - DNA, 65 bp, Rattus norvegicus
gctccaccccttcaccagcctccatatgatcaaagcctgcaacactacttgtgtccttactaatg

SEQ ID NO: 1760 - DNA, 65 bp, Rattus norvegicus
aatgaggcaaaaccgacgtaaactacactcagctagtcgatctgcatgcccgatacgccgagtgt

SEQ ID NO: 1761 - DNA, 65 bp, Rattus norvegicus
ggattccttttccccttgaaattatgtttatgctgatacacagtgatttcacatagggtgatttg

SEQ ID NO: 1762 - DNA, 65 bp, Rattus norvegicus
gctctctagtgatctgtgaatgtgaactcgccttatgaaagacaggcagtgacattgtttgccac

SEQ ID NO: 1763 - DNA, 65 bp, Rattus norvegicus
ggcctcagttacaggtttggctgggtgtgttagtattcacctacaatgtgaacactcagcagaca

SEQ ID NO: 1764 - DNA, 65 bp, Rattus norvegicus
aggctttctcattacccacctggaatctggtgaatagtgaccctgccctgagcacacccagctgg

SEQ ID NO: 1765 - DNA, 65 bp, Rattus norvegicus
atcatctacatcgaggaagcccacccatccgatggctgggtcaccacagattcaccctacgtcat

SEQ ID NO: 1766 - DNA, 65 bp, Rattus norvegicus
tgatgtccgtcgaactgagttgcacgggaaacgagcagcaccaggcacgaggcccagacgttata

SEQ ID NO: 1767 - DNA, 65 bp, Rattus norvegicus
cctatacttgggtgccaatgtccagtacatgagagtctgaggacaagaagaaagatgggcctcag

SEQ ID NO: 1768 - DNA, 65 bp, Rattus norvegicus
cgaagaaaatcctgcaattggggagaaggcattatggggatctgcaagaagagatacggaagccc

SEQ ID NO: 1769 - DNA, 65 bp, Rattus norvegicus
acaagatgcctcgactgtgtgtgtgcatgctagtcttagtgctggctctagctaccttctcggaa

SEQ ID NO: 1770 - DNA, 65 bp, Rattus norvegicus
tgattgaaccacaaagtactcggaaggcccaggattttcactggctcacccgttccaacatatga

SEQ ID NO: 1771 - DNA, 65 bp, Rattus norvegicus
atgaacaaaggaagatgccatgtcgccctgataggttgctgcacagtggctccatctcattcctt

SEQ ID NO: 1772 - DNA, 65 bp, Rattus norvegicus
gcagtccaaatgatgtcagccatgggtatgtgacagtgaagccagggatctgtctgcactttgtg

SEQ ID NO: 1773 - DNA, 65 bp, Rattus norvegicus
gtcaggagagggaattgaaccacagatgtaaaggcacatgtggcagtctgctctttctagtagca

SEQ ID NO: 1774 - DNA, 65 bp, Rattus norvegicus
cagtgagttttaggcaggaagtgatgtcacagtaatggtggggtaggggacaataaacgcacggc

SEQ ID NO: 1775 - DNA, 65 bp, Rattus norvegicus
tcacttctgctctgaatgacctgaaaacctgaaagacctgctctgagagacctgtgagctctctc

SEQ ID NO: 1776 - DNA, 65 bp, Rattus norvegicus
ccccaaggaagcactaaggaagctccagatgaggagcaggatatttccgtattctttggagggga

SEQ ID NO: 1777 - DNA, 65 bp, Rattus norvegicus
caagcctgctattgcagaatcggagcctgtgtttctggagaacggctcactggggcatgtggtct

SEQ ID NO: 1778 - DNA, 65 bp, Rattus norvegicus
attactctcaaagatctgagacccacagccatgaggacgctcactctgcttaccgcccttctcct

SEQ ID NO: 1779 - DNA, 65 bp, Rattus norvegicus
ccggtggcatttctttctgggaagttctactatcatccacacaaagtctacctgataccaacgga

SEQ ID NO: 1780 - DNA, 65 bp, Rattus norvegicus
atggatctggtcggaacagaactcaaggattcaggaaagcaatctcctgccactatggcagctcc

SEQ ID NO: 1781 - DNA, 65 bp, Rattus norvegicus
gaaaatgccgaaggacagagagtgataacctcatgactttggaaggggagacatgttttccatgg

SEQ ID NO: 1782 - DNA, 65 bp, Rattus norvegicus
cagctgcccatctcataccaaactacaaggaacatgtaaaccagataagcccaactgttgcagga

SEQ ID NO: 1783 - DNA, 65 bp, Rattus norvegicus
aagggctaacgactaaagaactccacagtcctgggaaccctgttctgagggtatccaccactcag

SEQ ID NO: 1784 - DNA, 65 bp, Rattus norvegicus
caacttagctggacagcagccgttggaaaccgccaagccagctgactccgcatccgaagatatga

SEQ ID NO: 1785 - DNA, 65 bp, Rattus norvegicus
cttgccctctgttcctgtgattatgactgtttggggatggggttgactggacagccacagatctg

SEQ ID NO: 1786 - DNA, 65 bp, Rattus norvegicus
tggggtccatgcactggcggttttcgacagattggcacttgtggactgcctagagtgagatgctg

SEQ ID NO: 1787 - DNA, 65 bp, Rattus norvegicus
cctgtcctccacgaaggaaaagattgctgttgtcaccctcatctcctatgtactccagggtcttt

SEQ ID NO: 1788 - DNA, 65 bp, Rattus norvegicus
aaagccctctggtagaacagaagagcttcatccctgtggaaaggtctgacacgaccttcctgttc

SEQ ID NO: 1789 - DNA, 65 bp, Rattus norvegicus
gaacttagagttcaccgttcaggaaactacatgcctaagagagtctggtgatccctccacctgcg

SEQ ID NO: 1790 - DNA, 65 bp, Rattus norvegicus
ccttgccctggtcctggtgtctggctcctggctgctggctgttgtatgcatcttctttctgctcc

SEQ ID NO: 1791 - DNA, 65 bp, Rattus norvegicus
tgagtgacagaggtagacaacgtgagaagaagtcaaccagcttcagggaggattgtcctggacac

SEQ ID NO: 1792 - DNA, 65 bp, Rattus norvegicus
ctggatccctgaactgcccttctatccatcttctctcctggatctcatcacccactatcatggat

SEQ ID NO: 1793 - DNA, 65 bp, Rattus norvegicus
ggggcctgatgatggcagtgatgattgcagctctgatgagcgacttggcctccatcttcaacagt

SEQ ID NO: 1794 - DNA, 65 bp, Rattus norvegicus
gctgtgggcatttctgttgctgcctatgagcttaatggcttgttttctgtgctgatgctggcctg

SEQ ID NO: 1795 - DNA, 65 bp, Rattus norvegicus
atcccctagcagttctaatggtttcttcttaccttgcccaaactctctccttggtgggaaatttc

SEQ ID NO: 1796 - DNA, 65 bp, Rattus norvegicus
ccttattctctgctgtgttaagtgggtgtcgtactccaaggagacaaacactttctacaacttct

SEQ ID NO: 1797 - DNA, 65 bp, Rattus norvegicus
taagcctgctcctgccaccaacactcagaattacgctacatacagagaaggctacaacgtgtatg

SEQ ID NO: 1798 - DNA, 65 bp, Rattus norvegicus
atcttcttggaacagatgaacaaggcctacaagcgtctcttcctcggtggctgatctggcaaggt

SEQ ID NO: 1799 - DNA, 65 bp, Rattus norvegicus
catcgagaatggtcaatgggagattatccacaaaccctctaggttaatccaccttccaggggatc

SEQ ID NO: 1800 - DNA, 65 bp, Rattus norvegicus
aagtgctgagagggattgtgtggtgaccaacattgatgttccctgtggtggcaaccaggaccagt

SEQ ID NO: 1801 - DNA, 65 bp, Rattus norvegicus
tcaagagtgtttctgagagactgtctatcctcaagggagccagacccagtgactccaatggacag

SEQ ID NO: 1802 - DNA, 65 bp, Rattus norvegicus
gcttgtcacccttagcagttgctgttacagattctcacctggcttgtttctgcttaggctctccc

SEQ ID NO: 1803 - DNA, 65 bp, Rattus norvegicus
cactcaaaagttctccagtgccattggtctcgtgctgctgttagaggctgtggctgtgctcatcg

SEQ ID NO: 1804 - DNA, 65 bp, Rattus norvegicus
gtcgctggtcaggtgtgttgattgtaccgaaggctcagggtattggtgtcactgtacactacagt

SEQ ID NO: 1805 - DNA, 65 bp, Rattus norvegicus
gtgacatccgatctctggagcatgctatggtatgccaagcacccaagcacactgtgttcactctt

SEQ ID NO: 1806 - DNA, 65 bp, Rattus norvegicus
gatcattagtcgggcttactctgtgacaccagtgcgcagaggaagagattgcccggagaagattt

SEQ ID NO: 1807 - DNA, 65 bp, Rattus norvegicus
aagaacacatgtttctgtcaggggtgtgaggtcaagcatgaacggtagtgcgtgtgcaccaccaa

SEQ ID NO: 1808 - DNA, 65 bp, Rattus norvegicus
ttggccacaacgagatcataggagtgtgtagagtggggatcagtgctgaaggtcttggcagggac

SEQ ID NO: 1809 - DNA, 65 bp, Rattus norvegicus
gcattgatcagatccacttgtccatagctgtcatggactatgaccgtgtaggtcacaatgaggtc

SEQ ID NO: 1810 - DNA, 65 bp, Rattus norvegicus
ctccgctctcccaagaagctgctgtgatgagaagtgggaaagtactgcgattacgacaaacagta

SEQ ID NO: 1811 - DNA, 65 bp, Rattus norvegicus
actctgagcgacctgcatgcccacaaacttgatcctgtcaacttcaagttcctgagccactgcct

SEQ ID NO: 1812 - DNA, 65 bp, Rattus norvegicus
ccagcggtcacagtcatcactgtacctgagcccacagttatcttctgagaagttcatgtatgcag

SEQ ID NO: 1813 - DNA, 65 bp, Rattus norvegicus
aaagtctgcaccaaccgcaccaccatcgtagtagcacacaggctctcaactgtggtcaatgctga

SEQ ID NO: 1814 - DNA, 65 bp, Rattus norvegicus
gaaattcccattagtttcatcccactgctgttgcgataatctcctgtgtactatgtagatgaccg

SEQ ID NO: 1815 - DNA, 65 bp, Rattus norvegicus
agtgactccctgagacatgtgtatggagagctggacctgcagattcgaagacgacctactgtata

SEQ ID NO: 1816 - DNA, 65 bp, Rattus norvegicus
gtgcagttgcacaggttcccacctcaaaatgggatgccatgactctgtctggataattctgtgga

SEQ ID NO: 1817 - DNA, 65 bp, Rattus norvegicus
tacatttacgtgggagtggctgacactttgcttgctctgagcctcttcagaggtttgcccctggt

SEQ ID NO: 1818 - DNA, 65 bp, Rattus norvegicus
tgtggaaagccaacctcccctgaagtggcgagacctcatcaggatgaaccaggactgcttctgag

SEQ ID NO: 1819 - DNA, 65 bp, Rattus norvegicus
cctgagccacgagcgtttagagagtccccaggaatgcgaacgaaagtcgtagtcacagcgaattc

SEQ ID NO: 1820 - DNA, 65 bp, Rattus norvegicus
aggtaccccaggctaacactgagctgctgagtctcctgtctcccgtggagtttgcatcacggcat

SEQ ID NO: 1821 - DNA, 65 bp, Rattus norvegicus
ctggtggagcacgaccagctcagggatgagcaggatgtctacgctcacttggtacagcagcggct

SEQ ID NO: 1822 - DNA, 65 bp, Rattus norvegicus
gatctctccagggaagccacagtatggaaagatatccactgtgcaaccacagaaagcatggacct

SEQ ID NO: 1823 - DNA, 65 bp, Rattus norvegicus
tgatacctttcctttactcacctgtaagtgcaacccaccactctccctctgtgctttgacaccac

SEQ ID NO: 1824 - DNA, 65 bp, Rattus norvegicus
ggcaaggctcacactcaaactgacgtctctgttacccacctcggtttctctcacatgtactagac

SEQ ID NO: 1825 - DNA, 65 bp, Rattus norvegicus; identical to SEQ ID NO: 1

SEQ ID NO: 1826 - DNA, 65 bp, Rattus norvegicus
acctacccgccccatttaggtcaagatggtcattctgcaagagcactgtccaactttggcttggg

SEQ ID NO: 1827 - DNA, 65 bp, Rattus norvegicus
gattgagggatgtggtgaatgcaaagaacccagtttacttggcagtctcctgtgtaaatcacagt

SEQ ID NO: 1828 - DNA, 65 bp, Rattus norvegicus
ccctagaatccatgcagatttgggttgtcccgagtgtacttcattggcacagtggcaagactgtg

SEQ ID NO: 1829 - DNA, 65 bp, Rattus norvegicus
ctcgcaggcatccaaagaaatggaggctttgagcagatctaaacaggacgatgttactgtgaaag

SEQ ID NO: 1830 - DNA, 65 bp, Rattus norvegicus
caccatgagaaggacctcggaggctgagaacttactgctgaagacacggacactcctgccctgct

SEQ ID NO: 1831 - DNA, 65 bp, Rattus norvegicus
gtcaaggctgtagataggctgagtgtgactcacaggcaaatgtgctttgatcaggatgactgcag

SEQ ID NO: 1832 - DNA, 65 bp, Rattus norvegicus
tttgtcgtgctgatctgtggcctcatcattgctgtcttcgtggcggtcatggaattcatctggtc

SEQ ID NO: 1833 - DNA, 65 bp, Rattus norvegicus
gccaggaaacacagcgcattcatttcagatgggtggtggagaaaatgtgctaaggtttgcaccct

SEQ ID NO: 1834 - DNA, 65 bp, Rattus norvegicus
gaatgtgagtgttcagactcttgacagccttttgggtattcattgccacacccactgtgcgtgcc

SEQ ID NO: 1835 - DNA, 65 bp, Rattus norvegicus
tcggcgctgatccagaagggtttcaaaccttgctcagagcagttcatcggcatcttttctcagaa

SEQ ID NO: 1836 - DNA, 65 bp, Rattus norvegicus
tcagcgtcggttctacgctcatcttccttggaggttacttcaaccaagttcctgatctcccctac

SEQ ID NO: 1837 - DNA, 65 bp, Rattus norvegicus
ccttctctactttgtgttcctggtgatcagtgtgatgttagaagatcgcatcatatcctgccctg

SEQ ID NO: 1838 - DNA, 65 bp, Rattus norvegicus
actggtgtgtgcccagcagagagccgaaagacatgacgacgttccgaagctcgtaactgcacatg

SEQ ID NO: 1839 - DNA, 65 bp, Rattus norvegicus
ctgactcgagatgactggtgagggctgatgtgggatttgaagtcccagactggctcacaagtgct

SEQ ID NO: 1840 - DNA, 65 bp, Rattus norvegicus
ctgcctcggtattgatcgtgtgttctctgtgccaatatgcaaaggagaggatcagttctttcctt

SEQ ID NO: 1841 - DNA, 65 bp, Rattus norvegicus
ctcttccagatggtcttgtttttaagaaccaacgtttctaaacagtcttgactgctaactattcc

SEQ ID NO: 1842 - DNA, 65 bp, Rattus norvegicus
tctgacggacagctctgactgatccctgcctaagccaagcacaagagactccacaaggatggggt

SEQ ID NO: 1843 - DNA, 65 bp, Rattus norvegicus
ttacccaacctgcaccctctcactggctacagcactccctccgaccttgggattcccagacaccg

SEQ ID NO: 1844 - DNA, 65 bp, Rattus norvegicus
tcacacccctcactgacaggtgctatctgaccctgacaggagccttgcacctcaagtttggaggt

SEQ ID NO: 1845 - DNA, 65 bp, Rattus norvegicus
atccggaagctgaagatgttcatctttgaaggcactgagctctcactgaacccaacctgtgccgt

SEQ ID NO: 1846 - DNA, 65 bp, Rattus norvegicus
tagttctggcccgaaagttcttcacgctctaccagctgtgtgaggagcagctctcaaagcaggag

SEQ ID NO: 1847 - DNA, 65 bp, Rattus norvegicus
aagcacttttccagggaccttaaaggaggagcaacaaggtgccaaagctcatggtgttcctgagc

SEQ ID NO: 1848 - DNA, 65 bp, Rattus norvegicus
tgtgtccccaacttctcagaggggaacaaccaggaggtgatcgatgccatttctcaagccatctc

SEQ ID NO: 1849 - DNA, 65 bp, Rattus norvegicus
cacttcctgacctgggaatctggtcaccaaaagatggggattttcccttcggttgcagtttcttc

SEQ ID NO: 1850 - DNA, 65 bp, Rattus norvegicus
agaaggctttcgagaccgagcagcgttcatccgtggggccaaagacattgccaaggaagttaaga

SEQ ID NO: 1851 - DNA, 65 bp, Rattus norvegicus
gagtcctgcctttctgttggtgtctaaatcctgcttactctaggtggtataaaccagtcctgccc

SEQ ID NO: 1852 - DNA, 65 bp, Rattus norvegicus
attggcttgagctacccagatcaacggtgctctaccgctgaatcgctcgctgcggattttccacc

SEQ ID NO: 1853 - DNA, 65 bp, Rattus norvegicus
gtcgacgctttggtgtgagcttttcggtttgatggtaactggtggagacttccatgtgagatttc

SEQ ID NO: 1854 - DNA, 65 bp, Rattus norvegicus
tacccaggaggaagatgtgtaggtccgggactgagttggactagcgacagttctccacaggagct

SEQ ID NO: 1855 - DNA, 65 bp, Rattus norvegicus
cttcctcctggacaagaaggggatattgctgttcaagttcttcctgatcgaccatttggcctttt

SEQ ID NO: 1856 - DNA, 65 bp, Rattus norvegicus
ggcattgtatacctgggcttaattcacgccggcataccaccacagggttcttagagattggagaa

SEQ ID NO: 1857 - DNA, 65 bp, Rattus norvegicus
gagccccagaagaaagaatcacagacgaactcagaggacacagaagtgagcgtgtaacagcctct

SEQ ID NO: 1858 - DNA, 65 bp, Rattus norvegicus
acggatcggtgttacatcacactcacacagtccctccacctgatcatgggcggagcccctgcagg

SEQ ID NO: 1859 - DNA, 65 bp, Rattus norvegicus
ggccatgggcaagttcttcaagggtctggccaggtggaacgcttcatgtttgagggtgttgaaat

SEQ ID NO: 1860 - DNA, 65 bp, Rattus norvegicus
ttatcttggcgcaaaagttttacgttctctataaactctgcgaagagcagctcacgaaacaggtc

SEQ ID NO: 1861 - DNA, 65 bp, Rattus norvegicus
acgccgctgacggataggtgttacctaactctcactcaagccatgaagatgggacttggagggaa

SEQ ID NO: 1862 - DNA, 65 bp, Rattus norvegicus
gtcatatcccatcggtgatgatgaagaatctgaaagtgactgagaccctctaacgtcgccaaatg

SEQ ID NO: 1863 - DNA, 65 bp, Rattus norvegicus
catgtccttcatgttggctccaaggtggccttcgtaactatcttctagtcttctgtgaatggagc

SEQ ID NO: 1864 - DNA, 65 bp, Rattus norvegicus
actctcttgagtgtccactgactgtgtgggggacaccccataaaagcccccttgtgatgcctctc

SEQ ID NO: 1865 - DNA, 65 bp, Rattus norvegicus
gcagaacttgccaagtacatgtgtgagaaccaggccactatctccagcaaactgcaggcttgctg

SEQ ID NO: 1866 - DNA, 65 bp, Rattus norvegicus
ggactccctcaagagacagctagatcatcagaagacagagtctgcaggtctgtagggctggtcta

SEQ ID NO: 1867 - DNA, 65 bp, Rattus norvegicus
aaagcttcagaatctgatggtggattttggccagctagcctgccacactcctcgtaggacctact

SEQ ID NO: 1868 - DNA, 65 bp, Rattus norvegicus
gaatagtctccagaacagaacccatagacaatctggcaaagcctgtctgccacttacaaggaaag

SEQ ID NO: 1869 - DNA, 65 bp, Rattus norvegicus
ttggaagatggtccaactcaccaagtgtcggcccagttagtgagaaacgcgcagtagacatggag

SEQ ID NO: 1870 - DNA, 65 bp, Rattus norvegicus
ttacccatgtgcttgcttgtgagccatgtgcctgtttcatgttctatgtcatgtgaccctgtgcc

SEQ ID NO: 1871 - DNA, 65 bp, Rattus norvegicus
gttgctgctggcagaagacaaacttcactatttccctgagatgtgtagccatcagcactaacata

SEQ ID NO: 1872 - DNA, 65 bp, Rattus norvegicus
aggccaaagaaaacacgatttaccttcaggtccaaacaggcaagtcctcaagtacctgacaggga

SEQ ID NO: 1873 - DNA, 65 bp, Rattus norvegicus
gggtacaggggacaatcttgctggactatttcctgaattgggtcctcgactggaacatgatcaag

SEQ ID NO: 1874 - DNA, 65 bp, Rattus norvegicus
ggcaacagcactgggatcttccattggctcagcaattgttggaggtttggttacaggtctcattc

SEQ ID NO: 1875 - DNA, 65 bp, Rattus norvegicus
tgttcccaagagagcatctgtcagttgttgtcaaaatgacaaagacctttgaaaatctgtcctac

SEQ ID NO: 1876 - DNA, 65 bp, Rattus norvegicus
cccgatgacctctccattgtgtgtttcacgagcggtacaacagggaaccccaaaggtgcgatgct

SEQ ID NO: 1877 - DNA, 65 bp, Rattus norvegicus
agaacctccactccaaccaatccaaggagcttctaggcaaagatgtctctgtcaaggtgaccttg

SEQ ID NO: 1878 - DNA, 65 bp, Rattus norvegicus
ttctgcaacccttgatggccagagatgacacatagactgtgcactgttcatcgaggctcacctgt

SEQ ID NO: 1879 - DNA, 65 bp, Rattus norvegicus
gagtgactttgcacaaaggagggctgagagcggacttgatcagtaagtcgtcgtgaatcagtttg

SEQ ID NO: 1880 - DNA, 65 bp, Rattus norvegicus
gcccctttcccatcctggttgattggctcagtgccaagtaacaacctgggcagatgaacttagaa

SEQ ID NO: 1881 - DNA, 65 bp, Rattus norvegicus
ggacttcagtccctgcagtattttgctgccagatagcatgtggtgcctctacctgtaaatgtcag

SEQ ID NO: 1882 - DNA, 65 bp, Rattus norvegicus
gtcagccatcaattaaagctgtgcttactgttgattgtgtgtgcatttctaaggtgaacgctcct

SEQ ID NO: 1883 - DNA, 65 bp, Rattus norvegicus
aagtacgagttcccagagtctggtctgctctcctgccctttgggagccaacattctggtcctctt

SEQ ID NO: 1884 - DNA, 65 bp, Rattus norvegicus
agcagtgtctcccataaccacatcaaatctccagcttccttgagtgttccccgtcagtagctgca

SEQ ID NO: 1885 - DNA, 65 bp, Rattus norvegicus
agggagagatatgcttgtcatcaccgaagcctgatgctgtagagccacaccctggtattggccaa

SEQ ID NO: 1886 - DNA, 65 bp, Rattus norvegicus
atcgtcaaccacatgagggaccagaacagttacaatgaggagaaggacaactggaaccaggtggc

SEQ ID NO: 1887 - DNA, 65 bp, Rattus norvegicus
aagaaatgtgcggtggtgggaaacggtgggattctgaagatgagtggctgtggccgtcaaataga

SEQ ID NO: 1888 - DNA, 65 bp, Rattus norvegicus
ttgtgacagccatggggagcaagacctctgcagatgaccacattgctaaagcactggagtgaacc

SEQ ID NO: 1889 - DNA, 65 bp, Rattus norvegicus
atgcgcagataagaagagaatctggagggatgctccaagagtgtgccagctgcctgagtggttgc

SEQ ID NO: 1890 - DNA, 65 bp, Rattus norvegicus
ctggagctgttccggaatgacattgctgccaagtacaaggagctgggcttccagggctgagccat

SEQ ID NO: 1891 - DNA, 65 bp, Rattus norvegicus
ttgcaaccagggcatgtctgagcctcatgaaaagtgagggtgaagaacttgtagtggatcccaga

SEQ ID NO: 1892 - DNA, 65 bp, Rattus norvegicus
ctcccagagaagttactgagtctcttgaagcagtgggacttggaagactgagaaacatctgctag

SEQ ID NO: 1893 - DNA, 65 bp, Rattus norvegicus
acgaacagagtttgcatgatcctgagcgtgatcccgagtgcctgtggtgatacagagccggggac

SEQ ID NO: 1894 - DNA, 65 bp, Rattus norvegicus
caaaacacctcacctgtgccacctcgacagggctttcctacgattaagggctatgctaactcatt

SEQ ID NO: 1895 - DNA, 65 bp, Rattus norvegicus
gactttcaactggtgtggggaaatctgtctttccagacatccgaggaacacatctgagaaaccag

SEQ ID NO: 1896 - DNA, 65 bp, Rattus norvegicus
tgctggcttacagcatcaccctggtcacgctctggtccatttggcattattcctgagtgggtaca

SEQ ID NO: 1897 - DNA, 65 bp, Rattus norvegicus
gtatctcccctttgcttctgcttttaacaccatgggtctccttaaagagggaaccctttgtagta

SEQ ID NO: 1898 - DNA, 65 bp, Rattus norvegicus
aactgaaagtgaggactgcctatccatcactgagactcattcatgcggtcagaggttactggctg

SEQ ID NO: 1899 - DNA, 65 bp, Rattus norvegicus
gagtcagccatgtgggtcatgctgtttatggagctgtattctctgttgatcctgatgggctcctg

SEQ ID NO: 1900 - DNA, 65 bp, Rattus norvegicus
ctatgacatggctaagctcctgtgtgacaagtattacatggcttcccctgacctggagatccagg

SEQ ID NO: 1901 - DNA, 65 bp, Rattus norvegicus
gctgagcttgtgtgtctttctcatggatgccggattggctactcttcaccacagacattagcaga

SEQ ID NO: 1902 - DNA, 65 bp, Rattus norvegicus
atcaaagccaggtccctgagtgtccagcatgtgcccagctcccaagaagcagcagaagatggcat

SEQ ID NO: 1903 - DNA, 65 bp, Rattus norvegicus
tagatcttagtggctcttgcagcccagtaaaagcctgtcctgttggtggtgcatggaaacatgcc

SEQ ID NO: 1904 - DNA, 65 bp, Rattus norvegicus
tcctggacacacaacatccagcgagagaaagagtttctgcggaagctagtgaaagcacgcgtcat

SEQ ID NO: 1905 - DNA, 65 bp, Rattus norvegicus
ggtctttgtgcaatggtcaattgttccctagagagcatctgtcagttgttgtcaaaatgacatcg

SEQ ID NO: 1906 - DNA, 65 bp, Rattus norvegicus
ggggtgaacttctggtctccctctgttatcagtccactacaaacacgctcactgtggttgtctta

SEQ ID NO: 1907 - DNA, 65 bp, Rattus norvegicus
ccttctcgaccttctgcatttcatcatggtcatcttggccccaaatcctgaagcttttggcttgc

SEQ ID NO: 1908 - DNA, 65 bp, Rattus norvegicus
attgatgaactcagagctgggaaagttccaaaaccagggccaaggagtggccgcttctgttgtga

SEQ ID NO: 1909 - DNA, 65 bp, Rattus norvegicus
cctgcgaacttttcgaatgcaggtaggaactcgggtgatttctagcttgctgtaaggttccatca

SEQ ID NO: 1910 - DNA, 65 bp, Rattus norvegicus
tctgatgcactggctgagctgaaggatgagaaacggaagttggaaagagagcgtccactgtcctt

SEQ ID NO: 1911 - DNA, 65 bp, Rattus norvegicus
taaccctcgcaagcctgtggagcactggcaccagctagtggaggagaagactctaagcagcttta

SEQ ID NO: 1912 - DNA, 65 bp, Rattus norvegicus
ccccacttcaggttctgcaacaaacgaactctatgagcttcagggtccagatgagagccctttct

SEQ ID NO: 1913 - DNA, 65 bp, Rattus norvegicus
tttggcaactgcaagatcctggccaagaaggtgtatactctgtactcactggctgtgcagcagct

SEQ ID NO: 1914 - DNA, 65 bp, Rattus norvegicus
aggcattaactcaggtaccgagctcctagtgtttgaaggaacagaactaaacttgaccccacgtg

SEQ ID NO: 1915 - DNA, 65 bp, Rattus norvegicus
aaatactggcaaggaagatgacacagatgtacaagctctgcagtgagcagctgtcccagcaggat

SEQ ID NO: 1916 - DNA, 65 bp, Rattus norvegicus
cagatcctttgcatccagagagctattcagcagaaactggaagtgtttgtctttgaagggacaga

SEQ ID NO: 1917 - DNA, 65 bp, Rattus norvegicus
ggattttccgcctcactctgctctcagcactcccaggaaatgaccattgctttactggattcgtt

SEQ ID NO: 1918 - DNA, 65 bp, Rattus norvegicus
agctcattgccagtctggacagtccacagctttcccaagtacacggtgtcattcaagtggatgtg

SEQ ID NO: 1919 - DNA, 65 bp, Rattus norvegicus
aagagcctccctcactctgctgttgtgaagaagttaggctaccatgggaagccatgaatgtggct

SEQ ID NO: 1920 - DNA, 65 bp, Rattus norvegicus
ttaagtgagcgacactggtctgggaggactcgaagtgttggggagctctcttgggagctcggtct

SEQ ID NO: 1921 - DNA, 65 bp, Rattus norvegicus; identical to SEQ ID NO: 1

SEQ ID NO: 1922 - DNA, 65 bp, Rattus norvegicus
ctccacgctactgtagctcacagattgatgcagaaatgagagacatcctgcagtcctgatgcagg

SEQ ID NO: 1923 - DNA, 65 bp, Rattus norvegicus
tttacgggatcaaagtgggtctacggcagtgctgcttcgtgaatgtgtgtggactcttgtttccg

SEQ ID NO: 1924 - DNA, 65 bp, Rattus norvegicus
agtagcggtatctgctggaccttcgcacagctagacacctactccaatgctgtggccaatctgtt

SEQ ID NO: 1925 - DNA, 65 bp, Rattus norvegicus
ctgtggtgggctcttcatcagtggtcagcagtcccaggtttgtaaggttacactggcttttactt

SEQ ID NO: 1926 - DNA, 65 bp, Rattus norvegicus
catcctgtttgactgcagcatcgccgagaacatcgcctacggagacaacagccgtgtcgtgtctc

SEQ ID NO: 1927 - DNA, 65 bp, Rattus norvegicus
atcttaaagcaagtctgtgaggattgggaagtggttcctgagcctgtggccaggtggtgcaatgt

SEQ ID NO: 1928 - DNA, 65 bp, Rattus norvegicus
ttcttgtcttgtcaaccaagtccttctcagagtgcccagagacctccggattcaccttggggtta

SEQ ID NO: 1929 - DNA, 65 bp, Rattus norvegicus
tatgaagctgaagatgacggacacttccgagaagcccttgtggaggacagtggtgaacatcaacg

SEQ ID NO: 1930 - DNA, 65 bp, Rattus norvegicus
ccccatgctgagcctgcttctatcactgttcatttgggagacctcagacttcagtttgccttatt

SEQ ID NO: 1931 - DNA, 65 bp, Rattus norvegicus
aagggctatctacagtgaggacctatcagaggtgaggggtggaaccctgctgcaagcacagaaat

SEQ ID NO: 1932 - DNA, 65 bp, Rattus norvegicus
aacccagtgtggaacgaggagctgacgtacagtggaatcacagatgacgacatcacccacaaggt

SEQ ID NO: 1933 - DNA, 65 bp, Rattus norvegicus
tttctcactgatggatttcaggcaagtgccctcctgctgagttcgactttccagcccctaattag

SEQ ID NO: 1934 - DNA, 65 bp, Rattus norvegicus
ctatctgagacttgcaaacacgtggcagagacattgtccctcttgggcacaaggacccatctcct

SEQ ID NO: 1935 - DNA, 65 bp, Rattus norvegicus
cttggcagtgtgcactgaccgcactttcatggtatacatggttaccaagttcctgatggcgctcg

SEQ ID NO: 1936 - DNA, 65 bp, Rattus norvegicus
ctgcggatttgagccctaccacatcagggccattgcagaggagctcgccccagaaaggggatttt

SEQ ID NO: 1937 - DNA, 65 bp, Rattus norvegicus
ttaccgttcatccagttctttcttcagagaagatgtcacctgtgtgcctatgcagacttggggcg

SEQ ID NO: 1938 - DNA, 65 bp, Rattus norvegicus
aggaccacaccagaaagggacgacagcttgcttatctctcccaacccagtatctcaagtgccaaa

SEQ ID NO: 1939 - DNA, 65 bp, Rattus norvegicus
ttgatggacccgtgaaaagcaagtggtcggttagcgttggtggtgaaaggtgctgcagttggaaa

SEQ ID NO: 1940 - DNA, 65 bp, Rattus norvegicus
tgttcatcccattagacagcaaggcagtagccaggacctccatccatgaagctctcttacctctg

SEQ ID NO: 1941 - DNA, 65 bp, Rattus norvegicus
gcagggccaggccgtggacttggacgccttgtgcagttacacatgggaagctgttgattccaaaa

SEQ ID NO: 1942 - DNA, 65 bp, Rattus norvegicus
agagcctcagccctaggtgtcttcctcctgtcccgggtcagcacagttgtggcaatagccagtat

SEQ ID NO: 1943 - DNA, 65 bp, Rattus norvegicus
tccaggcctcaacacaagagaagaatggactttgagaacggaagggcttcacacagcactaaagg

SEQ ID NO: 1944 - DNA, 65 bp, Rattus norvegicus
cctacctccacattggaaatgtttccgacttccagtaccactcctatacccagaaaccacagtgg

SEQ ID NO: 1945 - DNA, 65 bp, Rattus norvegicus
ggtcaaggaaccttctacctgtgtctccagaacacccatttagtcgatggcataatctgcagctg

SEQ ID NO: 1946 - DNA, 65 bp, Rattus norvegicus
taggtgcctgggattctgccattgttactttgtgcctttgatcatggccttccttaggtaggcac

SEQ ID NO: 1947 - DNA, 65 bp, Rattus norvegicus
aattcaaggccctcaagagcctacatgaacagggggcattgaaactgactgtcggccagtgtgac

SEQ ID NO: 1948 - DNA, 65 bp, Rattus norvegicus
ctggcctctttgtgggactgctcattaggctcttcattggagatgagaaaacccgcctgattcta

SEQ ID NO: 1949 - DNA, 65 bp, Rattus norvegicus
gactccattttcgtgacagcccaagtctctaagtcctcgggagacctgtatttgcactgctctga

SEQ ID NO: 1950 - DNA, 65 bp, Rattus norvegicus
gcctgtactctttactccattgagaaaagaaccagcgtctgtaaaagctgtgggtgccatcaggg

SEQ ID NO: 1951 - DNA, 65 bp, Rattus norvegicus
tgtggtttctgctgtaccccaaggcttcttgttaggggtcaacactgttgccaatacctcagtcc

SEQ ID NO: 1952 - DNA, 65 bp, Rattus norvegicus
agcagctacaatcaaggcggctacaaccaagacagttatgggtcaagtggtgggtacagtcagca

SEQ ID NO: 1953 - DNA, 65 bp, Rattus norvegicus
ctgtggggctctttctacagccactgcttgggaacacaggagcatcttaattgggattttcctct

SEQ ID NO: 1954 - DNA, 65 bp, Rattus norvegicus
tctcagatccagacgattcgcaatgcgctgatccaccagctgaccacattccagttcgaagggca

SEQ ID NO: 1955 - DNA, 65 bp, Rattus norvegicus
ggtcattggcccggaagttcatttccttgtacacgctctgtgacgaactgctgtccaagcaggat

SEQ ID NO: 1956 - DNA, 65 bp, Rattus norvegicus
tttaacacgttccgctttatgcagagaatcgcaccgtgagtcttgtatctgccctgtccccacac

SEQ ID NO: 1957 - DNA, 65 bp, Rattus norvegicus
ctgggcacctcttctggaatgctcactacagtctagtgctaaggtgttgccactgaattgatacc

SEQ ID NO: 1958 - DNA, 65 bp, Rattus norvegicus
gctctctgagacacaggggaatttgctggagaaatgttggctgagcatgagtaaggaatggtggt

SEQ ID NO: 1959 - DNA, 65 bp, Rattus norvegicus
aaccctgaagtctttcacagaagtgatagagtagaggccatgtccttgggcagggatggaggtga

SEQ ID NO: 1960 - DNA, 65 bp, Rattus norvegicus
agaaggattcattgaagcccgattgctggccaggaagttcattaccctttaccggctgtgtaaag

SEQ ID NO: 1961 - DNA, 65 bp, Rattus norvegicus
agtgggcgaagtggaccgacagggttttgtgtcttcactgtgtttggcctatgttcatcgagggt

SEQ ID NO: 1962 - DNA, 65 bp, Rattus norvegicus
cagtgtttaagtcctgcacctttgacgatgtgacctcagtcaacacctacttcaagaactgcacg

SEQ ID NO: 1963 - DNA, 65 bp, Rattus norvegicus
ggaagagccctacgtgatgtacaggaaatccgataagcccttgtatggaaacgacaggtttgaag

SEQ ID NO: 1964 - DNA, 65 bp, Rattus norvegicus
ttacatagccggagtcttttgtgcgattgtctctcaccctgctgactctgtggtctctgtgctga

SEQ ID NO: 1965 - DNA, 65 bp, Rattus norvegicus
cacactggcttagtctctattcagacaggtgacctttgctgtggtgggttcccctcagacctaat

SEQ ID NO: 1966 - DNA, 65 bp, Rattus norvegicus
acaaggccaccaactccaagggcagcgagtggaagaaggtcgccaaagtcatagaccgtttcttc

SEQ ID NO: 1967 - DNA, 65 bp, Rattus norvegicus
tttctgcaccggttttctaggtgcggttgtgggtgccaatttccccaacaatatccagatagggg

SEQ ID NO: 1968 - DNA, 65 bp, Rattus norvegicus
tagtgaggtagcccagacaccggacaaggtccgctgagcctgcagggtactggttacctgtccta

SEQ ID NO: 1969 - DNA, 65 bp, Rattus norvegicus
gacccagccatgtcacaaagctgaggaacaggccacttggggagacacacggagcgtgaattatc

SEQ ID NO: 1970 - DNA, 65 bp, Rattus norvegicus
tatatggtgtatgctgctgtatttacagctcatcctctctccattgtgccctgacccatttctgt

SEQ ID NO: 1971 - DNA, 65 bp, Rattus norvegicus
gacgtcagtagccatctatgcatcctaaatgcaggatcctcttgattctttctgccaatcaaata

SEQ ID NO: 1972 - DNA, 65 bp, Rattus norvegicus
tatttctgtgagtggggtaggcaggccagtacagaggggattgatctgcaggtgctggtcctgca

SEQ ID NO: 1973 - DNA, 65 bp, Rattus norvegicus
tgtcatacatcaccctacagcagacacgtgacaaccatactgggctctcatctgaacccctcttc

SEQ ID NO: 1974 - DNA, 65 bp, Rattus norvegicus
cagctgccagtgagacactttacagcctcgtggtgaagagtttgactgtgcttttgcctcagtgt

SEQ ID NO: 1975 - DNA, 65 bp, Rattus norvegicus
caacctctcttacacccaactccctattccaagttggggtacatgtgcaatctcattgccctggt

SEQ ID NO: 1976 - DNA, 65 bp, Rattus norvegicus
caacgcatttgtcatttctgagctgcctgcattgtcctattcttggcccactgagcctgtgcata

SEQ ID NO: 1977 - DNA, 65 bp, Rattus norvegicus
gttggcatgcaatggccaaacattcccagaagaccttttggatcaattcgcacctccacctggga

SEQ ID NO: 1978 - DNA, 65 bp, Rattus norvegicus
aggcagacaccagtggccctctggttcagcatgaagacaggcaagactttggatttcagagctct

SEQ ID NO: 1979 - DNA, 65 bp, Rattus norvegicus
catcgtgggtgtcctgcttcataatcctgacaggtgatctgttgtcttcctagtgtgaatatgtg

SEQ ID NO: 1980 - DNA, 65 bp, Rattus norvegicus
gacacggaatatgcttgtggtaacagtgccaaacagacaggactttgaagagccactccaggaac

SEQ ID NO: 1981 - DNA, 65 bp, Rattus norvegicus
gacaaccaacaagtaggagaggaagctgtggtgaagggaaatggagcaggaaaatgctctggaaa

SEQ ID NO: 1982 - DNA, 65 bp, Rattus norvegicus
tgagtgtgtgtgctcagggtcatacttccttgtcagacaatgtcactatgagaagaggtggctgg

SEQ ID NO: 1983 - DNA, 65 bp, Rattus norvegicus
agaactgggtcctggagagaagggcgaatacacatacgcattgccaaaatcgactcctactccag

SEQ ID NO: 1984 - DNA, 65 bp, Rattus norvegicus
tcagtgcaactgcgtcccttgtgcttgagacacagttatcagaagaagtagaacgcaataaagtg

SEQ ID NO: 1985 - DNA, 65 bp, Rattus norvegicus
gaccttagtgtgggctgggatcttgttcatcacatgacctcttgcggtggtcacagggagtaaaa

SEQ ID NO: 1986 - DNA, 65 bp, Rattus norvegicus
gaagggacagttccaacccatctagctgcctgcaagtcatgctgtgagctccagatttccagcta

SEQ ID NO: 1987 - DNA, 65 bp, Rattus norvegicus
ggacacgaataagcttgctgtggtctatgctcccatcacgctcttacaaacgccatgtctgtctt

SEQ ID NO: 1988 - DNA, 65 bp, Rattus norvegicus
aatccattcagcagggcaaatgcagctgagactatctctgcagcagcaagaggtctttcgtctgc

SEQ ID NO: 1989 - DNA, 65 bp, Rattus norvegicus
aacttctactacgtcatcctgtacctcatggtgatgatcggcatgttcgccttcatcgtggtggc

SEQ ID NO: 1990 - DNA, 65 bp, Rattus norvegicus
ccccactcagtccctcccggctctctcatccccagccatgtctcccagccttccactaccttaat

SEQ ID NO: 1991 - DNA, 65 bp, Rattus norvegicus
gccatgtaatctgatgaccttgaaccccatggtgaatgtggagaatcacgttctctgacttccac

SEQ ID NO: 1992 - DNA, 65 bp, Rattus norvegicus
ttgataaaggcagtcccttctactacgactgggagagcctgcaactgggaggaatgatctttggg

SEQ ID NO: 1993 - DNA, 65 bp, Rattus norvegicus
ttactgatgaggagctcatggcctgtgaccaagagaaggacagtagcagtagctcagagtctgag

SEQ ID NO: 1994 - DNA, 65 bp, Rattus norvegicus
tctcagcactggcttgctctataactaggcctgaggtgctcagactgctccacaggtttaactct

SEQ ID NO: 1995 - DNA, 65 bp, Rattus norvegicus
ggccgtagaacaacctgccacacaccttcctgaactgaagccactgtcatgaaccccatagttaa

SEQ ID NO: 1996 - DNA, 65 bp, Rattus norvegicus
ttggatctcagatgataaggaaaccaagtctaccttcaaacctctaagttgtagcaagatgaagg

SEQ ID NO: 1997 - DNA, 65 bp, Rattus norvegicus
agctggaaacctcgaccagaaacagcatcccggagtactgcttgtctagtctttgaatgaccagc

SEQ ID NO: 1998 - DNA, 65 bp, Rattus norvegicus
ccacaagcagcctgatccctccaatcagagaagttgaagatgaatgttgattcccaggagaccag

SEQ ID NO: 1999 - DNA, 65 bp, Rattus norvegicus
ttttatatctccacttcacaggttttgtttgaaccctgcttggagttattattcactcatggctc

SEQ ID NO: 2000 - DNA, 65 bp, Rattus norvegicus
tgtgaagtgatgccagcagcagctctctactcttgaaaaccgccttccgtcgtcagctaacacga

SEQ ID NO: 2001 - DNA, 65 bp, Rattus norvegicus
ataacgcttactctaaaaggcgaactcaaccagtagcacatgcctgtaacctgagctgaagcagg

SEQ ID NO: 2002 - DNA, 65 bp, Rattus norvegicus
aaaccacaggctgcacatccgtcgcaagtccatctaagtgtggggagggaagtacacggaagaat

SEQ ID NO: 2003 - DNA, 65 bp, Rattus norvegicus
aaagcagagtctttcggaggtgaggagggagtctcacatctgccctgacttcttgtctatcgtgt

SEQ ID NO: 2004 - DNA, 65 bp, Rattus norvegicus
gcatcctgcacctgtaactccacagttgatgtcatcacctgggcattacacactggggaagaaat

SEQ ID NO: 2005 - DNA, 65 bp, Rattus norvegicus
agtccggtgtcactcaccccactaccttgtacatgaccagctctcccagtgtcccagtgtctgcc

SEQ ID NO: 2006 - DNA, 65 bp, Rattus norvegicus
agcagttcactttgagcgaggctttcctgatgctgctctctttgttcaggtgaggaagcgaaggt

SEQ ID NO: 2007 - DNA, 65 bp, Rattus norvegicus
agctcaacgacatcctcagcttgggcaacttcacagagagcacagatggaggaaaggccattcta

SEQ ID NO: 2008 - DNA, 65 bp, Rattus norvegicus
gggccagcaaaggactcagaagaagtcaatatcaccaacatcatcaacagctccatctccagctt

SEQ ID NO: 2009 - DNA, 65 bp, Rattus norvegicus
aacagggtatgcacacccgtggatgcaaacgcctacgggagtcaaaggtcaccagagtggaaact

SEQ ID NO: 2010 - DNA, 65 bp, Rattus norvegicus
tgagcctcatgacctcagagcccagtctcagatctcggtgaacatggaggattgcgaggacactc

SEQ ID NO: 2011 - DNA, 65 bp, Rattus norvegicus
aaagagaggtaggtgggtgttagacattgttggcagtcattcttagttgccctggatcttactgg

SEQ ID NO: 2012 - DNA, 65 bp, Rattus norvegicus
ttccaaatgctctccatcgttgttcctaaggttggcacgcagttgggacagcactgtgcttataa

SEQ ID NO: 2013 - DNA, 65 bp, Rattus norvegicus
caaaatccctgatctaaccgatgtgaatgccatagacagatggtcccggatcgtgtttccattca

SEQ ID NO: 2014 - DNA, 65 bp, Rattus norvegicus
catcttaaaggaggtctgctggtttagggcaaggacagtgttggagctacagggaaagtagacag

SEQ ID NO: 2015 - DNA, 65 bp, Rattus norvegicus
ggagagctcatctcaatgcgcgacctcacggcgtccaacaaggtgtcgctggcactgctgcagaa

SEQ ID NO: 2016 - DNA, 65 bp, Rattus norvegicus
ggacagtcaacagagagacaaagatgggcgtgtagcttctaaatacctcacctgtagatgtcacg

SEQ ID NO: 2017 - DNA, 65 bp, Rattus norvegicus; identical to SEQ ID NO: 1

SEQ ID NO: 2018 - DNA, 65 bp, Rattus norvegicus
ggagacggtgtgttgtgattggtgtatctcagagtagctcaaacttcccatttctgccctcattg

SEQ ID NO: 2019 - DNA, 65 bp, Rattus norvegicus
cccgaccagactgtgacccttcatgtcagacctcgatgaccccttcttttagatccttgttggct

SEQ ID NO: 2020 - DNA, 65 bp, Rattus norvegicus
gcaaaagtgaggtggggagcttagatgtctctgggacttaggaggactctctgatccctgagata

SEQ ID NO: 2021 - DNA, 65 bp, Rattus norvegicus
gccctgcttctcggacaccccttgctgctcagacctccaataaaactcggttttccttcttgttt

SEQ ID NO: 2022 - DNA, 65 bp, Rattus norvegicus
ctgacagagtgcatacagcagcaagctgagatggagaatggaatggtacccatggacaccaaaga

SEQ ID NO: 2023 - DNA, 65 bp, Rattus norvegicus
ctgggccttcagtaagtgtgtaaactccatgctgtactctccttgtctgaaccaagtccacttcg

SEQ ID NO: 2024 - DNA, 65 bp, Rattus norvegicus
atgtctggtgtgctgttggctgggccacctgtggcttatacagtgtgagcgtatggaggtaggaa

SEQ ID NO: 2025 - DNA, 65 bp, Rattus norvegicus
tagctctggaaaactgacttgcccaggtcagatggacttgtgcagttcagctcttgctgcttggt

SEQ ID NO: 2026 - DNA, 65 bp, Rattus norvegicus
gacacagtagttctgggggtaggggaaccaaagaacctgatattcctgctgaagtaaagcttgcc

SEQ ID NO: 2027 - DNA, 65 bp, Rattus norvegicus
ctcctggatataagttgggcagttaaactgggatagagccagtcatgtctcttggcctcaagaag

SEQ ID NO: 2028 - DNA, 65 bp, Rattus norvegicus
ataatagtggcagcacagcaaccagatcacccatgaagcatccaaatcccaaaccccagagctcc

SEQ ID NO: 2029 - DNA, 65 bp, Rattus norvegicus
gatcctcgggtacacaaagtccatgaagagcaaactgtggacatttaagtccagtacgaattgcc

SEQ ID NO: 2030 - DNA, 65 bp, Rattus norvegicus
tagccatcaggaatgcagccctgccagccaggcatcatgggttgaggtcatcctgctttcatgac

SEQ ID NO: 2031 - DNA, 65 bp, Rattus norvegicus
gtagcagggaaggacactactccagcttgttgtgttacctttcagcaggatgggaagtactggaa

SEQ ID NO: 2032 - DNA, 65 bp, Rattus norvegicus
gcagtgtatgggatgaccttcaaaatcctgtgtatctcctgtaagcgtcgtagtgagaccaccgc

SEQ ID NO: 2033 - DNA, 65 bp, Rattus norvegicus
gggtagttacgtgccctttgagatcataagcctagcataattgcagcatgtttccagagcaagtc

SEQ ID NO: 2034 - DNA, 65 bp, Rattus norvegicus
agtgtgtggagtacaatgcactgtaaggtgctgtaaagtctgagcacggtgtgtaacaggcgcct

SEQ ID NO: 2035 - DNA, 65 bp, Rattus norvegicus
gtgggctcagctgcagctctagccttgattctgctccagccccaaacagacaagacaaagtcaaa

SEQ ID NO: 2036 - DNA, 65 bp, Rattus norvegicus
ggtgtttgcttgcattaggaacatcacagaacctcactcacactagatctcacagcgaagcaggt

SEQ ID NO: 2037 - DNA, 65 bp, Rattus norvegicus
aaaatgttgagaactaccgaagtaggataaggaagtattgccaaacacagatggaggtagtgagt

SEQ ID NO: 2038 - DNA, 65 bp, Rattus norvegicus
caaattgaaactgagtcttttcacacattgtgacggacaagatggcgttcttgtctccggacttc

SEQ ID NO: 2039 - DNA, 65 bp, Rattus norvegicus
aagcttgcacttccgcgtcctatatctagcagcatgggatacgtttggcagttcaccccattagg

SEQ ID NO: 2040 - DNA, 65 bp, Rattus norvegicus
gccaagttgtcttgtaaggagagaccacaatgtgtcatccatgcccagcttttgtgtctaacaaa

SEQ ID NO: 2041 - DNA, 65 bp, Rattus norvegicus
ttccacaccatgaccatccaaattgagagctactctgaggacatgaagagctgccaggagtgcca

SEQ ID NO: 2042 - DNA, 65 bp, Rattus norvegicus
atcactgtcctgacacctggtagcaaaagtcccctcagcctacccagaagacagatgaactccat

SEQ ID NO: 2043 - DNA, 65 bp, Rattus norvegicus
caggccgtcttctcttccgtgttctactttgcatccgttcctctctaccaaggcttcctgatcat

SEQ ID NO: 2044 - DNA, 65 bp, Rattus norvegicus
agtaaccagcccttgtgccctgtcttccccaccctaatggcaaggcgtcttcagccaaagctgaa

SEQ ID NO: 2045 - DNA, 65 bp, Rattus norvegicus
gggaggaagtgcagtcgaaagctaagcacctcttgctgaacacattcggcatgtacaagtgcact

SEQ ID NO: 2046 - DNA, 65 bp, Rattus norvegicus
gcacttagtgcatctacttggtgtatagaccctcgctctcttcaggtggtacatgagagacaggt

SEQ ID NO: 2047 - DNA, 65 bp, Rattus norvegicus
taacaatgccgtggactgccaccaagtgcaaatcgttgcctcccatcccaacagccctctacaaa

SEQ ID NO: 2048 - DNA, 65 bp, Rattus norvegicus
gtgggtgtatggcaggagagaaacgctgaaaatgcaatagaagctcttaaggagtatgaacctga

SEQ ID NO: 2049 - DNA, 65 bp, Rattus norvegicus
agtttctcaaacagcagcttatgctgttgcctgtagaaagcctactgatcctctcacccgtgctg

SEQ ID NO: 2050 - DNA, 65 bp, Rattus norvegicus
ccttgtatatccaaggcatgtgctggggtctgccctaagctagactatgattcctcaggccttac

SEQ ID NO: 2051 - DNA, 65 bp, Rattus norvegicus
atgcagaccaccaaggcactgctcatttctccagttctgatccgctcctgtaccaggggtctaat

SEQ ID NO: 2052 - DNA, 65 bp, Rattus norvegicus
aaggaagcaccaggtgtggcaccgttcatcatccgtcagatggacagacacccagacactcccgt

SEQ ID NO: 2053 - DNA, 65 bp, Rattus norvegicus
cggatgcaaagctgaaggaaatcgtaacaaacttcttggctgggtttgaaccttaaagccctgcc

SEQ ID NO: 2054 - DNA, 65 bp, Rattus norvegicus
ggtccatttagtggcttaaccctatttctgatccttgctctgtattcggagttgtctgatcacat

SEQ ID NO: 2055 - DNA, 65 bp, Rattus norvegicus
ccccaaagaaatgctgaagaggatccctcagagtaccctgagcgaattttaccctcgagactctg

SEQ ID NO: 2056 - DNA, 65 bp, Rattus norvegicus
tttactttggatgaggcgagttctggggctggagcaagagcatctggtaggagatggagtggaga

SEQ ID NO: 2057 - DNA, 65 bp, Rattus norvegicus
cagcgtttccagacactgcatcagtttgcccttccccacattccatcatcaaagccacaaagaca

SEQ ID NO: 2058 - DNA, 65 bp, Rattus norvegicus
atacaatctggccaacatcatctactactccctgaaggagtccaccaccagtgagcagagtgcca

SEQ ID NO: 2059 - DNA, 65 bp, Rattus norvegicus
acaaatgtatggtaaaggagagatggataagtttcctaccttcaattttgaggatcccaaatttg

SEQ ID NO: 2060 - DNA, 65 bp, Rattus norvegicus
acagatgtccttcaccttcgcctccccgacgcaggtgttctttgatggtgccaatgtccggcaag

SEQ ID NO: 2061 - DNA, 65 bp, Rattus norvegicus
ccacggtgaattgttcagagcccctctgtccttttgtgcccagtttacatgatgatctctgctgt

SEQ ID NO: 2062 - DNA, 65 bp, Rattus norvegicus
tattggcaaacagtgttgttgcttggctgacctgtggcttcacgatatcagttctatatggcagg

SEQ ID NO: 2063 - DNA, 65 bp, Rattus norvegicus
ggaacacctacaagatccttactggtgaccttctgtgagacactagtttgaggcactacatgtgt

SEQ ID NO: 2064 - DNA, 65 bp, Rattus norvegicus
tggcccagtctcctctcccacacctcggttacctctcactttccctcatttctccctctggctgg

SEQ ID NO: 2065 - DNA, 65 bp, Rattus norvegicus
cctctgacctcgcttatccctagccgcagcttccaaaccagcgccatttcaagggacattgacac

SEQ ID NO: 2066 - DNA, 65 bp, Rattus norvegicus
aagaacctgctggagctggtggagtatacccacatgctgagggtcaccaagaccttccttaaacg

SEQ ID NO: 2067 - DNA, 65 bp, Rattus norvegicus
tgccgagcctttgcagaactctgggcatttgatgcagcgcaagggaagtgcatccaattcatcta

SEQ ID NO: 2068 - DNA, 65 bp, Rattus norvegicus
gcatatcagtccagaggttggtgcaagcttgaggagagggctcagagagggggaccctacaaaga

SEQ ID NO: 2069 - DNA, 65 bp, Rattus norvegicus
cacaggaacgtgggttccaaacaacgctcgtatggactgaaaagatacgcaggcgtcaaatatgc

SEQ ID NO: 2070 - DNA, 65 bp, Rattus norvegicus
atctgtcacagcgtgggacccagagagaaggtgactgagaagacccagctcaactctgaactgtt

SEQ ID NO: 2071 - DNA, 65 bp, Rattus norvegicus
tgaaagttcacccatgctcctgctgtatcccaaagcaaggccatgagcagccaaacacactagtg

SEQ ID NO: 2072 - DNA, 65 bp, Rattus norvegicus
tcgagtatggcagtcctgaagaactgctgtccaacagaggttccttctatctgatggccaaggaa

SEQ ID NO: 2073 - DNA, 65 bp, Rattus norvegicus
gaaggtcagaacgaacttccacgagcatcggattttctactgcttctcaacgactcgggagaatg

SEQ ID NO: 2074 - DNA, 65 bp, Rattus norvegicus
tacagctacaaggaagtggggttgctcttgctctacctctcggtggggatttccatcttctctgt

SEQ ID NO: 2075 - DNA, 65 bp, Rattus norvegicus
gcccatcagggttgaggatctctatgatcgtgggtagctttctgtggttctgtaatgccaaaagg

SEQ ID NO: 2076 - DNA, 65 bp, Rattus norvegicus
aaagggtcctgtgagtgccatacaagatctacttcaggcaaaactctgctcttggctccccatgg

SEQ ID NO: 2077 - DNA, 65 bp, Rattus norvegicus
ccggccctgggccttaggcacctcaaggacttttctgctatttactgctcttattgttaaggata

SEQ ID NO: 2078 - DNA, 65 bp, Rattus norvegicus
agcagtgagcaggtgggcgaggcatccagccccagcaaggtgcagaaaagctggagcttcaatga

SEQ ID NO: 2079 - DNA, 65 bp, Rattus norvegicus
atcgtggtcagcgatcctgactccacagatgcctcaagtgtcgaagacaacgaggatgcttacaa

SEQ ID NO: 2080 - DNA, 65 bp, Rattus norvegicus
cggaaagtgtcatgaactggcaacagtattggaaagatgagatcggttcccagccattcacttgc

SEQ ID NO: 2081 - DNA, 65 bp, Rattus norvegicus
gctccctcgctgtagcccactacgccatcctgtgcaaaagtgactttcgtttcctcgaaactttt

SEQ ID NO: 2082 - DNA, 65 bp, Rattus norvegicus
ggggcccacttggatcctcactatgactgtgtaagctcatatcgtgttgatggaaacaaagtcat

SEQ ID NO: 2083 - DNA, 65 bp, Rattus norvegicus
cactgtcaccagttgagtggtcagcgttgcatgtcgtgaccaattagacattctatcgccttagc

SEQ ID NO: 2084 - DNA, 65 bp, Rattus norvegicus
gagacccagaaaagctcaagttggaggagtcattaagagagcaagctgaaaaggaaggcagtgcc

SEQ ID NO: 2085 - DNA, 65 bp, Rattus norvegicus
tgtttaacagctctctccggttgacttcgaagggcaaaggaactgccagtcacagctctcgatcc

SEQ ID NO: 2086 - DNA, 65 bp, Rattus norvegicus
ttgcagtgccaaacaactggactggaaggaccaacagctcaacaacttggagaaaacgtcccctg

SEQ ID NO: 2087 - DNA, 65 bp, Rattus norvegicus
aggtagcttacaggatgccagtggagaatacagatgcttcagatctctgggagggtcttgcttgg

SEQ ID NO: 2088 - DNA, 65 bp, Rattus norvegicus
aaagaggacatccagctgctgagctgcagaatgactgccctggaaaagcaggtggcagagatttt

SEQ ID NO: 2089 - DNA, 65 bp, Rattus norvegicus
aacggagttccagagagcacaagtacggactcacctcctggcatagatctccacaaccaggcgag

SEQ ID NO: 2090 - DNA, 65 bp, Rattus norvegicus
ctgtctctcttggctgtctactggacttggtctctttggcagcctgactctggatatgaactgag

SEQ ID NO: 2091 - DNA, 65 bp, Rattus norvegicus
ccccgggaaatctgagaggtctatcccagtctggcaaattcatcagaggactcttcattgaagtg

SEQ ID NO: 2092 - DNA, 65 bp, Rattus norvegicus
ctaagcactgtagggatcttgggtctccataggcatgtttctgatcctggtcttccgggaaagta

SEQ ID NO: 2093 - DNA, 65 bp, Rattus norvegicus
aggaagatcggaagttcggtgagcacccaacatagtcacagacgctctgtcggaagtaaggtctt

SEQ ID NO: 2094 - DNA, 65 bp, Rattus norvegicus
ataccgatgggtcagaaaggtgccaatggccttaatcctcaggttacaggcaaacaagcggtgga

SEQ ID NO: 2095 - DNA, 65 bp, Rattus norvegicus
tatcaccgacttacaggtttccaaagatgagagtcacccatggagccagcatctcagaaaggcac

SEQ ID NO: 2096 - DNA, 65 bp, Rattus norvegicus
ccatcctgtgagtgggcatcttgggccatcagcagctgactttagagggaaacatggtagatata

SEQ ID NO: 2097 - DNA, 65 bp, Rattus norvegicus
cctcctagagttggtaggttacatttggatgcattgcttcaagagttcaaatgggaatcttggcc

SEQ ID NO: 2098 - DNA, 65 bp, Rattus norvegicus
acatgggcaagaccacgtcactcatcgagagccagcaccaccacctgctacactgcttagaaaag

SEQ ID NO: 2099 - DNA, 65 bp, Rattus norvegicus
ccactgtattcctgtgacccagtgcattatctgtccctggatctctctagtgtctttctactggg

SEQ ID NO: 2100 - DNA, 65 bp, Rattus norvegicus
gctgtatttcggcatcagttggagactgtccacattcaagttgcaaggacattcatactcatgag

SEQ ID NO: 2101 - DNA, 65 bp, Rattus norvegicus
tgcgaagcaatcagttgtatggagacccctgaaggttctcagaggtcgggtttctccctcacgtg

SEQ ID NO: 2102 - DNA, 65 bp, Rattus norvegicus
aggaagtgagccgccattatcacctccggaaaggctccccatcagacgctctagtaccagagaca

SEQ ID NO: 2103 - DNA, 65 bp, Rattus norvegicus
cgctcggaaaaccaagaactatgctccgaataggattgtggaaattcacactgccaccctcttcc

SEQ ID NO: 2104 - DNA, 65 bp, Rattus norvegicus
gctgaagcccgagagagacttcatactgtgaatgtttactaacgcaccaatcagttcaatgacaa

SEQ ID NO: 2105 - DNA, 65 bp, Rattus norvegicus
gccaaattttgtggttacagttttgctatagtggagtttgaatgcaatttctgtggtaagtctac

SEQ ID NO: 2106 - DNA, 65 bp, Rattus norvegicus
ggacaaatgaccagccagcgccaaagtgccaccccacacctcacctgcttgccatggatttctta

SEQ ID NO: 2107 - DNA, 65 bp, Rattus norvegicus
gtctgtacataagcaagtgagagtcagtgtacccgaagtcttacacgataccttcagatttcctc

SEQ ID NO: 2108 - DNA, 65 bp, Rattus norvegicus
gtcacaaagagcgaggtctgtttaccatggccacaggtcagtcttacagagccctgtccatctca

SEQ ID NO: 2109 - DNA, 65 bp, Rattus norvegicus
acccggaacatgagagtgagttttccgtccctcatggaaataaccgcatgctcgctaaacatgag

SEQ ID NO: 2110 - DNA, 65 bp, Rattus norvegicus
gacaagactgttcctgaacatccaactcctgtggtctctaagagtccacataggactgacctaga

SEQ ID NO: 2111 - DNA, 65 bp, Rattus norvegicus
ggaagcgcaactctatgagaagaaacaactccatgaggaggagcaactccatccggaggaataac

SEQ ID NO: 2112 - DNA, 65 bp, Rattus norvegicus
gctgatgtttcagcacactgtcagggaccatccaaaggtctatccccacgagttcccaagcaaaa

SEQ ID NO: 2113 - DNA, 65 bp, Rattus norvegicus; identical to SEQ ID NO: 1

SEQ ID NO: 2114 - DNA, 65 bp, Rattus norvegicus
tggaagatttcagcttgccgttttggtgctctctccagcttctggctggtagagctattagctgc

SEQ ID NO: 2115 - DNA, 65 bp, Rattus norvegicus
tctctaggctggtgagaaggtgtcctaggatggctagctacattgtggaccagacacagatagaa

SEQ ID NO: 2116 - DNA, 65 bp, Rattus norvegicus
aggacgaggaggggttctgccattccttgcatgtgcccatctccactgtcctctgtcctcatgtt

SEQ ID NO: 2117 - DNA, 65 bp, Rattus norvegicus
ctactcttgtgggaggggagtcacctgaagccgtggaatccagcaggcatgaaatggaccatggt

SEQ ID NO: 2118 - DNA, 65 bp, Rattus norvegicus
ggtaacaatcctatgacccagagggtctgagcagatagaaaccccagacaaagagtttggggatt

SEQ ID NO: 2119 - DNA, 65 bp, Rattus norvegicus
tgagcagtgatatgttgggttcaggagaggattcctgcttgcttcttggacagggcttgctcttc

SEQ ID NO: 2120 - DNA, 65 bp, Rattus norvegicus
tcacagccagttcacagccaagttcagaccagtccctgggtctcctagacctagtctaccattat

SEQ ID NO: 2121 - DNA, 65 bp, Rattus norvegicus
actgcatggaggtgctatgctgcggagaatcctgactcatccacttggaagatctatgtccggaa

SEQ ID NO: 2122 - DNA, 65 bp, Rattus norvegicus
cgattaaagggcagggagagagcgagtactagaagcagtggtggagatgatttctggttttaagt

SEQ ID NO: 2123 - DNA, 65 bp, Rattus norvegicus
cctttgaagccagctgtgtatggtgttggattgggtagagaggggactcagacgtgggatgagta

SEQ ID NO: 2124 - DNA, 65 bp, Rattus norvegicus
ctggtcatctacacagccgtcttcacaccgtactcggctgccttcctgctgaaggagactgaaga

SEQ ID NO: 2125 - DNA, 65 bp, Rattus norvegicus
agtgtgcccgagttacttgcagatgttggaggtcagctgggactattttgcggagctagtttgat

SEQ ID NO: 2126 - DNA, 65 bp, Rattus norvegicus
acacatccctttgagaagcacaaggagatgacacgcgcattgtaaccttcacactgtctcggtgg

SEQ ID NO: 2127 - DNA, 65 bp, Rattus norvegicus
ttgatgctaggcttcctttacctctttgtctgctccctggacgtgctcagctctgccttccaact

SEQ ID NO: 2128 - DNA, 65 bp, Rattus norvegicus
atccttccggtctagcccagtctcccacttgggacgggtaggcaggtactcaataaaggcttgtt

SEQ ID NO: 2129 - DNA, 65 bp, Rattus norvegicus
tagctattcagctcataggaggtgccataccagccaccacgagcaggaagatgtcagaagttaca

SEQ ID NO: 2130 - DNA, 65 bp, Rattus norvegicus
acaggtaacccatgctgttggctgctgcatttcctcctgtgcagggccatggtggagaagatttg

SEQ ID NO: 2131 - DNA, 65 bp, Rattus norvegicus
agccccaccacaagttcccttcgtggggagtgggtggaaagacctttcagaccttggctaagctt

SEQ ID NO: 2132 - DNA, 65 bp, Rattus norvegicus
ggagcctcatgtccatagggcaagaggaagatgctgagtgtttaaggttggtttgagcgaagaac

SEQ ID NO: 2133 - DNA, 65 bp, Rattus norvegicus
aaagcttccactgacatctctgaagaatgagaaaacactacatggcactagctgggtgattttga

SEQ ID NO: 2134 - DNA, 65 bp, Rattus norvegicus
caccagaggtggaaccatcacttcctccagagggtggacatccgaaggatggacactttctgtta

SEQ ID NO: 2135 - DNA, 65 bp, Rattus norvegicus
gcttccaattgcagggtgctgtaaacaagagaggtgtatttccttactcaaacctcaccatacac

SEQ ID NO: 2136 - DNA, 65 bp, Rattus norvegicus
ctagcacttcgggcaaaccatcagaaccatggagccatgaactgagacagaagggcatctatcta

SEQ ID NO: 2137 - DNA, 65 bp, Rattus norvegicus
gtgtgtttacctgtctgttttgggtatttggtctgtttggtgtcctgtgctcttgactggaggcc

SEQ ID NO: 2138 - DNA, 65 bp, Rattus norvegicus
atgagatccatacaccaaggacactactaatctagtcccttgcagtggtcagcctttggacagga

SEQ ID NO: 2139 - DNA, 65 bp, Rattus norvegicus
cttaaaatgcccccatgtgttgggcagcatctgtacaaggagtccattagcaaagctgcagtgac

SEQ ID NO: 2140 - DNA, 65 bp, Rattus norvegicus
agagacccatagagtccctctcctggtgataggccacttctctgtcttgttacaacctcagtctc

SEQ ID NO: 2141 - DNA, 65 bp, Rattus norvegicus
ccagttaaagggcatagctggacactcctgccaaatggtattcccacaatctcagctcaagtggt

SEQ ID NO: 2142 - DNA, 65 bp, Rattus norvegicus
gtgaccccagtatttgtccatggagccacattgttctctccctgtgacacagctgtagagtctga

SEQ ID NO: 2143 - DNA, 65 bp, Rattus norvegicus
aagtgctgttttaggcaggagttgccatgcaaggtgacatcgacaaccatgtacaaagccaccgc

SEQ ID NO: 2144 - DNA, 65 bp, Rattus norvegicus
gaatgactgtacggtacagccggattggactggcacacgcgaatcttcgatgcagctattccaat

SEQ ID NO: 2145 - DNA, 65 bp, Rattus norvegicus
tagacactgtgtttgggaagggagccacacatagcacagggacactaactgcccatcatagcagt

SEQ ID NO: 2146 - DNA, 65 bp, Rattus norvegicus
cctgaagaccggtagcctgaagcttttaagggagtcattgcctcccactttagtctgagtgattc

SEQ ID NO: 2147 - DNA, 65 bp, Rattus norvegicus
taccactccctgtgctgtcaccaagacactctctgcctcccaccgtacctgttacctcgtcacaa

SEQ ID NO: 2148 - DNA, 65 bp, Rattus norvegicus
gggtctttgggtttgacttcgaatgaggaagcactttggagaaaccacccactttttgcactagt

SEQ ID NO: 2149 - DNA, 65 bp, Rattus norvegicus
tggagtgcgtggacgcttgtgtgtggtatggcatgaggacttctcagtagttgtatgcatggtaa

SEQ ID NO: 2150 - DNA, 65 bp, Rattus norvegicus
taaacggcagtgtcgaggaaccccactcctctcctgcctcaggcttaagatgcaagtcttccctt

SEQ ID NO: 2151 - DNA, 65 bp, Rattus norvegicus
gactagtaggtggttttcctgaggttagcccctgccttgtgctttgtaccttaaacccaggatac

SEQ ID NO: 2152 - DNA, 65 bp, Rattus norvegicus
cccttcaactacgagcacatcacagccaacttcacccaatactgagaaggagtatcttctgttgt

SEQ ID NO: 2153 - DNA, 65 bp, Rattus norvegicus
gatggtggtcccaaagctggtcgtgaagcagcctttggccctcaacagggtcttccaacacaatt

SEQ ID NO: 2154 - DNA, 65 bp, Rattus norvegicus
ctggagaaggcaatggcattttggaacttgttgtgagaggaatgacgtgtgcctcctgtgtccat

SEQ ID NO: 2155 - DNA, 65 bp, Rattus norvegicus
ggttctgggtcagtgatggaacaggattgatggcaattagggacatctcatccagtcgggactta

SEQ ID NO: 2156 - DNA, 65 bp, Rattus norvegicus
atgtcaggtctcagcctgtgactcagggtgaggtccattcggagtgggacttttgttctgatctt

SEQ ID NO: 2157 - DNA, 65 bp, Rattus norvegicus
cttaactgagcggctgagccacccggaacagacggacagaaatggattactctcatttgtgacat

SEQ ID NO: 2158 - DNA, 65 bp, Rattus norvegicus
gggacccataagcttcatctggttttctggtttcgctggtctgagtgatttggttgccctcacaa

SEQ ID NO: 2159 - DNA, 65 bp, Rattus norvegicus
aaagccacttcctggataaggaggtgaagctcatcaagaagatgggcaaccacctgaccaacctc

SEQ ID NO: 2160 - DNA, 65 bp, Rattus norvegicus
caacagcatgtctgtccttctgccagctacacaagcaacgaatcctgctgagcagctacattaac

SEQ ID NO: 2161 - DNA, 65 bp, Rattus norvegicus
tgctatgtcactgtgtctcctaacatctttgctctctctgttctattgccgctggttcactcccc

SEQ ID NO: 2162 - DNA, 65 bp, Rattus norvegicus
gatgagagctaagctgacgtccccaaggccatgtgactttactggtcactgaggcagtgcatgca

SEQ ID NO: 2163 - DNA, 65 bp, Rattus norvegicus
gctcgtagctgccacttgttaagttagggttagatgagaggaacagacacaatgaacagccccag

SEQ ID NO: 2164 - DNA, 65 bp, Rattus norvegicus
gttcactcccaaccagcagacaccagctgcatcctacagcttcccaaagatgtgcactatctgct

SEQ ID NO: 2165 - DNA, 65 bp, Rattus norvegicus
gggtgcaggaaccacagaccctatgcacagcttccccacaatggggaaataaagccatttgatga

SEQ ID NO: 2166 - DNA, 65 bp, Rattus norvegicus
tgctgctgcttctctgtatttgcctcttgtgatcctgtcctttcccgtgtccactttccccaaga

SEQ ID NO: 2167 - DNA, 65 bp, Rattus norvegicus
aaaggcctgatcggtgccagggtctgtctgtcataaagtcactccatccaaccagcttgacatta

SEQ ID NO: 2168 - DNA, 65 bp, Rattus norvegicus
aattaccttcggaactgaacgtcagctggcattgaggccacagagtgcagacagccctggtctgt

SEQ ID NO: 2169 - DNA, 65 bp, Rattus norvegicus
ctctggggaggactgtcgaagacatattccagttcatggttctcttcatcatggtgttcctggct

SEQ ID NO: 2170 - DNA, 65 bp, Rattus norvegicus
tagtgctactgaacatgctcattgccatgatgaacaactcctaccagctcattgccgaccatgct

SEQ ID NO: 2171 - DNA, 65 bp, Rattus norvegicus
ctttctgaagtgaagtcggtggtcatcaactacaatcacaagttcattgagaacataggctatgt

SEQ ID NO: 2172 - DNA, 65 bp, Rattus norvegicus
aagagactcggtttaccttagtgccttaggggatgccaagtcctccagactgctgtccttcgaag

SEQ ID NO: 2173 - DNA, 65 bp, Rattus norvegicus
actctgtgtgtgcaatggtgtagctgtgcgctccaaccaggatctcattactgagaacttgctcc

SEQ ID NO: 2174 - DNA, 65 bp, Rattus norvegicus
ataaggatgagacagagcacaccggtcaggagtcatatgtctggaagatgtaccaggagaggtgc

SEQ ID NO: 2175 - DNA, 65 bp, Rattus norvegicus
cagttccttgtctgctgtattgaactctattgacgtgaagtaccagatgtggaaacttggagtcg

SEQ ID NO: 2176 - DNA, 65 bp, Rattus norvegicus
ggacaagttcgtgaagagaaaggtgatcaacaagtatggagatctctatggagcagagcgcatcg

SEQ ID NO: 2177 - DNA, 65 bp, Rattus norvegicus
gcggcagtggaatcgcgtcttccgctggaagtgccatgacctagtgaaatccaaggtcttctact

SEQ ID NO: 2178 - DNA, 65 bp, Rattus norvegicus
caacggggaacagttcaaagtgtcccctggcacgctagctttctctgtcactctcttcaccattt

SEQ ID NO: 2179 - DNA, 65 bp, Rattus norvegicus
gttctaggctaaaacactgcaccactgaccctcgactcttgtaagagacctgtcttcagttaccc

SEQ ID NO: 2180 - DNA, 65 bp, Rattus norvegicus
tccctacccagactcaacctgggtacttcctaggctcctcctcatcagccttcttcctgggatca

SEQ ID NO: 2181 - DNA, 65 bp, Rattus norvegicus
tgtcaactgcaccctcttgcgccaggctactgtgagtgacacgtccttggatgccagtcctagca

SEQ ID NO: 2182 - DNA, 65 bp, Rattus norvegicus
atggctcgcttcggggaggcggtggtcgttggcagaccaggctcaggcgatggagactcggacca

SEQ ID NO: 2183 - DNA, 65 bp, Rattus norvegicus
atacggacactttgggtttacaggtaggcaagagagtgtgctcctccttcaagtcggagaaggtg

SEQ ID NO: 2184 - DNA, 65 bp, Rattus norvegicus
gtctctgttgtgtgtcagcacctgtgtgtgcaccctccacagaaagacttcagagcagaaataac

SEQ ID NO: 2185 - DNA, 65 bp, Rattus norvegicus
catccccttagatggtctagaactttgcagtgaccctgggaagtactgacccatgcaataagaca

SEQ ID NO: 2186 - DNA, 65 bp, Rattus norvegicus
attgtatctgaccagatccggcccgaggacagggctagcgttctgagaactctgctcctgaaaca

SEQ ID NO: 2187 - DNA, 65 bp, Rattus norvegicus
gctaatgaggcagagccagtgtttgatgagtgtgaaggtgtggacgagtacaacgagatgcccat

SEQ ID NO: 2188 - DNA, 65 bp, Rattus norvegicus
agaccaccaaagtgaacggcagtctggaaaccaagtacagatggaccgagtatgggctgacgttt

SEQ ID NO: 2189 - DNA, 65 bp, Rattus norvegicus
caggaggccacaaggttggcttgggatttgaactggaagcttaatggggttttgagtagagtatc

SEQ ID NO: 2190 - DNA, 65 bp, Rattus norvegicus
acccatgcctgtactctatggtgtgttcctgtataggggagtagcatcccttaatggtgtgcagt

SEQ ID NO: 2191 - DNA, 65 bp, Rattus norvegicus
gcaggaccacgagaaagtgctggagatcccagaccgtgacagtgaagaggaactggaacatgtaa

SEQ ID NO: 2192 - DNA, 65 bp, Rattus norvegicus
aaagtagagtctgaatgttctgctccaggggaacagcccaagttcctcggaattcgtgaacagcg

SEQ ID NO: 2193 - DNA, 65 bp, Rattus norvegicus
ggaggaacaagggaacagaaaccacgttgtaacctgttagtcattctcaaaactgacagttctat

SEQ ID NO: 2194 - DNA, 65 bp, Rattus norvegicus
agactctgaggcctggtgtgaagcttacactgtctgctctggtagacgggaagagctttaatgct

SEQ ID NO: 2195 - DNA, 65 bp, Rattus norvegicus
aaagggcatgaccatccgttggtggatacatggacctaatgaccacacttcctacaccaggccaa

SEQ ID NO: 2196 - DNA, 65 bp, Rattus norvegicus
ccgcaactttgacattcccaaaggcatgacgggcatctggagatacctgacaaacgcctacagta

SEQ ID NO: 2197 - DNA, 65 bp, Rattus norvegicus
taatcagtgagaccacgtacagcggctttccggtggtggtgtcccgagagtcacaaagacttgta

SEQ ID NO: 2198 - DNA, 65 bp, Rattus norvegicus
ggaaactggggctccgacaatgcctggtgacacggagtgggaggcttcttgggatcatcacaaaa

SEQ ID NO: 2199 - DNA, 65 bp, Rattus norvegicus
cgggcataaaggaagaactgaagaaagagttcagcaagctagaagaggctatggctaataagagg

SEQ ID NO: 2200 - DNA, 65 bp, Rattus norvegicus
cagaccctttgtcctgggcagttggtttacatcatcagcatttccctattccctgaacctgcagt

SEQ ID NO: 2201 - DNA, 65 bp, Rattus norvegicus
gtccactgatgaggaagatgaggacgagctgatcctgtgaacaacaccctccaagctttcttcat

SEQ ID NO: 2202 - DNA, 65 bp, Rattus norvegicus
cagaagaggaagttcgtttgttgaatagcacaattctttaatctgcgggactcgtccactttttt

SEQ ID NO: 2203 - DNA, 65 bp, Rattus norvegicus
aatgcgttctgtcacatcggacccttggtccttctagggttgtctgctgctaaccaagacttctg

SEQ ID NO: 2204 - DNA, 65 bp, Rattus norvegicus
tacctcaattttgctctaccagcctgcacttcctgtagatggagcaggatgggctttgcacagag

SEQ ID NO: 2205 - DNA, 65 bp, Rattus norvegicus
acggcctgtcttccttctgcaagccagcagtgaccagaagctggaacctgaggccatcctcactg

SEQ ID NO: 2206 - DNA, 65 bp, Rattus norvegicus
attcatcatggcctacaccgagagcacaacatctctctggtctggaagggacaaatctcaccctg

SEQ ID NO: 2207 - DNA, 65 bp, Rattus norvegicus
cttccctagtcttagtattggacgctatttactcagctatccagtagagatcctcaagacggcct

SEQ ID NO: 2208 - DNA, 65 bp, Rattus norvegicus
aaagctggagagagtggatggaccaaaacagtgtcttctcatgcgctaaacattgccgaatattg

SEQ ID NO: 2209 - DNA, 65 bp, Rattus norvegicus; identical to SEQ ID NO: 1

SEQ ID NO: 2210 - DNA, 65 bp, Rattus norvegicus
gtgtgggatgggtgaatgaagtggaatgggaactttgggcaaattcaatgggacagccttccatg

SEQ ID NO: 2211 - DNA, 65 bp, Rattus norvegicus
tgtttcttccagtcggtaaatggccacagggatgctctgacacggatatggtcctcacctttaga

SEQ ID NO: 2212 - DNA, 65 bp, Rattus norvegicus
ggacacagttatctggtttgtgacgatgctgtcctctgctctgttaagcactgaaataggcctgc

SEQ ID NO: 2213 - DNA, 65 bp, Rattus norvegicus
ggcttacgctattgcagtgtctgtagggaaagtctacgccaccaagcatgactacatcatcgatg

SEQ ID NO: 2214 - DNA, 65 bp, Rattus norvegicus
ctgttgtcaaagtggatgcagaagtagatggagaaaatgctacgaagcctgaagaagaggacggc

SEQ ID NO: 2215 - DNA, 65 bp, Rattus norvegicus
gggcctgcatcataccagactttacacatgttatcacctgactacctagacccttgaggatgaac

SEQ ID NO: 2216 - DNA, 65 bp, Rattus norvegicus
agaagcatcactactcactgaaaggtcctaaaaagctgagctggcaggaaagccctaccacttgg

SEQ ID NO: 2217 - DNA, 65 bp, Rattus norvegicus
gagagctgaaccttggccttcttctgctggcctaaacgctttgtcttctgttcctaatcaatccc

SEQ ID NO: 2218 - DNA, 65 bp, Rattus norvegicus
gacacgaagaaccacagggaaagcaactctaatcagtgtgtctatgccgcacacaactctgtcgt

SEQ ID NO: 2219 - DNA, 65 bp, Rattus norvegicus
tgaccaatgtacttggggactcaattggagcagctgtcattgagcatttgtcccaacgggagctg

SEQ ID NO: 2220 - DNA, 65 bp, Rattus norvegicus
gtgaatcccacagtgtcgctctgtatgtcttggctacaggaccgagctgcatagattccacaata

SEQ ID NO: 2221 - DNA, 65 bp, Rattus norvegicus
ggggtcatccttgtaaccagctgcttaacacactgtgctgttatctcaagaggacgcgttccatt

SEQ ID NO: 2222 - DNA, 65 bp, Rattus norvegicus
gctataaccttccctgtagctcctccatgacaacaaacattcccatgagtcctgagagaaagcca

SEQ ID NO: 2223 - DNA, 65 bp, Rattus norvegicus
cagagtatcctgcccttgggagtcaaagaccctaggagccaggctggcacagggatggggaggct

SEQ ID NO: 2224 - DNA, 65 bp, Rattus norvegicus
ttggtccacgttcatggtgctgacccaggccctctgagaaggccctgtcattcctattctgatgt

SEQ ID NO: 2225 - DNA, 65 bp, Rattus norvegicus
gccagaggtacactaggtaggtgagcaaagacacatgttccacttagacgaaatagagtcccaac

SEQ ID NO: 2226 - DNA, 65 bp, Rattus norvegicus
ttccaggcacattcacataggcatgtttcacgaggtgatagggaccacacctacggttgatgggt

SEQ ID NO: 2227 - DNA, 65 bp, Rattus norvegicus
gattgtctcccttaacgcctccttggggcacccatctgtcaaccccactgctccattccaggagg

SEQ ID NO: 2228 - DNA, 65 bp, Rattus norvegicus
tgtcccaccagagaaggacccagagtaaaaggcccatcactcgtagcccaaagctgtgatcaatt

SEQ ID NO: 2229 - DNA, 65 bp, Rattus norvegicus
gtagcaacagaagaaaagtccgtcatgcaagcaaatgaccatcaccaaagaaacctcagcttacc

SEQ ID NO: 2230 - DNA, 65 bp, Rattus norvegicus
ttataagtggataatgcagactgtggcggaagcaggccatttctgaggcttggttctggcagcac

SEQ ID NO: 2231 - DNA, 65 bp, Rattus norvegicus
gcaaccaggatcctcctcacagccgatcagtgtggagagagcacaactgaaggttcacaatgaat

SEQ ID NO: 2232 - DNA, 65 bp, Rattus norvegicus
ctcttgaccccacgaagagctgggcctctcatgtgatgttagtgatggatatgaagtagagctct

SEQ ID NO: 2233 - DNA, 65 bp, Rattus norvegicus
ctcatcttgtgcaatgtatccggttgtggaactgtatactgtgcgtgtggtgtgctcgtggtgaa

SEQ ID NO: 2234 - DNA, 65 bp, Rattus norvegicus
gatcaacagtcgtcttcacctgttagatacccagctcctgaagtcgttttcctactgacgctccg

SEQ ID NO: 2235 - DNA, 65 bp, Rattus norvegicus
ctcccgtccctgtgtgtcagagctattttgtggtacattgtgtcatgcttctgcagatgctaata

SEQ ID NO: 2236 - DNA, 65 bp, Rattus norvegicus
cgaggcaatgcccagggtctggctttgtcctggtttaagattttgggagaactgggtcaataaag

SEQ ID NO: 2237 - DNA, 65 bp, Rattus norvegicus
cctcagatgacttaatgagaacctgtccagactcctttagaaggtgttcactttccagaagcttt

SEQ ID NO: 2238 - DNA, 65 bp, Rattus norvegicus
tcagaaagcaagtggagaacataccaagtccagcattcaccatgacctctgcccaagggacagga

SEQ ID NO: 2239 - DNA, 65 bp, Rattus norvegicus
acttgactttgtgtagcagtaagattggaggcaggtggtgagtggggaaaacacgggagctgttg

SEQ ID NO: 2240 - DNA, 65 bp, Rattus norvegicus
tactcacatcttcatcagctggatgattgcacagtctgtcactgctgttgctggcctaacttctt

SEQ ID NO: 2241 - DNA, 65 bp, Rattus norvegicus
tgagaagtgccttaccatgagggagaccatgaagtatgtctatggacaccatgggattcggagag

SEQ ID NO: 2242 - DNA, 65 bp, Rattus norvegicus
taggcaagagcaaaagagcggctccttgcagactgtgcgcgcccggctttcagcatgggggatca

SEQ ID NO: 2243 - DNA, 65 bp, Rattus norvegicus
tccattctctttgccgtgctcatggaggccattggagtttcctggttttatggcgtggacaggtt

SEQ ID NO: 2244 - DNA, 65 bp, Rattus norvegicus
cctacctgtctatgaagccctttaggatgaaggcaggaggtttccttcttgctgctcgatgttct

SEQ ID NO: 2245 - DNA, 65 bp, Rattus norvegicus
agaagtgggagctttagggctgagaggtgtgaaagattgcagaagaggctagagggaaggtttgc

SEQ ID NO: 2246 - DNA, 65 bp, Rattus norvegicus
tcgggctttgctttggcaggaggtatatgggatctcctcaattctgtcctatgagaaaggcagag

SEQ ID NO: 2247 - DNA, 65 bp, Rattus norvegicus
ttaattttggcagatgacatcataacccggaaaacaaatcaccccaaagcaacacaaatggaagc

SEQ ID NO: 2248 - DNA, 65 bp, Rattus norvegicus
gcctgtcacctaccagtcctttccagatgtgctccaggaatctgtttgccaagacttttgaactc

SEQ ID NO: 2249 - DNA, 65 bp, Rattus norvegicus
aaggctccggtttaccatctctcagaggagtggctccatgtagacatccaggtgttgtaagcatc

SEQ ID NO: 2250 - DNA, 65 bp, Rattus norvegicus
gcactgatggtggatgagaggttaagtccagatgtgatcgagggtttcctggagtggccatatat

SEQ ID NO: 2251 - DNA, 65 bp, Rattus norvegicus
tctgcattcctgcctggagcatctacaagctcaggactctcaagggcccactcagagagagactt

SEQ ID NO: 2252 - DNA, 65 bp, Rattus norvegicus
atgaccagtgttcctgaccccagaacagaccctagcctcttgcccaggcaaatctgtatcttcct

SEQ ID NO: 2253 - DNA, 65 bp, Rattus norvegicus
ccgtgtagcagcttaaacccacatctgtgtcccatcaagcctgaaacagccaagtagccattaga

SEQ ID NO: 2254 - DNA, 65 bp, Rattus norvegicus
gtgagctattgtgtctgtccattatcgtctgtgagccctcgatcccaatactccaggtccatttc

SEQ ID NO: 2255 - DNA, 65 bp, Rattus norvegicus
aaccctcatgaacggtgcactcatgaaacccagtcacgtcattgtggagaccatgatgtgaggtc

SEQ ID NO: 2256 - DNA, 65 bp, Rattus norvegicus
caaggattaccctccacatgcactagctgtcatcggtttgctggtggcttcatctactatgtgca

SEQ ID NO: 2257 - DNA, 65 bp, Rattus norvegicus
atggtgaccgttaatgactgtgaggccaaggtcaaaggcgacggtaccatctctgccatcacaga

SEQ ID NO: 2258 - DNA, 65 bp, Rattus norvegicus
agaacaataccctagagcaaagtcatccacacccagtacacactccgctgctaacctgaaatgca

SEQ ID NO: 2259 - DNA, 65 bp, Rattus norvegicus
gacacacgagcagctgacaccccttgtcaggtcagcaggaactagtctggtgaacttcttcagca

SEQ ID NO: 2260 - DNA, 65 bp, Rattus norvegicus
tggacttcaaagcctttttagtgactcccaggaatcaagaggcctgcccactgtccagcaagtga

SEQ ID NO: 2261 - DNA, 65 bp, Rattus norvegicus
ttccaacaaggtatgcctgttcaagaccttctgcagtacctagatcttctgcttaaccccaccct

SEQ ID NO: 2262 - DNA, 65 bp, Rattus norvegicus
agtgggcaaacctaatggagaagatacaggcctctgtggctaccaactccattgcctccaccaca

SEQ ID NO: 2263 - DNA, 65 bp, Rattus norvegicus
tctaacactgtactgagccgtcttttggcgagaaccaggaaacaacgtaagcaacacgggactgc

SEQ ID NO: 2264 - DNA, 65 bp, Rattus norvegicus
ggggacgtggaaagccacttgagcttcctggagaagaacctgagggaaaaggtcagctcctttat

SEQ ID NO: 2265 - DNA, 65 bp, Rattus norvegicus
tgttggaagagagcaggagaacatgacacgtatgatggagtgtgtacatccctgccagtggtcct

SEQ ID NO: 2266 - DNA, 65 bp, Rattus norvegicus
gcccctgacttttccagcgcaatggagagcttaccggataaactaaaagagtttgggaacacttt

SEQ ID NO: 2267 - DNA, 65 bp, Rattus norvegicus
cgatttctactacgatatgaactgatttttcctgttcaatgtgatggtttcaaagtcttgcacca

SEQ ID NO: 2268 - DNA, 65 bp, Rattus norvegicus
actttccaagaggtcgttggttctcagaaattaactgactttcactgctcaatgtgaaggtttca

SEQ ID NO: 2269 - DNA, 65 bp, Rattus norvegicus
tgcacaggagagactgacaccctttgtccagagaactgggacgaatctgatggacttcttaagcc

SEQ ID NO: 2270 - DNA, 65 bp, Rattus norvegicus
tcacctgttcactgacaacttcccctgtcactttgtctctgcctttggagctggtttctgtgcca

SEQ ID NO: 2271 - DNA, 65 bp, Rattus norvegicus
tttagagagggcatcacagggctgtatcggggcatggctgcacccatcattggagtcacccctat

SEQ ID NO: 2272 - DNA, 65 bp, Rattus norvegicus
tcccagctcatctccctatacctcctcagcaaggaggccttaccctagcacatctcactatgcct

SEQ ID NO: 2273 - DNA, 65 bp, Rattus norvegicus
ttttgcggaaccctcctactcagcagccactaccatcatcaggaactggctgtgtccctcataca

SEQ ID NO: 2274 - DNA, 65 bp, Rattus norvegicus
agacagtggactgcaccacataggcgacttggagaaagggatgctaaacaccattgggctcctat

SEQ ID NO: 2275 - DNA, 65 bp, Rattus norvegicus
gagacagatgggcacttccgggagaagctgcaagctgccaacgctgaggacattaagagtggaaa

SEQ ID NO: 2276 - DNA, 65 bp, Rattus norvegicus
gactgagaatgctcatcaaagccaagctggatgcccttcaagacactggcatgaatcaccacctt

SEQ ID NO: 2277 - DNA, 65 bp, Rattus norvegicus
tccatgccctgagcggctggggctaactgtgtccgtcttcactgctgtgtgttaccacatacaca

SEQ ID NO: 2278 - DNA, 65 bp, Rattus norvegicus
agatttctctgacctcggtcagctccttcatatcagttgtctctttggtttccttgtgaaacacc

SEQ ID NO: 2279 - DNA, 65 bp, Rattus norvegicus
gtttgctggctataccgacaacttggtgcgtgtatggcaggtgactattggtacccgctaaaagt

SEQ ID NO: 2280 - DNA, 65 bp, Rattus norvegicus
gttgcaaaggcaactggtttgacaaagaaggatgctactgcagcagttgatgctgtctttacatc

SEQ ID NO: 2281 - DNA, 65 bp, Rattus norvegicus
ctggaatcagagatgcctctgaccagaactttgactacatgttcaaactgctcatcattggcaac

SEQ ID NO: 2282 - DNA, 65 bp, Rattus norvegicus
tttactgccgactgagcttcttcagtgtcccagctcactgtctaggtccctgtcctcatccgaca

SEQ ID NO: 2283 - DNA, 65 bp, Rattus norvegicus
aataggaatctacttcatccagttgattggcttgcctaacttggggaccagtggttggctcgcag

SEQ ID NO: 2284 - DNA, 65 bp, Rattus norvegicus
ctctgccaactccatcatcgtgaacatcatcaaagctcgcaacctcaaagccatggacatcgggg

SEQ ID NO: 2285 - DNA, 65 bp, Rattus norvegicus
gatgtacttctcgtgactggtggaagggactgtgtgattctagcatatacagacctgacttcact

SEQ ID NO: 2286 - DNA, 65 bp, Rattus norvegicus
acaggccacctcaaggtcagcaagcagaagatgagatggcagttgagaacagagagaatgtcacg

SEQ ID NO: 2287 - DNA, 65 bp, Rattus norvegicus
aggctgaggagcagaggcagaaggagacctacctggagtttgagaaatcccgctatggcacctac

SEQ ID NO: 2288 - DNA, 65 bp, Rattus norvegicus
ctctctgtcacatcagttcagcacatagcagcacatcctggtgttgccgaggtattggctagaat

SEQ ID NO: 2289 - DNA, 65 bp, Rattus norvegicus
acaaaggtggccaagaagacttgtgatcccttgtaccagcaagctttgctctttgatgaggggcc

SEQ ID NO: 2290 - DNA, 65 bp, Rattus norvegicus
tcacaggcaagggagttcgagagggcatcgaatggatggtgaagtgtgtcgtacggaatgttcac

SEQ ID NO: 2291 - DNA, 65 bp, Rattus norvegicus
gcctgaattgtactgtatgtagctgcactacaacagattcttaccgtttccacaaggtcagagat

SEQ ID NO: 2292 - DNA, 65 bp, Rattus norvegicus
gcacgagagcatggacttatcttcatggaaacttctgccaagactgcttctaatgtagaggaggc

SEQ ID NO: 2293 - DNA, 65 bp, Rattus norvegicus
agatcgcagaagggctaaacctacacaccattcgggaccgcgtctggcagatccagtcctgctca

SEQ ID NO: 2294 - DNA, 65 bp, Rattus norvegicus
atgtcctcatgtgccagtatcatgccaaactgtctgggcacctggtctctatcccatctcagagt

SEQ ID NO: 2295 - DNA, 65 bp, Rattus norvegicus
gggcatcaccattgtggaagacatcaacaaacggagagaacccattcccagcttggaggcaattt

SEQ ID NO: 2296 - DNA, 65 bp, Rattus norvegicus
ccaggcttccaacgcgttatacacagagtttgggtgcacactaccctccctctaagacaccagaa

SEQ ID NO: 2297 - DNA, 65 bp, Rattus norvegicus
tcacacgcttgcctctgcatggaagagcaatacgttgcccatttgatcgacaagtgacagaccta

SEQ ID NO: 2298 - DNA, 65 bp, Rattus norvegicus
ggtttgtcgttcattgagacatctgctctagattctacaaatgttgaagctgcttttcagacaat

SEQ ID NO: 2299 - DNA, 65 bp, Rattus norvegicus
gagctgtttgtcatggcccgagaacatgctccctccatcatcttcatggacgagatcgactctat

SEQ ID NO: 2300 - DNA, 65 bp, Rattus norvegicus
tatcctgtatctgctctccttggctgaagtgtgtcgctgttgaaagctgaagtacagagggcagg

SEQ ID NO: 2301 - DNA, 65 bp, Rattus norvegicus
ataaagtgggtctcaccacagtgctcaacagtggctttcttgatgagtggctgaccctggaggat

SEQ ID NO: 2302 - DNA, 65 bp, Rattus norvegicus
agataaacaccccttgtctgaaaactgccattcaaggcacctccagtcctacacctacagccagc

SEQ ID NO: 2303 - DNA, 65 bp, Rattus norvegicus
aagacctaggaagcatcaggtgaaaagcaagagaccaaagaagtggtcaggagcagagtcggcca

SEQ ID NO: 2304 - DNA, 65 bp, Rattus norvegicus
acagctacaatagcagaggtttcactatcaacggaaaccgcgtgtttggaccttgtgcgctgctc

SEQ ID NO: 2305 - DNA, 65 bp, Rattus norvegicus; identical to SEQ ID NO: 1

SEQ ID NO: 2306 - DNA, 65 bp, Rattus norvegicus
ccacaataggagcagactttctgaccaaggaggtgatggtggatgacagacttgttaccatgcag

SEQ ID NO: 2307 - DNA, 65 bp, Rattus norvegicus
gactgcttgacagcatgtccctgctgctctccaatctcatcagacagtagaatgtagggaaaagc

SEQ ID NO: 2308 - DNA, 65 bp, Rattus norvegicus
cccacacaatgtcttcaagtgttccaagtgccaagtggtcattcctatctacagcggaaaccgga

SEQ ID NO: 2309 - DNA, 65 bp, Rattus norvegicus
caaaggccacataacagtgaaactcgactgtccttccttcgggacttctctgcctggtgtttatg

SEQ ID NO: 2310 - DNA, 65 bp, Rattus norvegicus
atttgctgtgacaaagatcatggatgcttagcctggactgcactgcttgccctctgagtggaagc

SEQ ID NO: 2311 - DNA, 65 bp, Rattus norvegicus
tggacatatcagcctctagcacagagcagatcctttgagggcaacaatggagtttaggcagctcc

SEQ ID NO: 2312 - DNA, 65 bp, Rattus norvegicus
atgttcctggccacatggaaggacattcccaacgagaatgaagcccagttccagatcagagactg

SEQ ID NO: 2313 - DNA, 65 bp, Rattus norvegicus
tgtgacaaaatgtcagagagcttggagactgacccagccatcacagccgccaagcagagcacgag

SEQ ID NO: 2314 - DNA, 65 bp, Rattus norvegicus
gtcctagaacacacggagaagatggtggacaagatggatcaggacttgaagatgagccagaaaca

SEQ ID NO: 2315 - DNA, 65 bp, Rattus norvegicus
tggccagtatcgcttccacctgtccacaaacatggggaatatctttgcaaacctcttcaagggcc

SEQ ID NO: 2316 - DNA, 65 bp, Rattus norvegicus
ccttgagacagctacggtcaccccgacgtacacaggctccaagtgcacaggagtgtggctgctag

SEQ ID NO: 2317 - DNA, 65 bp, Rattus norvegicus
gtgtgtgctaattcaggcctaacttctgagaaacaaggacaaggatgctgtgacacccacctcag

SEQ ID NO: 2318 - DNA, 65 bp, Rattus norvegicus
ggggagtgaagtgaggtagctcttgtgttctggcatcacgtctcagtcccctgaggctgcttctc

SEQ ID NO: 2319 - DNA, 65 bp, Rattus norvegicus
attttcttcgtccaggatgtgttctttgtcctccaggccattggtatcccaggttggggcttcag

SEQ ID NO: 2320 - DNA, 65 bp, Rattus norvegicus
cgttaggatgctctgatctgacatttgacacgaatacagtgctatatgctcttgtgacttccagc

SEQ ID NO: 2321 - DNA, 65 bp, Rattus norvegicus
ccgtcatcctggacattttccgccgtgcggataaaaacgacgacgggaaactgtcccttgaggaa

SEQ ID NO: 2322 - DNA, 65 bp, Rattus norvegicus
actgagggccaagcctggcacctgccttcacccgttctcagttgtggacaagtgacaaccttgtc

SEQ ID NO: 2323 - DNA, 65 bp, Rattus norvegicus
aagccatgcatgtctaagtacgcacggccggtacagtgaaactgcgaatggctcattaaatcagt

SEQ ID NO: 2324 - DNA, 65 bp, Rattus norvegicus
tgacagccgtaaagcacgaacaggagtacatggaagtccgggagagaatacacagagccatcaac

SEQ ID NO: 2325 - DNA, 65 bp, Rattus norvegicus
aaggtttacacggtggtagatgagatgttcctggcaggagagatccgagagacgagccagacgaa

SEQ ID NO: 2326 - DNA, 65 bp, Rattus norvegicus
ggccagtaacggatccccagtcattagtccctactctgctttgggatagtatgagcttcgttttg

SEQ ID NO: 2327 - DNA, 65 bp, Rattus norvegicus
gctccgtatgtactgataggaagcagacgtgggagccagtgtgtttccaagtctctgtttcacat

SEQ ID NO: 2328 - DNA, 65 bp, Rattus norvegicus
cgctacatgacatacaactgagccccagaggctttgactgaaggaacttcctgtgcgttcataac

SEQ ID NO: 2329 - DNA, 65 bp, Rattus norvegicus
aacagtgaaaacgtagatatcagcagtggaggaggtgtgacgggctggaagagcaaatgctgctg

SEQ ID NO: 2330 - DNA, 65 bp, Rattus norvegicus
gcttctcctggctggaaataagctggactgtgaaacagacagagaaatctccaggcagcaaggag

SEQ ID NO: 2331 - DNA, 65 bp, Rattus norvegicus
tagcctgggactgcagccctgtgcaatgtcagctaagccagacatctgctttcgttgaaatgtct

SEQ ID NO: 2332 - DNA, 65 bp, Rattus norvegicus
atttggagaggatgcacttgcaaatgtcagcattgagaagccagttcaccagggaccagatgctg

SEQ ID NO: 2333 - DNA, 65 bp, Rattus norvegicus
tcctattcaccctgaacctggaggctagacctgagggaggtggactgaggtagactgatggaaaa

SEQ ID NO: 2334 - DNA, 65 bp, Rattus norvegicus
gaccttgctgcagtaaatattccatcaatcttgtgccaccagttcagctgttagatagcacagtc

SEQ ID NO: 2335 - DNA, 65 bp, Rattus norvegicus
ccccgtgtgtgtttaggtttgtacgtgtggctcattactcccgagagcacaggatagcttgtttt

SEQ ID NO: 2336 - DNA, 65 bp, Rattus norvegicus
taccacactaggtagtcagctctgcggctgtgtgtgctctactaaccccactgtgtagaaggaga

SEQ ID NO: 2337 - DNA, 65 bp, Rattus norvegicus
gttcaggacagtcacttccagctactatcggggtgctcatggcatcattgtggtgtatgacgtca

SEQ ID NO: 2338 - DNA, 65 bp, Rattus norvegicus
gggaaacagtacaagcagactataggactggatttctttttgagaaggattaccttaccaggaaa

SEQ ID NO: 2339 - DNA, 65 bp, Rattus norvegicus
atttgacctgtctcttgccaactgcctagaaaggaacaccactgtgacttgggaatggctgcctg

SEQ ID NO: 2340 - DNA, 65 bp, Rattus norvegicus
gaagctcttcaccaggagaagtagacggtgtcaaaatcctgctcatgttaacacctctgcataca

SEQ ID NO: 2341 - DNA, 65 bp, Rattus norvegicus
atcatcatctgaaggccatctccgatctcacggaccatctcgcagtcaaagcaaaaccagtgtcg

SEQ ID NO: 2342 - DNA, 65 bp, Rattus norvegicus
cccgctgttgcaagtctgtgttatttattacctggaggcctgttccatcctgtcccagtcctcca

SEQ ID NO: 2343 - DNA, 65 bp, Rattus norvegicus
gagagatggtatgcgcaattgtctccttgcagtgaacagatcaggaggcagtgtgtgcactgtta

SEQ ID NO: 2344 - DNA, 65 bp, Rattus norvegicus
ccacggtcatgttcacggttgtggccgtcttttccttcattgcccttagcatggttcataagttc

SEQ ID NO: 2345 - DNA, 65 bp, Rattus norvegicus
attatgcagatccactcacggaagatgaacgtcagtcctgatgtgaactatgaagagctggctcg

SEQ ID NO: 2346 - DNA, 65 bp, Rattus norvegicus
ccagaacctggagatctgcttccatgctgagggctgtggtctaccaccagaggccctgcacacag

SEQ ID NO: 2347 - DNA, 65 bp, Rattus norvegicus
atacaaagcactacccatacatctctacccgctcttccgcatccttcagcaccactgctgtgagt

SEQ ID NO: 2348 - DNA, 65 bp, Rattus norvegicus
aaagccagacgtgtccttctccatagcagtgccctaacagtgcaacctgcggaatcagtcatttt

SEQ ID NO: 2349 - DNA, 65 bp, Rattus norvegicus
gagatctatgagacagaactggtggatgtagagaaggccattgcccactacgagcaatctgcaga

SEQ ID NO: 2350 - DNA, 65 bp, Rattus norvegicus
ttaatctcggctgtgaccccctggaagtgggagagctcagaattcagaggtatctggaagactct

SEQ ID NO: 2351 - DNA, 65 bp, Rattus norvegicus
tgcagccatgttcaggctcctcacaggccaggagacaccgctgtacatctaggtacaccctgcct

SEQ ID NO: 2352 - DNA, 65 bp, Rattus norvegicus
cctggccaaggacttcgagaaagcatacaagaccgtgatcaagaaagatgagcaggaacatgagt

SEQ ID NO: 2353 - DNA, 65 bp, Rattus norvegicus
caatccttgctctgcacacgtaaacaaggaggaacatagccccttcatcttcagggcagagtttt

SEQ ID NO: 2354 - DNA, 65 bp, Rattus norvegicus
tacttggtctgatttctgacaagctgaagagtgtctacagcctggtttgcctgtctgccctcacg

SEQ ID NO: 2355 - DNA, 65 bp, Rattus norvegicus
gaaggagtatggcccagagaacatcgtgatggcgattgccgggaacaagtgtgacctatcagata

SEQ ID NO: 2356 - DNA, 65 bp, Rattus norvegicus
tgtgcgcgaggtacggcgacactcatccgtgacgctgagtatcatccattgcccaccagtcacca

SEQ ID NO: 2357 - DNA, 65 bp, Rattus norvegicus
ccagtgcggaagtaattcctgattgtggaccccagtgagaagctggtgtttcacatctaccttct

SEQ ID NO: 2358 - DNA, 65 bp, Rattus norvegicus
agaggttagctctctatcaagctgttctatgctagccctgagcagcttactggtgtcgcagagct

SEQ ID NO: 2359 - DNA, 65 bp, Rattus norvegicus
acatgtttctgcacagaccacaagcagtgttgtttccctagtgtttgagattcttcagttctgtg

SEQ ID NO: 2360 - DNA, 65 bp, Rattus norvegicus
tgcttctgtgccaagcaaaagcacaaactaagacatgaagccgtggtacaaactgaacagggccc

SEQ ID NO: 2361 - DNA, 65 bp, Rattus norvegicus
agggcagctgtataagtcatccttattagatgaccttctgactgaatccgaggacatggcacagc

SEQ ID NO: 2362 - DNA, 65 bp, Rattus norvegicus
ccagcatcacgtgccaagtgctgctccttatccccagtagaactgactcaacatccaattgtaac

SEQ ID NO: 2363 - DNA, 65 bp, Rattus norvegicus
atcatggcaaaggatgacctctctggggctgacatcaaggcaatctgcacagaggctggcttgat

SEQ ID NO: 2364 - DNA, 65 bp, Rattus norvegicus
agagctacgcaaggaatcatgagccctgaagggtgcagaggaacaggccagcttcgaagggaact

SEQ ID NO: 2365 - DNA, 65 bp, Rattus norvegicus
agattcagaaggtgttcacaaaacacggcttgctcaggcttgaccccattggggcaaagttcgac

SEQ ID NO: 2366 - DNA, 65 bp, Rattus norvegicus
atagtggtgcagacggtgttgttcattggctacatcatgtacaggactcagcaagaagcagctgc

SEQ ID NO: 2367 - DNA, 65 bp, Rattus norvegicus
ctgggtgatggagcacctcctggcggctatgggaactatggttatgccaatagtggatataatgc

SEQ ID NO: 2368 - DNA, 65 bp, Rattus norvegicus
tgtacacagaagacaatgacgatgacctctatggctaagtgatgtgccagcatgcagcgagctgg

SEQ ID NO: 2369 - DNA, 65 bp, Rattus norvegicus
cgatacctagatggcatggactcagatttcacaagtgtgactggcctactcacagggagtgtgaa

SEQ ID NO: 2370 - DNA, 65 bp, Rattus norvegicus
ggcggctccagcaggaactacctttctgaacccgtggagacccgcatacacctgaccccttgctt

SEQ ID NO: 2371 - DNA, 65 bp, Rattus norvegicus
agcagagggacaagatccgacaggctcagaaaagcatcgtcaaggagacctatggggcctttctg

SEQ ID NO: 2372 - DNA, 65 bp, Rattus norvegicus
acagtggtgaaacagctcagaggcttggtgaccggtatgtcccagcacatgtagaccagatccat

SEQ ID NO: 2373 - DNA, 65 bp, Rattus norvegicus
tgtgagcaggacccagagaagaagactttcatccggcagaacgcatccttcctttacgacactgt

SEQ ID NO: 2374 - DNA, 65 bp, Rattus norvegicus
gaggcttagagttgggaggtcctactcaagggtctccccatctttgggaactttcatctaggatt

SEQ ID NO: 2375 - DNA, 65 bp, Rattus norvegicus
ttatgggagaatggaaagggggtggctctatggtctcatacgttaggaagactgagattccaccc

SEQ ID NO: 2376 - DNA, 65 bp, Rattus norvegicus
gatggtagtgtggtgtccggaagaatggggttattgaaatctgtggtattttgtacagagtgccg

SEQ ID NO: 2377 - DNA, 65 bp, Rattus norvegicus
taagccctgcatgctagtgtccccttagtgccccaacaggtctgcctagataagccctcaataaa

SEQ ID NO: 2378 - DNA, 65 bp, Rattus norvegicus
agaaactgcacccttgggaccatctggaaagaaaggtctaggctagtggtggggaactctacatg

SEQ ID NO: 2379 - DNA, 65 bp, Rattus norvegicus
gtgcactgtcacacaaagttagcaacctgacagctcatacatcctatgagatttctgcctgggcc

SEQ ID NO: 2380 - DNA, 65 bp, Rattus norvegicus
ggctggccaacttccccagactttgtgaagaaacagaaaggattgttgctaaccacatccgtgag

SEQ ID NO: 2381 - DNA, 65 bp, Rattus norvegicus
acatggtagtcagtgagctcacgtccaccatcagaaagtgtagtgaaaagctccagcaatacccc

SEQ ID NO: 2382 - DNA, 65 bp, Rattus norvegicus
gtgcacaggtggcgactccttacttccagcaaaatccaaactgctgtctctaagactcttcctcc

SEQ ID NO: 2383 - DNA, 65 bp, Rattus norvegicus
cagtaatacctcgcttctctgtgcatttagctgggaatgttcccgctatggtgaccggaataaag

SEQ ID NO: 2384 - DNA, 65 bp, Rattus norvegicus
gagcctctaagactggtcctacttggtcctaagaatcccaaggatttctgggagcttccaacatg

SEQ ID NO: 2385 - DNA, 65 bp, Rattus norvegicus
ccctgttctccattgccatccaagctcatgtttcccctctgtttgctctctcaacaaagtcctcc

SEQ ID NO: 2386 - DNA, 65 bp, Rattus norvegicus
gtttgatacccctttgtgcgatcgtggcgtttaagggatctcaatacccacttgtgcagtccctt

SEQ ID NO: 2387 - DNA, 65 bp, Rattus norvegicus
ctgtacctctgttccaagcgtaacgtgatactatcagctagtgaggaaaacacccttaactatac

SEQ ID NO: 2388 - DNA, 65 bp, Rattus norvegicus
ctgaggaccaagccgaaatgctaccacctgagtttgcctttgtgaggcattagtgtagaccaatg

SEQ ID NO: 2389 - DNA, 65 bp, Rattus norvegicus
cttctcctcatcctggttgtgcttctggtcatctttcttccgagtggagaggacagtagtaaacc

SEQ ID NO: 2390 - DNA, 65 bp, Rattus norvegicus
cgaggcgagaagcttgatgacttggtatccaaatcagaagtcctgggaacacagtcgaaagcctt

SEQ ID NO: 2391 - DNA, 65 bp, Rattus norvegicus
atctccgaaacaagacagaggacttggaagccacgtctgaacacttcaagacgacgtcccagaag

SEQ ID NO: 2392 - DNA, 65 bp, Rattus norvegicus
catgcttggtgtggaggaaacttcctggaggtgacagagcagattctggctaagataccttctga

SEQ ID NO: 2393 - DNA, 65 bp, Rattus norvegicus
actagtgggacagaaggaaagctaggcctttgtgtcacttggaatatgcagacaagggcttgggt

SEQ ID NO: 2394 - DNA, 65 bp, Rattus norvegicus
tgcgaacgcccacgatgaccaccaccctcgtgtccgccaccattttcgacttgagcgaagtttta

SEQ ID NO: 2395 - DNA, 65 bp, Rattus norvegicus
gcttttccagctgctattggattacacttgctttgtgttgtcactgctgtccctctgctgggtcc

SEQ ID NO: 2396 - DNA, 65 bp, Rattus norvegicus
ttgctcttcagcaatctggaagatgtagcactgctagtatcctcagcccagtgttgcctgtggga

SEQ ID NO: 2397 - DNA, 65 bp, Rattus norvegicus
tacggtttagcatgtgtttggttctgggggtctctccagccttgttttgggccaagttggaacct

SEQ ID NO: 2398 - DNA, 65 bp, Rattus norvegicus
acccaagagatgcctcagatacctacctcactcagagccaggaccacaccccagacaccagccat

SEQ ID NO: 2399 - DNA, 65 bp, Rattus norvegicus
cagtgtccggtggttgtagcctctcctgagaatcctggtgctcaaatttccctcccaaagcaaat

SEQ ID NO: 2400 - DNA, 65 bp, Rattus norvegicus
catgcagcatgttcccagcacctaagctaacatacagtaagcaacggcttaccaaacacatgttc

SEQ ID NO: 2401 - DNA, 65 bp, Rattus norvegicus; identical to SEQ ID NO: 1

SEQ ID NO: 2402 - DNA, 65 bp, Rattus norvegicus
caaagttaccttggcttagtgattgcatctcgtttgtggtagacatcatgagcagggatacactc

SEQ ID NO: 2403 - DNA, 65 bp, Rattus norvegicus
tcccattacctcatacctcacaggagaagctgggaagttcgaagcaaacggaaaccacgcagaag

SEQ ID NO: 2404 - DNA, 65 bp, Rattus norvegicus
aatgagacaagtgaagaatccgttcggcttagagatcactaactcatccgcagcttccctagcaa

SEQ ID NO: 2405 - DNA, 65 bp, Rattus norvegicus
gccctctcacgtaagaaccaggtgttcagtggtatgtgcttaagtcatccccagctgagatttgt

SEQ ID NO: 2406 - DNA, 65 bp, Rattus norvegicus
ctggcgatgagtttgaactgcggtaccggagagcattcagtgatctaacatcccagcttcatata

SEQ ID NO: 2407 - DNA, 65 bp, Rattus norvegicus
aaggcaaggtggatgggatcctgtctttcagctccaaaaactgcacagacatcttcaagcccacc

SEQ ID NO: 2408 - DNA, 65 bp, Rattus norvegicus
tgggatgggtttgtggagttcttccacgtacaggacctagaaggcggcatcagaaatgtgctgct

SEQ ID NO: 2409 - DNA, 65 bp, Rattus norvegicus
ggatctttgtcttcaaactgctgggccattccacatctggagcagtcaggcaggtgacaagtgag

SEQ ID NO: 2410 - DNA, 65 bp, Rattus norvegicus
agttgctggtctgactggtctccatgctctggaggacgcaaaacaagacaaaggcagtgcaacaa

SEQ ID NO: 2411 - DNA, 65 bp, Rattus norvegicus
gacatctggtcacttgtaaacagtgtgcggaagcagttgacaaatgtcccatgtgctgcacagtc

SEQ ID NO: 2412 - DNA, 65 bp, Rattus norvegicus
ccctcccacatttacccagcaggtgtacctgccacaccagtgtctggacacaaagtgaatggtgt

SEQ ID NO: 2413 - DNA, 65 bp, Rattus norvegicus
cagtattcagggaccccaagttaggggctatgctcctgttgtataatttcaagcccccctttaga

SEQ ID NO: 2414 - DNA, 65 bp, Rattus norvegicus
agagatacggatcgcacaggagctgcggcggatcggagacgagttcaatgagacttacacgagga

SEQ ID NO: 2415 - DNA, 65 bp, Rattus norvegicus
gaatcggcagtgagatatgccaggactgccttttcccacaggcaatgccaatctctcgctaataa

SEQ ID NO: 2416 - DNA, 65 bp, Rattus norvegicus
ctcatacagtattcagggaccccaagttaggggctatgccctcctgttgtataatttcaagcccc

SEQ ID NO: 2417 - DNA, 65 bp, Rattus norvegicus
gcacataaagaccctcatagaaaaaaccaacgcagagcgcaagtccctgctcaacagtttagagg

SEQ ID NO: 2418 - DNA, 65 bp, Rattus norvegicus
tcgctggacctgtattggagacctaaatcggagcccacatcaagccttgagaagtggaggattta

SEQ ID NO: 2419 - DNA, 65 bp, Rattus norvegicus
ctggtggacaacatcgctctgtggatgactgagtacctgaaccggcatctgcacacctggatcca

SEQ ID NO: 2420 - DNA, 65 bp, Rattus norvegicus
atgtggaactcagaaatcctgaaaccagtggtcctggcactcagcagttagccctgtgcttcttg

SEQ ID NO: 2421 - DNA, 65 bp, Rattus norvegicus
cctttctggtcttgatgtttccatgcctggcagctgtcgcagcccatgtgtaggtgttggtttat

SEQ ID NO: 2422 - DNA, 65 bp, Rattus norvegicus
ccaaccgtccagactctacagtgagagtgacacatatgatgctagtagactgcaggcagtatctg

SEQ ID NO: 2423 - DNA, 65 bp, Rattus norvegicus
atgaagtcatccacaacattgccaggcatctcgcccaagcaggtgatgaactggaccacagcatc

SEQ ID NO: 2424 - DNA, 65 bp, Rattus norvegicus
aattccacatactttaccctccagaggcacaacacctaggccagcctttactgagactccaggtc

SEQ ID NO: 2425 - DNA, 65 bp, Rattus norvegicus
ttcatacgtgtgtgcgctccgagtggagagattctgctgtgcagtgttcgctgcagagcccgaat

SEQ ID NO: 2426 - DNA, 65 bp, Rattus norvegicus
tcaacatttgacgcctgtgacaccaatcctggattgcctcctaagtgccagggtcattaccgaac

SEQ ID NO: 2427 - DNA, 65 bp, Rattus norvegicus
tcaggaaggacgctaagcaccaacaccctgaccagaggacaaaagccagtttgtcgtcatgaatg

SEQ ID NO: 2428 - DNA, 65 bp, Rattus norvegicus
caggtccagttctggccaaattctccaggcatcctgccttccaactgctctgggacccataaaat

SEQ ID NO: 2429 - DNA, 65 bp, Rattus norvegicus
tggacgggtccggggagcagctcggaggcggcgggcccaccagctctgaacagttcatgaagaca

SEQ ID NO: 2430 - DNA, 65 bp, Rattus norvegicus
atcagaagcagtagccctacttgtcactactagggtccccagctctgtctcccctcagggttatg

SEQ ID NO: 2431 - DNA, 65 bp, Rattus norvegicus
gggactggaacacaaccatagcctgctttgtagccatattgatcggcctgtgccttacgttactc

SEQ ID NO: 2432 - DNA, 65 bp, Rattus norvegicus
tttctggggactgttcgctccgtcacctctggagccgacatactgttctggggtttgttctctac

SEQ ID NO: 2433 - DNA, 65 bp, Rattus norvegicus
atcacatggggcaaggtagtgtccctgtactcggtggctgcgggactagcggtggactgcgtccg

SEQ ID NO: 2434 - DNA, 65 bp, Rattus norvegicus
ggcacaaaagcctccactccaccctgacttcagaaaggcactcaagaaccttccccacaacttta

SEQ ID NO: 2435 - DNA, 65 bp, Rattus norvegicus
cccagacacacgggctctagtggctgactttgtaggctataagctgaggcagaagggttatgtct

SEQ ID NO: 2436 - DNA, 65 bp, Rattus norvegicus
atatcacactaatggatgaacggttgaactccctaaggtaggggcaagcacagaacagtggggtc

SEQ ID NO: 2437 - DNA, 65 bp, Rattus norvegicus
gctgagtctgtctagtcaggatttagaggtgggcaagaactaggaacccagaactgcagaatgac

SEQ ID NO: 2438 - DNA, 65 bp, Rattus norvegicus
aaggtctttgcactggaagagtcaaggagccggtatggatggcagaggtggctgtgagggcattt

SEQ ID NO: 2439 - DNA, 65 bp, Rattus norvegicus
gccagtgaaatagtaccacacattcccctttgatcccttgtatgtcatcaccaaggccgtactct

SEQ ID NO: 2440 - DNA, 65 bp, Rattus norvegicus
cagcagcgatgatggcgacaacaagaggagtttatctgcaggggaaatagagcggtctttcacac

SEQ ID NO: 2441 - DNA, 65 bp, Rattus norvegicus
gcctgtaccatgtcgctaaaggagggatgggctcctcggattttatgagcaatccagtatcccaa

SEQ ID NO: 2442 - DNA, 65 bp, Rattus norvegicus
catcatcctggatgccttggaacagcaggaagacagcatcaataaatttgctgactacatcagca

SEQ ID NO: 2443 - DNA, 65 bp, Rattus norvegicus
attccagccttgctgtccaccattaccttgggtgggcagttgtgttacgcctttatctctctgct

SEQ ID NO: 2444 - DNA, 65 bp, Rattus norvegicus
ctggcccagtgtgaatacctggatctggactgcgtctcatcaaagtttccagaagggttaattct

SEQ ID NO: 2445 - DNA, 65 bp, Rattus norvegicus
gccctagaacagcaggaagaaggcatcaacagactcactggctgtatcagcaaagtgaaggaata

SEQ ID NO: 2446 - DNA, 65 bp, Rattus norvegicus
tgtgtcgtgttgctggctggggccaaatgtccgtcgatgtcactaaaagaacttcccgcctacaa

SEQ ID NO: 2447 - DNA, 65 bp, Rattus norvegicus
ctgcactctttggctatgtgatgattttggggctgtccctcctggtgttgctgtgtgtcctggct

SEQ ID NO: 2448 - DNA, 65 bp, Rattus norvegicus
aggcgcctgtgctaagttgcgagtcctggtaaaccgagactgggtgctgtcctatcatcctagct

SEQ ID NO: 2449 - DNA, 65 bp, Rattus norvegicus
ccaaattctgcctttgggtcagtataggatgcatgagtggtagactcttcacacttcccactgcc

SEQ ID NO: 2450 - DNA, 65 bp, Rattus norvegicus
ccgggcagaagaactactgctcaagattcacgaggtgtcgacttccagccacgtagatgccgatt

SEQ ID NO: 2451 - DNA, 65 bp, Rattus norvegicus
aagaatgccaccttgtgactggggagaggcactcaagacatggggctgtaaggatccgaagttca

SEQ ID NO: 2452 - DNA, 65 bp, Rattus norvegicus
agactgtcaggggtctggtctattctctctagacagggctgttctctttgtgcaaagcacccaca

SEQ ID NO: 2453 - DNA, 65 bp, Rattus norvegicus
agcggaggccaagggtctcaggaagcctgtgccggctccaggagttcagattcttcccatggcag

SEQ ID NO: 2454 - DNA, 65 bp, Rattus norvegicus
tgggctactgacagaaagaaaccttagcccagcagggctcctccaagacccaaactaactgaagt

SEQ ID NO: 2455 - DNA, 65 bp, Rattus norvegicus
aaagaatcccctctcttagtccagtcctggagtggatgcacgtgctgcacgctctctcactcgca

SEQ ID NO: 2456 - DNA, 65 bp, Rattus norvegicus
tgtttctccagccctacggatgacagcatggatcggtgagaccaggcggcttcttgcattctctc

SEQ ID NO: 2457 - DNA, 65 bp, Rattus norvegicus
ttctcaacagagtcccagaggagcaggcaggacagcattctgagcagcttgactcactacacaag

SEQ ID NO: 2458 - DNA, 65 bp, Rattus norvegicus
gtcaatcctgatcgtgtaagctcagtctatacccggtccacaggagaacaggaagtttctactgg

SEQ ID NO: 2459 - DNA, 65 bp, Rattus norvegicus
atgccacgctcaaggcagtcataccagacagcacggagcagtcagatgtcaagttcagcagtgct

SEQ ID NO: 2460 - DNA, 65 bp, Rattus norvegicus
atgtagccattcggagagcagcagggttactgcccaggaagatgtggtcagcatgaacgaccttg

SEQ ID NO: 2461 - DNA, 65 bp, Rattus norvegicus
tatatttcattccttcctggcgagaaactggaaagaacaagctctgtctccccatcaactgggga

SEQ ID NO: 2462 - DNA, 65 bp, Rattus norvegicus
ggcaatttgctgcactggccctgtgactttgacagcttcctcatgaatgtctttccctattgcac

SEQ ID NO: 2463 - DNA, 65 bp, Rattus norvegicus
aagatgctgcactggggacctaagcagatgttctgaggtgaatactggtgatgggtgacctgtga

SEQ ID NO: 2464 - DNA, 65 bp, Rattus norvegicus
cacgaaccgtattgtagagttacgtttcgggctgcaaacccgtgaacagaggaaacagcattctc

SEQ ID NO: 2465 - DNA, 65 bp, Rattus norvegicus
ataactttgctgctgggactcagtgacagctcagcatatccaggtctcctgagaaccactctcag

SEQ ID NO: 2466 - DNA, 65 bp, Rattus norvegicus
tgtctcactttcttccagttcaaccagccctgacagctcccaagccttgagtcacagagacttgg

SEQ ID NO: 2467 - DNA, 65 bp, Rattus norvegicus
ttgtctccgggatgcagttcctggcttgtatcagcattgacagatactgggcaatcactaaggcc

SEQ ID NO: 2468 - DNA, 65 bp, Rattus norvegicus
tcctttgactacagtactatcaatggacgtccgtcttcacttgcatcctgggttacaccctgaga

SEQ ID NO: 2469 - DNA, 65 bp, Rattus norvegicus
ggccttgagcaacgtcattgaagtctaccacaattattctggtataaaagggaatcaccatgccc

SEQ ID NO: 2470 - DNA, 65 bp, Rattus norvegicus
atgagaaaccatgtccattgaaggacggagaaagctctgtaccgtgcagaggaagtggccgacaa

SEQ ID NO: 2471 - DNA, 65 bp, Rattus norvegicus
tccccaattatctgcttctgtgactcagtgtaccaaagtttccctcaccagtatggtagggtccc

SEQ ID NO: 2472 - DNA, 65 bp, Rattus norvegicus
aggaccctcctcctaccccagtcacaggagcttcaccaagatgtcctcattgattgagaaggctt

SEQ ID NO: 2473 - DNA, 65 bp, Rattus norvegicus
ggtggacactcttccgtctccacagagtcagaatcctcaagttttcactccagctaacacttacg

SEQ ID NO: 2474 - DNA, 65 bp, Rattus norvegicus
gatatccatcgcggctactgcatcctacttcctggccacagactctaccaacgtggtgcccaaaa

SEQ ID NO: 2475 - DNA, 65 bp, Rattus norvegicus
acactggtagcctccttcctggtctgctggtgcccttaccacttcttcgctttcctggatttcct

SEQ ID NO: 2476 - DNA, 65 bp, Rattus norvegicus
ccatgtcgccagagccaacgtcaaacatctgaaaatcctcaacactccaaactgtgcccttcaga

SEQ ID NO: 2477 - DNA, 65 bp, Rattus norvegicus
aaaagcggctacaacgccgagcggaggaggtaggaacctgatttccagaagcagctgggtaggca

SEQ ID NO: 2478 - DNA, 65 bp, Rattus norvegicus
tgagtagcactgcgagaggatatgggttccatgtgcccgtgttcctcacagccaagggtttgaaa

SEQ ID NO: 2479 - DNA, 65 bp, Rattus norvegicus
accatccagaaggccgacaagaaaagcatggaatggttcgccgtcattgagcattaccaccgaac

SEQ ID NO: 2480 - DNA, 65 bp, Rattus norvegicus
tcctgctgtagcttgcccatctcccgctcccacaatccggcgtgatggctgccgccgttcctggc

SEQ ID NO: 2481 - DNA, 65 bp, Rattus norvegicus
ttttgtccttgtgggtcttgcctttgggcagcagacttccaaacctagaagccaccagcacttca

SEQ ID NO: 2482 - DNA, 65 bp, Rattus norvegicus
caggtccaaaaggggtgatcaatgactggcgccgcttcaagcagttggagacagaacagagggag

SEQ ID NO: 2483 - DNA, 65 bp, Rattus norvegicus
ttacgtctgatactatccagactcatggtgctttgtctgagctggacctcagcaaggagctggtg

SEQ ID NO: 2484 - DNA, 65 bp, Rattus norvegicus
cagccaatgatgtgccttctccatatgaagtcaagggttttcctaccatctacttctcaccagcc

SEQ ID NO: 2485 - DNA, 65 bp, Rattus norvegicus
atcgagccgtcccttcgtcagcttgcccagaagtacaactgtgacaagatgatctgccgcaagtg

SEQ ID NO: 2486 - DNA, 65 bp, Rattus norvegicus
ctacaacattcaaaaggagtccactctccatctcgtgctgagacttcgtggtggcgctaagaaaa

SEQ ID NO: 2487 - DNA, 65 bp, Rattus norvegicus
aaagagagatacatgacctagggcagaccaacacggaagatgaagatatcgagtaagcacgcacg

SEQ ID NO: 2488 - DNA, 65 bp, Rattus norvegicus
gggagtcggtgacccaggctacttgcagtatcaggatgctgctaacaccctgagagaagattaca

SEQ ID NO: 2489 - DNA, 65 bp, Rattus norvegicus
tgagacaaattctgcgatctgatttccatcctctgtcacagaaaagtgcaatcctggtctctcca

SEQ ID NO: 2490 - DNA, 65 bp, Rattus norvegicus
tatgttgacctgtgacaatgcagcagttgctggattaaccacctcttacaaaggagttcagcacc

SEQ ID NO: 2491 - DNA, 65 bp, Rattus norvegicus
gaatgaagggaggaacaaggctggatcatggaaaactgttcacaggaaccagaggcctatcctcc

SEQ ID NO: 2492 - DNA, 65 bp, Rattus norvegicus
cccgaagctactgtgtgtgtgaatgaacactccccttgcctcatacccgaatgctgtacatctat

SEQ ID NO: 2493 - DNA, 65 bp, Rattus norvegicus
gacgaattacgatgcacaaaactgatgagcctggcaagtacactaccttcaaaggcaagaagacc

SEQ ID NO: 2494 - DNA, 65 bp, Rattus norvegicus
ctgtgccaagcccatttggatggatcaacacagattacatgccaaagaaccacacctctgattgc

SEQ ID NO: 2495 - DNA, 65 bp, Rattus norvegicus
cttgaagtcagcagcacattttcacagacagagattagagagaatcagggcgaaggcaggaggta

SEQ ID NO: 2496 - DNA, 65 bp, Rattus norvegicus
gtggccgacaaacagtctctaagctccaaattctggaagcatgtgagataccaaatgccagtccc

SEQ ID NO: 2497 - DNA, 65 bp, Rattus norvegicus; identical to SEQ ID NO: 1

SEQ ID NO: 2498 - DNA, 65 bp, Rattus norvegicus
gcacaaccttgagtcctcactgctctcctctgccaacaggaccttttgtccagatttctgagtat

SEQ ID NO: 2499 - DNA, 65 bp, Rattus norvegicus
ctcttactgccccatattataccaggtcgcctgagacctttctggactgataatgacctctgagg

SEQ ID NO: 2500 - DNA, 65 bp, Rattus norvegicus
taaccctggtctgtggccatgaagaagaagctagtttcgagagagggaacgtcgatgtggacaag

SEQ ID NO: 2501 - DNA, 65 bp, Rattus norvegicus
actcattgaaagatgagagaaccagcccagaggactcagacccttgcatcccagttgtaagcagc

SEQ ID NO: 2502 - DNA, 65 bp, Rattus norvegicus
ggaggggcaaatgaagaggggcagttttggaaacttggagcttttgtgtcactgatccctttgca

SEQ ID NO: 2503 - DNA, 65 bp, Rattus norvegicus
tacttcttaatcataacggtgttttgttccttcttctactcattatcactcatacctgggtacat

SEQ ID NO: 2504 - DNA, 65 bp, Rattus norvegicus
actggagaactctagcccagaaacttcacctggacagccatcttagcttctttgcctccaagccc

SEQ ID NO: 2505 - DNA, 65 bp, Rattus norvegicus
gtgccttggaggagatgggcaagagtgagatgctggtagccatgaccactgatggcgattgctga

SEQ ID NO: 2506 - DNA, 65 bp, Rattus norvegicus
ccaccgaacctgaaaaggttgttgtgatccttgggaccaacgtgaaggagagaacaaactctcac

SEQ ID NO: 2507 - DNA, 65 bp, Rattus norvegicus
ccagccgtcatctaccgaaacgtatatttcatcgagaacaccaatatcacagtttgcgcttttca

SEQ ID NO: 2508 - DNA, 65 bp, Rattus norvegicus
gaggctggtgtaggacttaagtttttcccaggatagatttctatagagacccccacattgaacat

SEQ ID NO: 2509 - DNA, 65 bp, Rattus norvegicus
cattatgcagctggcaacaaacccgaccacatgattaagcctgttgaagtcactgagtcagcctg

SEQ ID NO: 2510 - DNA, 65 bp, Rattus norvegicus
aaatcttgtggccggaagagaaagtgatcttctggggacccctgactcgcgacctcatcaacgtt

SEQ ID NO: 2511 - DNA, 65 bp, Rattus norvegicus
cattttgaaagcgtgaaagaaaggtcagatgtgcacgtgccttgctctttatcctgggtctccct

SEQ ID NO: 2512 - DNA, 65 bp, Rattus norvegicus
aagctgtgagcagtgtctcgtgggatttgtactgaactagacagcacgcttcctgcccaaacaga

SEQ ID NO: 2513 - DNA, 65 bp, Rattus norvegicus
aaagaaaatgagttccagtgacacgcccctgggaaccgtggcactgctccaggagaagcagaagg

SEQ ID NO: 2514 - DNA, 65 bp, Rattus norvegicus
gaagagtggagaagagcagaatctgattgaggatgactttcataacctgcgaatgaggccaaccg

SEQ ID NO: 2515 - DNA, 65 bp, Rattus norvegicus
gtggtctcagaagatgctagaatgtagaggaaacagaagatgaactggcaggttttgcctgtgcg

SEQ ID NO: 2516 - DNA, 65 bp, Rattus norvegicus
ccagtattttccccggaactggagattcgagtgccattcggctgctacctgcttagtgactccag

SEQ ID NO: 2517 - DNA, 65 bp, Rattus norvegicus
tctacattcccaagttcaaactggcacaaaactacgaactcaagcccattctgcaacgcatgggc

SEQ ID NO: 2518 - DNA, 65 bp, Rattus norvegicus
caactctctgtcactcgaggaactaggctctgacacagggatccaggttttcaatcagatcatca

SEQ ID NO: 2519 - DNA, 65 bp, Rattus norvegicus
caggagtacagtgactgtggaagaggctaatcctgtgaccaaacatgcagatagtcaatgagtga

SEQ ID NO: 2520 - DNA, 65 bp, Rattus norvegicus
aggccaaagggctgtaatcaacccctgtacccactggtaactttgcccacagcatggttgtccat

SEQ ID NO: 2521 - DNA, 65 bp, Rattus norvegicus
cacagactacagtctagagaaagaggtccttccagagctggggattaagaaagtcttctcccagc

SEQ ID NO: 2522 - DNA, 65 bp, Rattus norvegicus
gccaatttggtcccacgtagtggaaggccacctatgattgtgtggttcaacaggccattcctgat

SEQ ID NO: 2523 - DNA, 65 bp, Rattus norvegicus
cacaagacgctgttggtagacggtaaaggatgcattctctgtacccagccagtttgctatggctg

SEQ ID NO: 2524 - DNA, 65 bp, Rattus norvegicus
tgggacagtgtgctgaccccagagaacattcattctgtggacagaggtttcccacccaatcctaa

SEQ ID NO: 2525 - DNA, 65 bp, Rattus norvegicus
caactgggagaggaacccatctactgccttagaccgcggattctgtggcagcttgtcaagatctt

SEQ ID NO: 2526 - DNA, 65 bp, Rattus norvegicus
cagggaggatgtccaaggagcaccattcttgcctagtggaaaagaaacctcaacatgtctgagac

SEQ ID NO: 2527 - DNA, 65 bp, Rattus norvegicus
gacggaagtgaagctgcagcatccacaggcataaacatccctgcaatcatgagtttgactcaaac

SEQ ID NO: 2528 - DNA, 65 bp, Rattus norvegicus
actcagagaactgcacctatagtgtggtggaacggacgaacccaggaaagacctgtccagtcaat

SEQ ID NO: 2529 - DNA, 65 bp, Rattus norvegicus
gtgggactttgtgctatctccagaacagatcaatgcagtctatgttggtagggtattcagcccca

SEQ ID NO: 2530 - DNA, 65 bp, Rattus norvegicus
cataccccaaacctagttattggcaagtacatccagtcccaataaataaatgctttgagcacatc

SEQ ID NO: 2531 - DNA, 65 bp, Rattus norvegicus
tacaacctggaggaggtccttccagagctgggaattaggaaaatcttctcccagcaagctgatct

SEQ ID NO: 2532 - DNA, 65 bp, Rattus norvegicus
tgttcctctctgcctgtgtttctttgagtatccagtcaatgatcagaacaagtagcccattcagt

SEQ ID NO: 2533 - DNA, 65 bp, Rattus norvegicus
ccaaagttttccataagaccgtcctggatgtgaatgaagttggcacaaaggcagcagcagccacc

SEQ ID NO: 2534 - DNA, 65 bp, Rattus norvegicus
cacccatctaggagtccagagagagaatgggaccttatccaagtgtgcaggagcagtgaaaatct

SEQ ID NO: 2535 - DNA, 65 bp, Rattus norvegicus
tggtaactgtggcagtctaacagctacctcggagtttctgaagtggggagaccatcactgtgatg

SEQ ID NO: 2536 - DNA, 65 bp, Rattus norvegicus
ctcagaattgccatatgtctgcaagttcaaggcctagagtacagagatgacaccatgtgttgata

SEQ ID NO: 2537 - DNA, 65 bp, Rattus norvegicus
gggacactgggtatcctaacaattccaatcgtggctactgtgtatctgtgacttcaaactcagga

SEQ ID NO: 2538 - DNA, 65 bp, Rattus norvegicus
tatatcttccttcagcgttgctgtcttgatgggactgtgcacgattaccggccaacccacatgga

SEQ ID NO: 2539 - DNA, 65 bp, Rattus norvegicus
ttctgtgttcataccccaaaccaagccattgataagtcccagtaaaggttctgagaacatctgtt

SEQ ID NO: 2540 - DNA, 65 bp, Rattus norvegicus
ttctgtgactccagcctgtgcctgaatggtgggacctgcttgatgggccaagacaatgacatcta

SEQ ID NO: 2541 - DNA, 65 bp, Rattus norvegicus
tttccccaaacgcctggaacctggttactccactgccatgtgactgaccatattcatgcggggat

SEQ ID NO: 2542 - DNA, 65 bp, Rattus norvegicus
aagatcaggtgctggaacggaggattcacctgtgatcccatgggcttattactcaaccgtggatc

SEQ ID NO: 2543 - DNA, 65 bp, Rattus norvegicus
cctgctaaacaggcaaacaaggtcagccattctctacttccccaaactgtccatctctggaacct

SEQ ID NO: 2544 - DNA, 65 bp, Rattus norvegicus
ccccaacacactactgaagagctacaaaagaatcaccaacaacagatgcacgctgaaagccatag

SEQ ID NO: 2545 - DNA, 65 bp, Rattus norvegicus
gcccgggtgaccataggcccacactgcatcagggccttcaacgagtgttgtactattgcggataa

SEQ ID NO: 2546 - DNA, 65 bp, Rattus norvegicus
gcactgcatatcagctcctgtcctcatgaaacctgtccctgactccttttagtatagcttaacag

SEQ ID NO: 2547 - DNA, 65 bp, Rattus norvegicus
tgtgagcccacagtgtcagccattgctcccaagctagtcatcttctgagggaagtgacctccctg

SEQ ID NO: 2548 - DNA, 65 bp, Rattus norvegicus
gacccgcaactttctggtccgggcctcttgccgccttcgtttggagcctagcaaagagtacttaa

SEQ ID NO: 2549 - DNA, 65 bp, Rattus norvegicus
ttacctggataaggtgtcaaatcagacggtgaacttgtccttcacggttcagcaagatattccaa

SEQ ID NO: 2550 - DNA, 65 bp, Rattus norvegicus
gcaaacgcttcaacaccttcatccacgaagacatctggaacattcgcagcatctgtgatactgcc

SEQ ID NO: 2551 - DNA, 65 bp, Rattus norvegicus
gcattccaaagggtagacatgctggagatcaaaggcgacatcaccttgtcctatgtccagatctg

SEQ ID NO: 2552 - DNA, 65 bp, Rattus norvegicus
cttctgattctgcagcccctttgccaaatacttcacctttggaatccgtgtttgggaccacgaag

SEQ ID NO: 2553 - DNA, 65 bp, Rattus norvegicus
agaagaaccagaaacagtgcgaagacctcggggcattcacagaaacaatggtggttttcggctgc

SEQ ID NO: 2554 - DNA, 65 bp, Rattus norvegicus
gtgaagtaagaggactggctgtgaccctatctgtgaaggatggaaggatgtctaccctctcctgt

SEQ ID NO: 2555 - DNA, 65 bp, Rattus norvegicus
taagcatggatgggctccagatctcctccttcaagctcgagtgagcatctcctcagaagacctta

SEQ ID NO: 2556 - DNA, 65 bp, Rattus norvegicus
tgaaggatgtatatgatgtcttcaaatatctttacaacacgcacagtgctgacacatatctcagc

SEQ ID NO: 2557 - DNA, 65 bp, Rattus norvegicus
agaagaacctagcaggcagcagagactatggagctagcctcggctcgtctcctcagagggcagat

SEQ ID NO: 2558 - DNA, 65 bp, Rattus norvegicus
ggagcacttccctggaatggtgagttcgacctgttgagcaaagaatgcaaagatgtctaagggtg

SEQ ID NO: 2559 - DNA, 65 bp, Rattus norvegicus
ctccatccacagtttcagtgttaacttccgaatccagtcctttgtcaggggaatcaaccagggtc

SEQ ID NO: 2560 - DNA, 65 bp, Rattus norvegicus
ttcaaattccccaaccgcctcaacatggaggccatcaactacatggcggcggatggtgacttcaa

SEQ ID NO: 2561 - DNA, 65 bp, Rattus norvegicus
ttcgcaacaaagtgcacctgagcttcagcccatcccaaagtcttccagcctcacaaacccatatg

SEQ ID NO: 2562 - DNA, 65 bp, Rattus norvegicus
cagcatggatattagcaatggaatagactgctgtgcacttagagttagacccaagcacctctccc

SEQ ID NO: 2563 - DNA, 65 bp, Rattus norvegicus
atcatcaccacagaggaaggcttcaagactgtgatcggggatgacgagtatctccacttccacca

SEQ ID NO: 2564 - DNA, 65 bp, Rattus norvegicus
gcgatatccgtttgctggatgtaaggagctggtagctatcatgactgccagaaccctggaaatac

SEQ ID NO: 2565 - DNA, 65 bp, Rattus norvegicus
tccagttcccacatcggcacagaccgctagctaccatcaccagagtgcgagtgctcagtgaccat

SEQ ID NO: 2566 - DNA, 65 bp, Rattus norvegicus
ctttcctggaaatttcttttcctgtcattcatcctgttgtccgaaatcgccttttttgcctcgaa

SEQ ID NO: 2567 - DNA, 65 bp, Rattus norvegicus
aaggaagacactgtgacgctgacgtgcgaagggacccacaatcctggaaactcttctacccagtg

SEQ ID NO: 2568 - DNA, 65 bp, Rattus norvegicus
gggactgactgggctgttacccaccacttgcagacgttgattctagttctggacctctaatatgg

SEQ ID NO: 2569 - DNA, 65 bp, Rattus norvegicus
ttgactaactgtcctttccacgaccagccccatctgatgaggaaggcactctgctccttccagat

SEQ ID NO: 2570 - DNA, 65 bp, Rattus norvegicus
tgtcaaggcccgattgctctctgtgactgaggctaggattatgtccctcccaaactgaagtggct

SEQ ID NO: 2571 - DNA, 65 bp, Rattus norvegicus
gcaatggtcgggacatagttgacttcaccatggaacccgtgtcttcctaaagatggctgcactat

SEQ ID NO: 2572 - DNA, 65 bp, Rattus norvegicus
actctccatgacatctaaggtcctcgtgggctctacagggtctgccgttgtggccagtgtgatgg

SEQ ID NO: 2573 - DNA, 65 bp, Rattus norvegicus
tcagtggagtgtcccaaggatgccatcgtgtttgagactgtccagggaaggcttatctgcacaga

SEQ ID NO: 2574 - DNA, 65 bp, Rattus norvegicus
aacgaagacgtagacatcatctctaatgagttctccatccagaggccgacatgtgtgcagacccg

SEQ ID NO: 2575 - DNA, 65 bp, Rattus norvegicus
aagaggggtgtttgaggcacaagtcattctctacatagcatgtgtacctccagtgcaatgatgtc

SEQ ID NO: 2576 - DNA, 65 bp, Rattus norvegicus
tcatggctttctgtgctgcaggcccttgacccagacagggcaggaatctccccaaaatcccagtg

SEQ ID NO: 2577 - DNA, 65 bp, Rattus norvegicus
gcatagaggaaggctgacctgtctaccctccctctcgaccccacttgtcactgtaaccaagcttg

SEQ ID NO: 2578 - DNA, 65 bp, Rattus norvegicus
tcatgaccatgagacactgtggctgtgcagcagaccccagtccttggtgggtcctgcttctatat

SEQ ID NO: 2579 - DNA, 65 bp, Rattus norvegicus
tgctggacaggatggagttcgccagtcaagagcttcagacaagcagactctgttgcaaaatgaac

SEQ ID NO: 2580 - DNA, 65 bp, Rattus norvegicus
tcggcacgagggcggcctctgagcagatcgtctctccttgttcgcccagctcgctcagctccttc

SEQ ID NO: 2581 - DNA, 65 bp, Rattus norvegicus
gggacaagcccctgaaggatgtgatcattgtagactgtggcaagatcgaagtggagaaacccttt

SEQ ID NO: 2582 - DNA, 65 bp, Rattus norvegicus
gaaagggtggtgtctaccagccagtaggagctggagtgctctattcaaggttaaggtgatagaca

SEQ ID NO: 2583 - DNA, 65 bp, Rattus norvegicus
cacacacagaagtgttttcagattcctgttcttcagacaaccattggatctgccaaaagaccctg

SEQ ID NO: 2584 - DNA, 65 bp, Rattus norvegicus
agtgcagcactggcacaaagcatggactctgaaagcactgagtcttatagagtcttcgttgtgta

SEQ ID NO: 2585 - DNA, 65 bp, Rattus norvegicus
ctcctccttaccagacttctgacacgcttcagtcatacactgctgctttcctgtcacatccctta

SEQ ID NO: 2586 - DNA, 65 bp, Rattus norvegicus
atatggagctgacaccccgactgcctgctgcttctcctatggacggcaaattccacgaaaattca

SEQ ID NO: 2587 - DNA, 65 bp, Rattus norvegicus
ttgcagtcgtctttgtcactcgaaggaaccgccaagtgtgtgccaacccagagaagaagtgggtt

SEQ ID NO: 2588 - DNA, 65 bp, Rattus norvegicus
aggaactatgaggcaggggatggagggagcaagaggactaagagtttggttgaggcctatccaaa

SEQ ID NO: 2589 - DNA, 65 bp, Rattus norvegicus
acaagcaggtgcttctgtgtttgtcaacgtgactgaagcaagccaagtgatccacggaattggct

SEQ ID NO: 2590 - DNA, 65 bp, Rattus norvegicus
acagggctctggggcactgagaattgctctgttcctatgcccagcatctgtaagcgagtgaaaat

SEQ ID NO: 2591 - DNA, 65 bp, Rattus norvegicus
ctgggaccgagacatgtaatcaagctctatggagctctgaatcatctggaccagtttaactccag

SEQ ID NO: 2592 - DNA, 65 bp, Rattus norvegicus
tctagaacacagctggacctaacacacagaaactgcctgaggactctgcccttagctttccctgt

SEQ ID NO: 2593 - DNA, 65 bp, Rattus norvegicus; identical to SEQ ID NO: 1

SEQ ID NO: 2594 - DNA, 65 bp, Rattus norvegicus
catgacgttggtgaaggatctgctgcagaattcctccaggaaatgagagagtacatgcctccagc

SEQ ID NO: 2595 - DNA, 65 bp, Rattus norvegicus
gggcctcacttacctgcaccgctgttcttcgagtcttgctgcacgccccgttctgtgtttatcca

SEQ ID NO: 2596 - DNA, 65 bp, Rattus norvegicus
aaacagacgcagtcagatggctttcaaggcaggactgtgcctgtccacgtcattttctgtaagcc

SEQ ID NO: 2597 - DNA, 65 bp, Rattus norvegicus
gcgtgaggactcttatcgacaacattcctagcagacctttcatacctaaggactacgcatcagcg

SEQ ID NO: 2598 - DNA, 65 bp, Rattus norvegicus
tagattgcaccgatggcgtctgtctggtgaacgctggcttctgacaacactagttttacacattt

SEQ ID NO: 2599 - DNA, 65 bp, Rattus norvegicus
actcggagctctgcagcgtgtgttggatttgactcaaagcaaaagctttcacttggaagacgctg

SEQ ID NO: 2600 - DNA, 65 bp, Rattus norvegicus
ggagaagttagagtcacagaaggagtggctaaggaccaagaccatccaactcatcttgaaagcac

SEQ ID NO: 2601 - DNA, 65 bp, Rattus norvegicus
gacttccatctgaccgtccacctgttgggaggttctgtccaaccatgtctgtcaacaacaataaa

SEQ ID NO: 2602 - DNA, 65 bp, Rattus norvegicus
ctgtccgtccagaagagatcccacctataccagaaaacagattcctaatgaggaagagtcctcct

SEQ ID NO: 2603 - DNA, 65 bp, Rattus norvegicus
ccggtcacatcgtctgactgtcacattaaagacaaggacggtaaagcctttgggagtgtgctgat

SEQ ID NO: 2604 - DNA, 65 bp, Rattus norvegicus
ctagcctaaggaagcggaaaaggagtcggtgctgattctggggtagagagtgtgccaataagaag

SEQ ID NO: 2605 - DNA, 65 bp, Rattus norvegicus
gtgactagaatccaaaggatcatctgctttcccttactgtcccatttgatggtaacaatcacaat

SEQ ID NO: 2606 - DNA, 65 bp, Rattus norvegicus
ggattactgccctaagccaccatgccaggtgttctggttacctcattgtaaacatgacacaacct

SEQ ID NO: 2607 - DNA, 65 bp, Rattus norvegicus
cttaccaccaccttcccaagggaatttcataactcagaatactcacaggaacctagacatgcatg

SEQ ID NO: 2608 - DNA, 65 bp, Rattus norvegicus
tctctagaccacctcagcccacatctagctctgacaactttcgccctatgaccgtggaatgttaa

SEQ ID NO: 2609 - DNA, 65 bp, Rattus norvegicus
tcactctggacagaaacatgctgatggctattgatgagctaatgcggtctctgaatcacagcggc

SEQ ID NO: 2610 - DNA, 65 bp, Rattus norvegicus
tgtgtgggactgagtctgttccccataaccgtgttacctcccttttcaccagtaccacagtggaa

SEQ ID NO: 2611 - DNA, 65 bp, Rattus norvegicus
ctgagaagctgcaccgtgaatgagtccacgctcacaacactgaaagacttcctggaaagcctaaa

SEQ ID NO: 2612 - DNA, 65 bp, Rattus norvegicus
ttgtggaaggtgtgggcactgaagtcctacaagagagtatctgtgtgagcttaagaacccagcgg

SEQ ID NO: 2613 - DNA, 65 bp, Rattus norvegicus
gacccataaatctgaagctaatgcatccactctcttttccacaaccacctcaagcacttctgtag

SEQ ID NO: 2614 - DNA, 65 bp, Rattus norvegicus
gaccgtgggtgttaccaaatgcctgcaggagagatgtgctgagaaccctgactggatgatttcca

SEQ ID NO: 2615 - DNA, 65 bp, Rattus norvegicus
tactaaccagaaaagtgcctacttgtcccctggtggcaagaccacccaccctcaggaccttcctt

SEQ ID NO: 2616 - DNA, 65 bp, Rattus norvegicus
atcacggctgatggcgagcccttgggtcgcgtctgcttcgagctgtttgcagacaaagttccaaa

SEQ ID NO: 2617 - DNA, 65 bp, Rattus norvegicus
aaggtcgtggatgtggtgaggaacctcgtgtgccacctgaagaagggctacatgatagtcaagtg

SEQ ID NO: 2618 - DNA, 65 bp, Rattus norvegicus
attatccttgcaacagctcagcgcatctccctgccatcactctgcaaccacttccagtctcgaaa

SEQ ID NO: 2619 - DNA, 65 bp, Rattus norvegicus
atcgaggagctgagcaacatcacacaagaccagaagacttccctgtgcaacagcagcatggtatg

SEQ ID NO: 2620 - DNA, 65 bp, Rattus norvegicus
ggtagagtctgctggtgccattgtaaaggacgcacctctatgtttgcatggtttcttggttatct

SEQ ID NO: 2621 - DNA, 65 bp, Rattus norvegicus
cctaaggtagaggaacccattcatgccactgcagatccccagaaactgagtgtgtttatcactcc

SEQ ID NO: 2622 - DNA, 65 bp, Rattus norvegicus
taagaaaatggcagacaagccggacatgggggaaatcgccagcttcgataaggccaagctgaaga

SEQ ID NO: 2623 - DNA, 65 bp, Rattus norvegicus
ttgtgagactggacgttccatgaaagcatcatgccccgtgtttgcaccttacttcctgtgagctg

SEQ ID NO: 2624 - DNA, 65 bp, Rattus norvegicus
ctcaccatcaatgctgccgacatcccatcgggttcccataaagtcagtctgtcctcttggtacca

SEQ ID NO: 2625 - DNA, 65 bp, Rattus norvegicus
gcgtgactctgaacattggaaacgccacctaactactaagttgtgtctgatctcgtgtggatctg

SEQ ID NO: 2626 - DNA, 65 bp, Rattus norvegicus
gcctttgactcacaagtgctaacactgaaggagtgcaccgccatgtatggctcatgcagtttatg

SEQ ID NO: 2627 - DNA, 65 bp, Rattus norvegicus
actaacatcctggatcttctttccagctgtctgcttggatctaagggcacctgacctggatggtg

SEQ ID NO: 2628 - DNA, 65 bp, Rattus norvegicus
gacattttaggcggttcctgataggttcttaagtaccctgactgaaaggtcagcatttaacacca

SEQ ID NO: 2629 - DNA, 65 bp, Rattus norvegicus
atttgcttgctcctttggagggaacagtggcctggcttagctgagtgaatggattgcgtgagcct

SEQ ID NO: 2630 - DNA, 65 bp, Rattus norvegicus
gagtactggggtccggaagtgccctgaaacctgaggaacttggaagtttacgagtgaaaactact

SEQ ID NO: 2631 - DNA, 65 bp, Rattus norvegicus
accagctatgcattggagaaatctttcaggggctagacatactgaagaatcaaactgtccgaggg

SEQ ID NO: 2632 - DNA, 65 bp, Rattus norvegicus
gggcttgaccctttaccctatgtgtatgcaaatgttaccttcgtatatctgtccacagtggagtc

SEQ ID NO: 2633 - DNA, 65 bp, Rattus norvegicus
aagaatcaaggaagaatatgaggtgtctgaactgggggcaccccacggatcggcttctgtcagaa

SEQ ID NO: 2634 - DNA, 65 bp, Rattus norvegicus
cctctgtagtatgacatcacttctcttccaagcttcctgctcagatccgtgatccacaccgttct

SEQ ID NO: 2635 - DNA, 65 bp, Rattus norvegicus
ttgacagcttattcatttcagcatctctccagacactgctccttcaccctcactgccacaggtcc

SEQ ID NO: 2636 - DNA, 65 bp, Rattus norvegicus
tgatctgctgggaaaccaagctgcctaacaggaaacggttgagccatttggatcccatgaaccct

SEQ ID NO: 2637 - DNA, 65 bp, Rattus norvegicus
tcactgtgaatcctgctggttggctgctgtgattttctgaaaggagcctgtgaaatagaagcagc

SEQ ID NO: 2638 - DNA, 65 bp, Rattus norvegicus
tgtggatgtgccctgtgtccccgacaactctagcaaagaagccttccaaaggaagaagttgggct

SEQ ID NO: 2639 - DNA, 65 bp, Rattus norvegicus
aagtctgaaaacagtgctgtatctcagcctcagaaaggttaccctctctgccggatatgagagag

SEQ ID NO: 2640 - DNA, 65 bp, Rattus norvegicus
cacctgcacatcactgcacagacctgatttgtgtcccagtggtcttgtccaatggatgaagttga

SEQ ID NO: 2641 - DNA, 65 bp, Rattus norvegicus
tcaagctgctcctttctcggccatggttgcaacggagctacgctgtgtttgcttaaccttagctc

SEQ ID NO: 2642 - DNA, 65 bp, Rattus norvegicus
gcaacatggggacacgtaacaactgtctgctgcctagcatggcgacctttgtcacttccagcaaa

SEQ ID NO: 2643 - DNA, 65 bp, Rattus norvegicus
ggatatgtgtctcccatggagatggtccaccattgtgcttctctgctattgtggatatggctgtg

SEQ ID NO: 2644 - DNA, 65 bp, Rattus norvegicus
acaggaaggtagagagattgagagacagagccacatggagagacgaaatggcagagtagtaggct

SEQ ID NO: 2645 - DNA, 65 bp, Rattus norvegicus
ggtcagtcttttgccctcctgtccttaaagctgtctgggtcttcttacatcattcaactcacctg

SEQ ID NO: 2646 - DNA, 65 bp, Rattus norvegicus
aatcacatgcaaatccagtttggggtcaccatctgaccactgggcagcatcagaagaagttcgcc

SEQ ID NO: 2647 - DNA, 65 bp, Rattus norvegicus
caccctccacttcccgtctcagaatttaaacgtggtcaccttcgagtagagaagcaggcccccgc

SEQ ID NO: 2648 - DNA, 65 bp, Rattus norvegicus
tcataccaggagaaagtcagcctcctctccgccatcaagagcccttgccctaaggacacccctga

SEQ ID NO: 2649 - DNA, 65 bp, Rattus norvegicus
ggtggataacacttttgcagatgagttggtggagctcagcacagccctggagcaccaggaatata

SEQ ID NO: 2650 - DNA, 65 bp, Rattus norvegicus
acgtcgcagtggtgcccatctcaggaaaccggtacttcacagaccgtactgtgtacgtgaattaa

SEQ ID NO: 2651 - DNA, 65 bp, Rattus norvegicus
tctagccatggactcctcctgtgatcatcctccagaggtcgagactgtagacctgtgctaccatg

SEQ ID NO: 2652 - DNA, 65 bp, Rattus norvegicus
caattacagctccagatagacaaggcaaagcacgttgaccgggagttatgagcgggtgttctctc

SEQ ID NO: 2653 - DNA, 65 bp, Rattus norvegicus
tattactgtgaagatgggtaccacctagtgggcacacagaaggtgcagtgcagtgatggagagtg

SEQ ID NO: 2654 - DNA, 65 bp, Rattus norvegicus
accatcgagatccccaaatgcttcaaggagcacagttctctggctttctggaaaacggatgcatc

SEQ ID NO: 2655 - DNA, 65 bp, Rattus norvegicus
aactttagccattgggtccatctctgggcagttcagacaatgaggctgactttgtttacctgcct

SEQ ID NO: 2656 - DNA, 65 bp, Rattus norvegicus
gccctctatcccacaatgtcttaaaggtcctaagcctcattctaccaagcctccagtttacagtg

SEQ ID NO: 2657 - DNA, 65 bp, Rattus norvegicus
ccagtagcccagcacggaattcactcactcaagaagtctaatagccgccatgtacagtgatgtct

SEQ ID NO: 2658 - DNA, 65 bp, Rattus norvegicus
attgcctgttttctacctggagggatgaatggcatgcggagtgacccccagaaacccttctacat

SEQ ID NO: 2659 - DNA, 65 bp, Rattus norvegicus
aagatcgtggctatcaaagggatcgactactggaaggctcacaagcccatgtgctctgagaagct

SEQ ID NO: 2660 - DNA, 65 bp, Rattus norvegicus
ctgatccccaagatgtcgccatgctgcttcccaaactctccaacctcctgttccataaggagatt

SEQ ID NO: 2661 - DNA, 65 bp, Rattus norvegicus
gacgtagtcaccacagattcagggatatcgctttgtgtcgactcctaaggaaggcaggacgatat

SEQ ID NO: 2662 - DNA, 65 bp, Rattus norvegicus
gatttccactgtgccgtcccaactcggatgtcctgtgcccctggagacccaaatcgtagattcta

SEQ ID NO: 2663 - DNA, 65 bp, Rattus norvegicus
ggacccatgaacattcccttggtatcagatcccaagcgcaccattgctcaggattatggagtctt

SEQ ID NO: 2664 - DNA, 65 bp, Rattus norvegicus
taaactgcaggcaactgcacggtggattttctccacatttgccggatttgccagctgctggagta

SEQ ID NO: 2665 - DNA, 65 bp, Rattus norvegicus
gtgtccctggacgtcaaccacttcgctcctgaggagctcacagttaagaccaaggaaggcgtggt

SEQ ID NO: 2666 - DNA, 65 bp, Rattus norvegicus
agcgatggcctatggtctccacaaggttgatgtcttctacgtgttagtcatagacctgggtggag

SEQ ID NO: 2667 - DNA, 65 bp, Rattus norvegicus
agagtcttcgtgtccacggatgacctgctggactgcttagtcaatccacaagtaaccaggatggt

SEQ ID NO: 2668 - DNA, 65 bp, Rattus norvegicus
tgctgaccttcgggtttgtgagagctgacgatgaagtcgatgtggatggcacggtagaagaggac

SEQ ID NO: 2669 - DNA, 65 bp, Rattus norvegicus
ggggattgctctccagctcttctctgccttgtacatagcacacccaggtcctgggaaatgaatac

SEQ ID NO: 2670 - DNA, 65 bp, Rattus norvegicus
gcgtcagaagcaatcaagggtgcagttgttggaattgatttgggtactactaactcctgtgtggc

SEQ ID NO: 2671 - DNA, 65 bp, Rattus norvegicus
ttaccaacgctgtatgatggcacagtacaacagacatgatagccctgaggatgtgaaacggcggg

SEQ ID NO: 2672 - DNA, 65 bp, Rattus norvegicus
caatgcataggaggggctccttggcatatcctgccctagagccattacattggacatcacaatca

SEQ ID NO: 2673 - DNA, 65 bp, Rattus norvegicus
gacagtacaaactgccagatggagtcgaaaccaaagatttgtctgccatcctctgtcatgatgga

SEQ ID NO: 2674 - DNA, 65 bp, Rattus norvegicus
cttcctcagacaactcaggtggtgtttaaggtgatatcccagagaccaggagtttcagtgactcc

SEQ ID NO: 2675 - DNA, 65 bp, Rattus norvegicus
atacgatggagacgacctgggcagcttctatgcacccagagtatggtggatgtttcgtgtgtttg

SEQ ID NO: 2676 - DNA, 65 bp, Rattus norvegicus
catacctctcagtctggagatgagatgacttccctgtcagagtatgtgtctcgcatgaaggagac

SEQ ID NO: 2677 - DNA, 65 bp, Rattus norvegicus
taaggaggaaccaaaacatgctgagcagaatggaccagtggatggccaaggagacaacccaggca

SEQ ID NO: 2678 - DNA, 65 bp, Rattus norvegicus
ctgtccaggcagccattctatctggagacaagtctgagaatgttcaggatttgctgctcttggat

SEQ ID NO: 2679 - DNA, 65 bp, Rattus norvegicus
tttctggctctcagggtgttggctagagacagactcttgatggctgctggtgcacgattcttatc

SEQ ID NO: 2680 - DNA, 65 bp, Rattus norvegicus
caaatgtcagagatcacagacgactgtctctctcttcaggatcgcttccacctcagcgagattca

SEQ ID NO: 2681 - DNA, 65 bp, Rattus norvegicus
gtgtcagggaagcacgaagagaagcagcaagaaggtgggattgtctccaagaacttcaccaagaa

SEQ ID NO: 2682 - DNA, 65 bp, Rattus norvegicus
cacagtgtcaatcttctgctgcctcactgcagacttccgtaacacacatgaatgtagcaagacac

SEQ ID NO: 2683 - DNA, 65 bp, Rattus norvegicus
tgctagtgtgttgctcacttcatgtgtaacaggtgccctcatgttgtgctgtatcctgtgctttt

SEQ ID NO: 2684 - DNA, 65 bp, Rattus norvegicus
gtggggagatccaaccaccagcaggagagagcagaatccatcattaaggacacctcatgactaaa

SEQ ID NO: 2685 - DNA, 65 bp, Rattus norvegicus
gtgccgtcattgaagacgtgtaaaggggaagtcagaacattgctgagcatcttttctgtacatag

SEQ ID NO: 2686 - DNA, 65 bp, Rattus norvegicus
ggcttcgagtacatgaatagggaacttctctggcatggctttgccgaatttctggttttcctctt

SEQ ID NO: 2687 - DNA, 65 bp, Rattus norvegicus
aaatttgttcaagctgtcattccaacaatagaatatgactacacaagacacttcacaatgtagtg

SEQ ID NO: 2688 - DNA, 65 bp, Rattus norvegicus
taggcttctacacgtgaccaagagcaaagatagaggaggttccaagggattcgcttagcactccc

SEQ ID NO: 2689 - DNA, 65 bp, Rattus norvegicus; identical to SEQ ID NO: 1

SEQ ID NO: 2690 - DNA, 65 bp, Rattus norvegicus
gaagtttgatgaggcactcagggaaagctggaccactaaggtgaactggatggctcatacagttc

SEQ ID NO: 2691 - DNA, 65 bp, Rattus norvegicus
gcatccgctccactttgcactaaacatctctgcaagctcacagttatgggatcttacagacctct

SEQ ID NO: 2692 - DNA, 65 bp, Rattus norvegicus
gtacttgatggttgagtttcgctgtgtcaaatgcgatgacaaggaatatggtattgtctactatg

SEQ ID NO: 2693 - DNA, 65 bp, Rattus norvegicus
gaccagatagatgatctcacagtttgtcacctgtgtaacaggcaaacccagaggatgcctccaag

SEQ ID NO: 2694 - DNA, 65 bp, Rattus norvegicus
ctaaacagggatgacatcggcatcattctcatcaaccagtacatcgcagagatggttcggcacgc

SEQ ID NO: 2695 - DNA, 65 bp, Rattus norvegicus
gtagtaaatactcactccccaagctttatggagctttccagcaatagccatgaacttgaggtccc

SEQ ID NO: 2696 - DNA, 65 bp, Rattus norvegicus
tatcagaagtggtttgcgaaggcatgatgtcatggatgtaataacctgtgtgctctggagacagg

SEQ ID NO: 2697 - DNA, 65 bp, Rattus norvegicus
aatacatcagcagggactatgtcctcaagcagatccgcagcttggtgcaggccaatccagaagtt

SEQ ID NO: 2698 - DNA, 65 bp, Rattus norvegicus
gaccgtcggtccctgcgtgccgccagcctgagttctttttggaggcggatatctgctgagacaat

SEQ ID NO: 2699 - DNA, 65 bp, Rattus norvegicus
ccagcctgagggcaactattggaagtaagaagtaagaaggtgagaggaagctaagatttcagagg

SEQ ID NO: 2700 - DNA, 65 bp, Rattus norvegicus
tacaagtgacacactccaggatgttcctgtgtccatttgatcccaaaaggagatagccatcacta

SEQ ID NO: 2701 - DNA, 65 bp, Rattus norvegicus
gctcttcgacaggctcaggaggagaaacataaacttcaaatgtctgtacctggaatccttaaccc

SEQ ID NO: 2702 - DNA, 65 bp, Rattus norvegicus
caattaccgatcccacttgtaatgcggcaatgagctctagcctggtggtcttcaaactacaccag

SEQ ID NO: 2703 - DNA, 65 bp, Rattus norvegicus
gcatttgatggtgtagacagactgaagtgactttcacactggtgacagtttcgtgcgggtttgtg

SEQ ID NO: 2704 - DNA, 65 bp, Rattus norvegicus
acacaagctcacagtcctgcttgactgctggcttcccaaagaagttgacattggtcttgctggga

SEQ ID NO: 2705 - DNA, 65 bp, Rattus norvegicus
gacggggtcatctcacagtgggtcaggacacatcagtgtcgtgtaatcccaatgagtgttatgtg

SEQ ID NO: 2706 - DNA, 65 bp, Rattus norvegicus
acatgaagtgcccacagctcagctgcctaggcacctcctccggtttcctatcactctgctcctga

SEQ ID NO: 2707 - DNA, 65 bp, Rattus norvegicus
ggaggaaagccaatgcctgcctgttgaggtcctcagatttatgcagttcaaagtgcattagcctt

SEQ ID NO: 2708 - DNA, 65 bp, Rattus norvegicus
aaatcctgaaaaccatcagtttcctgcaaagccgttgagagagtcacagagccacctccttacgg

SEQ ID NO: 2709 - DNA, 65 bp, Rattus norvegicus
gagagtggggctaagtacctttacctggaccgaatctgtttaagtctgagactgtcgatgccact

SEQ ID NO: 2710 - DNA, 65 bp, Rattus norvegicus
ggctttcctcatcaatggatagtggcaaatccaaagataacagagatagtctgcgggcatctgcc

SEQ ID NO: 2711 - DNA, 65 bp, Rattus norvegicus
agccaatcaggaactgcagcacctcttctaccagtggaagtgcaagaagtaccgagatcagctgt

SEQ ID NO: 2712 - DNA, 65 bp, Rattus norvegicus
acagaagcatgaagtgtgaatacagtgggtctggagccacctctgacatgggtatggtggtccaa

SEQ ID NO: 2713 - DNA, 65 bp, Rattus norvegicus
aatccatggggcacaactgcagtagttctgatctttgggcgaaagccgagaactcctgactatta

SEQ ID NO: 2714 - DNA, 65 bp, Rattus norvegicus
tgctctcagcaggactttctaaagccacctgatcccttgggctctttggaaggttctgggtgcct

SEQ ID NO: 2715 - DNA, 65 bp, Rattus norvegicus
agggtgtgctgtccactgaagtccactttcgattgcttccgtgcaataaaaccaagtgcttctga

SEQ ID NO: 2716 - DNA, 65 bp, Rattus norvegicus
atgcagagtatctgtttgcttgcagagtggctttctggcttgctgccaacctgtgcatggtccat

SEQ ID NO: 2717 - DNA, 65 bp, Rattus norvegicus
atgcatgttcatgtatgtacctagggaatttgccagtttcctaagctgttgaaagaggggcactc

SEQ ID NO: 2718 - DNA, 65 bp, Rattus norvegicus
agagtttgggcaaaccagaccagaaagatctgaatgaaaacctagccgccactcaagggttggcc

SEQ ID NO: 2719 - DNA, 65 bp, Rattus norvegicus
ggcttcattgcaagggtctgaagggctacccaagcaaatgtagagaacgcatttctcctcaaaac

SEQ ID NO: 2720 - DNA, 65 bp, Rattus norvegicus
gctacagaaccaactacgtcattcaatctttttgttggaaacctgaacttcagcaaatctgctcc

SEQ ID NO: 2721 - DNA, 65 bp, Rattus norvegicus
ccttgccagtggattgtgtagagtgtacagccagtctcttgtcttctgtccaacatggcatcttc

SEQ ID NO: 2722 - DNA, 65 bp, Rattus norvegicus
gatgtctctaaggctttcacacacctcactcagcctccattgccaggactctgcctcaacagagt

SEQ ID NO: 2723 - DNA, 65 bp, Rattus norvegicus
tgcgctcactgaccatggttgaggacaatgacgatgaggaagaggatggagatgagctgctccat

SEQ ID NO: 2724 - DNA, 65 bp, Rattus norvegicus
acgaagagatcgatgagatgatcaaagaggctccaggtccaattaacttcactgtgttcctcacc

SEQ ID NO: 2725 - DNA, 65 bp, Rattus norvegicus
acatgcaacaaatggagagacaacgagaagaccaggagcagctacaagaggagatcaagaggctc

SEQ ID NO: 2726 - DNA, 65 bp, Rattus norvegicus
gctgaggccagcgttatctgtctcgattgtacattccagttccagttggtatacttgtcaacttt

SEQ ID NO: 2727 - DNA, 65 bp, Rattus norvegicus
ggcattgaactgaactaggagttacagagctaccctttgatttcaccttttaggatggagctatg

SEQ ID NO: 2728 - DNA, 65 bp, Rattus norvegicus
catcttttcccaggatgcattctgttcctttagcagaggtagctaacctttcgaagttatgacag

SEQ ID NO: 2729 - DNA, 65 bp, Rattus norvegicus
acattgccacaagggaccaaggtagtaaatgaggagaacgtccctaagtcatcctcccctcagct

SEQ ID NO: 2730 - DNA, 65 bp, Rattus norvegicus
ttcttcgaaagaaccccaactacaatctttgaaaaatggctgacactagagaccctggctgcagc

SEQ ID NO: 2731 - DNA, 65 bp, Rattus norvegicus
actaggccaggtgtgactggggctctcttagtggccctcttagtggatgtgttggcaaccttaat

SEQ ID NO: 2732 - DNA, 65 bp, Rattus norvegicus
tatcaatgggacagatgatgagagaacacccgatgtgacacagaactcagagccaagggctgagc

SEQ ID NO: 2733 - DNA, 65 bp, Rattus norvegicus
caagtgcctttactgcagttttcaggagcgcaagatagatctgggatagaaacgagctcagcaca

SEQ ID NO: 2734 - DNA, 65 bp, Rattus norvegicus
gccactgacaaccaggcaatcaaagctcttctccagtgatggatggatggactgataacttggga

SEQ ID NO: 2735 - DNA, 65 bp, Rattus norvegicus
ccgagcttcgacattattggtgacagcttgtcattcgacttcaaggacacggacatgaagcgact

SEQ ID NO: 2736 - DNA, 65 bp, Rattus norvegicus
ttcagttcctcggcagtgtcatggcaagccttcaaagtgggcctagcacacggaacaacagtttt

SEQ ID NO: 2737 - DNA, 65 bp, Rattus norvegicus
gggcttatcagccagaccatcagacagcagcaaagggacttcatagagacacagatggagaacta

SEQ ID NO: 2738 - DNA, 65 bp, Rattus norvegicus
acagccctatcgggatcagctccacctctttcccaaccccatacacaagttcaagcagttgctaa

SEQ ID NO: 2739 - DNA, 65 bp, Rattus norvegicus
atccatcaggcgcagaagctccggactgtgaagattgaacaagggaaggtgaatgatcaggccaa

SEQ ID NO: 2740 - DNA, 65 bp, Rattus norvegicus
taacgaatgtagagacaagcacaaccaatggtcagcctgaccaacaggctgcaccgaaagcacca

SEQ ID NO: 2741 - DNA, 65 bp, Rattus norvegicus
ccacccaaggaccatttcgagatggtctttctcagctaattgcatcatttaccaatcctactcca

SEQ ID NO: 2742 - DNA, 65 bp, Rattus norvegicus
ttctagccatgggaagcagctaagtgttctgtgtctttgcacctgcaccactggtggcagaagaa

SEQ ID NO: 2743 - DNA, 65 bp, Rattus norvegicus
agaattcagccgaggtgtgactgacctggatgctattgggaaggacggaggctcccacatagaca

SEQ ID NO: 2744 - DNA, 65 bp, Rattus norvegicus
aagaaatttgctgtggaggtgcacgacccccgaaggatttcagtgtccagaagaacctttggaca

SEQ ID NO: 2745 - DNA, 65 bp, Rattus norvegicus
tagaaaccacaaagccaggctaaggaaatccaccagtcctagcactgacctctgcttctcgtgga

SEQ ID NO: 2746 - DNA, 65 bp, Rattus norvegicus
taaagcaggcagcagctcagaagtcccagcagctttcagcactgcaggaagagaacgtcaaactt

SEQ ID NO: 2747 - DNA, 65 bp, Rattus norvegicus
gacatctcaagctgagagtcagagaacgaggaggagacgagtccagtgctagatggagatagata

SEQ ID NO: 2748 - DNA, 65 bp, Rattus norvegicus
cgtgccaacctgcaaacgaaagaacaacaggcttcttgaagtcgctgtcccttaagtgaggcctc

SEQ ID NO: 2749 - DNA, 65 bp, Rattus norvegicus
gagatatggtgtgtaagatacacgcttccagacggaactgtacgtgccacagtttgcactactcg

SEQ ID NO: 2750 - DNA, 65 bp, Rattus norvegicus
gatgtgggttcaaagagtcaggatgtcagccatagcttagaagacatcatggagaagctccgcca

SEQ ID NO: 2751 - DNA, 65 bp, Rattus norvegicus
cctgtggcctgtgagtttccttctagagttctactcttctccacctctttgctcatacagagctg

SEQ ID NO: 2752 - DNA, 65 bp, Rattus norvegicus
cgtttctgggttttcttaggtttgctatgcaacaggatcagtgctgtagtccccggttcaagctg

SEQ ID NO: 2753 - DNA, 65 bp, Rattus norvegicus
gagcaaaactggcctagcatcagacctagaactttgtgtgtgctactgacattcacagggtgatt

SEQ ID NO: 2754 - DNA, 65 bp, Rattus norvegicus
ctggcttggacctcccatggcagtggggttactatggtcaccactacacataggccatcatcaaa

SEQ ID NO: 2755 - DNA, 65 bp, Rattus norvegicus
aaggtggtgaagtaccccttacacgccatcatggagatcaaagagtacctgattgacgtggcctc

SEQ ID NO: 2756 - DNA, 65 bp, Rattus norvegicus
tttctagacaggcagcctcctctactgtggagtccagaatgacactcttgtgttttccccagtcc

SEQ ID NO: 2757 - DNA, 65 bp, Rattus norvegicus
acttctgacaccacctgaagttaaggacagctgaaggcttacaagcccgtgctgcagaacaagca

SEQ ID NO: 2758 - DNA, 65 bp, Rattus norvegicus
caccaaaaatcccagaaaacctttgcaaacatttgcacattatatacatagtgcctgtaaaactc

SEQ ID NO: 2759 - DNA, 65 bp, Rattus norvegicus
gggtctcaaggaaaacatccgagtgagaagggctggttatgcttatcggcgtgtcttccagaaat

SEQ ID NO: 2760 - DNA, 65 bp, Rattus norvegicus
atgcaacccgaaatgtgtaccgcatcatcagcatcggaggcgccaaggccatcatcaacagcaca

SEQ ID NO: 2761 - DNA, 65 bp, Rattus norvegicus
aggtcatccagtacctggcccatgtggcatcatctccaaagggcaggaaggaacctggtgtccct

SEQ ID NO: 2762 - DNA, 65 bp, Rattus norvegicus
tcctgaagtactggcaggtggaccagctcggtgacctgtggctccagatgcaaaggaagattgta

SEQ ID NO: 2763 - DNA, 65 bp, Rattus norvegicus
tatagaacacaacttcccagtgacccaaactaggtgcagatgggtgggcagtatgcaaaatcatc

SEQ ID NO: 2764 - DNA, 65 bp, Rattus norvegicus
ataggagccagagtgtatgctctccctgaagaccttgtggaagtaaaaccgaagatggtcatgac

SEQ ID NO: 2765 - DNA, 65 bp, Rattus norvegicus
ccatagcctgcttagcttggggtaagacttagtagaaaatggtgcttcagtaaaccgcttacttc

SEQ ID NO: 2766 - DNA, 65 bp, Rattus norvegicus
aataaactgcgggctaaaacccgggacttcacctctagccggatggtggtccatgaaagtgagga

SEQ ID NO: 2767 - DNA, 65 bp, Rattus norvegicus
tatgtttctcgtggtgcagtacctgacatgagccagctgtacccagcactggacagccttcccat

SEQ ID NO: 2768 - DNA, 65 bp, Rattus norvegicus
ggagcagttcatcgtgagccatctgaccaggacccatgatgtcttgaagaaagcacggactaatt

SEQ ID NO: 2769 - DNA, 65 bp, Rattus norvegicus
gaaggactttccagtaaggaaatggcaacatgtgacagtgaggaccctgttctcatctgtggggc

SEQ ID NO: 2770 - DNA, 65 bp, Rattus norvegicus
gactagttcccaataaggaacgagggtggtagctcagagtgtctggaaagaagcctgagttggga

SEQ ID NO: 2771 - DNA, 65 bp, Rattus norvegicus
ctgggcctgacacagaatgaaacagggctgcttttagggactacaagagagacgaaaagagtcct

SEQ ID NO: 2772 - DNA, 65 bp, Rattus norvegicus
aacttgatgcagggtttgccctgtctctgctcactcccaccaagctgtagaactgtctgtcctgt

SEQ ID NO: 2773 - DNA, 65 bp, Rattus norvegicus
gggaattctgaagttctgaacactgaggaggggaaccaaagccacttagggcgcagaaaatgtct

SEQ ID NO: 2774 - DNA, 65 bp, Rattus norvegicus
ctgctgtccatgggtacttgttcgcttcctgaagcatctcttggtgtctgttttgcttagagagc

SEQ ID NO: 2775 - DNA, 65 bp, Rattus norvegicus
gctaagggccataaaatgcactaccccatggtagagtactgcactccgactacatctggagaaga

SEQ ID NO: 2776 - DNA, 65 bp, Rattus norvegicus
ctcccgatgagaagaagcaaatggttgccaacgtggagaaacagctcgaagaggccagagaactg

SEQ ID NO: 2777 - DNA, 65 bp, Rattus norvegicus
agctggccatgcccgttctcctgatctcttcttgcgctctcctctcttcaacactcccctgcgta

SEQ ID NO: 2778 - DNA, 65 bp, Rattus norvegicus
cagcaatttcatcagcacgtctgtctgttaaggagcattactggggatgtgatagggactttgga

SEQ ID NO: 2779 - DNA, 65 bp, Rattus norvegicus
cggacctagcatttgtcgtcacaatccagtgtttggagtcatgtcctaaagttgacttcttgttc

SEQ ID NO: 2780 - DNA, 65 bp, Rattus norvegicus
aacaagatgctgctgttgggaccttgagaccaagatttcagagcccatgagatccagagagcagg

SEQ ID NO: 2781 - DNA, 65 bp, Rattus norvegicus
gccacaagggctacgtggcctttcttgagagtctggaactctactaccctcagttatacaggaaa

SEQ ID NO: 2782 - DNA, 65 bp, Rattus norvegicus
cgcgtctgtgtacgcgctctctctcctcaggacgacaatcgaccatcgtgctatggttgcagggt

SEQ ID NO: 2783 - DNA, 65 bp, Rattus norvegicus
cagtcggagagacgagccattcgctgaaagacagcattgattcacccaaaggcagaaagcagaat

SEQ ID NO: 2784 - DNA, 65 bp, Rattus norvegicus
ggcagtttaaaacattagagtctgaatcctggacagattcaaaccttgacacactgtgggatttt

SEQ ID NO: 2785 - DNA, 65 bp, Rattus norvegicus; identical to SEQ ID NO: 1

SEQ ID NO: 2786 - DNA, 65 bp, Rattus norvegicus
atttcccagatccagggagagatggaggacatcgtccaggaagcccgcaatgcagaagagaaggc

SEQ ID NO: 2787 - DNA, 65 bp, Rattus norvegicus
cattaagggtaagaccaaagtctcttatccactagctgattgatttccaccgtgggttggggagt

SEQ ID NO: 2788 - DNA, 65 bp, Rattus norvegicus
tcttcgggacacctttgcggccatgggccgtctcaatgtgaagaatgaggaactcgacgccatga

SEQ ID NO: 2789 - DNA, 65 bp, Rattus norvegicus
tctctgcgtacccagcttatggctagaagctgttggattcagtggctcctcacatagaggccctg

SEQ ID NO: 2790 - DNA, 65 bp, Rattus norvegicus
cgtcttctgctaaactgcttcccagcctgttggcatgacaaatctggaggtctttgttgagtaga

SEQ ID NO: 2791 - DNA, 65 bp, Rattus norvegicus
agtagcagtctgagtcccctggtaacaaccccactcttatgttttgctgagaaacagcttagagc

SEQ ID NO: 2792 - DNA, 65 bp, Rattus norvegicus
cacttatgagcgccttttccgatggattctcagccgtgtgaacaaagccttggataagacccatc

SEQ ID NO: 2793 - DNA, 65 bp, Rattus norvegicus
agaatgtgaccctcaagactccattgaaagaaggcaacccgaactgctgctgagtcagactgcag

SEQ ID NO: 2794 - DNA, 65 bp, Rattus norvegicus
acccacatcttgcccttctgttgtaaatacccctcacggaggaaatagttttgctaagaaataaa

SEQ ID NO: 2795 - DNA, 65 bp, Rattus norvegicus
gcgcgtggtttgtgagaacacggccattgtgatgtttgatcactctcgcttttatggataggtag

SEQ ID NO: 2796 - DNA, 65 bp, Rattus norvegicus
aatgacccagttctgtgaggctgaattctctgtcaagacccgaccccacctgtgctgcaaacagc

SEQ ID NO: 2797 - DNA, 65 bp, Rattus norvegicus
tgaagtgaggacgattgttgcagtggcactttcaggttaaaccaagacacgtcagaacggacggc

SEQ ID NO: 2798 - DNA, 65 bp, Rattus norvegicus
ttaagacggtcgtggaggaagtggtagacggcaaggtcgtgtcctctgaagtcaaggagatagaa

SEQ ID NO: 2799 - DNA, 65 bp, Rattus norvegicus
acatcagagcagtgtaacaaccgtggttgctgttttgactccagcatcccaaatgtgccctggtg

SEQ ID NO: 2800 - DNA, 65 bp, Rattus norvegicus
gagtaccagccctaaacctctggccaaccttgggaggaatttcctatctgggatatgccaatgcc

SEQ ID NO: 2801 - DNA, 65 bp, Rattus norvegicus
tttcttatggccatcaagacctcccacagtccagtgtgccaggatgtgctcaaattcatcagcca

SEQ ID NO: 2802 - DNA, 65 bp, Rattus norvegicus
ggaccaacatgctctactatacccgaggattccagcagatgggcatctatgctgtcatgattgag

SEQ ID NO: 2803 - DNA, 65 bp, Rattus norvegicus
gagggagcagctgcatgtgagctggaaaactcggatttggaaagcgttaagtgcgatttggagaa

SEQ ID NO: 2804 - DNA, 65 bp, Rattus norvegicus
aaaagaacccaacctctaaaccggggaagaacagtgcctcagaggaagaccatctgccccttcag

SEQ ID NO: 2805 - DNA, 65 bp, Rattus norvegicus
tgctagagtatctcaatcaagaacaggcagagcagggaagggaacatcttgccaaacgggccatg

SEQ ID NO: 2806 - DNA, 65 bp, Rattus norvegicus
gagtgacaccaccacctacaagaacctgcagcatcatgagtacaacgcattcaccttcctagacc

SEQ ID NO: 2807 - DNA, 65 bp, Rattus norvegicus
cagatggcatttcaggaggcagaagtctagaagaggtggtgttgtcaaagcacagcaggtcttct

SEQ ID NO: 2808 - DNA, 65 bp, Rattus norvegicus
agtctcgactggacaacgtgatgaagaaacttgcaaaagtgtctcacatgaccagtgatcggcgc

SEQ ID NO: 2809 - DNA, 65 bp, Rattus norvegicus
aaaactcctgtccactgaacaataactctctactattccttctcgttagtcctcaataaccatta

SEQ ID NO: 2810 - DNA, 65 bp, Rattus norvegicus
tgaagcaaaaggacaagaagctaaaggaggtcctactgcaggtggaggatgagcgcaagatggtg

SEQ ID NO: 2811 - DNA, 65 bp, Rattus norvegicus
aagagtaaccgggacagcctagccagaaccgacgccactcgcaaacgacctgtctcacgctctct

SEQ ID NO: 2812 - DNA, 65 bp, Rattus norvegicus
aggctcttcaccaaggtcaagcccctgctgaactcaataaggcatgaggatgagcttttagccaa

SEQ ID NO: 2813 - DNA, 65 bp, Rattus norvegicus
acaaactagtccgtcggacagagaagaaactgaaagagatcttcatgcaggtcgaagacgagcgc

SEQ ID NO: 2814 - DNA, 65 bp, Rattus norvegicus
tcagttccttggaaacgtcagcctctgccatggagatgcagatcaaccaaatcaaggtgacctgc

SEQ ID NO: 2815 - DNA, 65 bp, Rattus norvegicus
agccgagtcccagcagcagtgggatacttcaaaaggagaacaagtttcccaaaacggtttgccag

SEQ ID NO: 2816 - DNA, 65 bp, Rattus norvegicus
tatcctacacaaccagttgaacagaggccactgcagcagatgcctcctcaactcatgcagcatgt

SEQ ID NO: 2817 - DNA, 65 bp, Rattus norvegicus
gctggatctggcctggtgacacagttcaacctctcagacttttaaccctcaaattcggcctgatt

SEQ ID NO: 2818 - DNA, 65 bp, Rattus norvegicus
agaattgacgctttagtggcccaactgcagagccagtatatcgctctttccagcacaatcgggca

SEQ ID NO: 2819 - DNA, 65 bp, Rattus norvegicus
cgggtgggataaggtctgtgtgcgtctgttcattgtcatcttttgatcatcatgaccaacgaaac

SEQ ID NO: 2820 - DNA, 65 bp, Rattus norvegicus
gattgggtgccagaaaagtgctgtttccttgcctgcttcctccagcgtggactctggaacataat

SEQ ID NO: 2821 - DNA, 65 bp, Rattus norvegicus
tctgtacatagcatccctgccctgctgatacgcaggagcctcaaggagtccctcccagctcttca

SEQ ID NO: 2822 - DNA, 65 bp, Rattus norvegicus
gtgtcgatctctggggtttcttaaactctcttgagcctcagcagtggctggacacagtgtctttc

SEQ ID NO: 2823 - DNA, 65 bp, Rattus norvegicus
gtgcacagctggacgcagagagcagcgttcttaaagatgagaagaaagcccttgaagacatgttg

SEQ ID NO: 2824 - DNA, 65 bp, Rattus norvegicus
aaccacatcccggctccagtggacacaaagagagtgtgacagaggatctgcctggaaccacctgg

SEQ ID NO: 2825 - DNA, 65 bp, Rattus norvegicus
gaagaaagtagaggaggtggtctatgacctttccatccgaggcttcaataaggagacagcagcgg

SEQ ID NO: 2826 - DNA, 65 bp, Rattus norvegicus
gcctaactaacactgtgctggagccactaactagaaaagccttggagccataccaaacattcagt

SEQ ID NO: 2827 - DNA, 65 bp, Rattus norvegicus
tgataatgagacgtccttgcgtcagttagtggaaagtgacatcaacaaccttcgctgtgtgctgg

SEQ ID NO: 2828 - DNA, 65 bp, Rattus norvegicus
tggagaagcccagccagtcgccatcaggaacctcgagaagctgctccagctatgtgtgaagagga

SEQ ID NO: 2829 - DNA, 65 bp, Rattus norvegicus
ggctccagctcagggagccagcaggcctctgttgaaggttctgatggctatgattctgttgttaa

SEQ ID NO: 2830 - DNA, 65 bp, Rattus norvegicus
aatggtacctggacatgtggcccaatggtctcattgcatgcgcctcagttggcctccctgagcat

SEQ ID NO: 2831 - DNA, 65 bp, Rattus norvegicus
tgagctgtacagggaggcccccatcgacaaaaaggggaatttcaactacatcgagttcacgcgca

SEQ ID NO: 2832 - DNA, 65 bp, Rattus norvegicus
ctcactgctcccacacagacatccttacacaaccagcgatgcgtaaccttgaaaatgcctcatct

SEQ ID NO: 2833 - DNA, 65 bp, Rattus norvegicus
cactggatgtgttttccctgactcaaacaggacaaggaatgtagctgaaagactgactgggctgg

SEQ ID NO: 2834 - DNA, 65 bp, Rattus norvegicus
tcgtgcctctgctctctcaactttccatactccctgctcaggaaaccaaagaccctcttcagcct

SEQ ID NO: 2835 - DNA, 65 bp, Rattus norvegicus
aaccttccagagattgtgggagctgtccacagggtcacagctgaaggcaggacagaatgggaagt

SEQ ID NO: 2836 - DNA, 65 bp, Rattus norvegicus
gtttgtgtgctggaacactgcacttctggcaaaagtggcctctttgaagtttgctagggatgggc

SEQ ID NO: 2837 - DNA, 65 bp, Rattus norvegicus
aagctggaggaaatccagagggcgaaagaacagtcggagaagctgcggacactaggatacgacga

SEQ ID NO: 2838 - DNA, 65 bp, Rattus norvegicus
ctccgtccagctgcacctctgtggtgcctcattccagccgtggtccaaattctctgtgaaaagat

SEQ ID NO: 2839 - DNA, 65 bp, Rattus norvegicus
tccagcaggcagccctgataaaggcaaacacggcaagcaacgaacggaatacatgaggatccagg

SEQ ID NO: 2840 - DNA, 65 bp, Rattus norvegicus
actagttaccacttcttttcttgccagtctaacagggtgggaaagtccgagccttaggacccagt

SEQ ID NO: 2841 - DNA, 65 bp, Rattus norvegicus
tcgacagagagtattcagacgtatgaagaaacttctgtaattgtggagacggtgattgggaagac

SEQ ID NO: 2842 - DNA, 65 bp, Rattus norvegicus
cttcattctctgtgcctctgagcaagtttctctccagcatgaacacagccaagctgatcctggaa

SEQ ID NO: 2843 - DNA, 65 bp, Rattus norvegicus
gaggaagcaagaaactaatcgtcttggcaacaaaacaaagagaatgaaagcacacaaacataacc

SEQ ID NO: 2844 - DNA, 65 bp, Rattus norvegicus
tgtctctagcacacaactgtgaatgttttgtggatcagcgccttcagttcttttccaaatcattc

SEQ ID NO: 2845 - DNA, 65 bp, Rattus norvegicus
aactctcagaaagtcatccaagagctcaacacggagatagcccgccagaaagactccatcatgat

SEQ ID NO: 2846 - DNA, 65 bp, Rattus norvegicus
gcatatggttctttctatccacacagtgatagtgagtgtaaaatctgcttacttcactactgagc

SEQ ID NO: 2847 - DNA, 65 bp, Rattus norvegicus
gtaaaacgcacacttcaacttcctgtcagttcttcactgagagcagtcagactctagccccgaag

SEQ ID NO: 2848 - DNA, 65 bp, Rattus norvegicus
cctgaatctctgggacgagtggccaaggcatttctaggcttactgcaagtatcagatgacgacat

SEQ ID NO: 2849 - DNA, 65 bp, Rattus norvegicus
aagttcactctgagtggggtagatggggattcctggtcctcaggggaagactagaaactgcccct

SEQ ID NO: 2850 - DNA, 65 bp, Rattus norvegicus
cagagtctcagaaggagcagcacagtgaactggacaagtcttctattcacagctactgaggcctc

SEQ ID NO: 2851 - DNA, 65 bp, Rattus norvegicus
taaggtcgtggatggcaaagtggtgtccgagaccaatgataccagagttctgaggcactaaggct

SEQ ID NO: 2852 - DNA, 65 bp, Rattus norvegicus
tgcagatgacttgcggaccaagtttgagacagaacaggccctgcgcatgagtgtggaggctgata

SEQ ID NO: 2853 - DNA, 65 bp, Rattus norvegicus
aagcgtgaggccctggagaagaccatgaggaacaagatggacagtgaaatgagacggttacagga

SEQ ID NO: 2854 - DNA, 65 bp, Rattus norvegicus
aggaagtggtcctggatgagaaatgctgtgtcaggcacttatgagctctgcccttaccttgtgtg

SEQ ID NO: 2855 - DNA, 65 bp, Rattus norvegicus
gccattatgtgaacttgtcaagacgtcaccgttcttcctggagctagaagcacggagtcctgtat

SEQ ID NO: 2856 - DNA, 65 bp, Rattus norvegicus
atgcagagacctatgtggatggtcagcgcatctcagagaccacaatgctacagagtggcatgaga

SEQ ID NO: 2857 - DNA, 65 bp, Rattus norvegicus
tgctctcccaggctctccgaagcagccatgctgtgccttaggtcaacactgactgcactgacaat

SEQ ID NO: 2858 - DNA, 65 bp, Rattus norvegicus
tggactcctcacagcaccaggctctacatccaaagatggcctcactttcagccacgagattggat

SEQ ID NO: 2859 - DNA, 65 bp, Rattus norvegicus
cggtggcatgagcatctgggatgtgaagagcttggagtcagccttgaaggacctgaagatcagat

SEQ ID NO: 2860 - DNA, 65 bp, Rattus norvegicus
ttgggaacagccgtggagatggagatcgcccagatgctggaggagaactcaaggatcctcaagtt

SEQ ID NO: 2861 - DNA, 65 bp, Rattus norvegicus
gcgtgaactcttgtggttcagttctttgtgcactaaggtttagggtaactagtgactgtagttgg

SEQ ID NO: 2862 - DNA, 65 bp, Rattus norvegicus
gtctcaagccaaagtgctttctgggaagtcagtgcttagatagtgctgagaagctcttggactag

SEQ ID NO: 2863 - DNA, 65 bp, Rattus norvegicus
caacgccagaagaagtgaagaaacgcaagaaggcagtgctcttttgcctgagtgaggacaagaag

SEQ ID NO: 2864 - DNA, 65 bp, Rattus norvegicus
attgacaaggataaacgcttggtggtgctggatgaggagctcgagggtgtctctccagatgaact

SEQ ID NO: 2865 - DNA, 65 bp, Rattus norvegicus
ctggttcagctggcttccccaatttctgctccctgggagatcagtgttgtgagtgcatgtgaaat

SEQ ID NO: 2866 - DNA, 65 bp, Rattus norvegicus
actggctcctcattgacaccactaggccctacagcaatgaacatggtaggcagtatgggtattcc

SEQ ID NO: 2867 - DNA, 65 bp, Rattus norvegicus
tgttctttctgatcggagctgtttaagagtcacagcaggtcccacctcactggatcttgacgtca

SEQ ID NO: 2868 - DNA, 65 bp, Rattus norvegicus
cagatggccccaacatcagtgccaagactgagctgaccctccagtgttgtccaaggaaatgtaga

SEQ ID NO: 2869 - DNA, 65 bp, Rattus norvegicus
ggggtgggattttccagtcagggccatttagacacgggaatcgctgaggctttcagtcgatgggg

SEQ ID NO: 2870 - DNA, 65 bp, Rattus norvegicus
ggcacatagctgctaacatgcagagcagaatcaaagacgaaacagtaaagagcacacctaattaa

SEQ ID NO: 2871 - DNA, 65 bp, Rattus norvegicus
gaggaacaggttgtggaagaccacagggcagtgttccaggaatccattcgctggatagaagatga

SEQ ID NO: 2872 - DNA, 65 bp, Rattus norvegicus
gacagtgcttcctttacccgtccaagttcacagtttccatcttcttgtctgatggtgagcagccc

SEQ ID NO: 2873 - DNA, 65 bp, Rattus norvegicus
gcccggatgattaaggagtttcgggttactatggactgtaatcctctcactgtgacagaccctat

SEQ ID NO: 2874 - DNA, 65 bp, Rattus norvegicus
gggattcactggagaagggctgggtcttgggggtcttgtccttgctatttgtcctgttacacatt

SEQ ID NO: 2875 - DNA, 65 bp, Rattus norvegicus
aaaaccagaagatggtgttggaacaggagcggctaagggtggagcatgagaggctaaaggctgta

SEQ ID NO: 2876 - DNA, 65 bp, Rattus norvegicus
agccccgctttcccttcaagagcaatgctaagcacagaaactcttggagtcctgggacacatatt

SEQ ID NO: 2877 - DNA, 65 bp, Rattus norvegicus
ggagaatggcagctgaaatgtgtggcctacacaggaaataacatgaggaaacaaactccagtccc

SEQ ID NO: 2878 - DNA, 65 bp, Rattus norvegicus
ttccaactaaagcaagcctctgcttcctgctacctgcatggagcccactgtgacactcagaccat

SEQ ID NO: 2879 - DNA, 65 bp, Rattus norvegicus
gcaatcagaacacttgcttcactagattttgccaactgcaaatcatgttggactgagctaatctg

SEQ ID NO: 2880 - DNA, 65 bp, Rattus norvegicus
cgaagatggcagtgaatgtgtactcgacgtcagtcaccagtgataacctcagtcgacatgacatg

SEQ ID NO: 2881 - DNA, 65 bp, Rattus norvegicus; identical to SEQ ID NO: 1

SEQ ID NO: 2882 - DNA, 65 bp, Rattus norvegicus
gtatctttcggagtgagagaaacaacactggcgaagttattgtgaccttagagccctgtgagcgc

SEQ ID NO: 2883 - DNA, 65 bp, Rattus norvegicus
tgggcgtgatcctggatgaagcaaaaggcaagaacgatggtaccgttcagggaaggaagtatttc

SEQ ID NO: 2884 - DNA, 65 bp, Rattus norvegicus
tgtatcatgtcaaactcaactccagctccagcactagctgcaggcatcgatgcttctatgctgtt

SEQ ID NO: 2885 - DNA, 65 bp, Rattus norvegicus
ttgtacctcagctctgcgaggacctcttctctcgagttaatgtgaaccagagtgctcaactttcc

SEQ ID NO: 2886 - DNA, 65 bp, Rattus norvegicus
gctggggatccgatcgtgggagacaaacctgatcgagtgcaacttggaccaagagctcaaacttt

SEQ ID NO: 2887 - DNA, 65 bp, Rattus norvegicus
ttggagggtgagggtgaggaagaagggggggaatattaaattaaatgtcacaaggtgctgctttc

SEQ ID NO: 2888 - DNA, 65 bp, Rattus norvegicus
agttttgtggccagttacgtagagatctacaatgagaccgtccgagacctgctagctacagggac

SEQ ID NO: 2889 - DNA, 65 bp, Rattus norvegicus
gggacaccaacaggatgatcgccgagactcccatgaatcaagcttcaaccagatcacactgtatt

SEQ ID NO: 2890 - DNA, 65 bp, Rattus norvegicus
ttcaccaacctgaatgaacacagctcacgctcccatgctctgctcattgtgacggtgagaggcgt

SEQ ID NO: 2891 - DNA, 65 bp, Rattus norvegicus
gaaaagtgcagaggccactgaagacggagagtggtgctcacatcggcatattgtctccaaattcc

SEQ ID NO: 2892 - DNA, 65 bp, Rattus norvegicus
gggcagccaaaaggacaactgcagcaaccttgatgaatgcttactccagtcgttcacactcagtt

SEQ ID NO: 2893 - DNA, 65 bp, Rattus norvegicus
agtacgccaacctcatgcacaacttcatcttaaaggctcggagcactgtgcgtgagattgacccc

SEQ ID NO: 2894 - DNA, 65 bp, Rattus norvegicus
attgtgacctgtgtgatcatgcagaagaatggtgctgggttacacaccgcaagttcctgcttctg

SEQ ID NO: 2895 - DNA, 65 bp, Rattus norvegicus
agaaggagaatggtcttaggtttgtgctgggtctctggtgctcttcactgttgcctgtcactttt

SEQ ID NO: 2896 - DNA, 65 bp, Rattus norvegicus
acttgccttctttgccaagtcaaggggaaaccaaaaggagcttccctcctattcttcctagctcc

SEQ ID NO: 2897 - DNA, 65 bp, Rattus norvegicus
ggccattctcctgttcaaatctggttaatagcatggactgtgccaaacacccagtgatccatcca

SEQ ID NO: 2898 - DNA, 65 bp, Rattus norvegicus
atgtctgaggagcgatgccgagagaaatcatcaccctacagttgggccagtgcggcaatcagatt

SEQ ID NO: 2899 - DNA, 65 bp, Rattus norvegicus
agcttctggatgctgaaagtgaagaccagccaaaacaacgctgggagaatattgccacgattctc

SEQ ID NO: 2900 - DNA, 65 bp, Rattus norvegicus
agctaaaagtctcttctctgtgtgtttctttgtgccttcaggacaaaagatcctccatcaccgaa

SEQ ID NO: 2901 - DNA, 65 bp, Rattus norvegicus
aaagcgtctacggtctgtgaagttgctgtcccggaggtgggggttccattctacaaagagaggtg

SEQ ID NO: 2902 - DNA, 65 bp, Rattus norvegicus
tcgtctgcactcatgtacttcactgtacgatctttgcggactgcagcttcgggtcctgacagcat

SEQ ID NO: 2903 - DNA, 65 bp, Rattus norvegicus
aatccactggcacatcagcatcacctccggattgacttcagatccacagcctacactactagcag

SEQ ID NO: 2904 - DNA, 65 bp, Rattus norvegicus
gctgaaatcccacccatagggaagacacctgtgcaattccagctcagtttggctgaaggtaacta

SEQ ID NO: 2905 - DNA, 65 bp, Rattus norvegicus
ttccccatatcctccccatgtaccctactcacccgaaatccaccacagcatttctacctttgtgt

SEQ ID NO: 2906 - DNA, 65 bp, Rattus norvegicus
caatacagtacatgggtccttgtcagttatgtcctcactgccctgagtgagtaggaacattgttc

SEQ ID NO: 2907 - DNA, 65 bp, Rattus norvegicus
tgcaccagatgacggaactttgctgggagaagtgcatggataagcctgggcctaagttggacagt

SEQ ID NO: 2908 - DNA, 65 bp, Rattus norvegicus
gaagcgccaggaacagattgccaagagacgtaggctgtcttcgctgagagcttctacttctaaat

SEQ ID NO: 2909 - DNA, 65 bp, Rattus norvegicus
gttttcatcgcagacacttctgctgcaaagatggtcaacgtacctaaaacccgaaggactttctg

SEQ ID NO: 2910 - DNA, 65 bp, Rattus norvegicus
acccaatgaaaccaactgtctaccctgtgataccaatcatgctagtctttgtgcacacagaataa

SEQ ID NO: 2911 - DNA, 65 bp, Rattus norvegicus
aaagatgttgcaagctgggcatggtaagccagcctgttatcccagtattgtcccagtagtcagga

SEQ ID NO: 2912 - DNA, 65 bp, Rattus norvegicus
gaaagtggaccccatggcaattgtggtgttccatcaagcagacattggggagtacatacgccatg

SEQ ID NO: 2913 - DNA, 65 bp, Rattus norvegicus
gtgacaatgcttggctcgctgctgaccctgcttgagggaggggcacatgttcacactgtactagg

SEQ ID NO: 2914 - DNA, 65 bp, Rattus norvegicus
tcagcaaagtcaccagcagctgagaccaggacacctgtggcccttcctaagcattcccacatctt

SEQ ID NO: 2915 - DNA, 65 bp, Rattus norvegicus
aagaaatggcttgctcagggtaactggtcagatttccacgaggaagtgtttgctgcttctttgac

SEQ ID NO: 2916 - DNA, 65 bp, Rattus norvegicus
caggggcttggatttcatgtgctgtggccgctcacccacactgccttgtgagatggaatcgtaat

SEQ ID NO: 2917 - DNA, 65 bp, Rattus norvegicus
gtccaagaacgccagcagcatccccagaagtgagtcagcatccaaaggactgaatcagatgaata

SEQ ID NO: 2918 - DNA, 65 bp, Rattus norvegicus
tacctccgttcctgcttctaatagagagggtggtggcactggggatactgggtacaggcttggga

SEQ ID NO: 2919 - DNA, 65 bp, Rattus norvegicus
ctgcagagccaggaacatatacacaggggaagagatccttcggaagacagaagttctcgttagag

SEQ ID NO: 2920 - DNA, 65 bp, Rattus norvegicus
aggctccaggttcctccaggatgaagacgtttgaagaattgcccatgacccctacaacctacaaa

SEQ ID NO: 2921 - DNA, 65 bp, Rattus norvegicus
atacaggtgatgatgatgggcaacgtcaaagtggcagctctcctgctctcctatggtgcagattc

SEQ ID NO: 2922 - DNA, 65 bp, Rattus norvegicus
atctgtcctgctgtccaccgtccccatccaccgggaccaaaagcatgcgcacaagccgcccattg

SEQ ID NO: 2923 - DNA, 65 bp, Rattus norvegicus
gtggtgtatataacgtttgtgatagttggtggaaatttgggagcttggataatgggctgtgtgca

SEQ ID NO: 2924 - DNA, 65 bp, Rattus norvegicus
ctccactccatttgctacagtcacagctggaaaagatggtgtgttaccagaggacagactcacca

SEQ ID NO: 2925 - DNA, 65 bp, Rattus norvegicus
tgctgcgtgatgtggctgggaaggacaagtaccaggtcaacaacaagcacgacaaggagtacact

SEQ ID NO: 2926 - DNA, 65 bp, Rattus norvegicus
ttggactttaccatcgacctggacttcaagggtcagctgtgtgagctctcttgttccaccgacta

SEQ ID NO: 2927 - DNA, 65 bp, Rattus norvegicus
acagcaattcactggactagtgtctcacaaatgactgatttactcagagccattaagcagcaggc

SEQ ID NO: 2928 - DNA, 65 bp, Rattus norvegicus
aaaagtgttctacccagtgccctgtcactctagactggaaggtatggggcctgatgcaaggctga

SEQ ID NO: 2929 - DNA, 65 bp, Rattus norvegicus
agccgccacaaagtctgaagcacacccaactgtctgttaaagcgggataaggcaatcagcaggag

SEQ ID NO: 2930 - DNA, 65 bp, Rattus norvegicus
gacgggcagatgtatgtagcaagactagaaaggaaacccaagccctgtgtgtggaaagtagacca

SEQ ID NO: 2931 - DNA, 65 bp, Rattus norvegicus
ccattgtttgacacccagtgcacttgtcatttgcataaggcagcattttgaccacacttgtatgc

SEQ ID NO: 2932 - DNA, 65 bp, Rattus norvegicus
atttgtctggaggctccaggcagcaggaggttccctcaaatctctctgtgaatgagctgctaacc

SEQ ID NO: 2933 - DNA, 65 bp, Rattus norvegicus
ccttcgcgtggtggtgaagtaggataggaagcaggagtctccttgttagtccagttagctattgt

SEQ ID NO: 2934 - DNA, 65 bp, Rattus norvegicus
ttactgagtctaagatgtcctgtgcagaggatgctttccaagcacggtgctccaccttctggcag

SEQ ID NO: 2935 - DNA, 65 bp, Rattus norvegicus
ggagactatgacagacggaaaacctagacagatgctggttgctggagaagtgagatagaggtgca

SEQ ID NO: 2936 - DNA, 65 bp, Rattus norvegicus
cactccgcgtgactctgaggaaagggtgttggtgactgagtgtggcgacagtatcttctgcaaga

SEQ ID NO: 2937 - DNA, 65 bp, Rattus norvegicus
ttcaggaatgcacatctcttaagcactcgcaaaacaggaaggctccacacctctaacagccaggg

SEQ ID NO: 2938 - DNA, 65 bp, Rattus norvegicus
atggacagaaacccaataagctgcagtgctgccagaacctgtgactgccctgcacctccacccag

SEQ ID NO: 2939 - DNA, 65 bp, Rattus norvegicus
ggccatcacacaggttagttaggtttaggtcaagggctgaccatacttctaggtcttttgctagt

SEQ ID NO: 2940 - DNA, 65 bp, Rattus norvegicus
gccagctcttattaccctccatccttccaaatgagaatgagaagattgtgccgctgagttcgtcc

SEQ ID NO: 2941 - DNA, 65 bp, Rattus norvegicus
actgtaggttgcacacgaactcttactctcttgtaattgtgcctcagacttctcgaaagtcgact

SEQ ID NO: 2942 - DNA, 65 bp, Rattus norvegicus
ttctgtccactcgcaacgtgtctgagacccggtatgtgtcagaactgaccttggtacgtgtgaag

SEQ ID NO: 2943 - DNA, 65 bp, Rattus norvegicus
tttccatgacaccctttggagggtcctctggggtgactccttttggaggagcatcttcctcattc

SEQ ID NO: 2944 - DNA, 65 bp, Rattus norvegicus
cccgagggccagacaaattgctaccctaccctaccctagctagcccaccctttgactaaccctgt

SEQ ID NO: 2945 - DNA, 65 bp, Rattus norvegicus
acattttctgcctgggatgtctcctgcaaaagcagtgacctctgacccctggtgacctttgctct

SEQ ID NO: 2946 - DNA, 65 bp, Rattus norvegicus
gtgttgctccatatccttctctgttgccatcccaagacaacattgacggcgaagcgaacacatga

SEQ ID NO: 2947 - DNA, 65 bp, Rattus norvegicus
taaacttgtggtagttggagctggtggcgtaggcaagagtgccttgacgatacagctaattcaga

SEQ ID NO: 2948 - DNA, 65 bp, Rattus norvegicus
caacgaaggattatgcaggctatgacggaactactaccttgctatggatgagggttgggcaggat

SEQ ID NO: 2949 - DNA, 65 bp, Rattus norvegicus
tgggcttcaactacagcttctcttaccagctcgaaggtgaatcaagaaagtcatgtcgcctgcac

SEQ ID NO: 2950 - DNA, 65 bp, Rattus norvegicus
ttcaaccttctgaagacaggccacaggatggagaggccaaacaactgcagcgaggaaatgtaccg

SEQ ID NO: 2951 - DNA, 65 bp, Rattus norvegicus
gaacggtatcatagcctagcaccaatgtactaccgaggagcacaagccgccatagttgtgtatga

SEQ ID NO: 2952 - DNA, 65 bp, Rattus norvegicus
cgagggtgtggtacggacaaaagatgtgctgtttgagagcatcagccacctcatagactatcacc

SEQ ID NO: 2953 - DNA, 65 bp, Rattus norvegicus
tatggaatctggggcaactgtctgtgggcccatcaccttcttcaaaagccccgtgagagaggttt

SEQ ID NO: 2954 - DNA, 65 bp, Rattus norvegicus
gatttgggatagaggagcattggtggctgtcaatccaggcgatcgtgaccgctatgcagatataa

SEQ ID NO: 2955 - DNA, 65 bp, Rattus norvegicus
atcccaacactctggcttcgctcccttccataccacactctggcccaaggaccctcgtctgtata

SEQ ID NO: 2956 - DNA, 65 bp, Rattus norvegicus
tatcctgggaaggagtaacctgaagtttgctggaatgccgatcactctcactgtgtctaccagca

SEQ ID NO: 2957 - DNA, 65 bp, Rattus norvegicus
acccgcatcctctgggctgagctgtagctcctgtgacgctgacttccaggcatgaggtggctcct

SEQ ID NO: 2958 - DNA, 65 bp, Rattus norvegicus
ggaagttcctatggggtcacctcaacagaatcctacaaggagacactgcacaagacaatggtgac

SEQ ID NO: 2959 - DNA, 65 bp, Rattus norvegicus
atctctcgtacactctgaccccagtaccatttttcctgtcccattaggctcctacgtaccgttag

SEQ ID NO: 2960 - DNA, 65 bp, Rattus norvegicus
ccagggtgttcgagatgagaaggagccatgccccaacattcttctgtgccctttggcttctaata

SEQ ID NO: 2961 - DNA, 65 bp, Rattus norvegicus
gagactttcagcctgggagtctgtccgtaccctgggatgacaaaccagcaagcacgggaacaagt

SEQ ID NO: 2962 - DNA, 65 bp, Rattus norvegicus
ggggataagcaggtggcaaacacaatcccgtgaccagtgaacaacaatcagcacagtgaatgtaa

SEQ ID NO: 2963 - DNA, 65 bp, Rattus norvegicus
aaccctgagtacctaggcctggatgtacctgtatgagacgtgtgcagacgtcctgtgctttcaga

SEQ ID NO: 2964 - DNA, 65 bp, Rattus norvegicus
ttaaagagtccttcactcgtctgaccgagctggtgctgcaggctcacaggaaagagctggatggt

SEQ ID NO: 2965 - DNA, 65 bp, Rattus norvegicus
tcagagtcacatacccctgattctgtatcagtgtgtcctccttcagtccccagagccaaaatcat

SEQ ID NO: 2966 - DNA, 65 bp, Rattus norvegicus
aattccctggtgcacagggatttggcggcgcggaactgcatgctgaatgagaacatgtccgtgtg

SEQ ID NO: 2967 - DNA, 65 bp, Rattus norvegicus
gactctagtcatctgcaatctgccattctcagggcctccaagttagtgtttctcatttgcctgga

SEQ ID NO: 2968 - DNA, 65 bp, Rattus norvegicus
gtttgacgagagccttagagcttgtaactagtagccatctcccctgaacctgagtgtttccatga

SEQ ID NO: 2969 - DNA, 65 bp, Rattus norvegicus
ggagtatttgtctcagtcctgggctccttgagtgcagtctgatgctctaagatcagcaaaatcac

SEQ ID NO: 2970 - DNA, 65 bp, Rattus norvegicus
agattggggacagctaccgagatgtcatccaagagctgcacataggcctggacaagatgaagaac

SEQ ID NO: 2971 - DNA, 65 bp, Rattus norvegicus
attgggcagctgtgcaagggacgtctagtgatgtgggactgggtgttggacagtatatccgtcta

SEQ ID NO: 2972 - DNA, 65 bp, Rattus norvegicus
gagaacaacaccctggtctggaagtttgcagatgccaataacgtctgccacctctgccatgcaaa

SEQ ID NO: 2973 - DNA, 65 bp, Rattus norvegicus
attactggcacagcaggcttttccccaaggctaatgcccagagaacgtaaacttctgctccgtga

SEQ ID NO: 2974 - DNA, 65 bp, Rattus norvegicus
ctgaatcctgtggaagagaacccttttgtgtcccggaggaagaatggagaccttcaagctttaga

SEQ ID NO: 2975 - DNA, 65 bp, Rattus norvegicus
agcgtgcagagccagtagataccgctgtgccacttaacgtggagctcaaatacgccttattttgc

SEQ ID NO: 2976 - DNA, 65 bp, Rattus norvegicus
tgtacctgcccaactgtgaccgcaaaggattctacaagagaaagcagtgcaagccttctcgtggc

SEQ ID NO: 2977 - DNA, 65 bp, Rattus norvegicus; identical to SEQ ID NO: 1

SEQ ID NO: 2978 - DNA, 65 bp, Rattus norvegicus
accaaatccctggatacctgaacgggacacacgaacctgtgaatggaactcatgggctctttgct

SEQ ID NO: 2979 - DNA, 65 bp, Rattus norvegicus
tttgagctctatgtgaagtgatgataactctgtgccccgagatgagacccaccttcaagccctac

SEQ ID NO: 2980 - DNA, 65 bp, Rattus norvegicus
catataaatgagcttccaaaggaatgtgcttgggctaactatagatactgtgctgtatctgtctc

SEQ ID NO: 2981 - DNA, 65 bp, Rattus norvegicus
cactctgtgagtgcccttgaggctactacctgcactctaaactgcaaacagaaaccaggtgttct

SEQ ID NO: 2982 - DNA, 65 bp, Rattus norvegicus
cagtagaggaaccatcaaatccagaggctagcagttcaacttctgtgactccagacgttagtgac

SEQ ID NO: 2983 - DNA, 65 bp, Rattus norvegicus
atgggacagaaggactgagagggaatgcaggagccatggtgtcttttcatgtggcgtctccagaa

SEQ ID NO: 2984 - DNA, 65 bp, Rattus norvegicus
atgcacgaggacaaagactaccgagatccgactcctaaaggcagggtctgagtctgccagatgga

SEQ ID NO: 2985 - DNA, 65 bp, Rattus norvegicus
ctcatacgatctgtatcctccaggacccatttcctccactctgcaaagcctgtctgcatttatcc

SEQ ID NO: 2986 - DNA, 65 bp, Rattus norvegicus
aatggcaaacgaggtcacttcccattcacacatgtccgtctgctggatcaacagaatcccgagga

SEQ ID NO: 2987 - DNA, 65 bp, Rattus norvegicus
gtctgagtgaacctgtgtacttggtggcactttagagctgtgagatgcatagcattgtgacccag

SEQ ID NO: 2988 - DNA, 65 bp, Rattus norvegicus
tgtgtatccgaagaagctgcctacatcggagacataccttcacctaccagtcaggatcgggtgaa

SEQ ID NO: 2989 - DNA, 65 bp, Rattus norvegicus
tgccctcagaacaatgaggccttcctccaagagctggagctgaagacgagcagaggagaaatgta

SEQ ID NO: 2990 - DNA, 65 bp, Rattus norvegicus
gccgtgtctattccatctacgtccacaacttctgtgatccactctttggaggggattgggaagat

SEQ ID NO: 2991 - DNA, 65 bp, Rattus norvegicus
cccagatgcaacaagaactaaactcacttagcgaaagtaaaccccgtgcacagcagatgctccct

SEQ ID NO: 2992 - DNA, 65 bp, Rattus norvegicus
tgtcaaagccttagatgggaaattgcaggtttcaacgccacgagtcggcaaagtgttcggtgccc

SEQ ID NO: 2993 - DNA, 65 bp, Rattus norvegicus
tccggtgttctctgctttgatgaactcctcacttctgagagactgcagaatacctagagggccct

SEQ ID NO: 2994 - DNA, 65 bp, Rattus norvegicus
cagaagctcagcgacttggaagagaggactgcagccatgatgtccagtgcagactcgttttccaa

SEQ ID NO: 2995 - DNA, 65 bp, Rattus norvegicus
ggaggagcagaccgacacacactttactctagccaagatctgagcaataccacaggagtggattt

SEQ ID NO: 2996 - DNA, 65 bp, Rattus norvegicus
gtttatccagctgtcatgcctggttcagtgtctactgactatgcgccctcttattactgcatgca

SEQ ID NO: 2997 - DNA, 65 bp, Rattus norvegicus
aacagggagatccgctgccaccagcaccgacactgcgaactcaatcaagggcttcaggttaagaa

SEQ ID NO: 2998 - DNA, 65 bp, Rattus norvegicus
attggtctgatcgttggactgacaactctgggtctgctgatgttaggactggcgacctgcttcat

SEQ ID NO: 2999 - DNA, 65 bp, Rattus norvegicus
cgccacatcacagaaccggatctatctcacagctgacaaccttgtgctgaatctgcaggatgaaa

SEQ ID NO: 3000 - DNA, 65 bp, Rattus norvegicus
ccgaccggttaccttcctgtgtaagttgcttgtgtggaaaggctcaataccgtaggcattcacta

SEQ ID NO: 3001 - DNA, 65 bp, Rattus norvegicus
ccctcttttgcagtcagtcaaccttgcaggggaatttgcactatttacacttgaaagttaccagt

SEQ ID NO: 3002 - DNA, 65 bp, Rattus norvegicus
ttggatagacttggatagaataagaggcctggactgagatgtgagtcctgtggaagacttcctgt

SEQ ID NO: 3003 - DNA, 65 bp, Rattus norvegicus
cttcacttcaggattccctggttccagtaccccatcatctatgacattcgggccagacctcgaaa

SEQ ID NO: 3004 - DNA, 65 bp, Rattus norvegicus
gtcctggatttctcaattcctcagtttctactcaaaggtgctacttaccaaacactctgcccgtc

SEQ ID NO: 3005 - DNA, 65 bp, Rattus norvegicus
gtgcattgactctgttggatacaaaacactgtaggagggcgatatgttctagcacctttgagcat

SEQ ID NO: 3006 - DNA, 65 bp, Rattus norvegicus
aacgggactgcacatgccatagcctagctgatggcaattcaggataacagtcgagtcactgccaa

SEQ ID NO: 3007 - DNA, 65 bp, Rattus norvegicus
ctatgggacatgcttctgtcacagggcttttgttgacttcattcatctcctgggaattggtaagc

SEQ ID NO: 3008 - DNA, 65 bp, Rattus norvegicus
gaaggtcaaatcgcagtccaagatggcagccaaagccaagaagatctttgctgagttcatcgcga

SEQ ID NO: 3009 - DNA, 65 bp, Rattus norvegicus
atgtgtaggcttcgggatcagggaagatgcacccacatctgaggtaccgtctctgagtgtactgg

SEQ ID NO: 3010 - DNA, 65 bp, Rattus norvegicus
ctgcaggatgaattggtgtgtctcccctgctggcacttgtccccttccaggcccttctcagtttt

SEQ ID NO: 3011 - DNA, 65 bp, Rattus norvegicus
gggctaatgtgccctcataagccttgtggtagtgcatcttcaatgacttcctcttccaggccatt

SEQ ID NO: 3012 - DNA, 65 bp, Rattus norvegicus
atgatgctgatgggaaagttgatctttgcctgtcatgagaagctgcatgagaacaacccacgtgg

SEQ ID NO: 3013 - DNA, 65 bp, Rattus norvegicus
tctaggaagactgtaaacgtggagaggatcagcagcgcacagcctgctggccttccagaacccac

SEQ ID NO: 3014 - DNA, 65 bp, Rattus norvegicus
ctacatgcatatgtatctgtcacagagcaagagaggtgggtgagagcccaatcacctggctttag

SEQ ID NO: 3015 - DNA, 65 bp, Rattus norvegicus
cctatgttcagtagcatggtcgatgctattgtttagccttccttccaaactgtacattggcttgg

SEQ ID NO: 3016 - DNA, 65 bp, Rattus norvegicus
aagaaactgcctacagacatcagcacagcagcctcctcacttgggtactaccgggtggaagctgt

SEQ ID NO: 3017 - DNA, 65 bp, Rattus norvegicus
agtgattgcatggtgccggaaggaccagcagcgtgtgaagcagcccatgttctactctttcctca

SEQ ID NO: 3018 - DNA, 65 bp, Rattus norvegicus
ttaaatactttcaaagcttgatctgctgtgaccttcactgttgaacctgattggacagggaagcc

SEQ ID NO: 3019 - DNA, 65 bp, Rattus norvegicus
atggctgcaaccttggctaatggcggtttctgcccaattactggtgaaagagtgctcagtcctga

SEQ ID NO: 3020 - DNA, 65 bp, Rattus norvegicus
caagacaaaaggctttgattacctcctgaaggccgcagaagctggtgacaggcagtccatgattt

SEQ ID NO: 3021 - DNA, 65 bp, Rattus norvegicus
aaaatggagctaaccagagtactgctacagaggacggttttactcctctagccgtggcactccag

SEQ ID NO: 3022 - DNA, 65 bp, Rattus norvegicus
agaaccgctacgacgcgctagccgcacaggtggctgctgaggtgcagttcgtgcgcgatctggta

SEQ ID NO: 3023 - DNA, 65 bp, Rattus norvegicus
ggtaggctgcatatttggagaactgctgacacagaaacccctgttccctgggaagtcagatattg

SEQ ID NO: 3024 - DNA, 65 bp, Rattus norvegicus
tttcacacaagtgttctctgacttgaagaatgagagtggtcaggaggacaagaagcgactcctcc

SEQ ID NO: 3025 - DNA, 65 bp, Rattus norvegicus
caactatgtgcccatcttccaggagattgtggtgcccagtctgaacgtggcaaagctccttaagt

SEQ ID NO: 3026 - DNA, 65 bp, Rattus norvegicus
cagggacaatgaagttgacttccaggagtactgtgtcttcctgtcctgcattgccatgatgtgca

SEQ ID NO: 3027 - DNA, 65 bp, Rattus norvegicus
ctctgaaataaaatgggaaggcagagatgccttctgggaggctatcccagtcaagtccagtgggg

SEQ ID NO: 3028 - DNA, 65 bp, Rattus norvegicus
cagggatgaagagagccatgtcactcaatatgctgaacgtcgatggtccaagggctgccaggatg

SEQ ID NO: 3029 - DNA, 65 bp, Rattus norvegicus
tgtacttagctccagcctgaacccattcatcaaaaggaaaccaacccagactcgaaccgtggctg

SEQ ID NO: 3030 - DNA, 65 bp, Rattus norvegicus
agcacccatactttgacgacttggacaatcagatcaagaagatgtaaccctctggaagtcccgcc

SEQ ID NO: 3031 - DNA, 65 bp, Rattus norvegicus
tcccagccattctgaaagccttgcaggatgagtgggatgcagtcatgctgcacagcttcactctt

SEQ ID NO: 3032 - DNA, 65 bp, Rattus norvegicus
caaactactgattctggggtctgcatcgtttgcaatgtggtactactatgtccttcgtagattgt

SEQ ID NO: 3033 - DNA, 65 bp, Rattus norvegicus
tgatctcatgcgctgtgtggacctctacaaccaggcccagtccaagtggtttgaagagatggtga

SEQ ID NO: 3034 - DNA, 65 bp, Rattus norvegicus
tggaagcgtgcattcaatgccacatcattcctacgtcacatccgtaagctgggacagagcccaga

SEQ ID NO: 3035 - DNA, 65 bp, Rattus norvegicus
gacggataagtaccggacttacagcaagaagcactttcgcatcttcagggaaatgggccctaaga

SEQ ID NO: 3036 - DNA, 65 bp, Rattus norvegicus
agtggccacttccaccgtgaagcgagagagccagtagtgaatcccctcattcgtgcatttacttt

SEQ ID NO: 3037 - DNA, 65 bp, Rattus norvegicus
tacaagcattactgcatccatgggagatgccgcttcgtgatggacgaacaaactccctcctgcat

SEQ ID NO: 3038 - DNA, 65 bp, Rattus norvegicus
gcatggacactgtatctacctggtggacatgagcgagaaatactgcagatgtgaagtgggctaca

SEQ ID NO: 3039 - DNA, 65 bp, Rattus norvegicus
tgctgttcagtgacggcactgtccaggtgaacttctacggggaccatacgaagctgatcctcagt

SEQ ID NO: 3040 - DNA, 65 bp, Rattus norvegicus
tgtattccctgaagccattgatctatctcaaagacacagtgttgtacgcatacatgtgcgcacgt

SEQ ID NO: 3041 - DNA, 65 bp, Rattus norvegicus
cggagcagctgaacaaacatctaaagatggtgcctggtggaagaaagcattctgggaaatctggg

SEQ ID NO: 3042 - DNA, 65 bp, Rattus norvegicus
tttgacctgatgaggaggatgttagagttcgaccctgctcagcgcatcacactggcagaagcttt

SEQ ID NO: 3043 - DNA, 65 bp, Rattus norvegicus
ggctgctggactcaagccaaaaggatgagactccaataaagaggcatctggctcaaagaatggtc

SEQ ID NO: 3044 - DNA, 65 bp, Rattus norvegicus
gggaaaacaatgacgttccctgcggacatgttaactttgccatcagttttgatgtggaaacactg

SEQ ID NO: 3045 - DNA, 65 bp, Rattus norvegicus
gatgtacaaggctggagagaaaatgatcatggtctttcttttacttttgaagctgatgtagtcag

SEQ ID NO: 3046 - DNA, 65 bp, Rattus norvegicus
tgggaatgaagatgaagaatcaggacaaagatggtgtcaccggatgatggtcacctgaagacacc

SEQ ID NO: 3047 - DNA, 65 bp, Rattus norvegicus
gactcttaatgcatgtggacagtcgcgagcgtttatgctgtcggtgtgtctgtgttggacaaaac

SEQ ID NO: 3048 - DNA, 65 bp, Rattus norvegicus
agaatgctgcttgtcacagaaaccagccctttacccctacctacctactctggacttggagatcg

SEQ ID NO: 3049 - DNA, 65 bp, Rattus norvegicus
tgaagcaaactgcaagtctccagtgtcagattgcatcactagctgctatagtacggtaggatgca

SEQ ID NO: 3050 - DNA, 65 bp, Rattus norvegicus
aagctttctgtccaagacccctacccaacatgggactagcctttgaattctggagttgtgcatgg

SEQ ID NO: 3051 - DNA, 65 bp, Rattus norvegicus
tggagcgcagttgctgctggaaatgctgacctttaatccacttaagcgaatctctgccttccgag

SEQ ID NO: 3052 - DNA, 65 bp, Rattus norvegicus
gcaatggggcctcactaacctgaggtcgatgagaggaaaagtcaaaaggacatgccctgtaaatg

SEQ ID NO: 3053 - DNA, 65 bp, Rattus norvegicus
cacaggatcgaggccggtagcgagttcaagaacatctttggcaccccagcgtattttgcacccga

SEQ ID NO: 3054 - DNA, 65 bp, Rattus norvegicus
gagctccgacaccacctactgattgaatcctatccaatcccaaagatctagctgtgagagcaaga

SEQ ID NO: 3055 - DNA, 65 bp, Rattus norvegicus
tctctggttttctctaacatcatctgccgtcactacaagccaagctatcttgcctaccgcaccag

SEQ ID NO: 3056 - DNA, 65 bp, Rattus norvegicus
tgcttgagaaggacccaaatgaacgatacacctgcgagaaagccctcagacacccttggattgac

SEQ ID NO: 3057 - DNA, 65 bp, Rattus norvegicus
acagattacacctcgtccatcgatgtgtggtcagctggctgtgtactggctgagctgcttcttgg

SEQ ID NO: 3058 - DNA, 65 bp, Rattus norvegicus
taatgctggagaccgtggacagaccaataacgccgcttctgcatcagcctccaactctacctgaa

SEQ ID NO: 3059 - DNA, 65 bp, Rattus norvegicus
cttggggcaaattccagtggaggaagcccaaacctccatttatgcttgtggttcacacatttacg

SEQ ID NO: 3060 - DNA, 65 bp, Rattus norvegicus
taactctcgctggcctgaactcaacctgctaggactaaagatccttgcaacatgtccagctcgct

SEQ ID NO: 3061 - DNA, 65 bp, Rattus norvegicus
ccagaaagaacccctggagactgtcattttccgatatcctgccaaacgccctcttatctaggagt

SEQ ID NO: 3062 - DNA, 65 bp, Rattus norvegicus
ttgccagtcacattagtcagcatgatggcaatcccttcatgttgcacactctttaacagcatgct

SEQ ID NO: 3063 - DNA, 65 bp, Rattus norvegicus
gccaaccccagcattttatgcactttgtccttcagcaaggtggggaagcatgataagcactatag

SEQ ID NO: 3064 - DNA, 65 bp, Rattus norvegicus
actaacaaaccctgtccatcccagtgcgaattctgacactgtcaaagaagacccacactctgggg

SEQ ID NO: 3065 - DNA, 65 bp, Rattus norvegicus
tcagctcagcatatgaccacgtgcgcaagaccagagtggctatcaagaagatcagccccttcgag

SEQ ID NO: 3066 - DNA, 65 bp, Rattus norvegicus
tttaaccctcacaagaggattgaagttgaacaggctctggcccacccgtacctggagcagtatta

SEQ ID NO: 3067 - DNA, 65 bp, Rattus norvegicus
tttgcaactgcccttcttcccgtttggcactatggtttgttgcctgccgagctgatctgagaagt

SEQ ID NO: 3068 - DNA, 65 bp, Rattus norvegicus
gccacagtcccagtgacctcacctgcagcataaaagcgcaaaggaaacattgaagaagacagtca

SEQ ID NO: 3069 - DNA, 65 bp, Rattus norvegicus
ggagaacccaagccagaagttacgtggtggtttgaaggagaactactgcaggatggagaagacta

SEQ ID NO: 3070 - DNA, 65 bp, Rattus norvegicus
aagagtaagaccaagctgaagaacttcctgcgtgaggtgagcatcaccaacagcctgtcgtctag

SEQ ID NO: 3071 - DNA, 65 bp, Rattus norvegicus
ctgactggacctgtgtggtttacttgtagctgctccgtgaaacactgccttgctgtttgagtgta

SEQ ID NO: 3072 - DNA, 65 bp, Rattus norvegicus
aagggccaacagaacagaagaaaatgtttcagacggttccccgaatgctggcactgtggagcaga

SEQ ID NO: 3073 - DNA, 65 bp, Rattus norvegicus; identical to SEQ ID NO: 1

SEQ ID NO: 3074 - DNA, 65 bp, Rattus norvegicus
ctgcgatagcatatcctatccaaccatactaacgtggacacccacacctcccctcagaacttcaa

SEQ ID NO: 3075 - DNA, 65 bp, Rattus norvegicus
ggttgggaccaaggatatgtcagtcaggctgagggccttatagggaatgactagggtctgcttct

SEQ ID NO: 3076 - DNA, 65 bp, Rattus norvegicus
gctcagccagaagcagatgaagccactggtcctggttcacagtttagtgtcatgctctggtttat

SEQ ID NO: 3077 - DNA, 65 bp, Rattus norvegicus
aagactgctgaccagcagtacatggagggcttcaagtatgaactggaggcctttaaggagcgtgt

SEQ ID NO: 3078 - DNA, 65 bp, Rattus norvegicus
aagccacccttcaagccagcagtgggaaggcctgaggacaccctccactttgaccccgagtttac

SEQ ID NO: 3079 - DNA, 65 bp, Rattus norvegicus
gagattacagaagccaaatcagggactgctactccacagagatcgggatccatcagcaactatcg

SEQ ID NO: 3080 - DNA, 65 bp, Rattus norvegicus
gggcatgttggtatatggctatgatctcggcaggctaatgtgaactagatagaagaccccatctc

SEQ ID NO: 3081 - DNA, 65 bp, Rattus norvegicus
tccagtggaagcattaaaggaacagtcaaatccagccatggcgacaaaacggaaaagagcggagg

SEQ ID NO: 3082 - DNA, 65 bp, Rattus norvegicus
atacctgcaagaaattccagaagcgtgatggccgcaaggttcggaaggcagccaagaacgagatt

SEQ ID NO: 3083 - DNA, 65 bp, Rattus norvegicus
aaacctcagaatggccatggtcacgatcccgagcatgtggaagttcgcaggcagagttcagaccc

SEQ ID NO: 3084 - DNA, 65 bp, Rattus norvegicus
aatgaagggccactgagatgtgtcctttagctgctgggtgtcatgtctgacctgctggtgcctag

SEQ ID NO: 3085 - DNA, 65 bp, Rattus norvegicus
aacagagttgagaagctaagtgttcaagtagccacaggggatctgctgtttggaccctccagcac

SEQ ID NO: 3086 - DNA, 65 bp, Rattus norvegicus
gccctctgcaaagactgcctatagcatagccaccctggattcattcagatgggaaagacgtggct

SEQ ID NO: 3087 - DNA, 65 bp, Rattus norvegicus
ctagtctcagatctcaaacccgcactacacatggaggcatacgtttgcttcatctggacatttag

SEQ ID NO: 3088 - DNA, 65 bp, Rattus norvegicus
ggagcgcacagacatctgcctgcttaaaggtggctatgagaggttttcttctgagtacccagaat

SEQ ID NO: 3089 - DNA, 65 bp, Rattus norvegicus
ccccactgcttcctgtgagcagatcaggacccttaggaaatgtgcaaataacatccaactccaat

SEQ ID NO: 3090 - DNA, 65 bp, Rattus norvegicus
aacagatttctatcactccaagcgccgattggtcttctgcaagagaaagccctgaagtgcccacg

SEQ ID NO: 3091 - DNA, 65 bp, Rattus norvegicus
aagcagctatcagagagctcaaagaagccttccgaagagtcaagcagcaacgtgagcagtaacgg

SEQ ID NO: 3092 - DNA, 65 bp, Rattus norvegicus
gtacaggtattaggtgatgggttaggagatgccattgtcttgggtgaacgtgactgcactattca

SEQ ID NO: 3093 - DNA, 65 bp, Rattus norvegicus
agtgtgcgatctgctttggtctgatcccttagaggattatggtagtgagaagaccctggagcact

SEQ ID NO: 3094 - DNA, 65 bp, Rattus norvegicus
agctctagggccatggactgaacatcaaggagtcagggtttcgtccgtgaggggttggaggcagc

SEQ ID NO: 3095 - DNA, 65 bp, Rattus norvegicus
acaccaggcagtttgctgctcagtgcctctgtggcaggtcatggccagtttgcacctctccacag

SEQ ID NO: 3096 - DNA, 65 bp, Rattus norvegicus
cctgcctgtcgcatgtttgtgtctgcctcgtcccctcccctggtgcctgtgtctgcagaaaaaca

SEQ ID NO: 3097 - DNA, 65 bp, Rattus norvegicus
catagaagtcgcacagttggcatataatgctgaagatgactaacacactggtgactgctccctcc

SEQ ID NO: 3098 - DNA, 65 bp, Rattus norvegicus
aacgccatcaaacgcatctacagcagcctgtgaaaacggcaggcaacctgagccttccaactgtt

SEQ ID NO: 3099 - DNA, 65 bp, Rattus norvegicus
aaggccatgaccagcctacagaatgagagagatcacctgtggaatgagctggagaaattccggaa

SEQ ID NO: 3100 - DNA, 65 bp, Rattus norvegicus
ttcacgccaaaaggacctacagggagctgcggctgctgaagcacatgaagcacgagaatgtgatt

SEQ ID NO: 3101 - DNA, 65 bp, Rattus norvegicus
tccacctccagaatgaccctccatctgccttccccaaggtgaagattcagattctaagcaactgg

SEQ ID NO: 3102 - DNA, 65 bp, Rattus norvegicus
cagtaccattccaccacacgccagtgtcgagcatgtcatcagatttgccaggagaacaaagaaga

SEQ ID NO: 3103 - DNA, 65 bp, Rattus norvegicus
tgggtcagagccctgtcatggaactttagtcaccatggagactgtgggtcaccaagatgggccag

SEQ ID NO: 3104 - DNA, 65 bp, Rattus norvegicus
ttaccaacagagcaggtcacacacacagcagcggtcactgtaacagactgccacatacacagtct

SEQ ID NO: 3105 - DNA, 65 bp, Rattus norvegicus
gcgcatgaacactttgttacctccttggatttccataagacggcaccctatgtggttactggcag

SEQ ID NO: 3106 - DNA, 65 bp, Rattus norvegicus
ttcgaaagaccgcaggagaacatctgggtgtgacattccgagtggagggtggtgagctggtgatt

SEQ ID NO: 3107 - DNA, 65 bp, Rattus norvegicus
ctctcacagtggcttgtaacaacttcttctgggagaacagttgagcacagtctcagtaggcagcg

SEQ ID NO: 3108 - DNA, 65 bp, Rattus norvegicus
accattaggggcaaggatggtgggtccttgtatattctgctcttatcccaatacctgggcaagga

SEQ ID NO: 3109 - DNA, 65 bp, Rattus norvegicus
ccttgctggaacacttgagccatgtgcacgagccgaacccacttcactcaaaacaggtctttaaa

SEQ ID NO: 3110 - DNA, 65 bp, Rattus norvegicus
ccgctgcaagtcgccaaaggaggcctgggtttaatactcaaaagaatcgtagaaagtgaagcagc

SEQ ID NO: 3111 - DNA, 65 bp, Rattus norvegicus
tcggctcacacagtacatggatggaaatggaatgccaaagacaatgcagtcagaagagactcgag

SEQ ID NO: 3112 - DNA, 65 bp, Rattus norvegicus
tccttaaggtcgtcacggtgaccaggaatctagaccctgatgatacagccagaaagaaagctccc

SEQ ID NO: 3113 - DNA, 65 bp, Rattus norvegicus
cacgatcagatccagaacgcagccttcatgtatccacccaatccctggaaggagatttctcatga

SEQ ID NO: 3114 - DNA, 65 bp, Rattus norvegicus
ttccttgtgaaaagcccaaattcctgtcctgacctccggtgatagggaaactcgatgctctgagg

SEQ ID NO: 3115 - DNA, 65 bp, Rattus norvegicus
agaagaggatgcctcaaggaggaggcttctgcaaaggagctgtgaccctactctgcactctcaaa

SEQ ID NO: 3116 - DNA, 65 bp, Rattus norvegicus
gatggagtacttgtatctggagctgacaatggcactatgcacctttgggactggagaactggcta

SEQ ID NO: 3117 - DNA, 65 bp, Rattus norvegicus
cggggattccacactgacccagatcacagctgggctggacccagtggggcgaattcagatgagaa

SEQ ID NO: 3118 - DNA, 65 bp, Rattus norvegicus
acttctgaccagattgttcccgagtaccaggacgacaatgacgttagttccttctgctagtcccc

SEQ ID NO: 3119 - DNA, 65 bp, Rattus norvegicus
ttcgtgcttgacatacctaccagtattaaccattcccgatgacatacacgtttgagagttttacc

SEQ ID NO: 3120 - DNA, 65 bp, Rattus norvegicus
atggcaggcataggcgctgactttcatcctctgacactgcatcggtccctggtgttgcccatatg

SEQ ID NO: 3121 - DNA, 65 bp, Rattus norvegicus
taaatggtgtgtgtgatagagtgaatgctgtgccgtgctgtagaaccagtgtccgttccgagtgc

SEQ ID NO: 3122 - DNA, 65 bp, Rattus norvegicus
attttctctgacacttagcacacccctcccacactcgtggccctgaactctcttccaaatgtttc

SEQ ID NO: 3123 - DNA, 65 bp, Rattus norvegicus
gttcgcagggacacctggatacctctccccagaagtgctgcggaaggacccatacgggaagcctg

SEQ ID NO: 3124 - DNA, 65 bp, Rattus norvegicus
gtgaagaggccactgcgtaagctactcccggatgtcaaccgtgaagccattgactttctggagaa

SEQ ID NO: 3125 - DNA, 65 bp, Rattus norvegicus
gtacacaccctcacaaattgccctgactgccattttatcaagtgcctctagggctggaattacta

SEQ ID NO: 3126 - DNA, 65 bp, Rattus norvegicus
tacccaggccagtagatccttctaagttgccctccatgtccagagacctcttccgctataggtaa

SEQ ID NO: 3127 - DNA, 65 bp, Rattus norvegicus
gttgtggcttcttgtgtaaagacaggaactgtggaacagtggcattgtctttctcgtgttgttta

SEQ ID NO: 3128 - DNA, 65 bp, Rattus norvegicus
gcggcctgtaccttggcatgaatggcaaaggagagctttatggctcagagaaattgacttctgaa

SEQ ID NO: 3129 - DNA, 65 bp, Rattus norvegicus
ctcgtgatacaaagaggggagccatgtgtagcatctggaggggtctaagaagtgggttcttttag

SEQ ID NO: 3130 - DNA, 65 bp, Rattus norvegicus
taaggccgtgacaaaggcgtaactcgaatggactacctcgtctgcagatgcagttggcaccatgt

SEQ ID NO: 3131 - DNA, 65 bp, Rattus norvegicus
tggggaagctcaagtgggacctggctgctgtgattgcgcacgacttcctggccttgattctgcac

SEQ ID NO: 3132 - DNA, 65 bp, Rattus norvegicus
gcggtgtcacatacttctgacatgcactgtggatatggagacagtccttcaaaaggagcagttcc

SEQ ID NO: 3133 - DNA, 65 bp, Rattus norvegicus
gacaagcaagacaaaggcaggacaagacaagacaagacaagactttcagaacgacaccagagaaa

SEQ ID NO: 3134 - DNA, 65 bp, Rattus norvegicus
tctcgctcagctttgtttgcccagctaaatcagggagaagccatcacaaaagggctccgacatgt

SEQ ID NO: 3135 - DNA, 65 bp, Rattus norvegicus
acccacttcctacccaggttcaagcagtccgagcaaccggaactttccttcaccgtcactgttcc

SEQ ID NO: 3136 - DNA, 65 bp, Rattus norvegicus
cgggaccaagaaggaaaactgtccgtacagtatcctagagataacatcagtggaaatcggagttg

SEQ ID NO: 3137 - DNA, 65 bp, Rattus norvegicus
aacaactacaacgcctacgaatcctacgcgtaccccggtatgttcatggccctcagtaagaacgg

SEQ ID NO: 3138 - DNA, 65 bp, Rattus norvegicus
atacctgcagtatgggaacgaattagaggagactgtctcttgtgcttgggaactagtgcatatgc

SEQ ID NO: 3139 - DNA, 65 bp, Rattus norvegicus
gagagttccgggctctggcttggagggctcctgctttctcaagggaaggggagccgctgagactg

SEQ ID NO: 3140 - DNA, 65 bp, Rattus norvegicus
agagcaaagactgcgtattcaccgagatcgtactggagaacaactacacagccttccagaacgcc

SEQ ID NO: 3141 - DNA, 65 bp, Rattus norvegicus
gttgtgcatgccaccatgctgctggacccggagagatttgttctgagtctctggtgcatcattta

SEQ ID NO: 3142 - DNA, 65 bp, Rattus norvegicus
gcctggacagaaggccatactgtttcttccaatgtctgctaagagctgactctctttagacactg

SEQ ID NO: 3143 - DNA, 65 bp, Rattus norvegicus
ccactggactcttcacacagacggcaaaagcttgaagttaaggaggccatggtgcttgctggcct

SEQ ID NO: 3144 - DNA, 65 bp, Rattus norvegicus
cacatcatgctaacgaagtcagagagagagcagcctaagacatgtggtatcagagccccactgtt

SEQ ID NO: 3145 - DNA, 65 bp, Rattus norvegicus
cgtgttgcttccccttgcatggaggatagtgaatgacacctacaggacggatctttgtcttctgt

SEQ ID NO: 3146 - DNA, 65 bp, Rattus norvegicus
aatatggcctcacaggtacaccacagccgatccaaccccacggacatctatccctccaagtggat

SEQ ID NO: 3147 - DNA, 65 bp, Rattus norvegicus
attgtccagcaccacttagagccaacgacatttgaagactttgcagcccaggttttctctccagc

SEQ ID NO: 3148 - DNA, 65 bp, Rattus norvegicus
ttcggacttggactggtccaacctagtagatgccgccaaagcctatgaggtccagagagcctcat

SEQ ID NO: 3149 - DNA, 65 bp, Rattus norvegicus
accctcgagatatgggcgtaggcaccacattctgatctggaccaagttggaacagcaccatctca

SEQ ID NO: 3150 - DNA, 65 bp, Rattus norvegicus
catgtaccgagaaccatctttgcatgatgttggtgaaacagtcccgaaagctggggtgacaccaa

SEQ ID NO: 3151 - DNA, 65 bp, Rattus norvegicus
gtcaaagctactactgccttccaatttctgcagctctattactccctcattcgggagaccttgcc

SEQ ID NO: 3152 - DNA, 65 bp, Rattus norvegicus
ataagggtgaggagactgttctgtcgcacccagtggtacctgaggattgacaaacgaggcaaagt

SEQ ID NO: 3153 - DNA, 65 bp, Rattus norvegicus
ttaccccaagggacagactgagctgcagaagcccttcaagtacaccacagttactaagcgatccc

SEQ ID NO: 3154 - DNA, 65 bp, Rattus norvegicus
tgtcgtcccagcaataccagcagcaacgtcgaaaatttgcagctgccttcctggccttgattttc

SEQ ID NO: 3155 - DNA, 65 bp, Rattus norvegicus
gatatgtatgatgggagcttggatgaggacttgccgatttgctctgcacttactggctggtcctc

SEQ ID NO: 3156 - DNA, 65 bp, Rattus norvegicus
ggacttacactgtgtgctggtgacgaacccacattcatcacaatggaaggatcctgccttaagtc

SEQ ID NO: 3157 - DNA, 65 bp, Rattus norvegicus
ctctcatcctctgctgtctgtccttcatcctcttcatgatccaactctacaccatgcggagagga

SEQ ID NO: 3158 - DNA, 65 bp, Rattus norvegicus
cgggagcgggaaaaagccagcacatctaaaagtagcctcatccaccaaggcatccggtgaaagac

SEQ ID NO: 3159 - DNA, 65 bp, Rattus norvegicus
gagtgctgctgctgaagggaaaacctacttgaagctgaattggtggactctgctcaataaaggcc

SEQ ID NO: 3160 - DNA, 65 bp, Rattus norvegicus
cgtcaaacacagtgaacgccttcagtcatgctatggaatttgtgtatcctcattactgtatcatt

SEQ ID NO: 3161 - DNA, 65 bp, Rattus norvegicus
gagttgagagctgccaacggcagtaactcttccacagtccactgaatgtctgatgcgttcgttca

SEQ ID NO: 3162 - DNA, 65 bp, Rattus norvegicus
tggttatcttccagcgggaaccagagagtaagaatgcacctcacagccagggtgagtacgatgtg

SEQ ID NO: 3163 - DNA, 65 bp, Rattus norvegicus
tgtaccattgttgccgccacaagtaaaccagtcccttgcttctgtgccaccaatgaacccagctg

SEQ ID NO: 3164 - DNA, 65 bp, Rattus norvegicus
gtttcaagagtgaaccccagatgtttctttccctgtaatctgctgtgggaagtgacaagtgaccg

SEQ ID NO: 3165 - DNA, 65 bp, Rattus norvegicus
cctaaatgcacttcctcagccagtacacaacaatcgcaagatctgttcatggatagtcgacgtcg

SEQ ID NO: 3166 - DNA, 65 bp, Rattus norvegicus
attactagtgagttgactgcagttgacagtcttgtgtctctgatcaaggtggaggtgagaacgcg

SEQ ID NO: 3167 - DNA, 65 bp, Rattus norvegicus
atttggctgaacttgaagggcaaaggtcaaagggaggtcaagctccatgccatcctaaccccttg

SEQ ID NO: 3168 - DNA, 65 bp, Rattus norvegicus
aggactaccgacccatgaaccatgcagctttccgggatgagctgaggaacttccgcctcaagaca

SEQ ID NO: 3169 - DNA, 65 bp, Rattus norvegicus; identical to SEQ ID NO: 1

SEQ ID NO: 3170 - DNA, 65 bp, Rattus norvegicus
agagatggccaaagactttgtagaagacgataccacgcatggttaactgaaagataacgcctgcc

SEQ ID NO: 3171 - DNA, 65 bp, Rattus norvegicus
tctagtaggtcagcgtcgttaggactgttgcccctgcaaactgcttgatgatcgctcctagctct

SEQ ID NO: 3172 - DNA, 65 bp, Rattus norvegicus
gggaatgagcagcctcttcttcggtgtgttgaagtatgtcctagttttcccctggtctggtttgt

SEQ ID NO: 3173 - DNA, 65 bp, Rattus norvegicus
ctcaaggcctcctaggtctccgtccttcggactggtgccccttcattctgctagcgctctgctag

SEQ ID NO: 3174 - DNA, 65 bp, Rattus norvegicus
acaagcaggaggacatgtgggagcttgtgcccaattgttacaccccaatccctaggagggtcagg

SEQ ID NO: 3175 - DNA, 65 bp, Rattus norvegicus
accgagccataacaggatgggaggctctactccttcctgcgcagtcttctccagtgttgtatttt

SEQ ID NO: 3176 - DNA, 65 bp, Rattus norvegicus
ctcggtgttggtaaccgtgtcttaggcattcgtgttcatcgttaaggactattggttagtgcatc

SEQ ID NO: 3177 - DNA, 65 bp, Rattus norvegicus
cacacatgtaccttcagtcagatgatgagatggaactggaggagacggaatcacttccggagcct

SEQ ID NO: 3178 - DNA, 65 bp, Rattus norvegicus
ttcttcatggtgctgctgttctcggaggagtgggcatggcaggacacactcttctctgtgcttca

SEQ ID NO: 3179 - DNA, 65 bp, Rattus norvegicus
gtgctggtgaagcattcagtgttgctgtctgcctctagaaagagcgcagagcagttacgaataga

SEQ ID NO: 3180 - DNA, 65 bp, Rattus norvegicus
cagacgcattgactctgaagttctctctgtggagagtgttttcagttggaagacttggaactgtg

SEQ ID NO: 3181 - DNA, 65 bp, Rattus norvegicus
actgttgcggccacagatcacgtcagcatgaatagtcgtgctgaggggaaaacacggaagactat

SEQ ID NO: 3182 - DNA, 65 bp, Rattus norvegicus
gagaacagagaagggagctgtacagtcggagtggagaacttcaaggaggtcctgatgacaactta

SEQ ID NO: 3183 - DNA, 65 bp, Rattus norvegicus
aaagccgactgcctggttcccagtgagatccggaagctgaaggacaggatacgagaggagatcga

SEQ ID NO: 3184 - DNA, 65 bp, Rattus norvegicus
agttgccaatacgccagcttggacatcagtgtttgttggatccgtttgaccaatttgcaccagtt

SEQ ID NO: 3185 - DNA, 65 bp, Rattus norvegicus
ggatgactttgtgcctctgtaaccaggtattgaaactgttcgtctcaccaggccattccacgtgg

SEQ ID NO: 3186 - DNA, 65 bp, Rattus norvegicus
tgagtttgccctgcttcgagacttcgtcatcaggactcacctccaggacctcaaagaagtaacac

SEQ ID NO: 3187 - DNA, 65 bp, Rattus norvegicus
gatgttgatcagatgttctgggaagttatgcaactaagaaaggagatgtcgttggcaaagctggg

SEQ ID NO: 3188 - DNA, 65 bp, Rattus norvegicus
gttggtgtcctggtaggcaaagaccggtcaagttttttcgtgaatgggctgacacttgggggcca

SEQ ID NO: 3189 - DNA, 65 bp, Rattus norvegicus
cccagggacattcgatcattgcagtagctcagacttcttgtcttttctttgcacaccagctgtac

SEQ ID NO: 3190 - DNA, 65 bp, Rattus norvegicus
actggccaatctggacaagaacatactccactccttcgtccagcttcgagctgactatagatccg

SEQ ID NO: 3191 - DNA, 65 bp, Rattus norvegicus
tttggcgcctgttacattctctatctgcgcacgttgcagtctaagcttgtgctctttggccgtga

SEQ ID NO: 3192 - DNA, 65 bp, Rattus norvegicus
cctcttttgttcagtatgtgtaacttgaagctaatttgtactactggatatctgactggagccac

SEQ ID NO: 3193 - DNA, 65 bp, Rattus norvegicus
tgaatccatgcacacaacctgtctgtccgagcctaggtcttccctgaaaccacagtcattgaacg

SEQ ID NO: 3194 - DNA, 65 bp, Rattus norvegicus
gccatgtacacccgtggtgcaccttgccacctctgattaaagtgtccctaatggatgtcacatgt

SEQ ID NO: 3195 - DNA, 65 bp, Rattus norvegicus
ttggtgaagcggacgaagcggagttacaacgcctggtggccgccgaacagcagaaggcacagttc

SEQ ID NO: 3196 - DNA, 65 bp, Rattus norvegicus
ccgtgcggatcctgtcagagctcctgcagcacatctgcctttactgtcctttaaggatgtataaa

SEQ ID NO: 3197 - DNA, 65 bp, Rattus norvegicus
caatgtcagtgacgctggaacagtgctccatcctgagagacgagcatcagctccacaaagacttt

SEQ ID NO: 3198 - DNA, 65 bp, Rattus norvegicus
aagtaccaacttcccctgttctactgctcagtgccacgcatccgtcctgtctgaggaaagaaaca

SEQ ID NO: 3199 - DNA, 65 bp, Rattus norvegicus
ccaggccattgtgtctgttggacgtttgttccttttcattgctgagaagccttccattacagaga

SEQ ID NO: 3200 - DNA, 65 bp, Rattus norvegicus
atcaatctctccgagttccagcacgtcatctctcgctcaccagactttgccagctcctttaagat

SEQ ID NO: 3201 - DNA, 65 bp, Rattus norvegicus
atagagtatgaagtgggcttctctgggaactgctggcctctgcctccttgatgctaactaagggg

SEQ ID NO: 3202 - DNA, 65 bp, Rattus norvegicus
ttggagagcagatgaggactgtttggaatgattgagtccctctcgtccacgtgtggctttcattc

SEQ ID NO: 3203 - DNA, 65 bp, Rattus norvegicus
ccggctcattcatgagagagagtcttcaatcagacagctggaagctgacattatggacattaacg

SEQ ID NO: 3204 - DNA, 65 bp, Rattus norvegicus
acctgagagcaccgtttaagtgcaaggcggtaaacagggtcagccaggagtctgagatggaagtt

SEQ ID NO: 3205 - DNA, 65 bp, Rattus norvegicus
tacctctcattacccacacacgaaggaaagcaggaccttcatcccagtgacctcagctaagactg

SEQ ID NO: 3206 - DNA, 65 bp, Rattus norvegicus
gtaggctatatttcctgccacaaccctgtgacagtgaatgctttgtaggaatgagagcagccata

SEQ ID NO: 3207 - DNA, 65 bp, Rattus norvegicus
tatattgtccccagcttgttctgagtacacatgccagctgctgctgcagtagaaggcctggaaca

SEQ ID NO: 3208 - DNA, 65 bp, Rattus norvegicus
tttcacatactgggcaagtgttcatctgccaggatgccccattgctcctaggtcttcccaggtac

SEQ ID NO: 3209 - DNA, 65 bp, Rattus norvegicus
ctgtaacccatcctagatggacatcaggaatcaaagcaaagatggtcatgaggtcccgaagatgc

SEQ ID NO: 3210 - DNA, 65 bp, Rattus norvegicus
atgccatcacaacggcttgatgaccttcacctggacaggactccaagtctgagtctcgaagtctt

SEQ ID NO: 3211 - DNA, 65 bp, Rattus norvegicus
ttgacctcgaatgggataacagcgaggctgaagctcaggagtacaaggttgtgtacagcacccta

SEQ ID NO: 3212 - DNA, 65 bp, Rattus norvegicus
gtcctcctggatattgtgattcatcccagtgtgccagcattccatacaacgggcaaggctatcca

SEQ ID NO: 3213 - DNA, 65 bp, Rattus norvegicus
caggtgattatgaagcctttttactgattgcttggaagtccaccaggtttctatggttcctcaca

SEQ ID NO: 3214 - DNA, 65 bp, Rattus norvegicus
tatgactgccgagcactgaggggttgtgcccagagaagagccagtgtgtctctactgtgcctagc

SEQ ID NO: 3215 - DNA, 65 bp, Rattus norvegicus
ggaactgctagtgctgcaatcattcatgttgtgccttgcagatgactacacactacatggcccag

SEQ ID NO: 3216 - DNA, 65 bp, Rattus norvegicus
tggcctcactgtgaaagctggaacaaagatcgaacttcctgctacggtgactggaaaaccggagc

SEQ ID NO: 3217 - DNA, 65 bp, Rattus norvegicus
gccgtttgttcgttcttccgggtgacgacagcttgtctctgccctctccttggcagttggaatta

SEQ ID NO: 3218 - DNA, 65 bp, Rattus norvegicus
tctgtatggaaacaaaggaatagacggcagggattctgatctgctggtagatggagatttaggtg

SEQ ID NO: 3219 - DNA, 65 bp, Rattus norvegicus
tggaatggtgccttccagcctctccatgtgcatgaaaagtgacaagcatgggtccccatatttct

SEQ ID NO: 3220 - DNA, 65 bp, Rattus norvegicus
tgcccaacctctgagaagtaggaatcagcacccacacagctgagcttcagaaacctcgtcctcca

SEQ ID NO: 3221 - DNA, 65 bp, Rattus norvegicus
tacagctctaagatgagcctcccagtccaaatatctgtggtgagtgagtgaccttgcctctcatc

SEQ ID NO: 3222 - DNA, 65 bp, Rattus norvegicus
aacgaataagccatctcgcctgccattccttgacattgcacctctggacatcggtggtactaacc

SEQ ID NO: 3223 - DNA, 65 bp, Rattus norvegicus
aactgacaggagcattgtttgctacctgccatgttgtcctcgtatgcaggcggatgacactgtgt

SEQ ID NO: 3224 - DNA, 65 bp, Rattus norvegicus
aatccatagaagtcttggacaggcggactcagagagacctgcagtacgtggagaagatggagaac

SEQ ID NO: 3225 - DNA, 65 bp, Rattus norvegicus
tggacagggtccttccatgctacagttccttgcttcttggagactgggccttacatcctgagaga

SEQ ID NO: 3226 - DNA, 65 bp, Rattus norvegicus
tggcctctataaagggtcctcagcaagaagcaagcatgagtggtggccaacctgaccaataaagt

SEQ ID NO: 3227 - DNA, 65 bp, Rattus norvegicus
tctctcagacaaccatctcttggacgccattccaggagagttctgagtacatcatttcatgccaa

SEQ ID NO: 3228 - DNA, 65 bp, Rattus norvegicus
ttgtgcctggtaaccgcctcaagattctggttggcatgtatgacaagaagccagcagcacctgga

SEQ ID NO: 3229 - DNA, 65 bp, Rattus norvegicus
ggtgggtggagggtacactcctttctttgtccctccttcactagtctgtggtgccattgattcat

SEQ ID NO: 3230 - DNA, 65 bp, Rattus norvegicus
ccagactaagggaggcaaaggattaccagatgtaggtttggggcatcaagatgatagtgtggccc

SEQ ID NO: 3231 - DNA, 65 bp, Rattus norvegicus
agaagttccccttggttgtctcaggtactgcctcaatgaagagcaccacggtggttatctggcta

SEQ ID NO: 3232 - DNA, 65 bp, Rattus norvegicus
aactcacaagaacaaccacagcaaacaaatccagaggagaaaccgcctgctcctaagactcagga

SEQ ID NO: 3233 - DNA, 65 bp, Rattus norvegicus
cactggctcctgctaactcctccacccttgttccgttgtctcctcgagctacaacctggcctctt

SEQ ID NO: 3234 - DNA, 65 bp, Rattus norvegicus
cctgctcgcatgacatccaggttttggaaatgagccttgtaatataactcgctatgcttctcctt

SEQ ID NO: 3235 - DNA, 65 bp, Rattus norvegicus
acaggtgctgggcacaggaactgtatgtcctacacaatggtgctattctgtgtcaaacacctctg

SEQ ID NO: 3236 - DNA, 65 bp, Rattus norvegicus
gcacagccagcaatttgttggggaaagccagtcacgattttcacgtcatagtagaagagcctccc

SEQ ID NO: 3237 - DNA, 65 bp, Rattus norvegicus
tgaaaacccgagttagtccaaggcactggagcatctgcctcaccaggtgaccaggctgtggaaaa

SEQ ID NO: 3238 - DNA, 65 bp, Rattus norvegicus
gcaaatcaagtggtatcatgttcaaagacagtaacgaaagacagggctgtgttccctgacgagat

SEQ ID NO: 3239 - DNA, 65 bp, Rattus norvegicus
ccgtgttttaagcactcgttgtgtgccagccaacatccaaaggacttcataggtattcactcact

SEQ ID NO: 3240 - DNA, 65 bp, Rattus norvegicus
gagcaccattttccaaagcacaaagcagtttttatccctggggtgggaggaagcaagagactctg

SEQ ID NO: 3241 - DNA, 65 bp, Rattus norvegicus
cctcgtgttcttgttaatcttcccggttttatcactggaccaccattggttgtacaaggtaccac

SEQ ID NO: 3242 - DNA, 65 bp, Rattus norvegicus
gtagcctgcatatggcttctcacggtcatcctaggcttctgcgtctccttcaatgttgatgtgaa

SEQ ID NO: 3243 - DNA, 65 bp, Rattus norvegicus
agctccacagaaccttagctgggcctctaccctgatgtaactgtgaggcttagattcctgaccat

SEQ ID NO: 3244 - DNA, 65 bp, Rattus norvegicus
ccttcatgctcggcgctgcagattcaacatggagctttacaagctatcagggcgcaagagcgggg

SEQ ID NO: 3245 - DNA, 65 bp, Rattus norvegicus
ctctagactttcactcaggactcagaatcaggttctgctagccttgttccttcaaaagttggtga

SEQ ID NO: 3246 - DNA, 65 bp, Rattus norvegicus
tcacggctggacaagcagttccagatcctgaccagtctgcacacacactctggcgctgtatctgg

SEQ ID NO: 3247 - DNA, 65 bp, Rattus norvegicus
accaccactcctgtggttagaactgctcctgcagtatttactccagtttctaaggctacagatat

SEQ ID NO: 3248 - DNA, 65 bp, Rattus norvegicus
acttcagcctttgtttctgacctgtcaggctaactagcacttccaacagcctcctggagagcttc

SEQ ID NO: 3249 - DNA, 65 bp, Rattus norvegicus
tagtccaggatgtggctctgtctgggtgcagtatgcagtcatgtggaaccttgctttctagtgct

SEQ ID NO: 3250 - DNA, 65 bp, Rattus norvegicus
tataatcacggcgtttgcgcggttctgtatcagttccagcggagcctctggctgtgcattggtgc

SEQ ID NO: 3251 - DNA, 65 bp, Rattus norvegicus
aaagcaaggttgagtctagcacggctgtagagagaagccctgtctatacacaggcaagctaaggg

SEQ ID NO: 3252 - DNA, 65 bp, Rattus norvegicus
catttcattgacacatttcggtccagtgtagctgtacatatggggtgaggacaacctgttactgg

SEQ ID NO: 3253 - DNA, 65 bp, Rattus norvegicus
atagctgtcatcccatgtctggagagtgtggctgcaagccgggttggtctggactgtactgtaat

SEQ ID NO: 3254 - DNA, 65 bp, Rattus norvegicus
gctagattctggaaattcaagtatagcgcggatgcctttcccgtatgacttatcatgcatcaagc

SEQ ID NO: 3255 - DNA, 65 bp, Rattus norvegicus
ggtctgaagcagagtaagtaaccagtaaaaggacaagaggaactcccgagaccaggtagaagtcg

SEQ ID NO: 3256 - DNA, 65 bp, Rattus norvegicus
cttctagtgggaaagactacgtgtgacagcggcgaaggaagagatcctcctggagcgaatacaaa

SEQ ID NO: 3257 - DNA, 65 bp, Rattus norvegicus
ctgtgaatgacacccaagtgttttggcaccatgaacaaactagcaaggagcaggaaggccagtac

SEQ ID NO: 3258 - DNA, 65 bp, Rattus norvegicus
caagctcttacctagaacttggtagtgcacaggagcacctgcatccgagagcatgcgtacatttt

SEQ ID NO: 3259 - DNA, 65 bp, Rattus norvegicus
cggataacacggatgtccgggatttcattaatgagcgcctcaaagagcacgacttggaccccact

SEQ ID NO: 3260 - DNA, 65 bp, Rattus norvegicus
ctccttggagtctgccaccacagattcggacctggactacgactatctacagaactggggacctc

SEQ ID NO: 3261 - DNA, 65 bp, Rattus norvegicus
agctctactcgtgtttcattaccatacctgccacagacttccaagaccattgcaaaggaaggacc

SEQ ID NO: 3262 - DNA, 65 bp, Rattus norvegicus
cgatgcaggcctacaccaattgcacatccgtctgcatgttttggacacccgtgtggttgagctga

SEQ ID NO: 3263 - DNA, 65 bp, Rattus norvegicus
tgtcagagaaagttggaaacaaatcacagctcgcatccccatagtcgcagatcacgatgtaaatc

SEQ ID NO: 3264 - DNA, 65 bp, Rattus norvegicus
ctggcggttgatcttcctgatccacagtggaaaagctcagttcaacagaaatcagacctcatggg

SEQ ID NO: 3265 - DNA, 65 bp, Rattus norvegicus; identical to SEQ ID NO: 1

SEQ ID NO: 3266 - DNA, 65 bp, Rattus norvegicus
tcagtaacactgctcttggctttgatgcttccttccagttcctggtgaaagcagctcacgcagtg

SEQ ID NO: 3267 - DNA, 65 bp, Rattus norvegicus
ggttgccacctgattacctggcctaggaactgtccaagtcgaatggacaaagacacctcgccctt

SEQ ID NO: 3268 - DNA, 65 bp, Rattus norvegicus
gtttgagttccgtgggagttcagatcttgaagcccagtacccagttcctgacaatggttggattt

SEQ ID NO: 3269 - DNA, 65 bp, Rattus norvegicus
agaaggtattctaccaaggccgttactatgagagtctgactcagctggaggacatgtttgaggct

SEQ ID NO: 3270 - DNA, 65 bp, Rattus norvegicus
tggagcggacacagactatgctgatggcggtgaagacaaagtcgtagaagtagccgaagaggagg

SEQ ID NO: 3271 - DNA, 65 bp, Rattus norvegicus
agtcatcagtacctgctggctccagcctcagtgcctgggcttggcagtgtctcttggcatcgaga

SEQ ID NO: 3272 - DNA, 65 bp, Rattus norvegicus
gacactgaaggaaggggtcacgagaagatggggtctgtggctgtatgtcgtgtgctctggacact

SEQ ID NO: 3273 - DNA, 65 bp, Rattus norvegicus
ttctagtctgagttgatgaatgagatgcccttacagctcctgtttcagtttctactcccatcccc

SEQ ID NO: 3274 - DNA, 65 bp, Rattus norvegicus
aaaggagatgggtgagatacacagagagctcaatgcctaaccaaccatgccgtgtgctgcactga

SEQ ID NO: 3275 - DNA, 65 bp, Rattus norvegicus
ggccattcagcagtcactggggatgcgctgtccagaagatgagtatgcgggatatggttaccata

SEQ ID NO: 3276 - DNA, 65 bp, Rattus norvegicus
tcggtgtttcagctgctatcgactacaagagttacgggacactagaggcttgctggcttcacgtt

SEQ ID NO: 3277 - DNA, 65 bp, Rattus norvegicus
gaggtacagaaacttctagggccacacattggggacctgaagactgaggaggataaaagccctgt

SEQ ID NO: 3278 - DNA, 65 bp, Rattus norvegicus
aagctcaccttcgagtgcagcgatgggacctcgtttgctgaggaggtggagaagcccaccaagtg

SEQ ID NO: 3279 - DNA, 65 bp, Rattus norvegicus
ggatttgtgtccagcctgtcgcttaatctctccctggagttatggagtctgccctgcatttgttt

SEQ ID NO: 3280 - DNA, 65 bp, Rattus norvegicus
ttcatgattgagacccattgtgccccaattcctgcccaccaggtcgctctggctatccaggccta

SEQ ID NO: 3281 - DNA, 65 bp, Rattus norvegicus
atcatcaagtatgagctggtgtactgggcagcagaggatgaaggccagcagcacaaggtgacctt

SEQ ID NO: 3282 - DNA, 65 bp, Rattus norvegicus
tttataagtggtgtggaagacataatctctggtgccagtggtaccgtgaggccctgaagacaaaa

SEQ ID NO: 3283 - DNA, 65 bp, Rattus norvegicus
ccatggatccttgggaatgcactaacccatccacccaaattaggccttgtgaacagatggaccaa

SEQ ID NO: 3284 - DNA, 65 bp, Rattus norvegicus
cagttttccagtcaagtactcagcaccaaggcgaaccacggccaatggcgattacgacaagaaga

SEQ ID NO: 3285 - DNA, 65 bp, Rattus norvegicus
aggagtgaccttggacccaccagtgagcgaggagcgatcggtgcaacagagccaccccactacca

SEQ ID NO: 3286 - DNA, 65 bp, Rattus norvegicus
acgaagcctctacagtgagcctttcaaggaatccccgaaggtggagaaacctagtgttcagagtt

SEQ ID NO: 3287 - DNA, 65 bp, Rattus norvegicus
gccttctgacaaagaaagacatcgaaagcagaaacgtcctcctcctgagactctacatcacagag

SEQ ID NO: 3288 - DNA, 65 bp, Rattus norvegicus
cagagtacagctcagctggatgtgtttgctcaccagttccagaaacttctgtagactctaggttt

SEQ ID NO: 3289 - DNA, 65 bp, Rattus norvegicus
gaggagatcatgtcttcactcaagtctgttaacggacaaatagagagtcttatcagccctgatgg

SEQ ID NO: 3290 - DNA, 65 bp, Rattus norvegicus
gcaggctcctggaacagaaggccgagagctgccacaacagctatatcgtcctgtgcattgagaat

SEQ ID NO: 3291 - DNA, 65 bp, Rattus norvegicus
aaatcgaagattgaggactactttccagagttcgctcgctacaccactcctgaggatgcgactcc

SEQ ID NO: 3292 - DNA, 65 bp, Rattus norvegicus
attcaaacagacctcgtcattcctggtgtgacctgctggggctcatctcatgtccacttgcctta

SEQ ID NO: 3293 - DNA, 65 bp, Rattus norvegicus
gtacccctctatgagtcccctcctggtggcagatatgtgtccccgaagaagggaaccaatgaaaa

SEQ ID NO: 3294 - DNA, 65 bp, Rattus norvegicus
aggtgtgctctgaacaagctgagaccgggccatgccgtgcaatgatctcccgctggtactttgat

SEQ ID NO: 3295 - DNA, 65 bp, Rattus norvegicus
taaggctaaataccggcacgagaccgatagccaacaagtaccgtaagggaaagttgaaaagaact

SEQ ID NO: 3296 - DNA, 65 bp, Rattus norvegicus
acaaaacacgaagtcgctttgggcaaatcagtccaagcctccttagagcttctgtgtgcctgcag

SEQ ID NO: 3297 - DNA, 65 bp, Rattus norvegicus
atgtggtagctgagaaccagcaaggaaaatccaaggcagctcacttcgtgttcaggacttcagcc

SEQ ID NO: 3298 - DNA, 65 bp, Rattus norvegicus
tctgactccgtgcacctctcatggactgtggtccagggtccctttgactccttcctggtccagta

SEQ ID NO: 3299 - DNA, 65 bp, Rattus norvegicus
ccagaggcatttaagtaaacagagatgtgggatgaaggaccccagcttccgttcccaagctctgt

SEQ ID NO: 3300 - DNA, 65 bp, Rattus norvegicus
ggcccattctgagtcgatataagcagtggtcatcgtgtgtaacacgtgtgtgacatctgatgctg

SEQ ID NO: 3301 - DNA, 65 bp, Rattus norvegicus
caggacagcaagcagtgctgacaggttactgatctgggctagagatgaagactttctgtgagact

SEQ ID NO: 3302 - DNA, 65 bp, Rattus norvegicus
agaagccaactagaaatcttctgctcggcaagtccccattgctgaagagaccggaacagtcccat

SEQ ID NO: 3303 - DNA, 65 bp, Rattus norvegicus
ttagcataaccacatttcaggggacaccaatgtccgcttttgcatcgctacgtgcagcgagcaca

SEQ ID NO: 3304 - DNA, 65 bp, Rattus norvegicus
aggtcaagatcaatcaccagaagtgctgctcggaggcatgaccgattgtgtctgaatcgcttctg

SEQ ID NO: 3305 - DNA, 65 bp, Rattus norvegicus
ccagactctgaatgacgaggttccgaagtaccgagaccagattcctagtccaggacttatggttt

SEQ ID NO: 3306 - DNA, 65 bp, Rattus norvegicus
taatgaaagcagagtgaacctcaccatccaaggactgagggctgctgacaccggactgtacttct

SEQ ID NO: 3307 - DNA, 65 bp, Rattus norvegicus
ccaagccttgggaattcagcaggtggcaccttctcacccagcaagtccgagctgtgaatggtatt

SEQ ID NO: 3308 - DNA, 65 bp, Rattus norvegicus
tggatagtgaggagcaggaggtcctgtcaggaggaagagtagctgaggtccactcagttggagaa

SEQ ID NO: 3309 - DNA, 65 bp, Rattus norvegicus
tttaaggaccccttccactgccctatgtgtagggagccctgttcttgtcttgtgtgcttgggcat

SEQ ID NO: 3310 - DNA, 65 bp, Rattus norvegicus
ccggcatcgttggaagtaaaagcaactgctataggtgtgccgacaagtatgtcctaaaacagcca

SEQ ID NO: 3311 - DNA, 65 bp, Rattus norvegicus
cgcggagcagagcgtgcagaagccagaccatccaagttgactggccacttggagcggaatcagga

SEQ ID NO: 3312 - DNA, 65 bp, Rattus norvegicus
catgtgtaagcagagataacacagatatctcagccgattcctgagttggagacaccctgggatgc

SEQ ID NO: 3313 - DNA, 65 bp, Rattus norvegicus
ttgcctgagcttggtgagagaatgtgagaactgacctgacctggaccaggacagggaaaagcctg

SEQ ID NO: 3314 - DNA, 65 bp, Rattus norvegicus
tccgaagatgggaattgaaccccagtgaagactgtgacagtgttcccttttgtcggtgtttacaa

SEQ ID NO: 3315 - DNA, 65 bp, Rattus norvegicus
ttctatgagggtcctgagctagtagctgacagcaacgtggtgctggacacagctatgcgtggtgg

SEQ ID NO: 3316 - DNA, 65 bp, Rattus norvegicus
ttctggagtcggccatcccaaatttcatcggtccatagacacaagcacagagtgagaaacagggg

SEQ ID NO: 3317 - DNA, 65 bp, Rattus norvegicus
tggtgttccaggcttgcttggacccaaaggagaacctggcataccaggggatcaaggtctacagg

SEQ ID NO: 3318 - DNA, 65 bp, Rattus norvegicus
ctacttcatgaggcacaggaactgacgagctgtctgggtttactcactactccgtgcttacatac

SEQ ID NO: 3319 - DNA, 65 bp, Rattus norvegicus
cttttccctgacatggatgtatgatcacggggtcaaatcactcctatccaaaacctcctccctgc

SEQ ID NO: 3320 - DNA, 65 bp, Rattus norvegicus
ctgtggttcgctcagcagctgtgctcttcctgtatgcctttgcttggtctgttgatgagccctct

SEQ ID NO: 3321 - DNA, 65 bp, Rattus norvegicus
gtcctccatgcacgcacaccaactccaaaagtgccttagtcaagagcatttctcctttcaggcac

SEQ ID NO: 3322 - DNA, 65 bp, Rattus norvegicus
atgagatatcctctgagcccttctgggaagcccacgataccattggtctcctgctgtcttcatca

SEQ ID NO: 3323 - DNA, 65 bp, Rattus norvegicus
ttaacatccacattcctccacgtgaatctcttcctttggaactgcgggcaccttgttgcctctgg

SEQ ID NO: 3324 - DNA, 65 bp, Rattus norvegicus
atatgtgatagctaccaagtctcatgaggtgggaccggcatacagtagtagagagacaatactac

SEQ ID NO: 3325 - DNA, 65 bp, Rattus norvegicus
aacagacaaggggctcctgacctttgtggaccatctgcctgtcactcaggtagtgataggtgaca

SEQ ID NO: 3326 - DNA, 65 bp, Rattus norvegicus
acatttgcaggagaggtccccgaaaaccgtatagagacagtagtggccaacctcacagtgatgga

SEQ ID NO: 3327 - DNA, 65 bp, Rattus norvegicus
actaagtctaccctgacctcgtcctataactgccccagcccctatgcagatgggaggctgtacca

SEQ ID NO: 3328 - DNA, 65 bp, Rattus norvegicus
acagagtctgctggcagatcactgtgacagctcttggaatcctgtgtttctttcggctagtatcg

SEQ ID NO: 3329 - DNA, 65 bp, Rattus norvegicus
tacctcacttcctccaccgctcttcagcccctttgatgtcccctcagagaataccgatatacaca

SEQ ID NO: 3330 - DNA, 65 bp, Rattus norvegicus
agaggaacccaagatcaagccaggctcacgtcagaaaccgagaattacaggctgatactctctcc

SEQ ID NO: 3331 - DNA, 65 bp, Rattus norvegicus
gagagtgttatgtcccctggcacctgattgtgatagctttgggaatcctctgtacacttcttctg

SEQ ID NO: 3332 - DNA, 65 bp, Rattus norvegicus
gagtgtttgtccttgtttgtctgaaaccacgtgctccacaaagtcagaggcttgagaaaagggta

SEQ ID NO: 3333 - DNA, 65 bp, Rattus norvegicus
gtaactgagtacggatttcaacacgaccaacagctcctcctaatttcctctcactcactcatcct

SEQ ID NO: 3334 - DNA, 65 bp, Rattus norvegicus
gggccacagaatactggttgcttcaggggcaataccctctgtcctggcctggaatcagtgttatt

SEQ ID NO: 3335 - DNA, 65 bp, Rattus norvegicus
catggcgtttcctagtgggcttctcgacctctgatcctcagctctgtggttcccttaagaccaca

SEQ ID NO: 3336 - DNA, 65 bp, Rattus norvegicus
atgagctggacgaggcggaataccaggagatccggctgatggtcatggagatccgtaacgcttat

SEQ ID NO: 3337 - DNA, 65 bp, Rattus norvegicus
ctgttgtcctatgttgggattgtgagcatgcatgagtaggctcagctgtggtgagcgaccttaat

SEQ ID NO: 3338 - DNA, 65 bp, Rattus norvegicus
atctgaggcattagccggttcaccaatgttttgggctccctgctcagtcttcaccccaagctaaa

SEQ ID NO: 3339 - DNA, 65 bp, Rattus norvegicus
tgattcctcaggctaccaaagcgcccagccaatgggactatgatggcccttcatggtgtcttgaa

SEQ ID NO: 3340 - DNA, 65 bp, Rattus norvegicus
ttatcctccttatataccacatcctccacaccatagacctccagccaatcctcctacaaggcctc

SEQ ID NO: 3341 - DNA, 65 bp, Rattus norvegicus
agtttggccacatgtctgtcacggtggagaagcatatggttcatgagatcaagggggacacagtg

SEQ ID NO: 3342 - DNA, 65 bp, Rattus norvegicus
atgttgattgagcgctcttctgactttggcaagacatggagggtgtaccagtacctggcgacaga

SEQ ID NO: 3343 - DNA, 65 bp, Rattus norvegicus
gccaaatttctcggtaatcagcaagtgagttacgggcagagcctgtcttttgactaccgcgtgga

SEQ ID NO: 3344 - DNA, 65 bp, Rattus norvegicus
aaggttctgtcagcctgaatggctgccctgaccactaaccctacatagcaagattcacctttgga

SEQ ID NO: 3345 - DNA, 65 bp, Rattus norvegicus
ccggctctcatttcgcttgtaattggctttgcttttggagccttatactggaagaagaaacagtc

SEQ ID NO: 3346 - DNA, 65 bp, Rattus norvegicus
aagcgtgacgcactaactctgccacatagcaccgagtccctcttaaaagcctttacttctcatcc

SEQ ID NO: 3347 - DNA, 65 bp, Rattus norvegicus
ttgacgctgcaagttctggtggctggcaacccacagaatgtacgtctgcggtacagtttctttgt

SEQ ID NO: 3348 - DNA, 65 bp, Rattus norvegicus
cactaccaaacgtagcccctatgaagaggtttcgacaggcaatggcagtagcggtctctcttaca

SEQ ID NO: 3349 - DNA, 65 bp, Rattus norvegicus
acctcaagtaccgctgtaacgacaccataccagaggacttccaggagttccagatccagaccttt

SEQ ID NO: 3350 - DNA, 65 bp, Rattus norvegicus
gacctcacagggcacaaggaagtagcaatgtgatgaaaccccatactttccatgtgtatcaggtg

SEQ ID NO: 3351 - DNA, 65 bp, Rattus norvegicus
gcagtgcctttaatgagcacggttcccagtttgccatgcgttttgatgactgatagaccaaagtc

SEQ ID NO: 3352 - DNA, 65 bp, Rattus norvegicus
gaggcagtctggaagaagcccggataccccctgtcggggctccttactctctttaggacaatcta

SEQ ID NO: 3353 - DNA, 65 bp, Rattus norvegicus
gcgcagctctggcttgtccagccgcgagaactcagcccttactctgactgattctgacaatgaaa

SEQ ID NO: 3354 - DNA, 65 bp, Rattus norvegicus
tccaagacccagtataaccaagtccccagtgaagactttgaacgtgctcctcagagtccgactct

SEQ ID NO: 3355 - DNA, 65 bp, Rattus norvegicus
gcattgagtgtaaggcgtatggtgagaacattgggtacagtgagaaagaccgttttcagggacgc

SEQ ID NO: 3356 - DNA, 65 bp, Rattus norvegicus
ccaggagcttagccagtgtggtatagctcagacctctatgctgccaccatccgaataaaaggtgt

SEQ ID NO: 3357 - DNA, 65 bp, Rattus norvegicus
tgccatggacgagggacctgcaactactactcaaactcttacagcttctggctggcttcactaaa

SEQ ID NO: 3358 - DNA, 65 bp, Rattus norvegicus
cgcttgcccatcatagatatcggtcctgtggatattggcaatgcagaccaggaatttggctttga

SEQ ID NO: 3359 - DNA, 65 bp, Rattus norvegicus
gccttcttttacacccagccatccctgtattccaggacaggacagaactgcaatcttccaatcag

SEQ ID NO: 3360 - DNA, 65 bp, Rattus norvegicus
gatgggccagtcttgcaacacctgatgtgctgttccatttcctggtgctttctcacctcttatca

SEQ ID NO: 3361 - DNA, 65 bp, Rattus norvegicus; identical to SEQ ID NO: 1

SEQ ID NO: 3362 - DNA, 65 bp, Rattus norvegicus
ttgaggacctgacaggaaacagagtgcgctacactaactggaatgagggtgagcccaacaatgtg

SEQ ID NO: 3363 - DNA, 65 bp, Rattus norvegicus
ccactctcctgcagaggatgaagaagaaactgatggggatacaccactgtaggcggttaaagaac

SEQ ID NO: 3364 - DNA, 65 bp, Rattus norvegicus
atggtcgggagagttcaacctgatcggaaacagttgccactggtcctactgagactgctctgcct

SEQ ID NO: 3365 - DNA, 65 bp, Rattus norvegicus
gaggcggcttcctcattcttcacagccttccctgggtcctccttgctacactgacccttgggtgc

SEQ ID NO: 3366 - DNA, 65 bp, Rattus norvegicus
agacttctcatgaccacctcctgcttgtgagcactgccgagatcctctttaacgactccgcattt

SEQ ID NO: 3367 - DNA, 65 bp, Rattus norvegicus
cccagagacaaccagctcatccgtggaaaattcctctagtgcttactcattgctcaactaggacc

SEQ ID NO: 3368 - DNA, 65 bp, Rattus norvegicus
gcactggaagtctactgtgatatgacctctgatggaggtggatggatcgttttcctgagacgcaa

SEQ ID NO: 3369 - DNA, 65 bp, Rattus norvegicus
aaagggacttgagttatctgtgagggagaaccagaattggcccagcctatgaggaaggagtggcc

SEQ ID NO: 3370 - DNA, 65 bp, Rattus norvegicus
tagggttgtctcagccaatgtttcctagctggaatcctgtccatgtatgtgttcctgaagcccag

SEQ ID NO: 3371 - DNA, 65 bp, Rattus norvegicus
gcctcagattccttcaaaacacagctatctagagagccacatcctgttgactgagagtggcatgc

SEQ ID NO: 3372 - DNA, 65 bp, Rattus norvegicus
tggtggatggctgtgctaccaagaaaggctaccagaagacggtgctggagattgacacgcccaaa

SEQ ID NO: 3373 - DNA, 65 bp, Rattus norvegicus
ctaaatggtgctgccctgctcgtaactgggaactgtatgaaatggggaatgaatggtttgtggtc

SEQ ID NO: 3374 - DNA, 65 bp, Rattus norvegicus
atagaaaacggcacccagatctacattgcaattctggccgaaaatgaagccggtctcacctctga

SEQ ID NO: 3375 - DNA, 65 bp, Rattus norvegicus
agaagctctggatgaacggctcggtgacttcgcattcccagatgaattcgtctttgatgtctggg

SEQ ID NO: 3376 - DNA, 65 bp, Rattus norvegicus
aaaacagaagagacattgccaggattccagattccgtgacaaggccgacacaggggcagtcacag

SEQ ID NO: 3377 - DNA, 65 bp, Rattus norvegicus
actgctgtggagttccctggcagccaggacaagcaggcttggcaatggcgcaaccctgaggactt

SEQ ID NO: 3378 - DNA, 65 bp, Rattus norvegicus
gcgttgttaggttttcgtgtaagactcttgctgtatcgtgacagctgtgattggtgagttgaccg

SEQ ID NO: 3379 - DNA, 65 bp, Rattus norvegicus
ttctccatcctgccagctgtcttccatcctgggaaccagaagcaatatggtggctttgacaacag

SEQ ID NO: 3380 - DNA, 65 bp, Rattus norvegicus
taaataccacataacctgctccagctctaaagcaagagtccccacccagtccaaagacaccctgc

SEQ ID NO: 3381 - DNA, 65 bp, Rattus norvegicus
tgtgtggcacaacatctccatcattgctactgagatcaggaaccacagtcagatatcgcgagtgc

SEQ ID NO: 3382 - DNA, 65 bp, Rattus norvegicus
tcgccctcttctggcacctgcaggcactacactcatgtgcacagacacacctaaacgcataatta

SEQ ID NO: 3383 - DNA, 65 bp, Rattus norvegicus
attcagctacaacacaggttcccagcagacgtgtgccaacaatagacaccagtgctctgtgcatg

SEQ ID NO: 3384 - DNA, 65 bp, Rattus norvegicus
agatacaacagaatgcggttcaaaaccacacggccaccatgctggagataggaaccagcctcttg

SEQ ID NO: 3385 - DNA, 65 bp, Rattus norvegicus
ggtggttcgacgcatgtggtccttccaacttgaatggacagtactacccacaaaagcagaatacg

SEQ ID NO: 3386 - DNA, 65 bp, Rattus norvegicus
cagagttgctgcagaaaatgccataggacaaagtgactacacagaaatcggagattccgtcctgg

SEQ ID NO: 3387 - DNA, 65 bp, Rattus norvegicus
gcttactttgtagagctgacactaaattaccgaaggacttaggtgctctgtgtacttaaccccag

SEQ ID NO: 3388 - DNA, 65 bp, Rattus norvegicus
aacgagagcccgatgacgagggccaagaggatgactaaggggaattaacctgtttggggaaattc

SEQ ID NO: 3389 - DNA, 65 bp, Rattus norvegicus
ctcagcttgctcctgccctcccttggctttcttgtcttctattcggaattctgaacgttgtgaca

SEQ ID NO: 3390 - DNA, 65 bp, Rattus norvegicus
ggcagtgacaaacgcttggtcaataagtgccagaactgttcctgcacaaagtgtcccaacttctg

SEQ ID NO: 3391 - DNA, 65 bp, Rattus norvegicus
tcagggcagaacttgctctgatgcccttggtgactttctccacttgaatggctctctctttagaa

SEQ ID NO: 3392 - DNA, 65 bp, Rattus norvegicus
attcctctggccaaactcaaagattcgggaacctattcatgcacagcttccaatgaggctgggag

SEQ ID NO: 3393 - DNA, 65 bp, Rattus norvegicus
agggcgtgctaacaggataccagtagtacttggctgcatacctttccatgctgtatttctgcccc

SEQ ID NO: 3394 - DNA, 65 bp, Rattus norvegicus
gtttgcaggtctctacataagctctcgccacagagttcacagctgccctgactctttcccatttt

SEQ ID NO: 3395 - DNA, 65 bp, Rattus norvegicus
taagaacttgctgctcagagatgcatccacagtgatcccagtgatggtatacttggacccggtgg

SEQ ID NO: 3396 - DNA, 65 bp, Rattus norvegicus
aagatgcatgaaacatgctgcacagaggacatagctgtgtatgtgattgcgacgtggttgggtac

SEQ ID NO: 3397 - DNA, 65 bp, Rattus norvegicus
agactctgagcctctggaattaggaggtcctggtgcagaatctgaacaggcagagcagacagcag

SEQ ID NO: 3398 - DNA, 65 bp, Rattus norvegicus
agttcccagcctgaggaaaccagtgcctccatcgtctccttggctctcagtcgcttccaaagaaa

SEQ ID NO: 3399 - DNA, 65 bp, Rattus norvegicus
cactaagggacaacccatctgtagggcatttctatcctgtgaccatttgtctgtcctgcacttcg

SEQ ID NO: 3400 - DNA, 65 bp, Rattus norvegicus
agatatacctggagatgggaggccagatgctgaccctggagagcacaaacagcagagattttgtg

SEQ ID NO: 3401 - DNA, 65 bp, Rattus norvegicus
ctccaaccagccaatagttacagttagtgcagataacctggatgacacagtcaatggaccaagat

SEQ ID NO: 3402 - DNA, 65 bp, Rattus norvegicus
gacgtgcaaaacccagaggaagtggcaaagaatagcagcaagatcaaggttaaacagagaggtcc

SEQ ID NO: 3403 - DNA, 65 bp, Rattus norvegicus
atggattaccgggccttggtgcacgagcgagatgaagcagcctatggggcgcttagggccatggt

SEQ ID NO: 3404 - DNA, 65 bp, Rattus norvegicus
ggcatttcaagatgcacttgccctgctgctccttaggccatttctgtagtttacagttagagctc

SEQ ID NO: 3405 - DNA, 65 bp, Rattus norvegicus
gtgtccaaggctcagaacatgccaatggatcactgctccttccgaaaaccatccagatgaagaca

SEQ ID NO: 3406 - DNA, 65 bp, Rattus norvegicus
ctgtgagactcctccatatctcgtgagctaggaatccactctcctgcctatctctgcaatgaaga

SEQ ID NO: 3407 - DNA, 65 bp, Rattus norvegicus
ttaccacagccatttcgagcttttctgcaacggcaggaagtccacgtacctggggcaacttagaa

SEQ ID NO: 3408 - DNA, 65 bp, Rattus norvegicus
cccacccctagcaaacccgtcttgtctgatacacctagatgtctctctcagcaaacctcccaatg

SEQ ID NO: 3409 - DNA, 65 bp, Rattus norvegicus
gatggctgcacgagtcacaccggtacttggggcaagacagtcatcgaatacaaaaccaccaagac

SEQ ID NO: 3410 - DNA, 65 bp, Rattus norvegicus
tttaactctgtagtccactagcaccgtgcttgctggaggctttggcgtaggctgcgaaccagttt

SEQ ID NO: 3411 - DNA, 65 bp, Rattus norvegicus
tggagctgggagaaatggagctgctcacgatgcgctgtgtgttgaagtgctgaaaacctctgctg

SEQ ID NO: 3412 - DNA, 65 bp, Rattus norvegicus
agtccgccaaggacaccactgggaccctcactaagcaaggacctttggaccagacaagaagtctc

SEQ ID NO: 3413 - DNA, 65 bp, Rattus norvegicus
ccttgcaccctcatgggaggtttattccagttcaaggagatctgcgccttctggtccctgcagat

SEQ ID NO: 3414 - DNA, 65 bp, Rattus norvegicus
tgaaatccccagcttctggctcaaccaccagggcatccagatcgtgtgtgagacactgaccgagt

SEQ ID NO: 3415 - DNA, 65 bp, Rattus norvegicus
tctataacaccccatcccaacacctagagcccacagagagcagaatcgctgcccatagatcatca

SEQ ID NO: 3416 - DNA, 65 bp, Rattus norvegicus
gccgcatggagaaagcaggaaagatgcttgattccgaatgagcaaagacaaaggtatcctgtggg

SEQ ID NO: 3417 - DNA, 65 bp, Rattus norvegicus
atgggccaccagaagaaaatccttggaagcatccagacaatgaggtcccagctgagctgcactca

SEQ ID NO: 3418 - DNA, 65 bp, Rattus norvegicus
agtgtggtatggttacgaagaccaggacctaaacttcacagagagcccagcctgctgttctgatg

SEQ ID NO: 3419 - DNA, 65 bp, Rattus norvegicus
gtgtgaccagattctcggtgacacacagttgtgcagatcactaggagaacaaggttgggttttct

SEQ ID NO: 3420 - DNA, 65 bp, Rattus norvegicus
acataccagggcaagggtggtaacatgtgtagtcagtccccaaggaacactggcatgctgggact

SEQ ID NO: 3421 - DNA, 65 bp, Rattus norvegicus
agtgggcagtgtcgaggcagctgtcctctgtgatgactgtcagctgtgaagatctttgatgttca

SEQ ID NO: 3422 - DNA, 65 bp, Rattus norvegicus
gacattgacagtggtccagccgcttactctggacagagatgttgcaagagcaatcgaactactag

SEQ ID NO: 3423 - DNA, 65 bp, Rattus norvegicus
cctggtacctcctcttaggcactttagtcatgctagcccagattctgatgtgtggtgaaacagag

SEQ ID NO: 3424 - DNA, 65 bp, Rattus norvegicus
actgcctttcccttgcttggccagacaggcatgtgggccagaagacgtcccttgctgccttaaaa

SEQ ID NO: 3425 - DNA, 65 bp, Rattus norvegicus
tcaagaagcaacctctacaggatgtggccaagagggtggaggaaatctggcaagagttcctagct

SEQ ID NO: 3426 - DNA, 65 bp, Rattus norvegicus
tggaggggctgcgccagccacaccgctatgtcctagatgcagcacaactgcacatctacatgctc

SEQ ID NO: 3427 - DNA, 65 bp, Rattus norvegicus
gccttctcagtgtgataccaaatccttccagtcagccacaagaacacacccagaaaacagacacg

SEQ ID NO: 3428 - DNA, 65 bp, Rattus norvegicus
gtagtgtgctgctgttctgtgtacatagtcatcaaagtggggtacagtaaagaggcttccaagca

SEQ ID NO: 3429 - DNA, 65 bp, Rattus norvegicus
gtccatgacttacttgcctacagtgttcaagctagtccaaggcacaacccagctttcactccagt

SEQ ID NO: 3430 - DNA, 65 bp, Rattus norvegicus
tgctgaattctggaactgcctctgcaccggctgagtttgctcacctatccactgctacagtcata

SEQ ID NO: 3431 - DNA, 65 bp, Rattus norvegicus
ccacagcacaggttgtctggcaatacactgttcattctcagttgtgtggttcactgcagctgaga

SEQ ID NO: 3432 - DNA, 65 bp, Rattus norvegicus
tccagcttgacgcctctgatcctggcagctaaagaagcaatgaagagtaaccgctaacgtcgtca

SEQ ID NO: 3433 - DNA, 65 bp, Rattus norvegicus
tgtgtgtgcgagctgtagccagagtatctatgacggccagtacctccaggccctgaatgctgact

SEQ ID NO: 3434 - DNA, 65 bp, Rattus norvegicus
aatagagaactgagtgagcgtgggtgatgcgctcttatgtgaggaggagggcacctcttgagtcc

SEQ ID NO: 3435 - DNA, 65 bp, Rattus norvegicus
gggatgggaagtctttggccactttacttgctgtgtagactgtacttgtgtgtggagtttgcaaa

SEQ ID NO: 3436 - DNA, 65 bp, Rattus norvegicus
attgacaaagaccatgccttcgggaagtactactccaggccaaaggaagcaccagaaccgatgga

SEQ ID NO: 3437 - DNA, 65 bp, Rattus norvegicus
tttctgtgtgaatgggggcgagtgcttcacggtgaaggacctgtcaaacccgtcaagatacttgt

SEQ ID NO: 3438 - DNA, 65 bp, Rattus norvegicus
aggagtccatgtggagacctcaacaggaagtgtgtaagagctgaagaagctaagcatggggctga

SEQ ID NO: 3439 - DNA, 65 bp, Rattus norvegicus
acagagttgctccactccaggaatgaaggcgtggcaacatatgcggctgctgttctattccgaat

SEQ ID NO: 3440 - DNA, 65 bp, Rattus norvegicus
ccagaaacatcatctggtaaggagtgaccttttccaacatccaatcatagtgtaagcaaacgtct

SEQ ID NO: 3441 - DNA, 65 bp, Rattus norvegicus
cagcacctgttggtgcgatttttcgttagcctctacctattgcactgttgtgacttgttggccat

SEQ ID NO: 3442 - DNA, 65 bp, Rattus norvegicus
agcgctaagtaccccgtggtcttcattctcctgctggttacctacatcatcctcaccttcgtgct

SEQ ID NO: 3443 - DNA, 65 bp, Rattus norvegicus
caccattccttggtcttatttcgagaacaagaaccagtccatctctttctccgtggcttactggt

SEQ ID NO: 3444 - DNA, 65 bp, Rattus norvegicus
cctttcatagactacactgtgcccgagaaggtgtggactgctttcctctggcttggctatatcaa

SEQ ID NO: 3445 - DNA, 65 bp, Rattus norvegicus
tacatcatggatggaaccccttgttctccactagcagtctgcatgtcaggaaactgtagcgaccg

SEQ ID NO: 3446 - DNA, 65 bp, Rattus norvegicus
aatgtcactgccttcttcatggctgcattaatccctattcctgcactgcgagcgttctccctcca

SEQ ID NO: 3447 - DNA, 65 bp, Rattus norvegicus
catggtttcattacctgtgctcccagggaatggattgaggcaggtttggaaagtccaggacatcc

SEQ ID NO: 3448 - DNA, 65 bp, Rattus norvegicus
agctcaacccaccgatgttatccctgcagttacccttccggtttgggcaaatacagcggccaact

SEQ ID NO: 3449 - DNA, 65 bp, Rattus norvegicus
gagctcaatggaggatggcagcattttgtgtcatgcaataaaggacatttccccgtgaagacttg

SEQ ID NO: 3450 - DNA, 65 bp, Rattus norvegicus
gcctcttagcttgggaaatctgtgttccacttaatgactccaggctctgaaaatgcaacccctcg

SEQ ID NO: 3451 - DNA, 65 bp, Rattus norvegicus
ttgattcctgaccataccattcgtgccttgggacacattgcagtggctctgagggataccccaaa

SEQ ID NO: 3452 - DNA, 65 bp, Rattus norvegicus
tgaagggcactctcatccccgagttgttgagctacccaaaacagaagagggccttggattcaata

SEQ ID NO: 3453 - DNA, 65 bp, Rattus norvegicus
cggaccatgcctcactgactgggctgactgttttatggacggatggttgtaggaaaatgctcata

SEQ ID NO: 3454 - DNA, 65 bp, Rattus norvegicus
gggaacctacacaaggcatcacacacacgcgagccattgagctcattcaggctggcgggaataaa

SEQ ID NO: 3455 - DNA, 65 bp, Rattus norvegicus
cctcctggctttctctacaaggtggaaactctgcatgacttcgaggcagcgaactctgatgaact

SEQ ID NO: 3456 - DNA, 65 bp, Rattus norvegicus
gacctagtctagatgcctgcagtaccgtgcatttcggtcgatggttgttgagtctcagtgttgta

SEQ ID NO: 3457 - DNA, 65 bp, Rattus norvegicus; identical to SEQ ID NO: 1

SEQ ID NO: 3458 - DNA, 65 bp, Rattus norvegicus
ttcagttctgtggaccctgcattcactgagcaaagcaatgctggctgatcacagctcacctgcag

SEQ ID NO: 3459 - DNA, 65 bp, Rattus norvegicus
attggcaccagtgttctctcagtgtggtgttctgtgacatcctcgctctctggcccacttaatca

SEQ ID NO: 3460 - DNA, 65 bp, Rattus norvegicus
catttgtagagagctgtatactcactcatctcattgcttggagatcaatcattgtgtccgtgtgg

SEQ ID NO: 3461 - DNA, 65 bp, Rattus norvegicus
accttgcatttctcttcatggctgggtatccatctatcccttccctgccttgatggtggctgtga

SEQ ID NO: 3462 - DNA, 65 bp, Rattus norvegicus
gaaacgtcttacttctgtgggcttgagcactgggatgattcatttgtgtcttgtgagtgatgatg

SEQ ID NO: 3463 - DNA, 65 bp, Rattus norvegicus
tcactgctttcctgaatggcatcactgtcaaccacctgatggccctctactcccaggtaccatca

SEQ ID NO: 3464 - DNA, 65 bp, Rattus norvegicus
ttcagctgttggttgagcctgaaggtggaacagtcgctcctggtgggaccgtgaccctgacctgt

SEQ ID NO: 3465 - DNA, 65 bp, Rattus norvegicus
gactctctgagcctctctctcaggcttcatatctttctctaggcctaggactctgccttcaattc

SEQ ID NO: 3466 - DNA, 65 bp, Rattus norvegicus
acagtcactggacaccgtcccttaagaataccgttgagcgtctccgtggattccgacaggatatt

SEQ ID NO: 3467 - DNA, 65 bp, Rattus norvegicus
tacctctggtctgaagtacaagaggcagtgtctccagggtcttcaagcacaacctcgtcctcaga

SEQ ID NO: 3468 - DNA, 65 bp, Rattus norvegicus
cctgcagttagcaagaatggatacgagagagacgatgctggaagctcagacagtatggaaactgc

SEQ ID NO: 3469 - DNA, 65 bp, Rattus norvegicus
tggacaaagtcgagcatcaacacatgacagcacatcccatctctccgccatcgctcattgctcta

SEQ ID NO: 3470 - DNA, 65 bp, Rattus norvegicus
acagcctcgagtagaaccctggatccggcttgttaaaggaccaaagggcatctaacagcttctag

SEQ ID NO: 3471 - DNA, 65 bp, Rattus norvegicus
acaaagtaagctttacatccaggggatgaagaacgccaccagcagaagacttgcaaaccctttaa

SEQ ID NO: 3472 - DNA, 65 bp, Rattus norvegicus
tggatgcttgttcacttggagcagccttcccaggacgtgcagctcccttcctgctttgtccttct

SEQ ID NO: 3473 - DNA, 65 bp, Rattus norvegicus
gccagcgtgtggctggaataagcagcattgtgaccacaggatcaggggacttcatcttctatcat

SEQ ID NO: 3474 - DNA, 65 bp, Rattus norvegicus
attctggttggcttgtgaagactataagaaaacagagactgatcttttgcataacaaagcagagc

SEQ ID NO: 3475 - DNA, 65 bp, Rattus norvegicus
gcctaagcttctagtgacctgtgctcaggcctagattgttcttgcaccttttatgggacatgggg

SEQ ID NO: 3476 - DNA, 65 bp, Rattus norvegicus
ggacaaacttttctgcaagcccttggaccaaacttgtcgcgcgtcaccgtcacccaaccgggtcc

SEQ ID NO: 3477 - DNA, 65 bp, Rattus norvegicus
gtcgatatccagttggatcatcatgagcgatgtgactgcatctgcagctcaagaccacctcgata

SEQ ID NO: 3478 - DNA, 65 bp, Rattus norvegicus
tgctgcctggtggtgcccctcatagccgaatccggtaacaagctggacctggttattagcagaaa

SEQ ID NO: 3479 - DNA, 65 bp, Rattus norvegicus
ttcctcaaggccctgcagaatgcagtcagcacttttgtcaaccgcatgaagagcaaccacatgag

SEQ ID NO: 3480 - DNA, 65 bp, Rattus norvegicus
ccttgaagtcaaaagtggaaccagctcagagccttctacttggaagcagaacttgtaaccagggg

SEQ ID NO: 3481 - DNA, 65 bp, Rattus norvegicus
atcttcttgaagggctgacacgggagattctgagggagcaaccggacaatataccagcttttgcc

SEQ ID NO: 3482 - DNA, 65 bp, Rattus norvegicus
tacatgttgctccgtgtgttcccttgtccatgtttgtgttgagagcccatgagcagggcatgcat

SEQ ID NO: 3483 - DNA, 65 bp, Rattus norvegicus
tctgaaggctcctgagagaggacggtaactggagatgagtgagtgccacctcaccgcattgtata

SEQ ID NO: 3484 - DNA, 65 bp, Rattus norvegicus
gagtcatcgggtggaaccacacctgtggggagttttcacacagaggcagccagatggacagacta

SEQ ID NO: 3485 - DNA, 65 bp, Rattus norvegicus
atccatccctgcacggtcctatgttgcaagtgcctaccgctccaagtctgcaaggtggccatttt

SEQ ID NO: 3486 - DNA, 65 bp, Rattus norvegicus
actcattctgctgttctcatccccgtctctgcctgcgtcatcaaacatggactgagcttctacag

SEQ ID NO: 3487 - DNA, 65 bp, Rattus norvegicus
tgcccattcctgcatggacctttcccgcgctagaccaggtgcaaacccatcagagttgttgttct

SEQ ID NO: 3488 - DNA, 65 bp, Rattus norvegicus
ctgtgtcttcacaaggagccagcaagaatcccggtttagaccctagaagcatggcagtccatttt

SEQ ID NO: 3489 - DNA, 65 bp, Rattus norvegicus
cggccctgtgctgggctgtaatgggatcgcctatttaaagacactaccgtgatctcagatgtata

SEQ ID NO: 3490 - DNA, 65 bp, Rattus norvegicus
tggggacccaaggcctacgtcacatggatcacgctcgccgtctacattgtaccggtcatcgtgct

SEQ ID NO: 3491 - DNA, 65 bp, Rattus norvegicus
cagacaacagagtggatgcaatcaagggaaaacagtttacctgtgtccatatgtgtcagctttca

SEQ ID NO: 3492 - DNA, 65 bp, Rattus norvegicus
acttaacaagacctgagaaggctttgcctgtctggtccttacactacacctcccatccctgctgc

SEQ ID NO: 3493 - DNA, 65 bp, Rattus norvegicus
aagggtgaagctccctctcacactgctccacactggcccatctgacctgcagaagtgctctagct

SEQ ID NO: 3494 - DNA, 65 bp, Rattus norvegicus
ttgattactggccccaagaggaccctgacatcccctgcatggatgccggattgcctttcctgaaa

SEQ ID NO: 3495 - DNA, 65 bp, Rattus norvegicus
gcttggggaatctctcatgtgcctgtctgtaggtggcaagcaatctttccatttgatcccattcc

SEQ ID NO: 3496 - DNA, 65 bp, Rattus norvegicus
agagccgcttctgctccgccatccgcgaggtgtatgaacagctctatgacacgctggacatcact

SEQ ID NO: 3497 - DNA, 65 bp, Rattus norvegicus
attcgtactgtcctcctccttgttgcttccacacttagtcccacctgagctctggtacctctgct

SEQ ID NO: 3498 - DNA, 65 bp, Rattus norvegicus
gtgccctgggttggcctgtgtgctcctacaggagacacggtgatagatggtatcttccaaggcca

SEQ ID NO: 3499 - DNA, 65 bp, Rattus norvegicus
ctggggagcttcagagtcattagccccggaagtcatcatgagatcttattcccatttgccaacac

SEQ ID NO: 3500 - DNA, 65 bp, Rattus norvegicus
ttctgtgttttctccagaccccatgccttatgacccctgcctgcctcagtatccacacataaacg

SEQ ID NO: 3501 - DNA, 65 bp, Rattus norvegicus
ctcactttggtatccatggacccagaacgtaaaatggttcttacctctcaagcttttatgtctgc

SEQ ID NO: 3502 - DNA, 65 bp, Rattus norvegicus
cagcagaactctggtatggttcttaactgttacactgtgtttctgagacctttcatggggcagat

SEQ ID NO: 3503 - DNA, 65 bp, Rattus norvegicus
acaggccagatgcaagcgcagggaaaatcccagtctgaccttggtcaaatcctctctattctaca

SEQ ID NO: 3504 - DNA, 65 bp, Rattus norvegicus
acgtgacagtactgcagacgcacaatctaggccagtagacagtttgtgtggctccagtttgtcta

SEQ ID NO: 3505 - DNA, 65 bp, Rattus norvegicus
ggagcagtatatctacctctacaactgtctgaacagcgcactgctgaacgggctgcccagagctg

SEQ ID NO: 3506 - DNA, 65 bp, Rattus norvegicus
caagctttccggacacacggagctctacctgctcttcaggggaggactctgtcttctctcatgag

SEQ ID NO: 3507 - DNA, 65 bp, Rattus norvegicus
atggggctgcttatcgcccttctgctccgttcagtggactcggtgcagatgggtgggatgataaa

SEQ ID NO: 3508 - DNA, 65 bp, Rattus norvegicus
caggggctcactgagaaatgaagagtccacggtcttcccttggtcacagctgaaggagctaataa

SEQ ID NO: 3509 - DNA, 65 bp, Rattus norvegicus
ctccttcagatgacagagaagttcttccatgccatcatcagttcttcctcagagttcccctcgca

SEQ ID NO: 3510 - DNA, 65 bp, Rattus norvegicus
tggttgcattgcataggctgagtgttgacgttcacggaaaccaatgcctgtggaataaagagccc

SEQ ID NO: 3511 - DNA, 65 bp, Rattus norvegicus
ggcccagtacctaggactgaggaagatggctgacatccagaacatttcgctggacagcccaggga

SEQ ID NO: 3512 - DNA, 65 bp, Rattus norvegicus
gacatgcgtgtgtcgggtgtcagcctcatgcctgttgatgtcattctgtgtgggtttctaaccca

SEQ ID NO: 3513 - DNA, 65 bp, Rattus norvegicus
gagctgtttaccgagcaactggtgaggaattatgtgttcaatcccattttagagcgtgaaactcc

SEQ ID NO: 3514 - DNA, 65 bp, Rattus norvegicus
tggtgagcagaggagcactaatggtgaaacaatacaactgaagacccaagttttcaggcgctatc

SEQ ID NO: 3515 - DNA, 65 bp, Rattus norvegicus
ccccttccatttacgcacgagaggcctgatgctgctccttctctgccatcgtctggagatggagc

SEQ ID NO: 3516 - DNA, 65 bp, Rattus norvegicus
acccagttctatccttttcggtttctcctagtcccctgtaaatagaccataccatcaatcagtat

SEQ ID NO: 3517 - DNA, 65 bp, Rattus norvegicus
gaccaggatgacgatataggcttggtttctctctgtgaagaggaaccttgttcttctggtgagct

SEQ ID NO: 3518 - DNA, 65 bp, Rattus norvegicus
atatgacgttgtgtacctaaaggtggccaagcccagcaatgcctacctgagtgacagctatgctc

SEQ ID NO: 3519 - DNA, 65 bp, Rattus norvegicus
atcccttcccaggctgttgcagcatgagactgtcccgtggataggtttgacttggaatcgctgca

SEQ ID NO: 3520 - DNA, 65 bp, Rattus norvegicus
gcctccctcagtgaggcttaagactgcaagagaacagttccggccttcagtatacacaaagaatg

SEQ ID NO: 3521 - DNA, 65 bp, Rattus norvegicus
tcccagcccttctctcggctcatacactcgtatgatactctgacactgttcttggctcaatgagc

SEQ ID NO: 3522 - DNA, 65 bp, Rattus norvegicus
aagtgcagacaatcccacacaggaatccttgatggaggaaacgggagaagctaccaacagtactg

SEQ ID NO: 3523 - DNA, 65 bp, Rattus norvegicus
gtatcaaagcagacttgagagcccttatccactgcctacacatgtcatgattctctctgtgcacc

SEQ ID NO: 3524 - DNA, 65 bp, Rattus norvegicus
caatatctacaggatgcccctcagcaaagttacctactccgaggagaaccgcatcttctacctac

SEQ ID NO: 3525 - DNA, 65 bp, Rattus norvegicus
cctctccagcagtagagttaacaacaatccctaccatacctggtttacctgatgctggggaatga

SEQ ID NO: 3526 - DNA, 65 bp, Rattus norvegicus
cctatgtaccagagaagaacctgtgaaatgtacgtgtgttgctgtcgtcctgacctgtatgtgtg

SEQ ID NO: 3527 - DNA, 65 bp, Rattus norvegicus
caggccgagaagcaggggccttgtctggcattgcagtgttgtttgtatctggacctgtatatttg

SEQ ID NO: 3528 - DNA, 65 bp, Rattus norvegicus
ggtcccagcaagatgggaggagtgggttcttggtacttaggacttaatcctatgtttggccatgc

SEQ ID NO: 3529 - DNA, 65 bp, Rattus norvegicus
ggctcacggatgccttgctgtacgtgattcagtctgcactggggagcagtgagatcgatagcaag

SEQ ID NO: 3530 - DNA, 65 bp, Rattus norvegicus
taacaaggcggaaaacagaccgtgaagagaagacctaggacagctggtgtgaggatgctcaagca

SEQ ID NO: 3531 - DNA, 65 bp, Rattus norvegicus
aatctaaccagagcccatcactgccatgatagctggggcttcagtctgtctactgtggtgatttt

SEQ ID NO: 3532 - DNA, 65 bp, Rattus norvegicus
ggcagtgcacctttgtgaccgcagaagagcagaggggttttccaagagattaaggaagctctaaa

SEQ ID NO: 3533 - DNA, 65 bp, Rattus norvegicus
ccattcattcccgcactaacctaatggaggctgagctcttggatgcagactcggacttctgagct

SEQ ID NO: 3534 - DNA, 65 bp, Rattus norvegicus
ttctcctacacccggatctggagtaagctaaagaaccacgttagtcctggagctgcaagtgacca

SEQ ID NO: 3535 - DNA, 65 bp, Rattus norvegicus
aagctaccagcttcctcttctacatcctcccaatgaccctcatcagcgtcctctactacctcatg

SEQ ID NO: 3536 - DNA, 65 bp, Rattus norvegicus
ctccttgacctgaggggtagtcagaaacatctctgtggggtactccagtgcaatgttgcttgtgt

SEQ ID NO: 3537 - DNA, 65 bp, Rattus norvegicus
aacttgtaactctgaggacagttaaccaaacctgtgccttgtctctcctgagggtgtctgttaca

SEQ ID NO: 3538 - DNA, 65 bp, Rattus norvegicus
ccagggtcatacggttcccaacctgaggaaaaggtttttcacacactccttgctttctgctgaga

SEQ ID NO: 3539 - DNA, 65 bp, Rattus norvegicus
gtcctcaagatgaatcctgtgccacagccagctcctctttgatgaaggatacaccctcctgagta

SEQ ID NO: 3540 - DNA, 65 bp, Rattus norvegicus
gagagaggagatcacaaggctggaaacaaatcatggtgaaaagaagattcacctgtgggttacaa

SEQ ID NO: 3541 - DNA, 65 bp, Rattus norvegicus
ccgtggaaaattccgatccaggaaagctgactttgaccgttagatgaaagaccctggcagagaga

SEQ ID NO: 3542 - DNA, 65 bp, Rattus norvegicus
cctgaccaaggccaaggatgattcagagctagaaggccaagttatctcatgcctcaagctgagat

SEQ ID NO: 3543 - DNA, 65 bp, Rattus norvegicus
attaggagacctagggcgaaaaccttgtagcccacgaaaaggaacagagctgccagttactgcag

SEQ ID NO: 3544 - DNA, 65 bp, Rattus norvegicus
cccacgctctcccacctcagtgctccgtgctgtatgcgtgtgctctctgttcttgtatactcaat

SEQ ID NO: 3545 - DNA, 65 bp, Rattus norvegicus
gtccagcaggcactcgagaattttccttggggtaacggaatgaaggcagggattaaagctgtgaa

SEQ ID NO: 3546 - DNA, 65 bp, Rattus norvegicus
caagggatctatgaggatgggtagcaagtctaacgtcatgtagtcatgtctaggctcttccgcca

SEQ ID NO: 3547 - DNA, 65 bp, Rattus norvegicus
ctggctctgttgcctcatcagaatggatgtgagttgtgccttgtggatcaccagaatatggagag

SEQ ID NO: 3548 - DNA, 65 bp, Rattus norvegicus
cccatcaaccaaatcacagtgctggcatgggagctatctgtctttagacctttcatctggaaagc

SEQ ID NO: 3549 - DNA, 65 bp, Rattus norvegicus
gagtgaagtaatgtgggaggtgtgaggtgaccaccatcgtagtggctcctgcacagatagctttt

SEQ ID NO: 3550 - DNA, 65 bp, Rattus norvegicus
cagctgggtgatcctgggcttcttcatcttcctgcctttcatcatgactctcttccttgggatca

SEQ ID NO: 3551 - DNA, 65 bp, Rattus norvegicus
tgactttgaggagtactgtaacggaaatgacgcttactgtgtccctgacacgttcgcacgcaacg

SEQ ID NO: 3552 - DNA, 65 bp, Rattus norvegicus
atctctgggtttacctgctttgggcttgatgaacatcgtgggacagaaacaacggatgctgggct

SEQ ID NO: 3553 - DNA, 65 bp, Rattus norvegicus; identical to SEQ ID NO: 1

SEQ ID NO: 3554 - DNA, 65 bp, Rattus norvegicus
cctcggacgtgtggatcgaggggacagtgctccgtgtgaataaagttcaagtgcacactcgctaa

SEQ ID NO: 3555 - DNA, 65 bp, Rattus norvegicus
atgaagaatgctcaccgagaggagatggaacgggagttagagaagagccagcggtctcagatcag

SEQ ID NO: 3556 - DNA, 65 bp, Rattus norvegicus
tgtcacctgagctttcccagagttcactgcgccagtacccccaataaagggttctgatgtcactt

SEQ ID NO: 3557 - DNA, 65 bp, Rattus norvegicus
ctgagaactctggtgacacagcagaggctgatcaacctaccaagagcccagaagtacaaagaaga

SEQ ID NO: 3558 - DNA, 65 bp, Rattus norvegicus
ccgaaggaggatgtattctactggggtgttttcaagtgtcggcttagaattggaagttgaatgga

SEQ ID NO: 3559 - DNA, 65 bp, Rattus norvegicus
aaccagtgtggcttctccagagttccagggcggacttcagggtacagtgtggaatgtggccagca

SEQ ID NO: 3560 - DNA, 65 bp, Rattus norvegicus
ttttatgggagaacagagggtaaagggtcttgcctggggaagggttctgtggcgacacctcagtt

SEQ ID NO: 3561 - DNA, 65 bp, Rattus norvegicus
tgaaggagcctcagctctggtgtccttgagagacgagaagcctgtggaaaagacagaagaacaag

SEQ ID NO: 3562 - DNA, 65 bp, Rattus norvegicus
agtggagagtagggaggctgtcctcctggaaagaggagccttgtgtcttctcttcagactctgaa

SEQ ID NO: 3563 - DNA, 65 bp, Rattus norvegicus
atggagctcagatggctagtggccagctagcagggttcccaggatgaagcccagagatggttaat

SEQ ID NO: 3564 - DNA, 65 bp, Rattus norvegicus
ctccctaaagagtccagcatctaagcccaggacactagcgtttctccagactcagtggatctgaa

SEQ ID NO: 3565 - DNA, 65 bp, Rattus norvegicus
cagcacaggctgggtggccatttatgtcagtagtgccatagtctgcagcagtgaataacttcact

SEQ ID NO: 3566 - DNA, 65 bp, Rattus norvegicus
tcatcgactatggggagctgagcgagctgcaactgcacctgctgtcggtctacgccttccccttg

SEQ ID NO: 3567 - DNA, 65 bp, Rattus norvegicus
ggcctcagatacatgttatgttcagtctttctaacctcagccttccctgcgtcttagcccagttt

SEQ ID NO: 3568 - DNA, 65 bp, Rattus norvegicus
ctggattccctcaaaggagaagttataaattagctactgcacctctgacaacgacagaagagcat

SEQ ID NO: 3569 - DNA, 65 bp, Rattus norvegicus
actcccatagccaccttaggttgaccacagtcagcaccctgtgtgacaggaacagcagggatgta

SEQ ID NO: 3570 - DNA, 65 bp, Rattus norvegicus
ggatgagaagatccagacccgagaagggaagcctgctgttgatgcccgctatgaagctgcatgca

SEQ ID NO: 3571 - DNA, 65 bp, Rattus norvegicus
cactgtaaggaaatcttcacgggtgtggagtacagctcctgtgacaccattgccaagatctccac

SEQ ID NO: 3572 - DNA, 65 bp, Rattus norvegicus
tgcctccctgctcctctgtccttgaacagtgaacccagcctgcagcctgggacctggactctagc

SEQ ID NO: 3573 - DNA, 65 bp, Rattus norvegicus
cgtggacctggagatgctgacagtcagtagtatagggaccttccgcacaagctctgtgttaagat

SEQ ID NO: 3574 - DNA, 65 bp, Rattus norvegicus
cgcggagatgggagactctccagaagcagagaagttcctctcacacaaattcaccaaagacccca

SEQ ID NO: 3575 - DNA, 65 bp, Rattus norvegicus
caccctcgaagctatgcgcctacgcgctcaagatctgggctcactgcatgtcctacagcaattct

SEQ ID NO: 3576 - DNA, 65 bp, Rattus norvegicus
ttgaaagcctgggatccacagaggaacggaaaaacatgcagaggaacaaacaggtagccatgggc

SEQ ID NO: 3577 - DNA, 65 bp, Rattus norvegicus
tggatcaagtccatccaggctgctgtaagcgtggaccccttctacgagatgttggcagcaagaaa

SEQ ID NO: 3578 - DNA, 65 bp, Rattus norvegicus
tagtattgacctttggggacccttgtccacaacagcacctggtgatgacagcctccagacctgca

SEQ ID NO: 3579 - DNA, 65 bp, Rattus norvegicus
cagactcaggaacgagctagactgcccaagattcagagaagtgaagccaagacacgaatggccat

SEQ ID NO: 3580 - DNA, 65 bp, Rattus norvegicus
tatacaactgactgatttctggggcactctcactgagacctggcagcacaggtgctggaaggcct

SEQ ID NO: 3581 - DNA, 65 bp, Rattus norvegicus
gcaggcagtgcagatcctggaggagctggctgataagctgaagcgcagggtgagagaagcctcct

SEQ ID NO: 3582 - DNA, 65 bp, Rattus norvegicus
ggggtcacccctccattccctaccccaagtgcctttgctgtttttatatcctgaattggaggttt

SEQ ID NO: 3583 - DNA, 65 bp, Rattus norvegicus
gccttccccagggtttctgcaaactgggagttactttgttctacccgaaaacctgctcataatgg

SEQ ID NO: 3584 - DNA, 65 bp, Rattus norvegicus
gcccaggtgttttgcagaatgaattggtcactgcatcctttatggtcatggttttgagaaaagca

SEQ ID NO: 3585 - DNA, 65 bp, Rattus norvegicus
gtccagacgagatcagccaaattctggcccaatcccagggatccatcaccctcaagatcatccct

SEQ ID NO: 3586 - DNA, 65 bp, Rattus norvegicus
gagatgagtaagctcaatcagaacctcaatgatgtcctggtcagcctagagaagcaacacgggag

SEQ ID NO: 3587 - DNA, 65 bp, Rattus norvegicus
aatgacatcaccaaaacctgcctggacgagatgaacgtggttcgcttcactgggtcttcctggat

SEQ ID NO: 3588 - DNA, 65 bp, Rattus norvegicus
catttgatcgcacttgtgagattctgctgctgttgcagcataaacgctagctatgatagcaatgg

SEQ ID NO: 3589 - DNA, 65 bp, Rattus norvegicus
ggctaaaataggcttttcttgtcattatcctcgatatctccgaggggtcactaaagtctgaagaa

SEQ ID NO: 3590 - DNA, 65 bp, Rattus norvegicus
tgtggactgcacacagcacaggctggatctcgttggcattgtggagtgcttaaacactctccatg

SEQ ID NO: 3591 - DNA, 65 bp, Rattus norvegicus
cctgaaaatcactgttagttctcgaagttcaaagggaatgcttttctacgctcttctgctattga

SEQ ID NO: 3592 - DNA, 65 bp, Rattus norvegicus
gtgatgtcacatgcacatgcaatgtcagccagcagcacttcctacagactttcaacgtttaggtg

SEQ ID NO: 3593 - DNA, 65 bp, Rattus norvegicus
cacccgtgtatccacagtcttaagcaagcgcccatcttcatctgttctctggacattgtctgttc

SEQ ID NO: 3594 - DNA, 65 bp, Rattus norvegicus
acccttctgtgcagacaggtaacagtgtcagctgactctagtgcatccatgaactctggggttca

SEQ ID NO: 3595 - DNA, 65 bp, Rattus norvegicus
cagcccgactcttgggagggacttttgtgtccagctagagatcgtaagagcagatgtgtttatgt

SEQ ID NO: 3596 - DNA, 65 bp, Rattus norvegicus
ttttcctgttccatggcttctgtgagtaggagaggctgtgttgaagagctcagctggtggcttac

SEQ ID NO: 3597 - DNA, 65 bp, Rattus norvegicus
acttcactaaagacatcaccatgaagaacctggtggaaccttcccctcacagctttgacctggcc

SEQ ID NO: 3598 - DNA, 65 bp, Rattus norvegicus
ctcaagagaccaatgaaggcaagataaccgcactcagcaaacatgagatgttctgctcagatgtg

SEQ ID NO: 3599 - DNA, 65 bp, Rattus norvegicus
aagtgacttagtgtcctcctggacttcttgaggtaggtgaacaggtgtggtttatgggaagcttc

SEQ ID NO: 3600 - DNA, 65 bp, Rattus norvegicus
gtcccaggacaactgaggcacgtgatatagaaggagcctagggctactcttacatctggggaaaa

SEQ ID NO: 3601 - DNA, 65 bp, Rattus norvegicus
aaggtaactcagtacttagtggatgaaacctttgtgttggacgacgaaagtctgtatgaggcctc

SEQ ID NO: 3602 - DNA, 65 bp, Rattus norvegicus
gtgcacacccaggagattgaggaaaacttgcttagcttagaggtggccatcagacaactggagga

SEQ ID NO: 3603 - DNA, 65 bp, Rattus norvegicus
gcagggggtttgtactgcggactttgaatgttttctcagctctaaggcttgtatgctttcttaca

SEQ ID NO: 3604 - DNA, 65 bp, Rattus norvegicus
tctacacgagacactgtgtcaagaagtctgagcgactgggtagttcacatagagctgcttctgtg

SEQ ID NO: 3605 - DNA, 65 bp, Rattus norvegicus
aggattgatgccgctgtactgcctgctggatgttcccgttgcactatggacagttgctttgaaga

SEQ ID NO: 3606 - DNA, 65 bp, Rattus norvegicus
atctggacttccaaccggaatgttatcctcatggcccacgatgggaaggagcaccgcttcatggt

SEQ ID NO: 3607 - DNA, 65 bp, Rattus norvegicus
tctgctgcctgattgggaagagatgtactgggcacagcctcctgctttcaccttctaccttacct

SEQ ID NO: 3608 - DNA, 65 bp, Rattus norvegicus
ctgtccggcagcaagccaccaagagcaaaggacccatgatcatccactgcagtgcaggcattggc

SEQ ID NO: 3609 - DNA, 65 bp, Rattus norvegicus
aagtcttaccttgctcacccaccctcacacctgtctgcactggaacattctatcccaggctgtat

SEQ ID NO: 3610 - DNA, 65 bp, Rattus norvegicus
ggtcggtaagtgaggacagcatatagttagcacaaggtgactgggtgagctttctttctgtcagc

SEQ ID NO: 3611 - DNA, 65 bp, Rattus norvegicus
tggagaacactcagattgtgggaaagcgtgtgatggagagatacaggcaccagtctaggggtggg

SEQ ID NO: 3612 - DNA, 65 bp, Rattus norvegicus
cccgtgttcgagaaggcatcaataggaagatgcaagaaccatcaccacacacattcgacgacgca

SEQ ID NO: 3613 - DNA, 65 bp, Rattus norvegicus
ggtcttgagatggaggtttctcagagtgctatatcaacggtgccttccccttgtgctcaaccaat

SEQ ID NO: 3614 - DNA, 65 bp, Rattus norvegicus
agcccacggaatgagacgatggaagctgacccaggatccacgatacaactgatctgcaacgtcac

SEQ ID NO: 3615 - DNA, 65 bp, Rattus norvegicus
ggactggtacagtgtgtaacaagctggagcagacagagagactttttggcaagagatcacatccg

SEQ ID NO: 3616 - DNA, 65 bp, Rattus norvegicus
gagccagagcctcctcggaacctgacattagattatagatgggaagtatcttgtcaccaagaagc

SEQ ID NO: 3617 - DNA, 65 bp, Rattus norvegicus
cgagttcagtgaagtactccgtgtaacgtttcctcagatggacacactggcagcatgtgaagaag

SEQ ID NO: 3618 - DNA, 65 bp, Rattus norvegicus
actttcctgtgggcagaatcagcacacactgttacagttctggccatcaattccatcggtgcctc

SEQ ID NO: 3619 - DNA, 65 bp, Rattus norvegicus
atcaagaaagtcacccctgaggatctgaagcgcaactatgtctgtcacgctcgaaatgccgaagg

SEQ ID NO: 3620 - DNA, 65 bp, Rattus norvegicus
taaccagaaaggtgcgttcctcgtagagaagacctctgccgaagtccaatgcaaaggggcgaata

SEQ ID NO: 3621 - DNA, 65 bp, Rattus norvegicus
aatccacggagttttcagtcactccataccacagtcaaagaagtttcttccacgttctcctgggg

SEQ ID NO: 3622 - DNA, 65 bp, Rattus norvegicus
ggtccacagacagcaacagtgaagttgtctcatttggaagtccgtgctccatcaattccaggcaa

SEQ ID NO: 3623 - DNA, 65 bp, Rattus norvegicus
ttcaagtccctaaagcatcaggactacctgtcactgcccccttgggacaatagccagcctgggaa

SEQ ID NO: 3624 - DNA, 65 bp, Rattus norvegicus
agagatggttgcatgggtcgaggcacctgagaactgcgaggtgacgctggtgacagacaactgag

SEQ ID NO: 3625 - DNA, 65 bp, Rattus norvegicus
caggggaacttgactactgaagctgcagactcaaataggagcctctcaaaatgggttctaccacc

SEQ ID NO: 3626 - DNA, 65 bp, Rattus norvegicus
ggtgttaagcccacacacctagatcccgacattacggataacaatatcctcgtattagtgccaga

SEQ ID NO: 3627 - DNA, 65 bp, Rattus norvegicus
gggtcttctgggctgggctttccccgccttcctgctctgtctcactcgctcctctcctgcgttct

SEQ ID NO: 3628 - DNA, 65 bp, Rattus norvegicus
ctctaccaaatgatcccagtaggcagacaaccctattgcttcaaaagaggacaagggttccaagg

SEQ ID NO: 3629 - DNA, 65 bp, Rattus norvegicus
gctggctcctttctcaacctctgtttgcctaactggttctttggatttcatcacttactgatcag

SEQ ID NO: 3630 - DNA, 65 bp, Rattus norvegicus
agaggggatgaattgaagtgagggctccatctatgttgctttggggaccttgtcgtctactctgg

SEQ ID NO: 3631 - DNA, 65 bp, Rattus norvegicus
gcccagttgtggaaagcaacaagaacgcaaacttgattgcccaaagtcactgccagttacccaca

SEQ ID NO: 3632 - DNA, 65 bp, Rattus norvegicus
gagaactgtcccttattctctgtatctgtgcttttcatctctgtggcaattatcttagggtctga

SEQ ID NO: 3633 - DNA, 65 bp, Rattus norvegicus
gaccccggtttctattttgcacacgggcaggaggaccttttgcattctcttcagacacaatttgt

SEQ ID NO: 3634 - DNA, 65 bp, Rattus norvegicus
actcctgtttgcttcatggttcctgaatcccagagactccctgagcatgggtggctatcatgttg

SEQ ID NO: 3635 - DNA, 65 bp, Rattus norvegicus
ccggggttgactgactgccttttgagaagcgaagtttggaaccatttgaaagagcacgtgcctaa

SEQ ID NO: 3636 - DNA, 65 bp, Rattus norvegicus
gtatgcagctaccccaagtgtgctggtcacatgtcgagcattgaccctttcctttaccctttgaa

SEQ ID NO: 3637 - DNA, 65 bp, Rattus norvegicus
aaagcaactgctggactggcttctcgctaacctgtaagctgagaattcctctgactccctccatc

SEQ ID NO: 3638 - DNA, 65 bp, Rattus norvegicus
cattagtgacttaggtttctgtgaacaccgttatgtgttcccctggctttccatcaagtgatgtt

SEQ ID NO: 3639 - DNA, 65 bp, Rattus norvegicus
gcgctcactgtcttgaaccatactttgaaagaaatgcctcttcctggagtctgccttactgcatc

SEQ ID NO: 3640 - DNA, 65 bp, Rattus norvegicus
gcccagcaacagcatcagggacagaccccacattgcatcctgctctagcctagttagcacaggat

SEQ ID NO: 3641 - DNA, 65 bp, Rattus norvegicus
gtctggctgttgtctctccatcagggcagtgcagagagtgttcgtgactagatggtaatactctc

SEQ ID NO: 3642 - DNA, 65 bp, Rattus norvegicus
ctgcctgtcttctaggcgatctgccatgattctgtgtccagtgtgggctggagctgtgatttgtt

SEQ ID NO: 3643 - DNA, 65 bp, Rattus norvegicus
tgatcatagcccccatctgcctcatccctttcctcgttacgcttgtggtgtggaggagtaaagac

SEQ ID NO: 3644 - DNA, 65 bp, Rattus norvegicus
atcgttgtatgactaccttcagctcaccactctggacacggttagctgccttcggatcgtgttgt

SEQ ID NO: 3645 - DNA, 65 bp, Rattus norvegicus
agtcaactggcagatactgagaggaaccggaagtgtcctcccttttacctgtgggcagtcctgag

SEQ ID NO: 3646 - DNA, 65 bp, Rattus norvegicus
gaagaagaccatttctcagctgtgtgtcaaggaagactgtaaggcctaaggccgcatacaggcga

SEQ ID NO: 3647 - DNA, 65 bp, Rattus norvegicus
atacgccgtcacatccagaggacctcctcacgttcatctcctacatgagacatatccgtaggtcg

SEQ ID NO: 3648 - DNA, 65 bp, Rattus norvegicus
tgaacaaagcccaggaagacagcaaagaagttggagcttcagagcctgcaagtggttctgaggag

SEQ ID NO: 3649 - DNA, 65 bp, Rattus norvegicus; identical to SEQ ID NO: 1

SEQ ID NO: 3650 - DNA, 65 bp, Rattus norvegicus
ccatggcacccttgtgtccactcctgttggcaagttttagcttgtcgcttgccacagctggccag

SEQ ID NO: 3651 - DNA, 65 bp, Rattus norvegicus
tttattcacgctagaaccaagatctcctgtgggaaacagacagcaggcaaggggaggagtggaca

SEQ ID NO: 3652 - DNA, 65 bp, Rattus norvegicus
cttcccatgacctgacggtaactcattctgctgccaaattgacaccattaacaacgtgtgccttt

SEQ ID NO: 3653 - DNA, 65 bp, Rattus norvegicus
ttgacaaaagctctaagccacaggagttaagttcaggtgatctaaaggttcacgatgtgtctcag

SEQ ID NO: 3654 - DNA, 65 bp, Rattus norvegicus
tttccaaatgccctgtctggtctgctcactaggatgtgctgactttgggcactatacagaggggc

SEQ ID NO: 3655 - DNA, 65 bp, Rattus norvegicus
ctgaaaacccatctctgttgtccaagggcaggaaggactgatgtacttcaacttgtgagccctgc

SEQ ID NO: 3656 - DNA, 65 bp, Rattus norvegicus
agacatgtatggggacatcaagatcacgctggtaaagacagagacactggctgagtacgtggtgc

SEQ ID NO: 3657 - DNA, 65 bp, Rattus norvegicus
tgctgcaaatactggccggacgacacggagatctataaagacataaaagtcacgctaatagacac

SEQ ID NO: 3658 - DNA, 65 bp, Rattus norvegicus
gtcagaatgagaggacagtgatccagtatcactacacacagtggcctgacatgggagttcctgag

SEQ ID NO: 3659 - DNA, 65 bp, Rattus norvegicus
gctgctgcctctgacatggatattgggaagcgaaggatgatgtgtattgctgggattggacttgt

SEQ ID NO: 3660 - DNA, 65 bp, Rattus norvegicus
ggtggtacaggagtacatcgatgccttctcagattatgccaacttcaagtgacaggggacaaggc

SEQ ID NO: 3661 - DNA, 65 bp, Rattus norvegicus
ccaccacattgtaccccaaggcatgttctggaccgatgacatagcctatgagttaatgaccaaaa

SEQ ID NO: 3662 - DNA, 65 bp, Rattus norvegicus
tccatctctgaatgaaactgccaccaccatcactgtactgctgagacctgcacaaccgcaaaggt

SEQ ID NO: 3663 - DNA, 65 bp, Rattus norvegicus
gccgcagtgtgtcatgtctctaattgtgttgtgtatctgcttaacatctgcgacgttcctcttcc

SEQ ID NO: 3664 - DNA, 65 bp, Rattus norvegicus
tgcgctgtacacagctcagccatgagcagcagaaagaacttttccaggctcacctggttcaggaa

SEQ ID NO: 3665 - DNA, 65 bp, Rattus norvegicus
aaatgctgtaagtattggccaaccgagggctcagtgactcacggagatataactatagaaataaa

SEQ ID NO: 3666 - DNA, 65 bp, Rattus norvegicus
gtgtgtactctgcaagctttggagatgaagtgctgtagcgttgtccctgcacagtgaggatatcc

SEQ ID NO: 3667 - DNA, 65 bp, Rattus norvegicus
gaaaactatcatgaatgacatggttcacatagccttgggtggccaaggacatcccggatactctt

SEQ ID NO: 3668 - DNA, 65 bp, Rattus norvegicus
gcaacatgtgtgactcttaacatcccaagaaggtgatggctatctgcctgcattggcagtaattg

SEQ ID NO: 3669 - DNA, 65 bp, Rattus norvegicus
tcagcaacgctcagacagctgatgaggagaggacagaaagcaaaggcacctgacaattccccagt

SEQ ID NO: 3670 - DNA, 65 bp, Rattus norvegicus
tcagcctactcaagctgtttctggcttcctggctggatgtggtcctagtgactcatccctgctct

SEQ ID NO: 3671 - DNA, 65 bp, Rattus norvegicus
tgcctcctactcatccctcagccaacaagacatcctgctcagaagcctgtataatgccatcctaa

SEQ ID NO: 3672 - DNA, 65 bp, Rattus norvegicus
ctggttctctggttgctattgggcgctctgatagcttcttgtttgtcaatcatcccttctgttgt

SEQ ID NO: 3673 - DNA, 65 bp, Rattus norvegicus
ctgattacctgcttcctgttgattgttttcctctggagacacatcaggcaaatgcactcagatgg

SEQ ID NO: 3674 - DNA, 65 bp, Rattus norvegicus
gccttcctgatagggtgcttacttatgtcatggctattttctttcccagtagttgtgaagatggt

SEQ ID NO: 3675 - DNA, 65 bp, Rattus norvegicus
gggacattctaatctaaggcattccagttgtctggtgataacctatctgagatgtaaggaaaagg

SEQ ID NO: 3676 - DNA, 65 bp, Rattus norvegicus
ttgctggcaagcttggtgttcttgcctggaatcctgatgcaaaggactcttgaagagaggcccta

SEQ ID NO: 3677 - DNA, 65 bp, Rattus norvegicus
ctcattcactgtgaaagtgatgaagagcaatccaaagaatcatggaaacaggaccagtgggacac

SEQ ID NO: 3678 - DNA, 65 bp, Rattus norvegicus
tcacagccagaacattctgccagtgtcggaatgaaggacagctctcctgttggggagttcagaat

SEQ ID NO: 3679 - DNA, 65 bp, Rattus norvegicus
agcggagctattggctttctgcgaaacgcacgctaaggatgacccactggtgactcctgtccctg

SEQ ID NO: 3680 - DNA, 65 bp, Rattus norvegicus
gcaaagttctggattcacgtcccacctctgtcgccacagtagactcttgcaactgttctgttcat

SEQ ID NO: 3681 - DNA, 65 bp, Rattus norvegicus
tgcacttcgctgctgacttctgtattggctcaccagagatgagcttggtgctggttggcgtgctc

SEQ ID NO: 3682 - DNA, 65 bp, Rattus norvegicus
aagttccgggtcacctttctgaagatttggaatgaccacttccgatgccagcctaagcctcccat

SEQ ID NO: 3683 - DNA, 65 bp, Rattus norvegicus
gatttacagagtttacaggaatggagctgaccagccactatgacatgccttatatctccaagagc

SEQ ID NO: 3684 - DNA, 65 bp, Rattus norvegicus
agctgatttggtccctccaaggtcacatgacaaggactgtatgagaaaaccagcagtgacatgtc

SEQ ID NO: 3685 - DNA, 65 bp, Rattus norvegicus
tttcccttgtgtgtggatgataagtatataaagggaaattaaacagcgtgtcccctcagatatcc

SEQ ID NO: 3686 - DNA, 65 bp, Rattus norvegicus
cgcctccagacttatgcacaacggtgaaccaatccaccacagtattcagatgatggtctccaata

SEQ ID NO: 3687 - DNA, 65 bp, Rattus norvegicus
aaacattctgctgatctgagagtgtgtgtgtcctctcctggtctcctaaaccatgctcagcaaaa

SEQ ID NO: 3688 - DNA, 65 bp, Rattus norvegicus
tgaccgttcttgtgtttacaaggtagaggggaccactggtacaccatcacgaacgtgaggcaagg

SEQ ID NO: 3689 - DNA, 65 bp, Rattus norvegicus
acagggctatctctgaccaacaaagctggcctggaagacagcaactatgaagggaaggattccag

SEQ ID NO: 3690 - DNA, 65 bp, Rattus norvegicus
ctgtgttcaacgaagactttcgacaagcgtttcagagagtcgtccatttccgaaaggcctcttag

SEQ ID NO: 3691 - DNA, 65 bp, Rattus norvegicus
aacctcgtccacgatcgaacagcaaaactccactcgagtccgtcagaacactagggaacatccct

SEQ ID NO: 3692 - DNA, 65 bp, Rattus norvegicus
ccctctgctgactggagtgtcttcaagtacaaatcccttcagaccccagaaagtctgctcctttt

SEQ ID NO: 3693 - DNA, 65 bp, Rattus norvegicus
tgccagccttgtccttcccacttgtagatggagatctgtctagccgttagagttgcccagcatct

SEQ ID NO: 3694 - DNA, 65 bp, Rattus norvegicus
atgtccacctttgcctctgtggggactcactgctgaaggaacggcttggttagctcagattcctt

SEQ ID NO: 3695 - DNA, 65 bp, Rattus norvegicus
gagcttgcaggctctgtcagacctcggattctttggactcaaaccttgaacagactactgagtag

SEQ ID NO: 3696 - DNA, 65 bp, Rattus norvegicus
tggctctggagactttgccagatatcagctaccaaacttccagagtgtggacaggctctttatac

SEQ ID NO: 3697 - DNA, 65 bp, Rattus norvegicus
gattcttagtcagcacttcagcacggctcttaaaagccctcactgcactcacagcccacttacat

SEQ ID NO: 3698 - DNA, 65 bp, Rattus norvegicus
gtataggtggacatttaccacagcgctgaacctgacgacaaggactcaccatgtcagagtcaatc

SEQ ID NO: 3699 - DNA, 65 bp, Rattus norvegicus
cccagcaaccattatacaggaaccattggtactcacagaacctaccagaaccaggcttcagaaag

SEQ ID NO: 3700 - DNA, 65 bp, Rattus norvegicus
cgaaagagccactgctcctcagctcccagagtcaccaatagttacgtgcttgtccctcttaatca

SEQ ID NO: 3701 - DNA, 65 bp, Rattus norvegicus
aaccaaggctgcatgagacaggcgagatctacaaccatgatgcaattcttctcacgctgcaacga

SEQ ID NO: 3702 - DNA, 65 bp, Rattus norvegicus
ggatatggatcctggttcttcaggtcagacggagggtaaaaccggacagcaaacccaaactgaag

SEQ ID NO: 3703 - DNA, 65 bp, Rattus norvegicus
ggaaaccactgatgggagtgctggagtatccatgtgcgaagagaggctgcacaagctagtatgtt

SEQ ID NO: 3704 - DNA, 65 bp, Rattus norvegicus
gtccaaccgttccctacccctgaaaatagctagacatgtggttagtgtgcagaactttggaaggg

SEQ ID NO: 3705 - DNA, 65 bp, Rattus norvegicus
tctctgcttatgagggagatcgattgtaaccctgctgctggatatgaagggaactaactgcaggg

SEQ ID NO: 3706 - DNA, 65 bp, Rattus norvegicus
ctgcctttactgtgaccattgtctgcatccacttcgtcctccctctcatcatagtcggttattgc

SEQ ID NO: 3707 - DNA, 65 bp, Rattus norvegicus
cctggttaacttcctctacttcttctacgaaatcattgactgcttctccatgctacactgtgtcg

SEQ ID NO: 3708 - DNA, 65 bp, Rattus norvegicus
aagactaaggtacaggagccctaagtccccatggcttcactgagccgggtcctccgtgtagctgc

SEQ ID NO: 3709 - DNA, 65 bp, Rattus norvegicus
cacccaccctttcagaagttcctcctgagtatccttctaagtaatgctcacctctgtttcatgct

SEQ ID NO: 3710 - DNA, 65 bp, Rattus norvegicus
attcccttcatcatagccacctacgtcactaaggactggcactttggagatgtgggctgcagagt

SEQ ID NO: 3711 - DNA, 65 bp, Rattus norvegicus
gacggctatccagcttatggggatcatgtgtgtactgtccgtctgctggtcgccgctattgataa

SEQ ID NO: 3712 - DNA, 65 bp, Rattus norvegicus
cctcacttcacagttctgctctgtggtcctgcagtgtatggcccaattctgggtccttctgaata

SEQ ID NO: 3713 - DNA, 65 bp, Rattus norvegicus
cacacaggacctccacaaggcaatgattctcagtttaggaagagatgtcctcgcctgaagctttg

SEQ ID NO: 3714 - DNA, 65 bp, Rattus norvegicus
gcctgctggatgccttttaccctctattccttgatcgccgattacacctacccctccatctacac

SEQ ID NO: 3715 - DNA, 65 bp, Rattus norvegicus
aatcgtatctaaggcaacgccacctgactcccatgcaaacagctgccattcctgccaaggtacct

SEQ ID NO: 3716 - DNA, 65 bp, Rattus norvegicus
aaatctgaggccaaatagcctcgattaacccggtagttcaggagcgcagacagcttgctttgctg

SEQ ID NO: 3717 - DNA, 65 bp, Rattus norvegicus
caacggacatagcacaaagcaagaaatagcactgtgatcggagaccatccaattcatcctcggga

SEQ ID NO: 3718 - DNA, 65 bp, Rattus norvegicus
tttagaaggttttcaccattcctgcttgacctggtaagtggcctcaggagatgcataacctcctg

SEQ ID NO: 3719 - DNA, 65 bp, Rattus norvegicus
ggcataagtgcccactcctaagctagcactgagagaactgtagaatctgtcctcagacctactca

SEQ ID NO: 3720 - DNA, 65 bp, Rattus norvegicus
ctagatgcttttgcaatgacagatgtcccttagctttccaggcttcccatcatccgatgtctggg

SEQ ID NO: 3721 - DNA, 65 bp, Rattus norvegicus
cttgtccctgcatttgaagactcttgcctggtgttctctgtaacaggacgaaacagtgtctcacc

SEQ ID NO: 3722 - DNA, 65 bp, Rattus norvegicus
atgacttactgtgatgcccacgcttgtgaggatcccctcatcactcctgtgcccacttcggagaa

SEQ ID NO: 3723 - DNA, 65 bp, Rattus norvegicus
ctcggacctcctggcctactgtgaagcccacgtgcgggaggatcctctcatcatccctgtgcctg

SEQ ID NO: 3724 - DNA, 65 bp, Rattus norvegicus
caaaggggtgggtgaccagttgagaagttctttgctgcttctgacctgagctcctgtcaataaag

SEQ ID NO: 3725 - DNA, 65 bp, Rattus norvegicus
attgatatgctggtttcgtaaaggaggcctttccagtcccagtgagcaaacggtctgacctggac

SEQ ID NO: 3726 - DNA, 65 bp, Rattus norvegicus
gaaagaataaaggtctccaaagcatctgcagacctgatgtcatactgtgaggagcatgcccggag

SEQ ID NO: 3727 - DNA, 65 bp, Rattus norvegicus
tggacacttagttagcaaaggcttccttggagctgttaggataggcatggccaggtagacattgg

SEQ ID NO: 3728 - DNA, 65 bp, Rattus norvegicus
ttgatataccccagctcttcaggattgtgggaaactccagagggaacccgaaggctgaggccttc

SEQ ID NO: 3729 - DNA, 65 bp, Rattus norvegicus
gggcagctgtgtcatttcctaaggaactctggagggaaattgttttcagttgggtcagattgttc

SEQ ID NO: 3730 - DNA, 65 bp, Rattus norvegicus
gtcactcaagaaaagtctcttgtaacgtaaaggcaaacacatgtagctactgagctatgactgtc

SEQ ID NO: 3731 - DNA, 65 bp, Rattus norvegicus
cttcatgtttgttcctttaggctcaaggatcatcggccttgggtgttggaagcacccactgtggt

SEQ ID NO: 3732 - DNA, 65 bp, Rattus norvegicus
taaactgatacgctttaagtgcacaggttgacttgtcaatggcattggggtcgcctaaggccatt

SEQ ID NO: 3733 - DNA, 65 bp, Rattus norvegicus
tacactgtgtacatagttcattgtgcctgtctgtgcccatcacttctcactgggattccaggctg

SEQ ID NO: 3734 - DNA, 65 bp, Rattus norvegicus
tcagatggtttcatgtcatgcagagaacctaggctggttcctgtgtcagagagacctgggcttct

SEQ ID NO: 3735 - DNA, 65 bp, Rattus norvegicus
catctatacctatgggtatgtcctctggaaagcacaccaacatgtagccagcttgactgagcacc

SEQ ID NO: 3736 - DNA, 65 bp, Rattus norvegicus
ggccataccaagggtcatatccaactcactttctgctggtgatcatgtcttatgtgtgatgagag

SEQ ID NO: 3737 - DNA, 65 bp, Rattus norvegicus
agggaacctgggccaaagcctttaaatggcctcgttggaggaacgtaaagggccggaatgtaaac

SEQ ID NO: 3738 - DNA, 65 bp, Rattus norvegicus
actgtgaggcacatgccaaggaagatcccctgctgaccccagtcccggcctcagaaaatcccttt

SEQ ID NO: 3739 - DNA, 65 bp, Rattus norvegicus
ctcggcctagagacgcttagggaaaccagaacacatcagagcaattaggagccaagaatggtggc

SEQ ID NO: 3740 - DNA, 65 bp, Rattus norvegicus
gccactcatttgtgctgattctgggaaacagtaagctgagacaagccactctttctgtgctgcct

SEQ ID NO: 3741 - DNA, 65 bp, Rattus norvegicus
tccctatggagacacaccaggcagatgcaactcaatgtaacagggtacaatgatcccagcacaac

SEQ ID NO: 3742 - DNA, 65 bp, Rattus norvegicus
catactgggcccgcatttgattatgagatcagaaatacttacatcaatgggtgttatctgggtgg

SEQ ID NO: 3743 - DNA, 65 bp, Rattus norvegicus
ctggttctttacgcgctgtcctatgtgtccatggtcattgacgctacagttgtcatctcctcaga

SEQ ID NO: 3744 - DNA, 65 bp, Rattus norvegicus
cattgactgctgtgcctctgtctggtggtgatggctgttctgtgggaatgccatccaaaacagag

SEQ ID NO: 3745 - DNA, 65 bp, Rattus norvegicus; identical to SEQ ID NO: 1

SEQ ID NO: 3746 - DNA, 65 bp, Rattus norvegicus
ccctgaggctaacagatacacttaggaatctattcagctgctcttacttactgtgtggatggcgg

SEQ ID NO: 3747 - DNA, 65 bp, Rattus norvegicus
aacaatgaacctggggttctcgggtccacagtgacctgacatctaacctgcaatggtcgaatgca

SEQ ID NO: 3748 - DNA, 65 bp, Rattus norvegicus
tttggacatgaaaaccgtgttagcactctgcgagtgtctcctgatgggacagcattctgctcagg

SEQ ID NO: 3749 - DNA, 65 bp, Rattus norvegicus
gagaggcccatttccctcagtcgttctctgatcctgctttccactactgaccctttcaacaagaa

SEQ ID NO: 3750 - DNA, 65 bp, Rattus norvegicus
tgacccaagcagacaccacctcgctgagaactttgcgaatttcagagacctcagactcctcccag

SEQ ID NO: 3751 - DNA, 65 bp, Rattus norvegicus
agctgcggaacaccttcaaggagattctctgcggttgcaatggcatgaacgtgggctaggaaccc

SEQ ID NO: 3752 - DNA, 65 bp, Rattus norvegicus
gagtattgccctaactatgatgcagcttccactgccaaaggctaatggcttatctcctattcaaa

SEQ ID NO: 3753 - DNA, 65 bp, Rattus norvegicus
caggcacaacctgagcagtgtacttcccaacagctgcctctactgtatagtgctttggttggaaa

SEQ ID NO: 3754 - DNA, 65 bp, Rattus norvegicus
cctctcaagcccctccctgttctctagtcaatgctggcactttgataggatcggaaaacaagtca

SEQ ID NO: 3755 - DNA, 65 bp, Rattus norvegicus
ggagctaaagagatgcatcggccctgaaagagcatttacttttcttccagaagaccggagttcat

SEQ ID NO: 3756 - DNA, 65 bp, Rattus norvegicus
cgctcacctccaacaagttctccaggaaatccagctcttactcctccagctcaaccagtgttaaa

SEQ ID NO: 3757 - DNA, 65 bp, Rattus norvegicus
ttgtcttctgggatctgagagtttgctgagatgcattcacccccaggcctacaagttggactcct

SEQ ID NO: 3758 - DNA, 65 bp, Rattus norvegicus
ccaggacgcaaggtagagtccttctccatctcaagagaccaaaagaaccctgaaacgccaaacat

SEQ ID NO: 3759 - DNA, 65 bp, Rattus norvegicus
gagcccatgcaagcagaacctgcctgcaagcgagtccctttcaccaagaccactactttctgaaa

SEQ ID NO: 3760 - DNA, 65 bp, Rattus norvegicus
ctgttagatgtttgttgaactggtagcatcattgagactgctgtgatgtctttgtcagtaatctg

SEQ ID NO: 3761 - DNA, 65 bp, Rattus norvegicus
aggacagcatgaactaaccctgtgcagaagcaccgagcagtgtgccttcgagtcccaggatgaaa

SEQ ID NO: 3762 - DNA, 65 bp, Rattus norvegicus
acctccttcaagagcaccaacccctcagctaccttcagcctcatcaacggaaatatctgccatga

SEQ ID NO: 3763 - DNA, 65 bp, Rattus norvegicus
ccagtcgctgctgtggagtgaacatcatcagcttgcacatctgggaactcagctccatcaagaat

SEQ ID NO: 3764 - DNA, 65 bp, Rattus norvegicus
aaatccaacatgccggcctttggtgagcttctaggtgcctgctgatgaactcttgaggactcagt

SEQ ID NO: 3765 - DNA, 65 bp, Rattus norvegicus
aaggcaaaggctgagagaaagctacgcctgagacccagtgacctgcgcagtttcctaaccatgtt

SEQ ID NO: 3766 - DNA, 65 bp, Rattus norvegicus
aacatatgcatctgggtcttggcttcaggtgttggggtccccatcatggtcatggcagtgaccca

SEQ ID NO: 3767 - DNA, 65 bp, Rattus norvegicus
gccttagcattgactctcaagggaggaactgtaacacaaacgactcgccactgtagtgtaggctt

SEQ ID NO: 3768 - DNA, 65 bp, Rattus norvegicus
atgatttactttaactgacgagatgatgaacgtaacagaagattaaaccacatcccctttgatat

SEQ ID NO: 3769 - DNA, 65 bp, Rattus norvegicus
ttcactgatgagtatgggtcatgaatatagtctagtaaattgtgatcagagttatggctcatgac

SEQ ID NO: 3770 - DNA, 65 bp, Rattus norvegicus
aaagtgtttgtagtcttggcatagggacacggccgaaataactgactccttcctcgctctgcaga

SEQ ID NO: 3771 - DNA, 65 bp, Rattus norvegicus
gtcagcgagaggattagtagtgtgtaagcgaagagcagcgcagacttcctacaggaaagttcctg

SEQ ID NO: 3772 - DNA, 65 bp, Rattus norvegicus
ccgagtttcgaagtgtcttccgcaagactcttcgtctccgctgctgaaagaaccgctgatgtctt

SEQ ID NO: 3773 - DNA, 65 bp, Rattus norvegicus
gatgaggaggacgcaagcaaaccaaggaaaaggcaagagtgaagcactaaggttgtccagtttcc

SEQ ID NO: 3774 - DNA, 65 bp, Rattus norvegicus
acagcaaatgctggccagtcaggccttggaccagtgttggagttgaagctggatgtggtaacttg

SEQ ID NO: 3775 - DNA, 65 bp, Rattus norvegicus
actcacgttcttaatacccactgtcaagcatgccacgtgtccccagagctttacagagccacaac

SEQ ID NO: 3776 - DNA, 65 bp, Rattus norvegicus
tgtgtttcctcttcaaccgggagctgagggactgtttcagagcccagttcccctgttgccagagc

SEQ ID NO: 3777 - DNA, 65 bp, Rattus norvegicus
gcgctgtttcagcacaacccttctttactgcagaaaatccaggttaccaagggaaccttactgtg

SEQ ID NO: 3778 - DNA, 65 bp, Rattus norvegicus
tgctgtcaacccaatcgtctgcttcctgcttaacaaggacctcaagaagtgcctgaggactcatg

SEQ ID NO: 3779 - DNA, 65 bp, Rattus norvegicus
ggctactacagaccaacaaagaccagctgaagttaatccaccaggacactgtgagcacattactg

SEQ ID NO: 3780 - DNA, 65 bp, Rattus norvegicus
atgaaatgactccagacacctacccccacagcctaccctgcccatacttaggtaccattgacata

SEQ ID NO: 3781 - DNA, 65 bp, Rattus norvegicus
agccctttgagcatcttcttcagagaatcgcccgaagacccaagcctcagcagttctttggatta

SEQ ID NO: 3782 - DNA, 65 bp, Rattus norvegicus
ttcttggcagaactgctgtccgagcccaaccagacagagaacgatgccctggagcctgaggattt

SEQ ID NO: 3783 - DNA, 65 bp, Rattus norvegicus
aaacgtgacatgcacgacttctttgtgggacttatgggcaagaggaacagccaaccagacactcc

SEQ ID NO: 3784 - DNA, 65 bp, Rattus norvegicus
ttctgtctgttgattcccagcctcaggcatctgttgcattgaggaagctttgccgtgtcctgatg

SEQ ID NO: 3785 - DNA, 65 bp, Rattus norvegicus
tcgtagggccaggtgagaggaacatgaaatcagacctggggttttgcctcaccactgccataact

SEQ ID NO: 3786 - DNA, 65 bp, Rattus norvegicus
atcatattcgattcggtgggcaagtgatcggccccgtatggggtccagaaagccttgaccctttc

SEQ ID NO: 3787 - DNA, 65 bp, Rattus norvegicus
gagaaagcacagaaaatgcccccagaacaaggcttgaagacccttccatgtggtgatgggaaatg

SEQ ID NO: 3788 - DNA, 65 bp, Rattus norvegicus
tcctcagaagacctagagcagtcctgagaccacacccactgtgcacctgtgtcctctgctataat

SEQ ID NO: 3789 - DNA, 65 bp, Rattus norvegicus
attagaggaccaactctgcttgctgtggtcgaacactcaggccctacaggattggcttctgccca

SEQ ID NO: 3790 - DNA, 65 bp, Rattus norvegicus
cagaagacgtgttcctgccgtctctacgaactgttgcacggagctggcaaccacgccgcgggcat

SEQ ID NO: 3791 - DNA, 65 bp, Rattus norvegicus
gcaagcccagcttcctgaggggccttttgtcctgttagcaattgaggcatttgcagaacactgta

SEQ ID NO: 3792 - DNA, 65 bp, Rattus norvegicus
ggactccacctctcatggattcatctctccgactaggatttgcaatccccaaaagcttcttcgag

SEQ ID NO: 3793 - DNA, 65 bp, Rattus norvegicus
gaggactggagatctgcgcatagtggacaagaatgttccggatgaagaagccaccctgaacttat

SEQ ID NO: 3794 - DNA, 65 bp, Rattus norvegicus
gtctaccgaccctgttggcaagtctgatacctgctggtccacaacatcctttcagaagaaaacga

SEQ ID NO: 3795 - DNA, 65 bp, Rattus norvegicus
tacagcttatgcacaacctgggcaaacacctggcctctgtggagaggatgcaatggctgagaaaa

SEQ ID NO: 3796 - DNA, 65 bp, Rattus norvegicus
atggcggaccaagcagagctctgtcgactgaggtcccagtgaccgacctaccccggagcaggact

SEQ ID NO: 3797 - DNA, 65 bp, Rattus norvegicus
agttcctttgaggtcaaccttagaaagcagcccaggcatggccactctcagtgaagaagaagctc

SEQ ID NO: 3798 - DNA, 65 bp, Rattus norvegicus
tttgcagcaaaccaaataggttctccaagagccgtccagacgatggtagcagctctggtgaacct

SEQ ID NO: 3799 - DNA, 65 bp, Rattus norvegicus
aagatacatcaacacactgaccaggcctaggtatgggaagagagatgaggacacagctgggcttc

SEQ ID NO: 3800 - DNA, 65 bp, Rattus norvegicus
cagcatcttctggtttgaacctgtttctgtgaacaactacctaggaagagctttccagtgaacgc

SEQ ID NO: 3801 - DNA, 65 bp, Rattus norvegicus
ccgctcctcagcgctttgggaagaagtaacatcatctgctgtgatatgtctgcatgcaaaatcac

SEQ ID NO: 3802 - DNA, 65 bp, Rattus norvegicus
atgtgaaatctgtgcctatgctgcctgcacgggatgctagagtgacatcacttgccttcctctca

SEQ ID NO: 3803 - DNA, 65 bp, Rattus norvegicus
actcctgatgtggaccctgagctgctgaggtacttgctagggcggatcctcaccggaagttcgga

SEQ ID NO: 3804 - DNA, 65 bp, Rattus norvegicus
atggccctgaagacgtggcttctgtgcttgctgctgctaagcttggtcctcccaggggcttccag

SEQ ID NO: 3805 - DNA, 65 bp, Rattus norvegicus
ttctgactttccttgcctggtggcatgagtgggcttcccaagacagctccagcaccgctttcgaa

SEQ ID NO: 3806 - DNA, 65 bp, Rattus norvegicus
gtgctgcttgtgctgtacagttgccctcgtggtctggataactgctgcctgaaagctgtgatttt

SEQ ID NO: 3807 - DNA, 65 bp, Rattus norvegicus
aaacttctgtaatctgccccatgtggtaagactgacctggtatagcttcagcgcatcctccaagg

SEQ ID NO: 3808 - DNA, 65 bp, Rattus norvegicus
tgtactttcctcctaagcaagaactcacatccagcttctgcctcctctgcaactcccagcactct

SEQ ID NO: 3809 - DNA, 65 bp, Rattus norvegicus
tgaagacgcccaaggcctcccgtgagatgtgctaactacaccgacttcacttgcatgtttggttt

SEQ ID NO: 3810 - DNA, 65 bp, Rattus norvegicus
gcttgaagcatagaagatgtacagggagagagcctatataccccttaattagcatgcacaaagtg

SEQ ID NO: 3811 - DNA, 65 bp, Rattus norvegicus
agtaaaccttggtgtccattgtgaaaactcattcaaatgtcagctgagcactcacagggcatggc

SEQ ID NO: 3812 - DNA, 65 bp, Rattus norvegicus
aggtggaaacccatacaatgcttatgtatgtgcatgttagcagagcccgtgagtgacagcatgca

SEQ ID NO: 3813 - DNA, 65 bp, Rattus norvegicus
ccaggagtgaaggatgccactctgggtgttctttgtgctcctcaccctcaccagtggctcccact

SEQ ID NO: 3814 - DNA, 65 bp, Rattus norvegicus
agtcccaaagattacctggagtcaactgtcatggagagaaatggaagatgaaggtcctacaccag

SEQ ID NO: 3815 - DNA, 65 bp, Rattus norvegicus
aaccagcgccaacccagcaagaaagcctcaaagggcaagggactccgtgggagcgccaagatttg

SEQ ID NO: 3816 - DNA, 65 bp, Rattus norvegicus
gtggcaggcttgttaactagagcaggctcattcattaaatcgtgcacatgattctacagcagctg

SEQ ID NO: 3817 - DNA, 65 bp, Rattus norvegicus
ggtacctgtgttcagagtggcctgtgagcatactgtgtgaccttctgctttgagattttgaccta

SEQ ID NO: 3818 - DNA, 65 bp, Rattus norvegicus
catcatggggcgcaaggtgaagagccagtacttgctcacagccattcacaagtgggacaagaaaa

SEQ ID NO: 3819 - DNA, 65 bp, Rattus norvegicus
gacggctccatgttcttctcgcaccaccacactcgttttgcccgtctctggatcctcacatggtc

SEQ ID NO: 3820 - DNA, 65 bp, Rattus norvegicus
aactggaagcaggacagcaatcctctctacaaaagtgcggtcacaactaccgtcaaccctcgctt

SEQ ID NO: 3821 - DNA, 65 bp, Rattus norvegicus
tacagcactgtcaccagcactcacagcactaccaccaccgagcccttccttatagatggactaac

SEQ ID NO: 3822 - DNA, 65 bp, Rattus norvegicus
agcagcatcacagcatctgaaccatgactgattctcagctttacagagtggccaggactagttaa

SEQ ID NO: 3823 - DNA, 65 bp, Rattus norvegicus
gcacacattcctccagagaaagaacgacccttatgctcttgcatccctggtgtcctttgaagtca

SEQ ID NO: 3824 - DNA, 65 bp, Rattus norvegicus
aagatcaagatgaggcaggtcctagacagacagcagaagcaaatggtggaagattcccagtggct

SEQ ID NO: 3825 - DNA, 65 bp, Rattus norvegicus
ttccaattccaaactgggagcacaaggaaagccctgagaccgaagaagacgttgggcctgttgtt

SEQ ID NO: 3826 - DNA, 65 bp, Rattus norvegicus
aaatccgttctaaagtggagctggaagtgcgtgatctccccgaagagctgtcgctgtccttcaat

SEQ ID NO: 3827 - DNA, 65 bp, Rattus norvegicus
atccttccatctggggtgttacgtgagagcaggagttaagacggaggctttccttatgaagacac

SEQ ID NO: 3828 - DNA, 65 bp, Rattus norvegicus
ggaagtatggcatgagaaaggagtctggcctttaaggaaactgagttgtgcagatttgttttggg

SEQ ID NO: 3829 - DNA, 65 bp, Rattus norvegicus
ccctgctcaccagcactaaatgcactaacagaccttcagcctctgatctgcctagtgtaaaccta

SEQ ID NO: 3830 - DNA, 65 bp, Rattus norvegicus
ttgctgattgtgcccttatgtgccagaaactccggtttcgtccacatggaccttatcagaacagg

SEQ ID NO: 3831 - DNA, 65 bp, Rattus norvegicus
ctctcacctttggggatgtcgttgctgttcgctgttatgaaaaggcatagaagaaatgccgggtc

SEQ ID NO: 3832 - DNA, 65 bp, Rattus norvegicus
gaatgtgtcatgaaaggcgtgacttctacaagagtttacgaaagggcatgagccaagggacgagg

SEQ ID NO: 3833 - DNA, 65 bp, Rattus norvegicus
acgcttacacgggaactaagtgatgggaaactcatcctgactctcacccatggcaatgtggtgag

SEQ ID NO: 3834 - DNA, 65 bp, Rattus norvegicus
gataatgcaggctcactcactgtgtcatgagcactgcttccaagccttgtcagagccaaagaagt

SEQ ID NO: 3835 - DNA, 65 bp, Rattus norvegicus
tgggtaggggaccctagctggaaggatggctccattgtcatacacaacctagactacagtgacaa

SEQ ID NO: 3836 - DNA, 65 bp, Rattus norvegicus
ggaaccccagtaagtacgacgtgtcagtgactctaaagaacgtgcagctagaagacgaaggcatt

SEQ ID NO: 3837 - DNA, 65 bp, Rattus norvegicus
catagacactttacccgaaacccatgtcagaccgttggtttacccaggatcattcctttggttag

SEQ ID NO: 3838 - DNA, 65 bp, Rattus norvegicus
tgcgaactggagaccatgactggggaaaaggtcaaggcagtggttaagatggagggtgacaataa

SEQ ID NO: 3839 - DNA, 65 bp, Rattus norvegicus
ggtgtcacaggcactgaaattcacccaacagaggtctctagatagatgttcatggtggaagatga

SEQ ID NO: 3840 - DNA, 65 bp, Rattus norvegicus
gtcctaatgacaagtgccagtctagacccatcctttggaggaaaggggcatattagtaatacttt

SEQ ID NO: 3841 - DNA, 65 bp, Rattus norvegicus; identical to SEQ ID NO: 1

SEQ ID NO: 3842 - DNA, 65 bp, Rattus norvegicus
tggacccagtggattgagggtgatgaacttcacctggagatgagagcagagggtgtgacctgcaa

SEQ ID NO: 3843 - DNA, 65 bp, Rattus norvegicus
tctctatgccagagaggggcagactaccaaagctcagaacccttccatttgcctggtcagaagtc

SEQ ID NO: 3844 - DNA, 65 bp, Rattus norvegicus
tttaagaaccctgtttcctctcagagcctagggagagtccaaggacatggcgcatcaggaagtgg

SEQ ID NO: 3845 - DNA, 65 bp, Rattus norvegicus
ggaccagaatggaacctgggaaatggagagtaatgagaactttgaaggctacatgaaggccctag

SEQ ID NO: 3846 - DNA, 65 bp, Rattus norvegicus
tagtggagtgcaccatgaacaatgttgtcagcactaggacctacgaaagggtgtagcagatgggt

SEQ ID NO: 3847 - DNA, 65 bp, Rattus norvegicus
ggtaaactagcaggatgcacagtagtgaggagagcttaaaggacctggaagaaaccaatcaagat

SEQ ID NO: 3848 - DNA, 65 bp, Rattus norvegicus
gggacagaagaacccacaacatgagggaaagctaaatgagccagggtatgaatatgggagcctga

SEQ ID NO: 3849 - DNA, 65 bp, Rattus norvegicus
aagaagttcaaggcaaccgtgaagatggagggtggcaaggtggtggcagacttccccaactatca

SEQ ID NO: 3850 - DNA, 65 bp, Rattus norvegicus
atccaaagctgggaccactaccgagagtgagatcttgagaccttgtggagttcccaccctgaaat

SEQ ID NO: 3851 - DNA, 65 bp, Rattus norvegicus
atttgaccctctcaccccttctttcagctaatggaaactgacacacgacaacttgttccttcacc

SEQ ID NO: 3852 - DNA, 65 bp, Rattus norvegicus
cacgctaagaccgtgtgtctgcgtgcacacccttgaccacagctccagaagttgtctgtagacaa

SEQ ID NO: 3853 - DNA, 65 bp, Rattus norvegicus
cagcagtcacatccaaaggaggatgtcacccctgaggaacactgtacaaatgaggtgggatttgt

SEQ ID NO: 3854 - DNA, 65 bp, Rattus norvegicus
gctagcaagaagccatctctacttggagcactcctgtgtcactcactaccatcagtgcctgccct

SEQ ID NO: 3855 - DNA, 65 bp, Rattus norvegicus
cttaactgcctccaccagcctgctgacagacactaactctgtaccggttcaccaagcatttcata

SEQ ID NO: 3856 - DNA, 65 bp, Rattus norvegicus
attgcacacgcctatgtctctgtgagcccaacaggctacacgtggcactatctggagccactttt

SEQ ID NO: 3857 - DNA, 65 bp, Rattus norvegicus
taatactcggcgcttgacaagcagcagcgagtgtggaccaagcctgtctgtatctggtagctctt

SEQ ID NO: 3858 - DNA, 65 bp, Rattus norvegicus
gaacgccgcggacgttctctgaacgcacctctgtgctttcttgtcatgttatgcagtgaaactat

SEQ ID NO: 3859 - DNA, 65 bp, Rattus norvegicus
cactttaccttgtgacagaagtagcatgttgctgccagaatacaagcattgctttgggcaaatta

SEQ ID NO: 3860 - DNA, 65 bp, Rattus norvegicus
gaagagaagatcgttatgtccaagaaggagtccatgtgctcctgggacgagaccgagtacaagat

SEQ ID NO: 3861 - DNA, 65 bp, Rattus norvegicus
gcaggcagatttgccctgagtttgcggggaagatgcttcagtgtgattcttggggcaaatacctg

SEQ ID NO: 3862 - DNA, 65 bp, Rattus norvegicus
gagcggcgctcagaatggaagccatcgccaaatatgacttcaaagctactgctgacgatgagctg

SEQ ID NO: 3863 - DNA, 65 bp, Rattus norvegicus
ctagttaaccatgtgacctactgctgtgttggaatcatatggatgctacctgatcaccaggctgt

SEQ ID NO: 3864 - DNA, 65 bp, Rattus norvegicus
gtgggagcaggaatgggaaccttggcaaaatctggtctgggtaggacagacatgaagattcgaca

SEQ ID NO: 3865 - DNA, 65 bp, Rattus norvegicus
agaaaagacccaggggaagcatgagctctacaggtgacagctttagtgttcaccagctgagatct

SEQ ID NO: 3866 - DNA, 65 bp, Rattus norvegicus
ttagaggagagtgccttggtggtgacaccagagggagagcaggctttggcgaccacagtggagat

SEQ ID NO: 3867 - DNA, 65 bp, Rattus norvegicus
cgtggtgaatgtagctggaagtttcagcattcgacaggaccctacacggtttcagtcagtgcact

SEQ ID NO: 3868 - DNA, 65 bp, Rattus norvegicus
catatctagctgtccagatcagaagctggcctatgatcctctaactcccacaggtcccaatggct

SEQ ID NO: 3869 - DNA, 65 bp, Rattus norvegicus
caaagatgcggagcctttcgatatgacgttgaaatgccttccaaatttgtctgaggagcggaagg

SEQ ID NO: 3870 - DNA, 65 bp, Rattus norvegicus
cgtccgaaccacctcagatggaggctactctttcaagtatgagatggtaccgaacctcattacac

SEQ ID NO: 3871 - DNA, 65 bp, Rattus norvegicus
cgccctctgtctttgctctactatgacagggacagcaacattgtcaagacggatatacctgacat

SEQ ID NO: 3872 - DNA, 65 bp, Rattus norvegicus
gatctggccttacattagccctaacacagtttatctgcaagctggagggaattacatggggtgct

SEQ ID NO: 3873 - DNA, 65 bp, Rattus norvegicus
ctagtgtgtgtgcctgggatgggacatggtcattggacaacatacatcgccgtttgctaagtatg

SEQ ID NO: 3874 - DNA, 65 bp, Rattus norvegicus
cccattaggagctattggttacaccaaccatgccattgctacaccctaacagttactgcaccaga

SEQ ID NO: 3875 - DNA, 65 bp, Rattus norvegicus
attaggaaacgtaatcttaacccccatgctgtcaggtaccccactttgggagtcatgtcagtggg

SEQ ID NO: 3876 - DNA, 65 bp, Rattus norvegicus
tgattgcggagatccacacagctgaaatcagagctacctcggaggtgtcccctaactccaaacct

SEQ ID NO: 3877 - DNA, 65 bp, Rattus norvegicus
gatgaaagggagcaagagtggaaggcaggattccatcgctggagcaattacatgatggactggaa

SEQ ID NO: 3878 - DNA, 65 bp, Rattus norvegicus
aggcttctgcatgctctgctgcccttgtgccctggtgtgctgcctctgccaatgtgaaaacacaa

SEQ ID NO: 3879 - DNA, 65 bp, Rattus norvegicus
ctggaaagctgtaaattcctcatcgacaacccctacaccaacacgtactcatacaagtgctccgg

SEQ ID NO: 3880 - DNA, 65 bp, Rattus norvegicus
caacaaaaggtccggatcccaacctcagtcatcaaatgaccaaacgaaagagaatggttctggtc

SEQ ID NO: 3881 - DNA, 65 bp, Rattus norvegicus
ccaggtcttcagggtagtaatcgttccgatagtaggaagctagggttagtcgggagtaaagtctg

SEQ ID NO: 3882 - DNA, 65 bp, Rattus norvegicus
ttgctcagcgccacagccacagaggttccctgcacctgcccaagccccgcccatggggaggctgc

SEQ ID NO: 3883 - DNA, 65 bp, Rattus norvegicus
acatggtgcactggaagaaccagttcgaccactatagcaagcaggaacgctgctcagacctgtga

SEQ ID NO: 3884 - DNA, 65 bp, Rattus norvegicus
acagccctacactgtcagcgaggtgcataccgtcctcatgcgcctgtcagcctaacactaagaaa

SEQ ID NO: 3885 - DNA, 65 bp, Rattus norvegicus
caagctgatgcttttctcacctcccaaggttcattcccctgtgatcctcctccaccttatgtcat

SEQ ID NO: 3886 - DNA, 65 bp, Rattus norvegicus
gccagtgattaaagccagaatgatggagtatgggaccacaatggtcagctaccaacccttaggag

SEQ ID NO: 3887 - DNA, 65 bp, Rattus norvegicus
ggggacccatccaagaacttgctgctggctgaggtcatcaacatcatcaagcgggaagacctgct

SEQ ID NO: 3888 - DNA, 65 bp, Rattus norvegicus
tggtgtgtgaaaagtgtgaaaagaaactcggcagggttatcactccagacacatggaaggacggg

SEQ ID NO: 3889 - DNA, 65 bp, Rattus norvegicus
gacttttaagcacctcctcatgtgtcattacaagaacataggcgctacacggtgaaaagaccatc

SEQ ID NO: 3890 - DNA, 65 bp, Rattus norvegicus
ccattgtgacaaccgaatttcgcatcatcctttgaattgccccaagtgcaccgtgtttcctctgg

SEQ ID NO: 3891 - DNA, 65 bp, Rattus norvegicus
gactggcagtagcctggaccagaaagactcttgactaggtgaggcagagttcaaatgagtcacct

SEQ ID NO: 3892 - DNA, 65 bp, Rattus norvegicus
atcacccagcaaatgctgaactttgcaggcctacaggacaaagtcaccatcctcaatggggcatc

SEQ ID NO: 3893 - DNA, 65 bp, Rattus norvegicus
aaattacccacaccttcttagagaggaacctgccttccgtgcctggtctgctcaagatcactggt

SEQ ID NO: 3894 - DNA, 65 bp, Rattus norvegicus
cgcttagctgaaacctaaggctatgtttccgaagatctccgatacactgaccagtcccacaagtg

SEQ ID NO: 3895 - DNA, 65 bp, Rattus norvegicus
ctcaggtccagaacatgcttcctccttgcatagcaggtggaaccgacatggcctcctcaaagaat

SEQ ID NO: 3896 - DNA, 65 bp, Rattus norvegicus
caaagtgggctgtaacgtcctggacactgtggatatggtggattgtcttcgacaaaagagtgcca

SEQ ID NO: 3897 - DNA, 65 bp, Rattus norvegicus
gctactggctgtgctatatcaacagcaccgtgaaccctgtgtgctatgccctgtgcaacaaaaca

SEQ ID NO: 3898 - DNA, 65 bp, Rattus norvegicus
ctggcaggtaccacattatcacataagtgctgtcagtactaagtcgtggggatcaaggagactgg

SEQ ID NO: 3899 - DNA, 65 bp, Rattus norvegicus
ccaagtccatctctggcctctactgcaagtgctattgatgccttgagggtctgtcgtctctgatt

SEQ ID NO: 3900 - DNA, 65 bp, Rattus norvegicus
gtttcttcctatagggaggaacagagtgtgagtcaggagtctttctgtcaggtagggatgtgctc

SEQ ID NO: 3901 - DNA, 65 bp, Rattus norvegicus
agggcctaaactcaggagcacagccatagtggggtgggacttgggaaatgagcagtgggtgcttg

SEQ ID NO: 3902 - DNA, 65 bp, Rattus norvegicus
agcaacccttcacaagcccttcatccagggtttctagttctgtttcactcccaagtagcttggag

SEQ ID NO: 3903 - DNA, 65 bp, Rattus norvegicus
gccacttccctttaccccgtcaccaaaggtctcggtacaaccagctgcccattttgtgagatttt

SEQ ID NO: 3904 - DNA, 65 bp, Rattus norvegicus
gccaccctcctgttagccctcagagtcttatttctctctattggtgaccaagttgcaaatggata

SEQ ID NO: 3905 - DNA, 65 bp, Rattus norvegicus
gtgaccctgcctcgcacatgctcagcctccaagtgattccactgaggcccagtgcagctggggtg

SEQ ID NO: 3906 - DNA, 65 bp, Rattus norvegicus
cagggtgaaatggtcaacaacattgagagaaacgtggtgaactccgtagattacgtggagcacgc

SEQ ID NO: 3907 - DNA, 65 bp, Rattus norvegicus
aagggccaacaacgtccggaacaaactgaagagcatggagaagcatattgaggaagacgaggtcc

SEQ ID NO: 3908 - DNA, 65 bp, Rattus norvegicus
ccatgagatcttcacttttctagctaccgaggtggagatgcagggagagatgatcaatcgtatcg

SEQ ID NO: 3909 - DNA, 65 bp, Rattus norvegicus
tcccagggaccaacttaatcatctgggtcatctagaacttgactgccaccttctcctcaccatgt

SEQ ID NO: 3910 - DNA, 65 bp, Rattus norvegicus
ctgagcccgaacgccctaaggaagcagagtttgatgcctccaagattaagattgagttcacgcct

SEQ ID NO: 3911 - DNA, 65 bp, Rattus norvegicus
ccttctttgactggacctctgtcttatacacatccagggaagagaacatttgtcatggacttccc

SEQ ID NO: 3912 - DNA, 65 bp, Rattus norvegicus
agctcggcttcatgacactctcgatattcctgtgtagaaatctggatcacgtctatgaccggctg

SEQ ID NO: 3913 - DNA, 65 bp, Rattus norvegicus
gactcctgcctttgtgacagaacactgaaatcccagtgaggaactcatctgaagtggacattccg

SEQ ID NO: 3914 - DNA, 65 bp, Rattus norvegicus
gctgtatcagtcttctgagttgtgagtgactgtcttgaaagatgtaatggaagaaaagtatggtg

SEQ ID NO: 3915 - DNA, 65 bp, Rattus norvegicus
tggtgctctactgccaaattggaagcaaatgaatctgcggacttcctcagtcgttatagacacca

SEQ ID NO: 3916 - DNA, 65 bp, Rattus norvegicus
aactccttgtttagggttgggtacttctgtgaccctcccacattcatgctggaatgttgagtggc

SEQ ID NO: 3917 - DNA, 65 bp, Rattus norvegicus
ggcgagcactgtcgagatacaaacccattgcttgggattggaagtgaagaaaactccctacacag

SEQ ID NO: 3918 - DNA, 65 bp, Rattus norvegicus
catctatgtagtgctgtgttgtggaatgtttgagccctgtttccatacttgaagacatggaggac

SEQ ID NO: 3919 - DNA, 65 bp, Rattus norvegicus
accaaccacgatggctctgtcagttttgaggactttgtggctggtttgtcggtgattcttcgggg

SEQ ID NO: 3920 - DNA, 65 bp, Rattus norvegicus
ggatcactccggcacgttgggtcccgaagagttcaaagcctgcctcatcagcttgggttatgata

SEQ ID NO: 3921 - DNA, 65 bp, Rattus norvegicus
tcggattcccagtcaggcatcatgctatcatcagtgggcaccagcaagtgcaacagcccagcatg

SEQ ID NO: 3922 - DNA, 65 bp, Rattus norvegicus
ctcttgctctggcagggtgtggcgaaagagtccagccgcagcaaagacttcattagccttggact

SEQ ID NO: 3923 - DNA, 65 bp, Rattus norvegicus
aggagttgtcagacttggggaccgaggatggatggaccatggatacagaagcagatcattcagga

SEQ ID NO: 3924 - DNA, 65 bp, Rattus norvegicus
tttactcagatttacgccttacaaagggaatctctggtccagacacttgggcctggcaagggtgg

SEQ ID NO: 3925 - DNA, 65 bp, Rattus norvegicus
acatggaacaagcaccacccttctcaggatctgcttccagtgagcccttagagctgcggataaat

SEQ ID NO: 3926 - DNA, 65 bp, Rattus norvegicus
gctcctctctgagcagcctacgccctagctcttcagtggtttcctttctgtggctctttctctta

SEQ ID NO: 3927 - DNA, 65 bp, Rattus norvegicus
accatgcctgatgaggatttcttcagccttatccagagggtgcaggctaagcggatggatgagca

SEQ ID NO: 3928 - DNA, 65 bp, Rattus norvegicus
ggccatagagtacactgcctgccttaagtgaggacatgaaagtgctattaccaagttcaagatca

SEQ ID NO: 3929 - DNA, 65 bp, Rattus norvegicus
caggagaaagatgctgttttgcgctatcttgatttgttacagcagccaacttattggcatgatgg

SEQ ID NO: 3930 - DNA, 65 bp, Rattus norvegicus
gtcaaggctgctgaagtttattggcttctcatcgtacctaagcctcctggagcaataaaactggg

SEQ ID NO: 3931 - DNA, 65 bp, Rattus norvegicus
caagttccacatcattggagcagtgggcatcggtatcgccgtggtgatgatcttcggtatgattt

SEQ ID NO: 3932 - DNA, 65 bp, Rattus norvegicus
ctttgtgtcctttgctcactctctctgcaccatccatagggcaagagtgggctttcacctctttc

SEQ ID NO: 3933 - DNA, 65 bp, Rattus norvegicus
agagctggagtacaagtgtacctcttcagccaaggaggtagtactgcagcacgtgaggactgatc

SEQ ID NO: 3934 - DNA, 65 bp, Rattus norvegicus
aaaggctatgtgactgatgatggtcaaggaatgggtcgaggtagtagaccttacagaaatagggg

SEQ ID NO: 3935 - DNA, 65 bp, Rattus norvegicus
gcatttgagggaatatctatttgagcactgatttactctgtaaagagggcaaaatctctctgtcc

SEQ ID NO: 3936 - DNA, 65 bp, Rattus norvegicus
aacaagtcttgctctatgaggtctacacccataacaccctactccggaatggtaacagagccagc

SEQ ID NO: 3937 - DNA, 65 bp, Rattus norvegicus; identical to SEQ ID NO: 1

SEQ ID NO: 3938 - DNA, 65 bp, Rattus norvegicus
ttgcatacttcctgaattttctatgtagaactgttcatttccacccagggtatctgctgcctctg

SEQ ID NO: 3939 - DNA, 65 bp, Rattus norvegicus
tggtacccgtctacctgctcaccatcactgctctggataggaaaggacagcctcatcttcagccg

SEQ ID NO: 3940 - DNA, 65 bp, Rattus norvegicus
caaacttcgtggcttttggttgtcccagtggaagaagaaccatagtccagatgagttcaaggagc

SEQ ID NO: 3941 - DNA, 65 bp, Rattus norvegicus
gcaagtaggattcggtggcattttggaggaacttgagaggacttgaggctttctactgggacaca

SEQ ID NO: 3942 - DNA, 65 bp, Rattus norvegicus
cctcaagcattcagtaaggatgtcttggctgtgctgctgctgacctgttgaagtacatgaggcca

SEQ ID NO: 3943 - DNA, 65 bp, Rattus norvegicus
tgttgtcccagttcctgtggtaggccctgcaaaactcctgtcaacattgaggttcaaaaggctgg

SEQ ID NO: 3944 - DNA, 65 bp, Rattus norvegicus
ccttcatcctgcatgtgtgtagcattaggagaaggcatggctcctgctgcaaacactgtgaatgc

SEQ ID NO: 3945 - DNA, 65 bp, Rattus norvegicus
aaggaatttgaccaactcaccccagaagaaagccaggcccgacttgggcggattgtagaccgcat

SEQ ID NO: 3946 - DNA, 65 bp, Rattus norvegicus
ttgtcttgaagcaggccattacccacgagactactgctggctcgctgttgcctgtggtcatcatt

SEQ ID NO: 3947 - DNA, 65 bp, Rattus norvegicus
ggatgcctacgagtttactgtggacatgagagacttctcccctgaagacatcattgtcaccacct

SEQ ID NO: 3948 - DNA, 65 bp, Rattus norvegicus
gtgctggaggaatagcagtcttgagaattggcaggccataggttaaggatgtaggtcacaaggtc

SEQ ID NO: 3949 - DNA, 65 bp, Rattus norvegicus
gaggctgggcatcaagccagagagtgctcaacctcacaggcctacaacaaatccaaacacttcta

SEQ ID NO: 3950 - DNA, 65 bp, Rattus norvegicus
caggccagtgtcggcaactcatacaagtgcacaagtgaggagcacatctttgtcagcaaggcgct

SEQ ID NO: 3951 - DNA, 65 bp, Rattus norvegicus
tatcaagcaagtgaaggtggctggctgtccatccacacacagagagaagtcttggagctcacagt

SEQ ID NO: 3952 - DNA, 65 bp, Rattus norvegicus
acacactgtgtcaagttggctggtgctacccactacccactggataggtgctgttacgggaagtt

SEQ ID NO: 3953 - DNA, 65 bp, Rattus norvegicus
agcacacttctcacctgggttccgtgactctggggcatgaaggacagggccttggtggaagagaa

SEQ ID NO: 3954 - DNA, 65 bp, Rattus norvegicus
agcaaggagccctttgctggttcccacactactccctacttaccctcacatggttcacagctatg

SEQ ID NO: 3955 - DNA, 65 bp, Rattus norvegicus
aaatgaagcatttgacctgctccgtgctggaaagagtatccgtaccgtcctgacgttctgagaac

SEQ ID NO: 3956 - DNA, 65 bp, Rattus norvegicus
caagtgcgctgacacatagtgggtcgcttatcatgtccttgggttgctggttggattcatctcta

SEQ ID NO: 3957 - DNA, 65 bp, Rattus norvegicus
ccggaaagtagtggtctatctagtagacacatcgctgccagacactgacacctggattcatgact

SEQ ID NO: 3958 - DNA, 65 bp, Rattus norvegicus
ggcagagatgactatagagccaaaaatgactgaaactgaagcaactgtctgctcctccatcccct

SEQ ID NO: 3959 - DNA, 65 bp, Rattus norvegicus
caggagatcaatcgtgccccaacatacagaagtgctgttccaatggctgtggtcatgtttgcaaa

SEQ ID NO: 3960 - DNA, 65 bp, Rattus norvegicus
cttggtacccgaatctagactgcttgattctcaatttccactagaaggcgcatctgatgcagatg

SEQ ID NO: 3961 - DNA, 65 bp, Rattus norvegicus
ccgccaatgtttcctcttagagaacaaaggctgctgatttatgaatccaagcaaccggactcacg

SEQ ID NO: 3962 - DNA, 65 bp, Rattus norvegicus
cggcctccaagaatctgtttatttctgaatctcgacagcttggctcccgattttcgctagagggc

SEQ ID NO: 3963 - DNA, 65 bp, Rattus norvegicus
gaatctgttcatcgcagaatcaaggccacttgacacttggtttccactagagggcgcttcagatt

SEQ ID NO: 3964 - DNA, 65 bp, Rattus norvegicus
gagggcgcattcgatgcagacattggagccaattcagctgtaacttataggcttgactctaatga

SEQ ID NO: 3965 - DNA, 65 bp, Rattus norvegicus
ccagtgaatatttctccctagaagtaccaaccacagatgagctggtaaaaccactcgaactagtg

SEQ ID NO: 3966 - DNA, 65 bp, Rattus norvegicus
ttctacgtgggcgctacagatggaggctcgcctgcactcagcagccagactctggtgcggatggt

SEQ ID NO: 3967 - DNA, 65 bp, Rattus norvegicus
ttacctggttctcaccgccttcgacggaggcgacccggttcgctctggtactgccacaattcaaa

SEQ ID NO: 3968 - DNA, 65 bp, Rattus norvegicus
caagcgacagcgggcatccgccactcagcagtaatgcgtccctgtctgtgtttctattggatcag

SEQ ID NO: 3969 - DNA, 65 bp, Rattus norvegicus
gccgtgcaggcctttgagttccatgtgggtgcttctgatggaggctcacccgcgctcagcagcca

SEQ ID NO: 3970 - DNA, 65 bp, Rattus norvegicus
cagtggatggtgggtctccgcccaggtttgggaccacagagattcaaatactggtcttagacata

SEQ ID NO: 3971 - DNA, 65 bp, Rattus norvegicus
ccacggaccgaggctcacctgcactcagcagccaggctctggtgcgggtggtggtgctggacaac

SEQ ID NO: 3972 - DNA, 65 bp, Rattus norvegicus
tccctttcagcagccgagatgcagaggaccaaggaagcaatgaaggcatcggatggcagcctcct

SEQ ID NO: 3973 - DNA, 65 bp, Rattus norvegicus
gtggtctcttaatgagcataacaggagacttcgtcctgaaccagtaacatacggtccagctaacg

SEQ ID NO: 3974 - DNA, 65 bp, Rattus norvegicus
tgcagatagtgtcaccctcgatgtgggctatgtgggaaccattgtccctggctcagggtcagtgt

SEQ ID NO: 3975 - DNA, 65 bp, Rattus norvegicus
aagactcgagagaatcgaaactttccatcagccctgcttgctttaaccacttccgcgtaggagcc

SEQ ID NO: 3976 - DNA, 65 bp, Rattus norvegicus
aagcttaggggaactggaatcccacactgtatgctgtcctttccacacaggcctcttgctcctaa

SEQ ID NO: 3977 - DNA, 65 bp, Rattus norvegicus
tgatgtgagcctaagcctagtcagcagcatagaaccaaaggcctgcactagcgaacacacctatg

SEQ ID NO: 3978 - DNA, 65 bp, Rattus norvegicus
gaggcttcctcacagagagagacgacatcctctgtcctgactgtggaaaggacatctgaaggcga

SEQ ID NO: 3979 - DNA, 65 bp, Rattus norvegicus
aggaagagaatctggccaagcaacaattcctggtgtcagtccatactcagctgtcatgggtcgtg

SEQ ID NO: 3980 - DNA, 65 bp, Rattus norvegicus
aggaggcattcgtcggccatgtgtgactgtgggtgtgactgatggattgaacaagtggctttggt

SEQ ID NO: 3981 - DNA, 65 bp, Rattus norvegicus
aaaagacggatggcggtcgcgaaagcaagcggaaaagggagtcgcctcagcagcacgaaggcctt

SEQ ID NO: 3982 - DNA, 65 bp, Rattus norvegicus
catccgaacaatcctgaccttttgaagacgccaggaggaacttggaatgtcatcagattggatcc

SEQ ID NO: 3983 - DNA, 65 bp, Rattus norvegicus
aaggccactctggttctccgtgaggccgactgactccgttctagctggaggttcctgacttccct

SEQ ID NO: 3984 - DNA, 65 bp, Rattus norvegicus
tatgaggtggatgtccaggcaagggacttaggtcccaattccatcccaggccattgcaaagttct

SEQ ID NO: 3985 - DNA, 65 bp, Rattus norvegicus
tcgctgtccttccccagttggaattcgtagttgtgtgattccgtagtggtgattgtgatttgttc

SEQ ID NO: 3986 - DNA, 65 bp, Rattus norvegicus
ccccgtggaaacactacgtctccgatcttaatcctactcagtgaagctgttcacgcaattggatt

SEQ ID NO: 3987 - DNA, 65 bp, Rattus norvegicus
gaacatttcctgtctccccaggccttcctgccattagttcccaataaatgcacttgagatttgtc

SEQ ID NO: 3988 - DNA, 65 bp, Rattus norvegicus
cccactcagaagatgctccccttctcggctgttaaggctagtgatatctgatggatgggtatcac

SEQ ID NO: 3989 - DNA, 65 bp, Rattus norvegicus
gagtggacccactacagcatgaagccacatgagattcctcaacagttgaatgggagtgattgtgg

SEQ ID NO: 3990 - DNA, 65 bp, Rattus norvegicus
tggggaaccccaagagcgatgagatgaatgtgaaggtgctggactttgagcacttcctgcccatg

SEQ ID NO: 3991 - DNA, 65 bp, Rattus norvegicus
aaactcaacttcaactctcccgactgtctggactataaggaccaagcctcatggcggttccaggt

SEQ ID NO: 3992 - DNA, 65 bp, Rattus norvegicus
agctttcaaggccccattgacatgctcttgaacaccaagcctgtttcccatacccaggaaagagc

SEQ ID NO: 3993 - DNA, 65 bp, Rattus norvegicus
actgaggatggggcagagccactcctctgtccctcaggctatgagtgccacatcctgcagccagg

SEQ ID NO: 3994 - DNA, 65 bp, Rattus norvegicus
gcagtgtagtcccaagcacataaactaggaagagaaatgtatttgtaggagtgctacctaccacc

SEQ ID NO: 3995 - DNA, 65 bp, Rattus norvegicus
gaccggatcgcacatacaaaggaaacgatgcgccttgatggtttgaactcacttacctaccaggt

SEQ ID NO: 3996 - DNA, 65 bp, Rattus norvegicus
acaggctccgtgaagttcgaggactttgtaactgctctgtcgattttgctgagaggaactgtcca

SEQ ID NO: 3997 - DNA, 65 bp, Rattus norvegicus
aaagaatttggccctgagtcgggaaagtttagtcgtctgatccacgttttgtatgtagcttttgt

SEQ ID NO: 3998 - DNA, 65 bp, Rattus norvegicus
ggaacattgcaccactcgcttctttgagacctgtgacctagacaatgacaagtacattgccctgg

SEQ ID NO: 3999 - DNA, 65 bp, Rattus norvegicus
aagtcccctcgtgaggagaaactcctgcctgggtctgcccaaggattgggcttggacctggccaa

SEQ ID NO: 4000 - DNA, 65 bp, Rattus norvegicus
cccaccctgactcagatctatgcaaagagctctttgtggtccttctagggggtcaggcagggagg

SEQ ID NO: 4001 - DNA, 65 bp, Rattus norvegicus
ctcttcagaagcagtcataggctgcactgacgtaacaagagaccaccggaaatggaatctgcaaa

SEQ ID NO: 4002 - DNA, 65 bp, Rattus norvegicus
tggcgtagtctggacagggtgttcagcatcgggaactgtgctctcaggtccataagctccacata

SEQ ID NO: 4003 - DNA, 65 bp, Rattus norvegicus
cccatcagtctcgggaacaacacatacaacctccatgccacctgaaatgtctaccactgtcatgg

SEQ ID NO: 4004 - DNA, 65 bp, Rattus norvegicus
gaatgagttgatgcttaactccagccttatgcggatcactttgcggaacctggaagaggtggagt

SEQ ID NO: 4005 - DNA, 65 bp, Rattus norvegicus
acgtggacctcaatggagatggacgagtggacttccgaagatttgtccggatgatgtctcgctga

SEQ ID NO: 4006 - DNA, 65 bp, Rattus norvegicus
agaggatgacagtctgcacttacacctatggagttgtcccagcacacccagaatgcatagaggga

SEQ ID NO: 4007 - DNA, 65 bp, Rattus norvegicus
agtcgacagcgtgtactaagagttgcactactgcaaacgggtgttctgtccggtactcactcgta

SEQ ID NO: 4008 - DNA, 65 bp, Rattus norvegicus
caaggaaaatgtctgatgcttaaccctcccaataagtgccagaatgacggccagtgtgatggcaa

SEQ ID NO: 4009 - DNA, 65 bp, Rattus norvegicus
acacacgcctgttctgttcctctgagtctctgggagctgggaagcgggacccttacccctttcac

SEQ ID NO: 4010 - DNA, 65 bp, Rattus norvegicus
gaagcaagaacgtgattggcggctaggacttaggggctgtggaattctagatgtcacactttgga

SEQ ID NO: 4011 - DNA, 65 bp, Rattus norvegicus
tgagtgccttcaacatagctgtctcttgcctgccactgtgtgaatctggcggctgaatatctcag

SEQ ID NO: 4012 - DNA, 65 bp, Rattus norvegicus
tcatttcttcgttaacagaggaatccgctctgcatggcatctctccaagtgaagacaggcttctt

SEQ ID NO: 4013 - DNA, 65 bp, Rattus norvegicus
taccctgcctactcctgcactctcataagcagtccgttcctggaagccatggacacctccaagat

SEQ ID NO: 4014 - DNA, 65 bp, Rattus norvegicus
aagggtgtcaggaggagaactctgttccgagagaaagggtccagacccagagccatcgtagtgga

SEQ ID NO: 4015 - DNA, 65 bp, Rattus norvegicus
ccaagtaggcagaagctcacccatgttcttatcgcagccattattggagcagtacagatcgccat

SEQ ID NO: 4016 - DNA, 65 bp, Rattus norvegicus
gactcggtgttgctggcacaagagctgtagtgtcttggttacctgtgttggtactcaatacagtg

SEQ ID NO: 4017 - DNA, 65 bp, Rattus norvegicus
cgtgcaggaccgtttcgaggtcaacatcagtgagctgcctgatgagatcgacatttcctcctaca

SEQ ID NO: 4018 - DNA, 65 bp, Rattus norvegicus
agcatcctcagtaactactctacacccctagtgtggtctcttctgtcctgctgggtaacggggct

SEQ ID NO: 4019 - DNA, 65 bp, Rattus norvegicus
ttatggttgctctaatactgagggtggctacctatgtggctgtcctccaggatacctccggatag

SEQ ID NO: 4020 - DNA, 65 bp, Rattus norvegicus
ctcaatgtcatcaagaggctcaggaagccgacagagagagcaagcaaatgtgggccgaagaaata

SEQ ID NO: 4021 - DNA, 65 bp, Rattus norvegicus
agtcggagtacttgaagattcccggagaccaggttgtcagtgtggtgttcatcaaggagctggac

SEQ ID NO: 4022 - DNA, 65 bp, Rattus norvegicus
ttataccatcctggactctggaggcatcatcgtggccattgaacacagcaaccgtcctatcaatg

SEQ ID NO: 4023 - DNA, 65 bp, Rattus norvegicus
cttttgacaacatagagaacgaaccaccttttgagtttgtgtcctgagaaagctctcacaggccg

SEQ ID NO: 4024 - DNA, 65 bp, Rattus norvegicus
acggatgatatccttgtggcctcggcagagtgtcccagcgacgatgaggacattgacccctgtga

SEQ ID NO: 4025 - DNA, 65 bp, Rattus norvegicus
gggatgctcctctgggaagttcttatatgtgcaacaaagagcaggtggtttccgtgtctcgaaca

SEQ ID NO: 4026 - DNA, 65 bp, Rattus norvegicus
ctgtcttctcagagctactgtggagggtcattgccctcttcttgtgttcttgacttgtgtgttcc

SEQ ID NO: 4027 - DNA, 65 bp, Rattus norvegicus
ctgcagtcacgaggagaacccctatttccacggctggcttattggccacccggagatgtcgcccc

SEQ ID NO: 4028 - DNA, 65 bp, Rattus norvegicus
agaatgaggttgcagattcagctgtattagccctttgcagacttgggtcccagctcaaatcccag

SEQ ID NO: 4029 - DNA, 65 bp, Rattus norvegicus
tttcctcagtttttaggtcccacgtccactggagatcctaaggcagcatgcctcccaagaagcct

SEQ ID NO: 4030 - DNA, 65 bp, Rattus norvegicus
caagttgggaatgcaggggaagacggagaatgcatcgttaccatgaagaggagcaaagagatgca

SEQ ID NO: 4031 - DNA, 65 bp, Rattus norvegicus
gaccctggagatctcaagagtgtggctatcccctattttcaccaagccttcaatatccagccagg

SEQ ID NO: 4032 - DNA, 65 bp, Rattus norvegicus
tgcaccaagggcaactgtcacaacagctgccagaaggggaataccaccactctcattagtgagaa

SEQ ID NO: 4033 - DNA, 65 bp, Rattus norvegicus; identical to SEQ ID NO: 1

SEQ ID NO: 4034 - DNA, 65 bp, Rattus norvegicus
tgaaagcagctgaagcggcggccgagtcgtaggctccgacataggggcggcagctgagcggtagc

SEQ ID NO: 4035 - DNA, 65 bp, Rattus norvegicus
tacttgtccagaggccacatagccaagctagaaggccatgtccacccactctgcccactgtgggt

SEQ ID NO: 4036 - DNA, 65 bp, Rattus norvegicus
ccagtggcagcagggtcaattctggggtcagaagccatggagtcagcattatcaccaaggatatt

SEQ ID NO: 4037 - DNA, 65 bp, Rattus norvegicus
tgagtggttggtgtatcctctgtcacaggaagtatggcacgagcatgcgttttccacagcgagta

SEQ ID NO: 4038 - DNA, 65 bp, Rattus norvegicus
gctcagacagtatggggcagctccatatcatggactacaatgagactcatcacgaacacagctga

SEQ ID NO: 4039 - DNA, 65 bp, Rattus norvegicus
gcactacaatggtgctcacaaccactgtctgtaacacctaattctggggtatcgaggccttcaag

SEQ ID NO: 4040 - DNA, 65 bp, Rattus norvegicus
ctgatacatccgttctcaaattccagtgtgcccatatctgcccccacaccagcctgttctgtatt

SEQ ID NO: 4041 - DNA, 65 bp, Rattus norvegicus
ttgtgccggtacattcattctgaagattacagcaaggtccccaagtactgaggctgctgacgtcc

SEQ ID NO: 4042 - DNA, 65 bp, Rattus norvegicus
ggatgataatggtgatcttattgctgctcgtggctattgtggtggttgcagtgtggccaaccaac

SEQ ID NO: 4043 - DNA, 65 bp, Rattus norvegicus
gccaatggccccagatgacaaatctctgtttcagccctccatactatcctttcttttgggctcct

SEQ ID NO: 4044 - DNA, 65 bp, Rattus norvegicus
ggcaggtctgaatgaaacctttctggggtcagctgtgaggatacaacaggaaaagcatgtgatgt

SEQ ID NO: 4045 - DNA, 65 bp, Rattus norvegicus
accctctgagtgagctttgcatgttccactaaccttgagctggtgacaggtggagatgccaggca

SEQ ID NO: 4046 - DNA, 65 bp, Rattus norvegicus
ttcagggcaaagcattcggactgtcctgacattttgagatccagagagctgggtgttctgtgctg

SEQ ID NO: 4047 - DNA, 65 bp, Rattus norvegicus
cttctgccctccctgtcttcaccttctttcctgtggatcctgaagcattgggttgcaaactatct

SEQ ID NO: 4048 - DNA, 65 bp, Rattus norvegicus
gatcatttccacagcacatttctcctccagaaacgcgaaaaacacaagcgtgtgggttctgcatt

SEQ ID NO: 4049 - DNA, 65 bp, Rattus norvegicus
ctttcccctgatatccaggcagaatctatcccattgatcctaggaggaggtgatgtacttatggc

SEQ ID NO: 4050 - DNA, 65 bp, Rattus norvegicus
gctccaaaagctcttattgtggaaccctccagagagttagctgagcaaaccttgaacaacgtgaa

SEQ ID NO: 4051 - DNA, 65 bp, Rattus norvegicus
cacagctgggatttcttctgcacaagctcccaatccagttgatgacgagtcatgggattaaagca

SEQ ID NO: 4052 - DNA, 65 bp, Rattus norvegicus
attcagggagagcagctatgaccgatgcactgcctttggaggcttctgtgttagagacagagtga

SEQ ID NO: 4053 - DNA, 65 bp, Rattus norvegicus
aagtggctatgacaacctgaccttcctcccagacaacaaggccaagtggtcacccacctccaacc

SEQ ID NO: 4054 - DNA, 65 bp, Rattus norvegicus
aaacacagagaagccggcggagtggaggtggttctgtgggcaatgggagcgtcttggatcctgca

SEQ ID NO: 4055 - DNA, 65 bp, Rattus norvegicus
ggttttcagtcccactgctgctgagcattgtttctctggtaattcttctggtcttgatctccatc

SEQ ID NO: 4056 - DNA, 65 bp, Rattus norvegicus
ggtgagcgctggacagctgtatgccgctggactgaagaacgttggaacaggttgcaagaaatcaa

SEQ ID NO: 4057 - DNA, 65 bp, Rattus norvegicus
caagagttttactgtggacatccgagccaagccagaataccacaaattcctcattggcaaagggg

SEQ ID NO: 4058 - DNA, 65 bp, Rattus norvegicus
atgctttcctccagacctattcccacgaagtttcgctcactgcagactcaaggaagagtcacctg

SEQ ID NO: 4059 - DNA, 65 bp, Rattus norvegicus
ccaggttgtctatctgcactccaacaacatcaccaaggtgggcatcaacgatttctgccccatgg

SEQ ID NO: 4060 - DNA, 65 bp, Rattus norvegicus
tcctggctgctgagaggggagatgctggtttctacacttgcaaggcggtcaacgaatatggcgct

SEQ ID NO: 4061 - DNA, 65 bp, Rattus norvegicus
tgctgtccttactagtcattccgtgccatcaggagacaacataggagtcactgccttagagtgac

SEQ ID NO: 4062 - DNA, 65 bp, Rattus norvegicus
taacccgctgttaagagtggactgagtgggggtagctaaagcacttacagaggtctgcccaaatg

SEQ ID NO: 4063 - DNA, 65 bp, Rattus norvegicus
aatgtggctctgaaggggagctcttgtcagcagccattatttgcacttccggtgcattcctcatc

SEQ ID NO: 4064 - DNA, 65 bp, Rattus norvegicus
ctaggctagaaagggagatgactagggtgtgtgtgaggtagtctgccatagatcaatgaggctca

SEQ ID NO: 4065 - DNA, 65 bp, Rattus norvegicus
gggaagttggttcactccaagaagagaggtgatggctacgtggatacagagagcaagttccggaa

SEQ ID NO: 4066 - DNA, 65 bp, Rattus norvegicus
aaataagcacaatcaactcttgggagctgacatgcgtcgtcaaacctgcacaacaccgcatgctc

SEQ ID NO: 4067 - DNA, 65 bp, Rattus norvegicus
acatggacagatggaccaagaagccagtgtttggctggttgtctatcgggactggaccaggaaga

SEQ ID NO: 4068 - DNA, 65 bp, Rattus norvegicus
aaaggttgaagaggatgaagctggaggcagattcgttgctttctctggagaaggacagtcgctgc

SEQ ID NO: 4069 - DNA, 65 bp, Rattus norvegicus
agctcttgtggattggcggatctggctgtgtgggaggacctaagttggaagactggaattctgaa

SEQ ID NO: 4070 - DNA, 65 bp, Rattus norvegicus
cgagtcctccatgaagaaactcgtggcctgtgtgagtcaagacaacttctccctgtcatcagagg

SEQ ID NO: 4071 - DNA, 65 bp, Rattus norvegicus
gtgatagtgtattgctgaagtgtttgagacgttattgtgcttctgtagtaggggctgatgaaatc

SEQ ID NO: 4072 - DNA, 65 bp, Rattus norvegicus
ttccttttcggctctggttcccagggtcatctgccttcaactgtgcatgaactctccctcccaga

SEQ ID NO: 4073 - DNA, 65 bp, Rattus norvegicus
ctatgtcttagcagaagtcagtattccaaccaggcagctcttcagcatttctcatccccttccca

SEQ ID NO: 4074 - DNA, 65 bp, Rattus norvegicus
cagcagtcccctcaaggtggtcaaggcaattggaaccagaagaagaccaagtaaactgtccctga

SEQ ID NO: 4075 - DNA, 65 bp, Rattus norvegicus
ttccacgacctccagctgtgcagcctgtgcacggcaggatagactggtcttccaagtacccatct

SEQ ID NO: 4076 - DNA, 65 bp, Rattus norvegicus
ccagcatgtgctaatgctaactatagctgggtcctcgtcctgggaaagagatcggctgatcacaa

SEQ ID NO: 4077 - DNA, 65 bp, Rattus norvegicus
ctatgagactctgttgtctatcccagaggtagtgaagagttgcaaggagctacaaggattgctag

SEQ ID NO: 4078 - DNA, 65 bp, Rattus norvegicus
agttgtcttgctgatgaagccagaagtgtatgctggtgtgaagaagccagaatgggctagcaggg

SEQ ID NO: 4079 - DNA, 65 bp, Rattus norvegicus
cctcctatacaccttcaggaacaaatccatactggacagaaacctttcaaatgtggagaatgttt

SEQ ID NO: 4080 - DNA, 65 bp, Rattus norvegicus
gcagtgagggagacttcaccctggccaatacgatggaggagattctggaagagagtgagatctaa

SEQ ID NO: 4081 - DNA, 65 bp, Rattus norvegicus
ggagatgggatagctgatgatcttaccatgtccatgactgtgcccctgattcaagaccggatcat

SEQ ID NO: 4082 - DNA, 65 bp, Rattus norvegicus
taggagaagtggaagcctgaagcattgctccgtagaggacaatcacgccccttgatcctgggaga

SEQ ID NO: 4083 - DNA, 65 bp, Rattus norvegicus
gagatcaagcaagaggagactactaggtcatcgcggagcaggaaacggacccatgacttggtttt

SEQ ID NO: 4084 - DNA, 65 bp, Rattus norvegicus
aaccactatgagaaggctagcagaagacaccactgcacagacccaagtccaaggactgcctccca

SEQ ID NO: 4085 - DNA, 65 bp, Rattus norvegicus
cctggctctgccaggactccctcctctgtcttgtgttctgtcctctcgtgtaatggaatgcaaaa

SEQ ID NO: 4086 - DNA, 65 bp, Rattus norvegicus
gactaccaatgctgacactgatggcgacagttacaaggacaaaaccgagtcagttaccagtggcc

SEQ ID NO: 4087 - DNA, 65 bp, Rattus norvegicus
tgggccaccaaatgtatgcacagtcatggcttggaagtgtccgtagatgggaatgcaataaaggt

SEQ ID NO: 4088 - DNA, 65 bp, Rattus norvegicus
aaaccacgagctgttttccaagagcttcacctctgtggatgtgcctgtcattgtgaatggcaagg

SEQ ID NO: 4089 - DNA, 65 bp, Rattus norvegicus
ccttcgtttgccatcattgatcccttggtggtgactttgtagacgttgaagtagaagcgtgggac

SEQ ID NO: 4090 - DNA, 65 bp, Rattus norvegicus
ctaacaagaactaaggatgactcctgtgtgctgacgctgttcagactagctaagagtcgatttcc

SEQ ID NO: 4091 - DNA, 65 bp, Rattus norvegicus
tcgctgtgccaagaagagggcatccaggagcgtttggctgagatgctaccgtctgtcagcagcat

SEQ ID NO: 4092 - DNA, 65 bp, Rattus norvegicus
aacttcaacctcaggacagacctccgtcaagagagctactgaagcatcctgtcttccgtacaaca

SEQ ID NO: 4093 - DNA, 65 bp, Rattus norvegicus
gtggtatcctggtgaaagaggtggtacagacccatgagtgactcagtcccagtgaccaaatgaat

SEQ ID NO: 4094 - DNA, 65 bp, Rattus norvegicus
tagtactctgctgagaccctgagacagctagatgagttagccacagtgaacaaggctccacctca

SEQ ID NO: 4095 - DNA, 65 bp, Rattus norvegicus
taccacattggcacctggctgttggacagcgagaccctgcatcccttgggaatggcagtcaagtc

SEQ ID NO: 4096 - DNA, 65 bp, Rattus norvegicus
gcgttacgtgcgcaagcaacttgtgcctctgctctacaagcagtttgtgcctagtatgcccgagc

SEQ ID NO: 4097 - DNA, 65 bp, Rattus norvegicus
aaccccaccttcagcgatgtgctcattttcctggaccgtgagccaaacaggctgagagctttcca

SEQ ID NO: 4098 - DNA, 65 bp, Rattus norvegicus
ccagaggctctgccttgatgtggaagcccaaagttcccctcctaaaacttggggactttcagata

SEQ ID NO: 4099 - DNA, 65 bp, Rattus norvegicus
acaactggatggactcatactccagcaggctcatcccaatgctgtaggccccaagagtcattgat

SEQ ID NO: 4100 - DNA, 65 bp, Rattus norvegicus
ttaggaggaaggtgatgaggtcccagggactcctgtcacccaggactctccctcttacagaggaa

SEQ ID NO: 4101 - DNA, 65 bp, Rattus norvegicus
acgatgaattctgccttatgccttgacttcggtcatttcccctgagattcatactgtgattcccg

SEQ ID NO: 4102 - DNA, 65 bp, Rattus norvegicus
agcatcacccttcccgagtgacagcctggcagggaccttggtctgatcgacttggtgacactcta

SEQ ID NO: 4103 - DNA, 65 bp, Rattus norvegicus
ttcacctatgaccctttaatcagcagagcacacggagcacctaatctgcctcgccacatcctact

SEQ ID NO: 4104 - DNA, 65 bp, Rattus norvegicus
gactttggagctcagtctgtgtccccagtattctgcaccttctgatgaagcctgagaatgaatct

SEQ ID NO: 4105 - DNA, 65 bp, Rattus norvegicus
ttagcatcacccagaagaagagcctaaaccacaggtaccagatgggctgcgagtgcaagatcaca

SEQ ID NO: 4106 - DNA, 65 bp, Rattus norvegicus
accaccttataccagcgttatgagatcaagatgactaagatgctcaaaggattcgacgctgtggg

SEQ ID NO: 4107 - DNA, 65 bp, Rattus norvegicus
ctggctcaggcacaggtgctttgccagatatgactttgtcacggcagacaccttccacttggaag

SEQ ID NO: 4108 - DNA, 65 bp, Rattus norvegicus
agaggcagttggtaaggggctgctgagtttcggggatagtgtctcctccacttatggttacttta

SEQ ID NO: 4109 - DNA, 65 bp, Rattus norvegicus
gcagatcttctcttggaggatttgacatcactgacaagcctcagcaaacccaaagatgctaacag

SEQ ID NO: 4110 - DNA, 65 bp, Rattus norvegicus
acccagcgcatccattgcaaggtgccctgcaactggaagaaggagtttggagccgactgcaaata

SEQ ID NO: 4111 - DNA, 65 bp, Rattus norvegicus
aagccacatacggatgaggacctggtgtacctggagccaagtccagacttctgtgagcaggacat

SEQ ID NO: 4112 - DNA, 65 bp, Rattus norvegicus
tgcactggacaacagagggtcacgaagccatgaagacagaatggccactgactctcagctttcat

SEQ ID NO: 4113 - DNA, 65 bp, Rattus norvegicus
acaagagcatcagcaatgccacagacccctgaacccagacctgtcccacctcacctccttcccat

SEQ ID NO: 4114 - DNA, 65 bp, Rattus norvegicus
aggtgcttatgctctgcaggtcacagcccttcgggcaactcacagacgagcaggtcatcgagaac

SEQ ID NO: 4115 - DNA, 65 bp, Rattus norvegicus
tcggttcctgggatggattggttcagctctccttgcacagatgcgatacttatgggaaagcctgt

SEQ ID NO: 4116 - DNA, 65 bp, Rattus norvegicus
tcctcccacaacctatcggcgcggggctgctcctggcaaagaggaccagacgcgaggaaggcaca

SEQ ID NO: 4117 - DNA, 65 bp, Rattus norvegicus
aagtaacccccaagaggcaggtgatggcctaagttcttggattttggaggggcgttgaagtggca

SEQ ID NO: 4118 - DNA, 65 bp, Rattus norvegicus
ggtgctggcagagggaaccacaacagcgactgaatattaaggagatctacaaaatcctccatgct

SEQ ID NO: 4119 - DNA, 65 bp, Rattus norvegicus
tttaccaactggttctgaggggctgacaggccctactgggaatggactttggaagcaggatggca

SEQ ID NO: 4120 - DNA, 65 bp, Rattus norvegicus
gaagcctatcctgacgctgatgtttggccagtgtgggaaccctgctattgcaaagtgtactattc

SEQ ID NO: 4121 - DNA, 65 bp, Rattus norvegicus
tatgagaaggtgagtggggactacgggcatcctgtctacatcgtccaggagatgccacctcagag

SEQ ID NO: 4122 - DNA, 65 bp, Rattus norvegicus
gtgtccaacctgcgctacaaccacatgcttcgcaagaagaagaacctgctgttgcagtacaacag

SEQ ID NO: 4123 - DNA, 65 bp, Rattus norvegicus
aagaactccttggaccagtgcatgcgtcgatgccgcgtctgcgtcttggcttgtgattagcgtta

SEQ ID NO: 4124 - DNA, 65 bp, Rattus norvegicus
catgagcgagtcatgagtgcccagcttaatgccatctttcacgattagaggcacgtcagtttcac

SEQ ID NO: 4125 - DNA, 65 bp, Rattus norvegicus
gcctctaaggtgcttaaggagctgctgaggtactgccttttctcatgggtgtgctcggttttatt

SEQ ID NO: 4126 - DNA, 65 bp, Rattus norvegicus
ggtatttatgggcaattccacatgccgttatgaccctggtcagctggaagctgcctgatctcaga

SEQ ID NO: 4127 - DNA, 65 bp, Rattus norvegicus
gtacctgccactgtcattggatgactctgattcacttggcgattccatgtgaaagatgataggct

SEQ ID NO: 4128 - DNA, 65 bp, Rattus norvegicus
ctttcaaagctcgaacaaaagcccgaagcaaatgccgagataagagagcagatgttggagaattc

SEQ ID NO: 4129 - DNA, 65 bp, Rattus norvegicus; identical to SEQ ID NO: 1

SEQ ID NO: 4130 - DNA, 65 bp, Rattus norvegicus
agggccccacgattagagatggcgtggtggcccagcagagggagaagccaggagaagcacttaaa

SEQ ID NO: 4131 - DNA, 65 bp, Rattus norvegicus
ttggtacttctggaaagaaacccaggggatggagcctctgaggtgccggttggagttcaaatcct

SEQ ID NO: 4132 - DNA, 65 bp, Rattus norvegicus
aattagtcactctgccctctctgttcctcacctcctccactgcacttccctgttccctaccattg

SEQ ID NO: 4133 - DNA, 65 bp, Rattus norvegicus
ccaaggaacttgatatgcaattgagatggtcttactgtcaaggagtaatccaatcaaagctgagg

SEQ ID NO: 4134 - DNA, 65 bp, Rattus norvegicus
gccaccacttcagtgtgatttggaaaagggacagatgagcccctgaagacgaggtgaaaagtcaa

SEQ ID NO: 4135 - DNA, 65 bp, Rattus norvegicus
gactgtgtccatgttagaactcatagaagttaatggaacccctggcagtcagctctccactccgc

SEQ ID NO: 4136 - DNA, 65 bp, Rattus norvegicus
tcccagacaatggaagaagatcctgcctaaagctcaaagtctttgtgaggccaacaaacagctgt

SEQ ID NO: 4137 - DNA, 65 bp, Rattus norvegicus
ttctgcctgctggtgatgctgcttctgctcaagttggcgagacattccaagtttggcatgaaagg

SEQ ID NO: 4138 - DNA, 65 bp, Rattus norvegicus
ggccgctccctgaagagggtggacgtgaagtctccactgtcgcccaaaccgcccctcgccacacc

SEQ ID NO: 4139 - DNA, 65 bp, Rattus norvegicus
attttcatggatagtccaaaggaaggccaggggttcccactgacttccaagccatcagcagcacc

SEQ ID NO: 4140 - DNA, 65 bp, Rattus norvegicus
ttccttgctgctgtgcgtgcacaaaggacattgcaggctgatctcctcttaaccctcctcagtgt

SEQ ID NO: 4141 - DNA, 65 bp, Rattus norvegicus
ttccatcgtgaggcagagctgctcaccatgctacagcaccaacacatcgtacgcttctttggagt

SEQ ID NO: 4142 - DNA, 65 bp, Rattus norvegicus
cccaggttctccccaatcaccattgacgggatgacaagtcttgtgggaatgaacatccctggtca

SEQ ID NO: 4143 - DNA, 65 bp, Rattus norvegicus
atctcctttgtgattccctgcaacagtcactgaggatctgcctgtattctggagaacgccgtcct

SEQ ID NO: 4144 - DNA, 65 bp, Rattus norvegicus
aagagaaagttcctgtggatttcagcagctatgtgccttctgtcacgtaccactcccctcagcag

SEQ ID NO: 4145 - DNA, 65 bp, Rattus norvegicus
agattctggaagaaccacaccctctgatgttccaaaagctccaggaccagatcttcaatctcatg

SEQ ID NO: 4146 - DNA, 65 bp, Rattus norvegicus
ctgaacatgaagaggtgactttggcagtgtcagcctccttgacttgttctaggctttagcagggg

SEQ ID NO: 4147 - DNA, 65 bp, Rattus norvegicus
gccacaccctcctttctgctcctttgtagctgcctgtttacagttctatctgtgttctgactctg

SEQ ID NO: 4148 - DNA, 65 bp, Rattus norvegicus
tgattgtgtccttggtgttgggcttcttggccatgtttgtcgccacgatgggcatgaaatgcaca

SEQ ID NO: 4149 - DNA, 65 bp, Rattus norvegicus
gagagccattatggggccaaagataagcagatgtagccattcgctcatacctctgtctccctttt

SEQ ID NO: 4150 - DNA, 65 bp, Rattus norvegicus
ggggattgatgacaaacactggaactctcagtgcaaaacgtcgcaaacctacgtccgagcactga

SEQ ID NO: 4151 - DNA, 65 bp, Rattus norvegicus
aaacgctggctcagtgtctagatcaaaggaggcctagtccccagtgaacgggagtgagagtcact

SEQ ID NO: 4152 - DNA, 65 bp, Rattus norvegicus
gactacaaacactggagagagtggggaactcatgctcagacttctcagatccaatcaattcgccg

SEQ ID NO: 4153 - DNA, 65 bp, Rattus norvegicus
gttctggtactcatgagcttggcttgccgcctaagactccagtgagactacagcaggatctaata

SEQ ID NO: 4154 - DNA, 65 bp, Rattus norvegicus
tggttaccgaggttttcagtacgtgctggagagcgatcaccactcgggtgactacaagcacttca

SEQ ID NO: 4155 - DNA, 65 bp, Rattus norvegicus
agccctacacaaccaagagcaccatccgacccgcaaacaccagccatggggaagatcaccttcta

SEQ ID NO: 4156 - DNA, 65 bp, Rattus norvegicus
tttgaccagttcttcggagagcacctgttggagtctgacctcttctctacagccacttccctgag

SEQ ID NO: 4157 - DNA, 65 bp, Rattus norvegicus
aagctgcacctctttgagaacccagccttcagtgggcgcaagatggagatcgtagatgatgatgt

SEQ ID NO: 4158 - DNA, 65 bp, Rattus norvegicus
gaggggttcatcgttactcggtggcaaggagaagtccgccagaaggctctgacagacttgatgaa

SEQ ID NO: 4159 - DNA, 65 bp, Rattus norvegicus
atatgagaaccccaactttacgggcaagaagatggagattgtcgatgatgacgtacccagctttc

SEQ ID NO: 4160 - DNA, 65 bp, Rattus norvegicus
tgaccccaagtgtgtagaagagttacccgagtggaactttgatggttctagtacgtttcagtctg

SEQ ID NO: 4161 - DNA, 65 bp, Rattus norvegicus
agcctctgggtttatggcttctgtgaccgtgtgggcagtataaccgtctccagtggcacatgggt

SEQ ID NO: 4162 - DNA, 65 bp, Rattus norvegicus
cttcagtggattatcagaggaacctgtgtgtgtgcggaaatcccaggacaaatcctaagtctggg

SEQ ID NO: 4163 - DNA, 65 bp, Rattus norvegicus
tgtggccatcgcccagttcatcgaaacaaccaagaagaaactggagatcatacaatcccagaggg

SEQ ID NO: 4164 - DNA, 65 bp, Rattus norvegicus
ctgcggctggattcccatccagtaccccatcatttccgagtgtaagtgttcctgctagaactcgg

SEQ ID NO: 4165 - DNA, 65 bp, Rattus norvegicus
ggcatcatcaactaactgtaaggctttaatgactccagcactgactggtccactcttgtgccccg

SEQ ID NO: 4166 - DNA, 65 bp, Rattus norvegicus
agctgtcctgaaaacaaagcagaagacctttgggttgaagagagatttaaagcacacatcgcccg

SEQ ID NO: 4167 - DNA, 65 bp, Rattus norvegicus
tgtgtgctcctgtgcggacgactgcaaagcccacaatgactgttgcatcaactacagttcagtgt

SEQ ID NO: 4168 - DNA, 65 bp, Rattus norvegicus
ctcactggtctggatttctaccggaagactagccgtagctattcggaaattctgaccctcaagac

SEQ ID NO: 4169 - DNA, 65 bp, Rattus norvegicus
aggtggcattctccaaatgcttcctaacgcaggtgtgcaagtggaaccacacagtttatggaagc

SEQ ID NO: 4170 - DNA, 65 bp, Rattus norvegicus
ttgggaaggcacagacaatcaaatgtagaccggctaataaagtgtgtcctttggatgcttcttga

SEQ ID NO: 4171 - DNA, 65 bp, Rattus norvegicus
gccacgagtttcacagccatgaggacaagctagtcctagaccctaagagtaaggaagatgatagg

SEQ ID NO: 4172 - DNA, 65 bp, Rattus norvegicus
gcttatgaggacgaatacagctactacaaggggcatggctatgaaggctacgagggtcaggatta

SEQ ID NO: 4173 - DNA, 65 bp, Rattus norvegicus
agtcagatacttcaagatctaggcttgactcagggaagtaaggttttggcaggcaggacatagcc

SEQ ID NO: 4174 - DNA, 65 bp, Rattus norvegicus
tctctgacctggcaggtgcaaagcccagcgactctgagtctgacaaagccttcatgtccaagcag

SEQ ID NO: 4175 - DNA, 65 bp, Rattus norvegicus
ttcatattcccctgcagtagcattaccgatacacagattcgtgtgcgttgcttgttcctcacatg

SEQ ID NO: 4176 - DNA, 65 bp, Rattus norvegicus
tgtcattacctctggaaatgctttactagcaagtctgccttctgcagaactcacaaccccaggtc

SEQ ID NO: 4177 - DNA, 65 bp, Rattus norvegicus
ccctgaagcctgagagtggaggtaaccacatagctgatctgaagaaggagatagagatcttacgg

SEQ ID NO: 4178 - DNA, 65 bp, Rattus norvegicus
gtggacgacccgatgagtctgctctacaacatgaacgactgctactccaagctcaaggaactggt

SEQ ID NO: 4179 - DNA, 65 bp, Rattus norvegicus
ggctgcatgaaagaggtgacctttactcagagaccaagtagacttccagaaccagagcaaagctc

SEQ ID NO: 4180 - DNA, 65 bp, Rattus norvegicus
agacagctgagctcactccggaacttgtgatctccaaggacaagaggagtttttgccactgaccc

SEQ ID NO: 4181 - DNA, 65 bp, Rattus norvegicus
atcaacggagtctcgccctctccacctttcagcctccagagactttgaggagggggttattcaac

SEQ ID NO: 4182 - DNA, 65 bp, Rattus norvegicus
aactttaccacgactaagtgtgcacaatgtagctgcccgtttcctcagtgtggctcataaatgtc

SEQ ID NO: 4183 - DNA, 65 bp, Rattus norvegicus
gcttcacgctcgtgtggacaaagtggatgaagagagatacgacgtggaagcaaaagtcaccaaga

SEQ ID NO: 4184 - DNA, 65 bp, Rattus norvegicus
tacagcttcgatggcgtgtggagggtgagctacaccactttcaccgtctccaagtactggtgcta

SEQ ID NO: 4185 - DNA, 65 bp, Rattus norvegicus
agccctactgggttccaaacacaaggtgtccatggatctgcgggccaacctcaagtctgtgaaga

SEQ ID NO: 4186 - DNA, 65 bp, Rattus norvegicus
tgttccttgttgagggaatgcaatggtttgtgatggtgggtaggtcctgataacctctgtaagca

SEQ ID NO: 4187 - DNA, 65 bp, Rattus norvegicus
ttactcccccatcctttatggccctcgaatgacaccactcttctggaaaatgctggagaaacaat

SEQ ID NO: 4188 - DNA, 65 bp, Rattus norvegicus
ttcctttagaactatgcaaagactgcccttcctctcgctgacctcctgtgccctaagatctcagt

SEQ ID NO: 4189 - DNA, 65 bp, Rattus norvegicus
atcgaccacctgaatgaagaccagctgagagagaaggccaaggagctatggcagagtatccacaa

SEQ ID NO: 4190 - DNA, 65 bp, Rattus norvegicus
aagaccaagataccacaagaacagctaatgggggtgaacctccagaacctgctggctctctccac

SEQ ID NO: 4191 - DNA, 65 bp, Rattus norvegicus
aagactaacacccagcccagcaagggaatttaactgactccttaaagcagagagtatccccttcc

SEQ ID NO: 4192 - DNA, 65 bp, Rattus norvegicus
ataagaagttccgcttactaccatgtctccaccttgctggaaaggccaagcagaaaatgaattca

SEQ ID NO: 4193 - DNA, 65 bp, Rattus norvegicus
tgctaagtgtggtctttgccaagtaatctaacatgcagctttagaacctgacacgtggatgcttc

SEQ ID NO: 4194 - DNA, 65 bp, Rattus norvegicus
cccagtcccaccctaccattggggaagcacctaacatccagtctggagtacttggcctcactcca

SEQ ID NO: 4195 - DNA, 65 bp, Rattus norvegicus
tgcaagaaacagaagagtggtatcggtccaagtttgcagacctcacagacgttgcttcccgcaac

SEQ ID NO: 4196 - DNA, 65 bp, Rattus norvegicus
gacacacacgcagtttggttttgcagtgactggcgtttgtggatgtgacagcagcgtttgtaact

SEQ ID NO: 4197 - DNA, 65 bp, Rattus norvegicus
aaggcagctgaggattatggagtcacgaagactgacatgttccagactgttgacctctttgaagg

SEQ ID NO: 4198 - DNA, 65 bp, Rattus norvegicus
gaagtaactcagtcagcatttggaacattcttcgctcagcaggaagagcccctttccgcctaatc

SEQ ID NO: 4199 - DNA, 65 bp, Rattus norvegicus
atgccacttgcctgagcctcctgcttcccaagtacaatgtcactgagccccagatctactttgat

SEQ ID NO: 4200 - DNA, 65 bp, Rattus norvegicus
tgtgactgaggccaacaaggagttcatggaacagagtgaggaactgtacgatgcactgatggact

SEQ ID NO: 4201 - DNA, 65 bp, Rattus norvegicus
ggtgtggcacatctccatatctctaggctgctgcagggttttaaggtgacagacaaagctgtgat

SEQ ID NO: 4202 - DNA, 65 bp, Rattus norvegicus
cctcgctagagactggatttgacagaatgtgacagtgacacttgggtgtagaacgtgaggtgtac

SEQ ID NO: 4203 - DNA, 65 bp, Rattus norvegicus
actgcacctactactggggctttgctgcgtggatggcttattacatcaaccaccctctctacaca

SEQ ID NO: 4204 - DNA, 65 bp, Rattus norvegicus
gcctgtctggtgtgttctgaaacgtttgtgtggaaggagatattcagctgagaccctgggaatgt

SEQ ID NO: 4205 - DNA, 65 bp, Rattus norvegicus
atgcagggtcatgcctgcttagcctatactcctttctgcccagggagctctaacccaatttcctt

SEQ ID NO: 4206 - DNA, 65 bp, Rattus norvegicus
gacctgactgttttgaacgttggaaatcctaacattctaaggtcatctacaagccaactagtgga

SEQ ID NO: 4207 - DNA, 65 bp, Rattus norvegicus
agaagctttggcagaggtgctagatccacagaaccgcgagtctcgttctccgcgtcgctgtgtaa

SEQ ID NO: 4208 - DNA, 65 bp, Rattus norvegicus
ctgggtgacatctgcaggctcatcttctgcaccccaaaatgtaccacttcctgtagctcacattt

SEQ ID NO: 4209 - DNA, 65 bp, Rattus norvegicus
tttgtaaatgacgtctcaggctttggctgccaggactcaatggtgcttcttgtctagcacacaga

SEQ ID NO: 4210 - DNA, 65 bp, Rattus norvegicus
actaagccagagcagaagcccgagatgctggatgccattccaaaccctctgctgaacaagctggt

SEQ ID NO: 4211 - DNA, 65 bp, Rattus norvegicus
gaagagggtggaaacctgtggagcaaaggtgtctcctacagcctcggggatcctactacaaaaga

SEQ ID NO: 4212 - DNA, 65 bp, Rattus norvegicus
aaatctgtgtgatggttggcttctgtgatgaggtcaagagagtgccaatgaggactctggtcccc

SEQ ID NO: 4213 - DNA, 65 bp, Rattus norvegicus
tactacccatacccctactgctaccaaggaggtcgagtcatctgtcgtgtcatcatgccttgcaa

SEQ ID NO: 4214 - DNA, 65 bp, Rattus norvegicus
tggccaagagaacaggaacggaccccatcttcattgatgcagacttcaatagcacaacacccgga

SEQ ID NO: 4215 - DNA, 65 bp, Rattus norvegicus
atgaaccctcacactgcctctatcctgatgattcatctggtctgtaaaaccctgcaactaccttt

SEQ ID NO: 4216 - DNA, 65 bp, Rattus norvegicus
cctaaacgctgcagcagaaccttggttgtgcaccgctgtgtgcaaatgtactgaaagggtagttt

SEQ ID NO: 4217 - DNA, 65 bp, Rattus norvegicus
aactccagtgaagcagatcttcagagacagaactcatcctgcttaggaactcctcagtgatggag

SEQ ID NO: 4218 - DNA, 65 bp, Rattus norvegicus
gtatctgaagcttctgaagtgccgactgatccgaagcaagtgctaagaacgcataacatccttaa

SEQ ID NO: 4219 - DNA, 65 bp, Rattus norvegicus
ccattgaaagaaaacttgctgagcttttcgagtacacccagagtatacttaccttgattttcggg

SEQ ID NO: 4220 - DNA, 65 bp, Rattus norvegicus
gtaacactggttgcacgcatgtataggcatgatcaggctgtttacagagccagatatcactgccc

SEQ ID NO: 4221 - DNA, 65 bp, Rattus norvegicus
gcctatcctgaagccaaaggaaatgagatctacttggtttggtcacaactcccatccctgcaagg

SEQ ID NO: 4222 - DNA, 65 bp, Rattus norvegicus
cgcctggaaggttcctctgaacgacctagtgaacaacctgccatccttgaaagacatacatccta

SEQ ID NO: 4223 - DNA, 65 bp, Rattus norvegicus
ctccagaaaacagtgagcaagtccaccaggcaaaatcggaagaccttctgaaagtgtccatcact

SEQ ID NO: 4224 - DNA, 65 bp, Rattus norvegicus
ctacttcactgcctggacagtaatactgacaaagttgccacttaccttgaggccctaaagtgccg

SEQ ID NO: 4225 - DNA, 65 bp, Rattus norvegicus; identical to SEQ ID NO: 1

SEQ ID NO: 4226 - DNA, 65 bp, Rattus norvegicus
gggagaatgtagcatctatatccacctgtgcagagagggatgccaccattcagcattccttagag

SEQ ID NO: 4227 - DNA, 65 bp, Rattus norvegicus
tttgactaccctgcctggtctggactcaaagacttgcagtcatctgatgaagacactcatctttt

SEQ ID NO: 4228 - DNA, 65 bp, Rattus norvegicus
tgtggccagtgtaccgagatgtatcatggaaaatggaggttgccagaaggtcctcaactaccttt

SEQ ID NO: 4229 - DNA, 65 bp, Rattus norvegicus
gcagtgttgactcatttgggctcctatgatggtatgatggcaagagccatagagcttaactatgg

SEQ ID NO: 4230 - DNA, 65 bp, Rattus norvegicus
gattccctatgtggaatgaactggcatacttgcggtcacctgatgaagaacgtcgccattttgct

SEQ ID NO: 4231 - DNA, 65 bp, Rattus norvegicus
ggagaaggtatcctctgcacccataaatgccagcgagactaccctcaatgacttgaaggacttgt

SEQ ID NO: 4232 - DNA, 65 bp, Rattus norvegicus
gcggctgcatggaagtgaacatcaacggggtacagttggatctggatgaagccatttccaaacat

SEQ ID NO: 4233 - DNA, 65 bp, Rattus norvegicus
tagctgacccaatagtcagagttgacctcactggcctagcaaaccgtaacttgtctttggcccag

SEQ ID NO: 4234 - DNA, 65 bp, Rattus norvegicus
gaggtgttcgagaacgaccccgagacggactatttctatccaagatatcaagagtgcatgaggaa

SEQ ID NO: 4235 - DNA, 65 bp, Rattus norvegicus
aatggggtaaagatcagactgtaacaccagagatagtcccagtttcagggtcagcgtagctggtg

SEQ ID NO: 4236 - DNA, 65 bp, Rattus norvegicus
aatgatgagtcctgcccagttcctgtttctgctaatgctctggattcaggaaaccagtggtgatg

SEQ ID NO: 4237 - DNA, 65 bp, Rattus norvegicus
ctccctgtcctgtgctctgtgacttaacgtaactgttaccactgcacttgtgaactttcgtgtca

SEQ ID NO: 4238 - DNA, 65 bp, Rattus norvegicus
cggtctactccgcaaatgccaagactgccagagggatgaacagtcacctatgagctcctgcctgg

SEQ ID NO: 4239 - DNA, 65 bp, Rattus norvegicus
cacatcctcacacagagaggccacctcatgaataaggtttcctgcaaacatcttctgggcccttg

SEQ ID NO: 4240 - DNA, 65 bp, Rattus norvegicus
ccatttctgcaaagtgcttaccaggcacgctctttcttaacctcttctagtgctttggtggaatc

SEQ ID NO: 4241 - DNA, 65 bp, Rattus norvegicus
ggcccttcttcccacagcaatagtccccaatagcgtagatttttgctcttctgtatgtgacaaca

SEQ ID NO: 4242 - DNA, 65 bp, Rattus norvegicus
aggccaacaagtaccaagtgtcagtgaacaagtacaaagggactgctggcaacgccctcatggaa

SEQ ID NO: 4243 - DNA, 65 bp, Rattus norvegicus
agacatctggaagctttgaagatgctctgctggctatagtgaagtgcatgaggaataaacctgcc

SEQ ID NO: 4244 - DNA, 65 bp, Rattus norvegicus
gcttttggagaacctttgaggagtgatgccataggctctagaacaggaaagtgggatttgggtgg

SEQ ID NO: 4245 - DNA, 65 bp, Rattus norvegicus
ggtggctctgtgtggaggaaactaaacatcccaactgctctgtaagattccgaggagaacatctc

SEQ ID NO: 4246 - DNA, 65 bp, Rattus norvegicus
actggaccaaagtcaggtggccaaacatcgactgctcttcttcaaacaccggctacagtgcatga

SEQ ID NO: 4247 - DNA, 65 bp, Rattus norvegicus
gggcttcgctgccgccctaaaggttactgtgatctcggcttgagagcaaggtggacagccatggc

SEQ ID NO: 4248 - DNA, 65 bp, Rattus norvegicus
gctgccttactcacacgagtgtgtgctaatgaccaaagctgtctcgaatgaaagcagtgttctgc

SEQ ID NO: 4249 - DNA, 65 bp, Rattus norvegicus
ccagggagttggacgtaccgtctgtgacatgagacacttcctcatatgtgtcgtgaataaaccat

SEQ ID NO: 4250 - DNA, 65 bp, Rattus norvegicus
cctttaagaacctggtgacttgggttgggcagatattttcctggtgcctttgatatgcctgggga

SEQ ID NO: 4251 - DNA, 65 bp, Rattus norvegicus
ctgacctgcatgataacagacttcttccctgaagacattactgtggagtggcagtggaatgggca

SEQ ID NO: 4252 - DNA, 65 bp, Rattus norvegicus
cagctctaatctacctcactcttaggacttcaaggtttgggagaaattccagggttcctgggaag

SEQ ID NO: 4253 - DNA, 65 bp, Rattus norvegicus
catcgggaagttccagagagcgagactccagtagacaccaatctcatagagcttgacaccaatga

SEQ ID NO: 4254 - DNA, 65 bp, Rattus norvegicus
gggtggcaagctgtgtacacacctaaagttttgggaagggaacactgaaagcaaggagtgaatgt

SEQ ID NO: 4255 - DNA, 65 bp, Rattus norvegicus
gaaactgcttgtagtcctggttgccttgtgggaaacccctggtaacctttcagagttatgctaaa

SEQ ID NO: 4256 - DNA, 65 bp, Rattus norvegicus
tcggaggacatagttgtcgaagagtttatgcagcagaacagccagacacaaagctagaaagctcc

SEQ ID NO: 4257 - DNA, 65 bp, Rattus norvegicus
tagaggaggcactgctgtttctacgagggaatgagtcatcatccaaagccacctcagcttaggct

SEQ ID NO: 4258 - DNA, 65 bp, Rattus norvegicus
ttccagcaaaggcatactgaggggcatggatgtgtgtatcaacaaggcctggcatgaaaagccag

SEQ ID NO: 4259 - DNA, 65 bp, Rattus norvegicus
gctctcagaaaacagaagtttctactgtttcttccagcaaagttggccctcactaaggaccctca

SEQ ID NO: 4260 - DNA, 65 bp, Rattus norvegicus
tatgccttccaccctcttgtggcctccctaccatcctactttgccaaaagtgccactatctacaa

SEQ ID NO: 4261 - DNA, 65 bp, Rattus norvegicus
ctatcaacagatcctcaccagcttgccttcccaaaacgtgctgcagatagctcatgacctggaga

SEQ ID NO: 4262 - DNA, 65 bp, Rattus norvegicus
tcagagtagtgttcccttcttgactgtgactagatcaggttagggatccgttccctgtcccttgc

SEQ ID NO: 4263 - DNA, 65 bp, Rattus norvegicus
gctggcagaacaagaacacggagagcatcattgagctgcagaataagacgccagtctggaatgat

SEQ ID NO: 4264 - DNA, 65 bp, Rattus norvegicus
ggaacatgacaagtgtcccggcttacggctaagtgtctaggacagaatggaacacatagtagctg

SEQ ID NO: 4265 - DNA, 65 bp, Rattus norvegicus
gtgcagtagaaatggtaagatgcagtgttgttgaggccttaagattcgtctgcgtggtcaccatg

SEQ ID NO: 4266 - DNA, 65 bp, Rattus norvegicus
ggtgaaatggctgcctgcaaatgtgagtgactgaacaaacactcccagtggatgcctgtctcaca

SEQ ID NO: 4267 - DNA, 65 bp, Rattus norvegicus
ggagactattaagcaggttgatctttgcaactatgtttccgtcaatggtgccactgctcatccac

SEQ ID NO: 4268 - DNA, 65 bp, Rattus norvegicus
gtgtgactgctgagagagctctacatcagcatctgtatgtatcccttcaataaacatgtgctgtg

SEQ ID NO: 4269 - DNA, 65 bp, Rattus norvegicus
atgatgaagattgctgggcaaacttaggaaaacctcaaagtgttatgaggaagacattgcccggc

SEQ ID NO: 4270 - DNA, 65 bp, Rattus norvegicus
attcaaggaccctacaggcacctggaaattcacctacaatcccatggaccctctggactacaaag

SEQ ID NO: 4271 - DNA, 65 bp, Rattus norvegicus
tcctgacctttgtgctggctctccccagcgtagctctctgctcgcttaactgctggatgcacgct

SEQ ID NO: 4272 - DNA, 65 bp, Rattus norvegicus
atgctcaacgttttcctgaagtcgcgacacgaagagcacgagagacccgagttcgtcgcctaccc

SEQ ID NO: 4273 - DNA, 65 bp, Rattus norvegicus
agagaatagtgggctgcatctgtgaagaggacaactgcactgtcatctggttctggctgcaccaa

SEQ ID NO: 4274 - DNA, 65 bp, Rattus norvegicus
aggcccacaaggagtgcatgagagcgctgggatttaagatatgacatggtggcccactttgtgaa

SEQ ID NO: 4275 - DNA, 65 bp, Rattus norvegicus
ggcatatcttcctcagaagacggcttcctccagtcacccaagtgcctgaccaccctactgtatta

SEQ ID NO: 4276 - DNA, 65 bp, Rattus norvegicus
gtggcagtacactgttccatgtggttctcctagcttcatccgtgaaggactgaggacctttgtta

SEQ ID NO: 4277 - DNA, 65 bp, Rattus norvegicus
ctgtgatcttgctcttttcccaaggaagataccattgttgcctgccacaacatgtgacaaagact

SEQ ID NO: 4278 - DNA, 65 bp, Rattus norvegicus
ttctctgccgtccagaactcaacaatacagaacactttcaggcctccatccaggactacacgagg

SEQ ID NO: 4279 - DNA, 65 bp, Rattus norvegicus
gatactttggccccaagtgttacatgatccttttctacccggagcgcaacacctcagcctatttc

SEQ ID NO: 4280 - DNA, 65 bp, Rattus norvegicus
tacttgtccattgccatatcctatgtggcctacagggctgacctccccgtagacttcctcatcat

SEQ ID NO: 4281 - DNA, 65 bp, Rattus norvegicus
gcgctggttgtcttggtctcttatagctacatcattgctgctgtcatgaggattcattcaacccg

SEQ ID NO: 4282 - DNA, 65 bp, Rattus norvegicus
caagttctctgaggtccctggagaatgcttcctcctgttcaccctcatccttctcatgttcttag

SEQ ID NO: 4283 - DNA, 65 bp, Rattus norvegicus
ctctggttcaaacatcccttgcaatgcggctgcccttctgtggggacaacgtcatcaatcacttt

SEQ ID NO: 4284 - DNA, 65 bp, Rattus norvegicus
tttcctttgcattacaccaccatcatgagcaccaaggtttgtgcttcactacttatactactatg

SEQ ID NO: 4285 - DNA, 65 bp, Rattus norvegicus
cacctgcagttcccacttgttctctgtctctttgttctatggtactctcctcttcatgtatgtaa

SEQ ID NO: 4286 - DNA, 65 bp, Rattus norvegicus
gtctttcattgacttctgtcagtccactgttgttacccctaaaatgctggtgaactttgtgacag

SEQ ID NO: 4287 - DNA, 65 bp, Rattus norvegicus
gtttgtatcctcatgtcttatattcttatagcttgtgctgttgtgagagtttcctccacaggagg

SEQ ID NO: 4288 - DNA, 65 bp, Rattus norvegicus
gtaatctgtccttcgttgacctctgttactcttctgttattgtccccaaagccatggccaactta

SEQ ID NO: 4289 - DNA, 65 bp, Rattus norvegicus
gtaacatgtcttttgttgacctctgttactcttctgtcattgcccccaaagccatgaccatcttc

SEQ ID NO: 4290 - DNA, 65 bp, Rattus norvegicus
gtgcatcagtgtcatgggttccttgcttgagaccttgaccattttgaggctgtccttctgcacaa

SEQ ID NO: 4291 - DNA, 65 bp, Rattus norvegicus
tgggtaggaggttttgcccattccattgtccagctgtgtctgatgctcccattgcccttctgtgg

SEQ ID NO: 4292 - DNA, 65 bp, Rattus norvegicus
cctgacagtcgtcaatctcttctatgggccccttgtctacacctacatgttacctgcttcctatc

SEQ ID NO: 4293 - DNA, 65 bp, Rattus norvegicus
ggcgtcgcaaagctctgtctacctgtgcctctcatgtcactgttgttgtcttattccttgtacct

SEQ ID NO: 4294 - DNA, 65 bp, Rattus norvegicus
cagccatgtacacgtatctccaacctgtccacatgtattctgggagtgaaggaaagttcgctgcc

SEQ ID NO: 4295 - DNA, 65 bp, Rattus norvegicus
ggctctatctacctgtgcatctcacatcatggtggttgtcttgttcttcggacctgccatcttcc

SEQ ID NO: 4296 - DNA, 65 bp, Rattus norvegicus
tcgtcttcatgtatgcaaaacccaactcgagtcacacgatggccaaggacagagtggtgtctgtc

SEQ ID NO: 4297 - DNA, 65 bp, Rattus norvegicus
cttccctactaggactgatccctatgacaggaatacttatgtcttactcacagattgcttcatcc

SEQ ID NO: 4298 - DNA, 65 bp, Rattus norvegicus
aggaattcggcgaggactcaactaagaagtaagacagtggaagtgtgcaagagaaggacactagc

SEQ ID NO: 4299 - DNA, 65 bp, Rattus norvegicus
cccaattctgtctcactccatttgccctatgggacagttgtgtctctgctgtgcctgtcacacaa

SEQ ID NO: 4300 - DNA, 65 bp, Rattus norvegicus
gtggggaatttgggcatgattacactgattaggctcagttccctcctgcacacaccaatgtacta

SEQ ID NO: 4301 - DNA, 65 bp, Rattus norvegicus
agagctcaagctgtggactggtcaaaggtcaaaggcccgagcactacagtggtggaagtggcaga

SEQ ID NO: 4302 - DNA, 65 bp, Rattus norvegicus
ggtgggctgacctctatcacaccattcacatgtatcactgtttcatacgcctacattctctccag

SEQ ID NO: 4303 - DNA, 65 bp, Rattus norvegicus
atcacatacatgcgaccacaggcctaccattcctccaagcaggacaaagtggtctctgccttcta

SEQ ID NO: 4304 - DNA, 65 bp, Rattus norvegicus
ctctgtgcccttcttgtcgtggggtcatgggtggtagccaatctgaactgtctgttacacatact

SEQ ID NO: 4305 - DNA, 65 bp, Rattus norvegicus
ctgtggtccaatgaggtgggactactacttctgtgatatccctgtgatgctaaagctggcttgtg

SEQ ID NO: 4306 - DNA, 65 bp, Rattus norvegicus
ggatctcctgcagtaacacctatgtcaatgaacttgtgagctctgctgtggtgggtacaggtatc

SEQ ID NO: 4307 - DNA, 65 bp, Rattus norvegicus
cctatgtccagatggagagattgcaaatgaaacagatatggatcaatgcatcaagtgtcctgaag

SEQ ID NO: 4308 - DNA, 65 bp, Rattus norvegicus
ctggaagcactttacaaacatggatggtgacccgagtctcaaatgctatagtctgctgtggttcc

SEQ ID NO: 4309 - DNA, 65 bp, Rattus norvegicus
gctctaagtgtcaggcaaagctggaaggcaacttgcctcaacctttctttgtatgttgtggtgaa

SEQ ID NO: 4310 - DNA, 65 bp, Rattus norvegicus
gagcttaacaccacagtctccactgttctggatgagtagaactgtgagctccaagtgacatgcaa

SEQ ID NO: 4311 - DNA, 65 bp, Rattus norvegicus
cttgggtaccctggcctttgggagcttcactctggctttcttttccagaatcttcctggtgcctt

SEQ ID NO: 4312 - DNA, 65 bp, Rattus norvegicus
catggctttcaggattactgcaccaggaataaagatgagaggcatgctggcatcaggaacaccga

SEQ ID NO: 4313 - DNA, 65 bp, Rattus norvegicus
agaagccagagatgccaaggagtgtcaacccttccagaaatgtgtagaaagcagggtgagggatg

SEQ ID NO: 4314 - DNA, 65 bp, Rattus norvegicus
ctgttctctgatttcaggcgtatatatctttgctgtattctgtgcatcagtaaacttgggcttta

SEQ ID NO: 4315 - DNA, 65 bp, Rattus norvegicus
acatagcagtcaagacaaacattggcctagcacaaaatgtctgattgttggcatttctcctgcta

SEQ ID NO: 4316 - DNA, 65 bp, Rattus norvegicus
aaggtggggactacttcttgatgctgggaaaggagatatggggtgaggaagtgtcagtgctcaga

SEQ ID NO: 4317 - DNA, 65 bp, Rattus norvegicus
cagaaggtggatccctgagagcttactttcagcacatggaatgtggtgatgaatgccaggaactc

SEQ ID NO: 4318 - DNA, 65 bp, Rattus norvegicus
attcctgggttatgaagatccattgggaatgtctctggctatcttggctctgtgcttctctgctc

SEQ ID NO: 4319 - DNA, 65 bp, Rattus norvegicus
cccaacaccctccacagattaaaggaagtgattacaggtcacagggactcagaacacatttccat

SEQ ID NO: 4320 - DNA, 65 bp, Rattus norvegicus
gctgttgctttccattgcaaccttggatacctgggagcactagccctagtgagctactttatggc

SEQ ID NO: 4321 - DNA, 65 bp, Rattus norvegicus; identical to SEQ ID NO: 1

SEQ ID NO: 4322 - DNA, 65 bp, Rattus norvegicus
ggggtatgggatgaagaagagtcaggaggcaggtgctggttggagtataatgactggactgtaaa

SEQ ID NO: 4323 - DNA, 65 bp, Rattus norvegicus
gaaggtgtgtggattggggaagtggggatttcctcttggaggtggggaagtagtcaaagattaaa

SEQ ID NO: 4324 - DNA, 65 bp, Rattus norvegicus
tttggagagttgcggattgtcccttgatgattggaaggaggtattggatgagaatgaatcagggg

SEQ ID NO: 4325 - DNA, 65 bp, Rattus norvegicus
ttacacgcagagttcttcatcgttgtgagccactggaaacttccctgagataggcctgtgcagca

SEQ ID NO: 4326 - DNA, 65 bp, Rattus norvegicus
tgtccagtgtgtcttaaacctcataggagttcagtcatcacttgctgttgtctgaagcaaatggg

SEQ ID NO: 4327 - DNA, 65 bp, Rattus norvegicus
agagcctagggtctgctttgtccagcaagagttggattagcctaatgcggaccaggaagtcctgg

SEQ ID NO: 4328 - DNA, 65 bp, Rattus norvegicus
ccaaaagggaaatgacagaccaaatggcgaggtgaaaagtgaactctgtgagagtcttgaaacca

SEQ ID NO: 4329 - DNA, 65 bp, Rattus norvegicus
acctcagttctgctgcaaacaacagctcacaggcaagtgccacagcctcagtcatgtacactgta

SEQ ID NO: 4330 - DNA, 65 bp, Rattus norvegicus
atgagcagcaccaaccagtccagtgtcaccgagttcctcctcctgggactctccaggcagcccca

SEQ ID NO: 4331 - DNA, 65 bp, Rattus norvegicus
gtgtcctttggcattgccttctgtgttattctgggctcgtgtggtatcacactagtctcctatgc

SEQ ID NO: 4332 - DNA, 65 bp, Rattus norvegicus
cattgtgtcctatgtccgaattgtatcctccattctcaaggtcccatctgctcgaggcatccgta

SEQ ID NO: 4333 - DNA, 65 bp, Rattus norvegicus
tccaagtcacctcacaatgcatcttgtacctgttatattagcagctatttccctcagtggtatcc

SEQ ID NO: 4334 - DNA, 65 bp, Rattus norvegicus
ccagagcaagagcatcacctatgaagactgtattagccagatgtgtgtcttcttggttttcgcag

SEQ ID NO: 4335 - DNA, 65 bp, Rattus norvegicus
cctcaatgatgtgatcatgtattttgcacttgtgttattggctgtcgttcctctgcttggcattc

SEQ ID NO: 4336 - DNA, 65 bp, Rattus norvegicus
atgaacaatcaaactttcatcacccaattccttctcctgggactgcccatccctgaagaacatca

SEQ ID NO: 4337 - DNA, 65 bp, Rattus norvegicus
gctggtctctgtactctacgctgtcattgtaccgttgttcaatcccatcatctactgcttgcgca

SEQ ID NO: 4338 - DNA, 65 bp, Rattus norvegicus
ctttttctgtgacatgtctgctctgctaaagctggcctgctctgacacccgtgttaatgaggttg

SEQ ID NO: 4339 - DNA, 65 bp, Rattus norvegicus
tatcttagggggccctatagttgtactacctttccttctcatcattgtttcttatgcaagaattg

SEQ ID NO: 4340 - DNA, 65 bp, Rattus norvegicus
tttactcttatttcaagatagtgtcctctgtacgttctatctcctcagttcaggggaagcacaag

SEQ ID NO: 4341 - DNA, 65 bp, Rattus norvegicus
tgactggaaataaccaaactttgatcttggagttcctcctcctgggtctgcccatcccatcagag

SEQ ID NO: 4342 - DNA, 65 bp, Rattus norvegicus
cacgagttgtcgcctccattcttaaagtcccttctgtccgaggcatccacaagatcttctccacc

SEQ ID NO: 4343 - DNA, 65 bp, Rattus norvegicus
gccagttcccagcacagctaaatggcttgaaaacagaggacagaaagctgagagattgctctgca

SEQ ID NO: 4344 - DNA, 65 bp, Rattus norvegicus
aggaagaaagcatttgctacctgctcctctcacatgacagtggtaaccttgttttatggggctgc

SEQ ID NO: 4345 - DNA, 65 bp, Rattus norvegicus
ggtgaagctgtaagattgctccagatgccttaaactatgcacaaagctaagtgaccaaacttctc

SEQ ID NO: 4346 - DNA, 65 bp, Rattus norvegicus
atcgtgggaaggagatcccaagacgtttactatgcaaagtatgaagggagcacggcattcatgtt

SEQ ID NO: 4347 - DNA, 65 bp, Rattus norvegicus
ctcctttgcgtcactttaagcgtcctgcttatgcatctagttcctacgcaccttccgttccaaag

SEQ ID NO: 4348 - DNA, 65 bp, Rattus norvegicus
gttttggggtcgttttccagagctcagtatcacacctgggtttgctgaagtcttttcctctgctc

SEQ ID NO: 4349 - DNA, 65 bp, Rattus norvegicus
tctgatgctccgttctgaggcttctgtgctaggtcaaccctcaaagtgtgaaatgtgttctcccg

SEQ ID NO: 4350 - DNA, 65 bp, Rattus norvegicus
caatacatgcgtctcccacttggtggtagtgtttctcttctatggctctgctatctatgggtatc

SEQ ID NO: 4351 - DNA, 65 bp, Rattus norvegicus
gcactgccatcttggctgtaattctggactccctaagcaaagggagagttgagactcaagtccca

SEQ ID NO: 4352 - DNA, 65 bp, Rattus norvegicus
catccccgccatcattttctcttctgttccccctcgatctcatttcctaccagccttccccctac

SEQ ID NO: 4353 - DNA, 65 bp, Rattus norvegicus
agtcggaaatagagtgtttcacccccaaagggagtatggggaatggtgggagagcaacaatgagc

SEQ ID NO: 4354 - DNA, 65 bp, Rattus norvegicus
atcctgcgcatcaggtcatcagagggcaggtctaaagcatttggaacctgcagctctcatctcat

SEQ ID NO: 4355 - DNA, 65 bp, Rattus norvegicus
gccttgtcttctgagctcttgctacagtcgcctttgctactgctttaacagagaatctgcaggtg

SEQ ID NO: 4356 - DNA, 65 bp, Rattus norvegicus
tccgattcctagtcattgaagcaattctggctactgacctgaagaaacactttgactttgtagcc

SEQ ID NO: 4357 - DNA, 65 bp, Rattus norvegicus
gccaggtcctcactgagtccaaagtcttcgatgtcattagcactatccatcaggactggttcccc

SEQ ID NO: 4358 - DNA, 65 bp, Rattus norvegicus
ttcaggcagggagcaggagcaccgtgccacagcgtgtcaccttgttcagacagatgtcctcggga

SEQ ID NO: 4359 - DNA, 65 bp, Rattus norvegicus
agtggaactaagcctgctccagtgtttcctcatcattgagtttgggctagctgtggatagcttgc

SEQ ID NO: 4360 - DNA, 65 bp, Rattus norvegicus
atcccatccctaggtgcggaccagacctttgaaccacctgcctcaccaagcatcttagcctaaag

SEQ ID NO: 4361 - DNA, 65 bp, Rattus norvegicus
aggggacacagggtacatcccaggcatcagagaactgcagctcacctcaaaccatgtcaaagaat

SEQ ID NO: 4362 - DNA, 65 bp, Rattus norvegicus
agaacgccatcatccaggagattgtcaaatatgaccgtgagatggtgcagcaggcagagctgggc

SEQ ID NO: 4363 - DNA, 65 bp, Rattus norvegicus
gtggcgtcatggagcagcatttggtacaacacgacagagacatggctcgtggtattcggggtctg

SEQ ID NO: 4364 - DNA, 65 bp, Rattus norvegicus
ccatttgcataagactgagctgcatggcaagatgatctcggtggaaaaggccaaaagtgagcccg

SEQ ID NO: 4365 - DNA, 65 bp, Rattus norvegicus
atatggtgccatcccaggccagcatgtcactttgcctcggaagacatcctcaggttctttgccac

SEQ ID NO: 4366 - DNA, 65 bp, Rattus norvegicus
caaacacgttaggaatcgttctcggaagtgggttaggggcgaactgaatgtgtcctgggacattt

SEQ ID NO: 4367 - DNA, 65 bp, Rattus norvegicus
ctaggactctgtgcacctgttgttgtatgtggtcctgtgggctgagtgctttgtacatgagaata

SEQ ID NO: 4368 - DNA, 65 bp, Rattus norvegicus
ggtgcttcaaagtatggaatgagagaagggatcaccacacctgtgtcatggatgaagactgcctg

SEQ ID NO: 4369 - DNA, 65 bp, Rattus norvegicus
aacctcctgatcagaaaagatgggcgcacagtgaatttgggcggcaagacatctgtgaccgtgta

SEQ ID NO: 4370 - DNA, 65 bp, Rattus norvegicus
gtctcagaggcagtccctggatggcatttccttctcatgcttgtttgtcttgaggttcttaaacc

SEQ ID NO: 4371 - DNA, 65 bp, Rattus norvegicus
tccctgggtgtcactgaactaagagaagtctatgatgtcttcaggatgcaggatcccacaggtgc

SEQ ID NO: 4372 - DNA, 65 bp, Rattus norvegicus
agtctcacctgcagaccatcagcaacctgagtgagaaccaggcctcggaggaagaggacgagtta

SEQ ID NO: 4373 - DNA, 65 bp, Rattus norvegicus
tcggacatgtttgctgtggctgtgtccctggtctctgggaagatcctgtacatctccaaccaagt

SEQ ID NO: 4374 - DNA, 65 bp, Rattus norvegicus
ttccgatcagctcagggatgtgacctcctccagagcctgcagaacatcacagagggcgcaaagat

SEQ ID NO: 4375 - DNA, 65 bp, Rattus norvegicus
tctgactcaaggctgcatccgaatgggggatgctactgctctccttataggaccacaataactga

SEQ ID NO: 4376 - DNA, 65 bp, Rattus norvegicus
gacgatcctaccctacgtcctatttgccagcatgcgtccaactgctactgactgggttcaagaaa

SEQ ID NO: 4377 - DNA, 65 bp, Rattus norvegicus
acagtgcttgatctcttcgatggcagagagagcttgcgacccctgtgggaacaggttcaagggtt

SEQ ID NO: 4378 - DNA, 65 bp, Rattus norvegicus
tggcgttactgcctgggcaacaagtgcttcctgcagacagagagcatcgcatactggaatgccac

SEQ ID NO: 4379 - DNA, 65 bp, Rattus norvegicus
gtacgaaaccttgtgaacagaagccaaggacatcagggtcagcaggatgtttggagccttgtcct

SEQ ID NO: 4380 - DNA, 65 bp, Rattus norvegicus
ctagagtgttctgtgcctccaaggactgtctagcgatgacttgtattggccaccaactgtagatg

SEQ ID NO: 4381 - DNA, 65 bp, Rattus norvegicus
acgcccatccttggaagaaagttgttggctactatgctgatgcttccttgaggccaccagagagt

SEQ ID NO: 4382 - DNA, 65 bp, Rattus norvegicus
cagcatatgtcagcatagtatgatgcatactgctattctccatactcaaccttggaccccaacag

SEQ ID NO: 4383 - DNA, 65 bp, Rattus norvegicus
gcaccgagcgttccccagagccccactacctcactcctcttcggcggcagcgacatgttccagcc

SEQ ID NO: 4384 - DNA, 65 bp, Rattus norvegicus
tactttgggggcatggactgtggatcttacttgacccctatgcatcaccagcttcctggaccagg

SEQ ID NO: 4385 - DNA, 65 bp, Rattus norvegicus
ttccagaacaaacgctccaagttcaagaagctgatgaagcaaggcggggcagctctggagggcag

SEQ ID NO: 4386 - DNA, 65 bp, Rattus norvegicus
agctatgacaggagtgtttgacagaagagtccaagcatcgatccggcgacttccaagctccgttc

SEQ ID NO: 4387 - DNA, 65 bp, Rattus norvegicus
caaagttgggccacaagttaatattttcaggtaaatgtctaacttcagaaataaaccaagtgact

SEQ ID NO: 4388 - DNA, 65 bp, Rattus norvegicus
cgtacacttcctacgcgccctacggaaccagttcgtccccagtcaacaacgagcccgacaaggaa

SEQ ID NO: 4389 - DNA, 65 bp, Rattus norvegicus
ctttgtcccgagtgcgggaagtcgttcacaacttgtcttttagcctccacacaagtgcagtggca

SEQ ID NO: 4390 - DNA, 65 bp, Rattus norvegicus
cttgcccggaatgcgggaagtcgttcagcgccgtccgtgctcatccagcatcacatgtacacacc

SEQ ID NO: 4391 - DNA, 65 bp, Rattus norvegicus
ctgtataccaccagtaagaaagagtgtacaaaagtccgtaacttggtacactatcccaccaacag

SEQ ID NO: 4392 - DNA, 65 bp, Rattus norvegicus
tatagaggacattggctaccatgagttccggtgctctgttgccgaaaccacagatgcgtggtctt

SEQ ID NO: 4393 - DNA, 65 bp, Rattus norvegicus
tggtctatccattgaggcgcactccgtggatgctgacccctgcgatttcctccaaatgcgggaaa

SEQ ID NO: 4394 - DNA, 65 bp, Rattus norvegicus
catccttggacatgctgtttaccagcttaccatcatctttactctgctatttgttggagagcttt

SEQ ID NO: 4395 - DNA, 65 bp, Rattus norvegicus
acttctctacttcaagcagctctgctacacctgtgattccgggttctgctatacagctctttcgg

SEQ ID NO: 4396 - DNA, 65 bp, Rattus norvegicus
tttccgtggagaggaacaactctgagtcttaaaccaattttttgagccttgtcttgagcaaggct

SEQ ID NO: 4397 - DNA, 65 bp, Rattus norvegicus
tctgctgattatagcatttccgtgtaatcaggacctgacaacatcctgattgcttctatctgatt

SEQ ID NO: 4398 - DNA, 65 bp, Rattus norvegicus
ctgttgcttgctgctccttgtgtgtctgtgtggtttgctcgctgcttctcctggggtttcctgtc

SEQ ID NO: 4399 - DNA, 65 bp, Rattus norvegicus
agtgtttgtgaggagcagcctgaggactctctatgtgggtttggagccatgagacctgccagttt

SEQ ID NO: 4400 - DNA, 65 bp, Rattus norvegicus
gaaacacaccaaattatacatggcaattagcattttaatgaagggagcagtctaatggtagtggg

SEQ ID NO: 4401 - DNA, 65 bp, Rattus norvegicus
cctgggcccttgagtactgtgatcatcacccgtttgcagcacatttctaatctgtatggtcactg

SEQ ID NO: 4402 - DNA, 65 bp, Rattus norvegicus
cggactttccatactcaaaggctttggggacactcacactcattgcttctgtgctttcccagaaa

SEQ ID NO: 4403 - DNA, 65 bp, Rattus norvegicus
gtgaggaggagctggaatctcgagtgtaaggagaacggttccttctgacagaacttggacttcaa

SEQ ID NO: 4404 - DNA, 65 bp, Rattus norvegicus
actgattggctttggctctggtgtctgcaccctgatatctggctactccagtgtcagaactgagt

SEQ ID NO: 4405 - DNA, 65 bp, Rattus norvegicus
atgggaaggtggcagttctgagaagtaactgttctagatccagcaggtggcatgtgacagagcca

SEQ ID NO: 4406 - DNA, 65 bp, Rattus norvegicus
agctccacagagtctgcctcttactacccactgacaggagacacaaggtatgagctggagttgaa

SEQ ID NO: 4407 - DNA, 65 bp, Rattus norvegicus
actgacagactatcacacagtgataacgtggggtaggcgccattaaaatcccattcctttacaca

SEQ ID NO: 4408 - DNA, 65 bp, Rattus norvegicus
tcaaaatggaacctggggtgatcagatgcaaagccactgtgctctggaagcctggagccccactt

SEQ ID NO: 4409 - DNA, 65 bp, Rattus norvegicus
catggaggctgtggccctacagtccgaagcccctcaatggccagtccgacttcccttacctggga

SEQ ID NO: 4410 - DNA, 65 bp, Rattus norvegicus
aaggaacttcacgtagtctatgctctatcacacgtatgtggacaagaccgaacactactggccag

SEQ ID NO: 4411 - DNA, 65 bp, Rattus norvegicus
aatgtgaggaagcttgctgccaaaggaactagggaagcacttagtggctgactccctgcttttgc

SEQ ID NO: 4412 - DNA, 65 bp, Rattus norvegicus
aggatttatcaggacaaagaacagcttttccgtcactcccatgaggaccgtggcaatcactgttc

SEQ ID NO: 4413 - DNA, 65 bp, Rattus norvegicus
gtcggcatggtaatggctacattcttccccttctcaggggtgtaaccccaggatgcaaagttgaa

SEQ ID NO: 4414 - DNA, 65 bp, Rattus norvegicus
ggtgactgtcaaggaccttcttagtcctgactctatctggctgatgagaaacgactttgtgaaag

SEQ ID NO: 4415 - DNA, 65 bp, Rattus norvegicus
atggaaaactccagaacaaagtatccgttctttaatgacaggctcagccaaaggtttctttgaac

SEQ ID NO: 4416 - DNA, 65 bp, Rattus norvegicus
gaaacctgttctcgtgggtgtccactgaagtgatcatgggactccatgtgaccctgcaaggatta

SEQ ID NO: 4417 - DNA, 65 bp, Rattus norvegicus; identical to SEQ ID NO: 1

SEQ ID NO: 4418 - DNA, 65 bp, Rattus norvegicus
tgcctttcattacggtattgcccaacgtggcctgaccatcaccagcgatgaccacatggccgtta

SEQ ID NO: 4419 - DNA, 65 bp, Rattus norvegicus
tactccagtgccagtgtcaaactctccttcacgtcctagaacccagcatgacataacagtgcagg

SEQ ID NO: 4420 - DNA, 65 bp, Rattus norvegicus
cctattctatccatcatgaacttctagcccagatacctggtcagatccaggctggaggaaccagg

SEQ ID NO: 4421 - DNA, 65 bp, Rattus norvegicus
tcctgtttcttctgtgtgagtgctccttgccatgcccaggtggcatacccaagtggttgaaatac

SEQ ID NO: 4422 - DNA, 65 bp, Rattus norvegicus
aggcactggctctcagaatgtaaggctaaacagtcctatgtgcgggcgttgactgcagactctca

SEQ ID NO: 4423 - DNA, 65 bp, Rattus norvegicus
tttcatcctggggagcatgcaggaactccgaggctaagccactgaagcgaggactgacatttcta

SEQ ID NO: 4424 - DNA, 65 bp, Rattus norvegicus
gaacttagaactttcaactctgacctcgtgaccttttttggaacagcagcagcactaacttgacc

SEQ ID NO: 4425 - DNA, 65 bp, Rattus norvegicus
aactcttggactcctgctaccatcctgctgcaacttcctgagtaactgggactacagctccagcc

SEQ ID NO: 4426 - DNA, 65 bp, Rattus norvegicus
tgtcacatgcacccatgcacctgcccacacatgtcacatgcacgtatgcacctgcccacacatgt

SEQ ID NO: 4427 - DNA, 65 bp, Rattus norvegicus
cctcaagatggcctccttgtcctactgatgatcttgtagtttaagatgctatttctggagataga

SEQ ID NO: 4428 - DNA, 65 bp, Rattus norvegicus
caaataagtgaactcaacctaaaataaaaaacaaaaacccccgaaaaaaactttctctttgccat

SEQ ID NO: 4429 - DNA, 65 bp, Rattus norvegicus
ttctcctgtgaaaagccgtgcaaccagaccacagcaggcaacaccgtgtcatttctgaagagtct

SEQ ID NO: 4430 - DNA, 65 bp, Rattus norvegicus
ccccaaaactccaccatggctgctgcttgtgttgataatgtctggcactttatgtgcaggagtac

SEQ ID NO: 4431 - DNA, 65 bp, Rattus norvegicus
tgtaaaccactgccttagggaccatcggctccactattgtccactgtactgacaggtagtgagga

SEQ ID NO: 4432 - DNA, 65 bp, Rattus norvegicus
ccagggccagcatcggtcacccaaccaagggacctgggcacaggggactggggctcgcctctctt

SEQ ID NO: 4433 - DNA, 65 bp, Rattus norvegicus
tagaggtgcagggcctcgacagctgcttcagctacatgtcctgctccccataccagagtagtatt

SEQ ID NO: 4434 - DNA, 65 bp, Rattus norvegicus
tcggccaagacggcgctgtagtccgacagaggctgcagtgcgctttgtgggtttcccagataaaa

SEQ ID NO: 4435 - DNA, 65 bp, Rattus norvegicus
aatatgatcgaccccttgggaacctcgtccctgggactcaagctgccagtgaaggatttggaact

SEQ ID NO: 4436 - DNA, 65 bp, Rattus norvegicus
ctctgtgtatctagaaggactttgaacttcatgttcaccttgctcccacctactgagtgctgggg

SEQ ID NO: 4437 - DNA, 65 bp, Rattus norvegicus
tgttaccatctcgtagcacgaagcctttctgttatccagaactccccgttagcctgaaagacccc

SEQ ID NO: 4438 - DNA, 65 bp, Rattus norvegicus
agaatggatgggtggctgccaggacagagtggctggaggggtcctgaatgtgcagttcacatgtg

SEQ ID NO: 4439 - DNA, 65 bp, Rattus norvegicus
gttcttcaggcttcagccccctccttagcctgggctcttcgtggtgctgaggaccttcagtcctg

SEQ ID NO: 4440 - DNA, 65 bp, Rattus norvegicus
cctagaatggaggatcccagtcacaatgcctctgttcaaacttacagaaattgatgatgcaatgc

SEQ ID NO: 4441 - DNA, 65 bp, Rattus norvegicus
ggggctggatggacaatcgcttcaaatccctgaaaggctactggagcaagttcactgataagttc

SEQ ID NO: 4442 - DNA, 65 bp, Rattus norvegicus
gacacgtaaggtccacgaagaggcaagggatgcctttaacactggaagacaatgctgacttaagc

SEQ ID NO: 4443 - DNA, 65 bp, Rattus norvegicus
gcgttgcttgcagagtgtggtcccttagatcttgctcaccgggttacagatcaggaaactaagtc

SEQ ID NO: 4444 - DNA, 65 bp, Rattus norvegicus
aatgtagctctcagctggcagagtgccaaccatgcactaagctatgggttcaattcccagtactg

SEQ ID NO: 4445 - DNA, 65 bp, Rattus norvegicus
agagagagcaagagagcgaatagagaggaggcgactccagctgcctttttcaacatggattcccg

SEQ ID NO: 4446 - DNA, 65 bp, Rattus norvegicus
acgtgagattctactacgtgggaagaggttcctgacagcatcgagcttgctctatagccatagag

SEQ ID NO: 4447 - DNA, 65 bp, Rattus norvegicus
agttatcccgcttaggagacccgaaggcaggagcatcactccagtgactctgataaggtgcgatc

SEQ ID NO: 4448 - DNA, 65 bp, Rattus norvegicus
cagagctttcaaagacgagatgcaacctaggcgtcaggagggcaatggcaacactgtatccattg

SEQ ID NO: 4449 - DNA, 65 bp, Rattus norvegicus
ccacttaatccaacccatatttgctacctacctcaagcaaagctgaaagagcatggctgagaagt

SEQ ID NO: 4450 - DNA, 65 bp, Rattus norvegicus
attgaattcctagccctgttgggtgtgatgtccctgttgaggatgatgggggtggggcaagggta

SEQ ID NO: 4451 - DNA, 65 bp, Rattus norvegicus
tttctttagatctgacaataagtaactggtgcagaaagacctccagggacgaatggtcaccaggt

SEQ ID NO: 4452 - DNA, 65 bp, Rattus norvegicus
aacattttccctgctctcctgatgccccgttccttctttctgcaaacacatcttaggagtaagac

SEQ ID NO: 4453 - DNA, 65 bp, Rattus norvegicus
ttgttaggttcttaggaacacttgggctcagggcagaatgggagggacctgctggaccctcagat

SEQ ID NO: 4454 - DNA, 65 bp, Rattus norvegicus
gaatgcacaaggcggcaagggttggaaggacgggagagagaaaaggtggaaaacacaggatgtaa

SEQ ID NO: 4455 - DNA, 65 bp, Rattus norvegicus
ttgttcacaaagcagccttcactcgtgtcagtgagaattcgatggacacacacgccaacgagcag

SEQ ID NO: 4456 - DNA, 65 bp, Rattus norvegicus
ctgaaaactgtgcaatgtattgagaacactctgtaccatgtgcaaggagtacgctggtcccaagg

SEQ ID NO: 4457 - DNA, 65 bp, Rattus norvegicus
ggcccatggtctgtgcattcttgtagaatcttcagggtggaatgtgtgatgcctttcttggcaat

SEQ ID NO: 4458 - DNA, 65 bp, Rattus norvegicus
catctttttcgaacggtgacggtcattactcagaactggaccctataacggctctttctagagcc

SEQ ID NO: 4459 - DNA, 65 bp, Rattus norvegicus
ttgagtattcggggagcccaagaggaggagcccacagagccccagctcatgcgactggacaacat

SEQ ID NO: 4460 - DNA, 65 bp, Rattus norvegicus
ggcagtcacaattcaggcaagaacgagagcaagtggaaatgtacaccaaccgtggtcagtgtttg

SEQ ID NO: 4461 - DNA, 65 bp, Rattus norvegicus
acaacccacagccactatgtctgacgaggaaactgaacaagttgaggaacagtacgaagaggaag

SEQ ID NO: 4462 - DNA, 65 bp, Rattus norvegicus
ggatctgggagaatgtctgagcaaggagaactaaccccgaccatactggaagaagggcggacaga

SEQ ID NO: 4463 - DNA, 65 bp, Rattus norvegicus
agtgactatactttcagggatcatttctatagttcgttactagagaagtttctctgactgtgtag

SEQ ID NO: 4464 - DNA, 65 bp, Rattus norvegicus
aactaggagttggaataggagcttgctccgtccactccacgcatcgacctggtattgcagtacct

SEQ ID NO: 4465 - DNA, 65 bp, Rattus norvegicus
caggagtcaaaacaccagcggttctacagctgcctgcagccatgttggccctcattctgctcgcg

SEQ ID NO: 4466 - DNA, 65 bp, Rattus norvegicus
gtagcacacgtcggccacatcccttttggtgccactacggtttgctggttaagatttaccaagaa

SEQ ID NO: 4467 - DNA, 65 bp, Rattus norvegicus
tagacataaggtctctgtcagtttgttcctgtcactgtgctactgttgtaccttcagcccctgcc

SEQ ID NO: 4468 - DNA, 65 bp, Rattus norvegicus
gtccttcctctacaggaaaaattcctcagaccttagtctgacagccgaaaacctgcattcctata

SEQ ID NO: 4469 - DNA, 65 bp, Rattus norvegicus
agaagcagcttatctgcctgagtgggtgggcattgctgctgatctggaacagccaaacagaggac

SEQ ID NO: 4470 - DNA, 65 bp, Rattus norvegicus
cttcccgtcactccttccagcaaggcagaggccgtctccttggagatggcgctaactgagaataa

SEQ ID NO: 4471 - DNA, 65 bp, Rattus norvegicus
acagagctgctcctggccgtcaccacattctgccttggattctgggtggttagagtcacaagaac

SEQ ID NO: 4472 - DNA, 65 bp, Rattus norvegicus
gcaacctgttctcttgggacacttttgggaacacagagcctgctatcctttgttcgtctgtatat

SEQ ID NO: 4473 - DNA, 65 bp, Rattus norvegicus
ctctgtatggcaagttctaaagttgttcagaaagctctgttcgtcctacttggaaactaacagtg

SEQ ID NO: 4474 - DNA, 65 bp, Rattus norvegicus
ggaccttatggttttgtagatacggtgactccagtctttgttgtataaaggttgggggagctgat

SEQ ID NO: 4475 - DNA, 65 bp, Rattus norvegicus
cgctggggaatatacgtgcttggcgggtaattctattgggatatcctttcactctgcatggttga

SEQ ID NO: 4476 - DNA, 65 bp, Rattus norvegicus
aactctcaatggcggagcgctgagaagacggtcgaacttgactatctagaggaagtaaaagtcgt

SEQ ID NO: 4477 - DNA, 65 bp, Rattus norvegicus
tagcaagaaggcagcttcaggcaacgacaagggcaagggcaagaaatctgcttctgccaaggcta

SEQ ID NO: 4478 - DNA, 65 bp, Rattus norvegicus
ggctctggtcctgcctttctgtgaaagcagctgccacatgcctgcgttgttgggtgccataatta

SEQ ID NO: 4479 - DNA, 65 bp, Rattus norvegicus
taatagtcacaagctttataaacgggtcacttgcccgagggcaggacttgtaagcctcgcaacgt

SEQ ID NO: 4480 - DNA, 65 bp, Rattus norvegicus
tcacagacttgtctcctcacacactctgacagggatgttatagtgccgatcgtcctcagctatga

SEQ ID NO: 4481 - DNA, 65 bp, Rattus norvegicus
gtatttgcatccactccttgtagctgcaaccagtctataagctctctgttggttcccagtccgtc

SEQ ID NO: 4482 - DNA, 65 bp, Rattus norvegicus
tcccactaagaacgaaccatccagttcttttgtcagtcacactatgaaacagggaaggtgaaggg

SEQ ID NO: 4483 - DNA, 65 bp, Rattus norvegicus
gactctaccctttacccctttcactccatagtcccacacccaggaaagtactgggatgggagggg

SEQ ID NO: 4484 - DNA, 65 bp, Rattus norvegicus
gcctttgcccaactgtgagtactaacactgtccagctttagtcaaggaatctgcctgttccaggt

SEQ ID NO: 4485 - DNA, 65 bp, Rattus norvegicus
aacgtggacttgcggaggtccctgtatgccctctgtctggacactagccgtgaaacagatttgta

SEQ ID NO: 4486 - DNA, 65 bp, Rattus norvegicus
tcaaggcccaaaggcaccgagaatgaaagaagctgaaaaagagtaccaaagcgacaaccaagcaa

SEQ ID NO: 4487 - DNA, 65 bp, Rattus norvegicus
ggacagtgatgatgaatcacacgaacccaaaggcaccgaagatgaagatgctggaagtgactatc

SEQ ID NO: 4488 - DNA, 65 bp, Rattus norvegicus
cacacaggagtagatccacgtcagtagctctctgaaaagtttgttaactgtatatgatgggcttc

SEQ ID NO: 4489 - DNA, 65 bp, Rattus norvegicus
gcctgactgaactatgtacttgaaatgtagtgctacacttggagagttgttagcgctctgctccc

SEQ ID NO: 4490 - DNA, 65 bp, Rattus norvegicus
ctaagttctcaagcggaggcagtctattgcaaggaccttctttgctgccagttaccataggctgt

SEQ ID NO: 4491 - DNA, 65 bp, Rattus norvegicus
aaggcgatggactgctaatccattgtgctctgcacgcgtgggttcgaatcccatcctcgtcgcca

SEQ ID NO: 4492 - DNA, 65 bp, Rattus norvegicus
attggacataatactggttttaatacctgctttgcattttcacacatggtcagcagggacatgtg

SEQ ID NO: 4493 - DNA, 65 bp, Rattus norvegicus
gggtaagaattcgccatttcaagatggtagaaggacatgctggctctacttccaagaggacagcc

SEQ ID NO: 4494 - DNA, 65 bp, Rattus norvegicus
gtaaagtgtaacaacagccctagcccatcaatgtctgatgtaaaacctgaggtcacagcctatct

SEQ ID NO: 4495 - DNA, 65 bp, Rattus norvegicus
gcaggaacagtttgtagacctgtacaaggagtttgagccgagcctggtcaacagcactgtgtaca

SEQ ID NO: 4496 - DNA, 65 bp, Rattus norvegicus
agtgcctgtgccagacgagaggtttgacttccttttgccagtgtcacaagccagcaagcaagatt

SEQ ID NO: 4497 - DNA, 65 bp, Rattus norvegicus
ccccttgccaccaagtctcctttattgcctgcctctgctgtgaattaacttgttctgtgtattaa

SEQ ID NO: 4498 - DNA, 65 bp, Rattus norvegicus
ccagaacaggagtgtacctcctaatgttcactgtcacactgctctatgtgtgtccggttggttga

SEQ ID NO: 4499 - DNA, 65 bp, Rattus norvegicus
atgttttattaaccagcccagtgcaactgtcagcctattaaagagatccaatggtccctgtttag

SEQ ID NO: 4500 - DNA, 65 bp, Rattus norvegicus
aatgtagaggcatagtgggttagcccatgggaagctgcaagtctgtaatgtgtgccttggaacgg

SEQ ID NO: 4501 - DNA, 65 bp, Rattus norvegicus
gtaagcacaactgaagagctatgtagaaactcaagaattctagatttacagtcggagtccataag

SEQ ID NO: 4502 - DNA, 65 bp, Rattus norvegicus
tgaagggcgctctttcttgtcacgatgtcacctgcaaaggcccaaagaagcgaagtagatcagac

SEQ ID NO: 4503 - DNA, 65 bp, Rattus norvegicus
ggtactccaccacacgtaactatactcccagccttctacagtgattcataggaagagttgttttc

SEQ ID NO: 4504 - DNA, 65 bp, Rattus norvegicus
attgccacctaggaggaggatctgaagcagcaggagagaaagccatgtgcctggctacacacatg

SEQ ID NO: 4505 - DNA, 65 bp, Rattus norvegicus
caagtgctacgtgattcctctgaacacctccattgttatgccacccagaaacctgttggagcttc

SEQ ID NO: 4506 - DNA, 65 bp, Rattus norvegicus
ggtactccacaaaacagcaactgtcacccgaagagtcaagtacagacagcctaacaacgttaaca

SEQ ID NO: 4507 - DNA, 65 bp, Rattus norvegicus
ggtactccaccaacaaaatcatgtaatattgaaaataccttatgccttcatatatgtgtacatat

SEQ ID NO: 4508 - DNA, 65 bp, Rattus norvegicus
tttccgtggagaggaacaactctgagtcttaaaccaattttttgagccttgttccggcaaggcta

SEQ ID NO: 4509 - DNA, 65 bp, Rattus norvegicus
ctctgcttcctgtaccttgacatgcaaaaggctctcctaatactccacattcaaactgaagagga

SEQ ID NO: 4510 - DNA, 65 bp, Rattus norvegicus
tacaatgggaagtctgcccacaatgagcgataggtgctgctgttcagacctgttcgtaagtttag

SEQ ID NO: 4511 - DNA, 65 bp, Rattus norvegicus
agcaggtggcctgctgaagtcagttgaaggcacgattgcccttctggggtcactgcttcactagc

SEQ ID NO: 4512 - DNA, 65 bp, Rattus norvegicus
ccagtcgcagcagtgggattagtattagtgtgatatctcccggatgctgaatcagcctctggctt

SEQ ID NO: 4513 - DNA, 65 bp, Rattus norvegicus; identical to SEQ ID NO: 1

SEQ ID NO: 4514 - DNA, 65 bp, Rattus norvegicus
cggtgtgtgtcaggagtattttgggagtaatacatacctacaaggtgatttcagagttcttcctc

SEQ ID NO: 4515 - DNA, 65 bp, Rattus norvegicus
cctctgtggatgtcattgaaggtgacagtgactttgaaatggttgagacttccagggaactctgc

SEQ ID NO: 4516 - DNA, 65 bp, Rattus norvegicus
actaacaggctgaccatcctggaggaccacacacttggctacgtaaaggctccactcacaccaaa

SEQ ID NO: 4517 - DNA, 65 bp, Rattus norvegicus
gaggcttctcagtagacaaagcaaccctaacacgcttcttcgcattccacttcatcctcccattc

SEQ ID NO: 4518 - DNA, 65 bp, Rattus norvegicus
tgaaatcaacctgatcgcctaccgggaagcccacaattactcagcattgccgttttacttcaggt

SEQ ID NO: 4519 - DNA, 65 bp, Rattus norvegicus
cctgggaggtggtcaaagcagaagtctggagagccctgtcttcctcagccaacttgatgggaaga

SEQ ID NO: 4520 - DNA, 65 bp, Rattus norvegicus
agatgataggatcgatgacgtgctgaaaaccatgaccgacaaggcacctcctggtgtctaactgc

SEQ ID NO: 4521 - DNA, 65 bp, Rattus norvegicus
tgatttagccaccaagagagtacggcagcttctcgacttagacccagaagtggagtgtctgaagg

SEQ ID NO: 4522 - DNA, 65 bp, Rattus norvegicus
acggtggtttcctcaccatcaacctggcctttggctttgctgtcactctgggcatcctcatcgct

SEQ ID NO: 4523 - DNA, 65 bp, Rattus norvegicus
tccagatggggagcacggactgaggggcgacactaccatgccaagggacggcttcgcaggagtcc

SEQ ID NO: 4524 - DNA, 65 bp, Rattus norvegicus
ggtcttgaggtgctgtgtgttgatactggccctttcggcttctctctgaaaccctgagttgttta

SEQ ID NO: 4525 - DNA, 65 bp, Rattus norvegicus
accgacgtgaagatgatggagcgtgtggtggagcagatgtgcgtcacccagtatcagaaggagtc

SEQ ID NO: 4526 - DNA, 65 bp, Rattus norvegicus
gccagcttgatctttgtgagtgtggcttgcccttcttccacataattctaccatgctaaaagttg

SEQ ID NO: 4527 - DNA, 65 bp, Rattus norvegicus
ctggccccatgaagatgctgcacagtttacagatttcctgatcccaatgttagagatggttccag

SEQ ID NO: 4528 - DNA, 65 bp, Rattus norvegicus
ccctggagaagcagtgaagctgaggaccctacagacccctctctgatcccatggtgatgcccttt

SEQ ID NO: 4529 - DNA, 65 bp, Rattus norvegicus
caaaagacaccctgtgcctattagcatccctcgtctttctagattcccttctccaacctcgacga

SEQ ID NO: 4530 - DNA, 65 bp, Rattus norvegicus
gtctgtcttatgaccccattaaagagcagacctccatgaaaaggcaatcaggaagacgcctctgc

SEQ ID NO: 4531 - DNA, 65 bp, Rattus norvegicus
gcctagagaggcagtacagatggatcgagcacaatggttactgtcaaagcagaccctcaagaaac

SEQ ID NO: 4532 - DNA, 65 bp, Rattus norvegicus
agctcgctctgaaggcctgtttcctaggctacgtacgggggaccttgttccttatcctttcgcct

SEQ ID NO: 4533 - DNA, 65 bp, Rattus norvegicus
gggcaggtgtccatagatgctaatggggacgggtatggagacttctctgtggttgccatgactga

SEQ ID NO: 4534 - DNA, 65 bp, Rattus norvegicus
tcgggccagcctagctccacgaggactaaactaggtgctttgagctctcttcacccgtctcatct

SEQ ID NO: 4535 - DNA, 65 bp, Rattus norvegicus
cggtgactggacctgctttctgaccaagatccatcctctgataagccacatgtacctttctgaca

SEQ ID NO: 4536 - DNA, 65 bp, Rattus norvegicus
tcatgaatcaacccgtctatgtagcaaaatagtgggaagatttttaggtagaggtgaaaagccta

SEQ ID NO: 4537 - DNA, 65 bp, Rattus norvegicus
ccaagtcggaaatggagatggctcatctgtactcactttgtgatgctgcccatgcccagacagaa

SEQ ID NO: 4538 - DNA, 65 bp, Rattus norvegicus
tgttcacagcggtcttgctgaccctgagctatgctcaggaaccaggtgatgaacttcagatccta

SEQ ID NO: 4539 - DNA, 65 bp, Rattus norvegicus
gacaagaagtacaacagctatgcctggatggtggtccgagcagaagtcttcaggaacttttccat

SEQ ID NO: 4540 - DNA, 65 bp, Rattus norvegicus
ctgaggaacttgggcgcagacatgctgatggatccttctctgatgagatgaacacgattctcgat

SEQ ID NO: 4541 - DNA, 65 bp, Rattus norvegicus
cttcgacaagagccttcaggaagcatggctgggaaagagagccctttgaaaaacactccccagga

SEQ ID NO: 4542 - DNA, 65 bp, Rattus norvegicus
atggctccgattgcacagtccccttgctaaagcaaagggcactctcttaaggctacttcagaact

SEQ ID NO: 4543 - DNA, 65 bp, Rattus norvegicus
tgatacggagttcgtgcgcttggacaccaacaaggagactgtaagcctgaagcccctagtgcctt

SEQ ID NO: 4544 - DNA, 65 bp, Rattus norvegicus
gtattagagcagaggataagcccatacagacgtggccacttaagttttgacaaaggatccaaaac

SEQ ID NO: 4545 - DNA, 65 bp, Rattus norvegicus
gaaggtcacccttctcgcaggtcagaacttaactcgttcctatccatggctctgcatagtcagtt

SEQ ID NO: 4546 - DNA, 65 bp, Rattus norvegicus
gctctggcctcacaatgataaatgcaactgtcagcatgtgtggataaggttattgctgtgcccac

SEQ ID NO: 4547 - DNA, 65 bp, Rattus norvegicus
cagttctctgacttagtgagggtgggagtggtttacagaagcttggggaggaagttaaagctgct

SEQ ID NO: 4548 - DNA, 65 bp, Rattus norvegicus
agagttgttccgtgaggactagatcctgagacctgagtaacctctgtctctacttcctcccgaac

SEQ ID NO: 4549 - DNA, 65 bp, Rattus norvegicus
ccattctcccaacaggctcccgagcacaagaaacaggttagaagagcacattttgtcactttgtg

SEQ ID NO: 4550 - DNA, 65 bp, Rattus norvegicus
ccaaggacctctctgagacactacaagatgtgactgcaaacaggcaggaatgtactaactgccag

SEQ ID NO: 4551 - DNA, 65 bp, Rattus norvegicus
caggacaacctcctgttgctcctcttgaagcttttctgagtaccacaggtctctctagtctatca

SEQ ID NO: 4552 - DNA, 65 bp, Rattus norvegicus
tgtatttcacgtcaaaattctcgatcatggtacaaaaggcaatgtgtttcatcctccccagggtc

SEQ ID NO: 4553 - DNA, 65 bp, Rattus norvegicus
ctccaactatatccaatcaattcaagttctctcactgtacttcactctctctacttcatcatcca

SEQ ID NO: 4554 - DNA, 65 bp, Rattus norvegicus
caggtccagttggttaagtgtttgctgaacacaagcagaagatcctaaattcagatccccagcaa

SEQ ID NO: 4555 - DNA, 65 bp, Rattus norvegicus
cggactctaccaagtgcatagcttgtgaaagtgcaaagccaggcacaaagtctgagtttaaaggc

SEQ ID NO: 4556 - DNA, 65 bp, Rattus norvegicus
acctcatctcccacgtgcatcgtgagaccttggaggtttccgaacattttcccattgatagcatg

SEQ ID NO: 4557 - DNA, 65 bp, Rattus norvegicus
ttgaaatgtctggccttatctgttaagtcccacgcctgaagaagctgatgtgaactcatcatgta

SEQ ID NO: 4558 - DNA, 65 bp, Rattus norvegicus
cagttgtcttcagactttccggtgtctcctcctttgtcgtggcgaagcaacttgttaccgatcaa

SEQ ID NO: 4559 - DNA, 65 bp, Rattus norvegicus
gcaggtgtattcatgggttttgacctttgcaagcgagtacccaggcaatgaagtagaatgtctcc

SEQ ID NO: 4560 - DNA, 65 bp, Rattus norvegicus
tggagctcagtgcctgcgatttgggctcagctttacccataaggcacagactctactggccacag

SEQ ID NO: 4561 - DNA, 65 bp, Rattus norvegicus
aacggtgggaagaaggtgaacaacatctggggtgctgtgctacaggaacagaaccaagatgctgt

SEQ ID NO: 4562 - DNA, 65 bp, Rattus norvegicus
ctaattgctctgtctatggctcctgagggattactgagcagatgtggtcacagcagcatccttga

SEQ ID NO: 4563 - DNA, 65 bp, Rattus norvegicus
tcattcttagacacccaccattgctgctaccagcgccagatgtccatcctcccgattttgcctgt

SEQ ID NO: 4564 - DNA, 65 bp, Rattus norvegicus
agtccctaccatccaacccgtgctgactggcctgtccaggatcgtcaacggagaggatgctattc

SEQ ID NO: 4565 - DNA, 65 bp, Rattus norvegicus
tgcggccctactatcaggggctgattgacaagtactgcccgggcatcctgagctggtgaatggtt

SEQ ID NO: 4566 - DNA, 65 bp, Rattus norvegicus
ctcagcggcaattaagagcaagttctgcttttgcggagggaacactgaagttcccagtgtccatg

SEQ ID NO: 4567 - DNA, 65 bp, Rattus norvegicus
agattctagatgtcatcagtcaaaccgaggaaggcctcgtccgagaggacaccaggaaaacgcca

SEQ ID NO: 4568 - DNA, 65 bp, Rattus norvegicus
ctcgagggagggtgtcttgatttcaccccaatggacagagggaatgaagagcaggaactccttct

SEQ ID NO: 4569 - DNA, 65 bp, Rattus norvegicus
tcctcacgccttgcctgaagggcggcaccatcgtctgcaacggctacaaagaccgcgagttcatc

SEQ ID NO: 4570 - DNA, 65 bp, Rattus norvegicus
tcgataccgacgtaaggggttcttcgtcttgactgcagcagtagggtcagagtgtaccaagtcaa

SEQ ID NO: 4571 - DNA, 65 bp, Rattus norvegicus
gttatctgctatcattgctctctgcacactctcgcaccaaagccacaggattgagggacacatct

SEQ ID NO: 4572 - DNA, 65 bp, Rattus norvegicus
cctggggaaactacaacaaccctctctatgatgactcttaacaaaggaaggtggctgaggacaag

SEQ ID NO: 4573 - DNA, 65 bp, Rattus norvegicus
accacagcgacggcaggaccagggccggcggtcttgatcccgctccgcgatcgcacaccgggtct

SEQ ID NO: 4574 - DNA, 65 bp, Rattus norvegicus
cctcgggagggcgccgcggagccccggtacaggcccgatcggacgccggtagcgagctacagttt

SEQ ID NO: 4575 - DNA, 65 bp, Rattus norvegicus
tgtgcttgcactgtctgccggagaaacgtggacattccttggagtgtggcaactgagctacagtt

SEQ ID NO: 4576 - DNA, 65 bp, Rattus norvegicus
gccaggatgctatctgtgtagcccttttcgtgccacaattagggtggtgctggcttcctccgacc

SEQ ID NO: 4577 - DNA, 65 bp, Rattus norvegicus
gagggctacgattcatcttcagttgtctactacacattagatcgcatagcacccttccttaggct

SEQ ID NO: 4578 - DNA, 65 bp, Rattus norvegicus
cggttccatgtgcttagcaagctcctgagtttcatggcgcctattgaccacactgcaatgaatga

SEQ ID NO: 4579 - DNA, 65 bp, Rattus norvegicus
ccccaactctaatgggacgaatggagaggcacccaaatgccccaatagcagtgcggagtcttcat

SEQ ID NO: 4580 - DNA, 65 bp, Rattus norvegicus
atcattgcatcactccttctgttaacgttccctaagatgcttcttgaaagcaacaatactgagcc

SEQ ID NO: 4581 - DNA, 65 bp, Rattus norvegicus
ctcccagcactgtctggactagcattgcaaccttagttacctgctgtgttgtggatgagatgttc

SEQ ID NO: 4582 - DNA, 65 bp, Rattus norvegicus
cctccccatgcctcagttcttcatcttgttccaagtcagtacctacgtgtgttctttgataaccc

SEQ ID NO: 4583 - DNA, 65 bp, Rattus norvegicus
ggcttgtcaacgttttcttagctttgatttgaggcaccccgtaaagtcatagttgcagaatccca

SEQ ID NO: 4584 - DNA, 65 bp, Rattus norvegicus
ttttggatctgagttacattccctagaatccttgttaaaaactggggcaggggggggttggggat

SEQ ID NO: 4585 - DNA, 65 bp, Rattus norvegicus
agaccagtctaacaggctacgatgatctgctccaagtctacagcaccatgtgtgggaagacatgg

SEQ ID NO: 4586 - DNA, 65 bp, Rattus norvegicus
acaccaatgttagaacaaccttcctctagctctcaccacggtgtgaggcccaaagcaacagagct

SEQ ID NO: 4587 - DNA, 65 bp, Rattus norvegicus
cacgctcttctacagttctttccaaatcatcgctaagtgtcagaccttttgcatggtcactgatt

SEQ ID NO: 4588 - DNA, 65 bp, Rattus norvegicus
acatttgcggggtgaatcaatgctgtggaggaggattccagtaactctggcccttcccactgcct

SEQ ID NO: 4589 - DNA, 65 bp, Rattus norvegicus
cggtaaagaagccatagataaagcttgagcccactggtttggtggcagtttgtctacccgggagt

SEQ ID NO: 4590 - DNA, 65 bp, Rattus norvegicus
gactgtcaaaatctccaagttcctattggctttggtgcttggatggcatcttttcaagtaataaa

SEQ ID NO: 4591 - DNA, 65 bp, Rattus norvegicus
tctctggctacaacggtaattggcttcagatgggaagtcgtccatcgtacagcacaccgacacgg

SEQ ID NO: 4592 - DNA, 65 bp, Rattus norvegicus
tcctcgtcaagaaacatttcaacgcctccaagaagcccaactacagcgaactggacacacacaca

SEQ ID NO: 4593 - DNA, 65 bp, Rattus norvegicus
ccgtttctccaagatgctggtggtcctgttcacagcggtcttgttgaccctgagctatgctcagg

SEQ ID NO: 4594 - DNA, 65 bp, Rattus norvegicus
ccaaggtttcttcaagagtcattccaggtttgctagtccatgccacagtgccttgcaaaagcacc

SEQ ID NO: 4595 - DNA, 65 bp, Rattus norvegicus
cctaccaagtgctagggtacagtcatgaaccgctacaccagctcttggtctcttgtctttactgt

SEQ ID NO: 4596 - DNA, 65 bp, Rattus norvegicus
gggaggaggaggcgcggaagacagggtgatcagcgggatccacagccctggaactgcgcgggctc

SEQ ID NO: 4597 - DNA, 65 bp, Rattus norvegicus
gaagagagttgtgagggatccccaaggcattcgagcatgggtggcatggcaaagacactgtaaaa

SEQ ID NO: 4598 - DNA, 65 bp, Rattus norvegicus
gaagcctgaccttcccttacaggtcttgtggttgaatctggacaacgttccagccaaaacaagtg

SEQ ID NO: 4599 - DNA, 65 bp, Rattus norvegicus
gacagcttatctaagagtcaatcttatgtgacacatgtcctgatctaatgtcctgtggagagcca

SEQ ID NO: 4600 - DNA, 65 bp, Rattus norvegicus
tatgggcctactcctggcgctcatcgtgctgctcatcgtagtgggcaacgtgttggtgatcgtgg

SEQ ID NO: 4601 - DNA, 65 bp, Rattus norvegicus
cgctcactgctctctacctaagagagtagcatacatgcgacaggagaggattatccgtttgtcat

SEQ ID NO: 4602 - DNA, 65 bp, Rattus norvegicus
agggtctgggcaatgggctcgagtctggtgctgatcgtgacgacgtacacatgtactgactgact

SEQ ID NO: 4603 - DNA, 65 bp, Rattus norvegicus
tagaaagagtcctgggttggcttgatggcactagcactaatcccagcagttaaaagccggcagaa

SEQ ID NO: 4604 - DNA, 65 bp, Rattus norvegicus
gtgtcccatttggaatagtcactgtagtcaaaagaggaaactgcagtagactaggcagatcagtc

SEQ ID NO: 4605 - DNA, 65 bp, Rattus norvegicus
cgccagacctgtgaggagacaatgcttgcagtcaagtacattgccaattatgtccgagaacatct

SEQ ID NO: 4606 - DNA, 65 bp, Rattus norvegicus
tcagaagaattttgtctggaaactccttttgtagctgccgtcgtgcagctacagttgatgcatag

SEQ ID NO: 4607 - DNA, 65 bp, Rattus norvegicus
gagctggccccgccgctggtaccagcctgtggggaatcatgggaggaacctccgccccctgccct

SEQ ID NO: 4608 - DNA, 65 bp, Rattus norvegicus
gtggtgtgttcatgaatccaacccagatcacaactattccaggtccccgaggataaaggtacccc

SEQ ID NO: 4609 - DNA, 65 bp, Rattus norvegicus; identical to SEQ ID NO: 1

SEQ ID NO: 4610 - DNA, 65 bp, Rattus norvegicus
gtctatccggaatccagccacccagcctacaagcccattgcccaggcccctaggccacaggcgac

SEQ ID NO: 4611 - DNA, 65 bp, Rattus norvegicus
ggtggctggattccggatgacacgcacagtcacacatctgttactgactgcctgctgactttctt

SEQ ID NO: 4612 - DNA, 65 bp, Rattus norvegicus
aaactgggccaacccttccagcaaagagaaggacttcctctcaagcgacctcatctttctgggct

SEQ ID NO: 4613 - DNA, 65 bp, Rattus norvegicus
ttcatcttcttcatggtcattgccttctgcaagagctgctgcagtgaacccatgcatatgttcac

SEQ ID NO: 4614 - DNA, 65 bp, Rattus norvegicus
tttgaaagagcagtgcagtctgctaagtccggctcgctcctgcagtggcctctcctgcagctgta

SEQ ID NO: 4615 - DNA, 65 bp, Rattus norvegicus
gaaaccgcctatgaacggttaccagaagttctcccaggagctgctgtccaatggggaactaaatc

SEQ ID NO: 4616 - DNA, 65 bp, Rattus norvegicus
ggaggggacttggtggcttttgagaccttttgttaccatgtgtaaagttctggctgagagggaca

SEQ ID NO: 4617 - DNA, 65 bp, Rattus norvegicus
ttacagaagtgagaggctctgcggtcctgtgacatcccctccaagccgagcagccatctctacca

SEQ ID NO: 4618 - DNA, 65 bp, Rattus norvegicus
agaattccaagccctcgttccaaaggtgcaaccaaccttcagagtcactatgatccagggtcagc

SEQ ID NO: 4619 - DNA, 65 bp, Rattus norvegicus
cactaaaatttggtttggatattcttaaagtgtggaaaatgatacttagttctgcattttgattc

SEQ ID NO: 4620 - DNA, 65 bp, Rattus norvegicus
tcaaaaggaagattcaagttctgtaagagaaggaacaggtattgagtccaataggaacaaagtgg

SEQ ID NO: 4621 - DNA, 65 bp, Rattus norvegicus
tggagcttcttcacttggacctgcagagaggaccactgagaacaactacatggagattgtcaacg

SEQ ID NO: 4622 - DNA, 65 bp, Rattus norvegicus
gtaaggcgtctttagaatgggatgatggtattgagtaattgggtggagtttggtcggtgacaaaa

SEQ ID NO: 4623 - DNA, 65 bp, Rattus norvegicus
gctgctgagtctgtctgggagcttgactgtgaggaagaggtttccttaggcaaaatctcacctct

SEQ ID NO: 4624 - DNA, 65 bp, Rattus norvegicus
gcatttatgggcggttccaccctttgtaagtgaataagcacagccatctgggcctctttgaaacg

SEQ ID NO: 4625 - DNA, 65 bp, Rattus norvegicus
ctgttgaatgacagagccttttaaggacattccaagacagtaaagatcctaaactctgtaaaaaa

SEQ ID NO: 4626 - DNA, 65 bp, Rattus norvegicus
atgcagtcaataaccagccatcaccagatgagaccaagacaagtgtcgttgctagtggccctgtg

SEQ ID NO: 4627 - DNA, 65 bp, Rattus norvegicus
ttgtttcttacctgttcatcctcatagccattctcagaatgaattctgctgaaggtagacgcaag

SEQ ID NO: 4628 - DNA, 65 bp, Rattus norvegicus
taggactgtctttgaagactgaagattgcctgccaggagaggggactaggacattggtacaggag

SEQ ID NO: 4629 - DNA, 65 bp, Rattus norvegicus
gccagctgtttcgaacattgatcagagaggagctcttgtttgaggcaatgggaaaatcgtctaac

SEQ ID NO: 4630 - DNA, 65 bp, Rattus norvegicus
tatccctcacacacatttggcccagataggaaggctttgggacctggcatctacagcaacccagg

SEQ ID NO: 4631 - DNA, 65 bp, Rattus norvegicus
cgtacctagtctgcggttatggcttcgctcacggtgaaggcctatctactgggcaaggaggaggc

SEQ ID NO: 4632 - DNA, 65 bp, Rattus norvegicus
tggttcttatgcacaggacagacagcggcgtgtcactgcagacttatgatgatctggtagcccag

SEQ ID NO: 4633 - DNA, 65 bp, Rattus norvegicus
cttaactaagccatcttaaaatgcgcttaggtgcgtgcacacacttctgcatgcaagagcaaaat

SEQ ID NO: 4634 - DNA, 65 bp, Rattus norvegicus
gtatttgtatacgttgcctttttctcttcaaattaggaactgagaacaacatgccaattgaagac

SEQ ID NO: 4635 - DNA, 65 bp, Rattus norvegicus
tgatcacgaaggtggttttcccagggcgaggcttatccattgcactccggatgtgctgacccctg

SEQ ID NO: 4636 - DNA, 65 bp, Rattus norvegicus
catctggagttagactcacagagcacgtggtcaagagaaatcatcagagaggacgacatcacgag

SEQ ID NO: 4637 - DNA, 65 bp, Rattus norvegicus
agcttgctccgtccacctcacgcatcgacctggtattgcgcagtaccctcaggaacggtgcacca

SEQ ID NO: 4638 - DNA, 65 bp, Rattus norvegicus
accacaagctgctggagagtggtgatctggaagcagtaccagccgatgacaagctgcaggcttca

SEQ ID NO: 4639 - DNA, 65 bp, Rattus norvegicus
gagccctctgctttcgaacaacagcatcaccatctgctgcattgttttggagaagactacgtgtc

SEQ ID NO: 4640 - DNA, 65 bp, Rattus norvegicus
ggctcctccttcattcacattctggcatagtccttcccagtcagaagtagtactggatccattag

SEQ ID NO: 4641 - DNA, 65 bp, Rattus norvegicus
caataccccgccgtgacgacttgaaatatagtcggcattggcaatttttgtctctacggagactg

SEQ ID NO: 4642 - DNA, 65 bp, Rattus norvegicus
ctgtgcaaaacaagagccgaagaacgagtgttctgcagcacaggatgcaacccactcacctcaga

SEQ ID NO: 4643 - DNA, 65 bp, Rattus norvegicus
ccctctgtaaatagtgaatgtttcttactagttctgcactgcttctgtctgtcttaatgctggcg

SEQ ID NO: 4644 - DNA, 65 bp, Rattus norvegicus
ttccgtggagaggaacaactctgagtcttaaaccaattttttgaggccttgtcttgacaaggcta

SEQ ID NO: 4645 - DNA, 65 bp, Rattus norvegicus
cttcgtgagttcaaccagcctaatctgcatactgagtttccaggactatggcctcctgcctcaag

SEQ ID NO: 4646 - DNA, 65 bp, Rattus norvegicus
agagaagattagcatggcccctgcgcaaggatgacacgcaaattcgtgaagcgttccatattttt

SEQ ID NO: 4647 - DNA, 65 bp, Rattus norvegicus
ttgacgttcttaaggttacgccagaagaatacgcgggtcagataacactaatggatgttccagtg

SEQ ID NO: 4648 - DNA, 65 bp, Rattus norvegicus
caattcatttatggcagagcaatatcagtcctaatgactcgtgaaagtgttactaactgaatcat

SEQ ID NO: 4649 - DNA, 65 bp, Rattus norvegicus
tcctgtatcgtggctcaaaccagggcctctctagttgctgttagcaatgtctgcttcgtttccag

SEQ ID NO: 4650 - DNA, 65 bp, Rattus norvegicus
catttctgaatttcaagggctcctctgacaagtggacagtgcagtgggtgcaccttttccagagg

SEQ ID NO: 4651 - DNA, 65 bp, Rattus norvegicus
cctgcatatctacaagtaaacacagtgtctctgactctacaggaaccacagatcacgtgggcaga

SEQ ID NO: 4652 - DNA, 65 bp, Rattus norvegicus
tgccaccaccgcccatgatgatcttgaccctcctacatatgaaccattttcattctgtgcagtgc

SEQ ID NO: 4653 - DNA, 65 bp, Rattus norvegicus
cccatgtaggatctgctgcaagtaacagtgtatgaagtcaacctgacctggaacagaagtctgca

SEQ ID NO: 4654 - DNA, 65 bp, Rattus norvegicus
gaagtgataggggccactatgggaaattgaaacagtgcataacattgccaagataatatgccact

SEQ ID NO: 4655 - DNA, 65 bp, Rattus norvegicus
gcaccacccactctctatagcttcaagtctgccttctacggatgctttgagagaaaaccaaggct

SEQ ID NO: 4656 - DNA, 65 bp, Rattus norvegicus
tataggaaaagcatctccaggcatatgtgccgtagctcaaatcctgccccatggcttccccaccc

SEQ ID NO: 4657 - DNA, 65 bp, Rattus norvegicus
gctctccttttactgctggtgtctctgaggattccagacagcacttagtacatctgagattgtta

SEQ ID NO: 4658 - DNA, 65 bp, Rattus norvegicus
agcagaagccaaacctaaggatgaggccgccaagccaaaaggtcccatcaaaggtgtagccaaaa

SEQ ID NO: 4659 - DNA, 65 bp, Rattus norvegicus
ctacagagaaggatgaattgtaattatactctcactatgaatcctgtgtggagagggaatgtgac

SEQ ID NO: 4660 - DNA, 65 bp, Rattus norvegicus
tgcgatgggtcctcacactcagtttcctgttggcgaccgtggcagtgggaatttatgccatgtaa

SEQ ID NO: 4661 - DNA, 65 bp, Rattus norvegicus
cgttccctgttaagcaaaggatgtaactgaaagcagtctcgggatctcagcacgtgggttcaatt

SEQ ID NO: 4662 - DNA, 65 bp, Rattus norvegicus
tggcaagaagtcaatgacagcaagtggaaacttgggacatacgccttttcttgacgagttataac

SEQ ID NO: 4663 - DNA, 65 bp, Rattus norvegicus
ctcactcccttttatcaacagttataacctcagtccattgtgctacattagcgtgcctctttgta

SEQ ID NO: 4664 - DNA, 65 bp, Rattus norvegicus
acctccccttgcttcctcagtccagcgagcaggattcaggctaacgaaagctgcataccatcctg

SEQ ID NO: 4665 - DNA, 65 bp, Rattus norvegicus
agggactagaatgaatggctaaacgagggttaactgtctcttactttcaatcagtgaaattgacc

SEQ ID NO: 4666 - DNA, 65 bp, Rattus norvegicus
agactgcccatgtctccacacagagctagtcatctgacccacagagagaggacatagccctgagc

SEQ ID NO: 4667 - DNA, 65 bp, Rattus norvegicus
gcctaaagatgcctgctggttccactgtcataaaaacggtcactttgttctatggtacccatctt

SEQ ID NO: 4668 - DNA, 65 bp, Rattus norvegicus
cattagcatgacatagtcacatattttggtaaaaggaatgcatttatcttcacaaaaaggagtga

SEQ ID NO: 4669 - DNA, 65 bp, Rattus norvegicus
cacatgtccactagaagtcattaagacgagactgcagtcttcgagactagctcttcggacggtgt

SEQ ID NO: 4670 - DNA, 65 bp, Rattus norvegicus
tgactgaagaggagacgctgtcggaggagagtagcttttccatctggacacaaaacaagggccct

SEQ ID NO: 4671 - DNA, 65 bp, Rattus norvegicus
atgatgtgggagcagtttttgtttgcccttgaccgccactttccaatccgtatgtaccaccatcc

SEQ ID NO: 4672 - DNA, 65 bp, Rattus norvegicus
tggatgaatgccaactttcagacggagcccacttagcttgtccacattgtatctcaatgccaacc

SEQ ID NO: 4673 - DNA, 65 bp, Rattus norvegicus
taggacaggttagctgtgccgtgccacctgcgggacctcctcggaggattatcgcccttcaaatg

SEQ ID NO: 4674 - DNA, 65 bp, Rattus norvegicus
catcagggaagaatccttatcgctagcttggttttcacatgaggttttctgaggaaggggactgg

SEQ ID NO: 4675 - DNA, 65 bp, Rattus norvegicus
cttggcttacaagacgccacatcacctatcatagaagaacttacaaactttcatgaccacaccct

SEQ ID NO: 4676 - DNA, 65 bp, Rattus norvegicus
ggagcaactccagagtcaccagcaagatgctggtggtcctgctcacagcagccttgctagtcctg

SEQ ID NO: 4677 - DNA, 65 bp, Rattus norvegicus
gaacccattcttcccttccccatgggctgttgaagataaacaagagggactgtacttctgtggaa

SEQ ID NO: 4678 - DNA, 65 bp, Rattus norvegicus
gaagctaagcagggtcgggcctggttagtacttggatgggagaccgcctgggaataccgggtgct

SEQ ID NO: 4679 - DNA, 65 bp, Rattus norvegicus
gagaaaacagggcagaagctaatgctggggtcacagaggagtgctatgtattgatttgctcccca

SEQ ID NO: 4680 - DNA, 65 bp, Rattus norvegicus
taaggttgatggacctacacgtctgcgcatcgccagcctgcagggttcagggacacactctaagt

SEQ ID NO: 4681 - DNA, 65 bp, Rattus norvegicus
agatccacacatcattgcctacgctgacatgaggaacccgtgtcctgagtctttgattgagcaga

SEQ ID NO: 4682 - DNA, 65 bp, Rattus norvegicus
ttcactccagcgacatgtgagatcaactcatcgtcggccattcacctgtgtattccacttcgctg

SEQ ID NO: 4683 - DNA, 65 bp, Rattus norvegicus
actgtcatgactatccctgtcgactgcaccagtctcgccctctcacgtccttggcgctatgaggg

SEQ ID NO: 4684 - DNA, 65 bp, Rattus norvegicus
cgggaagaatttgcgttttcagtggaaacaagtgcgtactctatcgatgactgtgattgactcga

SEQ ID NO: 4685 - DNA, 65 bp, Rattus norvegicus
ttactgttcgagatgaccaaaaagtagcagtctacacgcgtcaaaatgaacttgtattgacagag

SEQ ID NO: 4686 - DNA, 65 bp, Rattus norvegicus
aggacagaaaggggccaccaccacagacacaggcgctgcaagaggcttcacaggatccacaagag

SEQ ID NO: 4687 - DNA, 65 bp, Rattus norvegicus
cctgtgaaaccatctttaattcagagaaaaattctttgtcaaagtaaacaaagaccctttgaatt

SEQ ID NO: 4688 - DNA, 65 bp, Rattus norvegicus
ggcgagtcagaattcttatctgaacccagcatatggacatctgtggcacaggagggattttggcc

SEQ ID NO: 4689 - DNA, 65 bp, Rattus norvegicus
ctgtctatgtactgtgctactctttgattctactttccattgacctcactagtcctcatgtgaag

SEQ ID NO: 4690 - DNA, 65 bp, Rattus norvegicus
aggctctccagagagagatccctgcagaagctgaacctgatgaagggagtggagcacctgttcct

SEQ ID NO: 4691 - DNA, 65 bp, Rattus norvegicus
tttgctcacagccctgtgctcaggggcttctccttgctagacaccaacctctgctgtcttcttgt

SEQ ID NO: 4692 - DNA, 65 bp, Rattus norvegicus
ctttagagacactgatcttcagtgttcaaaatgagtagcagggctgcccacccacctgccctcaa

SEQ ID NO: 4693 - DNA, 65 bp, Rattus norvegicus
cttgtcacctctaaggcccgctaggatgacagtgaagcagtcacagcctagaacaaagatgcccg

SEQ ID NO: 4694 - DNA, 65 bp, Rattus norvegicus
taatgcaaacatcttgcctctgccagtggcaagtgcggacaaacccaagtgcctgtaggctcctg

SEQ ID NO: 4695 - DNA, 65 bp, Rattus norvegicus
gtgtttcgtgtagtgtgctccttggtcaggcaaaatccttttccatttctgcataagactgcttg

SEQ ID NO: 4696 - DNA, 65 bp, Rattus norvegicus
gtccatagctttctcacagattttggattatacagctaacaaaactaccttaccttatagctttc

SEQ ID NO: 4697 - DNA, 65 bp, Rattus norvegicus
gtggcacttactcctttggcctctccacggcttactatcccgtttcacaaagctgcaatctactt

SEQ ID NO: 4698 - DNA, 65 bp, Rattus norvegicus
agatggggcttcgggtgaccccaaaaagaaagaaatctctctagactcagatgagagtgaagatg

SEQ ID NO: 4699 - DNA, 65 bp, Rattus norvegicus
agagccacttacccacctcctggattcccagccctttaggtcagaagccagagtccttagctggg

SEQ ID NO: 4700 - DNA, 65 bp, Rattus norvegicus
aagctctgcgagagggtgggcaccctagcggtgactctggccgggcctctatggcggactggtta

SEQ ID NO: 4701 - DNA, 65 bp, Rattus norvegicus
gaagggaagtcctggactccaccacctcatctctgtgattgtgatacgcagttcagttctcatgt

SEQ ID NO: 4702 - DNA, 65 bp, Rattus norvegicus
ttcactcaccatacctgtagccctcatttccccgatgagagcctgaagacgtggaagaggtttca

SEQ ID NO: 4703 - DNA, 65 bp, Rattus norvegicus
ataaagtgctctgattgtgcccgagaagcattggccaggaagaagtcacgcttcaagtgcacagg

SEQ ID NO: 4704 - DNA, 65 bp, Rattus norvegicus
ttgtggggctcgaaggtggaaggaacaaggacatattctcccgggggcagcttgaagcggttgag

SEQ ID NO: 4705 - DNA, 65 bp, Rattus norvegicus; identical to SEQ ID NO: 1

SEQ ID NO: 4706 - DNA, 65 bp, Rattus norvegicus
gtacgtgtggctactgcggcctgcagttcaagcagcagcatcactagtgtgggctgtgtcctggt

SEQ ID NO: 4707 - DNA, 65 bp, Rattus norvegicus
cttcctgtgtctcttcgtcagctgttctcaccaccatatgttctagtgatcaggtagtcccggtg

SEQ ID NO: 4708 - DNA, 65 bp, Rattus norvegicus
ctggttcacaaggaggttttgacacaccactctgcttcctttcgcacgtctctcaccactatcta

SEQ ID NO: 4709 - DNA, 65 bp, Rattus norvegicus
ggctcgcacactttgcctctgcaaattataggagaagctggatgctttcagctgcacatgccaaa

SEQ ID NO: 4710 - DNA, 65 bp, Rattus norvegicus
tagaggcgccgtctctgggctacaatgaaaagaggaaacagatactaggatattttttaagacag

SEQ ID NO: 4711 - DNA, 65 bp, Rattus norvegicus
cagtaaacaacaatctcacctctgaccaggctgtccaggattctcctcatggtttgtcgaaggtc

SEQ ID NO: 4712 - DNA, 65 bp, Rattus norvegicus
ccattttaaagacttcaacagggcttttggcttcatgacaagagtcgccctgcaggctgaaaagc

SEQ ID NO: 4713 - DNA, 65 bp, Rattus norvegicus
aaagccgacatctactcttttggcatcaccctgtggcagatgaccaccagggaggtgccttactc

SEQ ID NO: 4714 - DNA, 65 bp, Rattus norvegicus
gtgggggtacaaaggcattttctacctgtagctcccacctttgtgtggtctgtgttttctatgga

SEQ ID NO: 4715 - DNA, 65 bp, Rattus norvegicus
atcccaaaaggctcagggcctgatccacagcaggaatttcctgctcttgtccactcttgaggatt

SEQ ID NO: 4716 - DNA, 65 bp, Rattus norvegicus
cgggtgcctatggtgctaagtgcttttgcatgttgaatgctcctggattgtcctgctgaactaaa

SEQ ID NO: 4717 - DNA, 65 bp, Rattus norvegicus
cggcgtcagttcaaggtggtgactcggtcccaggagaaccccaatacctattccgaagatttaga

SEQ ID NO: 4718 - DNA, 65 bp, Rattus norvegicus
agaagtcacctcagtagacacaggactcaaagcagcaatatctacccagggttctacccctgcca

SEQ ID NO: 4719 - DNA, 65 bp, Rattus norvegicus
tcaaaagcacaatgacagataaggtatcaaccccacgttaacacttgccccaataccatgcactg

SEQ ID NO: 4720 - DNA, 65 bp, Rattus norvegicus
ccctcattaaagagtatgattgtttcaagtcgaaattagtcctccgtaagtgaccttcaataacc

SEQ ID NO: 4721 - DNA, 65 bp, Rattus norvegicus
tcacgggttcccttggctaagggcaagattccctgacccttgtccttccaggtgaagcaatgccc

SEQ ID NO: 4722 - DNA, 65 bp, Rattus norvegicus
atgggcaaaagtacctctcatcccttccccatcaaataaactgctcccttggggagagatgctag

SEQ ID NO: 4723 - DNA, 65 bp, Rattus norvegicus
tgtgaaggtgatgacatttccatccacgctgactttgagaacacatgttcccgaatcgtggtccc

SEQ ID NO: 4724 - DNA, 65 bp, Rattus norvegicus
ccaacacagaaccaaagggagtcactcgttaggtttccattcctcagtcaacagaacctgtattc

SEQ ID NO: 4725 - DNA, 65 bp, Rattus norvegicus
ctagtgcagtggttgcaccggagcgcgggctgcaagcgtcaccaccgcctgtcccccaccgccgc

SEQ ID NO: 4726 - DNA, 65 bp, Rattus norvegicus
cagcagctgagcgacttcatcagctttaaacccacaactatgcttccttgtgaatcaaccataaa

SEQ ID NO: 4727 - DNA, 65 bp, Rattus norvegicus
aaaatctaaatccaggcttggtggaccacatctttaatctcagtgcttagaagacaggcatgcag

SEQ ID NO: 4728 - DNA, 65 bp, Rattus norvegicus
ttgatggcctctgtggaagatcccagcgcacttcaaactcatttgtggaagactgatgctgcatt

SEQ ID NO: 4729 - DNA, 65 bp, Rattus norvegicus
gagctcttcccaagtgccaccgatgttacaagacacagacaaacccaagtcaaatgctaagcaaa

SEQ ID NO: 4730 - DNA, 65 bp, Rattus norvegicus
atgactgtgccagcaacccttgtctgcacggagcctgtgtggacggcatcaaccgttacagttgt

SEQ ID NO: 4731 - DNA, 65 bp, Rattus norvegicus
cagatcggccgagccaagagagtggtgatcgaggatgaccggatagacgacgtgctgaaggggat

SEQ ID NO: 4732 - DNA, 65 bp, Rattus norvegicus
cggagatctgaacccgactccctttcgatcggccgagcctctgtcaagtcttggaccaagtaaaa

SEQ ID NO: 4733 - DNA, 65 bp, Rattus norvegicus
cgtttctgcacataccagacagtctgtgcctgtgttctatggttgtggagagtggatgaacaggt

SEQ ID NO: 4734 - DNA, 65 bp, Rattus norvegicus
tgcagcaccatggaccggctgcgcctgctgctgctgctgattctagggatgtcctctggaggtgc

SEQ ID NO: 4735 - DNA, 65 bp, Rattus norvegicus
cctggtttaaagctcctccaaagaagcctgatagcaaagagcccgttgtctatgacacccatgtc

SEQ ID NO: 4736 - DNA, 65 bp, Rattus norvegicus
accacttccgctttctgtactgaagaactcgagtatgaaataagctttgtggtgctgaggtaacg

SEQ ID NO: 4737 - DNA, 65 bp, Rattus norvegicus
tggtagtcttttattgtgatgctcagtggaaacatctgtaaaccagcttactgtagtggtgacag

SEQ ID NO: 4738 - DNA, 65 bp, Rattus norvegicus
aaagaggcaggaaagtctcccggctttgccggatgacaaatgaatgatcagccgcttagtttgtg

SEQ ID NO: 4739 - DNA, 65 bp, Rattus norvegicus
gtgcactcgtggtgctccaactgtacctacgcacaaactaagcggctgatcattcatttgtcatc

SEQ ID NO: 4740 - DNA, 65 bp, Rattus norvegicus
cagctgtaccccagggtgcagtttctctgtagctccatgctttccgtaatcctagctgcctgctc

SEQ ID NO: 4741 - DNA, 65 bp, Rattus norvegicus
ggagccagaaagtggaaatgtttgggtttctgctgcccatgaaggactttgtgctaagcaggccc

SEQ ID NO: 4742 - DNA, 65 bp, Rattus norvegicus
aaaggtgttggttgatatagacagcaggacggtggccatggaagtcggaatccgctaaggagtgt

SEQ ID NO: 4743 - DNA, 65 bp, Rattus norvegicus
cagaaagacctctgtggtttgctaacagttccacctgtataccaagagtggtaccaactactgtt

SEQ ID NO: 4744 - DNA, 65 bp, Rattus norvegicus
gccacctgcttgctgggcagatccattggattagcctatgagggaaagtgtatcaaagcaaagtc

SEQ ID NO: 4745 - DNA, 65 bp, Rattus norvegicus
ataccctccatgctgtgggttgtctcaggctggttaccccaagagtgactactgcacaccctagt

SEQ ID NO: 4746 - DNA, 65 bp, Rattus norvegicus
ggggacaccaacaagccggtcatctctgctgtttcaaaggtgaaatcgcttcattccatggttta

SEQ ID NO: 4747 - DNA, 65 bp, Rattus norvegicus
caaagttgatttacaaaactcgtgaggcttagggggtttaaacatctccaggaggaagaaaggac

SEQ ID NO: 4748 - DNA, 65 bp, Rattus norvegicus
caagatgacagtcaacaaatccaacaggggacacttcttcctgccaagaatgtcgttgggaagcc

SEQ ID NO: 4749 - DNA, 65 bp, Rattus norvegicus
gccaatacgatttgagctaatcactcaagatggtcactttacacttgaaagctgaaatcagcagg

SEQ ID NO: 4750 - DNA, 65 bp, Rattus norvegicus
agatgctcaagaggacacataagcagccccaaaacatggcttgacctctgcgagcaataggacca

SEQ ID NO: 4751 - DNA, 65 bp, Rattus norvegicus
gctgaagccatcagtgaccattacccagtggaggtgacactcagaaagacctgatgtcattgagt

SEQ ID NO: 4752 - DNA, 65 bp, Rattus norvegicus
aattaaaggaatgcaccaccacacccagctatgcctgtgcttctaccctgaacttagcctagagc

SEQ ID NO: 4753 - DNA, 65 bp, Rattus norvegicus
tcttcatctatcctacttgttctggtagagtcactctagtggtcttccctcagccatcaagctcc

SEQ ID NO: 4754 - DNA, 65 bp, Rattus norvegicus
agccagcactactgaacccaaagtactgaacgacagcaaaacccctgcaaattcttcccatgccc

SEQ ID NO: 4755 - DNA, 65 bp, Rattus norvegicus
ggcccagcaaaagcactgttgggtgaatgttctgttgcctcaattcagagcagtagtaagtactt

SEQ ID NO: 4756 - DNA, 65 bp, Rattus norvegicus
agtttgaagaatcaacttccattgacaaggttctggaaccttctagcgtttggaatcatctgggg

SEQ ID NO: 4757 - DNA, 65 bp, Rattus norvegicus
cacctgttcagcatttgggaactcagcattcatcacaacagctctttccagaacgtgctgcaggg

SEQ ID NO: 4758 - DNA, 65 bp, Rattus norvegicus
tgcaagttcgcaagccacaactctcacaaaacttccctgaggttgaacaactctctgctgcccag

SEQ ID NO: 4759 - DNA, 65 bp, Rattus norvegicus
ggtcgagaggatggctcagccgttaaaggctaggccaaaaataacacctataagagttcggttcc

SEQ ID NO: 4760 - DNA, 65 bp, Rattus norvegicus
cccaaagacagagccattgtcctgcttagcttttgttgttcttccctgttatctgctcagtagac

SEQ ID NO: 4761 - DNA, 65 bp, Rattus norvegicus
cacctcaggactcacagaacccaggacaacttgccatctttgagcaacatatgcattgaagagtg

SEQ ID NO: 4762 - DNA, 65 bp, Rattus norvegicus
acgtcctgtaacaccttttatttggattaccctgcaaagtgcacttcctatcctcactgcctgcg

SEQ ID NO: 4763 - DNA, 65 bp, Rattus norvegicus
aacagtgtggaacagtttgacccaagagacctggctgtgaccagtcatgcagtcaccctcttaga

SEQ ID NO: 4764 - DNA, 65 bp, Rattus norvegicus
ccattgtaggagaacgtagggtagtcaagcttccaagactccagacacatccaaatgaggcgctg

SEQ ID NO: 4765 - DNA, 65 bp, Rattus norvegicus
agaggtccaagtaaaccatcttgtgcacccacgaagcctgcgggagcagaagtaagggatgctga

SEQ ID NO: 4766 - DNA, 65 bp, Rattus norvegicus
ttctgatgacgagcactaagttctgcctgctaggtttgactgacaccgatgatgccagcactgtg

SEQ ID NO: 4767 - DNA, 65 bp, Rattus norvegicus
gataacatttgacgtgttaagatacccaatgtgatgacctgtaaagtttctgaaaaaccaacatc

SEQ ID NO: 4768 - DNA, 65 bp, Rattus norvegicus
agcctgctaggctggctgacctctggacctctaccactccatcttccccagcaccagggatacag

SEQ ID NO: 4769 - DNA, 65 bp, Rattus norvegicus
cttcccttccgagctactgcatgccccagaaaagtgggtgaaggtcaagtaccccaaactcatct

SEQ ID NO: 4770 - DNA, 65 bp, Rattus norvegicus
tgggcctatagcccactgagacagtttggtaaagggctgttactaaagtcctgaaagccccaggt

SEQ ID NO: 4771 - DNA, 65 bp, Rattus norvegicus
attttcaacgtcaagaacctcgtgacagtatagacttggtcaaggagcgattcttagctgagtgt

SEQ ID NO: 4772 - DNA, 65 bp, Rattus norvegicus
agaatgtggggctgctaaatcctcagacaaccctcagggcctcagtgagggccgagtggaatcta

SEQ ID NO: 4773 - DNA, 65 bp, Rattus norvegicus
cagtccctgatgataaccattgcctttaaggacaaagtcacaactgggccatctccattccagag

SEQ ID NO: 4774 - DNA, 65 bp, Rattus norvegicus
cctttgaaagctatgtgaccccaacttcatccattcccatacctgccagtgcacaaagccgaaga

SEQ ID NO: 4775 - DNA, 65 bp, Rattus norvegicus
tcgaccacgacgtgatgacatctagccgttaaagaatgggtccttgtgcgtttccaccaaagttg

SEQ ID NO: 4776 - DNA, 65 bp, Rattus norvegicus
gaaagtcatgcgagcgaatgattaaaggtggggaaaggtgggatgagtaagacctaaccgtgcag

SEQ ID NO: 4777 - DNA, 65 bp, Rattus norvegicus
tgggtcatagtcccagtgctgaaactgctgaagtgtgacatgggtaagagctttgctttagtcgg

SEQ ID NO: 4778 - DNA, 65 bp, Rattus norvegicus
tccccagaacagtctggtagtggccctaatgaagagctgtggaagcctttagcacatgtcctgga

SEQ ID NO: 4779 - DNA, 65 bp, Rattus norvegicus
cactgatagtcttcccgtaagatgctaagtttctagcgtgttggtcgtttgcgttcctaagtgtc

SEQ ID NO: 4780 - DNA, 65 bp, Rattus norvegicus
ggcttcaagaactcaacatcagaccacagagtagcttcacagggacccaaaggagcagaacttgt

SEQ ID NO: 4781 - DNA, 65 bp, Rattus norvegicus
tgacaggaagaagaccttgtggccagagtatatgtcagctaccagaccctcttgatgtttctgac

SEQ ID NO: 4782 - DNA, 65 bp, Rattus norvegicus
ctagagtccgttactttgtcccttccctatctatctgctgtatcccagtcttaagtcgaaaggta

SEQ ID NO: 4783 - DNA, 65 bp, Rattus norvegicus
tttctcagactgtgctagtcccagaacacatacctgttcctcccgtaactgtcacctgtggcctt

SEQ ID NO: 4784 - DNA, 65 bp, Rattus norvegicus
cctgttcctgtctgcgggttaggtgctactattcccctcatgatagtctgtgtagtaaagcaggc

SEQ ID NO: 4785 - DNA, 65 bp, Rattus norvegicus
tgctgctgtccacttctgagttcgtcggcgcgctggacttaatagcaacgactcaagaggttctg

SEQ ID NO: 4786 - DNA, 65 bp, Rattus norvegicus
ggccgttgcacttgttccccagtgtgtgaactcggagatgagtttacaccaccactgttagttca

SEQ ID NO: 4787 - DNA, 65 bp, Rattus norvegicus
aagagctatcaatctgtcaatcctgtcagtgccggagctggtcgcctcttgtgcgcaggcctcct

SEQ ID NO: 4788 - DNA, 65 bp, Rattus norvegicus
ccggagtatgccaactatactgtccctgaagatgcaacaccagatgcaggagaagatcccaaagt

SEQ ID NO: 4789 - DNA, 65 bp, Rattus norvegicus
atccctgaaggagatcaccgaaaagtatccagaatggctacagagtcaccaggagtctattcccc

SEQ ID NO: 4790 - DNA, 65 bp, Rattus norvegicus
gaattaagctgtggtggggcatgcttttgttatatcccagctcttgggagacagagataagtggg

SEQ ID NO: 4791 - DNA, 65 bp, Rattus norvegicus
ttttcgaactggaaaggaaagcccgtctgtgagaggaggcagctatgaaggccaaagcggactag

SEQ ID NO: 4792 - DNA, 65 bp, Rattus norvegicus
ggggatggaatctgctttgacagctagcaaagtgacacgctgttcttgatgacagcaattcaggg

SEQ ID NO: 4793 - DNA, 65 bp, Rattus norvegicus
atggtcaaggcaaccacgtcccgtcctactacggaaactcggtcagggctacggtgcagaggtat

SEQ ID NO: 4794 - DNA, 65 bp, Rattus norvegicus
ccttgtttgactaagtcaataatcagaatcagcaggtttggagtcagattggcagggatcagcag

SEQ ID NO: 4795 - DNA, 65 bp, Rattus norvegicus
gaggctgtttacacaaggctctcccactcaccagctgttgagtttgtgaggaagacaggatctta

SEQ ID NO: 4796 - DNA, 65 bp, Rattus norvegicus
agactgagggcagctgctagagatgaaaatccttgcccaatggagggagcctgtcacatcaccat

SEQ ID NO: 4797 - DNA, 65 bp, Rattus norvegicus
atcttgctcctgttcaagccacccaagtaccacccagatgtgccctttgtcaagagggtgaagac

SEQ ID NO: 4798 - DNA, 65 bp, Rattus norvegicus
ggacaaatgagtgtgcctaaggccatgagatgtttcctaatgcagaaggaatctgttgtacgttt

SEQ ID NO: 4799 - DNA, 65 bp, Rattus norvegicus
actttgccgaggtggtttctgaagggtgaattctggttgagaaccaggaaggctctgtctttggg

SEQ ID NO: 4800 - DNA, 65 bp, Rattus norvegicus
ccaagccaacctcaaattccctatgtatctctaggtcccctgcctccttacacactcactaaacg

SEQ ID NO: 4801 - DNA, 65 bp, Rattus norvegicus; identical to SEQ ID NO: 1

SEQ ID NO: 4802 - DNA, 65 bp, Rattus norvegicus
cccgcttggaacaaacagattcaccaaagaatgttcaagtcagactgggaaaggaaacccatgtt

SEQ ID NO: 4803 - DNA, 65 bp, Rattus norvegicus
gcacgaggtttattgtaatgtcctcatcttccactgacctcatcaacccagcaggtcctgtccct

SEQ ID NO: 4804 - DNA, 65 bp, Rattus norvegicus
ccctccgctccagactccaagctcctgctcccagcctactgacctagctctccccagcctgctct

SEQ ID NO: 4805 - DNA, 65 bp, Rattus norvegicus
gtaccaggagtctgaacggttccacagtagcctttacaaccagaaccatcactgggcttacccta

SEQ ID NO: 4806 - DNA, 65 bp, Rattus norvegicus
cctgggctttgttattagtcaagcctttcatcatcatgaccatgaatagacagtgtaaaagagga

SEQ ID NO: 4807 - DNA, 65 bp, Rattus norvegicus
agtttctcttctgataccttaccgttctttggcatagcttgcacagaagggcctgatcgatgcag

SEQ ID NO: 4808 - DNA, 65 bp, Rattus norvegicus
aagaggaactggctgagtgtttccgcatctttgacaggaacgcagacggttacattgatgccgag

SEQ ID NO: 4809 - DNA, 65 bp, Rattus norvegicus
cacctatttagtggaactctctagcctcctggttcggaatgtcaactatgagatcccctctctga

SEQ ID NO: 4810 - DNA, 65 bp, Rattus norvegicus
acagactggagtctcacggccattccccagaagtgtctcggtttcactgaccacggatgtttcat

SEQ ID NO: 4811 - DNA, 65 bp, Rattus norvegicus
ccccgccgtgacgacttgcaatatagtcggcattggcaatttttgacagtctctacggagactgg

SEQ ID NO: 4812 - DNA, 65 bp, Rattus norvegicus
gtttagcgcaggaagaaggtgcccaagaaatggaccgcaatgatgagaccgtatttcaggccgta

SEQ ID NO: 4813 - DNA, 65 bp, Rattus norvegicus
ctcacttcctttacagagttaatgggatccatgatgcaaactccattagcagttttatgctggcg

SEQ ID NO: 4814 - DNA, 65 bp, Rattus norvegicus
aggtctcatgacctagacgaagaagagtgccccaaatacccctccaaaataagacctgccctggt

SEQ ID NO: 4815 - DNA, 65 bp, Rattus norvegicus
tatgtgaaagttgtggagaagtgggcttcagagttaaggctgacaggaagactgatgttcatggg

SEQ ID NO: 4816 - DNA, 65 bp, Rattus norvegicus
atacgatgatgctgtgattccatgatgctgtgatgtaggactggggcctatcaagggtgactgag

SEQ ID NO: 4817 - DNA, 65 bp, Rattus norvegicus
tattacagtggcatgatagtgacctgtgcagtcactgagctgtaggagtgaggcatgtgctgcac

SEQ ID NO: 4818 - DNA, 65 bp, Rattus norvegicus
aacgagcgcactgctcaccaactcgatcacagtgtatgacctcagtcaggcgcttctaaacagta

SEQ ID NO: 4819 - DNA, 65 bp, Rattus norvegicus
caggctcaaagttctgatggaactgcagagtcttgagcgctgagcgggtctcaggtatggatctt

SEQ ID NO: 4820 - DNA, 65 bp, Rattus norvegicus
agggagacaactcccaggccagtgatctatttcagtcctggcttgtcaccctagaggcaagggtt

SEQ ID NO: 4821 - DNA, 65 bp, Rattus norvegicus
caagagaaccagctcagaggacaacctctacctggctgtgctcagggcctccgagggcaagaaag

SEQ ID NO: 4822 - DNA, 65 bp, Rattus norvegicus
tgtttccctctctggtagtcgtgggtcatgttgtcagtctggctgctgtatggcactggcgtaag

SEQ ID NO: 4823 - DNA, 65 bp, Rattus norvegicus
agaaattcagagtcctggtcaagagcaacctaggaaacgggtgttcacggaaacagatgatgcag

SEQ ID NO: 4824 - DNA, 65 bp, Rattus norvegicus
cctaaccgttctcctactcctgtcctcaggtctaggctgctgtgaccattgattctcccaagtta

SEQ ID NO: 4825 - DNA, 65 bp, Rattus norvegicus
ctcctctcagcacagtatgagacactgtctgacagtgacgactgagctgcacaggagagcactct

SEQ ID NO: 4826 - DNA, 65 bp, Rattus norvegicus
cataactttcacccaagtcttgccagtggtttcaagaaagccaaacaagaagaagcccagacacc

SEQ ID NO: 4827 - DNA, 65 bp, Rattus norvegicus
aacgtgttctaatagcctaaacgatggtgcttggtgagtcgtggttctaaaggtaccaaacgggg

SEQ ID NO: 4828 - DNA, 65 bp, Rattus norvegicus
aggacagctgccactacctgctgtactcactcatcttcgtcaactcctacccagttacaatgagt

SEQ ID NO: 4829 - DNA, 65 bp, Rattus norvegicus
gtactgaatgtcatcaggttttagaaatggaagattcccagatggctggtcgttgacacttttca

SEQ ID NO: 4830 - DNA, 65 bp, Rattus norvegicus
ccggacttgaccatcgacgactcatattggtaccgtattgaagcatcaagaaccgggagaaatgg

SEQ ID NO: 4831 - DNA, 65 bp, Rattus norvegicus
tttcattatcccgttatgatggagcaggatccagagagcacccaatttacccagacccagcgagg

SEQ ID NO: 4832 - DNA, 65 bp, Rattus norvegicus
ggaacttatgatggtgtcgactgaaggaggtctttggattttgcttgcagttttgttctgaagag

SEQ ID NO: 4833 - DNA, 65 bp, Rattus norvegicus
cttgagccatcctgctgattctctgagcttccccacttcctgcttgacttcttctctgcacatat

SEQ ID NO: 4834 - DNA, 65 bp, Rattus norvegicus
cacaacactgacatttccagaacactgacaacagaaccagtctctgtcaagaacggttgaggagc

SEQ ID NO: 4835 - DNA, 65 bp, Rattus norvegicus
ctggaaggtggccttgagttaggcatccttggttgaatcctgtcccactgaacaggtgttaactt

SEQ ID NO: 4836 - DNA, 65 bp, Rattus norvegicus
cacactgccctctggccattggtgtgtgctcctacatgtgggctctttcatcagagtaaacataa

SEQ ID NO: 4837 - DNA, 65 bp, Rattus norvegicus
ttggagttgaccagtgacaatgaccgcctgcgcaagcgggtggaacagctgagccgtgaactgga

SEQ ID NO: 4838 - DNA, 65 bp, Rattus norvegicus
gtaagctgactcccgactcggtctagtgtaccaggaaccctttgcagacttccctcggaaatttc

SEQ ID NO: 4839 - DNA, 65 bp, Rattus norvegicus
agggtctacttgaagctgctgtcctggccatctggacgtcttgcatcagcccactcagatactca

SEQ ID NO: 4840 - DNA, 65 bp, Rattus norvegicus
aatgttggcgtgatgatggaggcaatatttaacagtgaaagctgtcaacagccatcctaaacatc

SEQ ID NO: 4841 - DNA, 65 bp, Rattus norvegicus
gtcatgtccccaaccctgttgctagggcataaacttctggatgaagatcgtggtcgtagttcttg

SEQ ID NO: 4842 - DNA, 65 bp, Rattus norvegicus
agcactcggacgcatcgtctgtagtctcgcctattccgatctccttggacggtctgcttattctt

SEQ ID NO: 4843 - DNA, 65 bp, Rattus norvegicus
tgtcctgttcccagacccctctccagacacagacaaatgaagcaagatggccctcaccagagcat

SEQ ID NO: 4844 - DNA, 65 bp, Rattus norvegicus
gttattcgtggcctgaagaagtccagaaaatacagaccaaagtcaatcagtaacacaacagctag

SEQ ID NO: 4845 - DNA, 65 bp, Rattus norvegicus
ttttatagccatgggatgggacatcaccactgtgtactctcagctgctggctttgtccttcccgg

SEQ ID NO: 4846 - DNA, 65 bp, Rattus norvegicus
taacccccagcctaagtgaccagctacagtcggaaaccatcagcaagcaggtcattgttccaaca

SEQ ID NO: 4847 - DNA, 65 bp, Rattus norvegicus
acttatggaagaacacagcagtgttagccaggtcccgtgtgtacagcacaccccatgcacatcct

SEQ ID NO: 4848 - DNA, 65 bp, Rattus norvegicus
gcagggtgagtccaagcagccccgacccgaccatggtggggctttggcctcagccaaactgccag

SEQ ID NO: 4849 - DNA, 65 bp, Rattus norvegicus
gtgagctccgtgcgctctagacatggctgcagaattcggccgagtagagcacgactgctctttca

SEQ ID NO: 4850 - DNA, 65 bp, Rattus norvegicus
aacgtgagagaagaaccagctgttcagttcaactcaggaactctggccctaaacaggaaggccaa

SEQ ID NO: 4851 - DNA, 65 bp, Rattus norvegicus
tatcatcgcctctagtcgcaactgcagcagtcatgatcagacgtaaggcaactgaatgcaagggc

SEQ ID NO: 4852 - DNA, 65 bp, Rattus norvegicus
gaaattggcttgctttatatgcggttcagtcagcagagaggagcctgcgtgctctgtagtagata

SEQ ID NO: 4853 - DNA, 65 bp, Rattus norvegicus
tgggacacatcagtcaacgtgggcagttcagtctgggttcgttcctttctctgttctcatctggc

SEQ ID NO: 4854 - DNA, 65 bp, Rattus norvegicus
ccctagcttagagctcagactgttccttacacaatggtctgggcatagcaccccttaagcatgct

SEQ ID NO: 4855 - DNA, 60 bp, Homo sapiens
tcctggtatgacaacgaatttggctacagcaacagggtggtggacctcatggcccacatg

SEQ ID NO: 4856 - DNA, 60 bp, Homo sapiens
ctttcctacacttaaatacctcgtgtatggtgcaatcagaccacaaaatcagaagctggg

SEQ ID NO: 4857 - DNA, 60 bp, Homo sapiens
agagtgcggtacaggaccacgccagacattgtgtcacgcatcacgcagtacatcgcaggg

SEQ ID NO: 4858 - DNA, 60 bp, Homo sapiens
aaaggggaaacgtctcccagatcgctcccttggctttgaggccgaagctgctgtgactgt

SEQ ID NO: 4859 - DNA, 60 bp, Homo sapiens
aatgagttgaagtactcggaaccacgaccctggagcagcacagattcagacagctctctt

SEQ ID NO: 4860 - DNA, 60 bp, Homo sapiens
cagccccagagaccagaactgatccagagctggagaaagaagccgaaggctcttagggag

SEQ ID NO: 4861 - DNA, 60 bp, Homo sapiens
gctgcgaggaaattgacttagacaaacacaagagcatccaaagaaagaaaacagaggtgg

SEQ ID NO: 4862 - DNA, 60 bp, Homo sapiens
atagtcacacgtatgtacagactgaggctctggggtgaggtccctatccagaatgcatct

SEQ ID NO: 4863 - DNA, 60 bp, Homo sapiens
ggcatcacagatcattgtggacttggcacgctatgttcaggaactgaaacaggagaggaa

SEQ ID NO: 4864 - DNA, 60 bp, Homo sapiens
ccgcaataaatccagctctcatcaggactcctccagaatgtccagtgttggagattataa

SEQ ID NO: 4865 - DNA, 60 bp, Homo sapiens
cagaaaacatccgtgtttcctcagcaaagaagaccgaggagatgctttccaaccagatgc

SEQ ID NO: 4866 - DNA, 60 bp, Homo sapiens
gtcctggtggaagaagtactgctgtttcgtatgatgctggcaagacacccagaaaggcta

SEQ ID NO: 4867 - DNA, 60 bp, Homo sapiens
caatgagaaggaaacctcatctttgcatagcccatgcctcatggagaggtgacatcatac

SEQ ID NO: 4868 - DNA, 60 bp, Homo sapiens
ttttgggggtgatggtgtaattgttaacctcatttccgtttcctacctgtttgcttcccc

SEQ ID NO: 4869 - DNA, 60 bp, Homo sapiens
gggaaaccagtcaacttggggctgtgggacacagcgggtcaggaggactacgatcggctg

SEQ ID NO: 4870 - DNA, 60 bp, Homo sapiens
ggagacggagctgtaggtaaaacttgcctactgatcagttacacaaccaatgcatttcct

SEQ ID NO: 4871 - DNA, 60 bp, Homo sapiens
gaggtgtgccatctaaggtgtctccaggtgctgatgtttctccaacttgctttgatcctg

SEQ ID NO: 4872 - DNA, 60 bp, Homo sapiens
tcccctgcctccaggaccctgttgctatggtgacacagcgtttctaggacagaggggcct

SEQ ID NO: 4873 - DNA, 60 bp, Homo sapiens
cactatggatgcacagcaggacagacccaagtcccaagactgcctgggcctactggccaa

SEQ ID NO: 4874 - DNA, 60 bp, Homo sapiens
tgaatggatgaagcggaagatagaatgccccatttgtcggaaggacattaagtccaaaac

SEQ ID NO: 4875 - DNA, 60 bp, Homo sapiens
caccactcttgtgcagtcatcctaaatataggttcagagcatctcctgtgaatgacatat

SEQ ID NO: 4876 - DNA, 60 bp, Homo sapiens
ggggaaattcaccttcgatgttgagaaatcggagattcagactttccacctgcagaatga

SEQ ID NO: 4877 - DNA, 60 bp, Homo sapiens
cagcgaatgcaaagaaatcttgggacagaacctaaaatggctcctcaggagaatcagctt

SEQ ID NO: 4878 - DNA, 60 bp, Homo sapiens
tgaaacaggaagaggacggcaccaagttgggggtgctggatgaaagagacgaggggtgat

SEQ ID NO: 4879 - DNA, 60 bp, Homo sapiens
ccgcacaggatttcctaagacgagagggatttagccaagagcacagacttggattccttc

SEQ ID NO: 4880 - DNA, 60 bp, Homo sapiens
gtgaaggccaagaagcccatccagactaagttccgaatgccactcttgaactgggtggca

SEQ ID NO: 4881 - DNA, 60 bp, Homo sapiens
aaaatgaacgcctgtagagacactctataccaggcctgagtgcaggtcttggcgcctttg

SEQ ID NO: 4882 - DNA, 60 bp, Homo sapiens
tcaggaggccaacggtcctgctgatggctacgcagccattgcccaggctgacaggctgac

SEQ ID NO: 4883 - DNA, 60 bp, Homo sapiens
aggcttggccactggatgttttcactaactacactctacaagtgaactccttgcccaggc

SEQ ID NO: 4884 - DNA, 60 bp, Homo sapiens
ttcctacccaacaatgtcttcttatcaggtgccaatgacccagggttctcaaggactgcc

SEQ ID NO: 4885 - DNA, 60 bp, Homo sapiens
ggtaccactcccagtcaccccgagtcatcctccagccagatgtgcacccaggcaactgct

SEQ ID NO: 4886 - DNA, 60 bp, Homo sapiens
caagagtggtaatggcgtctgtatgatcttcggagcctgctgcatcggacctcggccagt

SEQ ID NO: 4887 - DNA, 60 bp, Homo sapiens
caccagctacaaggcacagaatggaagttcaagcaaagccaccccatccacagcaaaaga

SEQ ID NO: 4888 - DNA, 60 bp, Homo sapiens
ggtacgtctcccccaaactgatcatcgttagggtgttaaacacagacgaggaaacacacg

SEQ ID NO: 4889 - DNA, 60 bp, Homo sapiens
cagttccagctattcttcagatgctctggattttgagacggagcacaaattggaccctgt

SEQ ID NO: 4890 - DNA, 60 bp, Homo sapiens
gtataattggattctaatactgtcatctcaagaagtgtatggtttaaagaagtgtattgg

SEQ ID NO: 4891 - DNA, 60 bp, Homo sapiens
tttccgctactgaccagttcatccagctttccacacagttgttgctgcctattgtggtgc

SEQ ID NO: 4892 - DNA, 60 bp, Homo sapiens
tgctgctggctgctccctggttgctgggtgcaaagtgctgggttctgggtttctggattc

SEQ ID NO: 4893 - DNA, 60 bp, Homo sapiens
aacggcgtaccaggtttggttacaaggggctcgaatgtggagtgagttatacgactagga

SEQ ID NO: 4894 - DNA, 60 bp, Homo sapiens
ctcaactgccagggaaggctaaggaaatggggatttgagcacaacaggaaagcctgggag

SEQ ID NO: 4895 - DNA, 60 bp, Homo sapiens
agtctaattccaagctaaagttggtgcgtagcctggcagtgtgtgaggagtcctccaccc

SEQ ID NO: 4896 - DNA, 60 bp, Homo sapiens
aaacagcaaccagagttccgtgtctgacgtctatcagcttaaggtggacagcagcaccaa

SEQ ID NO: 4897 - DNA, 60 bp, Homo sapiens
gatcccaaatgacaggttcacttctgaggttgctatgagggtgatggaatgtactgcctg

SEQ ID NO: 4898 - DNA, 60 bp, Homo sapiens
ttttggaatgcgagctcccaccagaagaaggttccggcacgaatcccatccccacgtctg

SEQ ID NO: 4899 - DNA, 60 bp, Homo sapiens
gcacactgctataacttccccactgcaaacattccagttttggcattacgaagaagtagc

SEQ ID NO: 4900 - DNA, 60 bp, Homo sapiens
gctcagtactacacagtgacagatgagcatcacagatccgaagaggaactcctggtcatc

SEQ ID NO: 4901 - DNA, 60 bp, Homo sapiens
ggaggagcagctttacactgatgaagtgttagacatcgagatcaatgaacctttagatga

SEQ ID NO: 4902 - DNA, 60 bp, Homo sapiens
gggttgacctgagctgaaggacatgaacttccacgtgaaatagccccagggccgggcaca

SEQ ID NO: 4903 - DNA, 60 bp, Homo sapiens
tccaccttctacactgtccagtacagacctggctttgacttggtcgtatcaccgctggtc

SEQ ID NO: 4904 - DNA, 60 bp, Homo sapiens
atgatcaaggtctcagaggggaagtaccgtgtgggggactcgagcctgctcatctttgtg

SEQ ID NO: 4905 - DNA, 60 bp, Homo sapiens
aggccctccattcctggtttctgtagcttgcattcttgttgtctctgatgcatgccctgc

SEQ ID NO: 4906 - DNA, 60 bp, Homo sapiens
cattcagtcgagaccatatgcattttctgtgctgtttgtacttgaggtatgtaacatttg

SEQ ID NO: 4907 - DNA, 60 bp, Homo sapiens
tgagaagggcctggaggctgtggcctgcgacaccgaaggcttcgtgccaccaaaggtcat

SEQ ID NO: 4908 - DNA, 60 bp, Homo sapiens
gaactgaggagtggaaaacggagttccacctttgcataggagtctgctttcatttctttc

SEQ ID NO: 4909 - DNA, 60 bp, Homo sapiens
aattgtttggtgtctttccgtcccactacagtataggcccggttcagacagaggccttgt

SEQ ID NO: 4910 - DNA, 60 bp, Homo sapiens
gtagcgcagcccatgctcttctgtactgtcatgcccgtctctggaatgtccactcccaga

SEQ ID NO: 4911 - DNA, 60 bp, Homo sapiens
ggcaggtcaagagagattccatgcattgggtccaatttactacagagattcaaatggagc

SEQ ID NO: 4912 - DNA, 60 bp, Homo sapiens
gcctctgctcccatctctctctttgcctcatagatttagctatgttgggaagcacatgct

SEQ ID NO: 4913 - DNA, 60 bp, Homo sapiens
cccgggttacctgtatctgaaggacggttctggggcataggaaacacatacacttccata

SEQ ID NO: 4914 - DNA, 60 bp, Homo sapiens
catggcacagaatatcagtattccggccaggcctcagagacgtggcatatcaatatgtga

SEQ ID NO: 4915 - DNA, 60 bp, Homo sapiens
gagcccatgctctagtcacctacattttgctacctcccatctcgtgtggcatctcacata

SEQ ID NO: 4916 - DNA, 60 bp, Homo sapiens
cacgtcagcatgttccaggtggtccaggagcagtccaacagggagtctgacttgttcttt

SEQ ID NO: 4917 - DNA, 60 bp, Homo sapiens
gaaactctgaatccgaccagtgtaggtgattacattagcctttgaagtcaacacaaagtt

SEQ ID NO: 4918 - DNA, 60 bp, Homo sapiens
atgctgacatgaccacatccgtggatttccaggaagaagcaaccatggataccacgatgg

SEQ ID NO: 4919 - DNA, 60 bp, Homo sapiens
atgtagggagctcggttggtgatttctcgggtttctggcctttccagacccttgtaattg

SEQ ID NO: 4920 - DNA, 60 bp, Homo sapiens
ctgaagggccaggacagtttgcatgggctgagttataccagctagaccaggaatagaaca

SEQ ID NO: 4921 - DNA, 60 bp, Homo sapiens
aggaaacagtgctttccgatgagactcagcccaccatttctcctcacctgggccttctca

SEQ ID NO: 4922 - DNA, 60 bp, Homo sapiens
tcagaccttgtcctggctgctcaggggcttaattctgccttttgatgcagtattcctgag

SEQ ID NO: 4923 - DNA, 60 bp, Homo sapiens
tcgcctaagaggctggaacatgtcctggagaagtcattgcattgctctgtgctcaagcct

SEQ ID NO: 4924 - DNA, 60 bp, Homo sapiens
gtaacaatctggctgctgactaccctattggacaactccaatattagagaacatttccac

SEQ ID NO: 4925 - DNA, 60 bp, Homo sapiens
gggtgagtgtgtctttgcatgtttcctttgctgtggtgggagatagtttgactgaacccc

SEQ ID NO: 4926 - DNA, 60 bp, Homo sapiens
tggaggagaaacaaggtgtctccaagagacatgttaggataagcaggtctttgcaccaag

SEQ ID NO: 4927 - DNA, 60 bp, Homo sapiens
aactgttcccaaatgggatagccacatcagagctgccctttccattgagcggaggaagaa

SEQ ID NO: 4928 - DNA, 60 bp, Homo sapiens
ctgcatcctcattaatggtgcccagtacttcaggcgcatcagtgagtctggcatcaagaa

SEQ ID NO: 4929 - DNA, 60 bp, Homo sapiens
tcaagctgtcagaccacaccatcaatgatccagagcaacacagccaaaagctggaatcgc

SEQ ID NO: 4930 - DNA, 60 bp, Homo sapiens
gtggggcacaacagaaacgaaagagcagcacagaacagacaaaaacgaggaagaccgtac

SEQ ID NO: 4931 - DNA, 60 bp, Homo sapiens
ctggggacacaagcaggcgccaatggtatctgggcggagctcacagagttcttggaataa

SEQ ID NO: 4932 - DNA, 60 bp, Homo sapiens
agagagaggacgacagaaaatgcagtgagaaggaggacacgtcaagaacaacgcaaggga

SEQ ID NO: 4933 - DNA, 60 bp, Homo sapiens
cggcagcagcatggctcacgggcccggcgcgctgatgctcaagtgcgtggtggtcggcga

SEQ ID NO: 4934 - DNA, 60 bp, Homo sapiens
ctgaaaagtggtccatcagcaaacacactcaactcagccctacggatgcttttgggacca

SEQ ID NO: 4935 - DNA, 60 bp, Homo sapiens
aaggaagtaggtagggtgtgcttacccaccaaaatagtgactggtaacacttggtctttt

SEQ ID NO: 4936 - DNA, 60 bp, Homo sapiens
ggtacttgtggcttgctagtatgtttttatgataatctcgggcattgtttgcattgtgtt

SEQ ID NO: 4937 - DNA, 60 bp, Homo sapiens
cctggacacagatgacctctacgggagtctaaacgccaagatttagtctcaggattaacc

SEQ ID NO: 4938 - DNA, 60 bp, Homo sapiens
agttagcgatccctcaacccctgcactgcgctagtcctaaagaggaaatgtctctacgct

SEQ ID NO: 4939 - DNA, 60 bp, Homo sapiens
agcaagatgttgcaagccaccagagctattcccaaaagaccctgattgcactggtcacct

SEQ ID NO: 4940 - DNA, 60 bp, Homo sapiens
tgcacgagtacctggtcgcctgtatcaagaacatcttcggggacatgctgtgtcctcgtg

SEQ ID NO: 4941 - DNA, 60 bp, Homo sapiens
cccctgtccttcttagttgtccaggtgaactactaaagctctctttgcataccttcatcc

SEQ ID NO: 4942 - DNA, 60 bp, Homo sapiens
agaggagccaagtgcgccatatgcacacaccaggaagagcttctccatcagtgacaaact

SEQ ID NO: 4943 - DNA, 60 bp, Homo sapiens
cgtgtaagagccatgcgagcagctcgttcccttggagaaagaactgtaacagaactgata

SEQ ID NO: 4944 - DNA, 60 bp, Homo sapiens
tctggaacaactggtgctgatggctcccttggcgaaggagtctgtttttcaacccaggaa

SEQ ID NO: 4945 - DNA, 60 bp, Homo sapiens
tcgtgggtcactacagggagaaaatccaggtcatgcagttcctggcccatcaactgtatt

SEQ ID NO: 4946 - DNA, 60 bp, Homo sapiens
tctgttagcaaaaggtgtgacaagcaacctgcctatgccccaaccaccacagaccaccag

SEQ ID NO: 4947 - DNA, 60 bp, Homo sapiens
gaagcattttgggcttaagattgccagcagcacacatcagatgcagtcattgttgctatc

SEQ ID NO: 4948 - DNA, 60 bp, Homo sapiens
ggaagctcctgccagcagagccgaggggccagttgccgtcgtcgttaatggacacacgga

SEQ ID NO: 4949 - DNA, 60 bp, Homo sapiens
gctttgttaacagtgaatctactggaccaatgaggtgcttcttccggttttgtccgcgct

SEQ ID NO: 4950 - DNA, 60 bp, Homo sapiens
cgccctgtttgtctgagccctttggagatttaggttgagtcatgagaaccggtcattgga

SEQ ID NO: 4951 - DNA, 60 bp, Homo sapiens; identical to SEQ ID NO: 4855

SEQ ID NO: 4952 - DNA, 60 bp, Homo sapiens
acgcaaggccatcctttcgccaaaagagccaccatcttggagtctagctcgagatattgt

SEQ ID NO: 4953 - DNA, 60 bp, Homo sapiens
aaaacagggcctttccctacaggacacgccccagagctgtggcagattgcaggagccatc

SEQ ID NO: 4954 - DNA, 60 bp, Homo sapiens
gctgtctgtctggagaggagtcctattggtggatgcagttcacagcagcagtagaattca

SEQ ID NO: 4955 - DNA, 60 bp, Homo sapiens
cgatgaaaacagaaccgacttctccccttgtggaattacaagagatttcgactgtggaag

SEQ ID NO: 4956 - DNA, 60 bp, Homo sapiens
cctcacaccaagaatcttgcctaaccctgtcagagtgcctaatatcctgtggtgattatg

SEQ ID NO: 4957 - DNA, 60 bp, Homo sapiens
ccaacagcaaccaaatcatgtgacatctgtctctctgtggaatagctagaagcaaccctg

SEQ ID NO: 4958 - DNA, 60 bp, Homo sapiens
gtctagatggcacaaaccacctctcagggaataaaccctaagacatcactcaaggaggac

SEQ ID NO: 4959 - DNA, 60 bp, Homo sapiens
tctttctgctgctcaccatcgtcttctgccagatcctgatggctgaagagggtgtgccgg

SEQ ID NO: 4960 - DNA, 60 bp, Homo sapiens
ggagcctctgcgcaagcagtttctgtctgaggagaacatggccacccacttctctcaact

SEQ ID NO: 4961 - DNA, 60 bp, Homo sapiens
ttgtgctcagaggtgaggagcaggagtccatgaagtctggccaccacccactagcagcgt

SEQ ID NO: 4962 - DNA, 60 bp, Homo sapiens
gaattcaacagcagatgcttgcgatgcagtgcgtcaggtgattctcactcctgtggatgg

SEQ ID NO: 4963 - DNA, 60 bp, Homo sapiens
gtcctggtagcagctgttgagtaactttcattggaggttgggaaggaagtgaggagaaag

SEQ ID NO: 4964 - DNA, 60 bp, Homo sapiens
cccaggaaaaccactcacagcctgacactgggctgactttcttgaagatcctcatccaat

SEQ ID NO: 4965 - DNA, 60 bp, Homo sapiens
agaatgagagtggctctttctgatttgcaagggcactatggtcagggcaaaggcatggcc

SEQ ID NO: 4966 - DNA, 60 bp, Homo sapiens
cagatctgcttccagattgatttttagagcaccatcactttcacattcctgattctgatt

SEQ ID NO: 4967 - DNA, 60 bp, Homo sapiens
atgcacacgaggcacaaatgggaatcaagggtggatgtgctgtgatgaagagaagtcctg

SEQ ID NO: 4968 - DNA, 60 bp, Homo sapiens
tgccctcaaagaacatgcttccagatcatctcgaaagatttgcactatcggaatagctcc

SEQ ID NO: 4969 - DNA, 60 bp, Homo sapiens
ttgcagacctgcctgaacgcacatgacatagcacttgccgatctgcgtgtgtccagaagt

SEQ ID NO: 4970 - DNA, 60 bp, Homo sapiens
ccaagcacagatagagtggcaagggcatgtccagcttactgaccatctgcattgagctca

SEQ ID NO: 4971 - DNA, 60 bp, Homo sapiens
ctcacactttctgagctgagatccacagtaaggaatacactgtttcatcttcgccctagg

SEQ ID NO: 4972 - DNA, 60 bp, Homo sapiens
agcatcctggagaagctcatcaaaacatgcccggtgtggctgcagctgagtctgggccag

SEQ ID NO: 4973 - DNA, 60 bp, Homo sapiens
tctcagatcaggacctggaccaggcgctcagtgacgaagagctcaacgctttccagaaat

SEQ ID NO: 4974 - DNA, 60 bp, Homo sapiens
gggtcggaggtcttacccaacagattgacgcggcgttagtattggccgtgtacccgaaaa

SEQ ID NO: 4975 - DNA, 60 bp, Homo sapiens
gatgttttcctctgctccagctccaagaagtcagcacacctgcattttagctctgcatgc

SEQ ID NO: 4976 - DNA, 60 bp, Homo sapiens
gcaactgttgctgtggaaactgtagctgttgctgtgaaaactgatgcggatgagctttag

SEQ ID NO: 4977 - DNA, 60 bp, Homo sapiens
aacccaaagaaccatctcccaaacaggatggcattggctagttgtaggtaaaactccacc

SEQ ID NO: 4978 - DNA, 60 bp, Homo sapiens
atcaccaagccggacatgaccatccggcagcagatcatgcagctgaagatcatgaccaac

SEQ ID NO: 4979 - DNA, 60 bp, Homo sapiens
ttctcacagtcccagttaccagttcctcacactgctgcttcttggatgctaagtcctgag

SEQ ID NO: 4980 - DNA, 60 bp, Homo sapiens
cagccactccagaggccatgcttcgtttcttgccagatttggctttcagcttcctgttaa

SEQ ID NO: 4981 - DNA, 60 bp, Homo sapiens
cgggacttggggccaatacggaaaccctaccccttccatgctcatctcactgcccagtga

SEQ ID NO: 4982 - DNA, 60 bp, Homo sapiens
ttgccgcctctcccggtacctgctgctgctcccggggcttcgggaaatgcgagagtctga

SEQ ID NO: 4983 - DNA, 60 bp, Homo sapiens
gggtgtacagtaatagaggcttgctgccttcaggaaatggacaggtcagtttgttgtagg

SEQ ID NO: 4984 - DNA, 60 bp, Homo sapiens
cagacgaatgtaccgccagtattatcagcagtcaacaagcaccttcctctccacagaagc

SEQ ID NO: 4985 - DNA, 60 bp, Homo sapiens
cacctgtagctccctccctacctgtaattccagtctttgtgcatttgtcatctgccctta

SEQ ID NO: 4986 - DNA, 60 bp, Homo sapiens
gagccttcacctctgttgctgaggaaatggtagaatgctgcctatcacctccagcacaat

SEQ ID NO: 4987 - DNA, 60 bp, Homo sapiens
atgctggcctctgtgctcctgctgtcttttcctgtttctgtttgcgtttgacttagtagc

SEQ ID NO: 4988 - DNA, 60 bp, Homo sapiens
atttctcatggccaaacgatgggtctcgctttgacctgactgtccgcacgcagaagcagg

SEQ ID NO: 4989 - DNA, 60 bp, Homo sapiens
ctcggatggaggttactctttcaagtatgagacagtgcccaaccttctcacgcagcactg

SEQ ID NO: 4990 - DNA, 60 bp, Homo sapiens
aaatcatgtgaaagggttgctgctgtcagccttgcccactgtgacttcaaacccaaggag

SEQ ID NO: 4991 - DNA, 60 bp, Homo sapiens
tccatcaatgaactcccagcagcttttgaatgcagcgacagctttagcctggacatgact

SEQ ID NO: 4992 - DNA, 60 bp, Homo sapiens
gacgggcctatatccctcctacaaagttcgagagaagatagaaacggtcaagtaccccac

SEQ ID NO: 4993 - DNA, 60 bp, Homo sapiens
aagaaaggtggtggcatctcctttaactcgacagtcacgctgacccagtgctcggaaaag

SEQ ID NO: 4994 - DNA, 60 bp, Homo sapiens
tttctctcgacgtttgtagtgggtgggcggaagttggttggcctttattcctcttctggt

SEQ ID NO: 4995 - DNA, 60 bp, Homo sapiens
gtcttaattcagcaactcgagaaggcgcttaaagaaatagattcccactgccatctcaga

SEQ ID NO: 4996 - DNA, 60 bp, Homo sapiens
ggtaccggcaaccacgggcagctctcagggaatctccgtcgtgaggccagaggctccagt

SEQ ID NO: 4997 - DNA, 60 bp, Homo sapiens
aagcccagaggttgggccttattgcttagcctgtttgggataaagagtcaacttgaggcc

SEQ ID NO: 4998 - DNA, 60 bp, Homo sapiens
tctgcacatcaagcagaacgtccccatcatccgtgacaacctggcttccacacgcaagta

SEQ ID NO: 4999 - DNA, 60 bp, Homo sapiens
aactacaccagacccgtgttcctgtgcggaggggatgtgaagggggaatcaggttacgtg

SEQ ID NO: 5000 - DNA, 60 bp, Homo sapiens
aaggatcttcttcagacagcactgctggagttaaggagtagctcgaggtgaagctggatg

SEQ ID NO: 5001 - DNA, 60 bp, Homo sapiens
agttgtggtaggccagccttgaagccatcgcacagtctagaaacttgtgtagctgagtgt

SEQ ID NO: 5002 - DNA, 60 bp, Homo sapiens
aatgaagcaacagtcactccttgccaagcaaccagccactcccacgagagcttctgaatc

SEQ ID NO: 5003 - DNA, 60 bp, Homo sapiens
gtaattgcatgacaaaccttatggaaaaggggtgacctagtagagtgtaatggggaaggg

SEQ ID NO: 5004 - DNA, 60 bp, Homo sapiens
tcaacctgacttccatgcaagactcggaaatgatccttacggccactttccacttctact

SEQ ID NO: 5005 - DNA, 60 bp, Homo sapiens
ccgccttgaggctgctataaagggcaatcaggaaagtgtcaaagtcaagataccaacatc

SEQ ID NO: 5006 - DNA, 60 bp, Homo sapiens
agcagccgggccccacagaccctcatgcactctcttacgtgccattctccccagactttt

SEQ ID NO: 5007 - DNA, 60 bp, Homo sapiens
aggtaaaagctgctgaaacatgtcaagagccgaaggaattcagattgccgaaagaccatc

SEQ ID NO: 5008 - DNA, 60 bp, Homo sapiens
aacctgaagtggtaggagagagtgactcagaagtagaaggagatgcttggcgcatggaac

SEQ ID NO: 5009 - DNA, 60 bp, Homo sapiens
ggctaccagacactggaagacttcaaagagctgcgagaaacacacctcaatgagctgaac

SEQ ID NO: 5010 - DNA, 60 bp, Homo sapiens
atcccgcccaagcaccggtgacagccaggaccacccgctaggttagactcacaaataata

SEQ ID NO: 5011 - DNA, 60 bp, Homo sapiens
cagacagcatcaactgggcaagtggtgaggatgaccatgtagttgccagagcagaatatg

SEQ ID NO: 5012 - DNA, 60 bp, Homo sapiens
tgccagggagacgcttctcgtctttgccacacccacggttggaatgagaccagtgaattt

SEQ ID NO: 5013 - DNA, 60 bp, Homo sapiens
gatccaggacgaggagctgaagaagttctgttcccggatctgtaaactgctgcaggcgga

SEQ ID NO: 5014 - DNA, 60 bp, Homo sapiens
ttgtaagtgccccaagagaaaggtgaccaacctgttctgcttcgaacatcgggtcaacgt

SEQ ID NO: 5015 - DNA, 60 bp, Homo sapiens
tggagacgagaccacgagattgatgagtttgccttgggagtcggtaagaaggtgaagcca

SEQ ID NO: 5016 - DNA, 60 bp, Homo sapiens
actagtgcatctgggtctcagatggcaagcggcatcagcctggtctccttcaacagccga

SEQ ID NO: 5017 - DNA, 60 bp, Homo sapiens
tgccttcacctactagtgctacgaagaccagtccattgaacagttctggcagctctcagg

SEQ ID NO: 5018 - DNA, 60 bp, Homo sapiens
ctggcttctcaaacggccgaagttgcctcttttaggaatctctttggaattgggagcacg

SEQ ID NO: 5019 - DNA, 60 bp, Homo sapiens
aggaagaccagactgagcgatttggaatccacatcctaatgctgccacaagctgcatgca

SEQ ID NO: 5020 - DNA, 60 bp, Homo sapiens
ctagccatcggcttcattggtggaatcatcgttgtggttatgcgaaaaatgtcgggaagg

SEQ ID NO: 5021 - DNA, 60 bp, Homo sapiens
cacacaggcagctgagaaaggttctcttgcttttccagtatcttcctaaggatggagccc

SEQ ID NO: 5022 - DNA, 60 bp, Homo sapiens
agggcaaggggaacgggaaataggtctcctaggtgcctgaagcgctgagcaacctgggta

SEQ ID NO: 5023 - DNA, 60 bp, Homo sapiens
agtgctctgcagctccgtgctgtccatctggatgtgtcgagagggcctgcttctcagcca

SEQ ID NO: 5024 - DNA, 60 bp, Homo sapiens
aatgggaagcaagaaaacggtaactcaagaggacagaggctggtgaggaggtaaagcagg

SEQ ID NO: 5025 - DNA, 60 bp, Homo sapiens
gacaaacgtatgaacagcattaaaccagaccttatccagctgagaaagacgagagaccaa

SEQ ID NO: 5026 - DNA, 60 bp, Homo sapiens
caacccgtttcgcgcctatatgaacctggacatatggactaccacagcgaataggaatgc

SEQ ID NO: 5027 - DNA, 60 bp, Homo sapiens
cacatcaacattcactgtttccagttcctcagcaatgtccaaaagtgtcattccatcttc

SEQ ID NO: 5028 - DNA, 60 bp, Homo sapiens
agtgttgccacctggatttgctgcattgctctgctgagctgtattgaaaccatgactggg

SEQ ID NO: 5029 - DNA, 60 bp, Homo sapiens
cactcttcaactttgatgttcatgacgatgtgcggttgctcagtgacgccactgtggaga

SEQ ID NO: 5030 - DNA, 60 bp, Homo sapiens
caaaggaggagctgccaaacttcagataataacggactttgatatgacactcagtagatt

SEQ ID NO: 5031 - DNA, 60 bp, Homo sapiens
attgagggttcggaggctcaggtcagacactgcttggcattgctgggctgtcacaaaact

SEQ ID NO: 5032 - DNA, 60 bp, Homo sapiens
agcttacctgctatgtccttgggttcgttaaccatcgctgaaccggctatgatcgccgaa

SEQ ID NO: 5033 - DNA, 60 bp, Homo sapiens
tgagtgccaggctgactgtcgtctgcaagcagtgccctctcctcagaagaggtctaaatt

SEQ ID NO: 5034 - DNA, 60 bp, Homo sapiens
ctcggggaactcctttccaagctgacctcagttttctcacaagaacccagttagctgatg

SEQ ID NO: 5035 - DNA, 60 bp, Homo sapiens
gtgtccacaagcctcaagccttgtttcaggtcaccctcaaatcacactctctttaggcaa

SEQ ID NO: 5036 - DNA, 60 bp, Homo sapiens
tgggcctctgtgctaccgctctcgtcagctacttgattcgcctacacaatgaaattgtct

SEQ ID NO: 5037 - DNA, 60 bp, Homo sapiens
gcagatctcagtcatcttccctgttggatatgggaaacatgtctgcctctgatctcgatg

SEQ ID NO: 5038 - DNA, 60 bp, Homo sapiens
caatgtggtgagaaagtttggtgtcaccgacttcccctcttgctacctgctgttccggaa

SEQ ID NO: 5039 - DNA, 60 bp, Homo sapiens
ggactgccctgaatttagcaccaattgcattaacgcacatctcttccacaactaacagac

SEQ ID NO: 5040 - DNA, 60 bp, Homo sapiens
gacccaggtttccaagtcactgcaagtcactaggatcttccttcaggctctgaatcttgg

SEQ ID NO: 5041 - DNA, 60 bp, Homo sapiens
aggcctcagtggctcttgtcaccccttctcgcggctgaacctttggagccatggtgaatt

SEQ ID NO: 5042 - DNA, 60 bp, Homo sapiens
aaaagtcaatatgtggtcggccccatgtgtgcaagttgctacggtggaagtcaaagggga

SEQ ID NO: 5043 - DNA, 60 bp, Homo sapiens
aatggtactactggaaaggctcaggctattcgctcaaggccacaaccatgatgatccgac

SEQ ID NO: 5044 - DNA, 60 bp, Homo sapiens
tgccaagcacacccagagctacccaacagattcctatggagttcttgaattccagggtgg

SEQ ID NO: 5045 - DNA, 60 bp, Homo sapiens
caggacctttgtccaggggctgactgtgggcagagaagttgcaaaccgagtttccaaggt

SEQ ID NO: 5046 - DNA, 60 bp, Homo sapiens
agctactcactgcgtgcctctcgcatgatgatacggcctttggacatctaacgagcagct

SEQ ID NO: 5047 - DNA, 60 bp, Homo sapiens; identical to SEQ ID NO: 4855

SEQ ID NO: 5048 - DNA, 60 bp, Homo sapiens
tcgccttagcgcccactgctcctgtgacagcagggataacacactgcaagtggacatcaa

SEQ ID NO: 5049 - DNA, 60 bp, Homo sapiens
tggttcagtactgtctatcaaaggtagattttacagagaacagaaatcggggaagtgggg

SEQ ID NO: 5050 - DNA, 60 bp, Homo sapiens
ttcagtggcagcatccaatgaacaagatcctacaagctgtgcaggcaaaacctagcagga

SEQ ID NO: 5051 - DNA, 60 bp, Homo sapiens
gctcaagatcaagacacaggcataggactagaagcaggagtaggacaaggagtaggagtc

SEQ ID NO: 5052 - DNA, 60 bp, Homo sapiens
gggtgaggcaggagaggttcatgtagtcaacagcttcctttgacccctcatcttatgtct

SEQ ID NO: 5053 - DNA, 60 bp, Homo sapiens
ggggtatggaattggctgaggatcaaacgtatgtaggtgaaaggataccaggatgttgct

SEQ ID NO: 5054 - DNA, 60 bp, Homo sapiens
ggtgagcttatcctcctgcagcgtccctggttccaaacccaccttcgagctctcagccga

SEQ ID NO: 5055 - DNA, 60 bp, Homo sapiens
tgtctcctttgtctattcctgtcccagtgaaagttttacttaggttgttaatgcctgcgg

SEQ ID NO: 5056 - DNA, 60 bp, Homo sapiens
gtccagagggttattcaggaggctggtggtggcatgatgagtgtggagaaaacaacctaa

SEQ ID NO: 5057 - DNA, 60 bp, Homo sapiens
gcactggtggtccggttcctcaccaaacgattcatcggtgactatgaaagaaatgcaggt

SEQ ID NO: 5058 - DNA, 60 bp, Homo sapiens
gtgttgccacatctgcaaacttcctgggagagtaatggggattcgagtgcttcgattatc

SEQ ID NO: 5059 - DNA, 60 bp, Homo sapiens
ccttttacgattcgtctgagcgaatagcttcccgagatgagaggatctcagtgccagcaa

SEQ ID NO: 5060 - DNA, 60 bp, Homo sapiens
gtgagatgaagctgtcagtcaatgcccgtgcccgcattgtggctgaagagttccttaaga

SEQ ID NO: 5061 - DNA, 60 bp, Homo sapiens
caagaacagcagagccaagagatcaattgggaacaaatcccggaaggaatcagtgatttg

SEQ ID NO: 5062 - DNA, 60 bp, Homo sapiens
ggaccgctccatcaaaggactgaaggagcatttccataagagcagttcttcctctggggt

SEQ ID NO: 5063 - DNA, 60 bp, Homo sapiens
gtgtcagaacaatcctagtgaaatcatccaaagtacgtatcaggagacacagaacaaaag

SEQ ID NO: 5064 - DNA, 60 bp, Homo sapiens
cgaaagcctttcacgtaaggaaagccaatcggataaaagagtgtctcagcaagggaacgt

SEQ ID NO: 5065 - DNA, 60 bp, Homo sapiens
aaaaggacattcagaacatgatcgtggaggagtgtgggtgctcatagagttgcccagccc

SEQ ID NO: 5066 - DNA, 60 bp, Homo sapiens
agttctactgggccagagaaaatgaaggaaggccacaagctcagagcccacatcaacact

SEQ ID NO: 5067 - DNA, 60 bp, Homo sapiens
cacagcttctcagttgccatttgatttcccaacttgtccggaagtgtttccagaatactg

SEQ ID NO: 5068 - DNA, 60 bp, Homo sapiens
gcaccgccttctattgacctggaatccatcatctgtccagctgttggttactggagttgt

SEQ ID NO: 5069 - DNA, 60 bp, Homo sapiens
acttatacagctagggctgctcagtaactgccccaaccactaccacgtccccaagtgcaa

SEQ ID NO: 5070 - DNA, 60 bp, Homo sapiens
taggttgcagtggggctagagcacgatagagggaaacccaacattgggagttagagtcct

SEQ ID NO: 5071 - DNA, 60 bp, Homo sapiens
ggagcatcatccgcaaggacttcaggtctcccttggctggagatgaggatccacattaaa

SEQ ID NO: 5072 - DNA, 60 bp, Homo sapiens
cctctctggacaagagccaccctttcactgtgcatatgatgctgatgcaattcctccatc

SEQ ID NO: 5073 - DNA, 60 bp, Homo sapiens
tccccagtgtatttgacccacaattggtggaactcatagacacagagggctggctgtact

SEQ ID NO: 5074 - DNA, 60 bp, Homo sapiens
gatttggaggcagctctcctcattttccccaaaacagggaaagcaaggagtaaattcctc

SEQ ID NO: 5075 - DNA, 60 bp, Homo sapiens
gcatacttagtgagcgccatcctgctgaacgtgtatttcagtgtttcacttactggacgg

SEQ ID NO: 5076 - DNA, 60 bp, Homo sapiens
gttccaagtgtgtgtgcaatgttccgttcatctgaggagtccaaaatatcgagtgaattc

SEQ ID NO: 5077 - DNA, 60 bp, Homo sapiens
gccctctccaccctctgattccccgtgaattcttcccaatttagcctatctccttaaacc

SEQ ID NO: 5078 - DNA, 60 bp, Homo sapiens
ctgtggccaatgtgtgttttctctgggaggttaaggttatctgtccattgccttgtacga

SEQ ID NO: 5079 - DNA, 60 bp, Homo sapiens
gccctcacgataatcaacggctgttcctggaatacggatttgtttctgtccataatcctc

SEQ ID NO: 5080 - DNA, 60 bp, Homo sapiens
ctgcaacacaatgttacataacagtgaacaacatgcaacaatcagagggaaggtgagcgt

SEQ ID NO: 5081 - DNA, 60 bp, Homo sapiens
gatgaggaatccccagcccttgaggcagaggtgccgagtgactgccatgcttcgcccgtc

SEQ ID NO: 5082 - DNA, 60 bp, Homo sapiens
aggagtccccagcagctggagccgcaagaatgaactgcaaagagggaactgacagcagct

SEQ ID NO: 5083 - DNA, 60 bp, Homo sapiens
aaaccagtcccaccgtgtatcctgtggacaatctccctgcaagattcacccatttccatg

SEQ ID NO: 5084 - DNA, 60 bp, Homo sapiens
accgcctcgaactccaactggaaatgcgccttcttctgagtctgacatagacatctccag

SEQ ID NO: 5085 - DNA, 60 bp, Homo sapiens
ggttttggccttggagtaggaattgccttcttggcaactgtggtcactcaactgctagta

SEQ ID NO: 5086 - DNA, 60 bp, Homo sapiens
gccataaatcagcagagtcatttcattctgggtgatcctgacacaccattgctatgttag

SEQ ID NO: 5087 - DNA, 60 bp, Homo sapiens
tcatgtgcaggagttagtagctcagaaagccagatgcccactggtctccctgtcatacat

SEQ ID NO: 5088 - DNA, 60 bp, Homo sapiens
gagcaacaccatcatcaggaaagccttgacagacagccctttacaactctggacacactt

SEQ ID NO: 5089 - DNA, 60 bp, Homo sapiens
tttcggggaaaacacccctcagccaagtggataatagcgttcagcagcactcaccttctg

SEQ ID NO: 5090 - DNA, 60 bp, Homo sapiens
gaagtgcctttcctgctttcttcgtggtaggttctagcacattcctctagcttcctggag

SEQ ID NO: 5091 - DNA, 60 bp, Homo sapiens
cgtctggggtttccgttgcagtcctcggaaccaggacctcggcgtggcctagcgagttat

SEQ ID NO: 5092 - DNA, 60 bp, Homo sapiens
cccacccagtcaaggacaaatggatctatgtgtcacatctggcagccaacaaggtctttg

SEQ ID NO: 5093 - DNA, 60 bp, Homo sapiens
ccttcctaatgaaaccatctgagcgagtccctggagcaactatgcttcttgctaagttgc

SEQ ID NO: 5094 - DNA, 60 bp, Homo sapiens
ggagctttgtgaagaatgccacctcgtaccctcctatgtgcacccaagatcccaaggcgg

SEQ ID NO: 5095 - DNA, 60 bp, Homo sapiens
agaacatggagagatttcttcatgcgattatgccatcgacctttatccctctctatacaa

SEQ ID NO: 5096 - DNA, 60 bp, Homo sapiens
tccgcttcaaaaggaagctgcctaagtacctgctctttaccagcccccaggagaacccct

SEQ ID NO: 5097 - DNA, 60 bp, Homo sapiens
tgccaggcacaagtgtcccgccgcatctccttcagcgcgagccaccgattgtacagtaaa

SEQ ID NO: 5098 - DNA, 60 bp, Homo sapiens
tgtctggcgcacctatctggacatgaaccgcttcgatctggccaaagagtattgtcgaga

SEQ ID NO: 5099 - DNA, 60 bp, Homo sapiens
ttcaagaaagacctgatggggtaatcctgttaattccagccacatagaatttggtgaaaa

SEQ ID NO: 5100 - DNA, 60 bp, Homo sapiens
ccaccccactgagagctgctcctttgggggaatgtttggcaacctttgtgttacagatta

SEQ ID NO: 5101 - DNA, 60 bp, Homo sapiens
ccctgaatgtaggcttgcagtgactttctgacccatccacctgtttttttgcagattgtc

SEQ ID NO: 5102 - DNA, 60 bp, Homo sapiens
caataaccacacttcctttaagggactgtatctttagttcatgacccatcatcagctgcc

SEQ ID NO: 5103 - DNA, 60 bp, Homo sapiens
gaaagatgggactcctcctttatttcagcatggagggttttaaatggaggatttcctttt

SEQ ID NO: 5104 - DNA, 60 bp, Homo sapiens
acagggaagagcctaggttccaggtgccttttcagttgctgacttctcttatggacatag

SEQ ID NO: 5105 - DNA, 60 bp, Homo sapiens
gagctgaagaaagctctggctggctgacaggatccctgtgttgtaattggtccctccttt

SEQ ID NO: 5106 - DNA, 60 bp, Homo sapiens
actttgtgcagtgttcatcaaagagagagacagtgaacctaaaactgaacctggaataaa

SEQ ID NO: 5107 - DNA, 60 bp, Homo sapiens
cgcattttccagtgactaagggtgttgaaccactcgtgccttcctgtgcctatttgacac

SEQ ID NO: 5108 - DNA, 60 bp, Homo sapiens
catggagcagccacttagcattgaattgcactaccctgagctaaacgtgtctgtgctttc

SEQ ID NO: 5109 - DNA, 60 bp, Homo sapiens
attcgtctggcaatctccatggctacgtggctgagggtggagccaaggacatccgaggtg

SEQ ID NO: 5110 - DNA, 60 bp, Homo sapiens
ggaaggaaatgaaccggagcacagcaaagaacacaaagtagtgggacaaaacgagttgtg

SEQ ID NO: 5111 - DNA, 60 bp, Homo sapiens
gaaaagcaagtttgaagtcctggtgtctgatccagtatttccttgtggcgatatagtagc

SEQ ID NO: 5112 - DNA, 60 bp, Homo sapiens
gtcctgtggcggtacactggaacccgaccatcgaatcttgcgaacaacacgatacttgtt

SEQ ID NO: 5113 - DNA, 60 bp, Homo sapiens
gtctgccacactggccgctgttcgaccaggaggagcaatacctgcagctgaacctacagc

SEQ ID NO: 5114 - DNA, 60 bp, Homo sapiens
agctcataccactcagtttactcaacctggctggtattacctgaagacagttggccattt

SEQ ID NO: 5115 - DNA, 60 bp, Homo sapiens
acaggctattcagtgctgcagatggtccaggctatggagaaggcctctgggaagaagatc

SEQ ID NO: 5116 - DNA, 60 bp, Homo sapiens
tctccatccgcacctacacctatgcagacacccctgatgatttccagttgcacaacttca

SEQ ID NO: 5117 - DNA, 60 bp, Homo sapiens
gcagacagatcaagagaggacaacacaaagaggaaaatcacgacgaagaagaaacaacac

SEQ ID NO: 5118 - DNA, 60 bp, Homo sapiens
cagcacagatttctatgcacctttactctttcctcaacccttgtctctatctgtacataa

SEQ ID NO: 5119 - DNA, 60 bp, Homo sapiens
ttacctacaaccccttcatgagagtgagggagaagacggtgcagcagcacgcaggtgaga

SEQ ID NO: 5120 - DNA, 60 bp, Homo sapiens
gctgacattcactgagtgcctactctttgccaatccccgtgctaagcgttttatgtggac

SEQ ID NO: 5121 - DNA, 60 bp, Homo sapiens
gttcgggaaagtgtcaactacctagtatctcagcagaatatgcttctgattcctacatcg

SEQ ID NO: 5122 - DNA, 60 bp, Homo sapiens
ccctggtacctgaaccgtatatctatcctatggccctgactggaaggatttctacgtagt

SEQ ID NO: 5123 - DNA, 60 bp, Homo sapiens
ggcccttgttcagtcattttctctaaggccttggaagcaaacatcttctggcatatggct

SEQ ID NO: 5124 - DNA, 60 bp, Homo sapiens
catgagatacccaatgaagtcagaaaaaatacatggcttaggatggagacctaaagtgcc

SEQ ID NO: 5125 - DNA, 60 bp, Homo sapiens
cggctcgtgaccatttccaaggatccatatgaagcatgtgatggtgcccatgctgttgtt

SEQ ID NO: 5126 - DNA, 60 bp, Homo sapiens
atggacagaccctatatcctggccaaggcaacaattcctatgtgttccctggagttgctc

SEQ ID NO: 5127 - DNA, 60 bp, Homo sapiens
ccagaaggtgatcccacggcgaacactggccactggctaccagtattccttcccagagct

SEQ ID NO: 5128 - DNA, 60 bp, Homo sapiens
cccaagagcatatacgttgcccatatccaaggaagaatcaagattatcaagactagcaac

SEQ ID NO: 5129 - DNA, 60 bp, Homo sapiens
ctgtgcatccgcctgaaagtgttttgccctatatacctcactagccatgctttatgtggg

SEQ ID NO: 5130 - DNA, 60 bp, Homo sapiens
tgttatccacgtgaaatcgcttcctggggtacaagactcgacacaacaatctagatctcg

SEQ ID NO: 5131 - DNA, 60 bp, Homo sapiens
ccgaggtgtggatggatgacttcaagtcccacgtgtacatggcctggaacatccccatgt

SEQ ID NO: 5132 - DNA, 60 bp, Homo sapiens
taggggcggttccagcgggcttcgctaatcggttctatgctcccattggtctgctttaat

SEQ ID NO: 5133 - DNA, 60 bp, Homo sapiens
tgatgtttcccagcctttccacaacctctaccttcccactcaccttccccagctacaaaa

SEQ ID NO: 5134 - DNA, 60 bp, Homo sapiens
tgaccattgtgctcttggctcttgggctggagtaccgtggtgagggagtaaacactagaa

SEQ ID NO: 5135 - DNA, 60 bp, Homo sapiens
cgccttgaatatggcagcatttaaaagtcttcagaccaggcatggtggctcattagccgt

SEQ ID NO: 5136 - DNA, 60 bp, Homo sapiens
actgtgaggtgaacagggactggctccagcctctgttgcacagggtcaaagaggactaca

SEQ ID NO: 5137 - DNA, 60 bp, Homo sapiens
atacttccatgaaagggctaatacgatgcatatactgaagggcaaggactttgaccatgt

SEQ ID NO: 5138 - DNA, 60 bp, Homo sapiens
ctgttcccctgtcctgtgaatggaagcaaagtgctggattgtccttggaggaaacttaag

SEQ ID NO: 5139 - DNA, 60 bp, Homo sapiens
cacaccagagacaagcagagtaacaggatcagtgggtctaagtgtccgagacttaacgaa

SEQ ID NO: 5140 - DNA, 60 bp, Homo sapiens
tgatgtagcacttccaagatggcaccagcatttggttcttctcaagagttgaccattatc

SEQ ID NO: 5141 - DNA, 60 bp, Homo sapiens
atcttggaaatgaagtgtctgatgaagagtgcttgaagagagtgggcctaagtggcgctc

SEQ ID NO: 5142 - DNA, 60 bp, Homo sapiens
tggggtgcagacacccactgcctgatctcacttctgtcagatgctcccatccactattaa

SEQ ID NO: 5143 - DNA, 60 bp, Homo sapiens; identical to SEQ ID NO: 4855

SEQ ID NO: 5144 - DNA, 60 bp, Homo sapiens
gagtatttggcgatcatgaatgatgactgaacagggcttgcaggtgctgatgccagaagc

SEQ ID NO: 5145 - DNA, 60 bp, Homo sapiens
aagagattcagaaggcagacttcaggcagaccctcagcgctttcctcatgggattcgcca

SEQ ID NO: 5146 - DNA, 60 bp, Homo sapiens
tctctgtgaagaggtggccatctatggcttctggcccttctctgtgaatatgcatgagca

SEQ ID NO: 5147 - DNA, 60 bp, Homo sapiens
ttaatgtcctcccctggatccccagtcatactgcagatgtgcaaccctagagaaggcaag

SEQ ID NO: 5148 - DNA, 60 bp, Homo sapiens
tggctagaacctctgttggccagaatagctgagaactacacggctgtcgtaagtccagat

SEQ ID NO: 5149 - DNA, 60 bp, Homo sapiens
gtgagacgtacttggctacagatttctgccttgttttgcgacattgtcccattcacacag

SEQ ID NO: 5150 - DNA, 60 bp, Homo sapiens
gagacatccttcatttgacatttagtagaattcctctttggccacaagaataagcagcaa

SEQ ID NO: 5151 - DNA, 60 bp, Homo sapiens
gtagaaaatcagccagatgctgcctctcaacttaatgtggatgcttctgggaatttagca

SEQ ID NO: 5152 - DNA, 60 bp, Homo sapiens
cttcaatggagtgaaggtgcttcccatccctgtcctctcggacaactacagctacctcat

SEQ ID NO: 5153 - DNA, 60 bp, Homo sapiens
gaaggggctgccaacgaaccagactcagtgaccacgtcatgacagaacagcacatcctgg

SEQ ID NO: 5154 - DNA, 60 bp, Homo sapiens
atacgtttcccagcctctgatggagaaggaacaccattctgataccagaacatggttaat

SEQ ID NO: 5155 - DNA, 60 bp, Homo sapiens
gagtcaacttgagagcgaacttctaacaatgccgcactgtagtgtggctggttctaccac

SEQ ID NO: 5156 - DNA, 60 bp, Homo sapiens
gatccttggaaaaccaactacagaatgtactcttatgtcacagaggagcttccccaactc

SEQ ID NO: 5157 - DNA, 60 bp, Homo sapiens
cctaagccatcctcagagagtccttagcagacaaatggtagatgtatctttgggcagctg

SEQ ID NO: 5158 - DNA, 60 bp, Homo sapiens
tcagcccaagattcttcagtctggactatattgggactgggacttctgggtctccaggga

SEQ ID NO: 5159 - DNA, 60 bp, Homo sapiens
tttctctcgggtgatccggccgagtggccctgggttagcagctgctgcatttccccggct

SEQ ID NO: 5160 - DNA, 60 bp, Homo sapiens
gggcctccagactaataggaagcatttctgtaaccaacctgccacccactgattcagaaa

SEQ ID NO: 5161 - DNA, 60 bp, Homo sapiens
ccgtgcgaaggagtttgcacagaaacacgacatccccaaggcctacggctcctatgagga

SEQ ID NO: 5162 - DNA, 60 bp, Homo sapiens
tcaggcacgcatgtgtaccagtggactttgaagaggtgcacgtgagttccaatgctgatg

SEQ ID NO: 5163 - DNA, 60 bp, Homo sapiens
attgttctgccacacaaggagctgagccgaagcttcaccaaccagatcatcctctgagta

SEQ ID NO: 5164 - DNA, 60 bp, Homo sapiens
attggcttgtagctggcatgcatccaagtccataggtcctgcctcttcaatcctggcttt

SEQ ID NO: 5165 - DNA, 60 bp, Homo sapiens
ccttggacaactggaatgtttcagtttgggaaatctggatgccaaacgagattggggcca

SEQ ID NO: 5166 - DNA, 60 bp, Homo sapiens
tgtctacaatgtcagcaagacagcgctgctgggtctcactagaacactggcattggagct

SEQ ID NO: 5167 - DNA, 60 bp, Homo sapiens
cgggcctgctacgatgaaggcaaacgtgttgcagagaccatgtgctatgcctacatgaag

SEQ ID NO: 5168 - DNA, 60 bp, Homo sapiens
cctttacgcgaatgtccgaccatgtgtctctatcgaaggctataaaaccccttacaccga

SEQ ID NO: 5169 - DNA, 60 bp, Homo sapiens
gcttttcaccattgggttctgctgggctcagtattccccaaatacacaacaaggacggac

SEQ ID NO: 5170 - DNA, 60 bp, Homo sapiens
tttcccatcagcaaggggagtgctggcctgacacatcagaagaccctggacttgtcatta

SEQ ID NO: 5171 - DNA, 60 bp, Homo sapiens
cactgctccattctggatgttcttggtctcagggcctaaggatcattttctcggatgcat

SEQ ID NO: 5172 - DNA, 60 bp, Homo sapiens
cttgagttcgataagccagagaagctgctcagccggaaggacagcgtcttcgcctccttc

SEQ ID NO: 5173 - DNA, 60 bp, Homo sapiens
cctgcactactatgagaccgttcgcatggcagccatcaaagagtcctggacgcacaatat

SEQ ID NO: 5174 - DNA, 60 bp, Homo sapiens
tacttcaatctcaccatgtcctaccgcagcgactccgacatcttcacgccctacggctgg

SEQ ID NO: 5175 - DNA, 60 bp, Homo sapiens
ttcctctagattgcacaagggacagtgcctttaaccaagcgaggagtccaaagctcagga

SEQ ID NO: 5176 - DNA, 60 bp, Homo sapiens
acctggaatttctcgtatgaatgacttgaccatcatccagactacacagggattttgcag

SEQ ID NO: 5177 - DNA, 60 bp, Homo sapiens
acgttgtttcgtatttctgaaggaagaactcaagctccgggaagtgatggctggggatgg

SEQ ID NO: 5178 - DNA, 60 bp, Homo sapiens
ctagtttattccagattgattagcctgctcagtcacaagttggcctaagaccccggatca

SEQ ID NO: 5179 - DNA, 60 bp, Homo sapiens
aagctcctcaggaaacaggattgctgatgtctgggaacctgatcaccagcttctctggag

SEQ ID NO: 5180 - DNA, 60 bp, Homo sapiens
tgtcagagatatggatgacgcctatgacagactgacaaggcaccgctgcaggatggtcga

SEQ ID NO: 5181 - DNA, 60 bp, Homo sapiens
gcttgcagggaagcatctgtcttgtcattccaggtgccagaatcctctcagagtcattga

SEQ ID NO: 5182 - DNA, 60 bp, Homo sapiens
agggttggaagttgtgtagcattcactcccttacctactggcattcccagtgccctctgt

SEQ ID NO: 5183 - DNA, 60 bp, Homo sapiens
gtgaataaagcacatttccacccaattttgtcatccgagagagagcacaaactgcaggcc

SEQ ID NO: 5184 - DNA, 60 bp, Homo sapiens
aggccctgacaagccaattgacagatgaagagctagcccaagggagactttacccaccgc

SEQ ID NO: 5185 - DNA, 60 bp, Homo sapiens
taaaaagggcatagatccagctatccagactatcttgtgagagaataagctcaccccagc

SEQ ID NO: 5186 - DNA, 60 bp, Homo sapiens
ttcaacctctttgtgttcagcccagacacaggtgctgtctctggctcctaccgagttcga

SEQ ID NO: 5187 - DNA, 60 bp, Homo sapiens
caacaaaatggggacttctttgggcagatgctaggtcagttgttttcacctaatatcctc

SEQ ID NO: 5188 - DNA, 60 bp, Homo sapiens
aggcagtgtggaatactgtggatgtctgtgcagagcctttgccggcactgaaggcatgca

SEQ ID NO: 5189 - DNA, 60 bp, Homo sapiens
ggggcattggcatgtggaatgcaaactgtcttgactactctggagatgctgtagccaaac

SEQ ID NO: 5190 - DNA, 60 bp, Homo sapiens
aacctgtgtcttctctcttttgtggacaggatggtgattgctcacaccaaagccttggac

SEQ ID NO: 5191 - DNA, 60 bp, Homo sapiens
agcgcgtatggagtggaaacgcttgtagggcttcaccaggtaagcggtgttgaactttct

SEQ ID NO: 5192 - DNA, 60 bp, Homo sapiens
tttgaagattgtcacacgagccaagtctcagcggattgcaaagttcgcctttgactatgc

SEQ ID NO: 5193 - DNA, 60 bp, Homo sapiens
aacccttctctgttggtctgccttctgctgaaagactcgagaaccaaccagggaagctgt

SEQ ID NO: 5194 - DNA, 60 bp, Homo sapiens
aaggtgtcatgcccggtgtgtgcaggaggaaactaacagttcagtaaactctgccttgac

SEQ ID NO: 5195 - DNA, 60 bp, Homo sapiens
gaggtgtttggggctctatcgcgcatctctcctaccaagctgggcaagagcttttaggag

SEQ ID NO: 5196 - DNA, 60 bp, Homo sapiens
tgaggcagagagcaaggcctctaagctctttggcaactactcccgggatcagcccatctt

SEQ ID NO: 5197 - DNA, 60 bp, Homo sapiens
gtgctgtcaaatggcgtccagttctcgcgcatcagtccagatggtgaagaaggctacccc

SEQ ID NO: 5198 - DNA, 60 bp, Homo sapiens
gtaactgtggacctactgcgtgccacgtgttttcatagactcatcccatgctggcaacag

SEQ ID NO: 5199 - DNA, 60 bp, Homo sapiens
ggaatgaggggaagccattttccagtgacttgcaatccaggctgttctcagcgttttgag

SEQ ID NO: 5200 - DNA, 60 bp, Homo sapiens
agcagtttcccaagaacaagatgtgatggcatctgctgctgaaaccctgatgaggaccag

SEQ ID NO: 5201 - DNA, 60 bp, Homo sapiens
cgcccaagtcagaagggaggtctcgtggtgcttaaggcctgtgactacagtgacccaaat

SEQ ID NO: 5202 - DNA, 60 bp, Homo sapiens
gatggacaaagcaaaggagcatggccacagcacaccacagatggcagcaacatttgcaaa

SEQ ID NO: 5203 - DNA, 60 bp, Homo sapiens
cacagttccacttattcaggaaatggaatccagaatcatgatcccactgaagacctcgcc

SEQ ID NO: 5204 - DNA, 60 bp, Homo sapiens
acctctctcttcacccctcaatggagtccacgatcgagcatatgttgctgtggatgggat

SEQ ID NO: 5205 - DNA, 60 bp, Homo sapiens
aactacaactggtcacttacagcagccgaagctaccagaccaacacagcagacacagtcc

SEQ ID NO: 5206 - DNA, 60 bp, Homo sapiens
cccacgtacggtcaaaaggcaaacatgagagtctgctatagtgagatggagatggctagc

SEQ ID NO: 5207 - DNA, 60 bp, Homo sapiens
gaccagcgctacgtcctttacccgaacaactttcaattccagtacgatgtcagctcggcc

SEQ ID NO: 5208 - DNA, 60 bp, Homo sapiens
aacgaggaccagatggctgtggagaagctctctgacgggatccgcaagtttgccgctgat

SEQ ID NO: 5209 - DNA, 60 bp, Homo sapiens
gctgctatgccctgggcactgtgggctatcgtgtggccacttttcatgactgcgaggacg

SEQ ID NO: 5210 - DNA, 60 bp, Homo sapiens
aaccttaagctgttttcttagcccctcagccagctgccattagcttggctcttaaagggc

SEQ ID NO: 5211 - DNA, 60 bp, Homo sapiens
ctgaacaaatcttgggtgggtgaaggcctggctggaagagggtgaaaggcagggcccttg

SEQ ID NO: 5212 - DNA, 60 bp, Homo sapiens
tatcacctaactggggagctctatgtgggacaactgattgcagaggccagtgctagtgat

SEQ ID NO: 5213 - DNA, 60 bp, Homo sapiens
ctctatcttctgttctctgaagatgacttgctctccctggaagactgggtgttcaacacc

SEQ ID NO: 5214 - DNA, 60 bp, Homo sapiens
ttatttgcggatgttccctggagaggtcgctttgtgaagaaaccatcagcaggctgtgag

SEQ ID NO: 5215 - DNA, 60 bp, Homo sapiens
aaactttctggtgtgagaggagatgccaaggcatacagtgaataaaagccttgtctctga

SEQ ID NO: 5216 - DNA, 60 bp, Homo sapiens
caagcagcccttgtgttgagtcaggttggccctgtctagggtggaacagaaggacagatg

SEQ ID NO: 5217 - DNA, 60 bp, Homo sapiens
gataagggaaaaggacagcccctcgaggcgatttaaacatcggcacgagggcgcggccaa

SEQ ID NO: 5218 - DNA, 60 bp, Homo sapiens
ctccccaacagcaggccgagtcccgtagcatccggtagggaaatggtcgtgctttcggtc

SEQ ID NO: 5219 - DNA, 60 bp, Homo sapiens
ctactatgccaccagcactacaaaggcattgatgtagtttggctttctttctatgcagcc

SEQ ID NO: 5220 - DNA, 60 bp, Homo sapiens
gcgagtttgaccccacatgccctcttctgtttgtcttgcaccttgtctaaggaccctaaa

SEQ ID NO: 5221 - DNA, 60 bp, Homo sapiens
agctacagtcatgaacttttggcgtctactgattcctccaactctccaccccacaaaata

SEQ ID NO: 5222 - DNA, 60 bp, Homo sapiens
aggcgtatctcactgaggagaatggtcagattgcggtgtttgatgccaccaatacaaccc

SEQ ID NO: 5223 - DNA, 60 bp, Homo sapiens
catgactgggtttcaacagtaaaggtcttcaactcttgctagtcattggaatcaagccgc

SEQ ID NO: 5224 - DNA, 60 bp, Homo sapiens
agtcatcctttgccacgtgtgttctcgtgtcagaagaagataaacacgccatcatagtgg

SEQ ID NO: 5225 - DNA, 60 bp, Homo sapiens
actcctcgctacacctgagccaggctcttgccaactctgttccagcctatggctttaggc

SEQ ID NO: 5226 - DNA, 60 bp, Homo sapiens
atctaaagccagtggcagtgtatgctcatacttggacagttagggaagggtttgccaagt

SEQ ID NO: 5227 - DNA, 60 bp, Homo sapiens
tgccccttcaggcctgctctcacagtgaaaccacttcaagacagggcaggaagttacctt

SEQ ID NO: 5228 - DNA, 60 bp, Homo sapiens
tccacctttaggaaatgctatctttgctcttctcctactctgccttggcctcactgaggc

SEQ ID NO: 5229 - DNA, 60 bp, Homo sapiens
gcgacaagaattgcctgtgagactcgccaacattctgaaggaaattgatatcctcccgac

SEQ ID NO: 5230 - DNA, 60 bp, Homo sapiens
tgagccagttcactgacgccctggtcaccatccggaaccggcacaacgacgtggtgccca

SEQ ID NO: 5231 - DNA, 60 bp, Homo sapiens
cgtctaaacctctctggagtgaggggaatagattacctgatcatggtcagctcacaccct

SEQ ID NO: 5232 - DNA, 60 bp, Homo sapiens
tctgaaaagtgctcggtacctgcagcaagaacttccagtgaggattgctcaccgcatcaa

SEQ ID NO: 5233 - DNA, 60 bp, Homo sapiens
ccataaggtgcagtaggagcaagagagggcaagtgttcccaaattgacgccaccataata

SEQ ID NO: 5234 - DNA, 60 bp, Homo sapiens
aaactcagctgccaagacctactacatgtctggtggccttcagcctgtgcctatagtctt

SEQ ID NO: 5235 - DNA, 60 bp, Homo sapiens
cccaaagacatgacgacgttccgcagtgcctagacacacttgggacatcggaaaatccaa

SEQ ID NO: 5236 - DNA, 60 bp, Homo sapiens
cattacaagaccacgcctgaagccgatgattggagcaatcccagcagtgaacccagggat

SEQ ID NO: 5237 - DNA, 60 bp, Homo sapiens
agccttcttcacgcgggcctttgaccagattcgcatggccgccatctccgagagcaacat

SEQ ID NO: 5238 - DNA, 60 bp, Homo sapiens
gaggattgtgagtctgggcagtaaatccacagccaacaaacatagaaacgacaaatcacc

SEQ ID NO: 5239 - DNA, 60 bp, Homo sapiens; identical to SEQ ID NO: 4855

SEQ ID NO: 5240 - DNA, 60 bp, Homo sapiens
gcttgttaggatgtcctgtgctgcttgtgatgagagcctccacactgtactgttcaagtc

SEQ ID NO: 5241 - DNA, 60 bp, Homo sapiens
aagaacattcacgagtcctgcatgagccagataggctggaaccgcatcatcgtggagaag

SEQ ID NO: 5242 - DNA, 60 bp, Homo sapiens
tcatcaaccgcgccaagaaggtggcagtcctggtcatgggcaggatgaagcgtgagatca

SEQ ID NO: 5243 - DNA, 60 bp, Homo sapiens
gatcttagcaaagcaatgtctcaagatggtgcttctcagttccaagaagtcattcggcaa

SEQ ID NO: 5244 - DNA, 60 bp, Homo sapiens
agatgcccttcatcctgaaccctataaccctgaggagatctgcaggtgtctgggaattag

SEQ ID NO: 5245 - DNA, 60 bp, Homo sapiens
accttgcagaataacctccagtatgttgccatctctaacctaccagctgccactttccag

SEQ ID NO: 5246 - DNA, 60 bp, Homo sapiens
tgccgggactaaaactttacagcacaacttggcaggacgtggatttcatcacgatgcctt

SEQ ID NO: 5247 - DNA, 60 bp, Homo sapiens
agcagcaaccttccgggcaaacgaccatcagcatatccgctacaacccgctgcaggatga

SEQ ID NO: 5248 - DNA, 60 bp, Homo sapiens
agcttcgcagggatgccctgtggcatcatggaccagttcatctcacttatgggacagaaa

SEQ ID NO: 5249 - DNA, 60 bp, Homo sapiens
ggacactcagcaaattacagtgggtttcagtttttatgctgtgtgctggagttacgcttg

SEQ ID NO: 5250 - DNA, 60 bp, Homo sapiens
acagctgctgcttgtatttcggtacagaagaggtttctttctgcaccaggaggaggcgtg

SEQ ID NO: 5251 - DNA, 60 bp, Homo sapiens
agaacagtaagaggagctgctctcctatctgcactcacccaggccttcacccagacttta

SEQ ID NO: 5252 - DNA, 60 bp, Homo sapiens
atcctctactttgacgtctacgcccagcacctggccttcttcagccgcttcagtgcccga

SEQ ID NO: 5253 - DNA, 60 bp, Homo sapiens
aaccacaaggtgataacgaggtcagcggagcaccagaaaccggctcactagcctcctgat

SEQ ID NO: 5254 - DNA, 60 bp, Homo sapiens
ctaagccaggcaaaggggctgatttgagtaagcctccatgtcgaaaagcaaaggaaatcc

SEQ ID NO: 5255 - DNA, 60 bp, Homo sapiens
ctagttttgagctttagacctcagccttttgtgtggaagaagtcacagctttcttaggct

SEQ ID NO: 5256 - DNA, 60 bp, Homo sapiens
ataaacccttgtgtatgtatcacccaactcactaattatcaacttatgtgctatcagata

SEQ ID NO: 5257 - DNA, 60 bp, Homo sapiens
gccccagtcttatctgtgcctttactgctttgcgcatctcagatgctaacttggttcttt

SEQ ID NO: 5258 - DNA, 60 bp, Homo sapiens
caaggagaagtatcacttttagaggcagaggagcggaaggcagtgggtgtgaccaaaagt

SEQ ID NO: 5259 - DNA, 60 bp, Homo sapiens
cattctgatctcctagaagacagcaaataccgaaaaatctactcctttactcttaagcct

SEQ ID NO: 5260 - DNA, 60 bp, Homo sapiens
ttttagatcctgtctgctgctcactgattatgactgtggacgcgtctccctgcttctctg

SEQ ID NO: 5261 - DNA, 60 bp, Homo sapiens
ggagatgcagtagccgaaaactgcgcggaggcacgagaggccggggagagcgttctgggt

SEQ ID NO: 5262 - DNA, 60 bp, Homo sapiens
gatttatttcctgaaccactacctgtatgacctgaaccacacgctgtacaatgtgcagag

SEQ ID NO: 5263 - DNA, 60 bp, Homo sapiens
atgtctactcgcagaagtcagccatgtatgagaagtatgacgtcagcaacggtggacagc

SEQ ID NO: 5264 - DNA, 60 bp, Homo sapiens
gcacaataagatcctatatcgccagttcaaacaggagttgaaggccaagtaccccaactc

SEQ ID NO: 5265 - DNA, 60 bp, Homo sapiens
ttcccaaagtcagaaagtgaagccagatctcaagggctgatacctgaggcaaggagagct

SEQ ID NO: 5266 - DNA, 60 bp, Homo sapiens
ggaccagtgatgactgatgaatcttatgagcttctgattgatctcggggtccatctgtga

SEQ ID NO: 5267 - DNA, 60 bp, Homo sapiens
tcacaagtgggagatgtgcaccagcattgacaagttttcctggggctatcgtcgtgacat

SEQ ID NO: 5268 - DNA, 60 bp, Homo sapiens
ttcttgagctgcaagctttagctgaggcagtaagtcacacagtagttagttcagcctggg

SEQ ID NO: 5269 - DNA, 60 bp, Homo sapiens
tgcacctgggttatggtaagcactagtccatgagcctgcttggaatcacactggatgtct

SEQ ID NO: 5270 - DNA, 60 bp, Homo sapiens
ctgcaccagaatgatccaggttttagatccacgtcctttgacaagttcggtcatgcccgt

SEQ ID NO: 5271 - DNA, 60 bp, Homo sapiens
gaacctcctcagttccttcacagtgcaaccctgtgtacttggcccgcaacccaatagtat

SEQ ID NO: 5272 - DNA, 60 bp, Homo sapiens
agaaagatcatgcgagctctgctggaggtgatctgcaccttgcacaaactcaacatcgtg

SEQ ID NO: 5273 - DNA, 60 bp, Homo sapiens
tggccatgccatgggcacagcaggtgtatactacgtgatggtcacatctactctttccat

SEQ ID NO: 5274 - DNA, 60 bp, Homo sapiens
ccacgttactgcatactgatccctttcccatgatccagaactgaggtcactgggttctag

SEQ ID NO: 5275 - DNA, 60 bp, Homo sapiens
gctgggctctcacatctatctggttgttcttcaccaccctccaagtcctctgacctaatt

SEQ ID NO: 5276 - DNA, 60 bp, Homo sapiens
ggtggcctgtctttaagcaatgcttttctcttgtgagggaagactgtaacacagctgaac

SEQ ID NO: 5277 - DNA, 60 bp, Homo sapiens
caatgcaggagaggcacagagtgcactgtcattgacatgttacccgactaaggatcactc

SEQ ID NO: 5278 - DNA, 60 bp, Homo sapiens
cagaatgctttgggattaattgggcagccatcgcagaattgtttgtgggcaaagggctgc

SEQ ID NO: 5279 - DNA, 60 bp, Homo sapiens
gggagaccacgggaatgttcagggaaacaatgtcagcttctctgaggaccagaattcatg

SEQ ID NO: 5280 - DNA, 60 bp, Homo sapiens
aactcttgtttcccccataaagttaggcatgaggaggagcactcattaaaggcagaagac

SEQ ID NO: 5281 - DNA, 60 bp, Homo sapiens
cagtgctgccagagtgagtgagtgtaattctcctttcaggtaaagataggctatctcaac

SEQ ID NO: 5282 - DNA, 60 bp, Homo sapiens
ggcacagggttctctgttttgggatgatggagagagtatagacacctatgaaagagacct

SEQ ID NO: 5283 - DNA, 60 bp, Homo sapiens
ggctcatggtcttccagggtttttatcctggctgtctatgaactagggttttctcctgcc

SEQ ID NO: 5284 - DNA, 60 bp, Homo sapiens
ttttatgccccaccgatacactgggaccaccccttaccccggacaggatgaatggatcaa

SEQ ID NO: 5285 - DNA, 60 bp, Homo sapiens
cataaagctgatcacttcagtggcagatgtggtgaacaatgaccctatggttggaagcaa

SEQ ID NO: 5286 - DNA, 60 bp, Homo sapiens
ggagtgatgttcttactctggtggtctgtgcttctgaacacaggctacatgcacacactg

SEQ ID NO: 5287 - DNA, 60 bp, Homo sapiens
taagcttgaccaaagagggtacaatgcccaggagtactacgatcgcattcctgagcttcg

SEQ ID NO: 5288 - DNA, 60 bp, Homo sapiens
tccagcgctatgtcccactaaaggatcaacgtaacgtgagcatgaggttttccaatcagg

SEQ ID NO: 5289 - DNA, 60 bp, Homo sapiens
ctactgtagaagaagtgaacacttacctggaggctcaccttgcagaaccagtgacaatct

SEQ ID NO: 5290 - DNA, 60 bp, Homo sapiens
agctacaagctggagaacctgagctcctctgaaatgggctacacggccaccctgacccgt

SEQ ID NO: 5291 - DNA, 60 bp, Homo sapiens
aatgggagctgtatatcccaccaaagcagaataaatctgtactcgtgcctcatggatcca

SEQ ID NO: 5292 - DNA, 60 bp, Homo sapiens
taaagggctactggtgagattgagatctgagcaggcaaagctcaaaagagagtttggagg

SEQ ID NO: 5293 - DNA, 60 bp, Homo sapiens
agcgatggcccagctctctaggtgggatcgaggtacgaatcacctgttgttcaacatgtt

SEQ ID NO: 5294 - DNA, 60 bp, Homo sapiens
cggggagtttactgtgaaaggaaaagcatctgatacagacctggcagtgatggcagatac

SEQ ID NO: 5295 - DNA, 60 bp, Homo sapiens
acttccacagcagcagaacaagtgcctcctggactgttcacggcagaccagaacgtttct

SEQ ID NO: 5296 - DNA, 60 bp, Homo sapiens
agtgctggcatctccatgactacctggtggacaccttgggcccctatgtgatcaatgtga

SEQ ID NO: 5297 - DNA, 60 bp, Homo sapiens
catgattatgtgcagaactgggagagctacacaggccgctgccctgatgttgaggtggcc

SEQ ID NO: 5298 - DNA, 60 bp, Homo sapiens
ccttctaagacctttgggacctcatggattactttccaaatctgtccaactcaatggtct

SEQ ID NO: 5299 - DNA, 60 bp, Homo sapiens
gcgtgatcttagcctaggtaggccacatccatcccaaaggaaaatgtagacatcacctgt

SEQ ID NO: 5300 - DNA, 60 bp, Homo sapiens
attcttcggtgacactggcattgctgggtggtgatgcccgtcctctggcttgggttaatt

SEQ ID NO: 5301 - DNA, 60 bp, Homo sapiens
tatacctggctatgggagagaccccttgcatgggagggaccccttgctatggccccttta

SEQ ID NO: 5302 - DNA, 60 bp, Homo sapiens
ttcaccttcaacctgggctactcagggaaattcttccacacaggtaccaatgctgaggac

SEQ ID NO: 5303 - DNA, 60 bp, Homo sapiens
aagtactacttcccggtccgcgagctggagcgctcgctgcgcttcgacatgaagggcgac

SEQ ID NO: 5304 - DNA, 60 bp, Homo sapiens
gatggcagagagtgaggtagtggcgagaaagctgactccattcatcagatccagtttatg

SEQ ID NO: 5305 - DNA, 60 bp, Homo sapiens
acaccagcaatggcaccaacgactacataggcagtgtagagaaatggcgttaaatggctc

SEQ ID NO: 5306 - DNA, 60 bp, Homo sapiens
ctggcactgatttgcaataagctaagctcagaaactttcctactgtaagttctggtgtac

SEQ ID NO: 5307 - DNA, 60 bp, Homo sapiens
cgtatctaagatgctgacacagaagctaatgtgacttttcagcttatcaagaggatggcc

SEQ ID NO: 5308 - DNA, 60 bp, Homo sapiens
tggagagagtcatcgtccttgacacggatatcacctttgccactgacattgcagagctgt

SEQ ID NO: 5309 - DNA, 60 bp, Homo sapiens
aagacgtcttggacaactgaagtttaaatatccacagggttttattttgcttgttgaact

SEQ ID NO: 5310 - DNA, 60 bp, Homo sapiens
tcttgttccagggcaagattggactccccatcctgtgcgtgggctctgtgtggaagagct

SEQ ID NO: 5311 - DNA, 60 bp, Homo sapiens
tggtgattcctgggaaggaagcttggctgctcagtttctgagtctggggtgagataatgt

SEQ ID NO: 5312 - DNA, 60 bp, Homo sapiens
taaggtggccaagttctgttatgcagacaagagcctgctcaacaaagccattgaggctgc

SEQ ID NO: 5313 - DNA, 60 bp, Homo sapiens
cttggagaccctggacaatggcaagccctatgtcatctcctacctggtggatttggacat

SEQ ID NO: 5314 - DNA, 60 bp, Homo sapiens
aagatgtttggtatcgacagggatgccattgcacaagctgtgaggggcctcatcaccaag

SEQ ID NO: 5315 - DNA, 60 bp, Homo sapiens
ttccagaatcataggtattgacatcaacagtgagaagtttgtgaaggctaaagccctggg

SEQ ID NO: 5316 - DNA, 60 bp, Homo sapiens
tttgatacagtagaattgcaagtccctaagtccctattcactgtgcttagtagtgactcc

SEQ ID NO: 5317 - DNA, 60 bp, Homo sapiens
aaagcactgtgtacccattaagatatggcattattgaagaaataaagtacatttgaaacc

SEQ ID NO: 5318 - DNA, 60 bp, Homo sapiens
ggattatgagagtgacagacacaggactgaagacagggagaaaatgtgcatggctgtgag

SEQ ID NO: 5319 - DNA, 60 bp, Homo sapiens
tccgtaccattctgatgttttgagacaatacagatgttttcccttgtggcagtcttcagc

SEQ ID NO: 5320 - DNA, 60 bp, Homo sapiens
taacgttgaacttttaagggtctcagtccccgttgattaaagaacagatcctagccatca

SEQ ID NO: 5321 - DNA, 60 bp, Homo sapiens
acagaacgagaaaactagagtttgaccaataagaccaatttctgccatgaagaaccgggg

SEQ ID NO: 5322 - DNA, 60 bp, Homo sapiens
aggtggtcttttggtgccttaatgaagagtcggattttgaagcagccttcagcgtgggag

SEQ ID NO: 5323 - DNA, 60 bp, Homo sapiens
accacttgctacatgacccatgaaaaccctagacttgtgacctgaaataaagaaaatacg

SEQ ID NO: 5324 - DNA, 60 bp, Homo sapiens
agccagtctacattgcccaaacagcaagggttggagagtggcttaagtggaatgcttcag

SEQ ID NO: 5325 - DNA, 60 bp, Homo sapiens
gtgattatctggaagctctaagatgagagcaaatgcctgatcactctggccaaatgtcag

SEQ ID NO: 5326 - DNA, 60 bp, Homo sapiens
cccatcttggttccagctatatcactgacagcatggtagaagactgcgaacctcacttct

SEQ ID NO: 5327 - DNA, 60 bp, Homo sapiens
gctttgcatgagagttgtcaagcgaatccgtaccttcaaaacgccgtaagaccgatgtgt

SEQ ID NO: 5328 - DNA, 60 bp, Homo sapiens
ccattgccataacatcctgctccattccctctaagatgtaggaagaattcggatccttac

SEQ ID NO: 5329 - DNA, 60 bp, Homo sapiens
atcattcagacctctgctcttccaggcaagtgaacatgtagccagtagtcctgcattggg

SEQ ID NO: 5330 - DNA, 60 bp, Homo sapiens
ggtctttgtggattgcatgttgacattgaccgtgagattcggcttcaaaccaatactgcc

SEQ ID NO: 5331 - DNA, 60 bp, Homo sapiens
acggggacgcggtcatcctgggcatgtccagcctggagcagctggagcagaacttggcag

SEQ ID NO: 5332 - DNA, 60 bp, Homo sapiens
tggaatttcccgttggttatgctcatttggaagatagggcctgcactgagctgtggaaac

SEQ ID NO: 5333 - DNA, 60 bp, Homo sapiens
gatcgctacatcgcccccacggtgctggtggatgtgcaggagatggagcctgtgatgcag

SEQ ID NO: 5334 - DNA, 60 bp, Homo sapiens
tgtccctgagaccacggagctgctcaaggagaggttcgaccatatcctgtacacgggcag

SEQ ID NO: 5335 - DNA, 60 bp, Homo sapiens; identical to SEQ ID NO: 4855

SEQ ID NO: 5336 - DNA, 60 bp, Homo sapiens
ttaatgacccgtactgagaccacagcttcttggcctcccttccagctctgcagctaatga

SEQ ID NO: 5337 - DNA, 60 bp, Homo sapiens
gatggggtcaaattctgtgtgaatgtgaacttgcctagtaagcactttgtctctgttcac

SEQ ID NO: 5338 - DNA, 60 bp, Homo sapiens
gcaatcctctcatttggaagactatcccttcgatgcagaatattgaggttgaatctcctg

SEQ ID NO: 5339 - DNA, 60 bp, Homo sapiens
ggcttgtagaccactgtcctggctgctctcatgcctgcctgataccctgcttggtcaaat

SEQ ID NO: 5340 - DNA, 60 bp, Homo sapiens
tgattcggaagactaagtctggacgtagacattataatgctatcaaagaagtttgatctc

SEQ ID NO: 5341 - DNA, 60 bp, Homo sapiens
cgaagactcgtcaacagcttaaatctggattactacagccaaataatcagtgttttatat

SEQ ID NO: 5342 - DNA, 60 bp, Homo sapiens
tccccctgtgaacaggcatgttgtattctataacacaatcttgagcattcttgacagact

SEQ ID NO: 5343 - DNA, 60 bp, Homo sapiens
aacaatccaagagggttcaggaggcctaggggctcaccacagggtcagcaggcgatatat

SEQ ID NO: 5344 - DNA, 60 bp, Homo sapiens
acctgcaaggaccgggagatcttacgccatgatcctcacaagctgctggaaggctgcctg

SEQ ID NO: 5345 - DNA, 60 bp, Homo sapiens
ttgaacagatcatgtacctaggctcgggtttgtgctgtgtcggtgccttggctggcctct

SEQ ID NO: 5346 - DNA, 60 bp, Homo sapiens
gccctgagtctccagtagctgaattcacctgacttttcaacaggccaaatctctgaacct

SEQ ID NO: 5347 - DNA, 60 bp, Homo sapiens
cctgtaacttcatctaagtccccagatgggtacaatgggagctgagttgttggagggaga

SEQ ID NO: 5348 - DNA, 60 bp, Homo sapiens
gcgccccgagttccgtccctaccaacacctccgcatccgcaccaagccctacccctgggg

SEQ ID NO: 5349 - DNA, 60 bp, Homo sapiens
tggagggcacttgagattaagtcccagcccctgcctttcagcttggttcttccttcaaaa

SEQ ID NO: 5350 - DNA, 60 bp, Homo sapiens
cgccatgctgtcttctgtgatgaacaaagacgggatgctggtagcgtatggaaatgggtt

SEQ ID NO: 5351 - DNA, 60 bp, Homo sapiens
taggtaacggggcagagatgtggttcgagattctccccggactctccgtcatgggcgtgt

SEQ ID NO: 5352 - DNA, 60 bp, Homo sapiens
cattgcaacaaggttacctctattttgccacaagcgtctcgggattgtgtttgacttgtg

SEQ ID NO: 5353 - DNA, 60 bp, Homo sapiens
cacaggccggtctggtggtggctggttactaccatgccaatgcagctgtgaacgatcaga

SEQ ID NO: 5354 - DNA, 60 bp, Homo sapiens
gggggccgtattacaattccattggccgttcgtttttcaaaagtttggacttgggaaaaa

SEQ ID NO: 5355 - DNA, 60 bp, Homo sapiens
ctgtgtcctggaggagctggctcgccaacgaaggggttaaacacctctgcctgttcatct

SEQ ID NO: 5356 - DNA, 60 bp, Homo sapiens
gtggggcgtgaggaccatgcaagcccgaggcttcggctcggatcagtccgagaatgtcga

SEQ ID NO: 5357 - DNA, 60 bp, Homo sapiens
ctgactacacggggaatgcttgacccagagagatcagattgtcaatgcttgttccactct

SEQ ID NO: 5358 - DNA, 60 bp, Homo sapiens
ttcaggttctcctctgtcattcggtcagccgtctcagtccatttgcggaggaacattggt

SEQ ID NO: 5359 - DNA, 60 bp, Homo sapiens
ggttccggcgtggccattttcgttggtggtgttcagttgtggcggttgctggtcagtaac

SEQ ID NO: 5360 - DNA, 60 bp, Homo sapiens
agtaacaagctgacttacgggaccatggtgtttgtcaggtccttccttgtgggagaagct

SEQ ID NO: 5361 - DNA, 60 bp, Homo sapiens
ttcattgagaaacgctacgtggagctgaagaaggcgaatcccgacctacccatcctaatc

SEQ ID NO: 5362 - DNA, 60 bp, Homo sapiens
ccaggtcaccttgggctctgtttgtcagatcctgttatccatagcctttagagaggacct

SEQ ID NO: 5363 - DNA, 60 bp, Homo sapiens
actggttttggacccttactctgtgtggaccacgaaaaccctttggatgctaagctcgtg

SEQ ID NO: 5364 - DNA, 60 bp, Homo sapiens
attggacaaaagcaagcaaggtctggacagctttgacacaggaaaaggagcaggagacct

SEQ ID NO: 5365 - DNA, 60 bp, Homo sapiens
tcctaggggaagtaaaaagatctgggataaaaccagactgaaaggaatacctcagaagag

SEQ ID NO: 5366 - DNA, 60 bp, Homo sapiens
cttcactcactgccctgacatctgcccagacgagctggagaagctggtgcaggtggtgcg

SEQ ID NO: 5367 - DNA, 60 bp, Homo sapiens
ttgttgggcaggtaatttcaaagggttatttgcctcatctcctatctttagtgaaatctt

SEQ ID NO: 5368 - DNA, 60 bp, Homo sapiens
tctacagcttgtactcccttggctgggcctccttccccaggaattaagaccaagaagcct

SEQ ID NO: 5369 - DNA, 60 bp, Homo sapiens
accagaataggagttttcctctgtggacctgaagccttggctgaaaccctgagtaaacaa

SEQ ID NO: 5370 - DNA, 60 bp, Homo sapiens
ccgaagaaactgttcctccattatttgaattactgaagacagcaagatatttgtaaatta

SEQ ID NO: 5371 - DNA, 60 bp, Homo sapiens
gactgcaaacccagtcatgcgacccttagaagatgcctgcttcacccttgcaattgtttg

SEQ ID NO: 5372 - DNA, 60 bp, Homo sapiens
aatccgcctccgaaacccgccggtcaacgcgatcagtacgactttactccgtgacataaa

SEQ ID NO: 5373 - DNA, 60 bp, Homo sapiens
aacccacagaggtcgtgaaagtcagacttcaagcacagagccatctccacggaatcaaac

SEQ ID NO: 5374 - DNA, 60 bp, Homo sapiens
aagtgtgtcagcgcctatgctggtgcaaagacggaggaccactccaactcagaccagaaa

SEQ ID NO: 5375 - DNA, 60 bp, Homo sapiens
gtgtgggccaccgattggcggctgatcctggactgggtaccttacatcaatggcaagttt

SEQ ID NO: 5376 - DNA, 60 bp, Homo sapiens
tgggtgtgccaggctagactaggaggttccggtgtctggaaaagcactttacagatgaga

SEQ ID NO: 5377 - DNA, 60 bp, Homo sapiens
aggtgcatacgcagcagaaccggaggagaataagaggacccgtacagcttatactcgggc

SEQ ID NO: 5378 - DNA, 60 bp, Homo sapiens
gcctctccatcgtcttgggcccttgctcaaatagctgtgggactgaatttcacagaaaag

SEQ ID NO: 5379 - DNA, 60 bp, Homo sapiens
agaagaaataatgtggtagttggtgtgtcctcggtttctcggctgctgggtcggtcccgc

SEQ ID NO: 5380 - DNA, 60 bp, Homo sapiens
cttgtagtaagacaccaactgcttaaaacataaggatgtttcagttcctccatttaacag

SEQ ID NO: 5381 - DNA, 60 bp, Homo sapiens
gctggatcctgtcacacctggagacctacaggaggccagagtgaaggggtccgttctgtc

SEQ ID NO: 5382 - DNA, 60 bp, Homo sapiens
gataaccacctggatgacattcggaatgactggacaaacccagagatcaataaagctgtc

SEQ ID NO: 5383 - DNA, 60 bp, Homo sapiens
tcttagccaggaaattagctgcagctgaaggcttggagccaaagtatcggattcaggaac

SEQ ID NO: 5384 - DNA, 60 bp, Homo sapiens
tacaattcatggcccgcggtttaacaacggcggaactggaaaaccttggcggtcccaact

SEQ ID NO: 5385 - DNA, 60 bp, Homo sapiens
catgcacttccacctctccaccagccaggtccctgccaagacagactgtgtcatgttctt

SEQ ID NO: 5386 - DNA, 60 bp, Homo sapiens
gtgtaggagctgcacgatctgggaacctcacgtttatggtgggaggagttgaagatgaat

SEQ ID NO: 5387 - DNA, 60 bp, Homo sapiens
cccacctcaagcatgtattttggcaattggtgcttcagaggataaactggtccctgcaga

SEQ ID NO: 5388 - DNA, 60 bp, Homo sapiens
agtggctgaagccagaactctttcgaataggtgccagtactctgctctcggacattgaga

SEQ ID NO: 5389 - DNA, 60 bp, Homo sapiens
ctgcagccctgaagatacctcattttggttattgtgatgagattgaccttactgaactgg

SEQ ID NO: 5390 - DNA, 60 bp, Homo sapiens
aaatctctactgggaaggcagcggtattggggccattgactctaacctggactggtctca

SEQ ID NO: 5391 - DNA, 60 bp, Homo sapiens
cataccctaaacaagaagcggtatagaccagaatggagcactgattgtaatccaccttct

SEQ ID NO: 5392 - DNA, 60 bp, Homo sapiens
gtgatcttcaaagagatggccattaacttagcagtgggacctcacttttacaagcactgc

SEQ ID NO: 5393 - DNA, 60 bp, Homo sapiens
agtgctagctctgcacttcgtgtctgctgagagcaaccagaccttccatgtcctcgggca

SEQ ID NO: 5394 - DNA, 60 bp, Homo sapiens
ttcccctgagcgccggagctcacaggtctcgccttgtcccgaaagccccgcaatcgaggc

SEQ ID NO: 5395 - DNA, 60 bp, Homo sapiens
atgttcatctcttgccaaataagggtcccctcctcactggagactacaagtggtgggtca

SEQ ID NO: 5396 - DNA, 60 bp, Homo sapiens
cagtgtgagacttcaaggggaagtatgagacttctctgaggaagcagacccttcacaagc

SEQ ID NO: 5397 - DNA, 60 bp, Homo sapiens
gctaacagcagagctaagacaaatgctgacacagatggcatggtgaagatccttgggcag

SEQ ID NO: 5398 - DNA, 60 bp, Homo sapiens
tggccatcacaaggattgagcagctgtcgccattcccctttgacctcctgctgaaggagg

SEQ ID NO: 5399 - DNA, 60 bp, Homo sapiens
agtcctgaaggctgtggagaacatcaacagtactctgggccctgctctgctgcaaaagaa

SEQ ID NO: 5400 - DNA, 60 bp, Homo sapiens
gtagtgacttgggtttttgcgagtgctttgtttactaaggactttggggaggaaccatgc

SEQ ID NO: 5401 - DNA, 60 bp, Homo sapiens
cacagttgccaccacctctgtggcattgaaatgagcacctccattaaagtctgaatcagt

SEQ ID NO: 5402 - DNA, 60 bp, Homo sapiens
cccagtctttgatgtttgggaggctgtttgacttgcaggacagcaagacggtacctacaa

SEQ ID NO: 5403 - DNA, 60 bp, Homo sapiens
tcatgtcttgtgcataattcttccaaaggatcttattttgtgaactatatcagtagtgta

SEQ ID NO: 5404 - DNA, 60 bp, Homo sapiens
ggaacatggcgactcaagtgtggctgtgtggagtggtgtgaatgtggcaggtgtttctct

SEQ ID NO: 5405 - DNA, 60 bp, Homo sapiens
atgctgaagatgctggcacaataccgcatcagtatggccgcctacgtgtcaggggagctg

SEQ ID NO: 5406 - DNA, 60 bp, Homo sapiens
atcaaccccacagaccatctcatcacagcctaccgggctcacggctttactttcacccgg

SEQ ID NO: 5407 - DNA, 60 bp, Homo sapiens
gtcaactgtcaaggagcagctaattgagaagctaattgaggatgatgaaaactcccagtg

SEQ ID NO: 5408 - DNA, 60 bp, Homo sapiens
ccctctaccagaaagatgataatggtgttcccttcgtccgaaccatccaggataagggca

SEQ ID NO: 5409 - DNA, 60 bp, Homo sapiens
cagcagctaggtctgaatagcacctgcgatgacagtatcctcgtcaagacagtgtgcggg

SEQ ID NO: 5410 - DNA, 60 bp, Homo sapiens
atgggcatcacttgacatagcatgctgaccttccccgagcatcatgtggacaattcagtc

SEQ ID NO: 5411 - DNA, 60 bp, Homo sapiens
catgtactctgaggagcacaaggtgaggtgcaggttcctgcccctaaagaactctatctt

SEQ ID NO: 5412 - DNA, 60 bp, Homo sapiens
ccacggatttatgactacagttcacgcttatacagctgatcaaagactacaagattcacc

SEQ ID NO: 5413 - DNA, 60 bp, Homo sapiens
cactgctggccttggtgtcatgccagaatctaccaggactgagggagccagaggagtcct

SEQ ID NO: 5414 - DNA, 60 bp, Homo sapiens
gggcctggaagagctggcagtgtctgtgggggtggatggaacgctctacaagctgcaccc

SEQ ID NO: 5415 - DNA, 60 bp, Homo sapiens
aggaacctcagaacatgggtccgtggtcgtttgtttctccaaggtttgaaaagcagctgg

SEQ ID NO: 5416 - DNA, 60 bp, Homo sapiens
gattgcccgtgaggcagaggctgccatctaccacttgcaattatttgaggaactccgccg

SEQ ID NO: 5417 - DNA, 60 bp, Homo sapiens
acatcgctcagacaccatggggaaggtgaaggtcggagtcaacggatttggtcgtattgg

SEQ ID NO: 5418 - DNA, 60 bp, Homo sapiens
acagtttcagtcgtccgtgggtttcccgccagccgcagtcttggaccataatcatggtgg

SEQ ID NO: 5419 - DNA, 60 bp, Homo sapiens
ccaccctgctagatgtcatctctggattgcacatggatgatgaaggaactcagcattgaa

SEQ ID NO: 5420 - DNA, 60 bp, Homo sapiens
agatgttgcgctgagtacgtcgtggagtcactgtgtctcacacatgagaggtgtgctcat

SEQ ID NO: 5421 - DNA, 60 bp, Homo sapiens
gagggttcagcagcatataccttcacactaggtttcagagcctgggaagaggaatattaa

SEQ ID NO: 5422 - DNA, 60 bp, Homo sapiens
cccaggaatcaaggtggttatacccagaagccctttccaggccaaaggacttcttttgtc

SEQ ID NO: 5423 - DNA, 60 bp, Homo sapiens
atacaccctcagtacccaaaacgcctgcacaaggtggtgaggaaactggtcccaagctgt

SEQ ID NO: 5424 - DNA, 60 bp, Homo sapiens
gccgatacaagggaagtgtggaattcaggaatggacaactggtcgtggacaaccatgaga

SEQ ID NO: 5425 - DNA, 60 bp, Homo sapiens
tggcacttctctgtttgatgaagagggagccaagattgtcaaagacctaatgtccaaagc

SEQ ID NO: 5426 - DNA, 60 bp, Homo sapiens
tactctcttgaagagcgggccttctcctcaggtctccaggttggcttgcccgtgctcttg

SEQ ID NO: 5427 - DNA, 60 bp, Homo sapiens
gctcaggaagaaaccccaagcagcattcagcacaccccaagggacaaccccatcatatga

SEQ ID NO: 5428 - DNA, 60 bp, Homo sapiens
ctgcccagggcaaggccaagtgaggggtgggcttgggcaataaaggcacctcccccaaca

SEQ ID NO: 5429 - DNA, 60 bp, Homo sapiens
accaaagtcatctgttcgatagcctgaccctagagctccaagatgtcatcactcacgcca

SEQ ID NO: 5430 - DNA, 60 bp, Homo sapiens
tggcctggtcacaaggccgctcatggattacttgcccacctggcagaaaatctacttcta

SEQ ID NO: 5431 - DNA, 60 bp, Homo sapiens; identical to SEQ ID NO: 4855

SEQ ID NO: 5432 - DNA, 60 bp, Homo sapiens
cctcctgaccgtgcccttcgagaagcattccactttgtagctggccagagggacgccgca

SEQ ID NO: 5433 - DNA, 60 bp, Homo sapiens
tcgcgctgatcggattggccgtcatgggccagaacttaattctgaacatgaatgaccacg

SEQ ID NO: 5434 - DNA, 60 bp, Homo sapiens
ggattgatgagtacgattactccaagcccatccaggggcaacagaagaagccctttgagg

SEQ ID NO: 5435 - DNA, 60 bp, Homo sapiens
attccggctggagtccccagaaagccaggcatgacccgggacgacctgttcaacaccaat

SEQ ID NO: 5436 - DNA, 60 bp, Homo sapiens
cccgcaatctgacctttaccaggagggaaacagttctcctacatctcatcattggaaaag

SEQ ID NO: 5437 - DNA, 60 bp, Homo sapiens
ggaattggcatagctccacttcagttccttccaggagaaaatgcagattccttgggcctc

SEQ ID NO: 5438 - DNA, 60 bp, Homo sapiens
cttttcatttatcaagcagagacctttgttgggaggcggtttgggagaacacatttctaa

SEQ ID NO: 5439 - DNA, 60 bp, Homo sapiens
agtgccatgtctgctgcaaaagccatctgtgaccacgtcagggacatctggtttggaacc

SEQ ID NO: 5440 - DNA, 60 bp, Homo sapiens
ctaagttgtgagactgagttctatattctggtgagttaatggggttgcctcccagcttct

SEQ ID NO: 5441 - DNA, 60 bp, Homo sapiens
gggacagaatgaaagtcgcttggtggcgttggacctcgtaaagcactgtttcagatggaa

SEQ ID NO: 5442 - DNA, 60 bp, Homo sapiens
aggccaagcggagggtgcgcgagctctaccgcgcctggtatcgggaggtgccgaacactg

SEQ ID NO: 5443 - DNA, 60 bp, Homo sapiens
tgtctaggcctgcagttcccaggcttgggttcactttcaccatgcattggcaaaactaga

SEQ ID NO: 5444 - DNA, 60 bp, Homo sapiens
ggggcacgtacagaagaaacgcaaccccaggaaacagaaaatacaacagaaagagggacc

SEQ ID NO: 5445 - DNA, 60 bp, Homo sapiens
ctgtacctcctctcaagccaagaagggctgtgggataatttaccatgaatccttagtagc

SEQ ID NO: 5446 - DNA, 60 bp, Homo sapiens
acaaactaccaaacgcggggagacaaacatagacacatccacacaagcagcgtctataaa

SEQ ID NO: 5447 - DNA, 60 bp, Homo sapiens
acagccaagctcagcggatggccgaaaatctaggcttcgttgggcctttgaaaagccagg

SEQ ID NO: 5448 - DNA, 60 bp, Homo sapiens
ttcctaaaactgtggaatggatcacgtagacatgtaacccagcagcagtttgcttctgtt

SEQ ID NO: 5449 - DNA, 60 bp, Homo sapiens
tgccattcagtatcaggaaatttcacccatgcacggagtgaagaggctccattgcactcc

SEQ ID NO: 5450 - DNA, 60 bp, Homo sapiens
gaacttaagcatctctagcagagcaatttgatcagtatataaaaccctaggatgtgctag

SEQ ID NO: 5451 - DNA, 60 bp, Homo sapiens
tgagccacttccacatggataccctgctgatgaccacacataacctgctctttggcggca

SEQ ID NO: 5452 - DNA, 60 bp, Homo sapiens
tctgtacctggttggtccttcgtctttgcatgtaagctctttgagaggaagggtgaagcc

SEQ ID NO: 5453 - DNA, 60 bp, Homo sapiens
ttcagcccaacaagaaatctccaccagaaccccgagtggcgaagaaactgggaatgattg

SEQ ID NO: 5454 - DNA, 60 bp, Homo sapiens
cctcattgtgtttctaccggagagagaatgtatttgctgacaaccattaaagtcagaagt

SEQ ID NO: 5455 - DNA, 60 bp, Homo sapiens
caaatcataaatcattggggtttcatctggatgacagataaagttaactaagccttcaga

SEQ ID NO: 5456 - DNA, 60 bp, Homo sapiens
cccatgtttcctgtctgtaggatctcaggtgctccctgtgttgaaagagaatgtggaagg

SEQ ID NO: 5457 - DNA, 60 bp, Homo sapiens
ttctcaataggaaagcgggcatgcctcggagaacagttggccaggactgagctgtttatt

SEQ ID NO: 5458 - DNA, 60 bp, Homo sapiens
gcagccttaacaggctagctcctaattcccattgggtagatgaggggatgacaacgaaca

SEQ ID NO: 5459 - DNA, 60 bp, Homo sapiens
atcctcttccgcaagcattttgactacaatgatgagaagtttctaaggctgatgtatttg

SEQ ID NO: 5460 - DNA, 60 bp, Homo sapiens
acagtgccaggagacgattcgtaccgccctggccatgggtgcagaccgaggtatccacgt

SEQ ID NO: 5461 - DNA, 60 bp, Homo sapiens
cgctgtcctcttcaaaaccaggaggagcccatttggtagtgaggcaggtatggggctaga

SEQ ID NO: 5462 - DNA, 60 bp, Homo sapiens
agccgttttgagactgagaagaataatggggcaggctactttttggagcatctggctttc

SEQ ID NO: 5463 - DNA, 60 bp, Homo sapiens
cgcacactgagaaagcaattggatcacaacctcaccttccacaagctggtggcctatatg

SEQ ID NO: 5464 - DNA, 60 bp, Homo sapiens
aacttttgactacagcatggccccatggcatccacaccaagagggtgttgtgatgaggtg

SEQ ID NO: 5465 - DNA, 60 bp, Homo sapiens
tgaatgctatttttgaggttcgtgcctgttgtagaccacagtcacacactgctgtagtct

SEQ ID NO: 5466 - DNA, 60 bp, Homo sapiens
aacaaagaggtaagaaggggacatggtaaaggtgtccgggaccacgttttttggcaaggg

SEQ ID NO: 5467 - DNA, 60 bp, Homo sapiens
attcttcatccaaatggaggcactgaacagggagcaagaggttccatgccagcctactct

SEQ ID NO: 5468 - DNA, 60 bp, Homo sapiens
catgttcatttgcctcttaaaggcaagggttgaagataaataaggtagcaatgtctatag

SEQ ID NO: 5469 - DNA, 60 bp, Homo sapiens
aacaaagtatgaactggtaacatcatcaagggaagaagcttggatcactgtctcaaagag

SEQ ID NO: 5470 - DNA, 60 bp, Homo sapiens
tgatgcttgttggcatgggcaagcgccggtgtatcggggaagtcctggccaagtgggaga

SEQ ID NO: 5471 - DNA, 60 bp, Homo sapiens
tcagcaatgcctggcatcgtgtccatgtctatgtctccccatgagcatggaaaggagcca

SEQ ID NO: 5472 - DNA, 60 bp, Homo sapiens
gcagcaacaagtggcggtagtgccagttcagaaaaggcatcaagtacttcaccagtggaa

SEQ ID NO: 5473 - DNA, 60 bp, Homo sapiens
tggtcagggcttacacccctgtctccagtgatgatgacagaggctttgtggacctaatta

SEQ ID NO: 5474 - DNA, 60 bp, Homo sapiens
ccatggtcccaaacctgcccaatcatcacagtcatttggaagcttatttctccggcatct

SEQ ID NO: 5475 - DNA, 60 bp, Homo sapiens
tgcagggagacaacgggtggctgcaatccagccagagacaggcgcaggtgggtgtcctca

SEQ ID NO: 5476 - DNA, 60 bp, Homo sapiens
tttagctttcagcaactgaggtaaccttagggacaggtggaggtgtgggccgatctaacc

SEQ ID NO: 5477 - DNA, 60 bp, Homo sapiens
gggttatttgcagctggagaatgtgacttctctcaacatggtggtaaccgcttaggtgcc

SEQ ID NO: 5478 - DNA, 60 bp, Homo sapiens
tccgatcccatctacatattaccactggcagtcactgctacaatgtgggctgttcttgag

SEQ ID NO: 5479 - DNA, 60 bp, Homo sapiens
gatccttgccattcccctcagctaatgacggagtgctccttctccagttccgggtgaaaa

SEQ ID NO: 5480 - DNA, 60 bp, Homo sapiens
gcttcagcaaccaggagggattgactgagatcttaacaacagcagcaacgatacatcagc

SEQ ID NO: 5481 - DNA, 60 bp, Homo sapiens
gaaagtgagtcctgcttgacccatgtgactgtgtacctgaccttctgggatcttttcagc

SEQ ID NO: 5482 - DNA, 60 bp, Homo sapiens
aaggtccatgaggagattgacagagtgatcggcaagaaccggcagcccaagtttgaggac

SEQ ID NO: 5483 - DNA, 60 bp, Homo sapiens
gcccccattagtataataattacatcacaagacgtctagcactctccagcctctcaccgc

SEQ ID NO: 5484 - DNA, 60 bp, Homo sapiens
tccggagtgactctatcaccaacatgctggacacactgatgcaagccaagatgaactcag

SEQ ID NO: 5485 - DNA, 60 bp, Homo sapiens
ggacccagacaaggctggagacaaacctcatatgcagacttatgaagttgaccttaataa

SEQ ID NO: 5486 - DNA, 60 bp, Homo sapiens
atgacatgaaagggaggctggcacttgtcagtcaggtagaggttacaaaccgtttcaggc

SEQ ID NO: 5487 - DNA, 60 bp, Homo sapiens
tttgagcaactccctctcagctaaaaggccacccctttatcgcattgctgtccttgggta

SEQ ID NO: 5488 - DNA, 60 bp, Homo sapiens
tcagttagcggtggagaggcagtatgtccggttcaatggcgactgcggaagctagcggca

SEQ ID NO: 5489 - DNA, 60 bp, Homo sapiens
aatatccctagagctcctaccatatgtcaggccctatgcctcaccctgagaacgcagtga

SEQ ID NO: 5490 - DNA, 60 bp, Homo sapiens
ctcctgccacagcatggacttcgtggcctaccgccacctggtgggcgtgtgctacacgga

SEQ ID NO: 5491 - DNA, 60 bp, Homo sapiens
gagtccatttagagagttccaaaggtggaaacaccatcctagcattcggccaaccttgga

SEQ ID NO: 5492 - DNA, 60 bp, Homo sapiens
ctcatagtgagcacaaggaaagttttgccctgagattcatggttatggctgggtaccacc

SEQ ID NO: 5493 - DNA, 60 bp, Homo sapiens
gcttctccatcaattgaagaagacaccaccattctgaggccagggagcgagtgggggcca

SEQ ID NO: 5494 - DNA, 60 bp, Homo sapiens
ctggagcaatgagggtctagtccaggggccaaaagcagtctgaggtattgggtatactta

SEQ ID NO: 5495 - DNA, 60 bp, Homo sapiens
ggtttgctgatctcttactctccctggaaacacggatgagtgagcaggggaaaactcact

SEQ ID NO: 5496 - DNA, 60 bp, Homo sapiens
ggcaccaagtaagtgcccaggacatgagctgttctaataactgggtaaggcatggaatcc

SEQ ID NO: 5497 - DNA, 60 bp, Homo sapiens
aaccggaaatgtgaagaccctcgacatcttgaattgctggtagagtatgtgaggaaacag

SEQ ID NO: 5498 - DNA, 60 bp, Homo sapiens
cactggacctgaacttgaagcatcagatcttgcctaaagagcagtggaccaaatatgaag

SEQ ID NO: 5499 - DNA, 60 bp, Homo sapiens
atggttttggatgtaccatttgtttcttatttgtgtaactgtaagttcacatgaacctca

SEQ ID NO: 5500 - DNA, 60 bp, Homo sapiens
ttccttggaggcccccatccaggccagaaggaccaggtccacccagcagctgtttgccca

SEQ ID NO: 5501 - DNA, 60 bp, Homo sapiens
cctatccgcacgtcttcactaaaggaatccccaatgttctgcgccgcattcgggagtctt

SEQ ID NO: 5502 - DNA, 60 bp, Homo sapiens
ccttatttgaacaagttttcctttattgagtaccaagccatgtaatggtaacttggactt

SEQ ID NO: 5503 - DNA, 60 bp, Homo sapiens
gctgtttctcctgggagcagatggaggttgtatcacacgacaggatttgccaaaggattg

SEQ ID NO: 5504 - DNA, 60 bp, Homo sapiens
agacagaaggctgaggccggggtgctagagaaccttgccgtgctggaattcacgttgacg

SEQ ID NO: 5505 - DNA, 60 bp, Homo sapiens
tagaccaacatcccagaaatgggagggcccaggaggcacaagacagggagagctaacaaa

SEQ ID NO: 5506 - DNA, 60 bp, Homo sapiens
gccagactacggcttccccgaacgcaaggagcgcgagatggtggccacacagcaggagat

SEQ ID NO: 5507 - DNA, 60 bp, Homo sapiens
gctcctctacatcggcttcttgggctactgctccggcctgattgataacctgatccggcg

SEQ ID NO: 5508 - DNA, 60 bp, Homo sapiens
cgtgtccttttgcgttggtaccagcggcgacatgacggggtacactccggatgagaaact

SEQ ID NO: 5509 - DNA, 60 bp, Homo sapiens
ccacatggagattggcacaggaccagactcaagacacacaactcataacagttgatgaaa

SEQ ID NO: 5510 - DNA, 60 bp, Homo sapiens
cccccaaaggggagggcgataaataccgaaagccgggttaccgtagaggccgcaagaacg

SEQ ID NO: 5511 - DNA, 60 bp, Homo sapiens
aacttttgggcgggcccgattttctcgcccttttggagaaaaccccaatagggggccatt

SEQ ID NO: 5512 - DNA, 60 bp, Homo sapiens
tgagatctgaggaggcttcgtgggcttttgggtcctctaactaggactccctcattccta

SEQ ID NO: 5513 - DNA, 60 bp, Homo sapiens
gcacatgcggttactgtgggctccagttcagacagcaccaccactagagcgtgtggcacg

SEQ ID NO: 5514 - DNA, 60 bp, Homo sapiens
taacccagtatcggaacgttaagcggcttctccgctttcctgccgtgagaaactcgaggt

SEQ ID NO: 5515 - DNA, 60 bp, Homo sapiens
taacaacgtttgtgcgtggaaacgtgctcgctggcaactcttgcacggaccattattgtc

SEQ ID NO: 5516 - DNA, 60 bp, Homo sapiens
ggacatccagaaaaggttcggccttaacatagatcgatggttgacaatccagagtggtga

SEQ ID NO: 5517 - DNA, 60 bp, Homo sapiens
tgcagtttccactgactataagaagctgaagaaggaccggccagacttctaagccaggct

SEQ ID NO: 5518 - DNA, 60 bp, Homo sapiens
ggcccttccatactttgaccggctagactatgtgtccatgatgtgtaacgaacaggccta

SEQ ID NO: 5519 - DNA, 60 bp, Homo sapiens
ggtacccatccggggaggagcgttgcattgcctgcaagctctgcgaggccatctgccccg

SEQ ID NO: 5520 - DNA, 60 bp, Homo sapiens
cacgtgccaagccgtcccaggaaccggccaaaggggtggttccacaaaaagacccgcgcg

SEQ ID NO: 5521 - DNA, 60 bp, Homo sapiens
gggtaaaggagctggaagtgcgaaaattgatgcatgtgagaggagatggaccctggtatt

SEQ ID NO: 5522 - DNA, 60 bp, Homo sapiens
tgtggatgctaactataggatatttaggttcctctgttctttgtctcccatagtggcccc

SEQ ID NO: 5523 - DNA, 60 bp, Homo sapiens
cctcagttgtacaggacttggtgatcaggatccaggcactcacttgtattctactgctca

SEQ ID NO: 5524 - DNA, 60 bp, Homo sapiens
acaatgaagtgaaccgcaagctgggcaagcctgacttcgactgctcaaaagtggatgagc

SEQ ID NO: 5525 - DNA, 60 bp, Homo sapiens
aaaatcacagacctggccaacctcagtgcagccaaccatgatgctgccatctttccagga

SEQ ID NO: 5526 - DNA, 60 bp, Homo sapiens
ttcgagggtgcgtgcaagtgctgcgaaccacgtgggtcccgggcgcgtttcgggtgctgg

SEQ ID NO: 5527 - DNA, 60 bp, Homo sapiens; identical to SEQ ID NO: 4855

SEQ ID NO: 5528 - DNA, 60 bp, Homo sapiens
gaccagcctgatgcaggtctatgaagaccagtggtagtgcccagacttctcctagacatc

SEQ ID NO: 5529 - DNA, 60 bp, Homo sapiens
ggcccatttacactcccaaaacatgagtgtgaagttcggtggttacccaagagacttggg

SEQ ID NO: 5530 - DNA, 60 bp, Homo sapiens
gggtcaccaggatcaaccgcaggctttcttcagtcccttggtcagaccataaactgcatt

SEQ ID NO: 5531 - DNA, 60 bp, Homo sapiens
tggcgtcctcagagagcacgcggatgtcctcatggacagcttcgatgcttttggaagcat

SEQ ID NO: 5532 - DNA, 60 bp, Homo sapiens
agaccaacagaacttcacagtgacactggaccaggtcctgctccgctgcctggaacacca

SEQ ID NO: 5533 - DNA, 60 bp, Homo sapiens
ggcaggacttaggatagggtactgtttattggaaaacctactgaggtggaaatgtgcggg

SEQ ID NO: 5534 - DNA, 60 bp, Homo sapiens
aaactgtgggcattgatgacctgactggggagcctctcattcagcgtgaggatgataaac

SEQ ID NO: 5535 - DNA, 60 bp, Homo sapiens
ctaagatccagaatgctgttcactgtactgatctgccagaggatggcctattagaggttc

SEQ ID NO: 5536 - DNA, 60 bp, Homo sapiens
gacctgagtgtgaaagactgagagttgaggagttactttgtggatcttgtccaaatttag

SEQ ID NO: 5537 - DNA, 60 bp, Homo sapiens
atcgctggaatcctggtggcagaacccagtccctggtctgagactcacgtttcctgagca

SEQ ID NO: 5538 - DNA, 60 bp, Homo sapiens
tagcaggcttctttgcctccgtggccatgatctgcgctattgccagtggctcggagctat

SEQ ID NO: 5539 - DNA, 60 bp, Homo sapiens
acaagtcttgtgctcatgactgggtctatgaataagaggtggacacaacagcagtctcct

SEQ ID NO: 5540 - DNA, 60 bp, Homo sapiens
caccctcttctgccctcatttcatgtgacagccattgtgagactgatgcacaaactgtca

SEQ ID NO: 5541 - DNA, 60 bp, Homo sapiens
accaagacgctgagtggcagcatagccccaatggacgtctgtgtccggcacttcctgcag

SEQ ID NO: 5542 - DNA, 60 bp, Homo sapiens
cagtgacatgtcttccagcctcaagagctacgatttccccattgggatgggcatagtaaa

SEQ ID NO: 5543 - DNA, 60 bp, Homo sapiens
tcactcccgcgcagtgaggttggcacagccaccgctctgtggctcgcttggttcccttag

SEQ ID NO: 5544 - DNA, 60 bp, Homo sapiens
actgtgcccagcacatgggtggtacactaattatgacttcccccagctctgaggtagaaa

SEQ ID NO: 5545 - DNA, 60 bp, Homo sapiens
agctgcggcctctgggatggagagcaatacatcatcatctttggagaatttagcgacggc

SEQ ID NO: 5546 - DNA, 60 bp, Homo sapiens
caagctgtttctgaacgagtttgtggcctatcaagacctctccaagtacaagcaacgccg

SEQ ID NO: 5547 - DNA, 60 bp, Homo sapiens
tgaacggaccgctatccagaaggccgtctcagaagggtacaaggatttcagggcaattgc

SEQ ID NO: 5548 - DNA, 60 bp, Homo sapiens
gcactggctgtatgagtagcccggcagatgcgcgtcacagaggctctcacactccagcct

SEQ ID NO: 5549 - DNA, 60 bp, Homo sapiens
gattgcaacctgtgtgtttgtcatcatcctcatctcaccattgtattgctatgccctccc

SEQ ID NO: 5550 - DNA, 60 bp, Homo sapiens
ccccttcactcttggaagtttggggcttcaaggtttattctggcaagaacacctcggagc

SEQ ID NO: 5551 - DNA, 60 bp, Homo sapiens
caggtccagggaaggttgtgctggtatttggctcatgacagccaagagcagatttgtgaa

SEQ ID NO: 5552 - DNA, 60 bp, Homo sapiens
tgagaatcctccccgaaagccagcagaaagctattctggaagaccttctgaccgatatcc

SEQ ID NO: 5553 - DNA, 60 bp, Homo sapiens
ccagacagtctgagggcaatttatggcacagatgacctaaggaatgcacttcatgggagt

SEQ ID NO: 5554 - DNA, 60 bp, Homo sapiens
gacaacgaacagaacaaacgaagggcagtgactgtgaacgggaatctgtgtcggctggac

SEQ ID NO: 5555 - DNA, 60 bp, Homo sapiens
tcactgagaaaggctcaatttggtgctcacgtgtccttaacacctgatctggcccaagct

SEQ ID NO: 5556 - DNA, 60 bp, Homo sapiens
tgttcagaaggtggataggtcttcccactccagcatggcttgaactcttaggggtctgca

SEQ ID NO: 5557 - DNA, 60 bp, Homo sapiens
ttcctgattggcagacattccaatgtactaggaaggtagcgcatcttgattccacaggga

SEQ ID NO: 5558 - DNA, 60 bp, Homo sapiens
caggtacaggtgatctcttcctttgttctttcagtactttgaggcgacaactttcaagta

SEQ ID NO: 5559 - DNA, 60 bp, Homo sapiens
tcagacttttgaggatgttgtgtgagggtgtttgactgtgactggggaagctcagactac

SEQ ID NO: 5560 - DNA, 60 bp, Homo sapiens
gggctcctctcgcgaggattggctgttagcggcgttgtagttaagctcgtgtaacggcgg

SEQ ID NO: 5561 - DNA, 60 bp, Homo sapiens
gcttccttgacaaagaagccatcatgggtgtgatccaagatccctgtcgtagtgttgatg

SEQ ID NO: 5562 - DNA, 60 bp, Homo sapiens
catccggaaaacggaccttaacaagaagctggtgcaggagctgttgctgtgttctgcaga

SEQ ID NO: 5563 - DNA, 60 bp, Homo sapiens
ctgggaactttgtggccttctctgccttcttctacactgtggactttttgcggacttcga

SEQ ID NO: 5564 - DNA, 60 bp, Homo sapiens
gtgcacagtttgcgatggacagtttgccggtcaaccagttgtatggcagcgattcattag

SEQ ID NO: 5565 - DNA, 60 bp, Homo sapiens
ccatgttctcaagacattaaggaatgttatgcgaaatacactaacttaaaactgtgttta

SEQ ID NO: 5566 - DNA, 60 bp, Homo sapiens
ccctgggaagataaggagttcagtgctatggcccttactaactgctgtggattctacaac

SEQ ID NO: 5567 - DNA, 60 bp, Homo sapiens
agacaacatgggcctagatcctgtgcaggtagccctcaagccaataagccaaacagatct

SEQ ID NO: 5568 - DNA, 60 bp, Homo sapiens
acctcgccaatacttgctccagctttcagtcggacctggatttctgttcagattgcggct

SEQ ID NO: 5569 - DNA, 60 bp, Homo sapiens
tttcacctgttgcagtctctgggcatctcccattgaggccacgtacttccttggagacct

SEQ ID NO: 5570 - DNA, 60 bp, Homo sapiens
aaatgttgtgtctcccaaccacctttccatccccagcccctctcatccctggagcactct

SEQ ID NO: 5571 - DNA, 60 bp, Homo sapiens
ggccatccttctcaaaagacttattgacagtgccaaagctcggtactggacacaacgagg

SEQ ID NO: 5572 - DNA, 60 bp, Homo sapiens
gtttacccttcaagtttcaagttcatgtcactgtctcagagaggttttcctgtgctcgcc

SEQ ID NO: 5573 - DNA, 60 bp, Homo sapiens
acgcacctgcgcatcctgggcaagccggtgatggagcgctgggagaccccctatatgcac

SEQ ID NO: 5574 - DNA, 60 bp, Homo sapiens
agtcctatgcggagagactgcgtctgggtttggccgtcattcacggggaagctcagtgca

SEQ ID NO: 5575 - DNA, 60 bp, Homo sapiens
cccatctcagcggcatatgcaagagcaagaggggctgataggatgtcttcatttggtgat

SEQ ID NO: 5576 - DNA, 60 bp, Homo sapiens
atatgttgggctcacctcatccttgctgtgagactggagttccatggggacatgaagtca

SEQ ID NO: 5577 - DNA, 60 bp, Homo sapiens
gcatcgcaggcatactctccagcactcctgtggacatcaactgccatcacgttttagaga

SEQ ID NO: 5578 - DNA, 60 bp, Homo sapiens
atatgacgactgcataaggcaggcaacacaatcgaggtcagcaagaagagaacggtcggt

SEQ ID NO: 5579 - DNA, 60 bp, Homo sapiens
ctgtgggtagacgatgccatctggcgcttgctgttctccatgatcctctttgtcatcatg

SEQ ID NO: 5580 - DNA, 60 bp, Homo sapiens
tgagcccctactcctattccaccacggctgtcgtcaccaatcccaaggaatgagggactt

SEQ ID NO: 5581 - DNA, 60 bp, Homo sapiens
catcctctgtacaaaagcctcaagtgagggtcaaattcaacattatcctgatctagacag

SEQ ID NO: 5582 - DNA, 60 bp, Homo sapiens
gtgacaggagtggaagcagctcccctgactctgaaatcaccgaactgaagtttccatcaa

SEQ ID NO: 5583 - DNA, 60 bp, Homo sapiens
ctacactcttagagaatccctctgttctccagcaaacatgggatgtaaagcctcacaggg

SEQ ID NO: 5584 - DNA, 60 bp, Homo sapiens
atgtctatacctgtaattgctaatggagacatcagaagcttaaaggaagcagaaaatgtg

SEQ ID NO: 5585 - DNA, 60 bp, Homo sapiens
tgctgcaagaagcgagcctccaaagagactgcagactgcccaggtcacggattgcttttt

SEQ ID NO: 5586 - DNA, 60 bp, Homo sapiens
cttgttaaagggacacgcagacctgtgacctgcaagattcgcatcctgccatcgctagaa

SEQ ID NO: 5587 - DNA, 60 bp, Homo sapiens
catcttgtcatttgaggatgccaaccgcgccatgcagactggtgtcaccgggatcatgat

SEQ ID NO: 5588 - DNA, 60 bp, Homo sapiens
gcccttgcacatgggcatggttgaatctgaaaccctccttctgtggcaacttgtactgaa

SEQ ID NO: 5589 - DNA, 60 bp, Homo sapiens
agaccgtgagttgatgccagttatcatgctgccactacatcgttatctggaggcaacttc

SEQ ID NO: 5590 - DNA, 60 bp, Homo sapiens
agcggcggcccacacagcagcgagaggcgagaggaggctgcctcgaggatgaagtgcaaa

SEQ ID NO: 5591 - DNA, 60 bp, Homo sapiens
gcaccaagttcaatctagtgcaatcagcctatcacatctaagctgcttttgccagatctg

SEQ ID NO: 5592 - DNA, 60 bp, Homo sapiens
ctcggtttctgctcagagctcgatgtcaggcatcagatgactgaagacttcctgtaagag

SEQ ID NO: 5593 - DNA, 60 bp, Homo sapiens
tcctccgtgttctgcaccagtattgtggctcaagactccagaggccacatttaccatggt

SEQ ID NO: 5594 - DNA, 60 bp, Homo sapiens
aatagctcaggtgtgctgaccccagtgaagacaccagataggacctctgagaggggactg

SEQ ID NO: 5595 - DNA, 60 bp, Homo sapiens
gctggtacctgggtgggcaatggccaccatgtctgcacacaccagaaatggacattttca

SEQ ID NO: 5596 - DNA, 60 bp, Homo sapiens
gaggaagaacagagctcaagggcaaaggcacagaggaaaccttctggctgattgggaaaa

SEQ ID NO: 5597 - DNA, 60 bp, Homo sapiens
ttggcagggatttgtgacactgcattgctgggctgtgttcctcgggctcttctggacctt

SEQ ID NO: 5598 - DNA, 60 bp, Homo sapiens
tgtgtggtgctgtcacagacagaacctgagccaaagcacattcccacagagaaagtcaag

SEQ ID NO: 5599 - DNA, 60 bp, Homo sapiens
agagcagaagatccgggtgtccgtggaggtggagaagccacgagaggagctcttccagct

SEQ ID NO: 5600 - DNA, 60 bp, Homo sapiens
gctgaaaacacaagcccaggagtgcagacactgccctaattgcttcctgagaattcccat

SEQ ID NO: 5601 - DNA, 60 bp, Homo sapiens
tttgctgaggctctgaggagctaccaggaggctgcggctgcaggcaccttcctggcagta

SEQ ID NO: 5602 - DNA, 60 bp, Homo sapiens
aggaggactgagcgactgggaaaactcggctctacatctcacccagaacggcttttagaa

SEQ ID NO: 5603 - DNA, 60 bp, Homo sapiens
acaccatcaaaaccaaccctgacgacagaagaatcatcatgtgcgcttggaatccaagag

SEQ ID NO: 5604 - DNA, 60 bp, Homo sapiens
tttacaactccgtcttcgccctaaacgcacgctgacccggaaagtaatctcctgaagcta

SEQ ID NO: 5605 - DNA, 60 bp, Homo sapiens
ggtggttggggctctcatccctagatcctaaccctttagtatgctggaattctactcttc

SEQ ID NO: 5606 - DNA, 60 bp, Homo sapiens
tgcacagtcaatttctgctggctggactgaactgaagatcaatcctcacaattcagactg

SEQ ID NO: 5607 - DNA, 60 bp, Homo sapiens
gacaaataccctaatctccaagtcattggaggcaatgtggtcactgctgcccaggccaag

SEQ ID NO: 5608 - DNA, 60 bp, Homo sapiens
gcccttcgttgttgaaacacttcatgggaagatagctgtggcacataatggcgaattggt

SEQ ID NO: 5609 - DNA, 60 bp, Homo sapiens
gtaattgaacggcgcattcggcaagagctgcctttcatggccacagagaacatcatcatg

SEQ ID NO: 5610 - DNA, 60 bp, Homo sapiens
aagttattcaggtgctgcttcaactggccaagttaaagtggtccatgacgtgagcatgga

SEQ ID NO: 5611 - DNA, 60 bp, Homo sapiens
actggaagctctttgccacaaatcacccagaatgcctgcagaatgtagccgtgagttcag

SEQ ID NO: 5612 - DNA, 60 bp, Homo sapiens
aatcctgactgtcttgagcatctggctgccagctcaggcacaggctcttctgactttgag

SEQ ID NO: 5613 - DNA, 60 bp, Homo sapiens
tcttaccagtgattgtcatcatggttaaagctggtctgtgcttcttccatagacagaagc

SEQ ID NO: 5614 - DNA, 60 bp, Homo sapiens
agaacttcttgacggagaagaggtgtcgtgtctgtgtttcactgatggcaagactgtggc

SEQ ID NO: 5615 - DNA, 60 bp, Homo sapiens
ggagacttggagtatgtcctcatccctcatggtatcattgtggacagaattgagcggctg

SEQ ID NO: 5616 - DNA, 60 bp, Homo sapiens
caagctggagccagacatcctgcttcgggccaagcaagatttcctgaagacggacagtga

SEQ ID NO: 5617 - DNA, 60 bp, Homo sapiens
ccggaggacaaatgtagcccaaatccgcatggcctatcgctatgaaacctggtgttatga

SEQ ID NO: 5618 - DNA, 60 bp, Homo sapiens
ccaagaaccctctgagggaattcctacacaagggactgcatgtttctctttccaccgatg

SEQ ID NO: 5619 - DNA, 60 bp, Homo sapiens
catgtcagtaagtggtgtgttcaatgtgtttgtttcatatgggccctttccaggagtttg

SEQ ID NO: 5620 - DNA, 60 bp, Homo sapiens
agattgagggtggtgtccatggcctgcactcttacgaaaagcggctgtactgaggacagc

SEQ ID NO: 5621 - DNA, 60 bp, Homo sapiens
ttcgggagctgggaagagcaccctgctgaagaggctgctccaggagcacagcggcatctt

SEQ ID NO: 5622 - DNA, 60 bp, Homo sapiens
ttgagtactttgtgatcttgctgaagactacaggcagccaaatggttccagatacttcag

SEQ ID NO: 5623 - DNA, 60 bp, Homo sapiens; identical to SEQ ID NO: 4855

SEQ ID NO: 5624 - DNA, 60 bp, Homo sapiens
cggggtgacattccggaaattcataccgaagtgcagcaagattgtcattgactttgattc

SEQ ID NO: 5625 - DNA, 60 bp, Homo sapiens
gatgagactaggtgctttgcttcctttcatcaggtatctttctgtggcatttgagaacag

SEQ ID NO: 5626 - DNA, 60 bp, Homo sapiens
cagagatgtacagaaaagctgcttgggaagcgtatttgagtagacttggtgtttgagtgc

SEQ ID NO: 5627 - DNA, 60 bp, Homo sapiens
ttaagaagacagccagtaacagcaagctgaggacctacctgcccgacttccggttcacac

SEQ ID NO: 5628 - DNA, 60 bp, Homo sapiens
aacgccgggaagaccgtaattgtggctgcactggatgggaccttccagaggaagccattt

SEQ ID NO: 5629 - DNA, 60 bp, Homo sapiens
gaacaacctggagaaatatagccgcagcttgacccgcagctaccaaaacgtctatgtctg

SEQ ID NO: 5630 - DNA, 60 bp, Homo sapiens
ttcctgaaacagattacgagtgtaccaactccaccagctgcatgacggtgtcctgtcctc

SEQ ID NO: 5631 - DNA, 60 bp, Homo sapiens
atcgctcagaaagtgaggggtgtggacgtcgtggtgggaggacactccaacacatttctt

SEQ ID NO: 5632 - DNA, 60 bp, Homo sapiens
aaggatggtaatagctgtaatgtgggaagcccctttgccaaggacttcctgcccaagatg

SEQ ID NO: 5633 - DNA, 60 bp, Homo sapiens
ggtgctccaggagccttccacagatggaaagttgtcctccttgttagaactgataagcga

SEQ ID NO: 5634 - DNA, 60 bp, Homo sapiens
gtcattgtgaaggtcatcaaacgctgtgacatcatactcgtgatggaaatcaaggacagc

SEQ ID NO: 5635 - DNA, 60 bp, Homo sapiens
tcagttctcgaagatgggcaagcagctgacctacacctacccctgggtctataactacca

SEQ ID NO: 5636 - DNA, 60 bp, Homo sapiens
tttgacccaggaagtgcttcaggaacatctggaagtagttcccagaacatgggagacacc

SEQ ID NO: 5637 - DNA, 60 bp, Homo sapiens
aacactggaactgacccttttctggcagtgaatgtaagctctagctcccccatctactat

SEQ ID NO: 5638 - DNA, 60 bp, Homo sapiens
ctcagcagtggtcacctgcaaggcaaaccctggaagtaaagactttgtctcacttaggca

SEQ ID NO: 5639 - DNA, 60 bp, Homo sapiens
ggagcagcctcttcagtaagcacgaaacatgctctcatcatggatgaagtagatggcatg

SEQ ID NO: 5640 - DNA, 60 bp, Homo sapiens
tcaggtgttcctctgcttctccaccgaaccagctaattctcacaaacagcccctcaggta

SEQ ID NO: 5641 - DNA, 60 bp, Homo sapiens
gaattgctccaaagtccaacagacacacactgagcaggtgttttacactcacattccctt

SEQ ID NO: 5642 - DNA, 60 bp, Homo sapiens
ggcatagtacctgcaaggacagtggccatgcaggagctagagacattgtttccattcaag

SEQ ID NO: 5643 - DNA, 60 bp, Homo sapiens
tggcccaacagagccacatggacgcttttgagagaagtttctgcattttccgcctaccac

SEQ ID NO: 5644 - DNA, 60 bp, Homo sapiens
ccccgagacctccacgatactcgagactttagagacccgagagacctcagatgttttata

SEQ ID NO: 5645 - DNA, 60 bp, Homo sapiens
gctgaagatcaaagaggttatctctgccagtcacaagtgtggctggtgtcattctgggtc

SEQ ID NO: 5646 - DNA, 60 bp, Homo sapiens
ccctctgtctgagagattgctctgatgtctttccttccataagtcctacggagatcgagc

SEQ ID NO: 5647 - DNA, 60 bp, Homo sapiens
acgttccacaaacttggggtcatagattgtccagtcactggctccctccctgtcagcaca

SEQ ID NO: 5648 - DNA, 60 bp, Homo sapiens
tgccagtggcaacctacaccaactcctcacaacccttccggctaggagagcgcagcttta

SEQ ID NO: 5649 - DNA, 60 bp, Homo sapiens
ctgattcttctggggtgtgtgccctcactaaattgctatcctcctttggagaagctgctt

SEQ ID NO: 5650 - DNA, 60 bp, Homo sapiens
ctggtccttagccccatgcctcttccaaaacagtgcaataaatctccggtaacccgtcca

SEQ ID NO: 5651 - DNA, 60 bp, Homo sapiens
aacaggctggtttgcagaggaaggcagcatgcagctccgttttgccccattctctgagca

SEQ ID NO: 5652 - DNA, 60 bp, Homo sapiens
tacccagtggtgccagaatccacaggaccagagaagcatcaggagcccagctgatctgca

SEQ ID NO: 5653 - DNA, 60 bp, Homo sapiens
agcgtgcgtgctgaggtatgcgcaacgcgtgcggggtctcttccggagtcttttcctgga

SEQ ID NO: 5654 - DNA, 60 bp, Homo sapiens
ttctggccatgaggctagaccattgtggcactgggacagcagctggacaggagcaagcca

SEQ ID NO: 5655 - DNA, 60 bp, Homo sapiens
cgccatgttcatagaggataaagcagtagacaccctggcttacctcagtgacggtgacgc

SEQ ID NO: 5656 - DNA, 60 bp, Homo sapiens
gactgctttccattaacagttccagctctatgtgtttcctctaacgctaaaggcacagcc

SEQ ID NO: 5657 - DNA, 60 bp, Homo sapiens
attgaggacctgaagaagtacggggctaccactgtggtgcgtgtgtgtgaagtgacctat

SEQ ID NO: 5658 - DNA, 60 bp, Homo sapiens
gcaggaagggctcctcttagagaagcagtcaaactgtgaagcactaagctgaccctgctt

SEQ ID NO: 5659 - DNA, 60 bp, Homo sapiens
gagtggaacagatagccagccaaagcctgacctggagaacagaattgcagaatttggtgg

SEQ ID NO: 5660 - DNA, 60 bp, Homo sapiens
gggcccgttattctcagattaggtgacggagctaagacttcgagaccatctcgtcctttt

SEQ ID NO: 5661 - DNA, 60 bp, Homo sapiens
acatccagtgactggcctacagcaccagaaccacagagcctcttcacatcagaaacaatc

SEQ ID NO: 5662 - DNA, 60 bp, Homo sapiens
gtctaacagaggcccttcagaataatgtcacaccatatgtagtctcattgcaagctaaag

SEQ ID NO: 5663 - DNA, 60 bp, Homo sapiens
tatctcagttgaaggaagctactcagtcccatcaagtagacaaacaaggtgtaaactcac

SEQ ID NO: 5664 - DNA, 60 bp, Homo sapiens
accgacaggcagacggactcggtattggagctgaaggcggcggcagagaacttgccggtg

SEQ ID NO: 5665 - DNA, 60 bp, Homo sapiens
gagacatcgtgcaacccaatgagtagtgaagggactgtgttgcttgtgaagcggtgtagt

SEQ ID NO: 5666 - DNA, 60 bp, Homo sapiens
accaccaagactgttcacatcatctctctaacattgcacgcttcctttgtgtacttaagt

SEQ ID NO: 5667 - DNA, 60 bp, Homo sapiens
cgccgctttgccattggctcccaggtgtctgagcacagcatcatcaaggacttcaccaag

SEQ ID NO: 5668 - DNA, 60 bp, Homo sapiens
ctgtcaggcttatgctcagacatgccagaaagctgggatcagggcctatccaactgttaa

SEQ ID NO: 5669 - DNA, 60 bp, Homo sapiens
ttgaagtggaagatccgcagatcccggagtgtgcagctctcgtcaggaggaccatggagt

SEQ ID NO: 5670 - DNA, 60 bp, Homo sapiens
ggatggatttagccgactaaaacgatggattatgattggcgatcatcaccagttacctcc

SEQ ID NO: 5671 - DNA, 60 bp, Homo sapiens
agactggcaaggccaagatcaccggcggctatcggctcccggccaagtacgtcatccaca

SEQ ID NO: 5672 - DNA, 60 bp, Homo sapiens
cttgtcagagcagagggcaggtgggagtcacctgaaagctgaaggaatggctttaaggat

SEQ ID NO: 5673 - DNA, 60 bp, Homo sapiens
ccacataatggcaaacactctcccatggtggccaagtcaacattggatattgttctggcc

SEQ ID NO: 5674 - DNA, 60 bp, Homo sapiens
gccggtaataaattccaggaataagcgccagggttacacttgggttaatggtctctgggg

SEQ ID NO: 5675 - DNA, 60 bp, Homo sapiens
tctgtgagaaaactgacaatgacatccgggcctgcatcaacaccctgcagttcctgtaca

SEQ ID NO: 5676 - DNA, 60 bp, Homo sapiens
ccctggaccataagagacctttgattaaggttttgggaattagcagagatgtgatgcagg

SEQ ID NO: 5677 - DNA, 60 bp, Homo sapiens
ggtcaagagccatttcacccattgtcatctcgaacagtatcttcttcttcgctccctagc

SEQ ID NO: 5678 - DNA, 60 bp, Homo sapiens
gggactcatactccaagcacggccatggagactgcaattccattcagatcacgtttcttc

SEQ ID NO: 5679 - DNA, 60 bp, Homo sapiens
atcaaaacacacaggcatcctgaaagaggccgaggctgagatgcaggagcgctactttga

SEQ ID NO: 5680 - DNA, 60 bp, Homo sapiens
atgcgtgtcagagaagaaccactttaaacaactgtaaccagatattcacggtaacggact

SEQ ID NO: 5681 - DNA, 60 bp, Homo sapiens
acacagaaggaattccctgcctggggtccaaggtgaagggtatcatagaggtaagggtga

SEQ ID NO: 5682 - DNA, 60 bp, Homo sapiens
gttctgaagttaaagctgtgttaaatgatgaacgatatcaatccttcaaagtaagtgatt

SEQ ID NO: 5683 - DNA, 60 bp, Homo sapiens
tgggcatttcttccggatgctttcgtcaccatgacaggagggttccggaggtaattaact

SEQ ID NO: 5684 - DNA, 60 bp, Homo sapiens
aggatgaagagcaacttttacagaaagtgatgaacttatgggaaaagaaggtgagaagaa

SEQ ID NO: 5685 - DNA, 60 bp, Homo sapiens
tctgtgcccctacgagcgtcgtgcctttgccctgttgggatggactggctcccctcggtt

SEQ ID NO: 5686 - DNA, 60 bp, Homo sapiens
tcctatccagcagtttgagagagacctccggcgctatgccacacatgagcggaagatgat

SEQ ID NO: 5687 - DNA, 60 bp, Homo sapiens
gaagatggaatgaaagcactagtcactctttccagtggagacatgcgtagggctctgaac

SEQ ID NO: 5688 - DNA, 60 bp, Homo sapiens
gacgcggccaggcgattcggtgaagcgattcctgcaggcgttggttcccctctttgacct

SEQ ID NO: 5689 - DNA, 60 bp, Homo sapiens
aacatacagctacctgctgcactgctctcccggtttgacctcctctggctgattcaggac

SEQ ID NO: 5690 - DNA, 60 bp, Homo sapiens
attaacctcgacatatagccctcatcaaagctgggcagatttgctgtctcagacccgtcc

SEQ ID NO: 5691 - DNA, 60 bp, Homo sapiens
cggacgtcagatgatcgagaaaaccaagcagctggtggagtctaagtacacagtggagaa

SEQ ID NO: 5692 - DNA, 60 bp, Homo sapiens
ctcaaacttgaagtcactcctccaatgtctgggacttgccagctcagcccgttaggatga

SEQ ID NO: 5693 - DNA, 60 bp, Homo sapiens
ccacccagtttgtggaagcacaggcaagagtgttcttttctggtgattctccaggccatt

SEQ ID NO: 5694 - DNA, 60 bp, Homo sapiens
ggagaaggtcttttccactgcctagctaagcagtctggggagagcatggggatcatttct

SEQ ID NO: 5695 - DNA, 60 bp, Homo sapiens
taagatcatcgagcccattcagtcccgctgtgcagtcctccggtacacaaagctgaccga

SEQ ID NO: 5696 - DNA, 60 bp, Homo sapiens
tgcctgcctagtgctggagtaggggacaatgggaatcctagaggggatggaagacgcggg

SEQ ID NO: 5697 - DNA, 60 bp, Homo sapiens
aggggtgggatgtgagtcatgcggattatccactcgccacagttatcagctgccattgct

SEQ ID NO: 5698 - DNA, 60 bp, Homo sapiens
acgggcaagtggctgtgtttggctcagacctgcaagagaagctgggcaagcagaagtatt

SEQ ID NO: 5699 - DNA, 60 bp, Homo sapiens
tgatgatttcctgacagtgactgggaagaccgtgcgcttgctctgaagccttgtgagcaa

SEQ ID NO: 5700 - DNA, 60 bp, Homo sapiens
gacagccttggtttgtaaagctcagctccactagttcatggtttggtgcaacttctgagc

SEQ ID NO: 5701 - DNA, 60 bp, Homo sapiens
ggcggaatgcagtacacaacagtatttaggacaactcctttgccaacacaatggctcccc

SEQ ID NO: 5702 - DNA, 60 bp, Homo sapiens
agggagtaacaccaactggaaaaccttgtatgaggtcaaatccgagaacctgggccaagg

SEQ ID NO: 5703 - DNA, 60 bp, Homo sapiens
cctagccccagtgaggtcagagtggaaacatcggccatggttgatccaaaaggcagccac

SEQ ID NO: 5704 - DNA, 60 bp, Homo sapiens
agcttcgatgtccatggctgtgatcttgacctcttcttggatctgggtgacttggaagag

SEQ ID NO: 5705 - DNA, 60 bp, Homo sapiens
gaggtggcacaaatggcagcttactatgagcatcgtctacagctgggtagcaaagccatt

SEQ ID NO: 5706 - DNA, 60 bp, Homo sapiens
gtggatttgccaagacatctgttgctgcttctctataccacacaccctctgactccaagg

SEQ ID NO: 5707 - DNA, 60 bp, Homo sapiens
gaatagtcccagctcagacgatggtatccgaccacttccagaatacagcacagagaaaca

SEQ ID NO: 5708 - DNA, 60 bp, Homo sapiens
tatatcccatgttctggctttctttgcagcaagcgatggcatagtaaatgaaaacttggt

SEQ ID NO: 5709 - DNA, 60 bp, Homo sapiens
gcatgttgcagtcatcctcaaccaagaaatccgggagttggaacgtcaacaggagcaact

SEQ ID NO: 5710 - DNA, 60 bp, Homo sapiens
aagaccctattggagagcgagcgggaaaggctgtttgcgaaaatggaggacacggacttt

SEQ ID NO: 5711 - DNA, 60 bp, Homo sapiens
tggctcattggtacaatgtcagataccgaggaaatgcttttccggtagaaatcacccgcc

SEQ ID NO: 5712 - DNA, 60 bp, Homo sapiens
aacggaattggagccattttgctttaagtgaatggcagtcccttgtcttattcagaatat

SEQ ID NO: 5713 - DNA, 60 bp, Homo sapiens
aagtcctggtacctccttcaagctgggagagggctctagtccctggttctgaacactctg

SEQ ID NO: 5714 - DNA, 60 bp, Homo sapiens
ggttacgtcatcgactccagtggtggagaaagtttgccatgagtccatctaacttcagca

SEQ ID NO: 5715 - DNA, 60 bp, Homo sapiens
ttcctcacagatgacttggtgagccaagaggagaatggtcagcaacagaagtacttgggg

SEQ ID NO: 5716 - DNA, 60 bp, Homo sapiens
acaacaccgttggcaactacacctgtatctgtcctccagactacatgcaagtgaatgggg

SEQ ID NO: 5717 - DNA, 60 bp, Homo sapiens
gcctgatcctgccaaaaccaagaatcgccgcaaaaggaagccatccacttctgatgattc

SEQ ID NO: 5718 - DNA, 60 bp, Homo sapiens
agttgttcttgatcatgtgacttgtaatcaggatttagaacgacaaaagcctttactacc

SEQ ID NO: 5719 - DNA, 60 bp, Homo sapiens; identical to SEQ ID NO: 4855

SEQ ID NO: 5720 - DNA, 60 bp, Homo sapiens
ccagctttcgaacctggcaggcagtcagatctcttggtgaagttgaatcgactcatggaa

SEQ ID NO: 5721 - DNA, 60 bp, Homo sapiens
catgagtggggaccacctccacaacgattcccagatcgaagcggatttccgattgaatga

SEQ ID NO: 5722 - DNA, 60 bp, Homo sapiens
aattcctgtggtaatccttaccgtggcgagttccgcgctcaatggagacgtttgacccca

SEQ ID NO: 5723 - DNA, 60 bp, Homo sapiens
catcatctgctctggcctctttaaattcctctctggaaatggatatggaaggactagaag

SEQ ID NO: 5724 - DNA, 60 bp, Homo sapiens
cgtccgcagtgtccactactgtcctgctactaagaagaccatagagcgacgttattctga

SEQ ID NO: 5725 - DNA, 60 bp, Homo sapiens
ctggggataacgatgagagtcaccgcaatttcatccaggacgaagtgctgcgtttgattc

SEQ ID NO: 5726 - DNA, 60 bp, Homo sapiens
gagaagactgaccataaagcttcttgcctcgttcaaacacctccaggacaatactcaggg

SEQ ID NO: 5727 - DNA, 60 bp, Homo sapiens
tgccagaatgccccacttggaaaacgtggtgctttgtcgcgagtctcaagtgtccatctt

SEQ ID NO: 5728 - DNA, 60 bp, Homo sapiens
ggagatgaagaagattcaagagaagcagagggagaagcgggctgcctgtgagcagcttca

SEQ ID NO: 5729 - DNA, 60 bp, Homo sapiens
cgtcagccaggatgatgtgctgtatgcgctgaaagacgagtaaaggggcttcacaagtta

SEQ ID NO: 5730 - DNA, 60 bp, Homo sapiens
gtcacattgagtggtaggcttcatccaattgctttgctatggaaatcttggtggtgtagc

SEQ ID NO: 5731 - DNA, 60 bp, Homo sapiens
cctgtcccagtgaagttggaaccaaataatgtgtagtctctataaccaatacctttgttt

SEQ ID NO: 5732 - DNA, 60 bp, Homo sapiens
tgagctgaaagctgaggatcggagcaagtttctggacgcacttatttccctcctgtccta

SEQ ID NO: 5733 - DNA, 60 bp, Homo sapiens
tgggaagatggacgcagctactctgacctacgacactctccggtttgctgagtttgaaga

SEQ ID NO: 5734 - DNA, 60 bp, Homo sapiens
tcttgccacacttcccttcctgagctgacctgacctcactgccacctcttgcattgggat

SEQ ID NO: 5735 - DNA, 60 bp, Homo sapiens
aggaataaccatccctacaactcgaggatagccatcaggagcactgttggaatcagcagg

SEQ ID NO: 5736 - DNA, 60 bp, Homo sapiens
gcagactatgatgaacaccttacgggacaaagccagcggagtgtgcatagactctgagtt

SEQ ID NO: 5737 - DNA, 60 bp, Homo sapiens
caggtcagtgggatccctggctgcatcttcgtccatgcaagcggcttcattggcggtcac

SEQ ID NO: 5738 - DNA, 60 bp, Homo sapiens
cgcgggacgcgtggttttcttggcatcaaagaaagtgatccttccaagctgcagcacaat

SEQ ID NO: 5739 - DNA, 60 bp, Homo sapiens
agaatagctgttgtggatttttctctgcctactgtcagaagtcctaggtgactctgcccc

SEQ ID NO: 5740 - DNA, 60 bp, Homo sapiens
cgaagtatcgtaaggaaaattggtactaatttgtctctgattcagtgtccaagagttcag

SEQ ID NO: 5741 - DNA, 60 bp, Homo sapiens
cgtgcgaggagggggcatggcggatactgtgttgtttgagtttcttcacacggagatggt

SEQ ID NO: 5742 - DNA, 60 bp, Homo sapiens
ctgtccctgaaaatggtaacttgggtccaatacaagctgaagtgaaaggggcaacagggg

SEQ ID NO: 5743 - DNA, 60 bp, Homo sapiens
acagaatctgtagtgattttggtggccagtaaatgccagccatttctcaaacccacctcg

SEQ ID NO: 5744 - DNA, 60 bp, Homo sapiens
atagtcatctttgtactgtaatttgatgtacacaacattaaaagtactgacacctgtatt

SEQ ID NO: 5745 - DNA, 60 bp, Homo sapiens
atgtaatggaaacgtaggagcatctggtgacagcctttcttgccctctgacctcaaaggc

SEQ ID NO: 5746 - DNA, 60 bp, Homo sapiens
tatctctccacttgagaggccaagctgacttgagctttgtggtaagagtgaggacctgtc

SEQ ID NO: 5747 - DNA, 60 bp, Homo sapiens
ctgcgggcgccaggcaaggtccccaactgcagcggaaccagaaacctgcacgacaacctg

SEQ ID NO: 5748 - DNA, 60 bp, Homo sapiens
ccgcagctgatgcccgaggacgcgctggacaccggtctgcagccgcttccaacctctccg

SEQ ID NO: 5749 - DNA, 60 bp, Homo sapiens
ctgcactgtagcatacctgtatgaccgcttgcttcggatcagagcactcagatgggaata

SEQ ID NO: 5750 - DNA, 60 bp, Homo sapiens
gttggacaacatgaggaaactggagaaagaactattcagagagatggaatcaatccttca

SEQ ID NO: 5751 - DNA, 60 bp, Homo sapiens
ttatttacgacccggcttccttctatggccattccgagtttgaactggcaatcgccttga

SEQ ID NO: 5752 - DNA, 60 bp, Homo sapiens
cctctcgaagcctgcagtcactttagcttttcattagcagagaccacgactgtatcactc

SEQ ID NO: 5753 - DNA, 60 bp, Homo sapiens
cgcaggagctgtgtaaacaatctcagtatgaattacctggaaagttaacctcctctccca

SEQ ID NO: 5754 - DNA, 60 bp, Homo sapiens
tcgtgaactgcgagtggaacaggaatctctgttgacagcttttcgctgtggcctgcagtt

SEQ ID NO: 5755 - DNA, 60 bp, Homo sapiens
gcgggtcagccctggttcgccggcttctgggtctttgaacagccgcgatgtcgatcttca

SEQ ID NO: 5756 - DNA, 60 bp, Homo sapiens
gagtaactttccccactactctgccttcctgttcagtaactcttacttttgcctgaagta

SEQ ID NO: 5757 - DNA, 60 bp, Homo sapiens
ggagctatcaggcctgcacagaagtagtcatgcccttttgtactaatggtgtcgatgaca

SEQ ID NO: 5758 - DNA, 60 bp, Homo sapiens
tgtttcttcacatgccggactagcttaagaccaatgcagtagcttatttccaagccttgc

SEQ ID NO: 5759 - DNA, 60 bp, Homo sapiens
aagcactgaagagcgccagtcgacgtgggtgcgacaactcgcggagtcttaggagcaaaa

SEQ ID NO: 5760 - DNA, 60 bp, Homo sapiens
atcgagctggacatgcgcaccattgccactgcactggaatatgtctacaaagggcagctg

SEQ ID NO: 5761 - DNA, 60 bp, Homo sapiens
ccttgaacttgctgtggagttcgtcaacagagctgcgtgccttgttggtagagggtctca

SEQ ID NO: 5762 - DNA, 60 bp, Homo sapiens
aactgtctggtgtgggtgaccggcagtggttgtatcagacatgtaccgagttcggcttct

SEQ ID NO: 5763 - DNA, 60 bp, Homo sapiens
gcatctgcattcatagccacgagtttgttattgctacaggctactgagcgtcgtaacagg

SEQ ID NO: 5764 - DNA, 60 bp, Homo sapiens
tgccaaccccgtcaaggtgggctgtgatcggctgctgagtgaggcccagaggatcacggg

SEQ ID NO: 5765 - DNA, 60 bp, Homo sapiens
ctaccagaagcgacagaagctgcagtttgaaactaagctgggcatgaactctcccttctg

SEQ ID NO: 5766 - DNA, 60 bp, Homo sapiens
caaagttggtgagtagcccagcatggtttatctccagcccacagctctttccctgaattc

SEQ ID NO: 5767 - DNA, 60 bp, Homo sapiens
tggccttggaaagaaggcaggcaaagctgctgagtaatagtcagaccctaggaaatgata

SEQ ID NO: 5768 - DNA, 60 bp, Homo sapiens
actgccactttccatgggacttagaacttcggagttgctgccttgcaattggaggaagga

SEQ ID NO: 5769 - DNA, 60 bp, Homo sapiens
gcgcgggaaagagaccaatataaactgtggcgggatagttttcgggtccttgtccagtga

SEQ ID NO: 5770 - DNA, 60 bp, Homo sapiens
tagacgttttggtagctgcgggtcaagctgcggctatatttctccaggttgttccaggca

SEQ ID NO: 5771 - DNA, 60 bp, Homo sapiens
acacaaactatcctttctccaccatggactcaatctgagaacaacagcattcatttccat

SEQ ID NO: 5772 - DNA, 60 bp, Homo sapiens
ccgacatggagctcgattcagatatggaggtaccacatggttctcagagcagcgaaagtt

SEQ ID NO: 5773 - DNA, 60 bp, Homo sapiens
gtgctccaggatgtgatcttctccgggcagctgcgagtaatcctccgcttgggcgctctc

SEQ ID NO: 5774 - DNA, 60 bp, Homo sapiens
aaagatgaactctttgagatgatttctcacctgctgtggtatcttgcaggaactgtgtgc

SEQ ID NO: 5775 - DNA, 60 bp, Homo sapiens
tgtcaccagtgtcacaaatggagcacatcctgaagccacttcagagcaaccacagcagaa

SEQ ID NO: 5776 - DNA, 60 bp, Homo sapiens
tctacgcaggaacctctcaacgcttcggaggccttttgcccaagagactgcatggtacca

SEQ ID NO: 5777 - DNA, 60 bp, Homo sapiens
atcagacatttggcgtgctcagaggttcgagctgctaaccttagtggagactgctcactt

SEQ ID NO: 5778 - DNA, 60 bp, Homo sapiens
ggggttcagtctgtggatggtaactacttatgatggacgttagccttgcttccggcttct

SEQ ID NO: 5779 - DNA, 60 bp, Homo sapiens
gggaggaaataggacactgttattgacaactaacattgcttcagcacctcctttctgtgc

SEQ ID NO: 5780 - DNA, 60 bp, Homo sapiens
tgagcttctttatcacctgcatcaccctggtgtacagcatggctcactctttcggggaga

SEQ ID NO: 5781 - DNA, 60 bp, Homo sapiens
cctaaagagcttgtacggaagccctatgtgctgaatgacctggaggcagaagccagcctt

SEQ ID NO: 5782 - DNA, 60 bp, Homo sapiens
ttcaagtctagtgacagtcctgaccacctgctacacgtgaggctatgcacaaggcacagt

SEQ ID NO: 5783 - DNA, 60 bp, Homo sapiens
attgccaaaagagtaccatctacttagtgagatctgggatgaagcagtgggttccagtcc

SEQ ID NO: 5784 - DNA, 60 bp, Homo sapiens
cgggctactgtaaagcatatttctatggcttgagagtaaaactcctagaaccagttcctg

SEQ ID NO: 5785 - DNA, 60 bp, Homo sapiens
caggtgttcagtgactggtaggtgtagatacagcaggagtggccatgtggtccacggctt

SEQ ID NO: 5786 - DNA, 60 bp, Homo sapiens
aaactgcttttggaattatctctacagtgaagaaacctcggccatcagaaggagatgaag

SEQ ID NO: 5787 - DNA, 60 bp, Homo sapiens
ctgcaggacgagaacatggtgagcttcatcaaaggcggcatcaaagttcgaaacagctac

SEQ ID NO: 5788 - DNA, 60 bp, Homo sapiens
atactcaaaccacttagcgatgaccccacagtatctgcctcacggtggaaaataccaagt

SEQ ID NO: 5789 - DNA, 60 bp, Homo sapiens
agtaaagatgacggcgccttgaggtaagctacaggcaacaccacttccgcgtttctcttg

SEQ ID NO: 5790 - DNA, 60 bp, Homo sapiens
ttagtacgcgtgcgcagcagtttcttccgacagttgtgttgtgccaatggtggagaagaa

SEQ ID NO: 5791 - DNA, 60 bp, Homo sapiens
tgggacatcattcagtcactagttggatggcacaaggctcttcacagacgcatctgtagc

SEQ ID NO: 5792 - DNA, 60 bp, Homo sapiens
tggacctttctgagggtgggatctgggcatcttcaatggcttaacaagtatcacagatga

SEQ ID NO: 5793 - DNA, 60 bp, Homo sapiens
agagtctgcccgagcaactccctgtggccgacatgagggcactcctgacaggcaaggact

SEQ ID NO: 5794 - DNA, 60 bp, Homo sapiens
ctatgaacctttacttacttgactggattggactaaaagcactgatcagaggccacgaca

SEQ ID NO: 5795 - DNA, 60 bp, Homo sapiens
tcagcctgcatactggtatcctggtcccagctcctgccagggctgttaccgttgttttct

SEQ ID NO: 5796 - DNA, 60 bp, Homo sapiens
ctatcagtagcgtttaccctttgtcaccagtggctttggtatttccatgtctggcattgc

SEQ ID NO: 5797 - DNA, 60 bp, Homo sapiens
attcgagaagagaagcgagaagaacggaggaggagagagttagaaaagaaacgtttgcgg

SEQ ID NO: 5798 - DNA, 60 bp, Homo sapiens
tagaggaagtcgtgctacccccgcggagttgtcgtgtgttctggattcattccggcacca

SEQ ID NO: 5799 - DNA, 60 bp, Homo sapiens
atatgggtcacgctttggtttccgggtcggttctggcaggtctgagcgctccgacttcca

SEQ ID NO: 5800 - DNA, 60 bp, Homo sapiens
ccacctcgcacatgtctggaggacacagcggaagaccatctcagactcgggctttgtcct

SEQ ID NO: 5801 - DNA, 60 bp, Homo sapiens
accttggcgctagtatttgaagcaccaaaccaggagaaagtttcagactatgaaatgaag

SEQ ID NO: 5802 - DNA, 60 bp, Homo sapiens
cccgcaaagtctctgctgtttcaggagatgttcgcaaagcactggatgtttgcaggagag

SEQ ID NO: 5803 - DNA, 60 bp, Homo sapiens
aagacgggcttgcggttgatggcgaatcggggagaatatgagtgggttcacctgcccaca

SEQ ID NO: 5804 - DNA, 60 bp, Homo sapiens
agatctgtggatccagcgtagcatctgtagcagctgggacatcattccaggttttgggcc

SEQ ID NO: 5805 - DNA, 60 bp, Homo sapiens
atttggtatgtgaccaaggtcggcctaaaggatggcgcaggtcctgggcaggaaagaatt

SEQ ID NO: 5806 - DNA, 60 bp, Homo sapiens
aggaaccaggagccctgaattcccctgctacacccaccagcaactgtcaaaagtcccagc

SEQ ID NO: 5807 - DNA, 60 bp, Homo sapiens
gttggtctggtgctgcttatgtggctggttcaggtctgtcatccgtcaacctgcatattt

SEQ ID NO: 5808 - DNA, 60 bp, Homo sapiens
gtaggtgtattgctagtgataggaacttgcttgctgctcccctgtgtattacccttgctt

SEQ ID NO: 5809 - DNA, 60 bp, Homo sapiens
gagaattgggtgagacacagatcatgcagattcccaggaatgtgctagagatgaccttcg

SEQ ID NO: 5810 - DNA, 60 bp, Homo sapiens
ctggtcttgtctataagtcactctgctttatcttgctaaagacaatttttcaagcaatcc

SEQ ID NO: 5811 - DNA, 60 bp, Homo sapiens
tcagagcaacagtacaacagactggtggactacatcacaaagacatcttgtcacctggcc

SEQ ID NO: 5812 - DNA, 60 bp, Homo sapiens
taccaggagatgtgaatgtgcgtcaggtgatggatgggtttgtcaagggaatcgttaccg

SEQ ID NO: 5813 - DNA, 60 bp, Homo sapiens
ggaagttatgggtgtgtgaagtgtcctgccaacaatatggagtacctggttggtgttagc

SEQ ID NO: 5814 - DNA, 60 bp, Homo sapiens
tacctcatttgtcctcgcccctccccgtccctctacgcgtttggttcccggttggtgctt

SEQ ID NO: 5815 - DNA, 60 bp, Homo sapiens; identical to SEQ ID NO: 4855

SEQ ID NO: 5816 - DNA, 60 bp, Homo sapiens
aagagctacagagacttctgaagtggagagtctgcgacctcctcggttcttcaatgaaga

SEQ ID NO: 5817 - DNA, 60 bp, Homo sapiens
attttaggagttgcctttatgtttatgttcactgcctttcaaacttgtggaaatgtggcg

SEQ ID NO: 5818 - DNA, 60 bp, Homo sapiens
cccataccctctgtttttgaaaggcaaaggccaatcagtccccatttgtagcatggcacc

SEQ ID NO: 5819 - DNA, 60 bp, Homo sapiens
tccgagcccaagagtatctggaaacactccccagtggagagcacagcggtgtcaataagt

SEQ ID NO: 5820 - DNA, 60 bp, Homo sapiens
ccattggcaaatgaatccttggagcacaaacctgtatccagtttagcagaacctgacttg

SEQ ID NO: 5821 - DNA, 60 bp, Homo sapiens
gtgtatttcagcagtatgccacagctatttaatgtgtatttcagcagtatgccacagcta

SEQ ID NO: 5822 - DNA, 60 bp, Homo sapiens
catgcttctttgctctccttaaaatgtctttttcactagttagttccaagggtcagtctc

SEQ ID NO: 5823 - DNA, 60 bp, Homo sapiens
acagaacacactttgtggtcgaaaggctcagcctctctacatgaagtctgtggacatgta

SEQ ID NO: 5824 - DNA, 60 bp, Homo sapiens
ctctgtgagggtactgaagacttggataaagtgaaaccaagagtacaagagacaggtgaa

SEQ ID NO: 5825 - DNA, 60 bp, Homo sapiens
aataaatctgggctgtcattatttatgctaacactggttttgtgtccctggaatctatct

SEQ ID NO: 5826 - DNA, 60 bp, Homo sapiens
gttatgacgatggcgaggaagactttgttgggaacgatcctgcatcaaccatgcatcaac

SEQ ID NO: 5827 - DNA, 60 bp, Homo sapiens
cacctagtcaagtcaagagtacacacaactgtgatagaccaccaagtacaggggtgatgg

SEQ ID NO: 5828 - DNA, 60 bp, Homo sapiens
ttagctgcagctttgtcgggaataaagatatggaacactacctatcagctccttcgtact

SEQ ID NO: 5829 - DNA, 60 bp, Homo sapiens
actaacttcttggggcattctgagagtgtgggcagagagaattatgtggcctcatcctcc

SEQ ID NO: 5830 - DNA, 60 bp, Homo sapiens
gggtctttcctcagcctcgaaaagtgggctctggaatccctttgtaaataggtgtgttga

SEQ ID NO: 5831 - DNA, 60 bp, Homo sapiens
gcaaggttcagtagtggcagatcatgactacattggattgcctgaaattccgattggagc

SEQ ID NO: 5832 - DNA, 60 bp, Homo sapiens
gtatctttcagcccgctaagaacagcagcaccacccaagggtccattcagattgaactac

SEQ ID NO: 5833 - DNA, 60 bp, Homo sapiens
taaagaacgcggacgttgcaccgtgatcaattttgtccctttggaggcgccgttacggtc

SEQ ID NO: 5834 - DNA, 60 bp, Homo sapiens
cttcctgctgaacttcagagggagctgaaagcagcgtatgatcaaagacaaaggcagggc

SEQ ID NO: 5835 - DNA, 60 bp, Homo sapiens
cccaaagaaagctccagaagtactggtagctcaagtggagtacagaaggctgtaacaaga

SEQ ID NO: 5836 - DNA, 60 bp, Homo sapiens
tctctatggctctccatccatcagaaactagaactttggtagcagttggggccaaatttg

SEQ ID NO: 5837 - DNA, 60 bp, Homo sapiens
cccttggtgatgagctctaccactgtctggaaggaaatcacaagaaacagccttttgagg

SEQ ID NO: 5838 - DNA, 60 bp, Homo sapiens
tgagagagagtctatcagacagaagttggcacttggaagcttctttgatgatggcccagg

SEQ ID NO: 5839 - DNA, 60 bp, Homo sapiens
ctacatgagtttgtatcttggtttaacctcttcagagttggaagaccccaggcaaatgat

SEQ ID NO: 5840 - DNA, 60 bp, Homo sapiens
tgaaggcgtgttcctgtcgctaattcagaagcactttccgtccaccaagagaaagcggga

SEQ ID NO: 5841 - DNA, 60 bp, Homo sapiens
atcaactacttgcagcgtgcaggagtccttgtgcagaaggtggtcaccacgacagatatt

SEQ ID NO: 5842 - DNA, 60 bp, Homo sapiens
ccagaaaccacactacagatagccataagcaaacagtagcaacagactctcatgaaggac

SEQ ID NO: 5843 - DNA, 60 bp, Homo sapiens
caaaactgagagtagcaggtgttgtggctcccacacttcctcgtgaagatctggagaaga

SEQ ID NO: 5844 - DNA, 60 bp, Homo sapiens
cataataagcattccctctggaacaagacaaggatgcccactctcacaaatcctcttcaa

SEQ ID NO: 5845 - DNA, 60 bp, Homo sapiens
ataagaacagttgagattttcctcaaactgataagaggaatccatgaaaacctacagctg

SEQ ID NO: 5846 - DNA, 60 bp, Homo sapiens
ctagttcctctcgaacaaagtcctgtgttggagcagtcgacgctgcagcacaacaatcaa

SEQ ID NO: 5847 - DNA, 60 bp, Homo sapiens
ttagcaggaggctctccttgcttgcactcaccctttcttattgtcttgccctgcatctgg

SEQ ID NO: 5848 - DNA, 60 bp, Homo sapiens
ctctggctcccttcacctcatttgtctacaccatcaaggaggaaggcctggttcttcaag

SEQ ID NO: 5849 - DNA, 60 bp, Homo sapiens
taactcattctatggagcaattattacatgtataccaaagctacctaaagacaccacaag

SEQ ID NO: 5850 - DNA, 60 bp, Homo sapiens
gccaaaacagtcttgagcagaatgaagaagtctggaagcatcatgccccctgatttaaaa

SEQ ID NO: 5851 - DNA, 60 bp, Homo sapiens
aactcacagggcctcagatgtcctctgctcaccccaaccagtcccctgcaaactcccttt

SEQ ID NO: 5852 - DNA, 60 bp, Homo sapiens
tgagagactctgttctccctggagggactggttgccatgagagcagccgtctgaggggac

SEQ ID NO: 5853 - DNA, 60 bp, Homo sapiens
actgaggggctgtgagctagttgatctcgcggacgaagtggcctctgtctaccagagcta

SEQ ID NO: 5854 - DNA, 60 bp, Homo sapiens
tctttgtggtgagactatttaaaatctactctgaatatttcttaaaagtatgctccacta

SEQ ID NO: 5855 - DNA, 60 bp, Homo sapiens
gactgcatttcaaggaattgatttatttcgtctaggttaacggatctatgggcatgaagt

SEQ ID NO: 5856 - DNA, 60 bp, Homo sapiens
gtccagcgtgtgggtcagaattagtccacatctcaggcgaagtggcgttacgttgtatta

SEQ ID NO: 5857 - DNA, 60 bp, Homo sapiens
gcgcccagtacctcggatcatgcggaacatgttgtcaaagctgcagattgcctgtgacaa

SEQ ID NO: 5858 - DNA, 60 bp, Homo sapiens
tttatgtgggcagatgctgtggtcaggaactaggcatgctttctggcaatgcactcacca

SEQ ID NO: 5859 - DNA, 60 bp, Homo sapiens
acctctcagacctgctgttgggttctcatcgatggacccgatgcttcctagcaaatgata

SEQ ID NO: 5860 - DNA, 60 bp, Homo sapiens
ctacttcttcaatggaaggattgtccttagatcttcccaccatcacaaatgaatttgaag

SEQ ID NO: 5861 - DNA, 60 bp, Homo sapiens
gccctagttactaccattctcgttttggaggaaacaatctctgccaccaccaagtcattg

SEQ ID NO: 5862 - DNA, 60 bp, Homo sapiens
cgatgcataatgcacaagacctgcagaagtggacagaggagttcaacatggaagaaacac

SEQ ID NO: 5863 - DNA, 60 bp, Homo sapiens
ggaagaagacccttgctacttccattaaatatggtaagttctagccagaacagttaggcc

SEQ ID NO: 5864 - DNA, 60 bp, Homo sapiens
cggcattgtgtactgcaggactagagaggcttgtgaacagctggccatagagctcagctg

SEQ ID NO: 5865 - DNA, 60 bp, Homo sapiens
ggcttctgctccctgagactctgggttcacccacagcactttctgaggaagaggacacca

SEQ ID NO: 5866 - DNA, 60 bp, Homo sapiens
tgccacctgcacctcgcccatgcactactgcagggaaaacgcagagaggagtcacggcca

SEQ ID NO: 5867 - DNA, 60 bp, Homo sapiens
atctgggtcaataactagaccacagtcagacccctgaagctccctctgtgtcttgtctag

SEQ ID NO: 5868 - DNA, 60 bp, Homo sapiens
tgcttccagattggtgcagcaaggactcctcactccagacatgctgaaacagctagaaaa

SEQ ID NO: 5869 - DNA, 60 bp, Homo sapiens
tttatcctggatgaagctagcctcagtgacacacatgacaggttgcactgccgacgttgt

SEQ ID NO: 5870 - DNA, 60 bp, Homo sapiens
tgggagcagatggagaaacagcaagtccacaccttttccccatcagttgagaagagtgag

SEQ ID NO: 5871 - DNA, 60 bp, Homo sapiens
atatccaaccccactaaaatacacattcctctcaagtatacacacagaacatattccaga

SEQ ID NO: 5872 - DNA, 60 bp, Homo sapiens
atcctaagtcagcttgaagggtaggctggttttcttcccacccctttcctagaagggcta

SEQ ID NO: 5873 - DNA, 60 bp, Homo sapiens
gaacacagcagctacctagaaatgaagcgctttgtccagtggctgaagccccagaaaatc

SEQ ID NO: 5874 - DNA, 60 bp, Homo sapiens
actttagaagtgcggtttactcctcatgccgagatggaccttgggcagctcagttcacaa

SEQ ID NO: 5875 - DNA, 60 bp, Homo sapiens
tccagctgcaggaagcggtctattcgctgtcgcattacgcgcagcgtctggatctcgatc

SEQ ID NO: 5876 - DNA, 60 bp, Homo sapiens
cgtccactatgtctttctttcggctactattccaaatgcccgacagtttgctgaatggat

SEQ ID NO: 5877 - DNA, 60 bp, Homo sapiens
tcacacttactgcaaaggcttggctcccgaatgtcgcatttggtggacgagaaggtgctt

SEQ ID NO: 5878 - DNA, 60 bp, Homo sapiens
catcatcgaccagtgagcagagtccgtgcttgctatctgtctcatgttacagagcttcca

SEQ ID NO: 5879 - DNA, 60 bp, Homo sapiens
ccttctcatgcctctcgacgactgtgtgatgtggacatagactacagaccttatctctgt

SEQ ID NO: 5880 - DNA, 60 bp, Homo sapiens
tatatgcagaaccatcaagcaggagcaccagctccatccttgtcacgctgctctactcca

SEQ ID NO: 5881 - DNA, 60 bp, Homo sapiens
aaccgaaaacagcccactactcatcaccagagcttaaaagctgcaaccctggatattcta

SEQ ID NO: 5882 - DNA, 60 bp, Homo sapiens
acagaaatactctgaatggacatcgccagctgaagacagttccccagggataagcctgtc

SEQ ID NO: 5883 - DNA, 60 bp, Homo sapiens
ttgccattgtccttactctccagctccaaagtcagggaaagatggaaaggagccctacca

SEQ ID NO: 5884 - DNA, 60 bp, Homo sapiens
gagtaagttaaaaggtgcatctctgctgcctggcaagctccccacgtcggtttccctgtt

SEQ ID NO: 5885 - DNA, 60 bp, Homo sapiens
ccatggacagggacacagaccaggcactgttgacgctgctgcaaggcaaacgttttcaaa

SEQ ID NO: 5886 - DNA, 60 bp, Homo sapiens
gagtagggttttcctgtctttgactggtgtacagacctccaaagtcagagggattggtgt

SEQ ID NO: 5887 - DNA, 60 bp, Homo sapiens
tgagagaactactctatgtggtgcagactccatgctcttggcattgcagctttctatggc

SEQ ID NO: 5888 - DNA, 60 bp, Homo sapiens
tctctacgaacacgtgaaggaaaagcagctccgtccacaacgccgcttcggggctcctag

SEQ ID NO: 5889 - DNA, 60 bp, Homo sapiens
caactctctgacttagtaggcaccattagactgcttaatagccagagattctgatacata

SEQ ID NO: 5890 - DNA, 60 bp, Homo sapiens
gtgccctaaagcaccacagcaggaagagcttcccctcagcagcgacatggtggagaagca

SEQ ID NO: 5891 - DNA, 60 bp, Homo sapiens
gcagttgtatgaattccggttgcccccagccttaccaacaattgggtatggtcactattt

SEQ ID NO: 5892 - DNA, 60 bp, Homo sapiens
gagttcatcatgtctgccacacctaccatggggaacacagacttctggaaaacactccga

SEQ ID NO: 5893 - DNA, 60 bp, Homo sapiens
cagtgatgaattcctcgttctgcagccaacaagtcacctctgagggccatgtgtctaaac

SEQ ID NO: 5894 - DNA, 60 bp, Homo sapiens
cctctcctacagatgtgtactgtatcagccagcaatttaggcacagctgacatggccact

SEQ ID NO: 5895 - DNA, 60 bp, Homo sapiens
ctgtgtgtttgtcaatattctgcaatttcagccccatttgtactacgtgcgagacagcct

SEQ ID NO: 5896 - DNA, 60 bp, Homo sapiens
gtatttagtggggaatggaaagagttgcccttgttgcaagtaatgaagcctgatttgatt

SEQ ID NO: 5897 - DNA, 60 bp, Homo sapiens
atttcctcaggcctctcagtagtaagtgtgagcactagctctggaggcagatgagtcaat

SEQ ID NO: 5898 - DNA, 60 bp, Homo sapiens
caaccacctttccagccatagagattttaattagcccaactagaagcctagtgtgtgtgc

SEQ ID NO: 5899 - DNA, 60 bp, Homo sapiens
gaggtgcaatatacatttgacctacagcttgcccaagaggatgcaaagaagatggctgtt

SEQ ID NO: 5900 - DNA, 60 bp, Homo sapiens
attattttcacagggatcggctgaatacagggtcaaaggatctctttgcagaatgtgcca

SEQ ID NO: 5901 - DNA, 60 bp, Homo sapiens
caacttctaacctcaaccatccaggaaattgacagtggctgcagtattgactccagtgac

SEQ ID NO: 5902 - DNA, 60 bp, Homo sapiens
atctgccttgtggcccacaatggctttgattatgatttccccctgctgtgtgccgagctg

SEQ ID NO: 5903 - DNA, 60 bp, Homo sapiens
gtcagacatgagtctaaggttctgcccttactccagtgtgtgacccttggcaagtcagtt

SEQ ID NO: 5904 - DNA, 60 bp, Homo sapiens
cctttggctaaaagcaaggtacaatgcacatgccgaaagaccttagttttggatgtgatg

SEQ ID NO: 5905 - DNA, 60 bp, Homo sapiens
gtgaagaaataactcgagaagccaaaaaagcacgaaaagtaggtggccttactggtagca

SEQ ID NO: 5906 - DNA, 60 bp, Homo sapiens
ccatggggaaagtgaatgtggccaagttgcgttacatgagccgagatgacttcagggtct

SEQ ID NO: 5907 - DNA, 60 bp, Homo sapiens
gaagacaggattgaagtcagatctctgtcatctctaaaatggatttaagggcatgagagt

SEQ ID NO: 5908 - DNA, 60 bp, Homo sapiens
gcatatatttgttcatagtaatttctactgattgccacttctacagtatcagtgtaactg

SEQ ID NO: 5909 - DNA, 60 bp, Homo sapiens
ctgttgtattcatcatgctttttgttgcctgtgtactttgggtttttgtttgtatgtttg

SEQ ID NO: 5910 - DNA, 60 bp, Homo sapiens
gattgaacgatctgtggtggaagcagcagtccaggaatgcagtcagtctgttgatgaaac

SEQ ID NO: 5911 - DNA, 60 bp, Homo sapiens; identical to SEQ ID NO: 4855

SEQ ID NO: 5912 - DNA, 60 bp, Homo sapiens
ggagcagcacttcccaaaacttgttcactggggtcctcgtgcctatggaatccttctttt

SEQ ID NO: 5913 - DNA, 60 bp, Homo sapiens
ggctgtgggttccaaagggggagatatcatgctctggaattttggcatcaaggacaaacc

SEQ ID NO: 5914 - DNA, 60 bp, Homo sapiens
cctaaatggcctatttagcaagctgcaaccaagagatgcacaaccctccacaaatacaca

SEQ ID NO: 5915 - DNA, 60 bp, Homo sapiens
gaggcctgtgttctgtccactttgccgtttaatacccgatgagaatccaagcagcttcag

SEQ ID NO: 5916 - DNA, 60 bp, Homo sapiens
aatgcagagccaggtccctcagcccagactcagtcagacatgttcactaatgactcaagt

SEQ ID NO: 5917 - DNA, 60 bp, Homo sapiens
caatagttcctagtactggagaaccaactactctaagcagtgagacacatatacccgagg

SEQ ID NO: 5918 - DNA, 60 bp, Homo sapiens
ggtggaaaagtgctgctcacattgtggactgaaatgtatggaccccagacgttgaatagt

SEQ ID NO: 5919 - DNA, 60 bp, Homo sapiens
tgatcaggatgttagtcagtggacaactgcagacagtgatgaaggccatggtaacaacca

SEQ ID NO: 5920 - DNA, 60 bp, Homo sapiens
gcccaacacaaaggccatacacaagggattattgggtacaaagacgagccccacaaagag

SEQ ID NO: 5921 - DNA, 60 bp, Homo sapiens
gcctagttctgtgttgggctcttccattctattcatcaagttgtctatctctgcacaaat

SEQ ID NO: 5922 - DNA, 60 bp, Homo sapiens
atgcgctgatcgtttcttccagttagagtcttcatctgtccgacaagttcactcgcctcg

SEQ ID NO: 5923 - DNA, 60 bp, Homo sapiens
gaagaaagctgtggatatgacctgccatggagagccatctctttataattccctaagcat

SEQ ID NO: 5924 - DNA, 60 bp, Homo sapiens
gctccttcgagctggtttatagactgtgtgatgtcctttgagttgcttcctcttgacagc

SEQ ID NO: 5925 - DNA, 60 bp, Homo sapiens
ggcccacaaatcaacgcatcaataagcacgtcaacaatgatgtgaaccttcgcattcaga

SEQ ID NO: 5926 - DNA, 60 bp, Homo sapiens
acttactagttgtgtcaccgcgggcagttactaacctctcagtgcctgttccctcgtttg

SEQ ID NO: 5927 - DNA, 60 bp, Homo sapiens
gcctccagcagcaactctgccaggtcctcacaatgaatttcagaaaagatttccttgtgc

SEQ ID NO: 5928 - DNA, 60 bp, Homo sapiens
tttgcactgaatgatcaaaacacagcatatcaaaatttgtaggggcagtgaaagcagtac

SEQ ID NO: 5929 - DNA, 60 bp, Homo sapiens
aagtggtcaagttctcagcctcacctgacccggtccttcagtggactgagaggggctgcc

SEQ ID NO: 5930 - DNA, 60 bp, Homo sapiens
cacaatccctgtgaaaatcccagtaggctttttatggaaatcaacaagctgatcacaaaa

SEQ ID NO: 5931 - DNA, 60 bp, Homo sapiens
tgaaatgccagagagtttgaattttcctatgacaaaccacttctagcatacgttctagaa

SEQ ID NO: 5932 - DNA, 60 bp, Homo sapiens
ggggtgggaaggagtacctgttcagtaaaatgctgctgctgggacaactggcaattcaaa

SEQ ID NO: 5933 - DNA, 60 bp, Homo sapiens
gaataaacaggaacagaaggccctctctgacaaaaaacccgaaatacgtacccaccctgt

SEQ ID NO: 5934 - DNA, 60 bp, Homo sapiens
ccagcgttttagacagtttatcttgctcacacctcaaagcatgagttcacttccatccag

SEQ ID NO: 5935 - DNA, 60 bp, Homo sapiens
tggtttccccacttctgggaggtcagcagagggaaggcttggccttgatgatgcagctgg

SEQ ID NO: 5936 - DNA, 60 bp, Homo sapiens
atttgtgagacacataaagcagaactgatgggaaaatatatagcactaaatgcatgctct

SEQ ID NO: 5937 - DNA, 60 bp, Homo sapiens
cctcttaccttaagaatcctctgcctgagccaagctggattgtctccctgtgcctagaat

SEQ ID NO: 5938 - DNA, 60 bp, Homo sapiens
ttatacagtgctcagggttaacgcagtacatccatgccattgctgtgggaggtatccccg

SEQ ID NO: 5939 - DNA, 60 bp, Homo sapiens
gctagactctggagcacctgagtacaaggtgatacagacctacttagaacagactggcag

SEQ ID NO: 5940 - DNA, 60 bp, Homo sapiens
tttccgtggagcctctcactcagtctccattgcttgatgtgtggggttcagtgtatcgac

SEQ ID NO: 5941 - DNA, 60 bp, Homo sapiens
agggtaaatgggattccttgccacccaagctgtcagaactgccactgagctaaagatggt

SEQ ID NO: 5942 - DNA, 60 bp, Homo sapiens
gtaaaggctcaggctgttagtagccgcagagagccacactcaccttgtcaggagactctt

SEQ ID NO: 5943 - DNA, 60 bp, Homo sapiens
agtgggttccttgggaagaactacctcccctggaccagcttttctggggactgcgttgtt

SEQ ID NO: 5944 - DNA, 60 bp, Homo sapiens
gggcattgagtggcgcagagccgggtttcatctggaattaactggatggaagggaaaata

SEQ ID NO: 5945 - DNA, 60 bp, Homo sapiens
gagtggctatagtaatcaaagtagatttcagagcaaagactatgaaagataaagacagtc

SEQ ID NO: 5946 - DNA, 60 bp, Homo sapiens
ctacaaagcccagaacacccattggaccaacactatagaaacctacattgtgccttgcgc

SEQ ID NO: 5947 - DNA, 60 bp, Homo sapiens
aagtttgccactagacatctagacatctttattttgctggtctatgtaggagtatttggc

SEQ ID NO: 5948 - DNA, 60 bp, Homo sapiens
acttagggatacatctgtatgcccttggttatttatgacaatggactcttacatgacacc

SEQ ID NO: 5949 - DNA, 60 bp, Homo sapiens
aaaagggtaaagaggcacggacaacggtcgagcccattttttgtcaaggggaaccgggcc

SEQ ID NO: 5950 - DNA, 60 bp, Homo sapiens
ccccttcgtgttgccatcatcttgttgaatcagccattttatcgaggcacgtgatcagtg

SEQ ID NO: 5951 - DNA, 60 bp, Homo sapiens
gacaacaagagaaaatctgtgtgacattgggtattgggtattagttatggtgaagacttt

SEQ ID NO: 5952 - DNA, 60 bp, Homo sapiens
attcattgtgattgtatagggatacaacctattttgcatgtcaaacttgtactttgtaac

SEQ ID NO: 5953 - DNA, 60 bp, Homo sapiens
aagcctcttgacagcatctgtgaccgaccatgcaccaaagccatgatatagcaacagctg

SEQ ID NO: 5954 - DNA, 60 bp, Homo sapiens
tcccggatccattttgggaaagtgtctctctgtcttttgccaccaatatgcattgtttgt

SEQ ID NO: 5955 - DNA, 60 bp, Homo sapiens
ccccttatcagtcccttagtgcctctttctgtttgtggcatggtgagaaaacccatgctg

SEQ ID NO: 5956 - DNA, 60 bp, Homo sapiens
atgtcatttcgtacaccacagctcagtcagcccatggccttcgtgaactttgctccaaca

SEQ ID NO: 5957 - DNA, 60 bp, Homo sapiens
ttctctgtgcaatgatctcatgctcaggacagttgcgcagggactcctgggagatattca

SEQ ID NO: 5958 - DNA, 60 bp, Homo sapiens
ggggtctggtaaacatctcttcctccaggttggggcgtcttcaaaattcaccgggggctc

SEQ ID NO: 5959 - DNA, 60 bp, Homo sapiens
gagtcgttcaccagacaggtgttatggaagctgctgaaggttgtgaaattcggagaagtg

SEQ ID NO: 5960 - DNA, 60 bp, Homo sapiens
caccactcctttccttaccacatcaactgattaaagcagtgaccagcaggaactgcccag

SEQ ID NO: 5961 - DNA, 60 bp, Homo sapiens
aggaggaaagtacagggctgctgagcggcctccggatctggcacacacagctgctcccag

SEQ ID NO: 5962 - DNA, 60 bp, Homo sapiens
cttcaatcccaacctgcgctgtgattttagcctcctgagattggagtttccatcccatgt

SEQ ID NO: 5963 - DNA, 60 bp, Homo sapiens
gagagtctacagatgggatgggtctgaccccttgtgggatgaaagccaaacctttcccat

SEQ ID NO: 5964 - DNA, 60 bp, Homo sapiens
agttatcgagcttgtgtccagctgctcagcagtcttagtgggtatcagtacacacggaga

SEQ ID NO: 5965 - DNA, 60 bp, Homo sapiens
aagggaccaagaacgcagacctgatttccaagccaagactcccatgctgcctcatttgta

SEQ ID NO: 5966 - DNA, 60 bp, Homo sapiens
agtccacctttctcaagaagcacctcgtgtcggccggatatgtccacgtgaacagggaca

SEQ ID NO: 5967 - DNA, 60 bp, Homo sapiens
ctgaccaccgtgaagtcagtcaacaaaacggacagtcagaccctcctgaccacatttgga

SEQ ID NO: 5968 - DNA, 60 bp, Homo sapiens
ccaaacatgagacaaagctgactgttcacactgattgcccagcacataccgtcttgccag

SEQ ID NO: 5969 - DNA, 60 bp, Homo sapiens
tgatagttgatgaagttgaggctcagggaaggcaaagaacttacctaagcaacatagttc

SEQ ID NO: 5970 - DNA, 60 bp, Homo sapiens
aaagcaaccccaaatccaagtcttctagctgctgaggaccaagtgccctgtgagaagtgt

SEQ ID NO: 5971 - DNA, 60 bp, Homo sapiens
taggtatctgtgactcttgggcctctgctctggtgggaacttacttctctatagcccact

SEQ ID NO: 5972 - DNA, 60 bp, Homo sapiens
ccgtggtggatgactcgaagggatcctttctgtgggggaaacctgatctcgacaaaatta

SEQ ID NO: 5973 - DNA, 60 bp, Homo sapiens
actagcggatcaagtatggacactgactcagactgaggagcagctccactgcactgtgta

SEQ ID NO: 5974 - DNA, 60 bp, Homo sapiens
ggcttcaggacctgcttggtcagctgcaggttgtaaatagtgtacgatactagcatctgg

SEQ ID NO: 5975 - DNA, 60 bp, Homo sapiens
aggaacaaaaaggatgcacctgtggaccatctggggactgagcactgctatgactccagt

SEQ ID NO: 5976 - DNA, 60 bp, Homo sapiens
ggccgaggtctggtacgactggagtaccggcagcgctgggatgaagcctttcgcaagttc

SEQ ID NO: 5977 - DNA, 60 bp, Homo sapiens
aaattcagtgccttctggatcttctgcgcagtccaaggtgcgttctactccaagagttaa

SEQ ID NO: 5978 - DNA, 60 bp, Homo sapiens
ccgagtgacagatccacagggtaaatctgacatccccatggacctgtttgacttctatga

SEQ ID NO: 5979 - DNA, 60 bp, Homo sapiens
ggtgtgcaacaccatctagcagccacctgcctgctcctatgtgccctcaccatccaataa

SEQ ID NO: 5980 - DNA, 60 bp, Homo sapiens
tcgagagcaattgagagtgatctcagtgatgacatcagtgaagacacagtacaggccgct

SEQ ID NO: 5981 - DNA, 60 bp, Homo sapiens
acatggtcacaaccgtggatcaaacaaggtcagtctaaagtggcaggtcctaggtgtgac

SEQ ID NO: 5982 - DNA, 60 bp, Homo sapiens
catgttcccagctgagagactatatcactcttggagcggaggccttcttattgaggctct

SEQ ID NO: 5983 - DNA, 60 bp, Homo sapiens
cgtgggccattcatccacctgtcagtcaacaacacccgctgagcatcggcttgtatcaaa

SEQ ID NO: 5984 - DNA, 60 bp, Homo sapiens
atgagtgtcccgacaccctctcggatgcagggcaggaccacccagctggtcagactctga

SEQ ID NO: 5985 - DNA, 60 bp, Homo sapiens
ggtgcctggaagggggagaggagtctgtgagtccctgcagattgaggcttccggtgtctc

SEQ ID NO: 5986 - DNA, 60 bp, Homo sapiens
tgaagctgaagctgctgatgagaaggatgtagttgacaacgatgaagggaactggcttca

SEQ ID NO: 5987 - DNA, 60 bp, Homo sapiens
aacctttcacgtctggacgaattaccaaatgccatgaattgccactgtgtgtttatgtag

SEQ ID NO: 5988 - DNA, 60 bp, Homo sapiens
cttcttacaacagagatgggagctgagtgctagagtaggtgcagaagtggtaggtcagct

SEQ ID NO: 5989 - DNA, 60 bp, Homo sapiens
atactctggagatcaccgaccttgctgacttctccccgctcaccctccttgctaactttg

SEQ ID NO: 5990 - DNA, 60 bp, Homo sapiens
gatgtttaaatcttgtcgaaggctcacctgatggaaaatggactgggctactgagatatt

SEQ ID NO: 5991 - DNA, 60 bp, Homo sapiens
ggcctgctcaccattcatcatgttcgctaccttcacactttatctgacataagagctcca

SEQ ID NO: 5992 - DNA, 60 bp, Homo sapiens
aacaccagctgaggagaaaccaatagaaatacagtgggtaaaaccagagccaaaagttga

SEQ ID NO: 5993 - DNA, 60 bp, Homo sapiens
cagggtttactagcattgggcatcagtaagtctgttcaaacaccagatccttctcatccg

SEQ ID NO: 5994 - DNA, 60 bp, Homo sapiens
aagcgcagggatgtcggtgtcattgccctcactaacgtcatgggcttcatcatgaatctg

SEQ ID NO: 5995 - DNA, 60 bp, Homo sapiens
cagtctcacatgattccagccatcaccttagaccaccaagccttgattggtgttgccagt

SEQ ID NO: 5996 - DNA, 60 bp, Homo sapiens
ggatttggaagatcctaacctggacttgaacgttttcatgagccaggaagtgctgcctgc

SEQ ID NO: 5997 - DNA, 60 bp, Homo sapiens
ctgctaagctggtacgaccaagagaaacgggacctaccatggagaagacgggcagaagat

SEQ ID NO: 5998 - DNA, 60 bp, Homo sapiens
ctgttgtcagctttgctcacgtgtcaaatggagcacctgttccatatgtacgaccagcca

SEQ ID NO: 5999 - DNA, 60 bp, Homo sapiens
aaatgagaagaccctactgaccagcccaagaagacagatgacaagatactgaggatggcc

SEQ ID NO: 6000 - DNA, 60 bp, Homo sapiens
agctgctgaccgatggccactacatgacgctgcccctgtctccggaccagctgccctgtg

SEQ ID NO: 6001 - DNA, 60 bp, Homo sapiens
gagtccttggagaaaagtaagaaaccaggagtgtttccagttccaccctttcctgcggca

SEQ ID NO: 6002 - DNA, 60 bp, Homo sapiens
cagcagggctctctgtatcagtctttcttgagcagatgattcccctagttgagtagccag

SEQ ID NO: 6003 - DNA, 60 bp, Homo sapiens
gaacctggaggccttggccttggatttgatggagccggaacaagcagtggacctgacatt

SEQ ID NO: 6004 - DNA, 60 bp, Homo sapiens
tagctcatcatgctcgaaagaatacagaactagaagagtggctaaggcaggaaatggagg

SEQ ID NO: 6005 - DNA, 60 bp, Homo sapiens
ttcctcccaacaagcagctgggttaggaaaaccatgggtaaggacggactcacttctctt

SEQ ID NO: 6006 - DNA, 60 bp, Homo sapiens
tcttctccacatccccagccaaagacagccttagctttgaggacttcctggatctcctca

SEQ ID NO: 6007 - DNA, 60 bp, Homo sapiens; identical to SEQ ID NO: 4855

SEQ ID NO: 6008 - DNA, 60 bp, Homo sapiens
tctttgatgcccttctacgcccagacacagactttgggggaaacatgaagtcggtcctca

SEQ ID NO: 6009 - DNA, 60 bp, Homo sapiens
tcatctctagtcctttgcctttctgcacggtgtacccatctcccatatctccttggctag

SEQ ID NO: 6010 - DNA, 60 bp, Homo sapiens
tacagtcagaaggacaggacaatggggcggaagattctggggacacagaggatgagctga

SEQ ID NO: 6011 - DNA, 60 bp, Homo sapiens
aagaccgtgttccgggccaggtttagctccatcacggacacagacatctgtaatgccatg

SEQ ID NO: 6012 - DNA, 60 bp, Homo sapiens
tacaggaaggcacctatgtgatggtggcaggccccagctttgagactgtggcagaatgtc

SEQ ID NO: 6013 - DNA, 60 bp, Homo sapiens
caaggggatcgccgacctgctgtcaaacggtcgcatgaggcggagagaaggactttcaaa

SEQ ID NO: 6014 - DNA, 60 bp, Homo sapiens
ggggtctttcggaagtttgcaacagacaataactgccatgtgacactggtcattcacccc

SEQ ID NO: 6015 - DNA, 60 bp, Homo sapiens
cacccaagacctggacaaagtcatgtctgcagtgaaaggaattgacggtgtttctgtcac

SEQ ID NO: 6016 - DNA, 60 bp, Homo sapiens
tcgtgtacccttaacaggtatctgctcctcatggcgcaggagcatctggagttccgcctg

SEQ ID NO: 6017 - DNA, 60 bp, Homo sapiens
catgtaaggacaagttcctggatgccctcttcctgtacgacgatgacgggtaccaatcct

SEQ ID NO: 6018 - DNA, 60 bp, Homo sapiens
gccaccatgctgctcacttatgtcatccacttggcccttgtatgacctgaatttgcaacc

SEQ ID NO: 6019 - DNA, 60 bp, Homo sapiens
caattcgagggctccttgtggtgggatcagaactaatccagagtgtgggaaagtgacagt

SEQ ID NO: 6020 - DNA, 60 bp, Homo sapiens
ctttgcagctttgctaatccagttgctcaagttctttacctcaacctgaaggaatgaagc

SEQ ID NO: 6021 - DNA, 60 bp, Homo sapiens
gagtcattgctgtggataagcgggaagctgctatctctctgacccatgagaatgctcaga

SEQ ID NO: 6022 - DNA, 60 bp, Homo sapiens
ccgctggtctgcttgtaacatctactcaactcagaatgaagtagctgcagcactggctga

SEQ ID NO: 6023 - DNA, 60 bp, Homo sapiens
aacatgaatgcaggcagatttcgtgaaatctgccaccactttataaccagatggttcctt

SEQ ID NO: 6024 - DNA, 60 bp, Homo sapiens
tgcctattctgccatttctcaggaaagggtggagtatgtatcatatgccttctaccatcc

SEQ ID NO: 6025 - DNA, 60 bp, Homo sapiens
aagaattcagcaagctgcttctccaatcaaagctgcctgccgtgctcaccctgtgtgtta

SEQ ID NO: 6026 - DNA, 60 bp, Homo sapiens
gggtcgcctccagaggtgcgtggtcgtggcgcgagggatcctgaggctgctccagcagtg

SEQ ID NO: 6027 - DNA, 60 bp, Homo sapiens
ggacgcccatggaacgcagcgaaggactatggcaggggagaacttcgctacgccgttcca

SEQ ID NO: 6028 - DNA, 60 bp, Homo sapiens
ttgctgcgatatgctcttctgttagacattgttcagcccacttgtagaaggtccgtgtgc

SEQ ID NO: 6029 - DNA, 60 bp, Homo sapiens
gccttctcagcctctgctatttcctttgaggaaggtagaagtgagtttccatgtttgcag

SEQ ID NO: 6030 - DNA, 60 bp, Homo sapiens
ccatcaacaagagctttgaccagagggacctggcacaggatgaagctgtatggctggagc

SEQ ID NO: 6031 - DNA, 60 bp, Homo sapiens
attgtcaggttcttctcccggttcacagaggtcagggagtttgccattgttcccctgcat

SEQ ID NO: 6032 - DNA, 60 bp, Homo sapiens
accaggggcatggacacgtgatgtgctgctctgtacctccgttccccatctgtgggacgg

SEQ ID NO: 6033 - DNA, 60 bp, Homo sapiens
cagccaaggctggtcaaggcaacatctccacacagaaaatctgcaccagttatgtaagct

SEQ ID NO: 6034 - DNA, 60 bp, Homo sapiens
tacgtggggagcatattaaagccagtaagagatcaatttccccaattttttatcattcat

SEQ ID NO: 6035 - DNA, 60 bp, Homo sapiens
agggatgctcaaacgcaactgtttctacttccccatttcaggtgtgagatgtaacccacc

SEQ ID NO: 6036 - DNA, 60 bp, Homo sapiens
ctttccccaacgtggaagggaccatagcaaggacccctgagttctccaacagacgttcaa

SEQ ID NO: 6037 - DNA, 60 bp, Homo sapiens
ctacccacgcaaggcaattctctattggatctcaacccatatctgcctctcaaacagttg

SEQ ID NO: 6038 - DNA, 60 bp, Homo sapiens
aaactgctgtttagacgtagacaataggcgagctgtcatgggaattactgccaggatgtg

SEQ ID NO: 6039 - DNA, 60 bp, Homo sapiens
cagtgtggggaatggggacattgataccccctttgaagtgagccagtttttacgtcaggt

SEQ ID NO: 6040 - DNA, 60 bp, Homo sapiens
ctatgatctctatgcccaatatgctgcctcaactctgagctgtctgcaaggcttagtaag

SEQ ID NO: 6041 - DNA, 60 bp, Homo sapiens
cttcttaagggaaagcaacttcttcgtgaggggaaagtctcggaagctcgagagtgtttc

SEQ ID NO: 6042 - DNA, 60 bp, Homo sapiens
gctgtcgtgactacacagagttactggcacaagtttatcttcttccagatttcctttcag

SEQ ID NO: 6043 - DNA, 60 bp, Homo sapiens
gaattaactgcaatggcaggagagagttacagtcgggcatatggggccatggtttcttgc

SEQ ID NO: 6044 - DNA, 60 bp, Homo sapiens
cagtgttttgagaacttaagtggctaaagagatgagacaaacatgcaggtcgctactggc

SEQ ID NO: 6045 - DNA, 60 bp, Homo sapiens
gttctctacaggcctcttcctgttgtgactgccaggataaagcttccgggaaaacagcta

SEQ ID NO: 6046 - DNA, 60 bp, Homo sapiens
gaaacagaacgtgaaggaagagctacagaacaagagacgagagccgaacccaaaaggacg

SEQ ID NO: 6047 - DNA, 60 bp, Homo sapiens
gcacattcacagatgaagataatgccatgtacctcctggtggtgaaccatccagatgcca

SEQ ID NO: 6048 - DNA, 60 bp, Homo sapiens
catacttgaacttacactgggcaaatgttgtttactacagtccaaatgaagttaaagtgg

SEQ ID NO: 6049 - DNA, 60 bp, Homo sapiens
tctctgtactgccccgtagaaaagtcgaacatcagttgtggaaatgagaaggaacccagc

SEQ ID NO: 6050 - DNA, 60 bp, Homo sapiens
gagcaagtggctgattgttaccgtctgcgatggcaaattgaactggcttttaagcggctc

SEQ ID NO: 6051 - DNA, 60 bp, Homo sapiens
acttactagggaagctatgcgaaattatttaaaagagcgaggggatcaaacagtacttat

SEQ ID NO: 6052 - DNA, 60 bp, Homo sapiens
tgttttgtctgagaagcccagggtgagcaccgtgtatgccaacaatggctctgtgcttca

SEQ ID NO: 6053 - DNA, 60 bp, Homo sapiens
tatcatcagctcctctgaaatgtgatccctttgtaactgtgctcatcacttcgccagtgc

SEQ ID NO: 6054 - DNA, 60 bp, Homo sapiens
atgagaacgcatctcagcccgaggtgctggtccccatccggctggacatggagatcgatg

SEQ ID NO: 6055 - DNA, 60 bp, Homo sapiens
attccacgactcttctttgcgggagaacatacgatccgtaactacccagccacagtgcat

SEQ ID NO: 6056 - DNA, 60 bp, Homo sapiens
tgtagcagcagcatttatgaatggggtgaatggggctattgtcgacggcacagctaatgc

SEQ ID NO: 6057 - DNA, 60 bp, Homo sapiens
acccctccacaaggctccatggccaatagtactgcagtggtaaagataccaggcactcct

SEQ ID NO: 6058 - DNA, 60 bp, Homo sapiens
taaaccagagtcgaactttactgtctcctcagcaacaacagcagcagcaagtggcacttg

SEQ ID NO: 6059 - DNA, 60 bp, Homo sapiens
gttcagaaccaacttctgtatatagaggctgccgcaaaggactttctcttgggaacattg

SEQ ID NO: 6060 - DNA, 60 bp, Homo sapiens
ttctcacccacatcattgaaggctttgttatccaggaaggagcagaacctttccccggtg

SEQ ID NO: 6061 - DNA, 60 bp, Homo sapiens
aaagcttacaatctgaaggtgtccgttcttacactggtcagaccactgtccttggggcag

SEQ ID NO: 6062 - DNA, 60 bp, Homo sapiens
gtcaactggtcgagatacagcatgtgtgaaggctctaagagacattgaacctggagaaga

SEQ ID NO: 6063 - DNA, 60 bp, Homo sapiens
aaaacccaagaaactgctgtcgccatgcatgttgctgccaactctatccaaaacaggccg

SEQ ID NO: 6064 - DNA, 60 bp, Homo sapiens
gacgaagcacagagccttccataggtatggagggctcatcattgtactttgttgttgaat

SEQ ID NO: 6065 - DNA, 60 bp, Homo sapiens
tgaacccctaagtctcctgtgccaagctgctccctgaaatggacttcttcatctgtacag

SEQ ID NO: 6066 - DNA, 60 bp, Homo sapiens
ctcaccagaagagctccgctttgggagtctgacctacagtgatccccgtgagcgagaacg

SEQ ID NO: 6067 - DNA, 60 bp, Homo sapiens
cggctgaacttggcatttccttgctaactgccagatgtggccaacctttgtccatatgca

SEQ ID NO: 6068 - DNA, 60 bp, Homo sapiens
cattaagttccaattctacacccacagccagagcatctccagggatgactttctggtatt

SEQ ID NO: 6069 - DNA, 60 bp, Homo sapiens
cgttgctcagataactcaagctatgaggaacccttgtcacccatctcagccagctcatct

SEQ ID NO: 6070 - DNA, 60 bp, Homo sapiens
gttacaaggcactaatagttctggatccttgggtggtcttgatgttcgcagacgaattcc

SEQ ID NO: 6071 - DNA, 60 bp, Homo sapiens
ggcggtgcagatccgcgtcgccatccaggaggccgaggacgtggacgagttggaggacga

SEQ ID NO: 6072 - DNA, 60 bp, Homo sapiens
cggagaaacagagggaaacccacagtgtggacagacttccttccgccctcactgcgaccg

SEQ ID NO: 6073 - DNA, 60 bp, Homo sapiens
tgaccacggcgactggacttacgaggagcagtttaagcagctctacgaactcgacgggga

SEQ ID NO: 6074 - DNA, 60 bp, Homo sapiens
acaaccagcaggcattgagctccagcattgaggaggggctacgcatgcaggccatgcaca

SEQ ID NO: 6075 - DNA, 60 bp, Homo sapiens
ttcagacaaaaaagtgcaaacaaaagggaaaaggggagcaaagggaaaacaggccgaagt

SEQ ID NO: 6076 - DNA, 60 bp, Homo sapiens
ctttggcaaatgttgatacacagtgtttggacttactgaagagttactgaagcctgtggg

SEQ ID NO: 6077 - DNA, 60 bp, Homo sapiens
gtgactataagctttgtgcttagagaatgtatgtgtttttatctgtcagtatgggaggat

SEQ ID NO: 6078 - DNA, 60 bp, Homo sapiens
ggtcaggtttttcaaggaacatagcttacaaatgcatcagtgtgtatctggagagcatcc

SEQ ID NO: 6079 - DNA, 60 bp, Homo sapiens
gcaaactttggtgcgagccacagtgcatcactttccttgcaaatgttcactgacagcagc

SEQ ID NO: 6080 - DNA, 60 bp, Homo sapiens
actgagggctctctgccacgtggggctctttgacttcgccttttgtgccttgtttgactg

SEQ ID NO: 6081 - DNA, 60 bp, Homo sapiens
tgaaaagctgagccccaaaccagggacaggtgaaccagttttaagtttgcactacagcac

SEQ ID NO: 6082 - DNA, 60 bp, Homo sapiens
aagctcatcgtccgcatcaaggaaatcctggcccaggtcgccagcgagcacctgtgagga

SEQ ID NO: 6083 - DNA, 60 bp, Homo sapiens
taagcacctctcctttgcccttcaccctgactcctgtcactgtctccatccccaaataaa

SEQ ID NO: 6084 - DNA, 60 bp, Homo sapiens
acactgtctcctgctggcattcaccccactcatgctggaaaggaagatccagatcgtaca

SEQ ID NO: 6085 - DNA, 60 bp, Homo sapiens
ttcactgtacattcgttctcaggtggtcttgtggctgtctttcggaaaatggttatttta

SEQ ID NO: 6086 - DNA, 60 bp, Homo sapiens
ttttcggtatttctgcctagtagttcttagacacagttgacctagtaaaatgtttgagaa

SEQ ID NO: 6087 - DNA, 60 bp, Homo sapiens
agtgagaccagcgatagtgattgatactgctcaacacagcccaacctatagtgccctgtg

SEQ ID NO: 6088 - DNA, 60 bp, Homo sapiens
ctcatgttgaggctatggttttgtaggaacaagtacccttattttcagagcatcatgtac

SEQ ID NO: 6089 - DNA, 60 bp, Homo sapiens
gcctatcctgctgttctagcacttcatctggctgcctttgcagtccttttactacagcta

SEQ ID NO: 6090 - DNA, 60 bp, Homo sapiens
acatttggccagtatgtctttctcaggggtttggtcacaaaggatggactcttcccaccc

SEQ ID NO: 6091 - DNA, 60 bp, Homo sapiens
atatgcttcccagagactggtattgtggctgtgccaggagtacatgtgagactatgggag

SEQ ID NO: 6092 - DNA, 60 bp, Homo sapiens
tctataatgaggatgactctgaagaggagcaaaggcagctgttgttcgaagacacctctt

SEQ ID NO: 6093 - DNA, 60 bp, Homo sapiens
gtcaaagtgggcctgagaaaagctcatacatgcctcatgtgaagtgtccaccctctctga

SEQ ID NO: 6094 - DNA, 60 bp, Homo sapiens
caggactgttatggccctgttgtgctgagttagttggaacagaattcaagctccctgcac

SEQ ID NO: 6095 - DNA, 60 bp, Homo sapiens
gcgccacatcatccaccaacaatccagaatttgtggaggatctctctcaaggtcagttgc

SEQ ID NO: 6096 - DNA, 60 bp, Homo sapiens
tcagggcttgaacctattctggtagaatcagactcatcctctggtggggaactagaggct

SEQ ID NO: 6097 - DNA, 60 bp, Homo sapiens
attttaagtactatgacgatgctgctgatgaataccgggaccaggtgggtaccctgctgc

SEQ ID NO: 6098 - DNA, 60 bp, Homo sapiens
tctcccctcgttgcctttgtagtggagaaggtggacaagtggcagtcggcgtgatcgcag

SEQ ID NO: 6099 - DNA, 60 bp, Homo sapiens
agtttcctctgctctccgctctcgcccgctagctctcctcccttccgctcctgcttctct

SEQ ID NO: 6100 - DNA, 60 bp, Homo sapiens
gccagagcattgagaagttcagctgttgtagagcttgatttggaaggcaccagaatccgg

SEQ ID NO: 6101 - DNA, 60 bp, Homo sapiens
acacattttgtgcgcatgatgaagagagcaccgtgaatctagtcttgactgcccctggtg

SEQ ID NO: 6102 - DNA, 60 bp, Homo sapiens
tgcccttgactccacctatgttggagccttagcccaaggccattccttctgtgatgataa

SEQ ID NO: 6103 - DNA, 60 bp, Homo sapiens; identical to SEQ ID NO: 4855

SEQ ID NO: 6104 - DNA, 60 bp, Homo sapiens
gagcagtttgccaactgagaaggacaaccaaagtgagctggatctttgaagcacaaatgc

SEQ ID NO: 6105 - DNA, 60 bp, Homo sapiens
tatgtctccccactaaccacatcctacctagggacacacaggcagctgaagaacatctgg

SEQ ID NO: 6106 - DNA, 60 bp, Homo sapiens
tcttcggctttgttcagaccctgacaggttgtgaggaccaagcacgcctcttcaaagacg

SEQ ID NO: 6107 - DNA, 60 bp, Homo sapiens
tggaagagctggtccttgcccacgatctgctggtgcacaatggcactgtcggagcacacg

SEQ ID NO: 6108 - DNA, 60 bp, Homo sapiens
ccgatgagggttggattagaggggttaaacaacttgtcttaggctccacagctgggaaca

SEQ ID NO: 6109 - DNA, 60 bp, Homo sapiens
caacattttggtatatgtttttccaggcttctttgggttgatcccacctatgagatcaga

SEQ ID NO: 6110 - DNA, 60 bp, Homo sapiens
atattgccaactagatacactgcctcaatcttgaccagacaagagaacagttaagttctc

SEQ ID NO: 6111 - DNA, 60 bp, Homo sapiens
cccaagagtaggaaagggcaaggttcgagaaaatcgggagaaagggtgggttccacaaaa

SEQ ID NO: 6112 - DNA, 60 bp, Homo sapiens
aaccctgcctcatctgttcctgccagaccctgagggtcacccttccaccctggtgtcact

SEQ ID NO: 6113 - DNA, 60 bp, Homo sapiens
ttgggattgcggcttcctgtcttctgtcttcatatctcataagcaggagacttccccagg

SEQ ID NO: 6114 - DNA, 60 bp, Homo sapiens
ggtgagatttggttgtttccaatggtttagaactctggaaaggaaggtttgggatagggg

SEQ ID NO: 6115 - DNA, 60 bp, Homo sapiens
aatacaagccttcctgcagaagaagcaaacgggagcctttctgaagaagaagcgaacggg

SEQ ID NO: 6116 - DNA, 60 bp, Homo sapiens
tgcatggtgaagacagaacagtgtctagtggctctgttgcataaacaccttcctggccac

SEQ ID NO: 6117 - DNA, 60 bp, Homo sapiens
cctgccctctgctgttacctgagtcctggggatgaacaggtcaactgcttcaacatcaat

SEQ ID NO: 6118 - DNA, 60 bp, Homo sapiens
tctgtgtcaagaggtggcagccgcacctttctgtgagaacggaactcgggttatttcagc

SEQ ID NO: 6119 - DNA, 60 bp, Homo sapiens
tataaacgacactacaagttgcagaccagaccaggcttcaataaggcccagttagcagaa

SEQ ID NO: 6120 - DNA, 60 bp, Homo sapiens
acttctccacacccccattcagatgcctgagaacagctaagctccgtaaagttggttctc

SEQ ID NO: 6121 - DNA, 60 bp, Homo sapiens
ccaccttaagagaacccttcaagtgtggagctttctagtaggtgtccttcatagctcaga

SEQ ID NO: 6122 - DNA, 60 bp, Homo sapiens
cctctcctcagagttagctccacatttattaaggcaccagcctgagtctcatagacctcc

SEQ ID NO: 6123 - DNA, 60 bp, Homo sapiens
tgccgctgtctaacttggtgtgcagagtgaattgccgctgccggagcggagagaggcgga

SEQ ID NO: 6124 - DNA, 60 bp, Homo sapiens
atgtgccaagtgtaagacgcagtacgtccgagacacagtcgtgggcaccatgggcctgaa

SEQ ID NO: 6125 - DNA, 60 bp, Homo sapiens
tctctaccctccagaggaatgagaagaacgtagcctcttccatgtttgagcgtgagaccc

SEQ ID NO: 6126 - DNA, 60 bp, Homo sapiens
ccacagggaaaaatgttaagaagacacagcatgaattagatcacaatggtctcgttccct

SEQ ID NO: 6127 - DNA, 60 bp, Homo sapiens
gcccccagagacctccaggcgggagccacaccaatggagaagtggtcatcatcatctcca

SEQ ID NO: 6128 - DNA, 60 bp, Homo sapiens
gcctcatttcttgctgcagagaatcttttgcactaagtcatgctgtttcctcaaagaagc

SEQ ID NO: 6129 - DNA, 60 bp, Homo sapiens
ctgacatgagtgatgccgaacaatacagaagctacagactggatattaaaagaagactaa

SEQ ID NO: 6130 - DNA, 60 bp, Homo sapiens
tgactttgtggtggaataccacggggacctcatcgagatcaccgacgccaagaaacggga

SEQ ID NO: 6131 - DNA, 60 bp, Homo sapiens
gatatcgaggacggagacagcatgatctcttcagccacctctgatactggtagtgccaaa

SEQ ID NO: 6132 - DNA, 60 bp, Homo sapiens
cattcactgggcagcgttcagtcaacagcaacgcaaagcaatgtggaaaaggcagactct

SEQ ID NO: 6133 - DNA, 60 bp, Homo sapiens
gaagtcgataatgaggaacacacccttgttcccgtcattcacgtataaagagtggctacc

SEQ ID NO: 6134 - DNA, 60 bp, Homo sapiens
atatgggaccatcaccagcttaccacttcccactcacggataagacaccaagacgtagac

SEQ ID NO: 6135 - DNA, 60 bp, Homo sapiens
ttaattcggcggccgcggatccgagccggacgggcactgggcgactctgtgcctcgctga

SEQ ID NO: 6136 - DNA, 60 bp, Homo sapiens
ccatgcatacccacatagttagcaccagcaacttcagtgagacctctgctttcatgccag

SEQ ID NO: 6137 - DNA, 60 bp, Homo sapiens
cctgactgcaagccaagcacagatgtatctgagggcacagatgctcatcttcacgcccac

SEQ ID NO: 6138 - DNA, 60 bp, Homo sapiens
gaccactcggtggacaggagagaaggttcaaggtcaatgatgggagaacgagaaggacag

SEQ ID NO: 6139 - DNA, 60 bp, Homo sapiens
tactaagtcccactcgctgtgagttttcgggtgggcagacgcactgttgaatctggtagc

SEQ ID NO: 6140 - DNA, 60 bp, Homo sapiens
ctacacctgtgggttatgacaaagacaactgccaaagaatcttcaagaaggaggactgca

SEQ ID NO: 6141 - DNA, 60 bp, Homo sapiens
tgtacattaacattacagcctctcaatttcaggcaggtgtaacagttcctttccaccaga

SEQ ID NO: 6142 - DNA, 60 bp, Homo sapiens
cggaacttagacatcaccggagtcaagaccgtgctcatctcccgactcaagcaggctatt

SEQ ID NO: 6143 - DNA, 60 bp, Homo sapiens
atgcaggtggatgaagccgcttccagggaagacaaactggaccttaccaagaagggcaag

SEQ ID NO: 6144 - DNA, 60 bp, Homo sapiens
gcagataaaggagagattcgagtaggaaaccggtaccaggcagacatcaccgacttgtta

SEQ ID NO: 6145 - DNA, 60 bp, Homo sapiens
tccatgcttgccgatggaggacagactgcaggaacttggcccatgtgggaacctagcctg

SEQ ID NO: 6146 - DNA, 60 bp, Homo sapiens
cagatcttcccaaccgtgaatggactgtttagatggtttaaggatcactaccaggatcct

SEQ ID NO: 6147 - DNA, 60 bp, Homo sapiens
gatgaagaacagaacacactaaatagcatctttgaatacaaagaaccaagaaaaaggaat

SEQ ID NO: 6148 - DNA, 60 bp, Homo sapiens
taagtaacatacccaaaatgctctgtcttgagtcatgagaaccatcagttcttgatattg

SEQ ID NO: 6149 - DNA, 60 bp, Homo sapiens
acagtgggcagtcgctggtcccggtttatatctatagtcccgagtatgtcagtatgtgtg

SEQ ID NO: 6150 - DNA, 60 bp, Homo sapiens
ttctgagcagaaaccaagttgggattgcagaacagagaagattcacagtgctttaccgtt

SEQ ID NO: 6151 - DNA, 60 bp, Homo sapiens
gacctggtggccttagtctttcaggtggaacggtgtgcgacatgggaaagaaaaccaagc

SEQ ID NO: 6152 - DNA, 60 bp, Homo sapiens
caaacagcggaaaatctactgcgtggcttgtcaggaactcgactcagacgtggataaaga

SEQ ID NO: 6153 - DNA, 60 bp, Homo sapiens
ctctgaggactgtgatgatgaggaaatgtgtcatgaagagatgtatggtaatgaggaggg

SEQ ID NO: 6154 - DNA, 60 bp, Homo sapiens
gtagcggtagttgatgggagctgttgaaacaggtaaacagcattctagcaatccttcgac

SEQ ID NO: 6155 - DNA, 60 bp, Homo sapiens
acacacattattcccacagaaatggaggtgtctccaagaaggggtcatataaacacgggg

SEQ ID NO: 6156 - DNA, 60 bp, Homo sapiens
taaagaacagcctaaagcaacagaggctaaggcaagggctgcagtaagagagactcataa

SEQ ID NO: 6157 - DNA, 60 bp, Homo sapiens
tgtaagtcccaagtatttccagcaggaagtaatgtcttcctcagcctcaaccagggacca

SEQ ID NO: 6158 - DNA, 60 bp, Homo sapiens
aagagtggagagtagtgatgtctagagggagctattttgtgctgaggccactatgttctg

SEQ ID NO: 6159 - DNA, 60 bp, Homo sapiens
ccgcccacttgtgtgcaagataactggaaaatgtctttctgtgtgctccgaggagaatgc

SEQ ID NO: 6160 - DNA, 60 bp, Homo sapiens
ctcggaacaacaagaagacgcgcatcatccctcgtaacctccagctggccatccgcaacg

SEQ ID NO: 6161 - DNA, 60 bp, Homo sapiens
ccagagccatgactagatccaatggattctgcgatgctgtctggactttgctgtctctga

SEQ ID NO: 6162 - DNA, 60 bp, Homo sapiens
ccgaaggcgccctcgggcggcaagaaggccacccaggcctcccaggagtactaagagggc

SEQ ID NO: 6163 - DNA, 60 bp, Homo sapiens
gcaatcccctccccactttttctgtgcctgtccctggtcagagcaggctgtcttggcctg

SEQ ID NO: 6164 - DNA, 60 bp, Homo sapiens
agtaactatctgtactagtttgtggcagctcaagtaaaatcgagtccaaaccaacggctc

SEQ ID NO: 6165 - DNA, 60 bp, Homo sapiens
atatgcaatcttgtctgccattgctgccatgaatgagccgaagacctgctctaccactgc

SEQ ID NO: 6166 - DNA, 60 bp, Homo sapiens
gctcgaagaaagccgtgactaaggcgcagaagaaggacggtaagaagcgcaagcgcagcc

SEQ ID NO: 6167 - DNA, 60 bp, Homo sapiens
ccagttccaagtaactttgccaagggagagacatgaagacagaggagaaatgaatgcata

SEQ ID NO: 6168 - DNA, 60 bp, Homo sapiens
agcagaatgggcgcacctacctcaagtactcgatcaaggcgctggtgcagaacgacacgc

SEQ ID NO: 6169 - DNA, 60 bp, Homo sapiens
ggctccaccagttgagcgataggagggatgtacgccattgttatcacgtaacatacgaca

SEQ ID NO: 6170 - DNA, 60 bp, Homo sapiens
ctgtccaacccttgattctgccgaggaagacactgatggtttgatgagtgattcagctgt

SEQ ID NO: 6171 - DNA, 60 bp, Homo sapiens
gccgtttgtcgctcagaattggcattttgagaggtgattgatactgctaacaattttcta

SEQ ID NO: 6172 - DNA, 60 bp, Homo sapiens
ttgcctgtgaggactgcggcttttcgctgtggctcgtccttaacgtttctgaaccacctt

SEQ ID NO: 6173 - DNA, 60 bp, Homo sapiens
ggtggggagtcttgtcattaaggtgtgtgtaatttagagtccagttggttttcttctgac

SEQ ID NO: 6174 - DNA, 60 bp, Homo sapiens
gtctcgaaggggcacctgtgaactcaaaaggctcttttcagagccacccacgttttcaaa

SEQ ID NO: 6175 - DNA, 60 bp, Homo sapiens
ggcctatctggttggcctttttgaagacaccaacctgtgtgctatccatgccaaacgtgt

SEQ ID NO: 6176 - DNA, 60 bp, Homo sapiens
tccatctgtaaggaagcaggtctccgcgaggggtttctttccatgtgttttcctcctgtt

SEQ ID NO: 6177 - DNA, 60 bp, Homo sapiens
caaacctatcagaaatttgtggccgagttcaagcactgaggccattactttcctattggg

SEQ ID NO: 6178 - DNA, 60 bp, Homo sapiens
tatatcaggttgtgcctcatgtaccgcttctagtgaaatgtagaggaaggctcaaaggag

SEQ ID NO: 6179 - DNA, 60 bp, Homo sapiens
ccctgtggcagtatgtgaagaccaacaggctgcaggactcccatgacaaggaatacatca

SEQ ID NO: 6180 - DNA, 60 bp, Homo sapiens
aggatgggcacgagcgggagtacatcaactgcaaccgttacttccgccagatcttcagtt

SEQ ID NO: 6181 - DNA, 60 bp, Homo sapiens
ggagagaggataggatgggaatgctgccctaaaggaagggctggtgaaaggtgtttatac

SEQ ID NO: 6182 - DNA, 60 bp, Homo sapiens
gccgcccttcctccatgtgtttgtaaatactctggcatcctttggccctgagaaggtttt

SEQ ID NO: 6183 - DNA, 60 bp, Homo sapiens
tcttcagttccaggaagatgcctttgggaagcatgtcaccaacccggccttcaccaaact

SEQ ID NO: 6184 - DNA, 60 bp, Homo sapiens
gttttcagagatccctcagcggctccatgccttgcttatgccaccagaacctatcatcat

SEQ ID NO: 6185 - DNA, 60 bp, Homo sapiens
taaagaagacccagactgcatcaaagccaaggtgcccttaggggacctggatctatatga

SEQ ID NO: 6186 - DNA, 60 bp, Homo sapiens
gagcgaggatcaacttcaggatccagatgacctagatgacagtcataggccaagtgtctg

SEQ ID NO: 6187 - DNA, 60 bp, Homo sapiens
gagagttgctgcctttgatagacccatgctgaccacagcctgatattccagaacctggaa

SEQ ID NO: 6188 - DNA, 60 bp, Homo sapiens
ttcctcctcaaagcgcaggccaaggcaaaggccaaaacttacgagtttcgaagtgactca

SEQ ID NO: 6189 - DNA, 60 bp, Homo sapiens
cctttatgaagtacaggaagtaaaagctgctaactcagctcagcagtaaagcgattactg

SEQ ID NO: 6190 - DNA, 60 bp, Homo sapiens
catgcagtgtgagtagaaggaagtcaacaatatgtggggagagcactcggttgtctttac

SEQ ID NO: 6191 - DNA, 60 bp, Homo sapiens
ctaaagcccgcctcaagcattagaactacagacaaaccctgatgcgacctctccagattg

SEQ ID NO: 6192 - DNA, 60 bp, Homo sapiens
tcagatgcatttgcacaggacttggatcctgaactgtgtaacctggagaggcaggtgtga

SEQ ID NO: 6193 - DNA, 60 bp, Homo sapiens
gaattgcgatgtatgatgtatggctttggggatgaccagaatccttatactgagtcagtg

SEQ ID NO: 6194 - DNA, 60 bp, Homo sapiens
catatcccagtacctacactatgccaggtattatgctaggtgatcgtttatatgtcagcc

SEQ ID NO: 6195 - DNA, 60 bp, Homo sapiens
caactagaagtgggtcatagatagattaccagggatgcagtggtgtttaggcaggatagg

SEQ ID NO: 6196 - DNA, 60 bp, Homo sapiens
ggcccaagctgagaacacagccttctgaaaacatctcctgccagctgaactgtagttaga

SEQ ID NO: 6197 - DNA, 60 bp, Homo sapiens
ggtccctgcaagggtcctttctttgtcaccagccaaggcattgataaccaagtagccatt

SEQ ID NO: 6198 - DNA, 60 bp, Homo sapiens
ctgtgcctttcatcacattcctagcccactctcatcattactgcagaagggtgttgtgat

SEQ ID NO: 6199 - DNA, 60 bp, Homo sapiens; identical to SEQ ID NO: 4855

SEQ ID NO: 6200 - DNA, 60 bp, Homo sapiens
taaaggtcaaaggtcacctccgcaaatggcaccaactgtgtagcctggcagtgggacttt

SEQ ID NO: 6201 - DNA, 60 bp, Homo sapiens
tgcgacctcatctcccagaatccggacaaggtacagtccctcaatgtggacgccatcatc

SEQ ID NO: 6202 - DNA, 60 bp, Homo sapiens
gatcctttctgtaggctaattcctcttgcccaacggcatatggagtgtccttattgctaa

SEQ ID NO: 6203 - DNA, 60 bp, Homo sapiens
tgtgctccacagctccttggggacaggagagtagatgctggccacacagatcagccagtt

SEQ ID NO: 6204 - DNA, 60 bp, Homo sapiens
tcccacacatagaacccaggtcactgctggggcgattgaacaggttgcctggcttttctc

SEQ ID NO: 6205 - DNA, 60 bp, Homo sapiens
actcctgttggtgatggacaagagagcctcaggaatgaatgactcattggagttgctgca

SEQ ID NO: 6206 - DNA, 60 bp, Homo sapiens
cccgccttgtggccacccctcaccctgacaccgacgtgtcctgtacatagattaggtttt

SEQ ID NO: 6207 - DNA, 60 bp, Homo sapiens
tcaaatgtagcaccgtcgtctgcgtgatctgcttggagaagcccaaataccgctgtccag

SEQ ID NO: 6208 - DNA, 60 bp, Homo sapiens
gccaagtacatggaaaaccatagcattgaaggagtgaggcatgtcttcagcagagcttgt

SEQ ID NO: 6209 - DNA, 60 bp, Homo sapiens
aaatctctaggtggcctcccgccaacagctgctgtgtacctttggctctgaattaggaat

SEQ ID NO: 6210 - DNA, 60 bp, Homo sapiens
gccaggcatatacgggaaacaactcttcacaaatccaagcagctatgaaaggttttgaag

SEQ ID NO: 6211 - DNA, 60 bp, Homo sapiens
cccacatctccagtttctcaggaaccagaaaggaagtccgctgagctgtcagatcaggga

SEQ ID NO: 6212 - DNA, 60 bp, Homo sapiens
tgaatgaaggacccaataactccgttggcttctctgccagttctccagtcctcaggcaga

SEQ ID NO: 6213 - DNA, 60 bp, Homo sapiens
ctcacctctgtagctctatgacttagtaaccacacctctactggacagaatgaggcctgc

SEQ ID NO: 6214 - DNA, 60 bp, Homo sapiens
gtagaagtgcctagattttgccagacttcatccagcttgacaagattgagaggcccatgc

SEQ ID NO: 6215 - DNA, 60 bp, Homo sapiens
ccatgttggaaagagtctccagttactgaacagatgaaaaggagcctgtgagagggctgt

SEQ ID NO: 6216 - DNA, 60 bp, Homo sapiens
ccagccgcaagtcggccgcgctttgcccgtcagcgcttggagctttctgcgtcgcttccc

SEQ ID NO: 6217 - DNA, 60 bp, Homo sapiens
atctccattttgtttgcttctgattgttgctctgaccttctacctattgatgggaacccc

SEQ ID NO: 6218 - DNA, 60 bp, Homo sapiens
ttaactctggaatcctatgggctcatcttgctcacccaatgtgggagtctggtttgagca

SEQ ID NO: 6219 - DNA, 60 bp, Homo sapiens
agccatggagcaagacaacagcccccgaaagatccagttcacggtcccgctgctggagcc

SEQ ID NO: 6220 - DNA, 60 bp, Homo sapiens
ggagtgtttctgctgtctgattacagagtcacgggagacaccgttctgtgttactgctgt

SEQ ID NO: 6221 - DNA, 60 bp, Homo sapiens
acggtcagagccccgttcccaggaatcagggggcactgacacggctactgtgttggacat

SEQ ID NO: 6222 - DNA, 60 bp, Homo sapiens
atcccaggatttttgatatcctcgggaatgagcagccacaagcagggtcatacctcgtca

SEQ ID NO: 6223 - DNA, 60 bp, Homo sapiens
ggaatctcgaatgcgaatagcagctcatcacatgatgcgtaacttgacagctggaatggc

SEQ ID NO: 6224 - DNA, 60 bp, Homo sapiens
gtgccattactgcaagtcatcctgccacgtgtcttccctccgtattccgtatgcctgcaa

SEQ ID NO: 6225 - DNA, 60 bp, Homo sapiens
cagtcagtcagctgttactagttgatgctgtgctaacatgatcccctcctacttccatgt

SEQ ID NO: 6226 - DNA, 60 bp, Homo sapiens
taccaaaagctcctggatctttatgagagtgttgacaagcagaagtggtgtgatgtctgc

SEQ ID NO: 6227 - DNA, 60 bp, Homo sapiens
acatgttccatcctactggcatccctctcgacgaattcagggctctcttagagatccaga

SEQ ID NO: 6228 - DNA, 60 bp, Homo sapiens
agagtgctctgtaccagtgctcatcatcccttcttcataccaacggtccctagttatagg

SEQ ID NO: 6229 - DNA, 60 bp, Homo sapiens
aattatgcacccctggagaagtgaccacgctgaaacccacccacccgctgtgctgaccat

SEQ ID NO: 6230 - DNA, 60 bp, Homo sapiens
cactagagtttatagaaacggaggaagatgtcaccagcctaagagaagctaaagaagtct

SEQ ID NO: 6231 - DNA, 60 bp, Homo sapiens
ttgagaagacggctgaccatctctttgacgctgcctacttcgggcagaaggactctgtgt

SEQ ID NO: 6232 - DNA, 60 bp, Homo sapiens
catattgttagggtcagccatttttaatgatctcggatgaccaaaccagccttcggagcg

SEQ ID NO: 6233 - DNA, 60 bp, Homo sapiens
gggcttgcttatcttgtgatactcaaaacaaatgcgagttaggggctacccagagttgtg

SEQ ID NO: 6234 - DNA, 60 bp, Homo sapiens
tgaccttcgtctctgtgcacgactgttactggactcacgcagctgatgtctccgtcatga

SEQ ID NO: 6235 - DNA, 60 bp, Homo sapiens
agtagtggatcactctgccaagcggcaggaagaattaaggaaacgacaaggagacgctcg

SEQ ID NO: 6236 - DNA, 60 bp, Homo sapiens
tccttgctcaggaaataagccactacagcttctgccccttatgccatagtccagtgggat

SEQ ID NO: 6237 - DNA, 60 bp, Homo sapiens
cactaacagctccaccgagattcctgaattcccaattgcacctgaaattgcactggaact

SEQ ID NO: 6238 - DNA, 60 bp, Homo sapiens
tcattctgtgtgctacgtgcggatcccacggaacccacagggactgctcctctcttagat

SEQ ID NO: 6239 - DNA, 60 bp, Homo sapiens
ttggtacaaaggacttctgtgacggccagtgtgacttcctccacaaggcccacttccact

SEQ ID NO: 6240 - DNA, 60 bp, Homo sapiens
cagcgtttgaagcatatggtggatgataagattcactctcgtgctaggggacctattcag

SEQ ID NO: 6241 - DNA, 60 bp, Homo sapiens
tacaccaaagagtcctccgttaaaacccattcaaccaaagcccacaattatgggagagcc

SEQ ID NO: 6242 - DNA, 60 bp, Homo sapiens
attaatccctggggtagaaccacgtgaaatggcagctatgtgtcttggattggctcacag

SEQ ID NO: 6243 - DNA, 60 bp, Homo sapiens
agagatgagaagtgggttactgggtcagatgaacaatccttccactaatggcgtgaatgg

SEQ ID NO: 6244 - DNA, 60 bp, Homo sapiens
ctcttggggtacgtgcctgacagtgtttaaggtgtccgttgaactggagttgcagacttt

SEQ ID NO: 6245 - DNA, 60 bp, Homo sapiens
gaacttgtcacaggaggagccacgtctcagatacaaggagtacaaaccaatgacgaccta

SEQ ID NO: 6246 - DNA, 60 bp, Homo sapiens
ctgaataccgcgtcatcgtggatgccaacaacctgaccgtggagatcgaaaacgagctga

SEQ ID NO: 6247 - DNA, 60 bp, Homo sapiens
tgtttctccggttctccctgtgcccatccaccggttgaccgcccatctgcctttatcaga

SEQ ID NO: 6248 - DNA, 60 bp, Homo sapiens
tctttaatcccactgttttccactgccaacaggctctgactaacctgcagctcccacagc

SEQ ID NO: 6249 - DNA, 60 bp, Homo sapiens
aggaaataatgctgcagctgatactggacatcgctttgtttggcttgaggacattcaggc

SEQ ID NO: 6250 - DNA, 60 bp, Homo sapiens
ttagcctcctggaccagctggataaggacatcaataccttctctatgcgtgtcagggagt

SEQ ID NO: 6251 - DNA, 60 bp, Homo sapiens
tctgtaccccatttcgtggtggggcagtcactctgatttccccttgcatgctaatgaatg

SEQ ID NO: 6252 - DNA, 60 bp, Homo sapiens
ttgctgatgggccaccttcagctgcagggaagaagcctaggagaggaggcatgggaggga

SEQ ID NO: 6253 - DNA, 60 bp, Homo sapiens
gcagagcgctgtatccttgcttatctctatgatctgtacacctcctgtagccatttaaag

SEQ ID NO: 6254 - DNA, 60 bp, Homo sapiens
ttcctttcccaagccagcagatgcaggtgttccaaggtgtgttgctctgtgggatttgtg

SEQ ID NO: 6255 - DNA, 60 bp, Homo sapiens
ggacaatggagtcatttctacctagagtaccagtaaacatctcccagtgtgctatagtag

SEQ ID NO: 6256 - DNA, 60 bp, Homo sapiens
ttaatggtggccatgccgcttctgccggtgccttcttgatcagggtgtctccttgtgctt

SEQ ID NO: 6257 - DNA, 60 bp, Homo sapiens
tataaagcagtccaggagaaaagctcatcacctcccccaagaaagacctctgagagccga

SEQ ID NO: 6258 - DNA, 60 bp, Homo sapiens
gctctcagcaggcagtgagtgtcacacacctgttaatccatcttgagcaggacagtacta

SEQ ID NO: 6259 - DNA, 60 bp, Homo sapiens
accatcactgtaactgttggccaaagctacaaaagaagcgagggaatccaaccgagcgca

SEQ ID NO: 6260 - DNA, 60 bp, Homo sapiens
cctgacataagatgtgaggttcacagttgtattccagtattcaagatagattcctgattt

SEQ ID NO: 6261 - DNA, 60 bp, Homo sapiens
ttcgcaccccggacgcgatgctattcgacaaggtgaaagcgttctcggtgcagttggacg

SEQ ID NO: 6262 - DNA, 60 bp, Homo sapiens
ggaagacttctaaagaaactgctccagcttttgcagccaatcaggtagcttaatggatgt

SEQ ID NO: 6263 - DNA, 60 bp, Homo sapiens
ttttggggtcatggcaaaagaaagtacttgatgtatcgaacagttttgcagttccttttg

SEQ ID NO: 6264 - DNA, 60 bp, Homo sapiens
atcccagggttataaaggggacaatgctgtcattccatacgaaacagacgaagacccgcg

SEQ ID NO: 6265 - DNA, 60 bp, Homo sapiens
tgagggcactaccagactgacatggccagtacagaggagaactagggaaggaatgatgtt

SEQ ID NO: 6266 - DNA, 60 bp, Homo sapiens
tgtgtgaggacatggggctgaaggaccctgaggagcttcgcaactacatggagaggatcc

SEQ ID NO: 6267 - DNA, 60 bp, Homo sapiens
ctcagtagcacccaaaccctgagccctagcagtttccttttgcttgtttactagcaagag

SEQ ID NO: 6268 - DNA, 60 bp, Homo sapiens
aagggtgcaactcctcttgggcaaggtgactctggacgtgaccatgggaactgcctgctc

SEQ ID NO: 6269 - DNA, 60 bp, Homo sapiens
gcaccattctgcaagtgcaggatgagactcattcagaaacggcagatcagcaggaagcta

SEQ ID NO: 6270 - DNA, 60 bp, Homo sapiens
gaggactaaggagggattcaattactcctgatatagcaacaaagcctgggcaacctttgt

SEQ ID NO: 6271 - DNA, 60 bp, Homo sapiens
caagttcaagacagatttttatgatcaatgcaacgacgtggggctcatggcctacctcgg

SEQ ID NO: 6272 - DNA, 60 bp, Homo sapiens
aatccctcactttaaggaggttatcatcatggctaccaactgcgagaactgtgggcatcg

SEQ ID NO: 6273 - DNA, 60 bp, Homo sapiens
gaggaccatcacatgcttctgcctgtcacggatactcagtctcctacatcagatacattg

SEQ ID NO: 6274 - DNA, 60 bp, Homo sapiens
ggtgggtcctgcagtggtctcgtgggtattactgcttgtgtctgattgtcctgtattttg

SEQ ID NO: 6275 - DNA, 60 bp, Homo sapiens
gtgtccctgttgaggagccactctgccagtctttgctggtccataggcgtgagagtttat

SEQ ID NO: 6276 - DNA, 60 bp, Homo sapiens
tccatctggaccatgatgatgtgaacgaccagagtgtctcaagtgcccagaccttccaaa

SEQ ID NO: 6277 - DNA, 60 bp, Homo sapiens
acgcagactcatgcacgcacacaggagggaggcctagctgctcagaggctgcagggaggg

SEQ ID NO: 6278 - DNA, 60 bp, Homo sapiens
tctatcagggtctggagaatctgtcaccaagctcaccttggctgacctcagagtcctttt

SEQ ID NO: 6279 - DNA, 60 bp, Homo sapiens
tgcagagtcgtgtcccaaatgcgaacatcctcgtgcttacttcatgcagcttcagacccg

SEQ ID NO: 6280 - DNA, 60 bp, Homo sapiens
agatgggccatcaactgagaaagaccttgacgaaaagaagaaagaacctgcaattacatc

SEQ ID NO: 6281 - DNA, 60 bp, Homo sapiens
tttcttgttctggaactaaatgaacagaacttcaaatacttcctaccctccaattcagac

SEQ ID NO: 6282 - DNA, 60 bp, Homo sapiens
aggttcatctgctccttccctgactgcagcgccaattacagcaaagcctggaagcttgac

SEQ ID NO: 6283 - DNA, 60 bp, Homo sapiens
cagagggacttgaagctcagtgagaaaaggatgatggagatagccaaagccatgaggctg

SEQ ID NO: 6284 - DNA, 60 bp, Homo sapiens
acacctcacattccagactctagccatctcggcaggatctcctggctccttgagtgccca

SEQ ID NO: 6285 - DNA, 60 bp, Homo sapiens
tggcacccacagcaggactccgccagtctgatgccaggactgaataaagtgtatttgccc

SEQ ID NO: 6286 - DNA, 60 bp, Homo sapiens
cagaagtttagatgctttgtgacttaagcaggtgtgtgggctcctttaggcaggttacag

SEQ ID NO: 6287 - DNA, 60 bp, Homo sapiens
ctcatgcgtgttttaccttttgatgttcagagtggctcactggctgggagtccttacctc

SEQ ID NO: 6288 - DNA, 60 bp, Homo sapiens
cccagcagtaagctaacagtggacacagatactctgactccttcgagcaccctttgtgaa

SEQ ID NO: 6289 - DNA, 60 bp, Homo sapiens
cgtttgagcgtcagtaagcgagagaaaggacggcgaaaacgagcaaatgtcatgagctca

SEQ ID NO: 6290 - DNA, 60 bp, Homo sapiens
tggcccaaagtcggctgcaacattggttatggagtataaggcactaacctctgcttggac

SEQ ID NO: 6291 - DNA, 60 bp, Homo sapiens
cgtgggcagtccacaaaacctacggggcatcactattggattgatctgcacaaatacctt

SEQ ID NO: 6292 - DNA, 60 bp, Homo sapiens
acatgaatgtcaacagcatggacatgaccggtggcttgtcggtgaaggacccatcccagt

SEQ ID NO: 6293 - DNA, 60 bp, Homo sapiens
aatctacctgtgacagtgagaacttggcagtcatcaacaagtcttccaggagggttgacc

SEQ ID NO: 6294 - DNA, 60 bp, Homo sapiens
gggactcatcatatgggcacaactctggtgtccttctatggagaaaacctcaagtaaagt

SEQ ID NO: 6295 - DNA, 60 bp, Homo sapiens; identical to SEQ ID NO: 4855

SEQ ID NO: 6296 - DNA, 60 bp, Homo sapiens
ctctctctgaaggcaaagatggggacaaggactaagagtcagaatgttgacactttgatg

SEQ ID NO: 6297 - DNA, 60 bp, Homo sapiens
aagtcaaatgaatgcagagggagcttggtcaaactgcttttgtttcaactgcaggcaggg

SEQ ID NO: 6298 - DNA, 60 bp, Homo sapiens
ttgagatgtgtgaccatgactatgatgggctgcttcccaagtctggaaagcgtcacttgg

SEQ ID NO: 6299 - DNA, 60 bp, Homo sapiens
agtcttgcagcaaaagcccaacatcaacgcagtggccacgctagagaaagtcatcgagat

SEQ ID NO: 6300 - DNA, 60 bp, Homo sapiens
aacaaggatcaggctgctggaaacacagtcacttgggagctgctgggctaggtccagatc

SEQ ID NO: 6301 - DNA, 60 bp, Homo sapiens
tgatatcgaaaggaaccggaacgagtgaaggctttaccacattgcttgcatttatacgtt

SEQ ID NO: 6302 - DNA, 60 bp, Homo sapiens
attgcacacctgactcagcatcagagggttcatactggagagagacctttcgaatgtatt

SEQ ID NO: 6303 - DNA, 60 bp, Homo sapiens
accacagagcaggtccgtgccttggagggcgtcttccggcaccaccagtacctgggccct

SEQ ID NO: 6304 - DNA, 60 bp, Homo sapiens
gagctaatcccctcagttaccaatccagaaaaccttccatcgctgccagatattccaccc

SEQ ID NO: 6305 - DNA, 60 bp, Homo sapiens
agagtacctttccccagatatgcaacgccagcgaaagaccaagcgcaaaaccaaagagca

SEQ ID NO: 6306 - DNA, 60 bp, Homo sapiens
atggccacctctggacgcctgagcttcaccgtgcgcagccttctaggtttacccgagcag

SEQ ID NO: 6307 - DNA, 60 bp, Homo sapiens
ccctctgcccttcccactcagatctagatcctgctttcatttctggctagtgaagtagac

SEQ ID NO: 6308 - DNA, 60 bp, Homo sapiens
ggacattgtgtacctcagttgtgtcacatgtgagcaagcccaggttgaccttgtgatgtg

SEQ ID NO: 6309 - DNA, 60 bp, Homo sapiens
gtaaccgaggtttctcctctgcctcctacttaaaggtccatgttaaaacccaccacggtg

SEQ ID NO: 6310 - DNA, 60 bp, Homo sapiens
aaaggcttctccaggcctgatcacttgaacggacatatcaagcaggtgcacacttctgag

SEQ ID NO: 6311 - DNA, 60 bp, Homo sapiens
gcagaacatgtctctcctcgagtcctttgggtttcagattgttcagtcggcatttgcgtc

SEQ ID NO: 6312 - DNA, 60 bp, Homo sapiens; identical to SEQ ID NO: 6311

SEQ ID NO: 6313 - DNA, 60 bp, Homo sapiens
tttcagtaaggcttctgacttaagagtctacctatacatcccttccccattgcccacccc

SEQ ID NO: 6314 - DNA, 60 bp, Homo sapiens
ggacacgaactggaagggggttcacggtcaaactgaaatggatttgcacgttggggagct

SEQ ID NO: 6315 - DNA, 60 bp, Homo sapiens
atcctttacaggctcccttctcactgccactgctcttgcctcttgtgatgtcttgggttt

SEQ ID NO: 6316 - DNA, 60 bp, Homo sapiens
gcgctggagaacaagttcaaggccacgcgctacctgtcggtgtgcgagcgcctcaacctg

SEQ ID NO: 6317 - DNA, 60 bp, Homo sapiens
gcagacattgaagaccagctgattcaaaaggtcagagagtcaaagtggtttgcccttcag

SEQ ID NO: 6318 - DNA, 60 bp, Homo sapiens
cacttcccctcggaggaaaggctcagctcccagcgcgcccctcccgtctccgcagcaaaa

SEQ ID NO: 6319 - DNA, 60 bp, Homo sapiens
ggacttgtttagagagcctgtcaccagagcttctctgggctgaatgtatgtcagtgctat

SEQ ID NO: 6320 - DNA, 60 bp, Homo sapiens
ccacgcaccatcatcttctgatgtgggtgtcagcgttatcgtcaagaatgttcggaacat

SEQ ID NO: 6321 - DNA, 60 bp, Homo sapiens
ccaacgtgggcagagtcttcacacagtgggagtgtcatttaagtgcagtgactgtggaag

SEQ ID NO: 6322 - DNA, 60 bp, Homo sapiens
cggtggcagactagagtctgagatgccccgagcccaggcagctatttcagcctcctgttt

SEQ ID NO: 6323 - DNA, 60 bp, Homo sapiens
aagtcctttacctccaagtctcagctcctggtgcatcagccagttcacacaggagagaaa

SEQ ID NO: 6324 - DNA, 60 bp, Homo sapiens
tggacaagaggtacagggttttacctgtcacattgcattctattgccttctttgaagaag

SEQ ID NO: 6325 - DNA, 60 bp, Homo sapiens
tggaccgcacggaatttgaacagtatctgcacttcgtgtgcaagcctgagatgggcctcc

SEQ ID NO: 6326 - DNA, 60 bp, Homo sapiens
accaatcggcaacagagctggcaaaccacgaccacctcacaggccttggcaacaagaaca

SEQ ID NO: 6327 - DNA, 60 bp, Homo sapiens
gttgccatctataaggattgtgccagtttacagtcccacccacaatgcatgagagtgcct

SEQ ID NO: 6328 - DNA, 60 bp, Homo sapiens
gcccaagacagttgtttcacaggagtggaagtgtgggtgatgcaagtagaaccctctaga

SEQ ID NO: 6329 - DNA, 60 bp, Homo sapiens
taacgcagtgcggggttagggattccccgggagagaggacgaagcgaggagagttctcca

SEQ ID NO: 6330 - DNA, 60 bp, Homo sapiens
aggacaagagcgtgttcggcgagacagaagagcagaagtgctccactccggtctacccgt

SEQ ID NO: 6331 - DNA, 60 bp, Homo sapiens
taaagatgtggaaagttacctccagcctaaggccaagaggcacacggagggaaagcccga

SEQ ID NO: 6332 - DNA, 60 bp, Homo sapiens
ccccaccactacctccatggttgttcatttaggatgcttctaattcagccactgtgaacc

SEQ ID NO: 6333 - DNA, 60 bp, Homo sapiens
tctttagactccagatccctacccctcagcaactagctcccctgtcggccagctaagaga

SEQ ID NO: 6334 - DNA, 60 bp, Homo sapiens
gatgcagcttgatctgtggcaaaaccaagtgtggtctttcagcttcagtgtgttagcatc

SEQ ID NO: 6335 - DNA, 60 bp, Homo sapiens
tagagtttgtatcactcaacatcaggggatgcctgaggagtgcgagctccacagcaacat

SEQ ID NO: 6336 - DNA, 60 bp, Homo sapiens
tggggtaggaggaacaggtttaaaaatccccaaaaaagcgaaccgtgaggaggggtgtgg

SEQ ID NO: 6337 - DNA, 60 bp, Homo sapiens
atgctaggctgctcttaccatccttagatggcagctcagaaggttggtggcaccttatca

SEQ ID NO: 6338 - DNA, 60 bp, Homo sapiens
gctgctatgaggccagatgtcattacagaaactgtagtggaggtgtcaactgaagagtct

SEQ ID NO: 6339 - DNA, 60 bp, Homo sapiens
ctgttaatagtggttttctgcaggaaatgggatggaccagggttatatgcaatgttcagt

SEQ ID NO: 6340 - DNA, 60 bp, Homo sapiens
ttctggagacaagctgaaacttgaccagactcatttagagacagtaattccagcaccagg

SEQ ID NO: 6341 - DNA, 60 bp, Homo sapiens
tggtcttcacctaccccagcactcctgagccttgtgcctcagctcatcgcaagagtagca

SEQ ID NO: 6342 - DNA, 60 bp, Homo sapiens
gcacatgggtgagaggccctatttgtgcaacgggaaaggtgtttatggtctttcttccgt

SEQ ID NO: 6343 - DNA, 60 bp, Homo sapiens
tcctcatcggcctggcccaactcaactgctccgagctgaagctaaagcggctctgttgca

SEQ ID NO: 6344 - DNA, 60 bp, Homo sapiens
gtggagaatcgccaccaagcaggcgagtccggaggaaatagacgtgacctcagatgatta

SEQ ID NO: 6345 - DNA, 60 bp, Homo sapiens
ttgaaacagcagtcccagtattctcagagcatgtgtcagagtgttgttccgttaaccttt

SEQ ID NO: 6346 - DNA, 60 bp, Homo sapiens
cgaacaggcactgcaatactcgccttacggctctacgttgcccgccagcctgcctctagg

SEQ ID NO: 6347 - DNA, 60 bp, Homo sapiens
atggggcacagcaggcatgcgagtgagaggatgaaggggaataaagtcagtacaactcgt

SEQ ID NO: 6348 - DNA, 60 bp, Homo sapiens
aaaagaccaagtgcagcatctgtaacagtgccttggagttgccctcagtccacttcctgt

SEQ ID NO: 6349 - DNA, 60 bp, Homo sapiens
attgctaagagattcccgctgattgggctcagtgccagctgttattctgcttccactgtg

SEQ ID NO: 6350 - DNA, 60 bp, Homo sapiens
tttccagctctcaggtgtacagaaatgcggtttactttgtaggccacgttggttcaataa

SEQ ID NO: 6351 - DNA, 60 bp, Homo sapiens
accgatggagccggggatgctgggtccacacaacctcccacaccacgagccaatcagctt

SEQ ID NO: 6352 - DNA, 60 bp, Homo sapiens
agtttggaagaaacggagcgggacgaagaggcggtagcagtagagtcagcctgagactct

SEQ ID NO: 6353 - DNA, 60 bp, Homo sapiens
ggcaagcaaaggagatgaaatctgttctgggaatgtttcagcagccaataagtgcccgag

SEQ ID NO: 6354 - DNA, 60 bp, Homo sapiens
cttggtagctgtcacttcaaaagaagacagtttccctgagtaatcatcacctacatggcc

SEQ ID NO: 6355 - DNA, 60 bp, Homo sapiens
ttgttttaactgtaccttaagcggtcatgttctctgaagtggaatgtggctttcctagga

SEQ ID NO: 6356 - DNA, 60 bp, Homo sapiens
cgttaataagcccaagagaactgtgaaggtggtagtcccttgccctaattggtgctcaat

SEQ ID NO: 6357 - DNA, 60 bp, Homo sapiens
aaacaagagaatcagatgcataaaggcgtcatcttgggcacagccaaccacctagacgcc

SEQ ID NO: 6358 - DNA, 60 bp, Homo sapiens
ggagtcagctgcacaccagtagtatggcatgctacgatcaggttctgtcctgaaagcttt

SEQ ID NO: 6359 - DNA, 60 bp, Homo sapiens
caaggtttacgcactgcctctctaagctggcctcaggtttattggcgataatcacagaaa

SEQ ID NO: 6360 - DNA, 60 bp, Homo sapiens
aaaatgggatccaaactggaagacatcctgatggacgacaccctttctcccgtcggtgtc

SEQ ID NO: 6361 - DNA, 60 bp, Homo sapiens
ccacttttctcaatcaaagctggactccccagaggaattggaacctgacagagaagagga

SEQ ID NO: 6362 - DNA, 60 bp, Homo sapiens
cacagtgggggactcaaagtcagccacatttcacatactgttactgaagaaagcaccaag

SEQ ID NO: 6363 - DNA, 60 bp, Homo sapiens
gtgacaaggccttagacgttgtcctagtttctggaatcaccgaataattcctacttactg

SEQ ID NO: 6364 - DNA, 60 bp, Homo sapiens
ttttgttgcatgttatgggtcgatgttcctgtaattgcagtgccgtaaaagcttattaaa

SEQ ID NO: 6365 - DNA, 60 bp, Homo sapiens
aatccacacactttgggcctaagccggtaccacccctatggcaagagccacttatccaca

SEQ ID NO: 6366 - DNA, 60 bp, Homo sapiens
gccatgtgccccatcacttgttgctcccaacctgattgagagacaaaagaaggtcaagct

SEQ ID NO: 6367 - DNA, 60 bp, Homo sapiens
actcaatgaacctggagtccagcccacctctgtctatggagactttagctgtaaggagga

SEQ ID NO: 6368 - DNA, 60 bp, Homo sapiens
ataaaacagaaggaaactaatggaccttccaggatttattgtggacggatgtggatatat

SEQ ID NO: 6369 - DNA, 60 bp, Homo sapiens
tctcccttaccctgggaaggcctcttggagaccttacccctggctgtttggactttgtat

SEQ ID NO: 6370 - DNA, 60 bp, Homo sapiens
gacaagcacaacaccaaggagagacatttgagcagaaatccaagggtggagagaccgtgt

SEQ ID NO: 6371 - DNA, 60 bp, Homo sapiens
agacagaggctacgtgtttggcctggagaacctcatcagcatcatggaacagatgcggga

SEQ ID NO: 6372 - DNA, 60 bp, Homo sapiens
cctctattggtgtgaacagtgtgatgtacagttctcctcaagcagtgaactctacctaca

SEQ ID NO: 6373 - DNA, 60 bp, Homo sapiens
tggtggtccttctctaaggtagaagccagatgatgagacagcaaggagggtttagcatgg

SEQ ID NO: 6374 - DNA, 60 bp, Homo sapiens
tgtgcgccagttttgttcgaagttacgagaagactcaccccggagagaaactttttgaag

SEQ ID NO: 6375 - DNA, 60 bp, Homo sapiens
cgaaggcgctgatcctgccaaattcagtgacctcgatgaacaatgtgactcaagttcctt

SEQ ID NO: 6376 - DNA, 60 bp, Homo sapiens
tgattaagatcgaggtacagaccaacgacgagggctcagaaagtttggagacacctgagc

SEQ ID NO: 6377 - DNA, 60 bp, Homo sapiens
cctacctaaggggcacaactagtaagggagtagagctgagattggctccagagttcttgt

SEQ ID NO: 6378 - DNA, 60 bp, Homo sapiens
gaggggctgtattgaagtgggctgtgtttgaggccggtgtaagaacgctcattctacccc

SEQ ID NO: 6379 - DNA, 60 bp, Homo sapiens
tgagatgatcccacctgaccaggaactgctggtgtggtacggaaactcacacaacacctt

SEQ ID NO: 6380 - DNA, 60 bp, Homo sapiens
gtattaacgagagcctcgctcagctcaaaaccctcatcctggacgccctcagaaaagaga

SEQ ID NO: 6381 - DNA, 60 bp, Homo sapiens
aggaaaggaaagtggaaaaaacctgagaacttcctgatctctctcgctgtgagacatgtc

SEQ ID NO: 6382 - DNA, 60 bp, Homo sapiens
cagccttagcagagctggggttcctgtcttctgcacacgattgactttcttgatgggtaa

SEQ ID NO: 6383 - DNA, 60 bp, Homo sapiens
ctctctccatcgctgtttctctccttccgtttctatttctcatccctctgtcccttgctc

SEQ ID NO: 6384 - DNA, 60 bp, Homo sapiens
agcacaatctgccaaagttctagagaccctgttcccttccccatcacctcacatgcttct

SEQ ID NO: 6385 - DNA, 60 bp, Homo sapiens
ttgtcacacaggctcaacttgaggctgcagcacactcagctgtcacagcagtggctgatg

SEQ ID NO: 6386 - DNA, 60 bp, Homo sapiens
aagaagatgaagagtcagatgatgctgatgatgggaataactgggaacacaagtccattt

SEQ ID NO: 6387 - DNA, 60 bp, Homo sapiens
cgcccggtttctcggcgaatgacagcacagacactcctatcttaaagccagtatctcttt

SEQ ID NO: 6388 - DNA, 60 bp, Homo sapiens
cacagtgtgcaactagccccagttttgacagaataattcttggtcttccccaaagagaca

SEQ ID NO: 6389 - DNA, 60 bp, Homo sapiens
agagacacactggcaggttaggcagtccttctggtgatcctattccattccctcctgctg

SEQ ID NO: 6390 - DNA, 60 bp, Homo sapiens
gacccctctgcaggaggcagaagcaaaatggcaccacatattcacctgaaaactccaaac

SEQ ID NO: 6391 - DNA, 60 bp, Homo sapiens; identical to SEQ ID NO: 4855

SEQ ID NO: 6392 - DNA, 60 bp, Homo sapiens
tgtcctgagtgtgggaaatccttttgtcaaaaagtcacatctacacagcatcagagaact

SEQ ID NO: 6393 - DNA, 60 bp, Homo sapiens
gccttctagctgaagcccatcctgcacacttactggatgctttggactcaacaggacata

SEQ ID NO: 6394 - DNA, 60 bp, Homo sapiens
ataacaatggactgcggacagagcaagacctctacgtgcgtctcatcgactccatgtcca

SEQ ID NO: 6395 - DNA, 60 bp, Homo sapiens
aagatctggatggaaaaggcagcaccagcttcctggagactttgaagacagagcggctga

SEQ ID NO: 6396 - DNA, 60 bp, Homo sapiens
ggcgacatcggcacgtcctgttacaccaaaagtggcatgatcctttgcagaaatgactac

SEQ ID NO: 6397 - DNA, 60 bp, Homo sapiens
ctgtggatacgatccctttagaacctgcttctctgatctgtgtgtttcctcacttctcaa

SEQ ID NO: 6398 - DNA, 60 bp, Homo sapiens
agaaggtaggaatcccggctccttttctcgtcttggtggttcggtgttttgttcgctcct

SEQ ID NO: 6399 - DNA, 60 bp, Homo sapiens
gcctcacgctcagcggcatctgcgccttcattagtgaccgcttcccctactaccgccgca

SEQ ID NO: 6400 - DNA, 60 bp, Homo sapiens
cccgtgcatctactcggaggtgatggaagccctagatctgcagcctggactctcgtttct

SEQ ID NO: 6401 - DNA, 60 bp, Homo sapiens
ctgggtcagactcctgggttcatgacttacttgctagcgtcccttcattttcccacaagt

SEQ ID NO: 6402 - DNA, 60 bp, Homo sapiens
gctggagcgtgaatctacaaatacagtggacctgggagagtgttcaaccgtaaaaccttg

SEQ ID NO: 6403 - DNA, 60 bp, Homo sapiens
gaattcgggaggttcacacaggagagaagccctatggatgcaacgagtgtgggaaaacct

SEQ ID NO: 6404 - DNA, 60 bp, Homo sapiens
tgggaaattcttcagtgagagctcagccctcattcggcatcatataatccacaccggaga

SEQ ID NO: 6405 - DNA, 60 bp, Homo sapiens
aattttctcgcttgcaggtcgggaggtttccgggcggcacaatctctaggactctcctcc

SEQ ID NO: 6406 - DNA, 60 bp, Homo sapiens
gtttggggatccagatgagttcccacttgctcacctcttggagcctttccgacagtatta

SEQ ID NO: 6407 - DNA, 60 bp, Homo sapiens
ctgaagattggggagcacatgcagaccaagtctgatgagaagctgttcctcgttctcttt

SEQ ID NO: 6408 - DNA, 60 bp, Homo sapiens
tgtccggcgttcacacaaggaggacgatggctgctcatgcagcatctgtgggaaaatctt

SEQ ID NO: 6409 - DNA, 60 bp, Homo sapiens
accgtaaaccagatctccgagttcttattccaccaggcagcaagaatacgatgccatcag

SEQ ID NO: 6410 - DNA, 60 bp, Homo sapiens
aaccccatactctccttttgactccttttggaacccccacttttacgttgtgtccctccg

SEQ ID NO: 6411 - DNA, 60 bp, Homo sapiens
cttcttgtctttgtaacccacagcagctggtactgtgccttgcctattgtaggtgcccaa

SEQ ID NO: 6412 - DNA, 60 bp, Homo sapiens
aaggagtttggagagagtgtttgctgtgatccattgaaagctccacattaaaccccagcc

SEQ ID NO: 6413 - DNA, 60 bp, Homo sapiens
gaacccattttctactcaggacacagatttagacttggagatgttagctccctatatccc

SEQ ID NO: 6414 - DNA, 60 bp, Homo sapiens
ttgcacatacacaacagtgagcgagtatcactggaggaaacatttaagaaaccattttcc

SEQ ID NO: 6415 - DNA, 60 bp, Homo sapiens
cccaaaggtctgctctccttggatattggagagttcacactagagaagagtccttacaag

SEQ ID NO: 6416 - DNA, 60 bp, Homo sapiens
cgtcaccggattgaggagaaacgtaaaaggacatatgagaccttcaagagcatcatgaag

SEQ ID NO: 6417 - DNA, 60 bp, Homo sapiens
acactggcattcctgcctacttgctgtggtggtcttgtgaaaggtgatgggttttattcg

SEQ ID NO: 6418 - DNA, 60 bp, Homo sapiens
ctccatcaccaatgcggcagtccttgccgtgacatgctgagctctggaaggagcgaagga

SEQ ID NO: 6419 - DNA, 60 bp, Homo sapiens
cctgagctaggttctagggatgctactgtcaacaagacagatgaaggttcctgccctcat

SEQ ID NO: 6420 - DNA, 60 bp, Homo sapiens
gtcttgtcaacctcgccgcttttcgcctccttaatggcactgtgcactcaactagagtat

SEQ ID NO: 6421 - DNA, 60 bp, Homo sapiens
tggatggacggcaagcttagcaagcctaagtcccctcatgttcagtgagcctgtttcatt

SEQ ID NO: 6422 - DNA, 60 bp, Homo sapiens
tagacaggttcagggaaggactgatgggggtgtcatggatggacacacctctccacaatt

SEQ ID NO: 6423 - DNA, 60 bp, Homo sapiens
tgtgcgatcgtgccttctcgcgctccgatcacctggcgctgcacatgaaacggcacatgt

SEQ ID NO: 6424 - DNA, 60 bp, Homo sapiens
tacttccgcagcgtggagggtctgctcaaacaggccatcagcatccgggaccatatgaat

SEQ ID NO: 6425 - DNA, 60 bp, Homo sapiens
cccgcgagaacactttacaacgacgaggagattcgtttccaaaccagaggagatcaattg

SEQ ID NO: 6426 - DNA, 60 bp, Homo sapiens
ccactcacccatcccagtgtattcaggtaagtgaaccttggtgttctgttcatgggagga

SEQ ID NO: 6427 - DNA, 60 bp, Homo sapiens
tgacatagaagttcgttttgtgttgaacgattgggaagcaaaaggcatcttttcacaagc

SEQ ID NO: 6428 - DNA, 60 bp, Homo sapiens
ctccaatctgcatgatgaatgctcttgtccgagctttaacagactcaacacccagagatc

SEQ ID NO: 6429 - DNA, 60 bp, Homo sapiens
gacatcacagcggctgtctcatgattaaggctgtgttcccttgttggtgaggaaattaat

SEQ ID NO: 6430 - DNA, 60 bp, Homo sapiens
ctcgagtgtgctggcatttctcaccctttcatctttagccctctgagtactttgaagcac

SEQ ID NO: 6431 - DNA, 60 bp, Homo sapiens
cgggctcccttactactggaatgcagacacagaccttgtatcctggctctccccacatga

SEQ ID NO: 6432 - DNA, 60 bp, Homo sapiens
catatcagagagagatcctaaaggtgtaatgtatgtgggaagaccacatcttgttccaca

SEQ ID NO: 6433 - DNA, 60 bp, Homo sapiens
tttggcacgcagcagccggaacgagtacatgcgctcgggcctctattccaccttcaccat

SEQ ID NO: 6434 - DNA, 60 bp, Homo sapiens
cagctctacatggtttctaaggagttgcggaatgtgctgctgaataacagtgagaagatg

SEQ ID NO: 6435 - DNA, 60 bp, Homo sapiens
gatgatatgtcccactttgaaagccaaagagcaaaagtcattggtgattttgacctcagg

SEQ ID NO: 6436 - DNA, 60 bp, Homo sapiens
cagctttgttcaagaggacacagaaggattctgcaaatagcctgcagagacttacctgtg

SEQ ID NO: 6437 - DNA, 60 bp, Homo sapiens
gtaaatgcaatgaatgtgaaaaagcctttagttaccaatcagaccttcttgtacacagta

SEQ ID NO: 6438 - DNA, 60 bp, Homo sapiens
gaactcatacgtgaggaatgttttcactggcccttacctcatgattaactcttcagtaat

SEQ ID NO: 6439 - DNA, 60 bp, Homo sapiens
attaatctcagtcctggcctgggagatgcggcccacaagaaggcaggtgaaagcggacca

SEQ ID NO: 6440 - DNA, 60 bp, Homo sapiens
ctgcccacaactcccttgcacgtaaacttcagtgtcccaccttgaccaaaatcagctttg

SEQ ID NO: 6441 - DNA, 60 bp, Homo sapiens
aactgcagaccaactacccctcctcagacaacagcctctacaccaacgccaagggcagca

SEQ ID NO: 6442 - DNA, 60 bp, Homo sapiens
tcatcatgaatcacaaccccaagtatctcatcagccagggaagagtaagtgggatcacag

SEQ ID NO: 6443 - DNA, 60 bp, Homo sapiens
agaagtctggcaagttgatgagcagatagatcactacaaggaaagccaagacaaacttcc

SEQ ID NO: 6444 - DNA, 60 bp, Homo sapiens
atccacatggtgacaggtctggaccccgagaagttgatcagcctgcacacagtggagctt

SEQ ID NO: 6445 - DNA, 60 bp, Homo sapiens
cttttaaactacaggtagttaagggccacctacaatacatctgaggtcctgtgatcttat

SEQ ID NO: 6446 - DNA, 60 bp, Homo sapiens
gcttcaaggactcagactacgtttacccctcactggagtcagatgaagacaaccccatct

SEQ ID NO: 6447 - DNA, 60 bp, Homo sapiens
gtaacagacatcagggttccagactagccctcttgagtaactgtcctagagctgggacag

SEQ ID NO: 6448 - DNA, 60 bp, Homo sapiens
agaaagattccagtgaagttgctgatggtatggctgtggtctgggacttgcggtgtctcg

SEQ ID NO: 6449 - DNA, 60 bp, Homo sapiens
gacttcctagccccattgggcattcttcagccgcaagctattgctaactatgagaagcca

SEQ ID NO: 6450 - DNA, 60 bp, Homo sapiens
atcccttgtgactcctttcagtatcttatgatggaaggaaactgtcccaaaatacaatac

SEQ ID NO: 6451 - DNA, 60 bp, Homo sapiens
aaataaccacgtctcctactttccaaacccatggcagtgtccctgctccagactcatcag

SEQ ID NO: 6452 - DNA, 60 bp, Homo sapiens
tcacatctccactacctcagagagaatttaccatatgagcccccccaggagatcagcctg

SEQ ID NO: 6453 - DNA, 60 bp, Homo sapiens
catggtccgttttactatatgaagcagccactcaccacagaccctgttgatgttgtaccg

SEQ ID NO: 6454 - DNA, 60 bp, Homo sapiens
ggagaggcttcttgctgaattttgattctgcagctgaaatttaggacagttgcaaacgtg

SEQ ID NO: 6455 - DNA, 60 bp, Homo sapiens
tacacttcttaccccagcctacccttcctgcatttctcttctcagctcttccatgatgga

SEQ ID NO: 6456 - DNA, 60 bp, Homo sapiens
aaaggctgattcatgccttcctgcctcttggctatggccctccccatctactctttaaac

SEQ ID NO: 6457 - DNA, 60 bp, Homo sapiens
tttccagcctgccagtcatgaatctcagacagcctgccacctattgccctgatttgtgtt

SEQ ID NO: 6458 - DNA, 60 bp, Homo sapiens
agtccctgctcctcatgtttctggtttggtgagtcctttgtgccaccacccataatgctt

SEQ ID NO: 6459 - DNA, 60 bp, Homo sapiens
ttcgagtttcgacctcgatccagatgtgattggccccgtacccctgattctcgatcctaa

SEQ ID NO: 6460 - DNA, 60 bp, Homo sapiens
agccgaacaactcaggttacgtatcgtcaagggcgaagcctttgatgtgctggccaagaa

SEQ ID NO: 6461 - DNA, 60 bp, Homo sapiens
ccaggctctatgtgcatccagattctccttttaccggtgagcaactactcaaacagatgg

SEQ ID NO: 6462 - DNA, 60 bp, Homo sapiens
ctgataggactctcctagtccaacttggggtgggcaaggcagtcagcatcaccagcaaca

SEQ ID NO: 6463 - DNA, 60 bp, Homo sapiens
ggagcctggagtctactaccagggcctctattcccgctctttgcttaatgcatcctagca

SEQ ID NO: 6464 - DNA, 60 bp, Homo sapiens
ggaaagcctttcgtcataactgtaagcgcagggctcatgaacgagagcatacaggggaga

SEQ ID NO: 6465 - DNA, 60 bp, Homo sapiens
acaattacagtgcaagtagcatggcagcacagcgttgtgcatccaggtctagcgtgtctt

SEQ ID NO: 6466 - DNA, 60 bp, Homo sapiens
acattggatgcggcagcctgtgtctttccatcgtgtcaagctcaccaacagcacgctgga

SEQ ID NO: 6467 - DNA, 60 bp, Homo sapiens
aaccccatgtgacagcccactccaccagggttcccaaagaacctggcccagtcataatca

SEQ ID NO: 6468 - DNA, 60 bp, Homo sapiens
tgcccccacacctgcacccaaacagacacatcaacgcaccccactcacagacacccctta

SEQ ID NO: 6469 - DNA, 60 bp, Homo sapiens
gaagtcatttgcactgaaatacgacttggcgaatcaggaccatatgatggatgctccacc

SEQ ID NO: 6470 - DNA, 60 bp, Homo sapiens
caaacgctgtggaaacatctgtcatattgacctgaggtactgcaagcaagtcaccaagga

SEQ ID NO: 6471 - DNA, 60 bp, Homo sapiens
aaagagttgggtcctatacccacccttgcctgttgtttctcctaatcctcttgggcatgg

SEQ ID NO: 6472 - DNA, 60 bp, Homo sapiens
aagcccgaggagatcccgcccgactggaggatagagaagacgtacctctacctgtgctat

SEQ ID NO: 6473 - DNA, 60 bp, Homo sapiens
gccagtgactgagaaagtcttcacctggaaatcacaactgggtatgcatcaggtatctaa

SEQ ID NO: 6474 - DNA, 60 bp, Homo sapiens
cagcccctatgaggaaatctggaggcaggtaacagttcccattttagagatgaagaactg

SEQ ID NO: 6475 - DNA, 60 bp, Homo sapiens
tcagtccagcgagctgatcctcaaacgatgccttcccatccaccagcagcacaactatgc

SEQ ID NO: 6476 - DNA, 60 bp, Homo sapiens
ctggagatgaccaacaagcagctctggctccgtatccaggagctggagatgcaggctcga

SEQ ID NO: 6477 - DNA, 60 bp, Homo sapiens
catgtaggtttgccaagtctttgtggtgaattgactcttctgtcattatgtgatgtcatt

SEQ ID NO: 6478 - DNA, 60 bp, Homo sapiens
ctggggagcaaacctcgaaactaacatgatgtgctttggtgtcagtagctgctttctgag

SEQ ID NO: 6479 - DNA, 60 bp, Homo sapiens
agggcttccaaacagatgcagaagaacccagaaaggagcaggtcttgatttgcccaacca

SEQ ID NO: 6480 - DNA, 60 bp, Homo sapiens
cgaaagcgagaatgatctccaagagatacacacgatccaggagtgtaaggaatgtgacca

SEQ ID NO: 6481 - DNA, 60 bp, Homo sapiens
ccagatgcgattttagtggaggactacagagccggtgatatgatctgtcctgaatgtggc

SEQ ID NO: 6482 - DNA, 60 bp, Homo sapiens
atttccactccattgctggggacagtgacttggactctgatgaatgaggcttcctttggg

SEQ ID NO: 6483 - DNA, 60 bp, Homo sapiens
caaatagctcacactggagagcagttcttaacatgcaatcaatgtgggacagcgcttgtt

SEQ ID NO: 6484 - DNA, 60 bp, Homo sapiens
caactctagtgcctaaagagtagggaatctcatccatcacagatcgcatttcctaagggg

SEQ ID NO: 6485 - DNA, 60 bp, Homo sapiens
gaattcggataatggacagacactacaaatgtaatgagcgtggcaaggcctttcatcaag

SEQ ID NO: 6486 - DNA, 60 bp, Homo sapiens
cagtggttctacaacaacaggttataccacaaatgcagcctggtggagtacaagctcctg

SEQ ID NO: 6487 - DNA, 60 bp, Homo sapiens; identical to SEQ ID NO: 4855

SEQ ID NO: 6488 - DNA, 60 bp, Homo sapiens
ggcaaaaggaaacactcgattgcatcttcccggttccaggtggccttatttgggagattc

SEQ ID NO: 6489 - DNA, 60 bp, Homo sapiens
tggttgcacataaccagatcgcctggcttctggcagacacggcaaatggtggcactgtca

SEQ ID NO: 6490 - DNA, 60 bp, Homo sapiens
tggacttgacccagctttgtgccagagaacccaatatgagtgttgttggcagcttgccaa

SEQ ID NO: 6491 - DNA, 60 bp, Homo sapiens
cgctgaatgagatcctcatctgcgggaagtgtggcctgggttaccaccagcagtgccaca

SEQ ID NO: 6492 - DNA, 60 bp, Homo sapiens
aggatctctttgtggggagggaatcagaggaggaaatctgaagtgaagacaggtgggctg

SEQ ID NO: 6493 - DNA, 60 bp, Homo sapiens
ggaaaggcttacacacatgtgatttcagaagcgttctgtgggtagaggaatcgttttctc

SEQ ID NO: 6494 - DNA, 60 bp, Homo sapiens
tttgcccacctctatgacccagcctcttgcagtattcccatacttgatgcagggaaggaa

SEQ ID NO: 6495 - DNA, 60 bp, Homo sapiens
tgttctactaaaggccttggcccttgccaattcagactctgtgcacatcgaagatgagcc

SEQ ID NO: 6496 - DNA, 60 bp, Homo sapiens
gctcctttactacctggtgaccttctgggaggagggtcggattcaatctgaacttagaac

SEQ ID NO: 6497 - DNA, 60 bp, Homo sapiens
atgttcgggagcgaactcccccgaagaaggaccagtgaagacgtcaggggcaaggtctcg

SEQ ID NO: 6498 - DNA, 60 bp, Homo sapiens
aacaatcctcgagcaggaactcacacctggttcagcatcaacacccgaactccagaaaga

SEQ ID NO: 6499 - DNA, 60 bp, Homo sapiens
tcccagcagttcatgcagaagaaggacttgcagagccacatgatcaaacttcatggagcc

SEQ ID NO: 6500 - DNA, 60 bp, Homo sapiens
cgacacgaggagaaagtgccatgtcacgtgtgtggcaagatgctgagctcggcttatatt

SEQ ID NO: 6501 - DNA, 60 bp, Homo sapiens
tcccccagaaattactcaatgctgaaacctctcaaagtggtattagagacgctgaaagca

SEQ ID NO: 6502 - DNA, 60 bp, Homo sapiens
tttaacttcaacaagctggtgatgcccaactacccattcatcaacattcggtcaagtggt

SEQ ID NO: 6503 - DNA, 60 bp, Homo sapiens
acgacgacatgacccggaacagaagagagtcctcaccacctcactcagtccattctttca

SEQ ID NO: 6504 - DNA, 60 bp, Homo sapiens
tttcctgttccccctatcaaccgcccccagtgataacatctgtgaagccagccattactc

SEQ ID NO: 6505 - DNA, 60 bp, Homo sapiens
gccggctcttcaaagacaatggaaactgtaccatacacattggaaggctccctaacacac

SEQ ID NO: 6506 - DNA, 60 bp, Homo sapiens
actcttactaggcattaaaaattcatactgtacagaaaccctacgagggtgaaaaacatg

SEQ ID NO: 6507 - DNA, 60 bp, Homo sapiens
tttctcctgtcctgatggggttctgggagggagacctgtcgctgatgagatgaagaatgt

SEQ ID NO: 6508 - DNA, 60 bp, Homo sapiens
cctaaatgaggctttaacgtaaacactggtgacataaaccattcattgctacgttgctta

SEQ ID NO: 6509 - DNA, 60 bp, Homo sapiens
ctaaagttcctgctgtcatcaacttgggcaacaaatgacccactggaaaggcaaatccac

SEQ ID NO: 6510 - DNA, 60 bp, Homo sapiens
atccctgtccacgtcagcaggttcgctatcagaagtcagcatcagcagctagaacaggcc

SEQ ID NO: 6511 - DNA, 60 bp, Homo sapiens
cacctgacccagttgtggtccagagaatctgagttgtgctgtcagctttctaaggattac

SEQ ID NO: 6512 - DNA, 60 bp, Homo sapiens
gggaagccagactccagggactgaaaaggagcaacaaggagagggtctgcttgagaaatg

SEQ ID NO: 6513 - DNA, 60 bp, Homo sapiens
atagtctgctgtgtgaatccaccgctagaaacccactcatcagttgatggtcatgtgggt

SEQ ID NO: 6514 - DNA, 60 bp, Homo sapiens
gtgaagtgaccggaaatggttaccttcaaggcaaagagagattcctggaggagatccttc

SEQ ID NO: 6515 - DNA, 60 bp, Homo sapiens
gcaatctatgggggaagactgatcttccaagcaatttcagcaaccatgagtttctggccc

SEQ ID NO: 6516 - DNA, 60 bp, Homo sapiens
gaagagagctcagagcaagctcgaggtggatttgctgaaacaggagaccattctcgaagt

SEQ ID NO: 6517 - DNA, 60 bp, Homo sapiens
ataagggaatggcccatacggaaacaatccccctaataaattttttggggtcaaggggcc

SEQ ID NO: 6518 - DNA, 60 bp, Homo sapiens
gtactacaacagtaacaacttctcctgtggtgacaactacagtgtcctcaagccagtctg

SEQ ID NO: 6519 - DNA, 60 bp, Homo sapiens
cagccttgtttgtactgtatgccttcagcattgcctaggaacacgaagcacgatcagtcc

SEQ ID NO: 6520 - DNA, 60 bp, Homo sapiens
cccagcgtccgtcctgtaacgtgcttctgtttgttatggtagaacagccctgtgttaata

SEQ ID NO: 6521 - DNA, 60 bp, Homo sapiens
ggggcaaagccccaactgcaaacaaagtgaatgcccattaatagggaactggttagataa

SEQ ID NO: 6522 - DNA, 60 bp, Homo sapiens
ccttcaaaatgctacacccacattctctccaactcttcatctccctgatcttccagacaa

SEQ ID NO: 6523 - DNA, 60 bp, Homo sapiens
aggatgcagtccattaacgatgcttttgagggactccggtctcacatccccactctgcca

SEQ ID NO: 6524 - DNA, 60 bp, Homo sapiens
attcgatggagacatcaaacaagagccaggaatgtatcgggaaggacccacataccaacg

SEQ ID NO: 6525 - DNA, 60 bp, Homo sapiens
atgcctcccttaatccgagagatgctggagaaccctgaaatgtttgaggatgactcctcg

SEQ ID NO: 6526 - DNA, 60 bp, Homo sapiens
tgcgagtacctgcacagcaagctggcccacatcaagaggctcatcgccgagtacgaccag

SEQ ID NO: 6527 - DNA, 60 bp, Homo sapiens
ccaccgacaccactcatgtcaatggctgaaagttgtccatttccatgactcaaagaccca

SEQ ID NO: 6528 - DNA, 60 bp, Homo sapiens
ctgagtaagagttttgaagtcagcagtgaatcaagtgcccacagatttgcaggcttaagc

SEQ ID NO: 6529 - DNA, 60 bp, Homo sapiens
tttaccagaggcgaacgtcatgagcatagtgatcccattgggggttgatacagcagagac

SEQ ID NO: 6530 - DNA, 60 bp, Homo sapiens
gcccagtggttttacgaatatgggaatgccctggaagggtccacctttgtgagccgtaaa

SEQ ID NO: 6531 - DNA, 60 bp, Homo sapiens
gcaactccaaactaacatggcagtcagactgtgtgatgtggcttctctgcttagaagtgg

SEQ ID NO: 6532 - DNA, 60 bp, Homo sapiens
atactccaaagaagtgtcgggcactgttcgggcttgaccgacagactttatggtgcaaac

SEQ ID NO: 6533 - DNA, 60 bp, Homo sapiens
ggagtccacaggatcagagtggactttaagacttatacaagcactagcaacaactctata

SEQ ID NO: 6534 - DNA, 60 bp, Homo sapiens
catgttggaaggaagcaacagtgaactctacctgttctggagttctcctgggtctgcaga

SEQ ID NO: 6535 - DNA, 60 bp, Homo sapiens
cacctccatcctctcggtaacctccagcgactcggaatgtgatgtatgatagccaaggcc

SEQ ID NO: 6536 - DNA, 60 bp, Homo sapiens
tacattcaccaggtgacggtacagaaagaagctctctcctttgaggatggtcagcctgtg

SEQ ID NO: 6537 - DNA, 60 bp, Homo sapiens
gctttcttctgctgtggagagatctagccagtccctgactttgcaacagacctactgact

SEQ ID NO: 6538 - DNA, 60 bp, Homo sapiens
agggtgcagacctcatccgtggcagcccttgggaatgtgaagcccttcagaaccagggca

SEQ ID NO: 6539 - DNA, 60 bp, Homo sapiens
atacgaatgaaggaagagccctcagatggaacgaaaggcgatgtgcaaggccatcccaga

SEQ ID NO: 6540 - DNA, 60 bp, Homo sapiens
ctgcatgatagcgttctggtgagctgggaaggacccaccactgccactgaggattgtttt

SEQ ID NO: 6541 - DNA, 60 bp, Homo sapiens
tctagatcgggtgtgagtggtggctctcgaagcctcaacatgtcaagaagagactcagaa

SEQ ID NO: 6542 - DNA, 60 bp, Homo sapiens
tctctgagcttcgtcacagtttcgatggctctgctgcagatcgctacctcctctctcagt

SEQ ID NO: 6543 - DNA, 60 bp, Homo sapiens
aatctctaccaccgagattgtcataaaccccaggtgacagacaaggaagcgaatgaccct

SEQ ID NO: 6544 - DNA, 60 bp, Homo sapiens
cctttgttacatgcatgagtcagtgaacagggaatgggtgaatgacatttgtgggtaggt

SEQ ID NO: 6545 - DNA, 60 bp, Homo sapiens
ctaagtgagttgaaaagcgaaagcgtctgaatcccaccagcatcgctggatgtgtcatcc

SEQ ID NO: 6546 - DNA, 60 bp, Homo sapiens
ggtggtgggagtttgttgtgacaggtactagagattcactctgcaaagagcatttggggc

SEQ ID NO: 6547 - DNA, 60 bp, Homo sapiens
acttaccatactgggaggtagaagagatgcagagaaatgtggaatttgtggacctatggg

SEQ ID NO: 6548 - DNA, 60 bp, Homo sapiens
tacgctgctccgctttcctcagacccctttttgccgtgcaaagggaattcttgacattaa

SEQ ID NO: 6549 - DNA, 60 bp, Homo sapiens
caagcgattctactgacatctagtacagtgttgaagcccaagtggttggctggttccagt

SEQ ID NO: 6550 - DNA, 60 bp, Homo sapiens
ggttgccggaagaagtggcgaagttacttttgagggtatttgagtagcggcggtgtgtca

SEQ ID NO: 6551 - DNA, 60 bp, Homo sapiens
ttgagagaccacacagcaggattagacacttgagagttcccactggacgaaagcctctca

SEQ ID NO: 6552 - DNA, 60 bp, Homo sapiens
tagtgaatacactgtttcctccgttatacaaggagctctttaatcctgactgtgccaccg

SEQ ID NO: 6553 - DNA, 60 bp, Homo sapiens
cccccttaacactgaatggagctggtgagagcaaatatccttgtttctgatattagatat

SEQ ID NO: 6554 - DNA, 60 bp, Homo sapiens
atatgcccagctctcagggtgtatggggctggagaatgcatgcgtagactgtgtgtatat

SEQ ID NO: 6555 - DNA, 60 bp, Homo sapiens
ttctgggctctaacctgggagactcgcatccagcccggcggaagctacagtctctaccct

SEQ ID NO: 6556 - DNA, 60 bp, Homo sapiens
cccgcctcataagtggaaggatgaaattctcagaacagctaacctctaatgggagttggc

SEQ ID NO: 6557 - DNA, 60 bp, Homo sapiens
catgccagaaaagagccttcccattgaattgaaggggagaacgtctccagacagaattct

SEQ ID NO: 6558 - DNA, 60 bp, Homo sapiens
tgcagcgccagtgaccagatgcgtcgttaccgcaccgccttcacccgagagcagattgcg

SEQ ID NO: 6559 - DNA, 60 bp, Homo sapiens
atcttgtgtcagatggactatgaggaagggcagctcaatggcacctttgaatcccaagtt

SEQ ID NO: 6560 - DNA, 60 bp, Homo sapiens
ttcttgggctcatcacaggaaagacctgtcccaggtgcaaggtctctctgatgtagaagg

SEQ ID NO: 6561 - DNA, 60 bp, Homo sapiens
agggcggcggccaagagcggggaaggtggatctcaggtagcgagtctgggcttcggggac

SEQ ID NO: 6562 - DNA, 60 bp, Homo sapiens
ctgccgtagcctttggagatggacgagcagcccaggctgatgcattcccatgctggggtc

SEQ ID NO: 6563 - DNA, 60 bp, Homo sapiens
actcttcttcataactgccacctttgccagaagctccagagagactccccaacctgccat

SEQ ID NO: 6564 - DNA, 60 bp, Homo sapiens
cctttctgtcacaagggttcacagagacacagtaatgcacactggaaatggacattatgg

SEQ ID NO: 6565 - DNA, 60 bp, Homo sapiens
ttcatcaagctcttcggcatggccaagattgacaacctgttgcaggagatgctgctggga

SEQ ID NO: 6566 - DNA, 60 bp, Homo sapiens
ggaagcatgtaggagaatccaagcgaggtcaacagagaaggcaggaatgtgtggcagatt

SEQ ID NO: 6567 - DNA, 60 bp, Homo sapiens
agaacattgaccattagctgatacatgcagacaagaggatcaggaaggatgagtctgatc

SEQ ID NO: 6568 - DNA, 60 bp, Homo sapiens
agcgtccactcagagcaagtgtttgcactgcgtctgcaggacaaaaagctcccaccgctg

SEQ ID NO: 6569 - DNA, 60 bp, Homo sapiens
ggctggctatgctagtcgcttcatcgtgatcgctgatttcaggaaagattcgaagaatct

SEQ ID NO: 6570 - DNA, 60 bp, Homo sapiens
ctcccctaacatccagttctgtagccactcactttccacagatgcaacaactgctatcag

SEQ ID NO: 6571 - DNA, 60 bp, Homo sapiens
gcagctgaaaggagtcgaaaggctccaccaattcctctaaaactgaagcctgattactgg

SEQ ID NO: 6572 - DNA, 60 bp, Homo sapiens
ccgccagaccaggtcttccggatgtttccagatatttgtgcctcacaccagagatcattt

SEQ ID NO: 6573 - DNA, 60 bp, Homo sapiens
ggccctagtccagaatgggaaactaaagcccaagcatgtactccagtggaggatatgtct

SEQ ID NO: 6574 - DNA, 60 bp, Homo sapiens
aagggaaaacataagtctgaaccctgatctcccacatcaaccaatgactcctgaaagaca

SEQ ID NO: 6575 - DNA, 60 bp, Homo sapiens
ctagaaagccaacaagagaaccaaagaatgggtaaggggcaaatccccctgatgtgcaag

SEQ ID NO: 6576 - DNA, 60 bp, Homo sapiens
tacaatgaagaaagcctctcactgaagacttccctcaccattggatcaagctccttgggg

SEQ ID NO: 6577 - DNA, 60 bp, Homo sapiens
gccaagcccagcgcaacaaaggaaaactacgaaccggctgtccaaggctgagcggtgact

SEQ ID NO: 6578 - DNA, 60 bp, Homo sapiens
gtcgccagattagccacttcttctcggagaatgaggatttccgctgcattgctggcatgt

SEQ ID NO: 6579 - DNA, 60 bp, Homo sapiens
taaggaggttcctgagaggggccgcatggatgttgctgagccctacaaggtgtatcagtt

SEQ ID NO: 6580 - DNA, 60 bp, Homo sapiens
gtgtccgccatggtcagaacacctacctcccctggttattgtgaggctggcgattacata

SEQ ID NO: 6581 - DNA, 60 bp, Homo sapiens
agccacgtggacttgctggacaagggtcaggtgatgactggttactaccgttggctgcag

SEQ ID NO: 6582 - DNA, 60 bp, Homo sapiens
tacagcgtccctgtgtatgttggactgactgtaataaatctgtctatatcgacttgtcca

SEQ ID NO: 6583 - DNA, 60 bp, Homo sapiens; identical to SEQ ID NO: 4855

SEQ ID NO: 6584 - DNA, 60 bp, Homo sapiens
ttacactttggaccttacgatcaggcacaggtcaggggtgacacagactcatcctgaaca

SEQ ID NO: 6585 - DNA, 60 bp, Homo sapiens
ccctcttgggacaaggacaaaagatgtcattgacgtagtcagtgctaagagcagaaatgc

SEQ ID NO: 6586 - DNA, 60 bp, Homo sapiens
aggcagctacaatcccctgcagtaccaagtggcacactgtgggcagacagccatgcacct

SEQ ID NO: 6587 - DNA, 60 bp, Homo sapiens
atccacttctccattgtgtctccccggaagctgcctgcgcttcggcttctgtttgagaag

SEQ ID NO: 6588 - DNA, 60 bp, Homo sapiens
agccagcatttacagccgatggccaaagaccaccacacggacctgacgaccttatagaag

SEQ ID NO: 6589 - DNA, 60 bp, Homo sapiens
gtggtagcggggtctcgcacggtctgcggagttcgtggttgtacagaaatgaacctttat

SEQ ID NO: 6590 - DNA, 60 bp, Homo sapiens
gtgaagaggagatcagtcgtttctttgcacaaagccagtctctgaccccttctcccggct

SEQ ID NO: 6591 - DNA, 60 bp, Homo sapiens
aaaactgccttccctggaagccccaacctctgcctctaacgtaatgactgcttttgccac

SEQ ID NO: 6592 - DNA, 60 bp, Homo sapiens
ggcatcgtcaagtcaaactcgactcttctgactctgattctgcatctggtcaagggcaag

SEQ ID NO: 6593 - DNA, 60 bp, Homo sapiens
gggatgctgacccaggaatagtggacatggtcacagtcctatgtacagagctttcttttg

SEQ ID NO: 6594 - DNA, 60 bp, Homo sapiens
ccgaaaatgttgcggagccagtctcagctagacctgtgcaaagactctccctatgaattg

SEQ ID NO: 6595 - DNA, 60 bp, Homo sapiens
agcctattatccctatgagcggactctggggcagtaccaatatgaacgatatggcgcagt

SEQ ID NO: 6596 - DNA, 60 bp, Homo sapiens
ccggaatcaagatcaacatatcaggtggtcattgcctttctccattgtctagtagacatg

SEQ ID NO: 6597 - DNA, 60 bp, Homo sapiens
atcacaaagatctccgaagacctgggcagtgagaagttctgcgtggatgcaaatcaggcg

SEQ ID NO: 6598 - DNA, 60 bp, Homo sapiens
cttggtcttgcccagtgctggcaagtgatgaatgtagcaactatattagcaacatttgtc

SEQ ID NO: 6599 - DNA, 60 bp, Homo sapiens
ttcagcatctggcttccagtgtccagcaacagacgtttccagccactttcctcgaatcat

SEQ ID NO: 6600 - DNA, 60 bp, Homo sapiens
ccgtcccccattcgcacacccgatgcccgggggtcgctacggacttaaaatctccgcacc

SEQ ID NO: 6601 - DNA, 60 bp, Homo sapiens
ttacaacttcagtaacttggccgctctcccggttgctctcaacatggtcctacctgatga

SEQ ID NO: 6602 - DNA, 60 bp, Homo sapiens
tgaagaggaaaggatggtggctgggtggttgacaaattactctcaggactcaatgacctt

SEQ ID NO: 6603 - DNA, 60 bp, Homo sapiens
cttacctacagcaggaaactgcaccagctagactccattctgggaccatctccaggagtc

SEQ ID NO: 6604 - DNA, 60 bp, Homo sapiens
ccagttcaggcaaagacatccaaagtagaaagtgaccagccgcaaaactccaacgatgct

SEQ ID NO: 6605 - DNA, 60 bp, Homo sapiens
ctgtgatcatccacggcagccttgtgacagttcgtgcccttgtgtgatagcacaaaattt

SEQ ID NO: 6606 - DNA, 60 bp, Homo sapiens
ggtcttccgctgatcactcagtgttccctggggaagctttatgccaaggtcaagccttgg

SEQ ID NO: 6607 - DNA, 60 bp, Homo sapiens
tcatccgtaaagactgtggagacgatctttctcccatcaagcctgttccatccggggaag

SEQ ID NO: 6608 - DNA, 60 bp, Homo sapiens
gcctcttcctgcagccattaccagccagctcgacaaggcatccatcattcgacttacaat

SEQ ID NO: 6609 - DNA, 60 bp, Homo sapiens
aatgttgtgtttgcggtggttgacgtagtgctcgaacgccagcaggtacgcctcctgact

SEQ ID NO: 6610 - DNA, 60 bp, Homo sapiens
ttccttgggtttgctctttcttcacctgaaaagaagactccaggaagggcagcacatgcc

SEQ ID NO: 6611 - DNA, 60 bp, Homo sapiens
gtgggcagaagggggaaaaacagcaaagagggataaaatagtttttgactctaatactgt

SEQ ID NO: 6612 - DNA, 60 bp, Homo sapiens
ctgcagctgaggttttatccactggacacatttgtgtgtgagaactaggtcttgttgagg

SEQ ID NO: 6613 - DNA, 60 bp, Homo sapiens
cttaccttttgtgcgaattgaacacatcttacctataaacagtgaagtcttaagtgatgc

SEQ ID NO: 6614 - DNA, 60 bp, Homo sapiens
gaaaccttgagtttcctcaatgtggtcaaagcttcagtcatcattaaacttctctggacc

SEQ ID NO: 6615 - DNA, 60 bp, Homo sapiens
aaacgtcaggtaagaggggaacagctgctgtacatcgtcctggcgagtgacaatgtgaca

SEQ ID NO: 6616 - DNA, 60 bp, Homo sapiens
gtccatgctgcgaaaattcagcctgcaaaggctcctctccccacttgatcaggcccagac

SEQ ID NO: 6617 - DNA, 60 bp, Homo sapiens
cccggttacttcctccagagactgacgagtgcggtgtcgctccagctcagagctcccgga

SEQ ID NO: 6618 - DNA, 60 bp, Homo sapiens
ggaggcgcagtggacggcaaacttacagccggtatcagaccttggaactacaaaaggagt

SEQ ID NO: 6619 - DNA, 60 bp, Homo sapiens
ttgaaaatttgcgcatgttacctcatgcacctggtgtccagatgcaagctattccagaag

SEQ ID NO: 6620 - DNA, 60 bp, Homo sapiens
actacacacagatgctgctttactttgcttgccacccagacaccgtggaaggagtctaca

SEQ ID NO: 6621 - DNA, 60 bp, Homo sapiens
cttgaatttggcaagtgtgttgcccagtgtgtgcttatcatcccctgcaagtaaaaccac

SEQ ID NO: 6622 - DNA, 60 bp, Homo sapiens
ccagatcccgaacctacctgctcctccgagcatttgagaaggatcgctttacaggcattg

SEQ ID NO: 6623 - DNA, 60 bp, Homo sapiens
tctggaggcaagttgctccagaaacagtacctctccattgcagagggtgcggacttctcc

SEQ ID NO: 6624 - DNA, 60 bp, Homo sapiens
atcagtgacgtgctgcagcgggacttgcgaaaggtgctggaccatcgagacaaggtatat

SEQ ID NO: 6625 - DNA, 60 bp, Homo sapiens
aagtcatcacctggttccagaatcggcgcgctaagctcaagcgggaactggaggagatga

SEQ ID NO: 6626 - DNA, 60 bp, Homo sapiens
aaaagagcaggagcgagagatgagaaagggaatccagcccgctctggagcagtacctggt

SEQ ID NO: 6627 - DNA, 60 bp, Homo sapiens
gtccagatcagtggctgactctgcccgacttcctctttggcacctccattccctgttgct

SEQ ID NO: 6628 - DNA, 60 bp, Homo sapiens
aacaactctccagtgaacgggaatagtagctgtcaaatggccttcccttccagccagtct

SEQ ID NO: 6629 - DNA, 60 bp, Homo sapiens
actggtatggtactgagcgacttattcggaaacatctggctgcaagaggcatcccaactt

SEQ ID NO: 6630 - DNA, 60 bp, Homo sapiens
gttcattttggagaggaacatacaagtgtgaccaatgtcagaaagccttgtcttttgtaa

SEQ ID NO: 6631 - DNA, 60 bp, Homo sapiens
tggtctagggcttggctatgagcaagttttccagatcaccacccaagttgtgtggggcag

SEQ ID NO: 6632 - DNA, 60 bp, Homo sapiens
acccaggaggacctgtacctgcacgtgaacagtgcccatccgggcagctcgtttctcaaa

SEQ ID NO: 6633 - DNA, 60 bp, Homo sapiens
gagccattggtgaatgaagacacccatcacttgtcatgttggtttccaacagtcctttcg

SEQ ID NO: 6634 - DNA, 60 bp, Homo sapiens
accctagcatgtaatggatttgggaagtcctgagggaatgcataccttaccacataacac

SEQ ID NO: 6635 - DNA, 60 bp, Homo sapiens
tttgagatacccctcagcaatgtgtcccagtgcaccacaggcaagaatgaggtgacactg

SEQ ID NO: 6636 - DNA, 60 bp, Homo sapiens
agtcagtgactgtagtgatggcacgtcagagctggaggaaccgctgggagaggatccccg

SEQ ID NO: 6637 - DNA, 60 bp, Homo sapiens
gggaaatctttctgcaggaaatcagtattgattctgcatcagggaattcactcagaagaa

SEQ ID NO: 6638 - DNA, 60 bp, Homo sapiens
cggagaagctggaaagtgtgaatgctgaactgaaggctcagattgaggagctcaagaacg

SEQ ID NO: 6639 - DNA, 60 bp, Homo sapiens
tgaaatttggcccagcccgaactgactcagtcatcattgcagatcaaacgcctactccaa

SEQ ID NO: 6640 - DNA, 60 bp, Homo sapiens
agataaaggtttgcagacaagccaggatgcacgcttttatgctctgtcggccagtttcga

SEQ ID NO: 6641 - DNA, 60 bp, Homo sapiens
tggaggtggagatgggcacctgacagctttgccttttgctgacacagctccataaagact

SEQ ID NO: 6642 - DNA, 60 bp, Homo sapiens
ggggatctgaccgactcggagcccggctggatgttacaggcgtgcaaaatggaagggttt

SEQ ID NO: 6643 - DNA, 60 bp, Homo sapiens
actgataggatgcaagctgaggtcgtggcacaggaatgacagacaccatttggggagtat

SEQ ID NO: 6644 - DNA, 60 bp, Homo sapiens
agccaagaggtgagggtgcacgtcttccctcctgtcccagctccccagcctggcgtagag

SEQ ID NO: 6645 - DNA, 60 bp, Homo sapiens
tggagctgctcaacgttctcttcaggacctgcaaacatgagaagctgaccttggacctga

SEQ ID NO: 6646 - DNA, 60 bp, Homo sapiens
gctatgggtaaaataatgccagtaattcagctgctacatccaagcactgaagtcttaccc

SEQ ID NO: 6647 - DNA, 60 bp, Homo sapiens
gagaagcaaccttattatgaagagcaggcccggctaagcaagatccacttagagaagtac

SEQ ID NO: 6648 - DNA, 60 bp, Homo sapiens
tctctcatacgcgtgtatgtttggttccatgtcacagccccctaggagccagtgatgctc

SEQ ID NO: 6649 - DNA, 60 bp, Homo sapiens
aagttactgactgatgctgagaagcggccattcattgacgaagcaaaacgcctcagggcg

SEQ ID NO: 6650 - DNA, 60 bp, Homo sapiens
agcccctactcgctgctcgacctgggctccaaaatggcagagatctcgtcgtcctcgtcc

SEQ ID NO: 6651 - DNA, 60 bp, Homo sapiens
atgcgacctgttcgagagaactcatcaggtgcgagaagcccgcgggttcctgctgatttg

SEQ ID NO: 6652 - DNA, 60 bp, Homo sapiens
cttgaggccatttggtacacatctctggaggctgagtcggttcatgaggtctcttatcaa

SEQ ID NO: 6653 - DNA, 60 bp, Homo sapiens
gcgcaactccacaaccagtacggccccatgaatatgaacatgggtatgaacatggcagca

SEQ ID NO: 6654 - DNA, 60 bp, Homo sapiens
gggcacggctgcagcgtcgcggtgcatcaagagatgtgaactttgtccccataaggatgg

SEQ ID NO: 6655 - DNA, 60 bp, Homo sapiens
gtgaatctcaggagagagcagccagagtggttgggcccatgtggtttgtgccctgtatat

SEQ ID NO: 6656 - DNA, 60 bp, Homo sapiens
ccagagtgttattgcttactgtgagctaagacagttttgcctaacctcgaagtcatgaag

SEQ ID NO: 6657 - DNA, 60 bp, Homo sapiens
tgccgcagcttcctgagtagctgggacttacagagatgtgaactttgtccccataaggat

SEQ ID NO: 6658 - DNA, 60 bp, Homo sapiens
ttctttgtggacagctgtacactgaagagtcatcagagagttcacactggagaaagacct

SEQ ID NO: 6659 - DNA, 60 bp, Homo sapiens
cagctgtctcctcaagaaaggatttctgagaaacaactaggtcagcatttgcctaatcct

SEQ ID NO: 6660 - DNA, 60 bp, Homo sapiens
gtggcaaaagctttggaaggacttcccatctaagccaacatcagcgtattcacacagggg

SEQ ID NO: 6661 - DNA, 60 bp, Homo sapiens
gccttcagttatcttgactcctttcaatcacatgataaagcttgcactaaagagaaactc

SEQ ID NO: 6662 - DNA, 60 bp, Homo sapiens
gcatgcactgagtgtggcaaagcttccgagaaaagtcaaacattcactgtacatcaaaga

SEQ ID NO: 6663 - DNA, 60 bp, Homo sapiens
gccttttcccagaagtcacacctcacagtacatcagagaatgcacacaggggagaaaccc

SEQ ID NO: 6664 - DNA, 60 bp, Homo sapiens
catcagataacccacttagaagagaaacaatgtaaatgtgatgtatatggcaaggtattt

SEQ ID NO: 6665 - DNA, 60 bp, Homo sapiens
gtaaagaatgtggtgaagccttcagtcagagctcaactcttacaaaacatataaaagtct

SEQ ID NO: 6666 - DNA, 60 bp, Homo sapiens
gctcctgaacaacctcaaagtatcagtaaggacttgaattctcctggaccacacagcaca

SEQ ID NO: 6667 - DNA, 60 bp, Homo sapiens
cactgcacatgagatatagatccgtagaattgtcaggagtgcacctctctacttgggagg

SEQ ID NO: 6668 - DNA, 60 bp, Homo sapiens
ccacaagacactgcgttcccacatggagctcactgcccatttcagagttcattgtcgaaa

SEQ ID NO: 6669 - DNA, 60 bp, Homo sapiens
gagtcttttgtaagacaaagatgtcagcatagcttctttcagtgtctgagaacgcctttc

SEQ ID NO: 6670 - DNA, 60 bp, Homo sapiens
gtggtgtgatgatgccatataccgcagggcttgcttctgtcaagtgtgactctatctcag

SEQ ID NO: 6671 - DNA, 60 bp, Homo sapiens
gccgagcccagcaaaggtggctccttctgaatgtgtggtcagcatctgtacaaatgcatt

SEQ ID NO: 6672 - DNA, 60 bp, Homo sapiens
catgacacatgcttcacctgtgcagcttgcagccggaagctgagaggaaaagccttttat

SEQ ID NO: 6673 - DNA, 60 bp, Homo sapiens
ctctatcccagtgtctccgtctgagggtttgtcctgttaatgcgggatgagcgatcagaa

SEQ ID NO: 6674 - DNA, 60 bp, Homo sapiens
cagcctgttgtacagcatctacaacttcaagagtctcagcagccaaccagtcaagcccaa

SEQ ID NO: 6675 - DNA, 60 bp, Homo sapiens
ccagaaaccatgtgaaaaggcaccttgggatgagggaatacaagtgtcatgtctgtgggg

SEQ ID NO: 6676 - DNA, 60 bp, Homo sapiens
ccagagaaacaaggccaaaagtggaaggaattaggagacagcttgactttcggttcagct

SEQ ID NO: 6677 - DNA, 60 bp, Homo sapiens
atgtgaccctctcgggtgggactctgcagctgcttcgcagcgcaactctctcaccaaact

SEQ ID NO: 6678 - DNA, 60 bp, Homo sapiens
ttggtattcactttcgcgactcaggtgaactaacctgcgagaagctggttgtgcgctgag

SEQ ID NO: 6679 - DNA, 60 bp, Homo sapiens; identical to SEQ ID NO: 4855

SEQ ID NO: 6680 - DNA, 60 bp, Homo sapiens
cgccagtctggatgaacaggacagcttgggagcgtgcttcaaggatgcagagtatatcta

SEQ ID NO: 6681 - DNA, 60 bp, Homo sapiens
gctgggactggttccttcgcagccattttctgtccaaccaaacagccgatggagacggga

SEQ ID NO: 6682 - DNA, 60 bp, Homo sapiens
tctgacccagccagcattccgagtgactgaggtggatgtggacatcattgcttaccaatt

SEQ ID NO: 6683 - DNA, 60 bp, Homo sapiens
aaggccgagcaagccgaacgtctgggaaacacaaaggagatcgagagccacagggactaa

SEQ ID NO: 6684 - DNA, 60 bp, Homo sapiens
agacacctctccggacaccaatggtggaggcagtacttctgatacccaggaagacattct

SEQ ID NO: 6685 - DNA, 60 bp, Homo sapiens
gttggctgagtgggtatcctgataaatctgggcttgtcttcctaatgctacctttgttgg

SEQ ID NO: 6686 - DNA, 60 bp, Homo sapiens
agaccagtcatttgtgtggatgattgatgtggcatgtggttgatgttttaggaaagggtg

SEQ ID NO: 6687 - DNA, 60 bp, Homo sapiens
tagcaggcatgtgggaaggaaggctctgtcttcaactctttgaccctccatgtgtaccat

SEQ ID NO: 6688 - DNA, 60 bp, Homo sapiens
attgtcacagagagtgagtacaccagtggacattcagtagctggagtgcttgaccagagc

SEQ ID NO: 6689 - DNA, 60 bp, Homo sapiens
ttttgaaacggattggaaggatacagaccaaactcttgatagtggtcacctgtgaagagt

SEQ ID NO: 6690 - DNA, 60 bp, Homo sapiens
aaactggatctcagcttggagaacaggaactgccagactttcaaccgcagactcctagga

SEQ ID NO: 6691 - DNA, 60 bp, Homo sapiens
agaacatgctgctgagtcacaggaacttctagcctgccttggcctgtggtttcccaccca

SEQ ID NO: 6692 - DNA, 60 bp, Homo sapiens
aaaacgtcaactctgtggaggctttgcaggaaactctcattcgtgcactaaggaccttaa

SEQ ID NO: 6693 - DNA, 60 bp, Homo sapiens
aactatgggaacgtggcctctctgggattccctgtccctaagccggagttgatctcccag

SEQ ID NO: 6694 - DNA, 60 bp, Homo sapiens
tgtacagactccctgggatcctcatgttttgggtgacaggacctatggaccactatactc

SEQ ID NO: 6695 - DNA, 60 bp, Homo sapiens
ccagacagatctgcatgaacacccactgtaccgggccggacacctcattctgcaggacag

SEQ ID NO: 6696 - DNA, 60 bp, Homo sapiens
cgccagtactctcccagcaaccgcgagcaatttcttgggaccaaagtcaatactccggag

SEQ ID NO: 6697 - DNA, 60 bp, Homo sapiens
ctctcacagtcttaaaccgtgccaaagtcctgttatgtcttgaacttttcctcaaagcat

SEQ ID NO: 6698 - DNA, 60 bp, Homo sapiens
tttctcagcaagattgaggaccgtgtttcagggcgtggggcattgggctttgtccacatg

SEQ ID NO: 6699 - DNA, 60 bp, Homo sapiens
aaactaaggaaatggaatcttaaaagtctatgacagtgtaactctacagtctcaaaatga

SEQ ID NO: 6700 - DNA, 60 bp, Homo sapiens
caaccagctacccacctcaactcccctgtagtttaggacacaaaacagctaccagcggta

SEQ ID NO: 6701 - DNA, 60 bp, Homo sapiens
gccattttagaaggttccagtgagctgcgttttagggagctattggggttgctctggtct

SEQ ID NO: 6702 - DNA, 60 bp, Homo sapiens
tggcgcatcgggcaccaaccccaggaataagccccaggaataaacttaggttgcgggcac

SEQ ID NO: 6703 - DNA, 60 bp, Homo sapiens
atggccaggggttcccagttatgcttctcaagattagccatattaggcacatggttgggg

SEQ ID NO: 6704 - DNA, 60 bp, Homo sapiens
cggaaggtttctttgctgcatgttagagactgtgaccaggtggcatagtgatagagccac

SEQ ID NO: 6705 - DNA, 60 bp, Homo sapiens
ccaacagagcagcagctacgggcagcagaatccgtatcagatcctgggcccgaccagcag

SEQ ID NO: 6706 - DNA, 60 bp, Homo sapiens
atgtggctctgggaattcctgcagagaagagcaggggtggccaggagatagtgagcagct

SEQ ID NO: 6707 - DNA, 60 bp, Homo sapiens
tagaagttgtctgtgggtgatgttactgtagtggtctcagggaaaggattgtccagttac

SEQ ID NO: 6708 - DNA, 60 bp, Homo sapiens
ttccacggagagattaactctgttggctgaagccctatcccaattccttggctagaccct

SEQ ID NO: 6709 - DNA, 60 bp, Homo sapiens
tgcctgccctctgtctgtcttctcctaattctgcaggtggaggttgctagtctagtttcc

SEQ ID NO: 6710 - DNA, 60 bp, Homo sapiens
aatgaggaggtcttcacggatggctttgccgattccagcccttggtccttggatagattt

SEQ ID NO: 6711 - DNA, 60 bp, Homo sapiens
aaataccacatcctgaagacccacgcagagaactggttccgaacatcagcagacccacct

SEQ ID NO: 6712 - DNA, 60 bp, Homo sapiens
gagaggcgtgatatctggatggaagttgggctggatgatctccaaagtcgtttcaactct

SEQ ID NO: 6713 - DNA, 60 bp, Homo sapiens
ctttcctcagcattgtcttgttaaaccgcatgccatttggaactttggcagtgagaagcc

SEQ ID NO: 6714 - DNA, 60 bp, Homo sapiens
ttccggtcggaattaccccgtggagcacgccgatatggctgcgctgacactgaggggtgt

SEQ ID NO: 6715 - DNA, 60 bp, Homo sapiens
cagatgatagtgacacttgggaacctccacgacatgtgaaacggaagctgtctaaatcag

SEQ ID NO: 6716 - DNA, 60 bp, Homo sapiens
gttcagaagacatttcagtgccgagtagtccacatacagaagctatacagcatagttcgg

SEQ ID NO: 6717 - DNA, 60 bp, Homo sapiens
cttcgtgtgtggctcaaacattgttgaacatcggggaatttatgctggtaggaaactttc

SEQ ID NO: 6718 - DNA, 60 bp, Homo sapiens
gctctggctctgtggctttgtgggttaaagtacttgtctggcaaacaggagatgctggat

SEQ ID NO: 6719 - DNA, 60 bp, Homo sapiens
aacgtcgccctcaattccaccgcctatgatccagtgaggcatttctcgacctatggagcg

SEQ ID NO: 6720 - DNA, 60 bp, Homo sapiens
gaaatctttggtgggaacccacgtttcctgtcactacacagagcacacctgggagaggag

SEQ ID NO: 6721 - DNA, 60 bp, Homo sapiens
tctcaacagccttacagagcagcagagacatctccttcagcagcaagagcagcagctcca

SEQ ID NO: 6722 - DNA, 60 bp, Homo sapiens
ttagactggctacttgccctaaaccagcacttggtgatgtctactgggtggatggttgtg

SEQ ID NO: 6723 - DNA, 60 bp, Homo sapiens
ttttcctaaggattttgctgcaaagtctccttcggaacccgaactgcaagctgagcgcct

SEQ ID NO: 6724 - DNA, 60 bp, Homo sapiens
aacacgcacatacgtaaccaccccagagcccctgtgggagacatgccctatagatgtgat

SEQ ID NO: 6725 - DNA, 60 bp, Homo sapiens
ccatctccgagaacatcagaggatccacaacagttgaagagccttttgaacgcagtagcc

SEQ ID NO: 6726 - DNA, 60 bp, Homo sapiens
aaaatagtgccttccaatgcttcttccttatgtcccacagacaggatcatcactaagaag

SEQ ID NO: 6727 - DNA, 60 bp, Homo sapiens
tacacagcggcctcttcaggtgcagggaggaaatggaagcacgttctatgctggttccac

SEQ ID NO: 6728 - DNA, 60 bp, Homo sapiens
cccacagaacaatgggaaacagctgcgcccctcaggaaaactaaatacctctgagaaggt

SEQ ID NO: 6729 - DNA, 60 bp, Homo sapiens
attctcagtcagaatggagcacctcaggcagatgtgagcatgtacagtcttgaggagctg

SEQ ID NO: 6730 - DNA, 60 bp, Homo sapiens
cagcagagttcactgctggcctataatacaacctcccacaccgaccaatcctcacgattg

SEQ ID NO: 6731 - DNA, 60 bp, Homo sapiens
tcatgggatttgctgccctctttgccccagagctgaagagctataggcactggtgtggat

SEQ ID NO: 6732 - DNA, 60 bp, Homo sapiens
cctcatggaaggttgtacagagccccacatttgaggggaagtcctttcagttgatatgag

SEQ ID NO: 6733 - DNA, 60 bp, Homo sapiens
ttctgaaccctgaagcccgatgacatcttacgaggtggacgttggactgttcatgcgcat

SEQ ID NO: 6734 - DNA, 60 bp, Homo sapiens
ttagaggaggctcctaacaactgggtaggaaccttcaagacaactccacctgctgagaca

SEQ ID NO: 6735 - DNA, 60 bp, Homo sapiens
gcatgcattctcaagaggtcgtgccaatcagccactgaaaggaaaggcatcactatggac

SEQ ID NO: 6736 - DNA, 60 bp, Homo sapiens
gcaaagtttcgtcttctcgtagactatctagcatgcagagtgtagtgtgttgaaacggtg

SEQ ID NO: 6737 - DNA, 60 bp, Homo sapiens
attgtattggtagcgtgaaaaaagcacactgagagggcaccatgccggtggaaaggatgc

SEQ ID NO: 6738 - DNA, 60 bp, Homo sapiens
cttcagccaaagctccaatttccttcggcatcagaaagttcacacacaggtaagacctta

SEQ ID NO: 6739 - DNA, 60 bp, Homo sapiens
ggtatggatatgacccatttttagccaagagggtctgagctgtatctgctggtggcttat

SEQ ID NO: 6740 - DNA, 60 bp, Homo sapiens
tacacctcagcctgtgaaatgaacgatccggaccctcaccaactttccccacctcaggca

SEQ ID NO: 6741 - DNA, 60 bp, Homo sapiens
agcccggaggttggctatgtgaccaggcaacatgctgagccggcttcaggaactgcgcaa

SEQ ID NO: 6742 - DNA, 60 bp, Homo sapiens
tcctcctccacctgcgcctcccttgtctgaacttcccaacgccttcctattcctttccaa

SEQ ID NO: 6743 - DNA, 60 bp, Homo sapiens
ggcctcatctccaagtcacctccagtaacaagatggcaaaccaagtatgctcagataagc

SEQ ID NO: 6744 - DNA, 60 bp, Homo sapiens
ctctgaccactctccagcaccagcttccagttagtggatatagcacaccatccccagcca

SEQ ID NO: 6745 - DNA, 60 bp, Homo sapiens
tctctgtcacaatgcctcaaaagacatggaacccaggcctacaaccgtcccaactgctaa

SEQ ID NO: 6746 - DNA, 60 bp, Homo sapiens
tctccaccaaaaggaatcacgagcagaggcatattcgggagcataatgggaagggctatg

SEQ ID NO: 6747 - DNA, 60 bp, Homo sapiens
ccacttagggaactgcgtgaacactcccaggccattatgatgctgttacagcttcagtgt

SEQ ID NO: 6748 - DNA, 60 bp, Homo sapiens
gacagacaaaagcagtcaggatcagctgctgtttctctttccagagttcagtcaacagag

SEQ ID NO: 6749 - DNA, 60 bp, Homo sapiens
cccttctcaagggagcagctgtggaaatctgtcacatcgtactcaataccactttctgtc

SEQ ID NO: 6750 - DNA, 60 bp, Homo sapiens
ggcctattcgggcaagggctaccacggcatgcagaggaatgtcgggtcctcacaattcaa

SEQ ID NO: 6751 - DNA, 60 bp, Homo sapiens
gcgagggactggacttcaactttgagccagatccctgagtcatgcctggaagctttgtcc

SEQ ID NO: 6752 - DNA, 60 bp, Homo sapiens
ggaagtatctcttaggctcgtcagacaccgagtgtcccgagcaaaaacaagtgtttgcaa

SEQ ID NO: 6753 - DNA, 60 bp, Homo sapiens
gatccaaactcctaaatgtttgtgcacacatttctcggtgacaacgttgggaaacacagc

SEQ ID NO: 6754 - DNA, 60 bp, Homo sapiens
attcaggaatggggactgtggagaactggactgacggatgactctcacgtctcctccata

SEQ ID NO: 6755 - DNA, 60 bp, Homo sapiens
accggagaaactggaaggagccggttcgagctcagcccctgagcgtaactgtgtgggctc

SEQ ID NO: 6756 - DNA, 60 bp, Homo sapiens
aaacttcatggtggttgccattgggcagaggagtataggactggggtctaggataggagc

SEQ ID NO: 6757 - DNA, 60 bp, Homo sapiens
gaaggccctatcaggacatggagtatgaaagacgtggtggtcgtggtgacaggactggcc

SEQ ID NO: 6758 - DNA, 60 bp, Homo sapiens
cctcttcagcctggatttgaagttcctgaataaccacatcctggtgaaagacgctcagga

SEQ ID NO: 6759 - DNA, 60 bp, Homo sapiens
ggaaaagtcttgagccatcattcatcccttaacaggcacattagatcttacaccagacac

SEQ ID NO: 6760 - DNA, 60 bp, Homo sapiens
ctgattttctggctgaagactattctctttgtgtatgtccaccacagttactttatccct

SEQ ID NO: 6761 - DNA, 60 bp, Homo sapiens
ggttttccagaggcctgttttggggctttcccaggagaaagatgaaactgaaagcatatg

SEQ ID NO: 6762 - DNA, 60 bp, Homo sapiens
gcgtccagctacctggagaactctgcatcctggtacacaagtgcagccagctcaatcaat

SEQ ID NO: 6763 - DNA, 60 bp, Homo sapiens
gggggcactcatgcgtgctccgcttcaatgagacaaccctgtgcaagcccctggtcccaa

SEQ ID NO: 6764 - DNA, 60 bp, Homo sapiens
acattgttgtacagaagcatgtttcgcatgtaggtaaactggtggtggtactagaaatac

SEQ ID NO: 6765 - DNA, 60 bp, Homo sapiens
gtgcactcagtcgaggtattactgctgcattcaagcctacaagtcaacactacacgaatc

SEQ ID NO: 6766 - DNA, 60 bp, Homo sapiens
gtggaatgcagtttaaagatgacatatgccaacaaatgccttgtattatatggcactgcc

SEQ ID NO: 6767 - DNA, 60 bp, Homo sapiens
ggaacacgcatgtgtgtatatatgtgttcacgtgtgctatgtgtgttaagcctgcatgca

SEQ ID NO: 6768 - DNA, 60 bp, Homo sapiens
gcggctacctcttaccacacagttgggaagcgcagtcctaaaggagacgcaggttggaga

SEQ ID NO: 6769 - DNA, 60 bp, Homo sapiens
ggtttagtcatctcggaagtcgtagggcagctatggaaaccactgggttctggaacgttc

SEQ ID NO: 6770 - DNA, 60 bp, Homo sapiens
gcactcagacctgaatcagagaaaatcatatgccaaagccaactgccagtgttagacctc

SEQ ID NO: 6771 - DNA, 60 bp, Homo sapiens
cgaccggagtactagccagcacaaaaggcagggtagcctgaattgctttctgctctttac

SEQ ID NO: 6772 - DNA, 60 bp, Homo sapiens
tctgggaggatttgatagcatggctgagctcctgccaagttcaagagctgaactagagga

SEQ ID NO: 6773 - DNA, 60 bp, Homo sapiens
aatatctgagacgacgtttgggagcaatgctctttaccacgttcaccaaatcgtctgggg

SEQ ID NO: 6774 - DNA, 60 bp, Homo sapiens
gtttgaaaggaggtcttccagtatcgcagttcttcgaatgaaagccaaggagcacaccgc

SEQ ID NO: 6775 - DNA, 60 bp, Homo sapiens; identical to SEQ ID NO: 4855

SEQ ID NO: 6776 - DNA, 60 bp, Homo sapiens
actgaaactgccgctgctgaactcagcgtatccagtcccgcagctgaccaatcggagctc

SEQ ID NO: 6777 - DNA, 60 bp, Homo sapiens
agaagtctggacagctgatcacctgaaagagaggagccaagaaaaccaatctaaacattt

SEQ ID NO: 6778 - DNA, 60 bp, Homo sapiens
cttctgctctgccccaagagtggtcgccttcgtggcagggcacgactctctcccagctcg

SEQ ID NO: 6779 - DNA, 60 bp, Homo sapiens
ctgtgaaggagttcaggcagctggccaacagtggcaaatattgtactccaagatacttgg

SEQ ID NO: 6780 - DNA, 60 bp, Homo sapiens
agcgggggcgggaagttccctgaaggagcgagacagggagggacagggcagaggaggaga

SEQ ID NO: 6781 - DNA, 60 bp, Homo sapiens
tcaatttctttcttgtcatccttgctggggactgaaaacgcttctgtgagacttgataat

SEQ ID NO: 6782 - DNA, 60 bp, Homo sapiens
gcagaaggtttcggcagaagcctaacctgtttaggcacaagagggcacactcaggtgcct

SEQ ID NO: 6783 - DNA, 60 bp, Homo sapiens
gtggaaggaatatgggaaacctttcatctgcagctcctcacttacccagtatcagagatt

SEQ ID NO: 6784 - DNA, 60 bp, Homo sapiens
accagattcatggagccaagccactacattctgtggaaggagatctctcaggagtaagca

SEQ ID NO: 6785 - DNA, 60 bp, Homo sapiens
cttagcctggtgacatgaattagctgattgtggaactctcagcagcatttcacgtattgt

SEQ ID NO: 6786 - DNA, 60 bp, Homo sapiens
ttgatagtgaacgtgtaccttgggaactggctcacccacctgctaatagcaccatcgtca

SEQ ID NO: 6787 - DNA, 60 bp, Homo sapiens
cagacaatccatactggtgggaaaccttacaaatgtaacgtgtggaaagttctaaagtca

SEQ ID NO: 6788 - DNA, 60 bp, Homo sapiens
gagagaaaccctacaaatgtgaagaatgtgataaggcaactcatgctggagagaaaccct

SEQ ID NO: 6789 - DNA, 60 bp, Homo sapiens
acgagcttcgtgcagatcgtgcacggtggcaaaggctttagtatcttctcaatccttact

SEQ ID NO: 6790 - DNA, 60 bp, Homo sapiens
tactggagagcaaccctacatatgtgaagaatgtgtgaaattttttacccaatcctcaac

SEQ ID NO: 6791 - DNA, 60 bp, Homo sapiens
catactcgtacgatctgaagacgcagaaatagaagaatgtggcaaagctttctaccattc

SEQ ID NO: 6792 - DNA, 60 bp, Homo sapiens
gctagcacttactgagcacctgcaatgaggtaaagactcagctaagggttttacaggaag

SEQ ID NO: 6793 - DNA, 60 bp, Homo sapiens
gagggaaattactctgggtgaagtcagaactttgtagaacacagaacataaagggtgaga

SEQ ID NO: 6794 - DNA, 60 bp, Homo sapiens
ggtgtcaaacagaggcatcagcctgctgttgatcacagagagaaattgagtagaaagacc

SEQ ID NO: 6795 - DNA, 60 bp, Homo sapiens
ctgttactgttgagaatgcgtctaaacctgattttacaaagaattcacaagttggatcgg

SEQ ID NO: 6796 - DNA, 60 bp, Homo sapiens
tccctctcaaggaccctttcccatgaaagacctacctttatctctgatcctagacagggc

SEQ ID NO: 6797 - DNA, 60 bp, Homo sapiens
aggccagataccgtgtactacaagttggcgaagaagatccttcacgcaggctttaagatg

SEQ ID NO: 6798 - DNA, 60 bp, Homo sapiens
ctccccagcagtacatcaggattttgtccaagaacatcgtttggttctgcaatcggtagc

SEQ ID NO: 6799 - DNA, 60 bp, Homo sapiens
aagaagtttgcctgtgaggtctgcagcaagatgttctaccgcaaggacgtcatgctggac

SEQ ID NO: 6800 - DNA, 60 bp, Homo sapiens
gcatctggtgagtctcaagacatctgtaagtctgcaggcagggtaaagagacaatgggaa

SEQ ID NO: 6801 - DNA, 60 bp, Homo sapiens
gtttaccagactctttagcctttgagctaaactgtctgagcaacctcttagatgtgcaca

SEQ ID NO: 6802 - DNA, 60 bp, Homo sapiens
ggtgtgtcagttccagttcaagttcccggaagtgaacctgatatgtctcaatactggcca

SEQ ID NO: 6803 - DNA, 60 bp, Homo sapiens
ataaagttggacgccattatggccggcatattttggggcacaatttcgcccctaatgcgg

SEQ ID NO: 6804 - DNA, 60 bp, Homo sapiens
aatccaatcaacttcgagagcgtaggccccacctatcgtgggtcgagttgcttggcggtc

SEQ ID NO: 6805 - DNA, 60 bp, Homo sapiens
ttatcctgagttaccatcagtgctaatgttcctcttttgggtatagttctccaggagaac

SEQ ID NO: 6806 - DNA, 60 bp, Homo sapiens
atatacacacagtggatggacggacaagacaggcagagatctataaacagacaggctcta

SEQ ID NO: 6807 - DNA, 60 bp, Homo sapiens
gtaagcttgttcgcctggagccattgactgaagctgaagctagtgaagctacactgtttt

SEQ ID NO: 6808 - DNA, 60 bp, Homo sapiens
caggctgtcttaaaacagctgaacgaacagagactttccaaccagttctgtgatgttact

SEQ ID NO: 6809 - DNA, 60 bp, Homo sapiens
ttattcccattgctctcctggctcactcttacggtcggtctccagtgactgaagcattcc

SEQ ID NO: 6810 - DNA, 60 bp, Homo sapiens
gctgcaagacaggcttcttaaggacatgctagaagaggagcttcttaatgtacgcagaga

SEQ ID NO: 6811 - DNA, 60 bp, Homo sapiens
aagtgtgcactgggaggaggctgaggcctgtgaagccaaacaatatgctcctgccttgca

SEQ ID NO: 6812 - DNA, 60 bp, Homo sapiens
ctcaccagcattgtgatagctactccagggaccagactcgctggacctcaaactgtacag

SEQ ID NO: 6813 - DNA, 60 bp, Homo sapiens
tcgcaaaatgcctagatattatcctactgaagatgtgcctcgaaagctgttgagccacgg

SEQ ID NO: 6814 - DNA, 60 bp, Homo sapiens
ggacatctccatcaggtccaactcgctggaacaagtttacaggctgctgctcagtcttta

SEQ ID NO: 6815 - DNA, 60 bp, Homo sapiens
cggttggtaaccggtcagaccagcccgagagggacctggtgcctgtacccaggcttctgt

SEQ ID NO: 6816 - DNA, 60 bp, Homo sapiens
aatgccagggaacgactccatcttccatgacatcgacagcgatacctccttaaccagcct

SEQ ID NO: 6817 - DNA, 60 bp, Homo sapiens
atgccaaggacctcaagcagcttgcccagaaaacaggtctgaccaaaagagttttgcagg

SEQ ID NO: 6818 - DNA, 60 bp, Homo sapiens
ctcaagtaaacccactcagcatcttggctatgacgcttcaagatcctggagcactgcatg

SEQ ID NO: 6819 - DNA, 60 bp, Homo sapiens
ccacctctgtaaaggctttgtgcattataaacctggaatgtatcgactttctttcagggg

SEQ ID NO: 6820 - DNA, 60 bp, Homo sapiens
ctcgccatgaaagaagtcatgatatagaggctgggtgtagtgactcagcctataatccca

SEQ ID NO: 6821 - DNA, 60 bp, Homo sapiens
gggtttcccagaccaggggttcagaggagactatttacccttcatgatctttggcgattc

SEQ ID NO: 6822 - DNA, 60 bp, Homo sapiens
aggttcccacctcaccaccctgggattcctgagtgtcagtgacttgggattcccacccag

SEQ ID NO: 6823 - DNA, 60 bp, Homo sapiens
atcctctgccctaactacagtcgtttacctggtgctgcgtcttgcttttggtttccagct

SEQ ID NO: 6824 - DNA, 60 bp, Homo sapiens
cagtgactgcagagcagggataccaaggcaggcctgttacactctccccaacctccttgg

SEQ ID NO: 6825 - DNA, 60 bp, Homo sapiens
attcaagactctcgaagagaagcttcagtgcagatggatttgagatgctacaaaacccag

SEQ ID NO: 6826 - DNA, 60 bp, Homo sapiens
tgggaaatacaacctagaaccaaacggtcatcacttcagcagggttttttgaagaatcaa

SEQ ID NO: 6827 - DNA, 60 bp, Homo sapiens
catgtcaccatggattggaactgttttgcatatcagggaaatcatagccaaggggaaatc

SEQ ID NO: 6828 - DNA, 60 bp, Homo sapiens
agtctataaatgtaagacatttgggaaagccttcacacagccttttgagcacacatgaga

SEQ ID NO: 6829 - DNA, 60 bp, Homo sapiens
taagtgtgaagaatgtggcaaaagctttattctgtcctctcatcttactacacataagat

SEQ ID NO: 6830 - DNA, 60 bp, Homo sapiens
cagtaaaggacacaagcacacataagaatgcattctggatagctgaacaaaaggcagcag

SEQ ID NO: 6831 - DNA, 60 bp, Homo sapiens
ccaacagagcagcagctacgggcagcagagtgagaaaccataccagtgtgacttcaagga

SEQ ID NO: 6832 - DNA, 60 bp, Homo sapiens
atcatcatcatcatcatcacagcagcggccatatcgaaggtcgtcatatgcgacgtgtgc

SEQ ID NO: 6833 - DNA, 60 bp, Homo sapiens
cgtccgagaaggcggaaacccacagtgttacctgacttatgaaacttgaaaccgcctctg

SEQ ID NO: 6834 - DNA, 60 bp, Homo sapiens
acagagtgcggtcaggactttgctcaggaagcagggctgcatcaacactacattcggcat

SEQ ID NO: 6835 - DNA, 60 bp, Homo sapiens
gcctaaaagattccttccaaaaagtgatagtgacaagatatgaaaaacgtgaatatggca

SEQ ID NO: 6836 - DNA, 60 bp, Homo sapiens
gtcccagtcaagaaacagaagaccagaactgtgttctcttccacccagctgtgtgtactc

SEQ ID NO: 6837 - DNA, 60 bp, Homo sapiens
ccacatcagtttcttgtgtgccaaataagacccatgctatgcatcttggtttccatgaag

SEQ ID NO: 6838 - DNA, 60 bp, Homo sapiens
aaggccctaataacaacaatcctcaaacctcagctgttcgaaccccgacccagactaacg

SEQ ID NO: 6839 - DNA, 60 bp, Homo sapiens
ttagccccacacaaggctttctgaactgccaagaggggatctggcttctcaactgctcgg

SEQ ID NO: 6840 - DNA, 60 bp, Homo sapiens
ttgctgtattgctgttctctttgaggctctccaaagtcttgagttctgtatatggcctgg

SEQ ID NO: 6841 - DNA, 60 bp, Homo sapiens
aaccagtgcctcaggtagatgaggctgagacacgggtcgtgaaggatttggctaaagttt

SEQ ID NO: 6842 - DNA, 60 bp, Homo sapiens
ccccttccagtgctggctctgtagcgccaagttcaaaatcagctcggacttgaaaaggca

SEQ ID NO: 6843 - DNA, 60 bp, Homo sapiens
catacatctggcgtacttgtgatcattttaccaagcaaacccacacttcttaccttttcg

SEQ ID NO: 6844 - DNA, 60 bp, Homo sapiens
tactactactaaattcgcgcccgggtcgacggaatatgaagagacatgagatggtggtag

SEQ ID NO: 6845 - DNA, 60 bp, Homo sapiens
ccctgccctgtgagtctttaagaccctctttgccaagttttacgacgggactgtctgggg

SEQ ID NO: 6846 - DNA, 60 bp, Homo sapiens
gttggtctcacagacgtatggatatccgaggagccacctaaagatggagaaatcaaggca

SEQ ID NO: 6847 - DNA, 60 bp, Homo sapiens
caccaggagttccagcacatcatgtactgcgagaatttcgcaccaggcaccaccagacct

SEQ ID NO: 6848 - DNA, 60 bp, Homo sapiens
gtgacaaggcttttgcgtggaattcacacctggtaagccatactagcattcatagtggag

SEQ ID NO: 6849 - DNA, 60 bp, Homo sapiens
gctgcagaatcatacaatgacccaacacagcagttagtgcaagtacagtctctcaaggag

SEQ ID NO: 6850 - DNA, 60 bp, Homo sapiens
cattctcacagaaactgcatgtggaaccacaagcagccttcagcccaagagaagtctctg

SEQ ID NO: 6851 - DNA, 60 bp, Homo sapiens
ggagtgctgaaggattactctgacattacttccagcaaatagggaacagttttgccctgg

SEQ ID NO: 6852 - DNA, 60 bp, Homo sapiens
ggcttctctgtgaattgcctgtaacacatagtggcttctccgcccttgtaaggtgttcag

SEQ ID NO: 6853 - DNA, 60 bp, Homo sapiens
ccaaatgcacccttgcagacaacagtctggcctgaaccctattgatgcaactttgcgcaa

SEQ ID NO: 6854 - DNA, 60 bp, Homo sapiens
caaggtttgctacgtcctctgggcatctgcaaaaggccctgctctctggagtgttgtata

SEQ ID NO: 6855 - DNA, 60 bp, Homo sapiens
agccaacaatggatactcctggctggtaagaagagcctgccatttcaccaaggggagaaa

SEQ ID NO: 6856 - DNA, 60 bp, Homo sapiens
catgaatggctcccatccttcagccttagttctttgtacagtgtatcatcagttgtgtac

SEQ ID NO: 6857 - DNA, 60 bp, Homo sapiens
tgcagagaagtcccacgaacccatccagagtgggaacgtttcttgtgagagcacagatct

SEQ ID NO: 6858 - DNA, 60 bp, Homo sapiens
gatggagagactggggagagcttccctgcacagtttccagcagacatttccagcataaca

SEQ ID NO: 6859 - DNA, 60 bp, Homo sapiens
ccatggctgaggaatttgtgaccctcaaggatgtcggcatggacttcaccttgggagact

SEQ ID NO: 6860 - DNA, 60 bp, Homo sapiens
ccttgcaaagagatccagtacctagtattggaagatccaccttaacgaccgtgcatatga

SEQ ID NO: 6861 - DNA, 60 bp, Homo sapiens
ggttcttgactgatccattgctaacagcctgagactcttcaatgcctttccgaaaactgg

SEQ ID NO: 6862 - DNA, 60 bp, Homo sapiens
ctccacgcctcccaccatcgtgtctccctccacagacaacccgaccacaagctccttatc

SEQ ID NO: 6863 - DNA, 60 bp, Homo sapiens
ctccaagtggtggataaggtgactcaaaggaaagacgactcaacctggaactcagaggtc

SEQ ID NO: 6864 - DNA, 60 bp, Homo sapiens
catggatggacatggtcgaggaattcggaaagcctgcagttgacattcagtcttcacttg

SEQ ID NO: 6865 - DNA, 60 bp, Homo sapiens
aaaaccctttgtgtgcaaagagtgtggcaaagcctttcgagataggccaggtttcattcg

SEQ ID NO: 6866 - DNA, 60 bp, Homo sapiens
tcccaaatacttcagtatatcctgaagctacgcaaagaattacaactaggccagatttac

SEQ ID NO: 6867 - DNA, 60 bp, Homo sapiens
ccaggtggtggtaatcttggaatgaacagtaggaaaccagatcttcgagttgtcatcccc

SEQ ID NO: 6868 - DNA, 60 bp, Homo sapiens
tatctgggaaggctggggaagtaggctctgggtccatgcctaactctgtaccgttttatt

SEQ ID NO: 6869 - DNA, 60 bp, Homo sapiens
ctcattggtagaagagacatgcatggtagaaaggatgatgcacaaaagcagcctgttaaa

SEQ ID NO: 6870 - DNA, 60 bp, Homo sapiens
gatgatgagaatggatggcaggcctttggggacttctctcccacagatgtgcataaacag

SEQ ID NO: 6871 - DNA, 60 bp, Homo sapiens; identical to SEQ ID NO: 4855

SEQ ID NO: 6872 - DNA, 60 bp, Homo sapiens
tcatcaatgccaatgtcattgctgaactgttcttcaggcccatcatcggcacagtcagca

SEQ ID NO: 6873 - DNA, 60 bp, Homo sapiens
ccagccaaagagtaccaattctatgcaatagtgagactctaccctgtcaaccaaacagca

SEQ ID NO: 6874 - DNA, 60 bp, Homo sapiens
ggatattactgcaatgtctgtgactgtgtggtgaaggactccatcaactttctggatcac

SEQ ID NO: 6875 - DNA, 60 bp, Homo sapiens
gcacggacacgttcagaaatgacactgaatccctgtgttgagtctacagagacatctaga

SEQ ID NO: 6876 - DNA, 60 bp, Homo sapiens
agggttttgcagaaactttgacttaaagaaacatgtgcgcaaactccacgacagcgtggg

SEQ ID NO: 6877 - DNA, 60 bp, Homo sapiens
ttccaagacaagataccggtgcttctggaaactaccaggtgtgcctggaagagttggtct

SEQ ID NO: 6878 - DNA, 60 bp, Homo sapiens
ttatagaaacctggtattcctgggtattgctgtgtctaatttagacctgatcacctgtct

SEQ ID NO: 6879 - DNA, 60 bp, Homo sapiens
ggaggccatggttcagagtattgagttcacccagatcgaaatgaaagtgatggaggggct

SEQ ID NO: 6880 - DNA, 60 bp, Homo sapiens
cccctgacttcctatcatttcaacccattgaggcacttgaactctcttcttggggatcct

SEQ ID NO: 6881 - DNA, 60 bp, Homo sapiens
cccactttcttcccaaactcatcctaaatctctcacacacgcgagtgttcccagccctca

SEQ ID NO: 6882 - DNA, 60 bp, Homo sapiens
aggcttcagtgtctgttctctggacatttcttttcacctcctgagcaccaaagtcgcagg

SEQ ID NO: 6883 - DNA, 60 bp, Homo sapiens
cacacttgtggctgatgtgaatgctgaccgaaacatggagatcccaaaaggattgattag

SEQ ID NO: 6884 - DNA, 60 bp, Homo sapiens
gttaggttcttgcggaggaatccagttagtaagatttttaagggggtttccctccaaccc

SEQ ID NO: 6885 - DNA, 60 bp, Homo sapiens
ggcccttctgaaaccagccaacctaattacctgtattgtggaaatgcgcatgagtcccca

SEQ ID NO: 6886 - DNA, 60 bp, Homo sapiens
ggaccacaggtggatctttgtgcgaacaacttgcatttcggaagccactgtccgtcttta

SEQ ID NO: 6887 - DNA, 60 bp, Homo sapiens
aaaagtggagttgtcagcaagagagaccgagagtagaagcccagagtggagatgcctgct

SEQ ID NO: 6888 - DNA, 60 bp, Homo sapiens
ttttgacctttgcaggcgagtaaccaggcaatggagtggagtgtctcctggagagagtga

SEQ ID NO: 6889 - DNA, 60 bp, Homo sapiens
cccggctctaccattggaactgcaatttgggacaagatacttaacctctcttagcctgag

SEQ ID NO: 6890 - DNA, 60 bp, Homo sapiens
ctgtcagctgctgcttggggtcaagggacacgccttctgaacgtcccctgcccctttacg

SEQ ID NO: 6891 - DNA, 60 bp, Homo sapiens
tccttggggagctgaacagctctgacccccatggcatcgagagcaaacggcggaagaaaa

SEQ ID NO: 6892 - DNA, 60 bp, Homo sapiens
agacggctttgtcctggggacactttccctctggaatctcaagacgacgtggcacacatt

SEQ ID NO: 6893 - DNA, 60 bp, Homo sapiens
aagaaggtggagcagctgtcgcgcgagctcagcaccctgcggaacttgttcaagcagctg

SEQ ID NO: 6894 - DNA, 60 bp, Homo sapiens
aactggtcatgtagccatcaactgcagcaagacaagtgaagtcaactgttaccgctgtgg

SEQ ID NO: 6895 - DNA, 60 bp, Homo sapiens
aacaagacattgattgaggagctaaaagcacttaaggacctttactgccacaaatcagat

SEQ ID NO: 6896 - DNA, 60 bp, Homo sapiens
cctggtcttccttgttatgtgttctcattttgcccaagatgtttggccagagcacagcat

SEQ ID NO: 6897 - DNA, 60 bp, Homo sapiens
tggcctggtacttgctgttagggcaggaaggggcaaaaggaagacttgggtagtaatctg

SEQ ID NO: 6898 - DNA, 60 bp, Homo sapiens
agccctcttttccgcataacttggtcagggcacaaggacttgaaggacttgaaagtcagg

SEQ ID NO: 6899 - DNA, 60 bp, Homo sapiens
gatgtggcaaatgcctgaccacctactgtaatgcagaagcacttgaggctcatcttgcac

SEQ ID NO: 6900 - DNA, 60 bp, Homo sapiens
ctggagtcccacatggttatccacactggggagaagaatcttaagtgtgattactgtgac

SEQ ID NO: 6901 - DNA, 60 bp, Homo sapiens
cctgaggaaaactagtgagtatatgggagccacctttgacctgtgccaaagcagtttcta

SEQ ID NO: 6902 - DNA, 60 bp, Homo sapiens
ggccaacggagacgtgaagcccgtggtgtccagcacgcctttggtggacttcttgatgca

SEQ ID NO: 6903 - DNA, 60 bp, Homo sapiens
ttttggggcagaagcagaagagacgcacagtagaaccgatctcagccttgctgatcatct

SEQ ID NO: 6904 - DNA, 60 bp, Homo sapiens
aaaacccatacttaccttgagtctgagaaaacctttggtagaagctcctgtcttatcagg

SEQ ID NO: 6905 - DNA, 60 bp, Homo sapiens
gaccctcagcttctgcaccactgccagcactgtgatatgtactttgcagacaacatcctt

SEQ ID NO: 6906 - DNA, 60 bp, Homo sapiens
ctcatgggccagaagttccccaagaacccagccgcagaactcatcaaaatgcacaaatgt

SEQ ID NO: 6907 - DNA, 60 bp, Homo sapiens
cagctggtctgatgtctccctgaaaagttctcgcttgtcacaagaacacttagacttgcc

SEQ ID NO: 6908 - DNA, 60 bp, Homo sapiens
gtggaatggccttccatcatagttcagtcctgaggcagcacaaaagaatccacactggtg

SEQ ID NO: 6909 - DNA, 60 bp, Homo sapiens
ttttgtaccagggccatgcaggcttggagtccagagttggtgctgtgggaacggactaga

SEQ ID NO: 6910 - DNA, 60 bp, Homo sapiens
actcccaacccaacaggccaatcctggtagcacttctcaacagcaagcagtgatagcaca

SEQ ID NO: 6911 - DNA, 60 bp, Homo sapiens
agatacctgtgaggactggttgtctctcttcggtggccttgagtctctgaatttgtcggg

SEQ ID NO: 6912 - DNA, 60 bp, Homo sapiens
gagatcgcgcacgccctgtgcctgacggagaggcagaggaaaatatggttccaaaacccc

SEQ ID NO: 6913 - DNA, 60 bp, Homo sapiens
tccccatttcctgtacaatcatgaacagctctgagatcctggagtgatatgatccagagc

SEQ ID NO: 6914 - DNA, 60 bp, Homo sapiens
gagatcgccaacgcgctttgcctgaccgagcgacagagcaagatatggttccaaaacccc

SEQ ID NO: 6915 - DNA, 60 bp, Homo sapiens
gacatttggttctagggccttgagtatgtgccacgtgcttgtgaaatgctatgattcaca

SEQ ID NO: 6916 - DNA, 60 bp, Homo sapiens
agcccattccttgaaaactaaaaggtccctgactcccagtctgcagccatcctgggcctg

SEQ ID NO: 6917 - DNA, 60 bp, Homo sapiens
tggggcagccttcaaccagagcaaatctcttacccttccccagacttgtaatagagagaa

SEQ ID NO: 6918 - DNA, 60 bp, Homo sapiens
agaagacccaggaaagcacagttggcttccgtttctcctgctccctgtgtgtgttagaat

SEQ ID NO: 6919 - DNA, 60 bp, Homo sapiens
aagttcagcctggcccactccatgttggccatcagtggtcacctagacagcgacgatgat

SEQ ID NO: 6920 - DNA, 60 bp, Homo sapiens
agacactgagcaacaagatcacacgtctccgaatgagaatgaccaggtcacaccgcaaca

SEQ ID NO: 6921 - DNA, 60 bp, Homo sapiens
agacaccgggacctcctggaagcctaaaaatgggaccattgcaatttagagatgtggcca

SEQ ID NO: 6922 - DNA, 60 bp, Homo sapiens
aacaactgtgctgcctaccgtaaactgctggaagcccagactcccagtgtacgcaagtgg

SEQ ID NO: 6923 - DNA, 60 bp, Homo sapiens
gctctctgccacagcttgcagcatggtcttgactgaatgtactgttcctgttagcgttac

SEQ ID NO: 6924 - DNA, 60 bp, Homo sapiens
caggccatcacagagccatgaaccagcagcacatgatgccttcccaagccttccagacgc

SEQ ID NO: 6925 - DNA, 60 bp, Homo sapiens
gggaagtcttctgagaccacccagtgaataggcactaccctgggattcaagacagtcttt

SEQ ID NO: 6926 - DNA, 60 bp, Homo sapiens
ctggagtccaggattcagatttggtttcagaatcgaagggccggacacaagggacaggcg

SEQ ID NO: 6927 - DNA, 60 bp, Homo sapiens
gctgtgaaccttgctacttgtacttggttgaagttctaggtacctttagtcaagggatgg

SEQ ID NO: 6928 - DNA, 60 bp, Homo sapiens
ggtacaaccccacctgaaaatggactctcagagcacccctgtgaaacagaacagataaat

SEQ ID NO: 6929 - DNA, 60 bp, Homo sapiens
tgtattgccgccagagaagagctggcctgaaagacgggactccgggagtcaggattctga

SEQ ID NO: 6930 - DNA, 60 bp, Homo sapiens
gggttcacaagaaagatcctcgctaactgacattagcccattcaggtcttcacagcgctc

SEQ ID NO: 6931 - DNA, 60 bp, Homo sapiens
caacatgaccctgagtcccctggattttgcattcactcctgcggagacctaggaactttt

SEQ ID NO: 6932 - DNA, 60 bp, Homo sapiens
actgcccgcctgtcactgccgtctgttccctgagctgtgctttacgctgggaaagacata

SEQ ID NO: 6933 - DNA, 60 bp, Homo sapiens
tccgccttccaccaacccattgcatctcagaactcacgcctgtcatcagctctgtctaca

SEQ ID NO: 6934 - DNA, 60 bp, Homo sapiens
aaaaaatacagcgttctgcactcacgtctttcctgagactgcgtttatagcagtgacttc

SEQ ID NO: 6935 - DNA, 60 bp, Homo sapiens
gataagcctcatgaatgcaaacacatggtaaagccttaagatgtttcttttgaatatggt

SEQ ID NO: 6936 - DNA, 60 bp, Homo sapiens
cgtcttgtagtctctatggcgtgtctttatggtgtaataaggttctcacggggtcaatct

SEQ ID NO: 6937 - DNA, 60 bp, Homo sapiens
tgctgaagttgatgaagatggaggaacattcatggatgtgttagatgatgaaagtgagag

SEQ ID NO: 6938 - DNA, 60 bp, Homo sapiens
gctggtttaccaacatctactccctcaggatgagcgtgagccagaagcagctgtgtattt

SEQ ID NO: 6939 - DNA, 60 bp, Homo sapiens
ctgcttagagagtgagagatgggatgaggcaggacaagagggtgttccagcatacatcat

SEQ ID NO: 6940 - DNA, 60 bp, Homo sapiens
aatttacacctgcgatcactgtcagcaggacttcgagtctctggcagacctgacggacca

SEQ ID NO: 6941 - DNA, 60 bp, Homo sapiens
catccaggttttggcccgaaggaaatcaagggaaatccagtccaagttgaaggaccaggt

SEQ ID NO: 6942 - DNA, 60 bp, Homo sapiens
tcttaagggccaagaaagcaacttgagccttgggctaatctggctgagtagtcagttata

SEQ ID NO: 6943 - DNA, 60 bp, Homo sapiens
actgcccctgccaactgaccacaaggaaccctgggttgcaggtggcttccctgtccaggg

SEQ ID NO: 6944 - DNA, 60 bp, Homo sapiens
tctacaccgcagtttgagatgcttcagaatcccctgggtctcacaggagcccttcgaggt

SEQ ID NO: 6945 - DNA, 60 bp, Homo sapiens
actggtgtctgacactaaggagggtgtaaaggccaaggtcagcatagactgaggcacact

SEQ ID NO: 6946 - DNA, 60 bp, Homo sapiens
gaacagatggagtgaactaacatctccacttgattcctcagcgagcatcaccatggctag

SEQ ID NO: 6947 - DNA, 60 bp, Homo sapiens
atcttccatcaacaccatgatgtcggcggtcatgagtgtagggaaggtcacagagaatgg

SEQ ID NO: 6948 - DNA, 60 bp, Homo sapiens
gggcctggcgtactggggcagggctcagaggggcatgggcggggcctaacgcgtatgggc

SEQ ID NO: 6949 - DNA, 60 bp, Homo sapiens
ggaagagggatctgcaagtgcagggtgttggttaaagttgtacctcccaagtatttgggg

SEQ ID NO: 6950 - DNA, 60 bp, Homo sapiens
ctggacatgacgtctgtggtttaagctttgtgaaagaatgtgctttgattcgaagggtct

SEQ ID NO: 6951 - DNA, 60 bp, Homo sapiens
gcatgtacaatctgtggcaagatgtttccatcacagtcaaaacttgataggcatgtactt

SEQ ID NO: 6952 - DNA, 60 bp, Homo sapiens
gatcatcccagatggagaatggttctgcccaccttgccaacataaactgctctgtgaaaa

SEQ ID NO: 6953 - DNA, 60 bp, Homo sapiens
accgtgctgacctcaataaggacaagcctgtcattcctgctgctgccctagctggctaca

SEQ ID NO: 6954 - DNA, 60 bp, Homo sapiens
accgaggagtctacttaggactgtggctctctgatgggtttgtgctcagccttttaaagc

SEQ ID NO: 6955 - DNA, 60 bp, Homo sapiens
agaaagagacccgatctaacccaggcctttcatcagagcccaggagggaaggcaggaagt

SEQ ID NO: 6956 - DNA, 60 bp, Homo sapiens
ttcaggcagcattccctatgggaaaggtgataccagctctgatatgcaaagcatatgata

SEQ ID NO: 6957 - DNA, 60 bp, Homo sapiens
tgaacttctggatctccagtcagatactatggaggagagagtgatggagggctgaggaga

SEQ ID NO: 6958 - DNA, 60 bp, Homo sapiens
ttatatggccctgcacagacctggagcgccacacactgcacatcttttggtgatcggggt

SEQ ID NO: 6959 - DNA, 60 bp, Homo sapiens
gaggcacgatttgcctatttcccagcgtccagtgtgggagatactacggctgtgtccgta

SEQ ID NO: 6960 - DNA, 60 bp, Homo sapiens
cccctttcccaacactttgaagatgaatctggagtctgcttacttggaaggcaaagagtg

SEQ ID NO: 6961 - DNA, 60 bp, Homo sapiens
atttctgtaccttcaacctggtgttaggtgtgcaaagtccgtgtcctacctccgtcttcg

SEQ ID NO: 6962 - DNA, 60 bp, Homo sapiens
ttgcaactggcagagctggagggcgagtttctggtcaacgagttcatcacacgccagcgc

SEQ ID NO: 6963 - DNA, 60 bp, Homo sapiens
agtgtttatggtgctggtgtaaacgtgctgcactttcagttgtataaaagtacaagacag

SEQ ID NO: 6964 - DNA, 60 bp, Homo sapiens
ccctggtcagcatagccgcccacggtctgttctcagattcctaatcattccagaagtatt

SEQ ID NO: 6965 - DNA, 60 bp, Homo sapiens
ctttgtgcagcccacattcccaccatcctgtgaactttgttgtacttggtgttgggcaac

SEQ ID NO: 6966 - DNA, 60 bp, Homo sapiens
agctgccccaaggacagtggtctgaccagtgtaggaacggacaccttcagattgtaagct

SEQ ID NO: 6967 - DNA, 60 bp, Homo sapiens; identical to SEQ ID NO: 4855

SEQ ID NO: 6968 - DNA, 60 bp, Homo sapiens
gtcgacgaaaacgggaagtactagtagaagacatggtatctcaagaagaagctcagggat

SEQ ID NO: 6969 - DNA, 60 bp, Homo sapiens
ccggcatgatcgattcggccacccccatctccatggcgagtggcgactacagcgcctacg

SEQ ID NO: 6970 - DNA, 60 bp, Homo sapiens
cacttaccctcttggaaagctggtacaggaaggaagtctgtggctggtctccgttaagta

SEQ ID NO: 6971 - DNA, 60 bp, Homo sapiens
gaagacattggttcaaagctggactcatgggaggaacacatcttttctgcctttggtaac

SEQ ID NO: 6972 - DNA, 60 bp, Homo sapiens
cgggccatgctgggtatgaagctttctctgccatatggactgaaggggctggactgggat

SEQ ID NO: 6973 - DNA, 60 bp, Homo sapiens
tcctccataagtggagcacagggtatggggttaaagcatgacagggagagtcttctgtgc

SEQ ID NO: 6974 - DNA, 60 bp, Homo sapiens
tccaaccaccccgaagacagagctgcagtcgggcaaggcagacccgaagcgggacgggcg

SEQ ID NO: 6975 - DNA, 60 bp, Homo sapiens
tgaatgaccaaccgtccctggactgtggaatgttccggcctgcatttctgcccacccctt

SEQ ID NO: 6976 - DNA, 60 bp, Homo sapiens
attgcctaagggtggcccactcttgtgattgccccatttcctctggcaacaaaagccaga

SEQ ID NO: 6977 - DNA, 60 bp, Homo sapiens
ggaagcgatgctccaaaggcttgctcccagctgtatcatggacctgccttctcatcttta

SEQ ID NO: 6978 - DNA, 60 bp, Homo sapiens
gttagatgcagtagacgatacaggttgcatgtggacactcagtcacattaacaacttggg

SEQ ID NO: 6979 - DNA, 60 bp, Homo sapiens
agacttggaggatgacattcccaggaggaagaacagggccaaaggaaaggcatatggcat

SEQ ID NO: 6980 - DNA, 60 bp, Homo sapiens
tgattcctcaggcaactcctttgctgtgactggctatgaccttgcggagatccggagatt

SEQ ID NO: 6981 - DNA, 60 bp, Homo sapiens
agtttggaagaagcccttcgtcatgaatgggatctgcagagttcgggcgagaggaggcga

SEQ ID NO: 6982 - DNA, 60 bp, Homo sapiens
ttggccgtctactggaaaaatcgagcctctcccaccctcagtcgcatagacttatgtgtt

SEQ ID NO: 6983 - DNA, 60 bp, Homo sapiens
ctatgctgatctcctctccgaggacaaggaaacaccctgcccttcagaacctaacacccc

SEQ ID NO: 6984 - DNA, 60 bp, Homo sapiens
gactagcaagcagcaacagttctcagtctttagccccactcatgatggaagtgcctatgt

SEQ ID NO: 6985 - DNA, 60 bp, Homo sapiens
gagtgttgtgtgtccaaaacagtgttgtgtcactggtggtcatgttgcttagttgaagag

SEQ ID NO: 6986 - DNA, 60 bp, Homo sapiens
cttcacaccatgctgacaggcctcaggaatgcaccaagtgagaaactggaacagattctc

SEQ ID NO: 6987 - DNA, 60 bp, Homo sapiens
ctgagaatgctaatggttgggttgattgtatgttgaggatctattactgaccgtatgatg

SEQ ID NO: 6988 - DNA, 60 bp, Homo sapiens
tgtaatgttgggtgggagtgcgggacgcctcaaaatgtcttccagtggcaccctcagcaa

SEQ ID NO: 6989 - DNA, 60 bp, Homo sapiens
acagatccgaacagatcttgtcgaatagagcaacctgttacacagcaagtccccacttgc

SEQ ID NO: 6990 - DNA, 60 bp, Homo sapiens
agcccgactagacccacctcacctgaagggggtgagacccttgttggcagccagacaagg

SEQ ID NO: 6991 - DNA, 60 bp, Homo sapiens
ggggtagccatggaaacagcacattcccagagttcctccacaacatggactacttcaagt

SEQ ID NO: 6992 - DNA, 60 bp, Homo sapiens
atcagagagtccacactgtagagaaaccattcaaatgtgtggaatgcgggaaaggcttca

SEQ ID NO: 6993 - DNA, 60 bp, Homo sapiens
tcgtgaagcacagggttataacgaccacgatccacaaatcaagccctccaaaatcaccca

SEQ ID NO: 6994 - DNA, 60 bp, Homo sapiens
aatgactccgccaggggatcagcagccgcatgaggtttattcgcacaccgtgaaaacaga

SEQ ID NO: 6995 - DNA, 60 bp, Homo sapiens
actgctccctctggtcctgggagtgtccagaagtacatcgtggtctcacttcccccaaca

SEQ ID NO: 6996 - DNA, 60 bp, Homo sapiens
ggggagcagggtccgagggctgtgtcagaaggctgggcagccatggcgtcctatttcgat

SEQ ID NO: 6997 - DNA, 60 bp, Homo sapiens
cttagctctgtaaggaagtgcttctataaattcttaggtttagagatgataccatctggg

SEQ ID NO: 6998 - DNA, 60 bp, Homo sapiens
cctctcaagaaggacttctgcgaaggaaagctatcccaggcagtgataacagagagactc

SEQ ID NO: 6999 - DNA, 60 bp, Homo sapiens
acctccctgagccagactgagtttccgtcgtgcatgctcaagcgccaaggtcccgcagcc

SEQ ID NO: 7000 - DNA, 60 bp, Homo sapiens
atcatcactacgtccagctccaacggcactggtgccccattccatcggcactaacgcccc

SEQ ID NO: 7001 - DNA, 60 bp, Homo sapiens
tgcaatatttcttactgtgccgagaagccgcaatgagcgagattaaagctgtttaacaca

SEQ ID NO: 7002 - DNA, 60 bp, Homo sapiens
taagccctctttaatgctgtctttgtggactgtgggtctggactaaccctgtggttgcct

SEQ ID NO: 7003 - DNA, 60 bp, Homo sapiens
ccagacgaacagtgaggaaattcggagctatacatatgtgcagaaggttactacctaggg

SEQ ID NO: 7004 - DNA, 60 bp, Homo sapiens
tgggacgtggtggtagccgttgggttgggaaagtgagggatttttggcctcgtttctcct

SEQ ID NO: 7005 - DNA, 60 bp, Homo sapiens
gagttcttgctctcatggaggtgacattagtggggaggagatactaagtatgtccaggga

SEQ ID NO: 7006 - DNA, 60 bp, Homo sapiens
gacttcctcagcgcaggatgtaaatagcactaacgatcgactggaacaaagtgaccgctg

SEQ ID NO: 7007 - DNA, 60 bp, Homo sapiens
accatcaatccaaatgccttcttgctggaccaaaagacaggcaagtggaagaccctggct

SEQ ID NO: 7008 - DNA, 60 bp, Homo sapiens
atatgtcaccaggcacaagccacctaagtgccctacctgtggtaacttcctaggagggaa

SEQ ID NO: 7009 - DNA, 60 bp, Homo sapiens
tacaagatcaccaaccgtatctggcagtacccaggaatctgcattctcgacaagcgtccg

SEQ ID NO: 7010 - DNA, 60 bp, Homo sapiens
ggaacacccaggcagaagcagaagagtcgcagaatagagaaagtcctagagtggctgttt

SEQ ID NO: 7011 - DNA, 60 bp, Homo sapiens
gggaacccatgtgcttcctttgaccactatagggagttcgtggtagcaactcttccacaa

SEQ ID NO: 7012 - DNA, 60 bp, Homo sapiens
aaactctgagttactttccccaggtgctaatcaggtgacaagcacagtggacagcctcga

SEQ ID NO: 7013 - DNA, 60 bp, Homo sapiens
ggctttgcagaagctttggccacagatgttcattgagcttgttagggatgcagtcataga

SEQ ID NO: 7014 - DNA, 60 bp, Homo sapiens
agccgctgttctagggaacggaaaagagttcatggccaagcgtctaacctaaagtcccag

SEQ ID NO: 7015 - DNA, 60 bp, Homo sapiens
tcccctctgatcagcttctccccatccttggaccaggacgactacctgtggggcttggag

SEQ ID NO: 7016 - DNA, 60 bp, Homo sapiens
atgtctagtgtctccaaactgaggaaagttaccatgtagagcttgactttagaagtggtg

SEQ ID NO: 7017 - DNA, 60 bp, Homo sapiens
aatgaccgctccttcatctgtcctgcagaaggttgtgggaaaagcttctatgtgctgcag

SEQ ID NO: 7018 - DNA, 60 bp, Homo sapiens
gatcggggatctagtatgctcctggtctaatgcatttacattgtttaggtaactggttcc

SEQ ID NO: 7019 - DNA, 60 bp, Homo sapiens
ggtcttccaggagatgctgtccatgctgggagatcagagcaacagctacaacaatgaaga

SEQ ID NO: 7020 - DNA, 60 bp, Homo sapiens
tgaacaaacgttcttgtctaccccagtagtcacagatgccatctttgcaacagaaagagt

SEQ ID NO: 7021 - DNA, 60 bp, Homo sapiens
tatggagtagctcgcagagatcacagaaatgcttgcagcctaaggcagggttttcagacc

SEQ ID NO: 7022 - DNA, 60 bp, Homo sapiens
cagcggcttccgagaaaacggctcgagcagcgacaacccgtcctctcccgagtttttcat

SEQ ID NO: 7023 - DNA, 60 bp, Homo sapiens
tctaagtacagagaaacttgtaaacgagacagcaaggcagaaaagcagcaggcacattcc

SEQ ID NO: 7024 - DNA, 60 bp, Homo sapiens
acaggtcatctattcacaaaactgaaatacttcttccctggcacaggtgacatgtatgaa

SEQ ID NO: 7025 - DNA, 60 bp, Homo sapiens
aacttcagctctctgagcatccagtgggagtccaccaggccagtgttggccagcatcgag

SEQ ID NO: 7026 - DNA, 60 bp, Homo sapiens
cgcccttcctaagttatcggcctgcgagccggagagacaatggagagaactgcagaggcc

SEQ ID NO: 7027 - DNA, 60 bp, Homo sapiens; identical to SEQ ID NO: 6308

SEQ ID NO: 7028 - DNA, 60 bp, Homo sapiens
ctgccagctccctgcaagcccctcaggttgggccttgccacggtgccagcaggcagccct

SEQ ID NO: 7029 - DNA, 60 bp, Homo sapiens
ccacgttgacacaaaacaggttctggttcaggtaaagttgcgtcagtcacctgcagcaga

SEQ ID NO: 7030 - DNA, 60 bp, Homo sapiens
tgttaaatggggtcctgaaacctgaccagggaagacgggataaagtagccatgggtcatc

SEQ ID NO: 7031 - DNA, 60 bp, Homo sapiens
cagacactaatcatcagaacccccaaaataagacctccccattctccgtgtccccaactg

SEQ ID NO: 7032 - DNA, 60 bp, Homo sapiens
aacactggctggcttagaacaacaggagtgtattccctgacagttctgggaggtgcacgt

SEQ ID NO: 7033 - DNA, 60 bp, Homo sapiens
tttgagcctccgtgtcttcatcactgaggaagggatttgacctgatgagaggaaggtgcc

SEQ ID NO: 7034 - DNA, 60 bp, Homo sapiens
tgccatgccaagacctctgcaccacacgctcaaaacccagatgtttccagcgtttcaaat

SEQ ID NO: 7035 - DNA, 60 bp, Homo sapiens
taacggttctaagtgcaatgagttgtgttgaagcctccgtctcccatccttgcctgtagc

SEQ ID NO: 7036 - DNA, 60 bp, Homo sapiens
tccactgcatatgagctgcccctcctcacccgagctgagaactacgcccagattcagaac

SEQ ID NO: 7037 - DNA, 60 bp, Homo sapiens
ggcactactctgccagtccagagttgtacagcagaagcctctctcctagactgaaaatga

SEQ ID NO: 7038 - DNA, 60 bp, Homo sapiens
cacagaagagcgagcagatgtatccttaacaactctacttacagctcaagcatccctcaa

SEQ ID NO: 7039 - DNA, 60 bp, Homo sapiens
agcctgggaatcaagtttgaaacaaagattaataaagattaataaagttctttgcctagt

SEQ ID NO: 7040 - DNA, 60 bp, Homo sapiens
catatccaatctcaatatctgggtcaatccacaccctcttagaactgtggccgttcctcc

SEQ ID NO: 7041 - DNA, 60 bp, Homo sapiens
gggctgaggtgagacttctcctgggatgacaatttgctgagagagtgcagcttttgtgaa

SEQ ID NO: 7042 - DNA, 60 bp, Homo sapiens
tcttctggcagaggaccccacagctgctgatttcaagcaggaactcaggcggaaaagtaa

SEQ ID NO: 7043 - DNA, 60 bp, Homo sapiens
ggtttgcttgatctgagtcacaacagcatttctcaggaaagtgccctgtacctgctggag

SEQ ID NO: 7044 - DNA, 60 bp, Homo sapiens
aagaacaaccgctataagtccatagatggctcagacgagaccgaagccaactggatgagg

SEQ ID NO: 7045 - DNA, 60 bp, Homo sapiens
tgaacagagtcaaggaaataacagacaagaaaaaggctggcaagctggacagaggtgcag

SEQ ID NO: 7046 - DNA, 60 bp, Homo sapiens
accgcaagtcgccacctaccacagagccatcaaaatcacagtggatgggccccgagaacc

SEQ ID NO: 7047 - DNA, 60 bp, Homo sapiens
ggccttacgtcctggagggatacttgtatactctacatgcacgctttccaaggcagaaaa

SEQ ID NO: 7048 - DNA, 60 bp, Homo sapiens
ttggaggggttgggccggaaggtggaagagcctgccaaggacctcatttagtttgtgtat

SEQ ID NO: 7049 - DNA, 60 bp, Homo sapiens
cctgagctctccgagagcgagctgacccgcctgctggcccgaatgtggaacgacctgtct

SEQ ID NO: 7050 - DNA, 60 bp, Homo sapiens
gtcatccagttcttcctgacaccggatgggtgcttgggaaccgtttgagccttatagatc

SEQ ID NO: 7051 - DNA, 60 bp, Homo sapiens
caatcagagactgtctcgatctctccactcaccgtggaagttgccttgtgcctaaactga

SEQ ID NO: 7052 - DNA, 60 bp, Homo sapiens
aagaagtagttactgcagaatctgtggatggtgccattcagcaagtagttagttcagggg

SEQ ID NO: 7053 - DNA, 60 bp, Homo sapiens
gagggttcagagaaagctgatgcttcatctggatctgatagtacatcgtcgtcatctgag

SEQ ID NO: 7054 - DNA, 60 bp, Homo sapiens
aacgggtgtcaggacacacagggtaactggtatgactggacgcagtgcatatcgctcgat

SEQ ID NO: 7055 - DNA, 60 bp, Homo sapiens
gacaggaacaaacagacctaggatgatcctgagaacaaatagaggggttcctttacttgt

SEQ ID NO: 7056 - DNA, 60 bp, Homo sapiens
tccaacccttggatctctttgagtctactgataatctccactggaaaggtggaattgaaa

SEQ ID NO: 7057 - DNA, 60 bp, Homo sapiens
gcagcaggtaaacgtgctgctctacgacatgaacggctgttactcacgcctcaaggagct

SEQ ID NO: 7058 - DNA, 60 bp, Homo sapiens
cagggccttggtagcccatgtgaggacatttgcagatttcctggtatatgagttttctac

SEQ ID NO: 7059 - DNA, 60 bp, Homo sapiens
ccagtacaggaccgcctgaagagagagccattgttcaattccaattcagtgtgagtgaca

SEQ ID NO: 7060 - DNA, 60 bp, Homo sapiens
tccacggtgtgcgctatggacagcctgcgaccagtgagactgcagaagtaccctcaagca

SEQ ID NO: 7061 - DNA, 60 bp, Homo sapiens
agagctattccagcagcactgtgtgtcttggcttcggagcattcagcaggtgttacagac

SEQ ID NO: 7062 - DNA, 60 bp, Homo sapiens
tgatactctgcacgctgccttttagtgagtgaggagtttggggttgcctagcaacttgct

SEQ ID NO: 7063 - DNA, 60 bp, Homo sapiens; identical to SEQ ID NO: 4855

SEQ ID NO: 7064 - DNA, 60 bp, Homo sapiens
gaagatttccgaaaaacccacagccctgatgcccctgactttcagctgcaggccatgatt

SEQ ID NO: 7065 - DNA, 60 bp, Homo sapiens
ggcaaactgcttaatcttgtggattttgtagatggtttcaaatgactgaactgcattcag

SEQ ID NO: 7066 - DNA, 60 bp, Homo sapiens
gattggcaaactagacaatcttcgatctgaagatgatgtcttggaaaacgggacagacat

SEQ ID NO: 7067 - DNA, 60 bp, Homo sapiens
agggataaaaaatttatgactcttgatcctgtctctcaggatgcacttcctccaaaacag

SEQ ID NO: 7068 - DNA, 60 bp, Homo sapiens
actgtctgaaacggctctgagcacgcttgaagccctcggtttccctgttcgcttttgaat

SEQ ID NO: 7069 - DNA, 60 bp, Homo sapiens
tgagctgtatgagaggtgaatctcctcactgtcactgccatagccaagcatcctcatgag

SEQ ID NO: 7070 - DNA, 60 bp, Homo sapiens
ggagacatacttaatactgccctcttaatccaacggaccttacatcgtgtagactgccgg

SEQ ID NO: 7071 - DNA, 60 bp, Homo sapiens
aagaagctagtagagctggaggtggagtgcatggaagagcctaatcaccttgatgtggac

SEQ ID NO: 7072 - DNA, 60 bp, Homo sapiens
cctagggctaatccaactcaactaaatacagtggagttcctgtgggaccctgcaaagagg

SEQ ID NO: 7073 - DNA, 60 bp, Homo sapiens
gtgtgcacattcaggttcccgagcacaaacatcaagataacgttcactgccctgtccagc

SEQ ID NO: 7074 - DNA, 60 bp, Homo sapiens
aactctgtttccacatcccggcaaaatctggacaccatcgtgcaggcaatccagcacatc

SEQ ID NO: 7075 - DNA, 60 bp, Homo sapiens
cagagtacccaagtgaagagaacgtcatgagtgtaagtgcaaatcagtggaaggagcggc

SEQ ID NO: 7076 - DNA, 60 bp, Homo sapiens
aaggaggatgccaaccaagagatgagctccgtggcctactccaaccttgcggtgaaagat

SEQ ID NO: 7077 - DNA, 60 bp, Homo sapiens
ctgtcttacaccacttgagctcagacctctaaaccctgtatttcccttatgatgtcccct

SEQ ID NO: 7078 - DNA, 60 bp, Homo sapiens
tttgcagattatcctgtggaaggaaaatgcctaaagtcaaaagaagccggaaagcacccc

SEQ ID NO: 7079 - DNA, 60 bp, Homo sapiens
ttacggtttggcaactgcaggtaaccccagtcagccatgtcgccagcacaggtctatgtc

SEQ ID NO: 7080 - DNA, 60 bp, Homo sapiens
cagagtcagctactgagagctctggaaagaaggatgtcaagaaggtgaaatcctaaagcc

SEQ ID NO: 7081 - DNA, 60 bp, Homo sapiens
atggaaacttctgggactgatgcccaactcagtgcactcaagacgcatctccagttttcg

SEQ ID NO: 7082 - DNA, 60 bp, Homo sapiens
gggccagccttgaactcgctggacagagctacagacctatggggcctggaagtgcccgct

SEQ ID NO: 7083 - DNA, 60 bp, Homo sapiens
ctgaaatgtctcacggattgatctacctgtccatgtatgtctgctgagctttctccttgg

SEQ ID NO: 7084 - DNA, 60 bp, Homo sapiens
ccagcaattcttggccacgcagttgattatgcaaacatccgagtctgggatcagtgctaa

SEQ ID NO: 7085 - DNA, 60 bp, Homo sapiens
ggtactttctgatggctccacagtgcagctccccagactttcctcactcggatttgagga

SEQ ID NO: 7086 - DNA, 60 bp, Homo sapiens
acccactcagccattctctacccatccttagtacatgctctgtccagctttccccagggt

SEQ ID NO: 7087 - DNA, 60 bp, Homo sapiens
ctggcctgtctagtctttgtagctgtgagacatagattacagcctatgctaattcaaacc

SEQ ID NO: 7088 - DNA, 60 bp, Homo sapiens
tgtccactttccatcgtagtggtacaaaccattacagcacctcttcctgtacgcctcctg

SEQ ID NO: 7089 - DNA, 60 bp, Homo sapiens
attccgaacctggacagagttgaacgtggttgtgtatcatgggagtcaagctagtcgtcg

SEQ ID NO: 7090 - DNA, 60 bp, Homo sapiens
tgacagtgccaccatttgccgtgtctgccagaagccaggcgatctggttatgtgcaacca

SEQ ID NO: 7091 - DNA, 60 bp, Homo sapiens
gcttaagtgtgacaggactgataaatagaagatcaagagtagatccgactttagaagcct

SEQ ID NO: 7092 - DNA, 60 bp, Homo sapiens
ggcaagagtgttcagcaaaccgtagagctccttacccggaaattggagatgcttggggca

SEQ ID NO: 7093 - DNA, 60 bp, Homo sapiens
cacttgaatcagatggttggaatcgagtacatccttttgcatgctcaagagcccattctt

SEQ ID NO: 7094 - DNA, 60 bp, Homo sapiens
gggtgggtctaatttggtaacggtttgattgtgcctggttttatcacctgttcagatgag

SEQ ID NO: 7095 - DNA, 60 bp, Homo sapiens
tcccatagtccctgccacgaatttctgtgccctcctgacccattgctgttgtccaactat

SEQ ID NO: 7096 - DNA, 60 bp, Homo sapiens
ccctcagcagagtggtgcagtttcgctcagagcttgtctccttggcttccaaccccagaa

SEQ ID NO: 7097 - DNA, 60 bp, Homo sapiens
ctgagtcccagaaggagctgagttctctagaccagaagaggatgacaatggcaacaagtg

SEQ ID NO: 7098 - DNA, 60 bp, Homo sapiens
ggaacagatttctgacattgatgatgcagtaagaaaactgtaaaattcgagccatataaa

SEQ ID NO: 7099 - DNA, 60 bp, Homo sapiens
ccgccctttggaaagtcagggcatcgaacggcttcatcctatgcagtttgatcacaagaa

SEQ ID NO: 7100 - DNA, 60 bp, Homo sapiens
cgtggaggcaaacgctgtgttatcctctttgcagaccatcccagaatttgcagagactct

SEQ ID NO: 7101 - DNA, 60 bp, Homo sapiens
ggagtctgaagaggaggttggccccacaaaagagtccgaagaagatgactcagagaaaga

SEQ ID NO: 7102 - DNA, 60 bp, Homo sapiens
cgggaggctggacagaggctgtagccaacacaatcacctttactttgtactctgtgtgta

SEQ ID NO: 7103 - DNA, 60 bp, Homo sapiens
agggcgaggaggaaggctccgaatccgaatctcggtccgtcaaagtgaagatcaagcttg

SEQ ID NO: 7104 - DNA, 60 bp, Homo sapiens
gagccaaggagaagagtgagattcagcggatggtgatttcaggtgggaacttcaaaccag

SEQ ID NO: 7105 - DNA, 60 bp, Homo sapiens
cctttgaccctcgaagacatcgcttctcagaagaggaacttaagccccagccaatcatga

SEQ ID NO: 7106 - DNA, 60 bp, Homo sapiens
ccttagatagcgttaatgaaactggatctacggccctttccatagccagagcagtacaag

SEQ ID NO: 7107 - DNA, 60 bp, Homo sapiens
ccattatccaacatgaagaggagtttgagatgctgcataaatctatccctgtggaccctg

SEQ ID NO: 7108 - DNA, 60 bp, Homo sapiens
aagagccttgtcttcttagctgtcacctgccgaggcttctgggccactcaggccagtgca

SEQ ID NO: 7109 - DNA, 60 bp, Homo sapiens
tcacaaatgcctaccgcaggaatgggatggcttttctagcctgctgatgtgacaactgtg

SEQ ID NO: 7110 - DNA, 60 bp, Homo sapiens
ccacgcacgcagagggttgtggggcggatagctcccctccagatggaggctcacgaagta

SEQ ID NO: 7111 - DNA, 60 bp, Homo sapiens
ccagcaccagggagatactgcaggagtttgaatccaagttatctgcatcacagtcttgtg

SEQ ID NO: 7112 - DNA, 60 bp, Homo sapiens
actgggcttggatgcttcgggcttctgactgctccataggttttgactggtgaaacaggg

SEQ ID NO: 7113 - DNA, 60 bp, Homo sapiens
ggacctggagcccatcccgggagccttggacgctgtgcgggagatgaacgacctaccgga

SEQ ID NO: 7114 - DNA, 60 bp, Homo sapiens
acatctaccgggagctctacgccttcttcggtgacagcttggccacacgctttggcaccg

SEQ ID NO: 7115 - DNA, 60 bp, Homo sapiens
agcctccacacagtccccagcttcccaggcatcttcccttgtggtttcggcatctggtgc

SEQ ID NO: 7116 - DNA, 60 bp, Homo sapiens
caaagctacttgtttacattgtacactgcgaccaccttgccgcttttcatcacaagcttg

SEQ ID NO: 7117 - DNA, 60 bp, Homo sapiens
atcagatgggagtatctgccaaacgtagaccaaaggctcagcccacaactcttgtcctac

SEQ ID NO: 7118 - DNA, 60 bp, Homo sapiens
aaatccatgcttgcaggagagggttggtgcctgctcagtttctgtcgagggaatgggagt

SEQ ID NO: 7119 - DNA, 60 bp, Homo sapiens
ggattggacaatgtagagatgtcaaagtgcttaggctgatatccttgggaactgtggagg

SEQ ID NO: 7120 - DNA, 60 bp, Homo sapiens
tcagggtcaccatagcccattagtggaaggaccaggactagacctttagtcttctgaggt

SEQ ID NO: 7121 - DNA, 60 bp, Homo sapiens
aggacccaagaagcagaaggagaacaagccaggaaaaccccgaaaacgcaagaagcgtga

SEQ ID NO: 7122 - DNA, 60 bp, Homo sapiens
aagttctctgaggcagaagggggttccctgttcccagagtctgcagccatcagcaaggag

SEQ ID NO: 7123 - DNA, 60 bp, Homo sapiens
tttgactcaaggctacaagctgccagtcagatgactctcacagaagggatgtaccctgca

SEQ ID NO: 7124 - DNA, 60 bp, Homo sapiens
ccagccaaagacagcagcattcccaagcgcaagagaaagcgggtctcggaaggaaattcc

SEQ ID NO: 7125 - DNA, 60 bp, Homo sapiens
tggttggggtagagcaaaaggatggtcactcttccgaggtctccctgaaatgaatgtatt

SEQ ID NO: 7126 - DNA, 60 bp, Homo sapiens
aaacctcttaggagaggggcaaccaaatgtgatgaatttgggaagagctttactcagagc

SEQ ID NO: 7127 - DNA, 60 bp, Homo sapiens
gctgttcagttgccactaagagattgcacagtcaaaacgactctaaacacactagtttgg

SEQ ID NO: 7128 - DNA, 60 bp, Homo sapiens
ataagtgtgaagagtgtggaagagcttcagttgggcgttcacgactgcaggctcatcagg

SEQ ID NO: 7129 - DNA, 60 bp, Homo sapiens
atcgtggccattgctgaccagaacagtgttccatgcttaagagcgctagctgccaataag

SEQ ID NO: 7130 - DNA, 60 bp, Homo sapiens
tgagggtgaacaggaaatgccttgtggaaacaggaagtccaagtgattcatgtactgagg

SEQ ID NO: 7131 - DNA, 60 bp, Homo sapiens
gatggtcctgaacgagtccttgaaggttctgaagatgcaaggctgggaagaaagacagat

SEQ ID NO: 7132 - DNA, 60 bp, Homo sapiens
cattgtaacgaagctgagcgtgttcttagctcggcctcactttgtctctggcattgatta

SEQ ID NO: 7133 - DNA, 60 bp, Homo sapiens
tctcaatggaaggggcctccttggtctggagaagagatctgaggtcccaccttagaaatg

SEQ ID NO: 7134 - DNA, 60 bp, Homo sapiens
gacactgaagtgtgcaggagcgaaggttaacagtaggggagattgtcgatctcatcacca

SEQ ID NO: 7135 - DNA, 60 bp, Homo sapiens
gactccaaagcaaaagctcccgactactagctctgttagttccagcctgctatacctcag

SEQ ID NO: 7136 - DNA, 60 bp, Homo sapiens
gagcaaagtagccattgtgagccagcctgttgccagaagttcagtctcagcagatagtag

SEQ ID NO: 7137 - DNA, 60 bp, Homo sapiens
gtttccctcaagcttagttggcagcactctccacacttctgtggctcagtgattactgct

SEQ ID NO: 7138 - DNA, 60 bp, Homo sapiens
gctgaaagtgaatggtgactgttaggaatgtcagggactagtgacccagtcctgtttctc

SEQ ID NO: 7139 - DNA, 60 bp, Homo sapiens
ctctgccaagagatccataccgaggcagcgtcggtggctacaagccctcagtccacacct

SEQ ID NO: 7140 - DNA, 60 bp, Homo sapiens
agggactttgtcataatcactgttacatcccagtgcctcacaccatgcctggcccttaag

SEQ ID NO: 7141 - DNA, 60 bp, Homo sapiens
ctgatctgaagattttgggcgttcaaggcattaagataatagcctgagttgttcatggag

SEQ ID NO: 7142 - DNA, 60 bp, Homo sapiens
ccctcccatggagcagcctccttgtggagtaggaaaacataagcttgaagaaggaagctt

SEQ ID NO: 7143 - DNA, 60 bp, Homo sapiens
ttatatccagtaacacatagactgtgcgcataggcctgctttgtctcctctatcctgggc

SEQ ID NO: 7144 - DNA, 60 bp, Homo sapiens
cactgtgggaaaactaccattgtaataagtgtagcaaaatctccttagatatctgaaaag

SEQ ID NO: 7145 - DNA, 60 bp, Homo sapiens
tggaaggaaaaccagaaaatgagagtgaaccaaagcatgaggaagagccaaagcctgagg

SEQ ID NO: 7146 - DNA, 60 bp, Homo sapiens
tggagaaaaacccctatggaatgtaagggaatgttagggaaagctttcagttcagaatgc

SEQ ID NO: 7147 - DNA, 60 bp, Homo sapiens
caccactctggttacccaactacagaacctcctttgatcaggccagtaggttgtgatgca

SEQ ID NO: 7148 - DNA, 60 bp, Homo sapiens
taaatctggtgagggcatacgggagcctatctcagtgaaagagcagcataagcgggaagg

SEQ ID NO: 7149 - DNA, 60 bp, Homo sapiens
ttccaggagttctgagccttggttgtggacaaaacaatcttaagttgggcagctttcctc

SEQ ID NO: 7150 - DNA, 60 bp, Homo sapiens
caagcaaaacagttctcagaaatgtcatgattgccggggtgaaggcaagagatgaattgc

SEQ ID NO: 7151 - DNA, 60 bp, Homo sapiens
gaaatgggtagaatcagtcaagttgaaaactcctgtaatggagagtcacagctccttcct

SEQ ID NO: 7152 - DNA, 60 bp, Homo sapiens
aggaattgctgtcatacatgaagttgctccgagctgtctttattctcttcttggtcaagg

SEQ ID NO: 7153 - DNA, 60 bp, Homo sapiens
ttagtcagaaagcaggcctctttcaccatatcaagatccacacaagagacaaaccttatc

SEQ ID NO: 7154 - DNA, 60 bp, Homo sapiens
gtagtcctatgtgaatgagcttatccctccacaaccaggtgcatatgaaagtgtacatat

SEQ ID NO: 7155 - DNA, 60 bp, Homo sapiens
ctcctttgaacagcccttccgtgctccctatcatggatcaagagctggaatagctactca

SEQ ID NO: 7156 - DNA, 60 bp, Homo sapiens
atacctctacctgacatggcctgaagatgcagggcagaggaattgcccatggacagtgac

SEQ ID NO: 7157 - DNA, 60 bp, Homo sapiens
ttgattgcctccggtactgtgaggaaaggacacgactctatggtgaggactgatggacat

SEQ ID NO: 7158 - DNA, 60 bp, Homo sapiens
cccctaggagtatatttccgcacttcagaattccatatcttgcgaatccaagctccctgc

SEQ ID NO: 7159 - DNA, 60 bp, Homo sapiens; identical to SEQ ID NO: 4855

SEQ ID NO: 7160 - DNA, 60 bp, Homo sapiens
aaacagagtatatagggtatctacccagcctagaaagcacaggaacaatacgtcatatat

SEQ ID NO: 7161 - DNA, 60 bp, Homo sapiens
cacctggaaacagccttctggcccaactctggatgcctgttatactgggacaaaccttat

SEQ ID NO: 7162 - DNA, 60 bp, Homo sapiens
aacataaccaggttgagctcgggtcctttccggaccatcacggtgcgagacacgatgtcc

SEQ ID NO: 7163 - DNA, 60 bp, Homo sapiens
aagcagtgcatcgagctggagcagcagtttgacttcttgaaggacctggtggcatctgtt

SEQ ID NO: 7164 - DNA, 60 bp, Homo sapiens
cccagggctatggatttcttctgaggagcagcagagtcccttgtaaaagactgcttttgt

SEQ ID NO: 7165 - DNA, 60 bp, Homo sapiens
ctgtgctgtgtgagcctgtgcaagtgacatgacctctctaaaccttggttttctgctctc

SEQ ID NO: 7166 - DNA, 60 bp, Homo sapiens
taaagtctctggcctcataaaaggtggctgtgggtcgtcaggaatctgcgccatcttcct

SEQ ID NO: 7167 - DNA, 60 bp, Homo sapiens
gttctctgggctggccaaacacaagcagctgcactgtgatgaccagtctgggaaatcggt

SEQ ID NO: 7168 - DNA, 60 bp, Homo sapiens
agcgtgagaaaatccctgggtctagaatgggaactggagaggaccctgagaggagacggg

SEQ ID NO: 7169 - DNA, 60 bp, Homo sapiens
ggtggacgaaaccatcttcctgctggagtcttacattgagtgcaccatgaagagacagtg

SEQ ID NO: 7170 - DNA, 60 bp, Homo sapiens
gcaccagcagcatagccatcacttagtaaccacagaaaccagacctctgaccttagtagc

SEQ ID NO: 7171 - DNA, 60 bp, Homo sapiens
gttgcaagaacaagcaggatttgcaggttgctttaccagcatgagtctcatttttctggc

SEQ ID NO: 7172 - DNA, 60 bp, Homo sapiens
ggaacacgaaatctccttgaaagcaaacttcacaataatggacgtagacttgctgctatg

SEQ ID NO: 7173 - DNA, 60 bp, Homo sapiens
ctgcttgcccatggatgggtgcttggctttgcttgatgatgcagccttctcatttaccta

SEQ ID NO: 7174 - DNA, 60 bp, Homo sapiens
tcacaacaataggtggaagttgctagtgcagtcttggtctgatggctgtgtgcatcgcac

SEQ ID NO: 7175 - DNA, 60 bp, Homo sapiens
attgttcaggatgagattcttgctcaccgtctggggctcattcccattcatgctgatccc

SEQ ID NO: 7176 - DNA, 60 bp, Homo sapiens
acagcgtctccacgtccgatgaggacagccagtctgaagacaggaatgacctaaaggcat

SEQ ID NO: 7177 - DNA, 60 bp, Homo sapiens
tggactcgaccatccctcaccccaccaaggaccacactgtgaagtgataactgccttgaa

SEQ ID NO: 7178 - DNA, 60 bp, Homo sapiens
ttggttcgtaaagtccacaccccgatgctcagaagtgtcttgccagcaacattcctgcta

SEQ ID NO: 7179 - DNA, 60 bp, Homo sapiens
ggagactttaatgccaaaagcgttaatgggtgtgtgcctagcccttcagatgctaaaagc

SEQ ID NO: 7180 - DNA, 60 bp, Homo sapiens
ttgggcaggaattagcacaagttcagcacagcattgggcagctttgcaataccaaggatc

SEQ ID NO: 7181 - DNA, 60 bp, Homo sapiens
aggatccggcgttctggcctagagctgtatgcggaatggaagcacgttaatgaggactct

SEQ ID NO: 7182 - DNA, 60 bp, Homo sapiens
ccttctaagacattctgttggagttccctcagtactattccttacaactggagtgggtag

SEQ ID NO: 7183 - DNA, 60 bp, Homo sapiens
gccacaagagatcctttcagtccctagacctccattcactctgtttctcttctgctggat

SEQ ID NO: 7184 - DNA, 60 bp, Homo sapiens
accctttccgtagttgtcccaaatggagctggaattggatgctggtgaccaagacctgct

SEQ ID NO: 7185 - DNA, 60 bp, Homo sapiens
gttgaattctcggactaccagccatttgctacgctaccggcaggctgccaagcctccaga

SEQ ID NO: 7186 - DNA, 60 bp, Homo sapiens
cttctcatccaccctggcagctagtaggttctgctgttatgcagagccatttcctctaga

SEQ ID NO: 7187 - DNA, 60 bp, Homo sapiens
taatcctggtggacctggacctggtggtcgaggaagaggtagaggtcaaggcaactggaa

SEQ ID NO: 7188 - DNA, 60 bp, Homo sapiens
tggaaggagtttgtccaacagggtcagtgtcacagccacaacttcagaaagcagccatcc

SEQ ID NO: 7189 - DNA, 60 bp, Homo sapiens
acaacaacaggtacagcaggtacagactgtgcagcaggtacaacatgtctatcccgctca

SEQ ID NO: 7190 - DNA, 60 bp, Homo sapiens
ggacaccgatcttctcttggatgatcaagattcagtcttgcttcagggtgacgcagaact

SEQ ID NO: 7191 - DNA, 60 bp, Homo sapiens
tgaattaggcggtaatcctgggagcaccagcgctgccacttgtacccgcagacattatga

SEQ ID NO: 7192 - DNA, 60 bp, Homo sapiens
agaaagagagacagcacgtgtgcgtcatgaccagcgccggaagttggtctcgacacctgg

SEQ ID NO: 7193 - DNA, 60 bp, Homo sapiens
aaagggccattgtccctctggaggctcgaatgaagcagttcaaggacatgctgctagaga

SEQ ID NO: 7194 - DNA, 60 bp, Homo sapiens
tgcgttccataaaggtggctccagaaagggcatcctctaccccaagcccaaagcctgctg

SEQ ID NO: 7195 - DNA, 60 bp, Homo sapiens
aggaattgcatgtgactcacacaaacaggagctagcccaatcatacactgactcgcgtgg

SEQ ID NO: 7196 - DNA, 60 bp, Homo sapiens
gaaatgctggaattctatggggatcgagatggagcccaagaggtactcaccaattatgca

SEQ ID NO: 7197 - DNA, 60 bp, Homo sapiens
gcgggagagactcagcaacgacccatacctcagacccgacggcccggagcggacgccctg

SEQ ID NO: 7198 - DNA, 60 bp, Homo sapiens
gattttgatcacagggaacacttacttagaaccctgattagaggcaatgttattctcacc

SEQ ID NO: 7199 - DNA, 60 bp, Homo sapiens
atcagcctccaccacctcttattcgccctgctaattccatgccaccccgtctaaacccaa

SEQ ID NO: 7200 - DNA, 60 bp, Homo sapiens
ttgtgtcccgaggtgccatccgccaccttcttcactgcgctgctctcgctgctggtttcc

SEQ ID NO: 7201 - DNA, 60 bp, Homo sapiens
gcctagctgagtgggagagtcattttccccagacactacatttggatacaggtgccaaag

SEQ ID NO: 7202 - DNA, 60 bp, Homo sapiens
catgaaacacaggcagtatgagagaaagcaaggcccgtcatgctgtccgtacactacgta

SEQ ID NO: 7203 - DNA, 60 bp, Homo sapiens
gggacggcaactttctgaacatcccacagcagtctcagtcctggttcctctgataagatc

SEQ ID NO: 7204 - DNA, 60 bp, Homo sapiens
ttaatagcagttctgtggttggacctcctgaaaccagcctgcataccgtggtacaaggca

SEQ ID NO: 7205 - DNA, 60 bp, Homo sapiens
acactggcgcatggggaaaggggcttcctgcaccacacatgctctcccacagtgggcttt

SEQ ID NO: 7206 - DNA, 60 bp, Homo sapiens
ttctcgaaagagatttcctcccacgcgaccttccagttctcggagccaggttaggggttt

SEQ ID NO: 7207 - DNA, 60 bp, Homo sapiens
atgtgcaacctgtggctcaggggagcaagcttacacaagaagtgagggaaggatgtttag

SEQ ID NO: 7208 - DNA, 60 bp, Homo sapiens
aaggaggggctgagcctcaggacccctaggccaggccgtgttgaaagcagataccccgag

SEQ ID NO: 7209 - DNA, 60 bp, Homo sapiens
tgttgtttacgcatggaatcactattcctggttatctcaccaacgaaggctaggaggcgg

SEQ ID NO: 7210 - DNA, 60 bp, Homo sapiens
aattctggagatgatgttagtgaacaggatgtgccagacctgtttgacacggataatgta

SEQ ID NO: 7211 - DNA, 60 bp, Homo sapiens
aaagacagaggtctagacgtgagatccgcgtcgggacagggttttaagtgacaaagaagg

SEQ ID NO: 7212 - DNA, 60 bp, Homo sapiens
ctgctttccttggccacgacttcggcttctgacagcctcaagccagagcagctggacatt

SEQ ID NO: 7213 - DNA, 60 bp, Homo sapiens
cagctgcaagaaagctaacacttaagactcccaccctgtgacactgagtcccgagcacag

SEQ ID NO: 7214 - DNA, 60 bp, Homo sapiens
gcctcttgtggtgaggggtgtgggaagaccaaaggaaggaacgctaacaatttctcatac

SEQ ID NO: 7215 - DNA, 60 bp, Homo sapiens
gggaactgttggcccaaactcaggttgcagtaactgtcacaataccattctccatcagct

SEQ ID NO: 7216 - DNA, 60 bp, Homo sapiens
tatggctcaacaccacgcagcccctgtgcaaagccttcatggtgaccgacgaggacatca

SEQ ID NO: 7217 - DNA, 60 bp, Homo sapiens
gactgttgatgacattgacatttcatggattcggatgatgcaaggagacacatgccaccc

SEQ ID NO: 7218 - DNA, 60 bp, Homo sapiens
acaatggatgccttccaaagcctacctgcgagaagctggagtggtggctgtttggattca

SEQ ID NO: 7219 - DNA, 60 bp, Homo sapiens
cactcagacatgttcctgctgaagccagaggacggaagagaagacaagtgggtttggact

SEQ ID NO: 7220 - DNA, 60 bp, Homo sapiens
cagcagaggctatgcatgttgtgtgatgatgagtgtttacagccaccttctcctaaaacg

SEQ ID NO: 7221 - DNA, 60 bp, Homo sapiens
gacgtcgacattgacaaggtcatgatcaacctcaagacggaggaatttgtgctggacatg

SEQ ID NO: 7222 - DNA, 60 bp, Homo sapiens
tgtcttcccctaaaggagaacatggggataacatgggtgtgtgcccacaacactctaggt

SEQ ID NO: 7223 - DNA, 60 bp, Homo sapiens
tgatctggcctcagacaactactggtgagcaagctggacccaccatgtacagtgtgttat

SEQ ID NO: 7224 - DNA, 60 bp, Homo sapiens
acccagtattactgctgctgtgcttttgatctctgcttaccgttcaagaggcgtgtgcag

SEQ ID NO: 7225 - DNA, 60 bp, Homo sapiens
tgtgcaagccgaattctctggtggttgagatcccgccgtttcggaatcagaggataacca

SEQ ID NO: 7226 - DNA, 60 bp, Homo sapiens
gccaaaagcgacctcttctctagtccggtgttacgaacagaagttctgagttgtgctaca

SEQ ID NO: 7227 - DNA, 60 bp, Homo sapiens
tgtctgcagtgtgaaggcaggttcattgtggaatagtttaacagtcaggaaggctaaact

SEQ ID NO: 7228 - DNA, 60 bp, Homo sapiens
atggaaaagatacactagaaggtgctggggatacatcagaggtgatggatactcaggcgg

SEQ ID NO: 7229 - DNA, 60 bp, Homo sapiens
atcacctcattcaggtacagctttcattttagtgcttttttgctgcttttccccaaaaaa

SEQ ID NO: 7230 - DNA, 60 bp, Homo sapiens
ctcaagctattcttgatttcagaaacgcaaaaaatgggtttgaaagggccaaaacctgga

SEQ ID NO: 7231 - DNA, 60 bp, Homo sapiens
agaagctctgctgaggaagaccaaagcagcactcgttgccaattagggaatggaccgttt

SEQ ID NO: 7232 - DNA, 60 bp, Homo sapiens
ttctggtcgaagacgcaggttctggactggatcagctaccaagtggagaagaacaagtac

SEQ ID NO: 7233 - DNA, 60 bp, Homo sapiens
aaaattcagcatgtcggtctccagccatctgcgagtctggaattgggaccgtcgctagac

SEQ ID NO: 7234 - DNA, 60 bp, Homo sapiens
tgtgaggaactcaaaaagaagccttccgctgctctggagaaggtgatgcttccgacggga

SEQ ID NO: 7235 - DNA, 60 bp, Homo sapiens
ctcccacacccagccactacctcccagcttggagaacacctcagaattcagaagatatga

SEQ ID NO: 7236 - DNA, 60 bp, Homo sapiens
gaggctctcaaattagatcaagaaatgcctttaacagaagtgaagagtgaacctgaggaa

SEQ ID NO: 7237 - DNA, 60 bp, Homo sapiens
ggtgactccaggaaccattttcacctattaccagtgttccctggggactcctcttaatgt

SEQ ID NO: 7238 - DNA, 60 bp, Homo sapiens
tgtgaagcacaggaaccgaaagcacgtgatgtccccttagagatggcagagccaccagac

SEQ ID NO: 7239 - DNA, 60 bp, Homo sapiens
gcagagcgctcctgtggggatgaaggccgagggcttcgtggatgccctgcaccgggtccg

SEQ ID NO: 7240 - DNA, 60 bp, Homo sapiens
ttgggaaacggcatcaagcacaccgtcatcgttgagagcgcgtatttggttctatcgtgt

SEQ ID NO: 7241 - DNA, 60 bp, Homo sapiens
agtggtgacaccagctctgaagtaagcacagtagaactgctgcatctgcaacaacagcag

SEQ ID NO: 7242 - DNA, 60 bp, Homo sapiens
atggagacacactacttggcctcagtgattctgaagtggaagagctagatagtgcccctg

SEQ ID NO: 7243 - DNA, 60 bp, Homo sapiens
attcaggctgttgaaagcacctcagaggatgggcagaccatcattgagattgatccagcc

SEQ ID NO: 7244 - DNA, 60 bp, Homo sapiens
agataggattggattggattttgcagagggtgagaacttctctgtgcctgctcagaggcg

SEQ ID NO: 7245 - DNA, 60 bp, Homo sapiens
cacctgatcgccgcgcgagctggcacagagaaggtgctgcaggcacaggagtgcggacac

SEQ ID NO: 7246 - DNA, 60 bp, Homo sapiens
tgaaaccccagacccaccagaaagacaagtgtctagcaatgccttggtacctgatctttt

SEQ ID NO: 7247 - DNA, 60 bp, Homo sapiens
gaattacaggcagctgttcaaactcttcaggcaggattcctgtggactttgagattcatg

SEQ ID NO: 7248 - DNA, 60 bp, Homo sapiens
tcgcaggagacgggacgccagtcctttggctccgttccgctggctccttcgtcagtactg

SEQ ID NO: 7249 - DNA, 60 bp, Homo sapiens
agtttagacacatgttgttggggtgtctttctggtgcccaaactttcaggcacttttcaa

SEQ ID NO: 7250 - DNA, 60 bp, Homo sapiens
taaccaaatggcaaaagaatgatcaggagttgatttcggatcctttgcagcagtgcttca

SEQ ID NO: 7251 - DNA, 60 bp, Homo sapiens
gccagcaggttttgatgccagtgtgagctcaagcagtagtaatcagccagaaccagaaca

SEQ ID NO: 7252 - DNA, 60 bp, Homo sapiens
gttaactcctccagaatcccagtcaccactgcactggttagcagatcttgcagagcaaaa

SEQ ID NO: 7253 - DNA, 60 bp, Homo sapiens
agtactcctccagcattcagaactctgacaatgacctgcccgtcgtccaaggcagctcct

SEQ ID NO: 7254 - DNA, 60 bp, Homo sapiens
gacctactttgtcctctacatagggtagcttctgtcagggaatcttggttcttcccaaga

SEQ ID NO: 7255 - DNA, 60 bp, Homo sapiens; identical to SEQ ID NO: 4855

SEQ ID NO: 7256 - DNA, 60 bp, Homo sapiens
tctggcagagggttaacctgggtcaaatgcacggattctcacctcgtacagttacgctct

SEQ ID NO: 7257 - DNA, 60 bp, Homo sapiens
ttttgaaaggcaccactatttgttttgctggggtctcgggtggacccttattcgctccga

SEQ ID NO: 7258 - DNA, 60 bp, Homo sapiens
cacctttgggcttatgtgcaaaatggcagatcaaactctcttctccattgtcgagtgggc

SEQ ID NO: 7259 - DNA, 60 bp, Homo sapiens
ttattaattagtattttcttggctcacccccgcacagcaccgtgcccgagcaccacccac

SEQ ID NO: 7260 - DNA, 60 bp, Homo sapiens
atgcgagcaccttcctgtctctcattttcaccatctgactggggctaggttggttagagg

SEQ ID NO: 7261 - DNA, 60 bp, Homo sapiens
gtccaggtctgaggtgatggtaacttggactcggatggtggtaatgggaggtagattgat

SEQ ID NO: 7262 - DNA, 60 bp, Homo sapiens
aggagaaactcccggtgtgtttctgaccctttcagccccattaaagctcctgagctctca

SEQ ID NO: 7263 - DNA, 60 bp, Homo sapiens
gaggaaatgccacacttagcgagacccatcaaagtggagagccctcccttggaagagtgg

SEQ ID NO: 7264 - DNA, 60 bp, Homo sapiens
atggctcctggacatttgcccagcgtcctactgagcaggaactgagggcccgtaaagcag

SEQ ID NO: 7265 - DNA, 60 bp, Homo sapiens
ctcgcgatggcgggcatcctgtttgaggatattttcgatgtgaaggatattgacccggag

SEQ ID NO: 7266 - DNA, 60 bp, Homo sapiens
aagttatcagtgactgacagctaggtggactgcccctaggacttctgtttcaccagagca

SEQ ID NO: 7267 - DNA, 60 bp, Homo sapiens
ctgggaaaggaggtgttcctgctcatatgtttggcgtgacaaagtttggggataacattg

SEQ ID NO: 7268 - DNA, 60 bp, Homo sapiens
gtgcgtaacacacatcaagacagaacctgttgccattttcagccaccagagtgaaacgac

SEQ ID NO: 7269 - DNA, 60 bp, Homo sapiens
acttcctgccagactccaaggtggtgttcattgagaggggtcctgatgggaagctgcaat

SEQ ID NO: 7270 - DNA, 60 bp, Homo sapiens
ttgccagcaagaagcgaaagaagccttcaaggccagccaagactcggaaacgtcaggttg

SEQ ID NO: 7271 - DNA, 60 bp, Homo sapiens
gcaataccaataagttctacatgctggattcaaggtctacagacagagtgttacagtggg

SEQ ID NO: 7272 - DNA, 60 bp, Homo sapiens
attgtgattcagcaggacgatgagatccgcttaaagattgtggggacccgtgtggacaag

SEQ ID NO: 7273 - DNA, 60 bp, Homo sapiens
gttgagtttgtgctgtggtgtcaccagaattccagataaacacacagcctttcccatacc

SEQ ID NO: 7274 - DNA, 60 bp, Homo sapiens
agatggaggcatgggacgcccaccccgacaaggaggccttcgcagccgaggcccagaagc

SEQ ID NO: 7275 - DNA, 60 bp, Homo sapiens
gccctctacctccatccccatctgcattcatttcctccagtctcacagatcctttctgat

SEQ ID NO: 7276 - DNA, 60 bp, Homo sapiens
tttcaagccatggttggaacattcctacatctgttttgctgaatctcctagtaaaagtca

SEQ ID NO: 7277 - DNA, 60 bp, Homo sapiens
ttattatccctgaccctccacaatgtgattaccaaccgctaggatgagttgcatcttatt

SEQ ID NO: 7278 - DNA, 60 bp, Homo sapiens
aagtgcagactctgagtgttccagggaaacacatgctggacatcccttgtaacccggtat

SEQ ID NO: 7279 - DNA, 60 bp, Homo sapiens
ggcggcttgtccctaggaagaggcgattcaacacaccattggaattttgcagacagaaag

SEQ ID NO: 7280 - DNA, 60 bp, Homo sapiens
gcgagatgcatgtgaaggcaggcagtgccaagattccgcttcctttgtttgccaaatact

SEQ ID NO: 7281 - DNA, 60 bp, Homo sapiens
acaaggaagcccctctttacatcagccatattaggggaacggttgtcagctccccaaatg

SEQ ID NO: 7282 - DNA, 60 bp, Homo sapiens
gtgctggcaagagcgatgtctactacttcagtccaagtggtaagaagttcagaagcaagc

SEQ ID NO: 7283 - DNA, 60 bp, Homo sapiens
tggctcttccagcaaaccagcaggagctgactctacacacaaagtcccagtggtcatgct

SEQ ID NO: 7284 - DNA, 60 bp, Homo sapiens
acagaaaactgagtggaggggtgaacgtatagcaatgagaggggacgtgagataggacag

SEQ ID NO: 7285 - DNA, 60 bp, Homo sapiens
ccatccaaactaagatatgcagagagatgctgaaagaggggtttacctcctcacttgaca

SEQ ID NO: 7286 - DNA, 60 bp, Homo sapiens
aactcgacttgaccggcgccaaacagaacacaggagtgtggctagtcaaggttcctaaat

SEQ ID NO: 7287 - DNA, 60 bp, Homo sapiens
aagcacctttggagatgagtatgcatccagcggcaagcgctccactctcagtctttacta

SEQ ID NO: 7288 - DNA, 60 bp, Homo sapiens
ttacagattttaaggttgttaacgttctggcagtgtgtaacatgccatttgaaatccgtt

SEQ ID NO: 7289 - DNA, 60 bp, Homo sapiens
actcctaggggttatttctgtgccagacacattccacctctccagtattgcaggacagaa

SEQ ID NO: 7290 - DNA, 60 bp, Homo sapiens
ataaactggaccacatgagaagaagaattgagaccgatgagagagattcgaccaaccggg

SEQ ID NO: 7291 - DNA, 60 bp, Homo sapiens
tatcaggactctggaagcctttacacatagtatccaagttaggtttggagctgcaactac

SEQ ID NO: 7292 - DNA, 60 bp, Homo sapiens
ttcttatgctgaccactggagtccatggtggcaagtagagagctgctctaggttcttgag

SEQ ID NO: 7293 - DNA, 60 bp, Homo sapiens
ctggagcacatggccgtggtgaggatcaacaaaggctgggagttcattctgccttatgat

SEQ ID NO: 7294 - DNA, 60 bp, Homo sapiens
tttatgcagtatacaaggagaactgtcctgtaggatattctcttcctgatggtgcagaac

SEQ ID NO: 7295 - DNA, 60 bp, Homo sapiens
cccagatgccaagatttatcaagtcctcgatttccgaatccgttgtggaatgaaacacgg

SEQ ID NO: 7296 - DNA, 60 bp, Homo sapiens
ctgttactctgaatatggactctctatatctggtatggcgtgactgggcataacttctgt

SEQ ID NO: 7297 - DNA, 60 bp, Homo sapiens
agctgagtccgctgtggtcctcgacctgctcatgtcacttccagaggagctgccactcct

SEQ ID NO: 7298 - DNA, 60 bp, Homo sapiens
atcccagtgacacagaagaatgggttagactggcagaaatgtctctggaacaagacaata

SEQ ID NO: 7299 - DNA, 60 bp, Homo sapiens
tctaagaaacgccactgaggaacaggatccactttgaacagtccgctaaagctatcaaaa

SEQ ID NO: 7300 - DNA, 60 bp, Homo sapiens
ctaatgaccctgacgacctggacgtgctcagaacccggcatgccaggcacacccggaagc

SEQ ID NO: 7301 - DNA, 60 bp, Homo sapiens
tagatcaatccaaccctctgtccacccccatgcctaagaaacgaggtcgaaagtccaagg

SEQ ID NO: 7302 - DNA, 60 bp, Homo sapiens
attcggggagaagaaccacgaggtgtccatgactgccctgaggctcctacagaggatgaa

SEQ ID NO: 7303 - DNA, 60 bp, Homo sapiens
aagttaagcagatttgcctaaggatgccaatgtttttaattctcaggaactgtgaatatg

SEQ ID NO: 7304 - DNA, 60 bp, Homo sapiens
catcctctccatccgggtctgcagggacatgatcacccgccgctccttgggctacgcgta

SEQ ID NO: 7305 - DNA, 60 bp, Homo sapiens
caagtgtacgagctgtgcccaaccagcgagcacctccttcaggttacttcatgacagctg

SEQ ID NO: 7306 - DNA, 60 bp, Homo sapiens
agcacggaagacttatgaacgccttgttgcccagttccccagttctggcagattctggaa

SEQ ID NO: 7307 - DNA, 60 bp, Homo sapiens
aaccctccctgtttggaaccctccccaaagaggcagtcaggctgatgctcagtgctttgt

SEQ ID NO: 7308 - DNA, 60 bp, Homo sapiens
gactctattcttagcgtcacagtggacgggaaaactgccaaccttaacttggagacacgg

SEQ ID NO: 7309 - DNA, 60 bp, Homo sapiens
tgaacgcttcttaggccaagagacaccatgcggagcctagtctgtgatcctgtgtgaaga

SEQ ID NO: 7310 - DNA, 60 bp, Homo sapiens
cattagaagctgtaaccacctgtgaactatgtaaagagaagttggagcttaacctggagg

SEQ ID NO: 7311 - DNA, 60 bp, Homo sapiens
gcatgaatcaccacaactagcctacccttagatttttggaaggatcgatcttatttaact

SEQ ID NO: 7312 - DNA, 60 bp, Homo sapiens
gcctgaaattgtctgcattatccctaagtcacattggaagtgaacttggaggatgcatat

SEQ ID NO: 7313 - DNA, 60 bp, Homo sapiens
caagatgattcgctgggaggactatgtgcttagactgtggcgcaaatactcgaataaact

SEQ ID NO: 7314 - DNA, 60 bp, Homo sapiens
cggggcatcaccaaaatgaggctccagcaggaggaaatggtgcagaaaatgttgctgctg

SEQ ID NO: 7315 - DNA, 60 bp, Homo sapiens
cacaggtgtttcaaaggtaaggaataggttgtctcttggattaagtcatatgcctccagc

SEQ ID NO: 7316 - DNA, 60 bp, Homo sapiens
ctgtagcatggagaatgggtgcaaaaagctgacttctgtatccccacacttggattaggg

SEQ ID NO: 7317 - DNA, 60 bp, Homo sapiens
gcaagcggtaacccttggacaagacttagcagcatatacaacctatgaggtctacccaac

SEQ ID NO: 7318 - DNA, 60 bp, Homo sapiens
ttaccaaacgattccgccacacatccttttagctacagggctgatacatccttctgtggc

SEQ ID NO: 7319 - DNA, 60 bp, Homo sapiens
gtcacctggtacacatcttggagcccttgcccagactgtgcaggggaggtggccgagttc

SEQ ID NO: 7320 - DNA, 60 bp, Homo sapiens
gggttagctaccaccctataacctccctaccaggtaataaggagaccaagtctttgatca

SEQ ID NO: 7321 - DNA, 60 bp, Homo sapiens
tgcaaccatacatgggctccagtcaactatgggactgaaggtcctaattgctcacccaag

SEQ ID NO: 7322 - DNA, 60 bp, Homo sapiens
ggctctcgtgggtctcttcatctcagaaatgccaatcaggtcaaggtttgctacattttg

SEQ ID NO: 7323 - DNA, 60 bp, Homo sapiens
atcggttgtgcctccctgcttcccaccatagctgcctgaaaacatgacgctctcaagctt

SEQ ID NO: 7324 - DNA, 60 bp, Homo sapiens
tgagtcccttgctctgacagagatggatctgctagaaggaacctggagagcaggacccat

SEQ ID NO: 7325 - DNA, 60 bp, Homo sapiens
tgcaggctcctcaccgatatgtacaatgctcatcttaccaaggattacacagtgcgtggc

SEQ ID NO: 7326 - DNA, 60 bp, Homo sapiens
ccaaggaagctaaagaacgtgccaatggaatggagcttgatgggcgtaggatcagagttg

SEQ ID NO: 7327 - DNA, 60 bp, Homo sapiens
aaaggtctggtcgcagagacaggaacgtgtaatcctcagcgtgctccagcccacagcttc

SEQ ID NO: 7328 - DNA, 60 bp, Homo sapiens
tttgagccttacggagccgtctaccagatcaacgtcctccgggaccggagtcagaaccct

SEQ ID NO: 7329 - DNA, 60 bp, Homo sapiens
tgtgaggatcagcaccaatgtccgtagaggccctgacacaattccctaagctgatatttg

SEQ ID NO: 7330 - DNA, 60 bp, Homo sapiens
ccagaagtcttaaggttccaaagggatttagcagtgaggcagcaatgctgagtaggtagg

SEQ ID NO: 7331 - DNA, 60 bp, Homo sapiens
gtgaacctcaaatggactgaataaccctgagttggttgcagtcccaggagcctgatgtta

SEQ ID NO: 7332 - DNA, 60 bp, Homo sapiens
caaacctcgggagctctatctgcttttcagaccatttaagggctatgagggttctcttat

SEQ ID NO: 7333 - DNA, 60 bp, Homo sapiens
cagggtaaccaggagccgacaacaactcctgacgcaatggttcagccttttactaccatc

SEQ ID NO: 7334 - DNA, 60 bp, Homo sapiens
tctgacatggactctgaagcctcaaaccaagagaggtgtctgtctagccctgatagtcgg

SEQ ID NO: 7335 - DNA, 60 bp, Homo sapiens
aactccgaagccatccagattggacacgggaacatcattacaagacagacagtctccagg

SEQ ID NO: 7336 - DNA, 60 bp, Homo sapiens
gtcacttagcaaggtttgctgatgcttcaaagagcttagtttgcggtttcctggacgtgg

SEQ ID NO: 7337 - DNA, 60 bp, Homo sapiens
cagatgaaggcaaactttttgttggagggctgagttttgacaccaatgagcagtcgctgg

SEQ ID NO: 7338 - DNA, 60 bp, Homo sapiens
gtctaacaagcccattttcatgccccagctgtgctgtgggttttccaagcctcatatttg

SEQ ID NO: 7339 - DNA, 60 bp, Homo sapiens
tcccttctaattggcccactaacatggttgtccatgcgttattggtttgtaatgctagca

SEQ ID NO: 7340 - DNA, 60 bp, Homo sapiens
acccttcggcaatatcatttcctccaaggtgtttatggatcgagctaccaaccagagcaa

SEQ ID NO: 7341 - DNA, 60 bp, Homo sapiens
gctgtagcctccccaaccagcagacagttttatggaaacttggtatagcagctaaaagag

SEQ ID NO: 7342 - DNA, 60 bp, Homo sapiens
gttgcccctaggacaagacttaccaaaggtaatactcgtgagtaggtggcagatgtagca

SEQ ID NO: 7343 - DNA, 60 bp, Homo sapiens
caaaacggcttctttactgttcgctatgcaaggttgctgtcaactctgcctcgcagctgg

SEQ ID NO: 7344 - DNA, 60 bp, Homo sapiens
gccagtgttgcctaagtattaaaacattggattatcctgaggtgtaccaggaaaggattt

SEQ ID NO: 7345 - DNA, 60 bp, Homo sapiens
aagaacatcacctaaagtctgcacacgagcccatttttaccaagatttgatcagtgtctt

SEQ ID NO: 7346 - DNA, 60 bp, Homo sapiens
ttttcaggacgctcctcagccaagaagaagggcggaaaccacatccccgaaaggtggaaa

SEQ ID NO: 7347 - DNA, 60 bp, Homo sapiens
cagagagatttttagagctgtggtggacttcatagatgaattcaagtgttgagggaggat

SEQ ID NO: 7348 - DNA, 60 bp, Homo sapiens
aattctgtgacatgctcttgagctttaccctagttgaacatacatgtgtagatttacaca

SEQ ID NO: 7349 - DNA, 60 bp, Homo sapiens
aaaggcaagaggagaggtggccgaagacgcagcagaagtccagaccggagacgtcgctga

SEQ ID NO: 7350 - DNA, 60 bp, Homo sapiens
gtgacaccaaagccacctctgtcatttgttgtgatgtcttttcttggcaaaagccttgtg

SEQ ID NO: 7351 - DNA, 60 bp, Homo sapiens; identical to SEQ ID NO: 4855

SEQ ID NO: 7352 - DNA, 60 bp, Homo sapiens
gccttgtgctaaaggcgtataacggtggtgcctatctacttaagggggcattctagtctt

SEQ ID NO: 7353 - DNA, 60 bp, Homo sapiens
tgcgggttattagccagcggtacccagacatccgcattgaaggagagaattacctccctc

SEQ ID NO: 7354 - DNA, 60 bp, Homo sapiens
gttgctcagcgagtcccctggtaagctccacgttgaagtttcagcagatcttacagcaat

SEQ ID NO: 7355 - DNA, 60 bp, Homo sapiens
tcactgtataaataggagaggatgagagcccagaggtaacagaacagcttcaggttatcg

SEQ ID NO: 7356 - DNA, 60 bp, Homo sapiens
gcaaaagacagtccaacgagacttatcgagatgctgttcgaagagtcatgtttgctcgat

SEQ ID NO: 7357 - DNA, 60 bp, Homo sapiens
gctactgtaccttgctcattttgcagatttagaagctgaaacatgggttaggttacttac

SEQ ID NO: 7358 - DNA, 60 bp, Homo sapiens
aagaatttgccatactgtactcagaatcacgacattccttccctaccaaggccacttcta

SEQ ID NO: 7359 - DNA, 60 bp, Homo sapiens
tggccaggcttggggaacaatgatggtgcacaaaggcttagatttgccttgtctcaaaat

SEQ ID NO: 7360 - DNA, 60 bp, Homo sapiens
ttcccctcagagccattgttgtctgggctcgagtttctgccccaggttgtgtgctggaat

SEQ ID NO: 7361 - DNA, 60 bp, Homo sapiens
ggctgtagtgtcaacgatgtttccagtagtgtttagatttggtgtcttcaaaggtagttg

SEQ ID NO: 7362 - DNA, 60 bp, Homo sapiens
gcagagcaaaatcactcaggatctcatggccaaagtcagagcgatgcttgcagcttccaa

SEQ ID NO: 7363 - DNA, 60 bp, Homo sapiens
ggacaccagaggaagctgtttcctgttgtgatgttggacctgtagtaggacatggtgatt

SEQ ID NO: 7364 - DNA, 60 bp, Homo sapiens
tggaggttactatgggcaaggcggcatgagtggaggtggatggcgtgggatgtactgaaa

SEQ ID NO: 7365 - DNA, 60 bp, Homo sapiens
tagtccatcgaagaagagtccttggaacaagcaactggctattgaaaaggttattttgta

SEQ ID NO: 7366 - DNA, 60 bp, Homo sapiens
gtggtaatgagagatccaaacaccaagcgctctaggggctttgggtttgtcacatatgcc

SEQ ID NO: 7367 - DNA, 60 bp, Homo sapiens
attgtaagtgtagctgcactctgagttacatcctatcacaggcatcaaggtttgctttgc

SEQ ID NO: 7368 - DNA, 60 bp, Homo sapiens
ctactagagttttaggctctgaaattgctgctggaggaattggaagagcatgaactgttt

SEQ ID NO: 7369 - DNA, 60 bp, Homo sapiens
cagctcctggttgcctggcaagatcaagagggagttcatgcaacacctgagaatctgatt

SEQ ID NO: 7370 - DNA, 60 bp, Homo sapiens
aggttttaagaagcaaatggcagatactggaaaactgaacacactgttgcagagagcccc

SEQ ID NO: 7371 - DNA, 60 bp, Homo sapiens
ttctggaaagtcgtggatctggccaacaagaaggtgggacagttgcacgaagtgctagtt

SEQ ID NO: 7372 - DNA, 60 bp, Homo sapiens
ggtaaccaaggagcagtgaacagcagctactacagtagtggaagccgtgcatctatgggc

SEQ ID NO: 7373 - DNA, 60 bp, Homo sapiens
tttaactaaggtgaagctgatcaacgagctgaatgaacgagaggtccagcttggggtggc

SEQ ID NO: 7374 - DNA, 60 bp, Homo sapiens
aacccgtcgaccattcccatgaaggaccacgatgccatcaagctgttcattgggcagatc

SEQ ID NO: 7375 - DNA, 60 bp, Homo sapiens
tggcagtggacgcaccctcagagcatggggtctattctttccagttcaacaagtaacagt

SEQ ID NO: 7376 - DNA, 60 bp, Homo sapiens
gccctggactgtgtacatctgaactttggtccatcctttgatgtgtggttcgttagccac

SEQ ID NO: 7377 - DNA, 60 bp, Homo sapiens
tcttccatgcagtctccatgattgctttcaaactggatgaggacctttgtgctgctcctg

SEQ ID NO: 7378 - DNA, 60 bp, Homo sapiens
cagcaaacctggtatcatgaaggaccaaatagcttgaaggtggcaagactatggattgct

SEQ ID NO: 7379 - DNA, 60 bp, Homo sapiens
gagtgcatggttcccgtggtcctcggggccaagcagctgatccttgtaggcgaccactgc

SEQ ID NO: 7380 - DNA, 60 bp, Homo sapiens
cgacaattctagacagagagcagtcactggatcaggcagtcacttgtgtgatttgaagct

SEQ ID NO: 7381 - DNA, 60 bp, Homo sapiens
acactcgttactcgagacactggtctgcacagaacacgcttactctgcgtttgttgtctc

SEQ ID NO: 7382 - DNA, 60 bp, Homo sapiens
cttcataaaggaaactgcgtatgcagattcagtattgtgtatctttggacaattagatgg

SEQ ID NO: 7383 - DNA, 60 bp, Homo sapiens
acctctctacaccctcaacaagcctttgctcagtggcatcagcaatgcagaagcacggca

SEQ ID NO: 7384 - DNA, 60 bp, Homo sapiens
tgagctgcagcgggaggaagcggacaagctagtgaggcagtacaacgaggaaggccgcaa

SEQ ID NO: 7385 - DNA, 60 bp, Homo sapiens
cgaaggaatcattatggtgacggatcctccgtttggtggcttggttgaacctctggctat

SEQ ID NO: 7386 - DNA, 60 bp, Homo sapiens
ccacccccatctcccttgctcatttggatgcgtcaccttaattctcctgctgccaccgtc

SEQ ID NO: 7387 - DNA, 60 bp, Homo sapiens
ctccaggcgacacgattgcagacgccattatcctctgtttctctgctgcaccgacctcga

SEQ ID NO: 7388 - DNA, 60 bp, Homo sapiens
gacgcttgtccagcagtttgcttcttgtgattgaactgaacctgtaaggattcatggata

SEQ ID NO: 7389 - DNA, 60 bp, Homo sapiens
ttttggtaggagtgggctggaccggacgccagagacaaaggctcccaaggcaagagggac

SEQ ID NO: 7390 - DNA, 60 bp, Homo sapiens
aaagccagttgccctgaacccagcagacaccatggaatgtcctttgcacgcattaaatgg

SEQ ID NO: 7391 - DNA, 60 bp, Homo sapiens
agattgagtcacagacagaagagcagcctacaacgaaacaagccaaagcagtggaggtcg

SEQ ID NO: 7392 - DNA, 60 bp, Homo sapiens
ccggagcagatactaagcaggaacagacttgggaccaaaaatcccttttcaacgaaacta

SEQ ID NO: 7393 - DNA, 60 bp, Homo sapiens
cggcatctcagaggagcagtgcctgtaccagatctacattgatgagttgtacggaggcct

SEQ ID NO: 7394 - DNA, 60 bp, Homo sapiens
tgcagaacttcctctctgactgcacgattcatgatggggccgcaggtgtccatttcatct

SEQ ID NO: 7395 - DNA, 60 bp, Homo sapiens
accatcccctcggtgggagtggtgaaccccatcctggccagccctccaacgctgggtctc

SEQ ID NO: 7396 - DNA, 60 bp, Homo sapiens
taccaagggcaaggaccctctggcttaccctccaagcgactctgtagttttcccagattt

SEQ ID NO: 7397 - DNA, 60 bp, Homo sapiens
atggtagtgagtcgcgaagtcgggaccatcgtcgtgaggatcgtgtgcattacaggagtc

SEQ ID NO: 7398 - DNA, 60 bp, Homo sapiens
tgcacagtatttgctgcagaacagtgtgaagcagtattctggaaagtttttctaagacta

SEQ ID NO: 7399 - DNA, 60 bp, Homo sapiens
cgcaccaggaagtgactgtttccccgccgcagcaaaccaggccatccgctggccttttag

SEQ ID NO: 7400 - DNA, 60 bp, Homo sapiens
tctatatccgaggactgcctccccacaccaccgaccaggacctggtgaagctctgtcaac

SEQ ID NO: 7401 - DNA, 60 bp, Homo sapiens
ccaggtcgaggtcaaggagacattctcatagacgttacactcgatccagatcccactctc

SEQ ID NO: 7402 - DNA, 60 bp, Homo sapiens
cccttttggaagttcttttgataaaaggtcgaaccagtaagtccagagattttgtggtca

SEQ ID NO: 7403 - DNA, 60 bp, Homo sapiens
ctaaaagctcctagaagtattctttgatgggacctctcatggtgcaccacctgcacaagg

SEQ ID NO: 7404 - DNA, 60 bp, Homo sapiens
ctagctggaatgaacattcttctagaggatatagcctgcagggacctctcatggtgcacc

SEQ ID NO: 7405 - DNA, 60 bp, Homo sapiens
gaatgctgccaaagatatgaatggagagaaatcatccaagctcccaagaaaccagggatt

SEQ ID NO: 7406 - DNA, 60 bp, Homo sapiens
ccagtatatgcaacgagtggctggaatgagagcacttcctgccaatgccatcttaaatca

SEQ ID NO: 7407 - DNA, 60 bp, Homo sapiens
tgaagcctgtgaaagtttcagctccccgagttggtggaaaacgctaaactggcagattag

SEQ ID NO: 7408 - DNA, 60 bp, Homo sapiens
agtctctgaagcctcatcagtcaccgggactgtcaggaatagtggtttaagaggaagctc

SEQ ID NO: 7409 - DNA, 60 bp, Homo sapiens
actttgaggcctttgggactctgacggactgcgtggtggtggtgaatccccagaccaagc

SEQ ID NO: 7410 - DNA, 60 bp, Homo sapiens
acctctgtatttctgctggcattaagggttgatggtgttaccatgtatcatcatggcggt

SEQ ID NO: 7411 - DNA, 60 bp, Homo sapiens
ttttattctcggctttcaggtggaggatgcacttgccctcatcaggttggatgacctctt

SEQ ID NO: 7412 - DNA, 60 bp, Homo sapiens
gcagaggcaggagtttggatgtttggatgggattcccttaggattctacagccaataaag

SEQ ID NO: 7413 - DNA, 60 bp, Homo sapiens
tggccccagaggacctatacctagtggaatgcagggtcccagtccaattaacatgggggc

SEQ ID NO: 7414 - DNA, 60 bp, Homo sapiens
aaaccagtgacgcaacgtccgacaactcaggcgaagacagtaccggttgttgaaaagcct

SEQ ID NO: 7415 - DNA, 60 bp, Homo sapiens
ggcaggcgaacctcaggctctttgtcctactaaaaagcgcacgacaatggtagaagcaga

SEQ ID NO: 7416 - DNA, 60 bp, Homo sapiens
aggacaaagccaacagtgccagctctcacaactggaacacactattcatggggccgaatg

SEQ ID NO: 7417 - DNA, 60 bp, Homo sapiens
ggctcagcagacaggtttgtgtacgtgtgggacaccacaagccgaaggtcctgtacaagc

SEQ ID NO: 7418 - DNA, 60 bp, Homo sapiens
cccaaagagggtggtgaagagagtgcaaacttggacttcatgttggccctaagtctgcaa

SEQ ID NO: 7419 - DNA, 60 bp, Homo sapiens
aggccttccaggagttcatccggtccactccatactcggcatacgacccagagacgtaca

SEQ ID NO: 7420 - DNA, 60 bp, Homo sapiens
gcacctttgactgatgccaagactaggagccatgctgatgatgtgggtctcgttctttct

SEQ ID NO: 7421 - DNA, 60 bp, Homo sapiens
gagacgagaattccaaggagtgtcaccatcagaggcttctcttcattgtgtcaaagaagc

SEQ ID NO: 7422 - DNA, 60 bp, Homo sapiens
ttcttcaaggaaagtatagcgtctatggagttcagagggcacgtgtttgggggaaaatat

SEQ ID NO: 7423 - DNA, 60 bp, Homo sapiens
gcgcagaggacaaaagaggatctatccacagcggcaccagcgactacgatcaaattagcc

SEQ ID NO: 7424 - DNA, 60 bp, Homo sapiens
ggtggaggtggaggaagcgtccctgggatcgagaggatgggtcctggcattgaccgcctc

SEQ ID NO: 7425 - DNA, 60 bp, Homo sapiens
aaaaggacgtgcaaaagtctagccttgcccgagctttccttacaatcagagcccctctca

SEQ ID NO: 7426 - DNA, 60 bp, Homo sapiens
aaatcactggcattcgtggggccactccccacccaagctccacgtgtgtccgtctgtgct

SEQ ID NO: 7427 - DNA, 60 bp, Homo sapiens
agcggggccgatgtgtagttggtgactgcctctccagatgctgaggtgcctgtatcattg

SEQ ID NO: 7428 - DNA, 60 bp, Homo sapiens
ttattactaccaccctcctcctcgcatgccacctccaattagaggtcggggtcgtggtgg

SEQ ID NO: 7429 - DNA, 60 bp, Homo sapiens
caaaatgatgaactttgatttgaacaggtgcatttaaacaaccggaaatgatcacttaga

SEQ ID NO: 7430 - DNA, 60 bp, Homo sapiens
tcctcacctagctctagcagcagtaattctgtcaaccccatagcctcacttggagccctg

SEQ ID NO: 7431 - DNA, 60 bp, Homo sapiens
atggaagacacgcagctagccaccagcagtcatcaccaaagatgcctctgatttgtgact

SEQ ID NO: 7432 - DNA, 60 bp, Homo sapiens
agagagccgtatcctccaggtcccactcctgttcattgccccttaggtctccaaaatgta

SEQ ID NO: 7433 - DNA, 60 bp, Homo sapiens
tgaattgatgttccaagagaagtttagctcgacaggtccaccctcaccatccgggtcttt

SEQ ID NO: 7434 - DNA, 60 bp, Homo sapiens
aagaacaacatcattgggatgatcgccgccgaatgccagatggaggttatcctcatggtc

SEQ ID NO: 7435 - DNA, 60 bp, Homo sapiens
aagtagctcggaaccttatcatgaaggggacggagatgtgccccaagagtgaagatgtct

SEQ ID NO: 7436 - DNA, 60 bp, Homo sapiens
gttgttactgatttcttgtatctcccaggattcctgttgctttacccacaacagacaagt

SEQ ID NO: 7437 - DNA, 60 bp, Homo sapiens
gcatctcgatggaaggctcttgatgaaatggaaaagcagcagcgtgagcaggttgataga

SEQ ID NO: 7438 - DNA, 60 bp, Homo sapiens
acgggagactttgtacagtggcctctctaaaagtacaaaacattcataagagaaacctgc

SEQ ID NO: 7439 - DNA, 60 bp, Homo sapiens
cattttaggattgtcaaaaggaggattgaggaggatcagatcaataatggaggcaatggt

SEQ ID NO: 7440 - DNA, 60 bp, Homo sapiens
gcgatgattctgacatttgggatgatacagcactgataaaagcatatgataaagctgtgg

SEQ ID NO: 7441 - DNA, 60 bp, Homo sapiens
agaatacaagtgtggtaaatgccatgtttgtactttatctaacatcttctctttcagtag

SEQ ID NO: 7442 - DNA, 60 bp, Homo sapiens
aaccccaaagagttctaccacgaggtgcacaggccctctcacttcctcaactttgctctc

SEQ ID NO: 7443 - DNA, 60 bp, Homo sapiens
aggcccattgattagcagttctcagggtagaaacagtcctgccttggctgtaatgacagc

SEQ ID NO: 7444 - DNA, 60 bp, Homo sapiens
acagcctgcatgtggctctgtctgaatgtctttgtagagctacctggaaattgggaggca

SEQ ID NO: 7445 - DNA, 60 bp, Homo sapiens
tggccccgttcatgccccagtcttcacaatgtctgtagatgtggatggcacaacatatga

SEQ ID NO: 7446 - DNA, 60 bp, Homo sapiens
tgttacaacttgtgcttatgtagacacaatcttctgtctcagtacagaggcactgacttc

SEQ ID NO: 7447 - DNA, 60 bp, Homo sapiens; identical to SEQ ID NO: 4855

SEQ ID NO: 7448 - DNA, 60 bp, Homo sapiens
ggagtcagggaatggagaggacttaaccaaggtgccattgaagaggctgagtgatgaaca

SEQ ID NO: 7449 - DNA, 60 bp, Homo sapiens
gccatttatccaatggagtttcctcttacctacttaacaggaacagggaaagggtgtccc

SEQ ID NO: 7450 - DNA, 60 bp, Homo sapiens
ctcccacttgtttgtgtgatctcagaactgtgccaagcagacactgggacaaagggagaa

SEQ ID NO: 7451 - DNA, 60 bp, Homo sapiens
ttaaaaaacggattggttaaaaaatgcttcatatttgaaaaagctgggaattgctgtctt

SEQ ID NO: 7452 - DNA, 60 bp, Homo sapiens
ttctcatgtatggaagtaaaccacagattgcagagataatcagaagttttaaaggccacg

SEQ ID NO: 7453 - DNA, 60 bp, Homo sapiens
gtccggcatgaaggtctggggtctggctgctgcctgcttcttgctccagcaccatggaat

SEQ ID NO: 7454 - DNA, 60 bp, Homo sapiens
ccgctgcaatcacctttgctggttatggcaatgctgaagtgactccactgttgaacctca

SEQ ID NO: 7455 - DNA, 60 bp, Homo sapiens
gcccgccagcatttagatgcttgagaaagctaacacttatatttagccagacctacttgt

SEQ ID NO: 7456 - DNA, 60 bp, Homo sapiens
ctgccccagtggtagaagctgtctccacccctagtgcggcctttccctcagatgccactg

SEQ ID NO: 7457 - DNA, 60 bp, Homo sapiens
cctgatgtgccacactactaagatgtacagcacagatgatggagtccagtttcacgcctt

SEQ ID NO: 7458 - DNA, 60 bp, Homo sapiens
gcgaaacagagcaatttccagcagtgccatttccaaagcagtatctggagccagtgcagg

SEQ ID NO: 7459 - DNA, 60 bp, Homo sapiens
gtcctaatgaggagacagaagcagatcaactatgggaagaacacaattgcctacgatcgt

SEQ ID NO: 7460 - DNA, 60 bp, Homo sapiens
gcgaaacccaggggtgaattggattcttgaagagaccaaagcctgtaactgtccagcttc

SEQ ID NO: 7461 - DNA, 60 bp, Homo sapiens
aaccggatgctgcaaacccagaatgcagccttccagccaaaccagtaccagatgctagct

SEQ ID NO: 7462 - DNA, 60 bp, Homo sapiens
gacttctagcatttagcaaccgagagtcgtagagtcaataaagctgtaagtgtcttcact

SEQ ID NO: 7463 - DNA, 60 bp, Homo sapiens
aaagggaagttcggtgttggagcgatactcaatgtagtcagtctacacctggacgtgtgg

SEQ ID NO: 7464 - DNA, 60 bp, Homo sapiens
actaagaaacatctagtggtgccgggggatacaatcactacggacacaggattcatgcgg

SEQ ID NO: 7465 - DNA, 60 bp, Homo sapiens
cgtgctgatatcgctgcttacaagcaacaagatgactcagccgcaacattgggtgacatc

SEQ ID NO: 7466 - DNA, 60 bp, Homo sapiens
ccctgtctctacgtgaacttgggattccaaagccagctaacagcatgatcttttctcact

SEQ ID NO: 7467 - DNA, 60 bp, Homo sapiens
aagactacaggcttggacaggtcgccagtagcttatttcgcggcgaacaccattccagag

SEQ ID NO: 7468 - DNA, 60 bp, Homo sapiens
tagaagtggcaatgctgtaacctggtgcctgctgctgtgcagccacatacacacaattgt

SEQ ID NO: 7469 - DNA, 60 bp, Homo sapiens
ctgtgacagttaaagctcagactaaagcccctcccaaaccagctcgagcagcacctaaaa

SEQ ID NO: 7470 - DNA, 60 bp, Homo sapiens
tacagcacatcccacgatcgctccgtgaaggtgtggaatgtggcagagaactcctacgtg

SEQ ID NO: 7471 - DNA, 60 bp, Homo sapiens
gccagtgaaaaccatgttgctgccacagggagtcacctctgcgttctcaggagtagaaaa

SEQ ID NO: 7472 - DNA, 60 bp, Homo sapiens
gaacatctcaccgagtggctacaatcggtaaaatggtactggaaacaagaagacaaaata

SEQ ID NO: 7473 - DNA, 60 bp, Homo sapiens
tcgcctgtgggaggaggtggcggtgggcggaactcctagcggacacctcgtggagtccgg

SEQ ID NO: 7474 - DNA, 60 bp, Homo sapiens
ctgggcaacctgcgctgaagatgccgggaaaactccgtagtgacgctggtttggaatcag

SEQ ID NO: 7475 - DNA, 60 bp, Homo sapiens
cgtctctctgactctataccaccatggtcgcaattattatcttctatacccactacgtta

SEQ ID NO: 7476 - DNA, 60 bp, Homo sapiens
gcaaacagaacccaagaaaatgtgcattagaacctgggaatgtagaagaagcttgtttct

SEQ ID NO: 7477 - DNA, 60 bp, Homo sapiens
ctgaccaggcagttctagatgagcgcttggataagagggtggatgacatgcttgctgctg

SEQ ID NO: 7478 - DNA, 60 bp, Homo sapiens
gttcaaatgcccactttccagtttggccttatgcttcatgcagacttgagtgtatgcagg

SEQ ID NO: 7479 - DNA, 60 bp, Homo sapiens
cactttgcctgcgaacagaacctgctgtcgcggccagatggctctgcttccttcctgcaa

SEQ ID NO: 7480 - DNA, 60 bp, Homo sapiens
tgtctcaggttctttgaatcatgctgccagtaagaagcttgacctggaggcctggtttcc

SEQ ID NO: 7481 - DNA, 60 bp, Homo sapiens
gccagcggatgtctcatgcaaggatcgtctctgtggctaagcctcactttccgctccgcc

SEQ ID NO: 7482 - DNA, 60 bp, Homo sapiens
gggcaccagaatgctccctctccaaaggatctaaggaccaaagctgacagtttctttact

SEQ ID NO: 7483 - DNA, 60 bp, Homo sapiens
gccgtctaaggcagttgtttatgacagctgaaaactggacactccctaaatgtccacctt

SEQ ID NO: 7484 - DNA, 60 bp, Homo sapiens
gctgtgctttcttgatgcgtagaaacacgtgcatggaggatcaaacactgtcagaattgc

SEQ ID NO: 7485 - DNA, 60 bp, Homo sapiens
cagaggtgacactgcgtacaccaagctagctctggatcggcacactgacactacctattt

SEQ ID NO: 7486 - DNA, 60 bp, Homo sapiens
tatctatgtgcaggtgctacaggcagatggtgggacctatgcagcttgtgtgaatgcagc

SEQ ID NO: 7487 - DNA, 60 bp, Homo sapiens
ctgccctggacttgttctcagaggtatcaggaaaggctttctgttttgatctggagctgt

SEQ ID NO: 7488 - DNA, 60 bp, Homo sapiens
tgcaggagtactttggcagtttggcagcttgacttctgcagctggaggaggcccctcagg

SEQ ID NO: 7489 - DNA, 60 bp, Homo sapiens
cccataccatttcgtgttattcacattccccgtaccatttcttgttattcacatgtacag

SEQ ID NO: 7490 - DNA, 60 bp, Homo sapiens
cagacatcaccagttgacttctgcattaacctgcatgatctgtttctactatggattgga

SEQ ID NO: 7491 - DNA, 60 bp, Homo sapiens
aaaatgttccacgtgggataccctgcgtggggttcactgtagtagctgcactaggtgatt

SEQ ID NO: 7492 - DNA, 60 bp, Homo sapiens
ttcctgccatggctcagcttacgctgtcatccctagcagaacatcatgaagtcttgacag

SEQ ID NO: 7493 - DNA, 60 bp, Homo sapiens
gctgtgagtttctagaagtgtacagagttgctcctgtgttcccgggtcatgttgagtagg

SEQ ID NO: 7494 - DNA, 60 bp, Homo sapiens
gcaaggtaagtatatcaaaggaaatcaacagttgtgcttgggggctttttgttatgggat

SEQ ID NO: 7495 - DNA, 60 bp, Homo sapiens
taggatcagacgaggccatgctcgtttggcattatctcaaaaccagcagtcttctggggc

SEQ ID NO: 7496 - DNA, 60 bp, Homo sapiens
atgagcagaagtcccgaatccaggccatgaagcccatgaccaaggaggagtgggatgccc

SEQ ID NO: 7497 - DNA, 60 bp, Homo sapiens
cagcactagatgaaatccggttgctgaagtcagttcgcaattcagaccctaatgatccaa

SEQ ID NO: 7498 - DNA, 60 bp, Homo sapiens
cctgtcgggtggataagccctctgagatagtagatgttggagataaagtgtgggtgaagc

SEQ ID NO: 7499 - DNA, 60 bp, Homo sapiens
cctcctggagcagcctctccatggatgagaaagtcgagttgtatcgcattaaagttcaag

SEQ ID NO: 7500 - DNA, 60 bp, Homo sapiens
gcagattgtgatcgtagaacagaagtggccaagaaaagattagcagaaactcaagaagag

SEQ ID NO: 7501 - DNA, 60 bp, Homo sapiens
ctcagatgttggcagtgaatagaagtgagtttcttcctaggagttgttactccctcagcc

SEQ ID NO: 7502 - DNA, 60 bp, Homo sapiens
gggtacgaggaacagcaaattcaggaaaaagtggcgacctttcgactcatgttgctggag

SEQ ID NO: 7503 - DNA, 60 bp, Homo sapiens
ggttgtggatttctgagcatgtgcagactggtctagctagttcaggaactggtgcatgta

SEQ ID NO: 7504 - DNA, 60 bp, Homo sapiens
cccctcccaggactggtctgttgtcttttcatctgttcaagaggagattgaaactgaaaa

SEQ ID NO: 7505 - DNA, 60 bp, Homo sapiens
ccacctgaggaacctcctttgccagacgaggatgaggaattatctagtgaagaatcagaa

SEQ ID NO: 7506 - DNA, 60 bp, Homo sapiens
ctgcgctccatgcagggtttccctttctatgacaaacctatgcgtatccagtatgccaag

SEQ ID NO: 7507 - DNA, 60 bp, Homo sapiens
accaaacatgccccaatgaccttagccccattgctccattcactcccaggtgagaattca

SEQ ID NO: 7508 - DNA, 60 bp, Homo sapiens
agaatgtctgaggggtcaggcggtgctggcaagatggctgcacttgagaagatgacgttt

SEQ ID NO: 7509 - DNA, 60 bp, Homo sapiens
ttgccctagatgccccaggagacctggcaccatgaggattacagacagtggaatcttact

SEQ ID NO: 7510 - DNA, 60 bp, Homo sapiens
caagtacatagcagaacccagtatgcactcaatgcctgcagtgactttgtctccaaatgg

SEQ ID NO: 7511 - DNA, 60 bp, Homo sapiens
gcacgagggtgctgactggcttgcgtctctgccactttctttcagcttagtggcgcgcgg

SEQ ID NO: 7512 - DNA, 60 bp, Homo sapiens
gcacaacaccagcctatgaatatcttcccatatccagtgggtgttcatgctcctttgatg

SEQ ID NO: 7513 - DNA, 60 bp, Homo sapiens
cagaggtgtggaagaagaggaagaagatggggaaatgagagaatagcatcttttgtgggg

SEQ ID NO: 7514 - DNA, 60 bp, Homo sapiens
gtggcagacatgtccaaggaatattgcggggatttgatccctttatgaaccttgtgatag

SEQ ID NO: 7515 - DNA, 60 bp, Homo sapiens
ccccgaccacgacttggcttccttgtgccttaaaaaacctgcctttcctgcagccacaca

SEQ ID NO: 7516 - DNA, 60 bp, Homo sapiens
ataatgtccctcaagtttatggcagtgtaccttgtgccactgaatttccaaagtgtacca

SEQ ID NO: 7517 - DNA, 60 bp, Homo sapiens
atggagtgagcatgtggccccagatgggcgcatctactactacaatgctgacgacaagca

SEQ ID NO: 7518 - DNA, 60 bp, Homo sapiens
gaggaggaatttaacaccggtccactctctgtgctcacacagtcagtcaagaacaatacc

SEQ ID NO: 7519 - DNA, 60 bp, Homo sapiens
gacacaggcacatagtgtggcactttgttcagttaacatttgtggagctgtcatcagctc

SEQ ID NO: 7520 - DNA, 60 bp, Homo sapiens
tgaaggactatgaagctggccaactgtatgggctggagaagttctgggccttcttgaaat

SEQ ID NO: 7521 - DNA, 60 bp, Homo sapiens
cctggagtaggcgcttccggccattcatactgcagtcggtcagtgttcggttgaaggatt

SEQ ID NO: 7522 - DNA, 60 bp, Homo sapiens
aaaagcttcatcacttgtagttctggatgctggaataccaagagtttctaacctaaatac

SEQ ID NO: 7523 - DNA, 60 bp, Homo sapiens
tacccgaccgaattttacgtggtgctgcatttccggtagcgcggcggaaatcggctgtgg

SEQ ID NO: 7524 - DNA, 60 bp, Homo sapiens
gcgctggaagaagcggaagaagatggcgctcaccagctttttacctgcacctactcagct

SEQ ID NO: 7525 - DNA, 60 bp, Homo sapiens
gtgggttcgtgcgccttctacctcgctgtttcggttttcctggctcctcggcccttttct

SEQ ID NO: 7526 - DNA, 60 bp, Homo sapiens
gagtgttatgtggtgtctaaccacggaagatgtgtgctgggtgaagaagtgcccacgaat

SEQ ID NO: 7527 - DNA, 60 bp, Homo sapiens
ccctgctgatgttttgttgcttaggatatgaatggctgagcggaggctgtaaaacctggc

SEQ ID NO: 7528 - DNA, 60 bp, Homo sapiens
ctggagaaccttctcttcactgctgaattagaccctcatatcttggccgtgttccagcag

SEQ ID NO: 7529 - DNA, 60 bp, Homo sapiens
gtgttacaccctcacattagtgtgctgtgtggggcagttcaacacaaatgtaacaattat

SEQ ID NO: 7530 - DNA, 60 bp, Homo sapiens
gtcattttcaggaagaatggagttcaggcgatggtggaatttgactcagttcaaagtgcc

SEQ ID NO: 7531 - DNA, 60 bp, Homo sapiens
aagagaatagttttggaggggagaagtgggacaaaaaagatgcagttttcctttgtattg

SEQ ID NO: 7532 - DNA, 60 bp, Homo sapiens
ttttggagccaagcataacaccagtaaccagcactatcccacctacctcgacatcaaatc

SEQ ID NO: 7533 - DNA, 60 bp, Homo sapiens
tccaccgccttctagtctcaccgaaggcttgtggccatctctgtaaagtttctggggagg

SEQ ID NO: 7534 - DNA, 60 bp, Homo sapiens
ttcaagggctgtcaaagatggtgaggtctgaagccaaaggcaagcacaccaaactccatg

SEQ ID NO: 7535 - DNA, 60 bp, Homo sapiens
tgagatttgctacacttctccccacctggtacatgatacatgaccccaggttccagtgta

SEQ ID NO: 7536 - DNA, 60 bp, Homo sapiens
ctcggggattgctcatggcatgggcctcttacgtgctgtcagcttgatgtgaagatcaag

SEQ ID NO: 7537 - DNA, 60 bp, Homo sapiens
caggctggagttattgaagcagagtggcagtcttcagtttgcagagtaggggtctgtctt

SEQ ID NO: 7538 - DNA, 60 bp, Homo sapiens
atcaccccaatgcagtacaaggccatgcaagctgcgggtcagattccagccactgctctt

SEQ ID NO: 7539 - DNA, 60 bp, Homo sapiens
gaagaagagatggaagaagacacagtcacaaacgggtcctgagcagtgaggcagatgtat

SEQ ID NO: 7540 - DNA, 60 bp, Homo sapiens
tccggacagacgccagagcgaggagggcgctacgcgacttggcaagatgacccagttcct

SEQ ID NO: 7541 - DNA, 60 bp, Homo sapiens
aaatcgtcggcggtcaggagcctggagaggaagacacacagaatgatctgaaagttcatg

SEQ ID NO: 7542 - DNA, 60 bp, Homo sapiens
atccagatgcttggtctttgattggcaatcttcatttggcaaaacaagaatggggtcctg

SEQ ID NO: 7543 - DNA, 60 bp, Homo sapiens; identical to SEQ ID NO: 4855

SEQ ID NO: 7544 - DNA, 60 bp, Homo sapiens
tgcgagagaaagttcggcctaagatgggcaaaattgacatcgactaccagaaactgcatg

SEQ ID NO: 7545 - DNA, 60 bp, Homo sapiens
agtgacattctgaaagttcccaaacctgaacctataccagagcctaaagaaccttctccg

SEQ ID NO: 7546 - DNA, 60 bp, Homo sapiens
gttagggaagttaacagctgagatgccaccagagccaagtgtttgagagttttgtgtctc

SEQ ID NO: 7547 - DNA, 60 bp, Homo sapiens
tctgatgctgctttggaggccacagagaatgaaccacttaacaaggaaacagaagaaatg

SEQ ID NO: 7548 - DNA, 60 bp, Homo sapiens
cattggagaaatcgatgaagaaacagattctgcgcttgatttggggaatattcgagcaga

SEQ ID NO: 7549 - DNA, 60 bp, Homo sapiens
caagaacccatgacagagatcgcagcagaagcaaggagtaccatagatacagagaacagg

SEQ ID NO: 7550 - DNA, 60 bp, Homo sapiens
gcgaactgagtgaaggggaattggaaaagcgcagaagaacccttttggagcaactggatg

SEQ ID NO: 7551 - DNA, 60 bp, Homo sapiens
gaatgactggatgggaaactattggggaaatgcacacaagtgagcagaataataggaagg

SEQ ID NO: 7552 - DNA, 60 bp, Homo sapiens
gaccccaagtccatcaactctcgagtcttcattggaaacctcaacacagctctggtgaag

SEQ ID NO: 7553 - DNA, 60 bp, Homo sapiens
tcaccaacttcatcagcgaagccacagtggagaagctacagcccgagaatcgacagatct

SEQ ID NO: 7554 - DNA, 60 bp, Homo sapiens
tagcgacaacacagaaaaggaagcgacgagcacgaccaagagagtcggacgaagcagaga

SEQ ID NO: 7555 - DNA, 60 bp, Homo sapiens
gtgccaccaacagacttctctcaactgattgattgtccagagtttgtaccaggccaagcc

SEQ ID NO: 7556 - DNA, 60 bp, Homo sapiens
caagtagaggcccaacagcagaaccccaaagtgaagttacagtggaaatgagtggagggg

SEQ ID NO: 7557 - DNA, 60 bp, Homo sapiens
ttagtttcccagagcatggtgttctcgtgtcgtgagcaatgtggtttgctaactggatgg

SEQ ID NO: 7558 - DNA, 60 bp, Homo sapiens
cttggcccctccagtttccctctgtcctccttggcttggctttgctgctgcttgtagttg

SEQ ID NO: 7559 - DNA, 60 bp, Homo sapiens
tatgccccaatgggaatgcaccctatgggtcagagagcgaatatgcctcctgtacctcat

SEQ ID NO: 7560 - DNA, 60 bp, Homo sapiens
gatgcgacagagaagggcgaggctcaggatgcatccaagaagtcggattcaaatccatta

SEQ ID NO: 7561 - DNA, 60 bp, Homo sapiens
gcttcttttgtgatacaatttgtcctctttttataatagttggtgatttttcactgacat

SEQ ID NO: 7562 - DNA, 60 bp, Homo sapiens
agggctcagcaaaaagtcggtcgtgtgggagaataagcacatcacgtggtttgccaccct

SEQ ID NO: 7563 - DNA, 60 bp, Homo sapiens
attagcataattgtgtatagtcagttgaacccactgttaccattgttcttatcccatggg

SEQ ID NO: 7564 - DNA, 60 bp, Homo sapiens
gtcagggcctatccttgcctgtagttctcagtcactggatgcacaaaatcactgtgtaac

SEQ ID NO: 7565 - DNA, 60 bp, Homo sapiens
cactcaaggtcctaactggctatggccacagctggaactacccgagaagtcttttgtaca

SEQ ID NO: 7566 - DNA, 60 bp, Homo sapiens
cactgagttgtagtcataacttgtacccagttaggagcaggggtagataactttatttat

SEQ ID NO: 7567 - DNA, 60 bp, Homo sapiens
acagttacttttgagagttttctggtcaagcttttaccaggcattctctagccttggtac

SEQ ID NO: 7568 - DNA, 60 bp, Homo sapiens
gccagatgaccccatggcctctttccttggacagtagcaactagtcagaagaccatccaa

SEQ ID NO: 7569 - DNA, 60 bp, Homo sapiens
ctactagatgttatgtgttcttttgcaattgtttctgcttatacctttactagcaaaggg

SEQ ID NO: 7570 - DNA, 60 bp, Homo sapiens
tattccgctgtaacagcttccggcgggtcctggatgttgatgtcctgcatctaacgcggt

SEQ ID NO: 7571 - DNA, 60 bp, Homo sapiens
gttgaaaactccaccaacagtcagcaccaggtcaaagaagctttacctgtgtcactcccc

SEQ ID NO: 7572 - DNA, 60 bp, Homo sapiens
atgtgccttcaggccacagtcgtgctgctagaacagtctcatagctgcagttcagctgtg

SEQ ID NO: 7573 - DNA, 60 bp, Homo sapiens
gttttcatggcattagccaatggagtttccagaataaaaacaggaccagttacactccat

SEQ ID NO: 7574 - DNA, 60 bp, Homo sapiens
caagcagaagattgagctgctgatgtcagttaactctgagaagtcgtcctcttcagaaag

SEQ ID NO: 7575 - DNA, 60 bp, Homo sapiens
agagcaggccacacagttcagcgcctttctgctgcccatgatggagtacatccccgaaaa

SEQ ID NO: 7576 - DNA, 60 bp, Homo sapiens
tggaatatctgagtaattggtttggagaaagagactttactccagaattgggaagatggc

SEQ ID NO: 7577 - DNA, 60 bp, Homo sapiens
attggatggatcagtaattctgctctccctcttgtaaacaagacgcattagggcttaacg

SEQ ID NO: 7578 - DNA, 60 bp, Homo sapiens
agctgcgctacagtatctacagagacctgtgggagcgaggcttcttcctcagtgcggctg

SEQ ID NO: 7579 - DNA, 60 bp, Homo sapiens
ctgatccagctcatacagaagaatttgcctatgaaaattctccagagcttaacccaaggc

SEQ ID NO: 7580 - DNA, 60 bp, Homo sapiens
tcatggtgtggacaaggtcgtggcctgcacctcggctttcctgctctgggaccctaccaa

SEQ ID NO: 7581 - DNA, 60 bp, Homo sapiens
agaagtgtcatcaattctgtggctgggaagggtctggattccctggagcacagcctgttt

SEQ ID NO: 7582 - DNA, 60 bp, Homo sapiens
gctccatcgagacctatgagcaggagaaagcagtcttccagttctaccagcgaacgaaat

SEQ ID NO: 7583 - DNA, 60 bp, Homo sapiens
ggttgctaccagtgggtgctgattcagcatcacaagtgactgaaattggctgtggatctg

SEQ ID NO: 7584 - DNA, 60 bp, Homo sapiens
tctggtggtttcttgtggttgaagtcctacagttttggcaggaatgcagggagatgccgt

SEQ ID NO: 7585 - DNA, 60 bp, Homo sapiens
ggagagtgagacttttacagctcttgctgaagcctctgttcacctctctgctctggaagt

SEQ ID NO: 7586 - DNA, 60 bp, Homo sapiens
gcagacaaaccaaagagcggaaattcatgcagcctgcaaagccattgaacaagcaaagac

SEQ ID NO: 7587 - DNA, 60 bp, Homo sapiens
ggctgcttagaccagtgatttggaagcacagatttcatggctccctttgtgagaagtgtg

SEQ ID NO: 7588 - DNA, 60 bp, Homo sapiens
gtaagagatagtgttgaaccagcatcaagtctccagaaacatggcagagcagacaggccg

SEQ ID NO: 7589 - DNA, 60 bp, Homo sapiens
gactgcatacgactaagtgtggagaatgtcccctgcattgtcactctgtgcaagattggc

SEQ ID NO: 7590 - DNA, 60 bp, Homo sapiens
aataatcaggagtgaagtcccagggatattctgtgctggtgctgaccttaaggaaagagc

SEQ ID NO: 7591 - DNA, 60 bp, Homo sapiens
tcatggccaaccgttacaccatggatctgactgccatctacgagagcctcctgtcgctga

SEQ ID NO: 7592 - DNA, 60 bp, Homo sapiens
ggaccagcatgtttggcagtgcaactacagacaatcacaatcccatgaaggatattgaag

SEQ ID NO: 7593 - DNA, 60 bp, Homo sapiens
cccgtggaaatgaggtttgccggaagatttggttgggtctgtttgatgctcggacatctt

SEQ ID NO: 7594 - DNA, 60 bp, Homo sapiens
ctggaggtgtgtgggaatgccctcatgaagcaataccaggttcagttctggaagatgcta

SEQ ID NO: 7595 - DNA, 60 bp, Homo sapiens
ctcggctcagacatctttgctgctccagctcctcagtcaacagctacagccaattttgct

SEQ ID NO: 7596 - DNA, 60 bp, Homo sapiens
cggggctgcactgccaccctgggcaacttcgccaaggccacctttaatgccatttctaag

SEQ ID NO: 7597 - DNA, 60 bp, Homo sapiens
ggcgccgattttatttggagagaagcaagcatctttgcctctttggagtaggaaattcag

SEQ ID NO: 7598 - DNA, 60 bp, Homo sapiens
tcagaagttcagtctattttttcagcggatactgccgccaccaagaatccaaacctagga

SEQ ID NO: 7599 - DNA, 60 bp, Homo sapiens
ggccatagtttgcccatccctaatgtaaagaaaggactttagcccaaagccacaacttgc

SEQ ID NO: 7600 - DNA, 60 bp, Homo sapiens
ggtgccgagagacgatgggaaaaatctagcagatactctgaacaatccagagaatcaaag

SEQ ID NO: 7601 - DNA, 60 bp, Homo sapiens
gcttcaacaccaagagaaaccgactgcgggaaaaactgactcttttgcattatgatccag

SEQ ID NO: 7602 - DNA, 60 bp, Homo sapiens
ttagtcattcaagtgttcagacagccacatgaggggacagtgcagctacaggatatgcca

SEQ ID NO: 7603 - DNA, 60 bp, Homo sapiens
cccctcaagggcctttgccaatctttcattttatgccaagtcctctaaaacgcatcaggg

SEQ ID NO: 7604 - DNA, 60 bp, Homo sapiens
aaatgatgtggaagttgagtgagtctcggtgggatattgctgctgcacctggtcaaggcc

SEQ ID NO: 7605 - DNA, 60 bp, Homo sapiens
taggtaacacttgggccagaaaggctggtcacaaagggaaaaccctggcaatgagcctat

SEQ ID NO: 7606 - DNA, 60 bp, Homo sapiens
agtaacttgtgggacttgttcaggaaaatcattacctcaccatgcttgttcaaattgtgg

SEQ ID NO: 7607 - DNA, 60 bp, Homo sapiens
atgaagacaggcgaggtcctctgctcacgcagctctactctctgaacatgcttgtgcaga

SEQ ID NO: 7608 - DNA, 60 bp, Homo sapiens
agatagtgcagaaattccgcaaggctgtgacagacttcacctcggaggtcacctatgacc

SEQ ID NO: 7609 - DNA, 60 bp, Homo sapiens
atgtctggctgtagctgttggtcacgtgaagatgacagacgatgagcttgtgtataacat

SEQ ID NO: 7610 - DNA, 60 bp, Homo sapiens
gagctcactgtggcagtggagcacatatgaaggttgatgtaaggcacttattactgtgtc

SEQ ID NO: 7611 - DNA, 60 bp, Homo sapiens
gctagacattgttagccctgaagatctggctaccccaataggaaggctgaaggtttccct

SEQ ID NO: 7612 - DNA, 60 bp, Homo sapiens
gggaagttatactagaataggcagcccaggcttccggttctaggtgcttcaggagccgtg

SEQ ID NO: 7613 - DNA, 60 bp, Homo sapiens
aaacgcagatttaggaccctgaggagtctttttcacccgtttcccgtcactcgctcaggc

SEQ ID NO: 7614 - DNA, 60 bp, Homo sapiens
ctaagagttacctggctacagaaagaagatgccagatgacacttaagacctacttgtgat

SEQ ID NO: 7615 - DNA, 60 bp, Homo sapiens
ccacgcgtccgggcggcttgtgcagcaatggccaagatcaaggctcgagatcttcgcggg

SEQ ID NO: 7616 - DNA, 60 bp, Homo sapiens
agaacaagaagaagaacagacgagaaaccgcaacgacgagggagagcacaagcagagaca

SEQ ID NO: 7617 - DNA, 60 bp, Homo sapiens
ttcccagggaagcatttccaggagatctcatggttcttgtgccctttccacctctcagtg

SEQ ID NO: 7618 - DNA, 60 bp, Homo sapiens
ttgggagaaaacaatctcacaaagacgagggggaggatcaccgaggaggggcaacaaaat

SEQ ID NO: 7619 - DNA, 60 bp, Homo sapiens
agagtggggtcacagggaactgcgactgggtcaacttgctcctttcacagcgcctcacaa

SEQ ID NO: 7620 - DNA, 60 bp, Homo sapiens
aggcaagagaaactggcatttcaagaggactccaggagtaccttgtctcggagagaactg

SEQ ID NO: 7621 - DNA, 60 bp, Homo sapiens
attgtctttggagcagcaggagactaggatgcctctcactcacatcgagttcctggctgg

SEQ ID NO: 7622 - DNA, 60 bp, Homo sapiens
atttataagctgacgaaggtagccagacttccggaggactgaccatctctcactgtcctc

SEQ ID NO: 7623 - DNA, 60 bp, Homo sapiens
ttagtcgtatagtcttccgtcacttagctgaccatgggcaactttctgggatccagcgag

SEQ ID NO: 7624 - DNA, 60 bp, Homo sapiens
cagagcatcaccagaatggtctttaatgagcatggaacctgagcaaagggaataggtggg

SEQ ID NO: 7625 - DNA, 60 bp, Homo sapiens
atttggctctttgggttgcaggagtcatggctcatacgctacatgaggcaccagctcatg

SEQ ID NO: 7626 - DNA, 60 bp, Homo sapiens
tctttaactcgttcttgaagcacagatttcagcgagcctttcagctattcagtgccagcg

SEQ ID NO: 7627 - DNA, 60 bp, Homo sapiens
ctcagaagtgtttgagagtgggacaaggcagggctagaggtcctgatccacaattacaga

SEQ ID NO: 7628 - DNA, 60 bp, Homo sapiens
acgggcaggaacagtgactggcttggcagtgaatatagctgccttgctctctgtcatgct

SEQ ID NO: 7629 - DNA, 60 bp, Homo sapiens
aagacggaggtcctctttccttgcctaacgcagccatggctcgtggtcccaagaagcatc

SEQ ID NO: 7630 - DNA, 60 bp, Homo sapiens
caacagctactggaacggaaacaggccatccaggagcttcgggccaatgtggaagaggag

SEQ ID NO: 7631 - DNA, 60 bp, Homo sapiens
aagacggaggcttgggtcatgttatctctctccaccaatgtgtaaggtgaaagtcctatt

SEQ ID NO: 7632 - DNA, 60 bp, Homo sapiens
cctgaagatgtactactgtttgccattccaatatgtgccccttacaccaccatgacaaac

SEQ ID NO: 7633 - DNA, 60 bp, Homo sapiens
tgagctttaagcgtgtggtggcatcttggtttgaggtggagtaattagttgtgaaaacca

SEQ ID NO: 7634 - DNA, 60 bp, Homo sapiens
ggggaggtaatgtaggccctttgaaagggaagcgggccaagggggaaacgacgtggaaaa

SEQ ID NO: 7635 - DNA, 60 bp, Homo sapiens
atcggcaatgtctacaaggagaaagccagagtcatcactgagtaggaggaaaacttccag

SEQ ID NO: 7636 - DNA, 60 bp, Homo sapiens
tattctcttcctgtggctcctggtgtactgcttgctgctcttcccacaactggatgttag

SEQ ID NO: 7637 - DNA, 60 bp, Homo sapiens
aagaacaagtaccgcccgacctgcgcatggcagccatccggaggcccagcggcatcctgc

SEQ ID NO: 7638 - DNA, 60 bp, Homo sapiens
tctctctctctctctctctctctggtgaacaggacccgtcgccatgggccgtgtgatccg

SEQ ID NO: 7639 - DNA, 60 bp, Homo sapiens; identical to SEQ ID NO: 4855

SEQ ID NO: 7640 - DNA, 60 bp, Homo sapiens
caggaactctttagaagagcaagacatcccagggtagagacagattaggcaggcacagga

SEQ ID NO: 7641 - DNA, 60 bp, Homo sapiens
tatgaagaagccctagccaaccagcgcaaggagatggcgaaaactcaccaccagaaagtc

SEQ ID NO: 7642 - DNA, 60 bp, Homo sapiens
atctaagaagatcgatcgccacatgtatcacagcctgtaccgccctccgcaccacgccct

SEQ ID NO: 7643 - DNA, 60 bp, Homo sapiens
tgaagccctggaggctgcccgaatttgtgccaataagtacctgcccgggcggccgctcga

SEQ ID NO: 7644 - DNA, 60 bp, Homo sapiens
tccgggttctcctgacgcttggttgttcccttgccctttggtgcatgtgggtttaacaac

SEQ ID NO: 7645 - DNA, 60 bp, Homo sapiens
gccggattcaccacaacatggcaaatctttttataaggaaaatggtgaaccctctgctct

SEQ ID NO: 7646 - DNA, 60 bp, Homo sapiens
tggtctaacagacccgcgagaacgaaggacgcttgcctttttccggtcggggaaggggga

SEQ ID NO: 7647 - DNA, 60 bp, Homo sapiens
agacaccgtctgaacaagatcagggcaagaggatcattgaacgagacagaaagcgaccat

SEQ ID NO: 7648 - DNA, 60 bp, Homo sapiens
aaagctacatccatattggaattttaccgggaacttggattgccgccgaaacagacagtt

SEQ ID NO: 7649 - DNA, 60 bp, Homo sapiens
cccaagggcttactgctgctaagtggctgaaggcatactaactctgcagtgtatactctt

SEQ ID NO: 7650 - DNA, 60 bp, Homo sapiens
ggtgtaattgtgcaaactcgatcactagctctgcgtgatgtggcagaagcaaagggaacc

SEQ ID NO: 7651 - DNA, 60 bp, Homo sapiens
ttcatggcataataggtgttaaaaaaaaaaataaaggacctctgggctaccaaaaaaaaa

SEQ ID NO: 7652 - DNA, 60 bp, Homo sapiens
caccaagagctcctgagccccctgcccccagagcaataaagtcagctggctttctcaaaa

SEQ ID NO: 7653 - DNA, 60 bp, Homo sapiens
ccgctgattttccagctgctgcccaataaacctgtctgccctttgggatcccagccaaaa

SEQ ID NO: 7654 - DNA, 60 bp, Homo sapiens
gagaaatctcgtctcgacccgcgcaggcgcagacggtggaagcggacgcaacatgccagt

SEQ ID NO: 7655 - DNA, 60 bp, Homo sapiens
gcagggaggttcagggacatgaggacgaagctagggcattttgagctagaaagcaagaat

SEQ ID NO: 7656 - DNA, 60 bp, Homo sapiens
cattaagttggactaaatgctcttccttcagaggattatccggggcatctactcaatgaa

SEQ ID NO: 7657 - DNA, 60 bp, Homo sapiens
ctgtcctctccagcagagcctccaatttgaacggggtacactgtccgctccacgtctgtg

SEQ ID NO: 7658 - DNA, 60 bp, Homo sapiens
ttctcctgcggaacctttgaacggggtactcgagcccacaggggaagagcagcggaaggg

SEQ ID NO: 7659 - DNA, 60 bp, Homo sapiens
gactcacatcgtgcgggaagtcgacaggccgggatcaagaacaatgcctccactgactat

SEQ ID NO: 7660 - DNA, 60 bp, Homo sapiens
aagagacaacgattcacgtctactttctaggatgacttccatgtgctccatctcgcgcgt

SEQ ID NO: 7661 - DNA, 60 bp, Homo sapiens
gtggtgtgttcttgactccgctgctcgccatgtcttctcacaagactttcaggattaagc

SEQ ID NO: 7662 - DNA, 60 bp, Homo sapiens
atacagctctttgagaaagatgcagtcataagtggtgcagagttgcagtctgcccattcc

SEQ ID NO: 7663 - DNA, 60 bp, Homo sapiens
cttccagtggctggtttctgagagagtgccatgattgctagccagcattccatattggga

SEQ ID NO: 7664 - DNA, 60 bp, Homo sapiens
gcattgggttcaaggaatccatcctgcaaaggcccttgtcattgccttcgctccatgttt

SEQ ID NO: 7665 - DNA, 60 bp, Homo sapiens
aaataaattcccgtttctatccaaaagagcaataaaaagttttcagtgaaatgtgcaaaa

SEQ ID NO: 7666 - DNA, 60 bp, Homo sapiens
cggccgcagccatgagtatgctcaggcttcagaagaggctcgcctctagtgtcctccgct

SEQ ID NO: 7667 - DNA, 60 bp, Homo sapiens
ctctgctctcctgaacctttaggcttgtctcggcccatttgaagaccaggaagttgatca

SEQ ID NO: 7668 - DNA, 60 bp, Homo sapiens
ctgccccaagaactctcattgaggagctccctagctgaacgggttaccctggtcattaat

SEQ ID NO: 7669 - DNA, 60 bp, Homo sapiens
agtgtttgggcaggatgagatgatcgacgtcatcggggtgaccaagggcaaaggctacaa

SEQ ID NO: 7670 - DNA, 60 bp, Homo sapiens
tcttgcggtgccgttgctggttctcacaccttttaggtctgttctcgtcttccgttccga

SEQ ID NO: 7671 - DNA, 60 bp, Homo sapiens
ggagacccctaagctgtattcccattgcccctagtcatccactccctaccatggtcgggg

SEQ ID NO: 7672 - DNA, 60 bp, Homo sapiens
gaggaaatcaaggacttcctgctcacagcccgacgaaaggatgccaaatctgtcaagatc

SEQ ID NO: 7673 - DNA, 60 bp, Homo sapiens
cagctgggtgctgagcattgagtcactgatctcttgtgatggggccaatgagtcaattga

SEQ ID NO: 7674 - DNA, 60 bp, Homo sapiens
ctccggctacagctcttgctgtcagatacgcatccaagaagtcgggtggtagctccaaaa

SEQ ID NO: 7675 - DNA, 60 bp, Homo sapiens
aggatgggtgagtcagatgattccattctccgattggccaaggccgatggcatcgtctca

SEQ ID NO: 7676 - DNA, 60 bp, Homo sapiens
gacagccaggccagatgacctgattccagcaaaaataaaactcagatttgggcaaaatga

SEQ ID NO: 7677 - DNA, 60 bp, Homo sapiens
tgaacgacaccgtaactatccgcactagaaagttcatgaccaaccgactacttcagagga

SEQ ID NO: 7678 - DNA, 60 bp, Homo sapiens
tcttccaagatgcccacgttcgcacagagaccccggatcgcggaagctcgcgtctcgaaa

SEQ ID NO: 7679 - DNA, 60 bp, Homo sapiens
tagcttatctgcacagcaacccagcctttccgtgctgccttgcctcttcaagatgctatt

SEQ ID NO: 7680 - DNA, 60 bp, Homo sapiens
ccaggggacttctatgatagacggacaactaagcctgagtttttgagacctggtcctcga

SEQ ID NO: 7681 - DNA, 60 bp, Homo sapiens
ctgagtacctattagggtatgccattaaaactgtcctcatgctgggactcattccacatg

SEQ ID NO: 7682 - DNA, 60 bp, Homo sapiens
agctgtatgctctcggcttggtgcccacgcgcggttcgctggagctctgcgacttcgtca

SEQ ID NO: 7683 - DNA, 60 bp, Homo sapiens
gtataattttccagatggtgatgttacttttcagtgtactcatatgtctcattttcatct

SEQ ID NO: 7684 - DNA, 60 bp, Homo sapiens
aagttgaagctgatagactgaagaatgcggattacataccctgaggctgcagaggatttt

SEQ ID NO: 7685 - DNA, 60 bp, Homo sapiens
cccttgggtcctaaattaagagttgtgttcatgtaggttcgtgtcgtcgttggctctgag

SEQ ID NO: 7686 - DNA, 60 bp, Homo sapiens
ctggtaatgaatcttgccctcagcctcagacatcggaacacctggctgctatagagatca

SEQ ID NO: 7687 - DNA, 60 bp, Homo sapiens
attcttcccagtagaaacgtaggaacaatttcgtgaacgcaatccggagtgcccaacatg

SEQ ID NO: 7688 - DNA, 60 bp, Homo sapiens
ccaaggacaaggccattaagaaattcgtcattcgaaacatagtggaggccgcagcagtca

SEQ ID NO: 7689 - DNA, 60 bp, Homo sapiens
gctccaaggtcattgcccgtcctctcactgtgatgatgcagcacggattatgcggggtgg

SEQ ID NO: 7690 - DNA, 60 bp, Homo sapiens
gcacgagccaccaaagtcccacttgtagctgagaaacctctgaaagaacccaaaacagtc

SEQ ID NO: 7691 - DNA, 60 bp, Homo sapiens
gcacccactttgactatgagtataccaccacattgcatttctgtttgcaccatgtcttcc

SEQ ID NO: 7692 - DNA, 60 bp, Homo sapiens
ggggttgccatggaagtaacaaagacacaattagaacagttaccagaacacatcaaggag

SEQ ID NO: 7693 - DNA, 60 bp, Homo sapiens
accaagttcgtgcgggacatgattcgggaggtgtgtggctttgccccgtacgagcggcgc

SEQ ID NO: 7694 - DNA, 60 bp, Homo sapiens
gactaccgccgcaaccacaagggtggtgtacccccacagcggactcggaagacatgtatt

SEQ ID NO: 7695 - DNA, 60 bp, Homo sapiens
tgactacatgaatgtccagtgccatgcctgcattggaggcaccaatgttggcgaggacat

SEQ ID NO: 7696 - DNA, 60 bp, Homo sapiens
tactgaatgagttactgtaagtacgtattgacagaattacactgtactttcctctaggtg

SEQ ID NO: 7697 - DNA, 60 bp, Homo sapiens
gcggacagagagtaacctcggagccaaggtgttcttcttcaaagcactgctattaactgg

SEQ ID NO: 7698 - DNA, 60 bp, Homo sapiens
gatacaagacaggcaagaacaagtggttcttccagaaactgcggttttagatgctttgtt

SEQ ID NO: 7699 - DNA, 60 bp, Homo sapiens
atagaacctgttgtgcaaccacggtttaaccggagattttgaggctagggtgtgtttctt

SEQ ID NO: 7700 - DNA, 60 bp, Homo sapiens
tgaacagacagaaggatgtaaaggatggaaaatacagccaggtcctagccaatggtctgg

SEQ ID NO: 7701 - DNA, 60 bp, Homo sapiens
tcgcgagatttgggtctcttcctaagccggggctcggcaaggagaaagccatgttcagtt

SEQ ID NO: 7702 - DNA, 60 bp, Homo sapiens
actgtctgccccaatgtctaacaaaggccggaggcgactcttcctgcgaggtctcagagc

SEQ ID NO: 7703 - DNA, 60 bp, Homo sapiens
actattccaagcccaaagaaaccttgagagcagaaaagagcatcactgccagctagccgc

SEQ ID NO: 7704 - DNA, 60 bp, Homo sapiens
gcagagacagccaccttacactcctaaaccagctgctgcagggtttgcggcaggacctca

SEQ ID NO: 7705 - DNA, 60 bp, Homo sapiens
aaacaagaagagggtcctgctgggagaaactggcaaggagaagctcccgcggtactacaa

SEQ ID NO: 7706 - DNA, 60 bp, Homo sapiens
ggctggagagtaatgagacagaaggaatgtcttatattgttctgactgctgacaattcct

SEQ ID NO: 7707 - DNA, 60 bp, Homo sapiens
tgaagaaaacgttgaagatccaggatgtcgggcttgtgccgatgggtggtgtgatgtctg

SEQ ID NO: 7708 - DNA, 60 bp, Homo sapiens
tttttgaggaagacgcggtcgtaagggctgaggatttttggtccgcacgctcctgctcct

SEQ ID NO: 7709 - DNA, 60 bp, Homo sapiens
gtccgacatcttgagacgaggctgcggtgtctgctgctattctccgagcttcgcaatgcc

SEQ ID NO: 7710 - DNA, 60 bp, Homo sapiens
ggccagccattgtaggtgatgggcattagcagtggtcaagagagactgtaatttggatgt

SEQ ID NO: 7711 - DNA, 60 bp, Homo sapiens
atctgcacaggcgctcgacagctccaagacgctgcggccaagcagaaagttgaacagaac

SEQ ID NO: 7712 - DNA, 60 bp, Homo sapiens
agacaaattcgcctaagataaggagttacgtagaagacagggcgtcctggtgtacgggct

SEQ ID NO: 7713 - DNA, 60 bp, Homo sapiens
aatttcccagagctgatggcatcgtccctgaaacgtggattgatggccccaaagacacat

SEQ ID NO: 7714 - DNA, 60 bp, Homo sapiens
tggaattaatcccttcttcccccgctctccgccagaccgccgccgcgccgccatcatgga

SEQ ID NO: 7715 - DNA, 60 bp, Homo sapiens
tctgaaggctggttggggaagttgttggagtcatacatgaaataaaactggtattagttg

SEQ ID NO: 7716 - DNA, 60 bp, Homo sapiens
ctaccgcatccgggattttacacggtgcatatctgtacgaaccactgacgatcgaccacg

SEQ ID NO: 7717 - DNA, 60 bp, Homo sapiens
ggatctcgttcagcagttcattgttttctataagcaggtttcgcgatatgggagcccaac

SEQ ID NO: 7718 - DNA, 60 bp, Homo sapiens
aaaagaacaccgaagtgcactggagaaaaattcttgaccctcccactcctgtgtgaagac

SEQ ID NO: 7719 - DNA, 60 bp, Homo sapiens
cacccttcgaggaaggtgtcacctggaccccttcattccacggaggaagctgaggccaca

SEQ ID NO: 7720 - DNA, 60 bp, Homo sapiens
aaagcaaagagaaaccagaagcacaaaagccaaagacgcgcgagaagggcagcaccagcc

SEQ ID NO: 7721 - DNA, 60 bp, Homo sapiens
attgtctactgtggcaggtgtttgagaagtcccccctgcgggtgaagaacttcgggatct

SEQ ID NO: 7722 - DNA, 60 bp, Homo sapiens
acttgccttgctctccttggtaacctagttcctgtaaccttgtgttttccagattggccc

SEQ ID NO: 7723 - DNA, 60 bp, Homo sapiens
tggctttcctccgcaagcggatgaacaccaacccttcccgaggcccctaccacttccggg

SEQ ID NO: 7724 - DNA, 60 bp, Homo sapiens
accaagatcataaatattaatggtgaaaacactgtagtaataaattttcatatgccaaaa

SEQ ID NO: 7725 - DNA, 60 bp, Homo sapiens
tccgtcatctctttctaccaccataccaatagctgtaggaaaatccaccttggggcagtc

SEQ ID NO: 7726 - DNA, 60 bp, Homo sapiens
caccttcagaagtcgacctgtggcaaatgtggctaccctgccaagcgcaagagaaagtat

SEQ ID NO: 7727 - DNA, 60 bp, Homo sapiens
cacttttgatgagattgtcaacattgctcgacagatgcggcaccgatccttagccagaga

SEQ ID NO: 7728 - DNA, 60 bp, Homo sapiens
cacaaggggaaatactggggcaagttctacatgcccaaacgtgtgtagtgagtgtaggag

SEQ ID NO: 7729 - DNA, 60 bp, Homo sapiens
gagcaatttctacgggagaaggttaaagtcaatggcaaaactggaaatctcgggaatgtt

SEQ ID NO: 7730 - DNA, 60 bp, Homo sapiens
gcttccaaagcaatcagcatctttctctctggatggcttttagaagtggacacagtttac

SEQ ID NO: 7731 - DNA, 60 bp, Homo sapiens
actggctgataacgaagcagctattgtccaggctgaaagcgaagaaactaaggagcgcct

SEQ ID NO: 7732 - DNA, 60 bp, Homo sapiens
cctggccggaagaaagactgaagacaccaaggggttaatcccagctgagataaagagaat

SEQ ID NO: 7733 - DNA, 60 bp, Homo sapiens
cgagagctgcgaagggccaggtgtcgggcgctgtttctcgttttcatcatatagacaaaa

SEQ ID NO: 7734 - DNA, 60 bp, Homo sapiens
tgtcagtgaattagcaggtcatcagactagagctgagtcttggggtactggcagagctgt

SEQ ID NO: 7735 - DNA, 60 bp, Homo sapiens; identical to SEQ ID NO: 4855

SEQ ID NO: 7736 - DNA, 60 bp, Homo sapiens
attcagggactgcctcggcacacgggaagttgccctacaggcgcgggagaaagcgcaggc

SEQ ID NO: 7737 - DNA, 60 bp, Homo sapiens
accaagatgctctgaaaagtacattactgtacatacagcctgaagttaacctttctatgt

SEQ ID NO: 7738 - DNA, 60 bp, Homo sapiens
cgagttcctcggacctgtataatctcccaaagccaaggtttggtaataatgtagtcccca

SEQ ID NO: 7739 - DNA, 60 bp, Homo sapiens
agtgtggaagagaaagtacaggacactgggtctgtccccaccccaattcccttacaagta

SEQ ID NO: 7740 - DNA, 60 bp, Homo sapiens
ggctttgctgttgttgggacatggcaatctagaccggtagcagcgcctcgctgacagctt

SEQ ID NO: 7741 - DNA, 60 bp, Homo sapiens
cggacgcgtgggcttttcacaaaatggcgccgaaagcgaagaaggaagctcctgcccctc

SEQ ID NO: 7742 - DNA, 60 bp, Homo sapiens
caagggtcgtgtgtttgaagtgagtcttgctgatttgcagaatgatgaagttgcatttag

SEQ ID NO: 7743 - DNA, 60 bp, Homo sapiens
cactataggcctcatggggccaagttcaagatcaaccccaagaacgggcagcgggagcgt

SEQ ID NO: 7744 - DNA, 60 bp, Homo sapiens
agcacaatcttctttgtagtttagcctttccggaaatcggcttagttgccaccatagcca

SEQ ID NO: 7745 - DNA, 60 bp, Homo sapiens
tgccagcaacttccgtcctcctagctaaaagcggaaaacagaggctcggaaccgctgcgt

SEQ ID NO: 7746 - DNA, 60 bp, Homo sapiens
gggatattttgggatgtcaaggggtggaggcagagcacaagtcacaccagaaactgcttt

SEQ ID NO: 7747 - DNA, 60 bp, Homo sapiens
agcgactacaaggacaagtacagccacctcatcggcaagggagcagccaaagacgcagcc

SEQ ID NO: 7748 - DNA, 60 bp, Homo sapiens
acctcaagttccagcctctgaccctggagcagcacaagggcttcatgatggagcccgatt

SEQ ID NO: 7749 - DNA, 60 bp, Homo sapiens
gtggagccagagccaactgaggacaaggatttggaagctgatgaagaggacactaggaaa

SEQ ID NO: 7750 - DNA, 60 bp, Homo sapiens
aggcacacactacgttctctagtccatgctggtgtcccagcctcctacctgctgattcct

SEQ ID NO: 7751 - DNA, 60 bp, Homo sapiens
gcggcacaagctgagactccacagcaatcgactcaatgtaacaaatgaacataaacacag

SEQ ID NO: 7752 - DNA, 60 bp, Homo sapiens
ttgccttacagactgtgatgtggaagatgggactatggatggcaatgatgaggggcactc

SEQ ID NO: 7753 - DNA, 60 bp, Homo sapiens
aaaatggctcaagtagaaaagcagtcccattcatattaagacagtgtacaaaactgtaaa

SEQ ID NO: 7754 - DNA, 60 bp, Homo sapiens
gtgggaatgcaccttcctacatctaccgcctgatgagtgaactctaccatcctgatgatc

SEQ ID NO: 7755 - DNA, 60 bp, Homo sapiens
aataacccactgttttacatttggtacatctgtgtctgctaatacagttagctttctcac

SEQ ID NO: 7756 - DNA, 60 bp, Homo sapiens
gcgggaggtgataaaggccatgaccaaggctcgcaattttgagagagttttgggaaagat

SEQ ID NO: 7757 - DNA, 60 bp, Homo sapiens
agttgctgtggacacttttaagaaacttagaacccatggaacccttgtttatcgccatgc

SEQ ID NO: 7758 - DNA, 60 bp, Homo sapiens
gaccaacagctggtcaggacgttacacgcggtgccttgtaagaggcaagaaacacttgcc

SEQ ID NO: 7759 - DNA, 60 bp, Homo sapiens
gtaccagtgaaggacaagaaacttctggaggtcaaactgggggagctgccaagctggatc

SEQ ID NO: 7760 - DNA, 60 bp, Homo sapiens
aggaaacccttccgagaaaacagcaacaagctgagctgctgtgacagaggggaacaagat

SEQ ID NO: 7761 - DNA, 60 bp, Homo sapiens
gcgtccgagttgacctctgaatgtatgtgatgagaggcagagctggatattgcatttcta

SEQ ID NO: 7762 - DNA, 60 bp, Homo sapiens
cagaagacagctcaggccaagttttgatcgttccatacagtaccttgtttatctgcttct

SEQ ID NO: 7763 - DNA, 60 bp, Homo sapiens
ttagttcagtcggctcttagagtagtaaccgccagaaaggagtcggaagaggtctcacga

SEQ ID NO: 7764 - DNA, 60 bp, Homo sapiens
ctggtgtctgcagtgggggatttaaggcacccgcttccacttctttcttgtttggagttt

SEQ ID NO: 7765 - DNA, 60 bp, Homo sapiens
ccgcacttacgggcgataatctgatggctttggcagaagcaacagttgctcttgcagaaa

SEQ ID NO: 7766 - DNA, 60 bp, Homo sapiens
acactggtttgacagtggtcagttacatgtccccacagttccaatgtgcctgttcactca

SEQ ID NO: 7767 - DNA, 60 bp, Homo sapiens
gaatacagggtcactcaagtagatgggcactccagtaaaaatgacatccacacactgttg

SEQ ID NO: 7768 - DNA, 60 bp, Homo sapiens
cgtgatatgagacagacagttgcggtgggtgtcatcaaagcagtggacaagaaaggcttc

SEQ ID NO: 7769 - DNA, 60 bp, Homo sapiens
gtcaagtcagaattcaggtctctgttgagcatccggcagcaacacaggagccctgggcgc

SEQ ID NO: 7770 - DNA, 60 bp, Homo sapiens
cctgcaaggaaagcaacatggaaaacagccccaactcacccatgagggatgaaaagcact

SEQ ID NO: 7771 - DNA, 60 bp, Homo sapiens
tgccaactactgaggaggaatacttgcactttggggagaaggctgactctgagaaccaag

SEQ ID NO: 7772 - DNA, 60 bp, Homo sapiens
tggctgagagaagggcccagcagattaccaggatatgcttcacatcaagtaggagttgca

SEQ ID NO: 7773 - DNA, 60 bp, Homo sapiens
caagagacgacaaagcgacaaagtgaccgacaaagacgatcctcccaatagacgaagcag

SEQ ID NO: 7774 - DNA, 60 bp, Homo sapiens
atacctgccacccaactcttaatcagggtggaagaacggtctcagaactgtgggaattcc

SEQ ID NO: 7775 - DNA, 60 bp, Homo sapiens
tttggatggcctttgaggtgggtctcccttgcccagaaatgctgactgtactgcgcttaa

SEQ ID NO: 7776 - DNA, 60 bp, Homo sapiens
acccacagctcgaggtctggtttccatgccctatcccttacgatgagcgccctattttgt

SEQ ID NO: 7777 - DNA, 60 bp, Homo sapiens
ttcaaattggccatttacgtttaggtaggtaaaggcctggttaattgataacaatgcatc

SEQ ID NO: 7778 - DNA, 60 bp, Homo sapiens
tccttgggacacgccttctgagcctcacatctccttctgttcaaaggcctcattggtata

SEQ ID NO: 7779 - DNA, 60 bp, Homo sapiens
ggaaaggattagtttgaccccttcttttgatggttaatgcatacatgcagttaaatccct

SEQ ID NO: 7780 - DNA, 60 bp, Homo sapiens
cgcacggttaccaccggaacacgggtatcgtgaaaactacccctaaagccaaaatgggaa

SEQ ID NO: 7781 - DNA, 60 bp, Homo sapiens
gttcatggcaaatgggaagaagtttggtgggatgaattagcggaagaactccaaagagct

SEQ ID NO: 7782 - DNA, 60 bp, Homo sapiens
agggccagcacagtcagctgagatgtccctgtaaatcatgtttttgataaaagctctgtg

SEQ ID NO: 7783 - DNA, 60 bp, Homo sapiens
atgatggagacacagtgacagatttcatggcccaagagcgagaaagaggcattactattc

SEQ ID NO: 7784 - DNA, 60 bp, Homo sapiens
tcaagggctggaaggtggagcgtaaggagggcaacgcaagcggcgtgtccctgctggagg

SEQ ID NO: 7785 - DNA, 60 bp, Homo sapiens
gctggaggctaggatttcttggacttttgcacatggaagttttcaaccagcgactggagc

SEQ ID NO: 7786 - DNA, 60 bp, Homo sapiens
gattctagctgagggaggtggggctaagttcaagaagtacgaggagattgacaatgcccc

SEQ ID NO: 7787 - DNA, 60 bp, Homo sapiens
gcttttgaggactatgtgcagtccatggatgtggctgctttcaacaagatctaaaatcca

SEQ ID NO: 7788 - DNA, 60 bp, Homo sapiens
acaagtatgctggtggtagatgcaccttatcccttctcttactccaatcctgtaagtcct

SEQ ID NO: 7789 - DNA, 60 bp, Homo sapiens
cctgcagcaaatgaggtctaaactaaatcataatgcagcgtttatgcagatacccatggg

SEQ ID NO: 7790 - DNA, 60 bp, Homo sapiens
accagcggagaccacggtgagctcgtcgtccggattgccagtctggaagtggagaaccag

SEQ ID NO: 7791 - DNA, 60 bp, Homo sapiens
ccagcaggtggcaccatactcgcttggtcgttccgctggagaattctggcccttccgccg

SEQ ID NO: 7792 - DNA, 60 bp, Homo sapiens
tgactttcaagcgttatgtcttcgacacccacaagcgcatggttcagtctccctgagtgt

SEQ ID NO: 7793 - DNA, 60 bp, Homo sapiens
aagtgaattccaaggcagaagtcaggttccatttggcaactgccgagtggatcgcggagc

SEQ ID NO: 7794 - DNA, 60 bp, Homo sapiens
gtgtttcctaaactgttacagtacatttctcagcatccttgtgacagaaagctgcaagaa

SEQ ID NO: 7795 - DNA, 60 bp, Homo sapiens
gaggtgacagctggaaggactactggaggtgacatctgccaacaatttacccgagaaata

SEQ ID NO: 7796 - DNA, 60 bp, Homo sapiens
catcatggaactgaccatgtagccactgaccggaagctggagccatcctacgccttccct

SEQ ID NO: 7797 - DNA, 60 bp, Homo sapiens
agctccagggataaccgaaagacagttagagctcgaagtcgaaccccaagtcgtcggagt

SEQ ID NO: 7798 - DNA, 60 bp, Homo sapiens
agatgggagcagttgcagtgttgagggcggaagaggagtgcgtcttgttttgggaacttg

SEQ ID NO: 7799 - DNA, 60 bp, Homo sapiens
ggcagttcccaagtctggggaggggtataggtttgaaaggctgtttgaaagaggaatgtt

SEQ ID NO: 7800 - DNA, 60 bp, Homo sapiens
aacgtcatatcatcgttgcatgcgaaggctctccgtacgttccggttcatttcgacgcgt

SEQ ID NO: 7801 - DNA, 60 bp, Homo sapiens
actagctctctagtacctccatatctcggaatgatactgaccgcattgctgcaaggcctg

SEQ ID NO: 7802 - DNA, 60 bp, Homo sapiens
tgaagaacatcctgatgagcaaagtcaagcctccgaagtacctgttggatagctgtgccc

SEQ ID NO: 7803 - DNA, 60 bp, Homo sapiens
gtgcactttgacggttagatgccaccatgtagggattatcgcgagtggttgaccttacac

SEQ ID NO: 7804 - DNA, 60 bp, Homo sapiens
ggggccagtagcaggcggtcagaacgctacggggtccaaacggccagggggaaaggggga

SEQ ID NO: 7805 - DNA, 60 bp, Homo sapiens
tctatgaatctttgtgagcaattatgctcccaaatctaagcaagtaaaatacacattttg

SEQ ID NO: 7806 - DNA, 60 bp, Homo sapiens
gaaggtgggggttatggaggagataactcaaaacttcttcaattttgcctagtgcctgcg

SEQ ID NO: 7807 - DNA, 60 bp, Homo sapiens
gcctgggagacctgaagttgctctttgagtacctgaccctatttggcattgatgacaaaa

SEQ ID NO: 7808 - DNA, 60 bp, Homo sapiens
gaccaactgctcattctgaaagccaaacataaaagctaggagaagtggcatctgaacatt

SEQ ID NO: 7809 - DNA, 60 bp, Homo sapiens
cgattcttaacgtggattctgaataggtatcacatccgagacgtgtgcttataccctcga

SEQ ID NO: 7810 - DNA, 60 bp, Homo sapiens
gatttgacatctctctagcccatccattgcttacagtagaagagtggggctgtatgcttg

SEQ ID NO: 7811 - DNA, 60 bp, Homo sapiens
gggcactaaactgacagttccttccttcatggagcctgcttcatgtggaggaaacaggaa

SEQ ID NO: 7812 - DNA, 60 bp, Homo sapiens
tccacgtcagtgccatcggtctagaaccactaaccccgcattgctgttgatcgtcacgct

SEQ ID NO: 7813 - DNA, 60 bp, Homo sapiens
gctgcatatccagatttggaaaatcctcctctgctagtgacaccaagtcagcaggccaag

SEQ ID NO: 7814 - DNA, 60 bp, Homo sapiens
ggttttgtcctctttgcttccccaaggctaaagtcagatctagagttctgccacaggtct

SEQ ID NO: 7815 - DNA, 60 bp, Homo sapiens
aggatgagctcccgcaagaagaggtacttatagcaaggggactctcaaatccattacctc

SEQ ID NO: 7816 - DNA, 60 bp, Homo sapiens
taccttgcatggtgtggtggacgagctggtgcggttccggcagaaggtccggcagtttgc

SEQ ID NO: 7817 - DNA, 60 bp, Homo sapiens
caagctcaatcagtggtgcaatgtggtgcgttgggaattcaagcatcctcagcctttcct

SEQ ID NO: 7818 - DNA, 60 bp, Homo sapiens
tccacggtgcacacgcactcctcggtcaagagcgtgcctgaaaaccttctcaagtgcttt

SEQ ID NO: 7819 - DNA, 60 bp, Homo sapiens
aaggaagacccaggaaaggtgtgagctggaagcactgaacctacctcatcctcctggagg

SEQ ID NO: 7820 - DNA, 60 bp, Homo sapiens
ccctgatgccttggaatatgtgccaggtcaggatattttggacatctggtttgatagcgg

SEQ ID NO: 7821 - DNA, 60 bp, Homo sapiens
cggtctggctgttgggaagatggccaggaatggactcataccattggcacattaggctaa

SEQ ID NO: 7822 - DNA, 60 bp, Homo sapiens
ataactggaagctggacgaggcccggaaaaacctactgcgaacccacaccacatcagcca

SEQ ID NO: 7823 - DNA, 60 bp, Homo sapiens
acaagaccagccactgctaccgcatcacgtaccgccacatggaacggactctgtcccaga

SEQ ID NO: 7824 - DNA, 60 bp, Homo sapiens
ggtgtgtgacaggcagtctgattcctctcattctccatagtctgtttcctggaaagtcga

SEQ ID NO: 7825 - DNA, 60 bp, Homo sapiens
agaagatggaaaaactttatacgcaaacacaataaatggatctggacttgcaattgatag

SEQ ID NO: 7826 - DNA, 60 bp, Homo sapiens
ggtaactgaagatcaaagtaaagcaacagaggaatgtacatctacctaataactttctaa

SEQ ID NO: 7827 - DNA, 60 bp, Homo sapiens
atctttacagttttacagcaaatatatgcagggtggatggagacggggtaggtctgcagc

SEQ ID NO: 7828 - DNA, 60 bp, Homo sapiens
cagctcccagagtgacgattctaccaggcatatcacagatacactcgccctcaagcctat

SEQ ID NO: 7829 - DNA, 60 bp, Homo sapiens
catgttaccttcaaccaagtgaaaggcattttcggcttcactgacagcgactgcattggg

SEQ ID NO: 7830 - DNA, 60 bp, Homo sapiens
cccgagggtatcgaatgataacagaaggcggagtcagcataaatcaccaacaagtaacaa

SEQ ID NO: 7831 - DNA, 60 bp, Homo sapiens; identical to SEQ ID NO: 4855

SEQ ID NO: 7832 - DNA, 60 bp, Homo sapiens
atttgtcagctgtcagggtgcagtgggacgtcagagactatgtggtccatcgccttcatt

SEQ ID NO: 7833 - DNA, 60 bp, Homo sapiens
tcaagaagcgttctgtggaagacctgaaggagcggtactaccacatctgtgctaagcttg

SEQ ID NO: 7834 - DNA, 60 bp, Homo sapiens
ggagtgtcccctgacaagatcagtctccagcaagatgaggatgtattggatacctggttc

SEQ ID NO: 7835 - DNA, 60 bp, Homo sapiens
ttcgcagatccccgagatgccggagttcctggaagacccctcggtcctgacaaaagacaa

SEQ ID NO: 7836 - DNA, 60 bp, Homo sapiens
cctggtaggagagcctgtgctgggtgccaagatggagacagcggctaccttgctacggcg

SEQ ID NO: 7837 - DNA, 60 bp, Homo sapiens
ttagttctccgagtgctgccatcacagtccagagagtcctagaggaggacgagagcataa

SEQ ID NO: 7838 - DNA, 60 bp, Homo sapiens
gaggggatcagggtccaagaccattgaccagatccataaggaggctgagatggaagacat

SEQ ID NO: 7839 - DNA, 60 bp, Homo sapiens
gaacaatcacgacaggaaacatgcagttggggatgatgctcagttcgagatggacatctg

SEQ ID NO: 7840 - DNA, 60 bp, Homo sapiens
gttaagtaaggaattgccagcaaggattcgtttcctgctgcaggataccgtagagttgcg

SEQ ID NO: 7841 - DNA, 60 bp, Homo sapiens
tcctcttcgtgaacaccagcagatacctccttgtgcctccactgatgcaggagctgccac

SEQ ID NO: 7842 - DNA, 60 bp, Homo sapiens
acagaagctggaactcatggcaagggttcaatcccttcagctcaggcggaccatttagat

SEQ ID NO: 7843 - DNA, 60 bp, Homo sapiens
tctgcgctatgtggacattgccatcccatgcaacaacaagggagctcactcagtgggttt

SEQ ID NO: 7844 - DNA, 60 bp, Homo sapiens
acacgactacgagaggaagcgcacacaaacgcgtacgacaacaaaacagcgagaacagag

SEQ ID NO: 7845 - DNA, 60 bp, Homo sapiens
gaggctttttcgacgtgaaactgtcacagatggcaaaataaatgtcacggtacttagttt

SEQ ID NO: 7846 - DNA, 60 bp, Homo sapiens
ttgatgaagatgcgctacttggaagtatcagagccacaggacattgagtgttgtggggcc

SEQ ID NO: 7847 - DNA, 60 bp, Homo sapiens
tacacttcatggaccagttgctcgataccatccggagcctgaccattgggtgctccagtt

SEQ ID NO: 7848 - DNA, 60 bp, Homo sapiens
aggaatgacttccagctgattggcatccaggatgggtacctatcactgctccaggacagc

SEQ ID NO: 7849 - DNA, 60 bp, Homo sapiens
ttggctacgaccacctcatcctcaacgtcgagtgggccaagccgtccaccaactaagcca

SEQ ID NO: 7850 - DNA, 60 bp, Homo sapiens
agcaaaggacacattcggcctggcccaagccctgacgatttcagtgttgttttctgcacg

SEQ ID NO: 7851 - DNA, 60 bp, Homo sapiens
gccacaaaggtgtgttgagcccattcatttgctgattatacttctgagctgctaccacat

SEQ ID NO: 7852 - DNA, 60 bp, Homo sapiens
tcagaagacctagggatgaaggtggctggagaagaggaccagctgaggaatcttcaagct

SEQ ID NO: 7853 - DNA, 60 bp, Homo sapiens
caggcctagagaggaagtcgttcaaaaggagcaagaatgagcctgcggttgggagggaat

SEQ ID NO: 7854 - DNA, 60 bp, Homo sapiens
cggtaccttcttcatggtttggagtgtgtggtagcaatgcatcaagctcagcttatctcc

SEQ ID NO: 7855 - DNA, 60 bp, Homo sapiens
gctggtcttggccggcctcgaggctcggcccttatggcggtccgcggccgcataataata

SEQ ID NO: 7856 - DNA, 60 bp, Homo sapiens
tttagcgattgtgtaccgagtgggattcacgagaccagctacactcagaccaacagatgg

SEQ ID NO: 7857 - DNA, 60 bp, Homo sapiens
ttgtgaccgcgtccaaggacaacacagccaagctttttgactccacaactcttgaacatc

SEQ ID NO: 7858 - DNA, 60 bp, Homo sapiens
aaaacaggactcctgattcccttgctcaggaattgggagtgcgggtcgcttctaagggcg

SEQ ID NO: 7859 - DNA, 60 bp, Homo sapiens
cttggtgtcgcctggtagcaatttgagtgaaccctggtttagttatagtggctttatccc

SEQ ID NO: 7860 - DNA, 60 bp, Homo sapiens
ttctctgagaggaagtactgaaagatgaattgacatacaacgtatgtttccagtgaagtc

SEQ ID NO: 7861 - DNA, 60 bp, Homo sapiens
gaggacacagaacggctgccattctacatggaggctctcctgactttgtaggaaatggta

SEQ ID NO: 7862 - DNA, 60 bp, Homo sapiens
ggccttctaagcagattgggaaggaggtattttctggttttcgctttcctccgacttaat

SEQ ID NO: 7863 - DNA, 60 bp, Homo sapiens
gagccacactctatatggctgaggaaggagctagggaaagagatagacacaatggggtga

SEQ ID NO: 7864 - DNA, 60 bp, Homo sapiens
caaggaactgaagttgttcaaggagtgcttttgggtctggttgtagaagatcggcttgaa

SEQ ID NO: 7865 - DNA, 60 bp, Homo sapiens
gtgaggactgaccacagattccctggatagtgtagtggtagatttctccacaggatagcg

SEQ ID NO: 7866 - DNA, 60 bp, Homo sapiens
ttgagtagagacaaacagcgtgctgctaagtagagtggctggttcccaaagcagagaacc

SEQ ID NO: 7867 - DNA, 60 bp, Homo sapiens
caccatagtatgcattgttatacatactgtgtacctaattatgtatagcagtgtagtctc

SEQ ID NO: 7868 - DNA, 60 bp, Homo sapiens
ggggtgaaaaccgtagcctttgcattctctatagcctctgcagagagatactaagcagca

SEQ ID NO: 7869 - DNA, 60 bp, Homo sapiens
tctccgtgtgcttagagcagtttcgttttctcagttggatgccctgtgtctctgtgagtg

SEQ ID NO: 7870 - DNA, 60 bp, Homo sapiens
ccaggacaggtggtattagctccactgtcttaacatagtacgtggcacgttatgcctttc

SEQ ID NO: 7871 - DNA, 60 bp, Homo sapiens
gtccacagacatctttcaaccaccttttaggctgcatatggattgccaagtcagcatatg

SEQ ID NO: 7872 - DNA, 60 bp, Homo sapiens
aatacgcagtgcctgtgctcaggacaaagaagaagtttctcgagtggatgcaaaaccctg

SEQ ID NO: 7873 - DNA, 60 bp, Homo sapiens
ccgtggtgtcatcgctccagttggcgagagtttgcgctacgctgagtacttgcagccctc

SEQ ID NO: 7874 - DNA, 60 bp, Homo sapiens
tcttctgaagagctgaaagctgcctaccggaggctctgtatgctctaccatccagacaag

SEQ ID NO: 7875 - DNA, 60 bp, Homo sapiens
tgtgttcttttgttaatgtgtagagttctcctttctcgaaattgccagtgtgtacttggc

SEQ ID NO: 7876 - DNA, 60 bp, Homo sapiens
ggtgctgctgaaaacgtttgagggaggtaatgacatgatcgaagctatacttgagaaagg

SEQ ID NO: 7877 - DNA, 60 bp, Homo sapiens
gtgacaagggcagagatgatccaggacaacaggaaacagacagcagtgaagatgaggata

SEQ ID NO: 7878 - DNA, 60 bp, Homo sapiens
cttcggttgcagattgaagcatttcaggttgtgcattttgtgtgatgcatgtagtagcct

SEQ ID NO: 7879 - DNA, 60 bp, Homo sapiens
accggcagtcctgccagctgttttggctagccgaggaaggtggagatgaagacgctggtg

SEQ ID NO: 7880 - DNA, 60 bp, Homo sapiens
ctgcttctctccagctctcaatctgctgcattttcctctagtgcttccggatcctcttca

SEQ ID NO: 7881 - DNA, 60 bp, Homo sapiens
gacaagtcaggattgaaggatagttctgtcgaagaactcaagaaaagatacggtggttga

SEQ ID NO: 7882 - DNA, 60 bp, Homo sapiens
gagctggtggcgccgcgataggagagccgatggccaagtggggtgagggagacccacgct

SEQ ID NO: 7883 - DNA, 60 bp, Homo sapiens
gggagtcccaggcagtgctgtgctgctgtttgaggtggagctggtgtcccgggaggatgg

SEQ ID NO: 7884 - DNA, 60 bp, Homo sapiens
ggctcgtggcaagcccatggagctcatcattggcaagaagttcaagctgcctgtgtggga

SEQ ID NO: 7885 - DNA, 60 bp, Homo sapiens
tgcatggccagcatttggtccagcagctggtcctaagaacagtgaggggctacttagaga

SEQ ID NO: 7886 - DNA, 60 bp, Homo sapiens
caataaaacgggaaagtttgccccttacctgagccagatgagcaatcttcgtgaactctt

SEQ ID NO: 7887 - DNA, 60 bp, Homo sapiens
agaggatcttgttctgtactgactactgccctgactgtggcaacaggtcattttatgacc

SEQ ID NO: 7888 - DNA, 60 bp, Homo sapiens
agaggatcttgttctgtactgacaactgccctgaccatggcgacaggtcattttatgacc

SEQ ID NO: 7889 - DNA, 60 bp, Homo sapiens
ccagaccgtgtttgatcagcctcaggaatacttcatggagttgacattcaatcaagctgc

SEQ ID NO: 7890 - DNA, 60 bp, Homo sapiens
gacatggacaatgacaggcagctctctaaagccgagataaacctctacttgcaaagggaa

SEQ ID NO: 7891 - DNA, 60 bp, Homo sapiens
atcattggagagctgctgaaacaggcggatctctacatttctgaaggccttcatcctaga

SEQ ID NO: 7892 - DNA, 60 bp, Homo sapiens
ccctaaggaaaggaattggcatgtgtatgttccagttcaactcatggagatggcagctgt

SEQ ID NO: 7893 - DNA, 60 bp, Homo sapiens
ctggaggcgtctatgagacaacacagcacttcattgacatcaaagagcacctgcacatag

SEQ ID NO: 7894 - DNA, 60 bp, Homo sapiens
gaaaagaacaggattcaagtccagagttttcatcttcagcctgtgatctgtccagggacc

SEQ ID NO: 7895 - DNA, 60 bp, Homo sapiens
agaacttggccaaaagcaggtgattccaggtctggagcagagtcttctcgacatgtgtgt

SEQ ID NO: 7896 - DNA, 60 bp, Homo sapiens
ctgacttgacaggttaaaagaccctgtcctagatgcccaggaatcaggtagtcacacatt

SEQ ID NO: 7897 - DNA, 60 bp, Homo sapiens
ggcattgctgcgtcacagcgcgccggctcaccacccttcgttgcacgcacgcacgtcatt

SEQ ID NO: 7898 - DNA, 60 bp, Homo sapiens
aaactcctacccgagaggaaggaagtggaagagactgatgagatggaccaagtagaactg

SEQ ID NO: 7899 - DNA, 60 bp, Homo sapiens
tctcttctccttcaagtccgtggttctggtggagcccgactgagcactaaggatcctctg

SEQ ID NO: 7900 - DNA, 60 bp, Homo sapiens
ttaaccggctggaacacagaggaagggcaggagaacgaagcaagtcacccggcaaacaca

SEQ ID NO: 7901 - DNA, 60 bp, Homo sapiens
tcaacagcagatgctagctcaacatcagccgtctcaacaacaggcatcacctgaatatct

SEQ ID NO: 7902 - DNA, 60 bp, Homo sapiens
cactctgtgctcccagccttgaggctgcagtaggactctgatctcacctgccagaagaga

SEQ ID NO: 7903 - DNA, 60 bp, Homo sapiens
ccagatttgctttcacagtgtggctgtggattatacaatagccaggaagaactcaactgg

SEQ ID NO: 7904 - DNA, 60 bp, Homo sapiens
gtaactggctctgagtctctgcttgaggaccagaggaaaatggttgttggacctgacttg

SEQ ID NO: 7905 - DNA, 60 bp, Homo sapiens
aagggatgtttatgaccaaggcggagagcaggcaattaaagaaggaggctcaggcagccc

SEQ ID NO: 7906 - DNA, 60 bp, Homo sapiens
aggaagctgcagatcggggtcaagaagcgggtggaccactgtcccatcaaatcgcgcaaa

SEQ ID NO: 7907 - DNA, 60 bp, Homo sapiens
ctacactagagcagagtacgagtctgaggcggagggagtaatggcaggacaagcgtttag

SEQ ID NO: 7908 - DNA, 60 bp, Homo sapiens
ttctctcggaagtagaacgcaacctccaggatgccatgcaagtgtgtcgcaatgttctcc

SEQ ID NO: 7909 - DNA, 60 bp, Homo sapiens
tggatcaggacgtgccataactactttattgaagaccttggattgccagtgtggggatca

SEQ ID NO: 7910 - DNA, 60 bp, Homo sapiens
ttatgaactgttgggggtgcatcctggtgccagcactgaggaagttaaacgagctttctt

SEQ ID NO: 7911 - DNA, 60 bp, Homo sapiens
tttagtacactttacatctgactactattgtgtagcctgagccattctgaatttctacac

SEQ ID NO: 7912 - DNA, 60 bp, Homo sapiens
gcggactctgtcaacaacaggagaagctctatacgaaattcttggtctgcataagggagc

SEQ ID NO: 7913 - DNA, 60 bp, Homo sapiens
tgttcaaggtggccttcatggacaagaagacagtggtactgcgcgagttggtacacacgt

SEQ ID NO: 7914 - DNA, 60 bp, Homo sapiens
atatgcacaggcatgagctgtcctgcgtctgacagaagcctgaagagtcatgtgtggttg

SEQ ID NO: 7915 - DNA, 60 bp, Homo sapiens
cagttaacagaggaagcgagagaaggtatcaaacagctactgaaacaagggtcagtgcag

SEQ ID NO: 7916 - DNA, 60 bp, Homo sapiens
aaacagggccagtctgtactcatttccagagccagaagcagctcagcccatgacaaagaa

SEQ ID NO: 7917 - DNA, 60 bp, Homo sapiens
ctcctggctttgcctctgcatgacttcctctgccagctctcctgatactcgggatcctca

SEQ ID NO: 7918 - DNA, 60 bp, Homo sapiens
gtgtcatatcaggaagcccagtgccagaggacagacaggttcaaaactggcttttcctct

SEQ ID NO: 7919 - DNA, 60 bp, Homo sapiens
gtaggaaatggtttccatctgtactttggtcctctgatttcacatattgcaacctagtac

SEQ ID NO: 7920 - DNA, 60 bp, Homo sapiens
ccaagcctcggttacctaaagcatctgaatctcagctacgtgctgctgttccgcatcagt

SEQ ID NO: 7921 - DNA, 60 bp, Homo sapiens
caatacatcaagcaagagaagcttgtatgagattacctaagcaaattgaagaacgtaatg

SEQ ID NO: 7922 - DNA, 60 bp, Homo sapiens
tgtgagaacatggacaatgccgcagacttctgccagctgtctggcatgcacctgctggtg

SEQ ID NO: 7923 - DNA, 60 bp, Homo sapiens
gatctgaagaggacaatgatggcctgtggaggctcaatccagaccagtgtgaatgctctg

SEQ ID NO: 7924 - DNA, 60 bp, Homo sapiens
acatcagtgattcttgagagagacagggtttgtgtgcatttggggaacacacagatgcac

SEQ ID NO: 7925 - DNA, 60 bp, Homo sapiens
ccttctggaaatgatccacagtatccaaaatagccaggacatgaggcagatcagtgacgg

SEQ ID NO: 7926 - DNA, 60 bp, Homo sapiens
gttctctgtaatacccaaaacagtgctgtatttactccaagtattcagaagtgcttgttg

SEQ ID NO: 7927 - DNA, 60 bp, Homo sapiens; identical to SEQ ID NO: 4855

SEQ ID NO: 7928 - DNA, 60 bp, Homo sapiens
ttcctttggtggtcttcaagtggtgatcaatgggctgaacagcacagagcccctcgtgaa

SEQ ID NO: 7929 - DNA, 60 bp, Homo sapiens
agagtgccattcgggttatccatgccttgtctgaaaatgagctgtgtgttcgagccatgg

SEQ ID NO: 7930 - DNA, 60 bp, Homo sapiens
ccatgactcacaacctgaaccgaatactgatcgataatggataccaaccagaatggatcc

SEQ ID NO: 7931 - DNA, 60 bp, Homo sapiens
cgaggaggtcttccgggaattctttgggagtggagacccttttgcagagctctttgatga

SEQ ID NO: 7932 - DNA, 60 bp, Homo sapiens
tcaaggaaggtaaatacaagcaagctttactacagtataagaagatcgtgtcttggctgg

SEQ ID NO: 7933 - DNA, 60 bp, Homo sapiens
tgaagatcatggggaagatcttagaccaaggggaggacttcccagcatcagagatgacac

SEQ ID NO: 7934 - DNA, 60 bp, Homo sapiens
ctagtgctttacctttattaatgaactgtgacaggaagcccaaggcagtgttcctcacca

SEQ ID NO: 7935 - DNA, 60 bp, Homo sapiens
aaccttcgagatattgatgaagtctcatctctacttcgtacctccataatgagtaaacaa

SEQ ID NO: 7936 - DNA, 60 bp, Homo sapiens
aactacacctgctccaggaccaatcagtgaaacctgctcggaattaaaggcttcctctgg

SEQ ID NO: 7937 - DNA, 60 bp, Homo sapiens
cccgacggaaagagcattcgaaacgaagacaaaatattgaccatcgaagtgaagaagggg

SEQ ID NO: 7938 - DNA, 60 bp, Homo sapiens
gtttacttggtcccagcttttgagagataaatcccttatgaatccctggtctaaaatact

SEQ ID NO: 7939 - DNA, 60 bp, Homo sapiens
cgctgtgcctttctacagtagaactggggtaaaggaaatggttttattgcccatagtcat

SEQ ID NO: 7940 - DNA, 60 bp, Homo sapiens
gcagaagagacaccgtgtatttttcgtttatgtaggtggagaatcacctttgaaagagaa

SEQ ID NO: 7941 - DNA, 60 bp, Homo sapiens
tattttgtactgatgtagccctgaggtagttcatgaaaatgctgtgcactcattccatgg

SEQ ID NO: 7942 - DNA, 60 bp, Homo sapiens
actcaggactgtcaaagggctcagtgctgtcagagagggactacgagagcctcgtcatga

SEQ ID NO: 7943 - DNA, 60 bp, Homo sapiens
cattgtgcaatatgctgtgggacatgggatgtcgtctcagtcttcaaggaaatggaaggg

SEQ ID NO: 7944 - DNA, 60 bp, Homo sapiens
ctggtgccttgttagaagaagcggagcaattgctagaccgaggcattcacccaatcagaa

SEQ ID NO: 7945 - DNA, 60 bp, Homo sapiens
aaaaacaagctaaaagctgaatattctgggagatgatgttcaccttcattttccaaaatg

SEQ ID NO: 7946 - DNA, 60 bp, Homo sapiens
acctgtaggagtttgctgagcttgaagagtgaaaactgttgtgaatgagcctgatcataa

SEQ ID NO: 7947 - DNA, 60 bp, Homo sapiens
tttgccaccctgcctgggacatcgctggaacctgcaccatgccaggatcatgggaccagg

SEQ ID NO: 7948 - DNA, 60 bp, Homo sapiens
agtcaacaagcgcgcgccacagatggactggaacaggaagcgtgaaatcttcagcaactt

SEQ ID NO: 7949 - DNA, 60 bp, Homo sapiens
gaggaagccagtgaaggtggaggaaatgatcgtgtgcggaacctgcaaagtgaggtggag

SEQ ID NO: 7950 - DNA, 60 bp, Homo sapiens
aaggatgaaggtgtggctgtgggtctggctaggattgaagccatctggaccttttctaga

SEQ ID NO: 7951 - DNA, 60 bp, Homo sapiens
aagtccttgtccctggtcctgtggtccctccaccttcaaaccagcaatggtgcattgagc

SEQ ID NO: 7952 - DNA, 60 bp, Homo sapiens
cttgtcgagataagaccacgggtgataactcgtggcgctatatgatggtactttgtgtga

SEQ ID NO: 7953 - DNA, 60 bp, Homo sapiens
tctcctaagcttttctctcatagcgtagacctagggaagggatgggaagattgcccagtc

SEQ ID NO: 7954 - DNA, 60 bp, Homo sapiens
aacatcatccaggctgagatgcgatgctgtggtgtcactgactacacagactggtaccca

SEQ ID NO: 7955 - DNA, 60 bp, Homo sapiens
gggactgttttactgcctgtgtattttctgctagagagttagcaatgttagagctagaac

SEQ ID NO: 7956 - DNA, 60 bp, Homo sapiens
gggttcctgcaatgaagtctctgaagtgaaactgcttgtttcctagcacacacttttggt

SEQ ID NO: 7957 - DNA, 60 bp, Homo sapiens
acgtgttcctcatgatccggcgccacaagaccaccatcttcacggacgccaaggagtcca

SEQ ID NO: 7958 - DNA, 60 bp, Homo sapiens
cccgggagcctcaggtggtgactatcctgttgagaagcaaaagatactttgcaagtaaaa

SEQ ID NO: 7959 - DNA, 60 bp, Homo sapiens
cgatacaaatgcccagatatgcatcgtcctttcaaggtgccactgttcatcccagctttg

SEQ ID NO: 7960 - DNA, 60 bp, Homo sapiens
cacgatcatctcagagcatttgtaaggcaggagaaagtacagatgccctcagcttgcctc

SEQ ID NO: 7961 - DNA, 60 bp, Homo sapiens
ccagatggttttccaccaagccacaagagacgtcataatcaaggaaacacaggctccagc

SEQ ID NO: 7962 - DNA, 60 bp, Homo sapiens
ttactcccagcagtgccatcagcagcatagcaagagagaaccacgaaccagaaagattgg

SEQ ID NO: 7963 - DNA, 60 bp, Homo sapiens
ggagcccaagatgcctctgctgctccttggagagacagagcctcttaagttggagcggga

SEQ ID NO: 7964 - DNA, 60 bp, Homo sapiens
cacctaccatggacaggagttcatccgagtgggctactacgtcaacaacgagtacctcaa

SEQ ID NO: 7965 - DNA, 60 bp, Homo sapiens
attgtagggtctcattttctcaccgatattagtcctacaccaattgaagtgaaattttgc

SEQ ID NO: 7966 - DNA, 60 bp, Homo sapiens
aggggtcgctttctcctggattgcaaatgcctcttcagtttggactcagctctgacagcc

SEQ ID NO: 7967 - DNA, 60 bp, Homo sapiens
cctctgacactcatgcagaatgagatcaggcatatttgtggttgacatactctagatagc

SEQ ID NO: 7968 - DNA, 60 bp, Homo sapiens
cggatgtttcacgacgacagcatgaagtctttcttccgtagactgagtttcactcccgac

SEQ ID NO: 7969 - DNA, 60 bp, Homo sapiens
ctacagcaggccaaaacaacttcccgacaagtggcagcacgatcttttcgacagtggctt

SEQ ID NO: 7970 - DNA, 60 bp, Homo sapiens
gaacaaaacacgctgcaggagttcctgaagctggcttgagtcaagcctgtccagagttcc

SEQ ID NO: 7971 - DNA, 60 bp, Homo sapiens
agagatcatcactccctgccttttaccctggcacttcaggctcttgttccggatgtgggt

SEQ ID NO: 7972 - DNA, 60 bp, Homo sapiens
ggaatcaatgtcagcaaagagacacatgccagtgtcattgcacacgttacagcctgcagg

SEQ ID NO: 7973 - DNA, 60 bp, Homo sapiens
cggcaaccatgaaaccgcatccaacagtccaaaagcagtcttccaaacagaagaaggcca

SEQ ID NO: 7974 - DNA, 60 bp, Homo sapiens
ttggtcagggaccatgatgctctacatggacatttgagtcttcgtcttctgctgctgctc

SEQ ID NO: 7975 - DNA, 60 bp, Homo sapiens
cctcagtgtcgagacttcgtaccttcagcatgagagtggccgcatttccactaagtttga

SEQ ID NO: 7976 - DNA, 60 bp, Homo sapiens
ttgttaatggtgcctacaagcatgaggacctgcagacggatgagtccagcatggatgaca

SEQ ID NO: 7977 - DNA, 60 bp, Homo sapiens
accaagtggtggatatgctggttgagtgtcctaagggaagtgaggtcacattgttggtgc

SEQ ID NO: 7978 - DNA, 60 bp, Homo sapiens
gaaccacagattttctgagcttctaaatgtagcctttcattgcacatttcagtgatcaga

SEQ ID NO: 7979 - DNA, 60 bp, Homo sapiens
ccgccagtcttcactcctgttcaagattctctccagtgttcggaatcatcagatcaactc

SEQ ID NO: 7980 - DNA, 60 bp, Homo sapiens
cctctaagacctccgctcccagtaaacaccctcaggcaccctaaccctgtgtatgtgatt

SEQ ID NO: 7981 - DNA, 60 bp, Homo sapiens
gtggagaagcgcctagcagcctgcgtcaacctcatccctcagattacatccatctatgag

SEQ ID NO: 7982 - DNA, 60 bp, Homo sapiens
ttttagtgcctagagattttcactcctctaacatctctggatacagtgtccctggtcaac

SEQ ID NO: 7983 - DNA, 60 bp, Homo sapiens
tatgttcagctgggtcagcaaggatgcccgccgcaagaaggagccggagctcttccagac

SEQ ID NO: 7984 - DNA, 60 bp, Homo sapiens
gaccttgttgctcgcctggatgaactcgggggcctgtatctccagtgtgaagaaggactg

SEQ ID NO: 7985 - DNA, 60 bp, Homo sapiens
gctacaattgccagggaactccttatgaatggaacatcttctacagctgaagccataggt

SEQ ID NO: 7986 - DNA, 60 bp, Homo sapiens
gtacccttccacggggatgctggtgcttttctttgccctgcatgtgtgtgatgaggtgaa

SEQ ID NO: 7987 - DNA, 60 bp, Homo sapiens
cctatgtctccagatacaaaacttgtaaccattgaaccaccaaaccctatcaatcccagc

SEQ ID NO: 7988 - DNA, 60 bp, Homo sapiens
tattgccaaagtggtttccagaaaggcactgctggcttcgactcctataagcagcacgtg

SEQ ID NO: 7989 - DNA, 60 bp, Homo sapiens
tgtgtgtgctgggcaccttgactcagcttgacatctgcagctctgcccctgaggactgca

SEQ ID NO: 7990 - DNA, 60 bp, Homo sapiens
ccagacctctacaagcaaatggagaagttcaggaaggtacaaacacaagtgcgccttgca

SEQ ID NO: 7991 - DNA, 60 bp, Homo sapiens
gcttcccagtttgtttacccgggaaagtacgtctagattgtgtggtttgcctcattgtgc

SEQ ID NO: 7992 - DNA, 60 bp, Homo sapiens
ctgaaagccggaaggggcaagacgggttcagttcgtcatggggctgtttggaaagaccca

SEQ ID NO: 7993 - DNA, 60 bp, Homo sapiens
cggtgttggtgcactgtcatgcaggagtcagtcgaagtgtggccataataactgcttttc

SEQ ID NO: 7994 - DNA, 60 bp, Homo sapiens
gctcctgaggtgcattttctcatcatccttgctttaccacaatgagcaatgaggtcgggt

SEQ ID NO: 7995 - DNA, 60 bp, Homo sapiens
tgagtagagtaagatttgggtgggatgggtaggatgaagtatattgcccaactctatgtt

SEQ ID NO: 7996 - DNA, 60 bp, Homo sapiens
gaacaaccaccatctgacctttagcatccagaactacacggagaagttgggctggtacca

SEQ ID NO: 7997 - DNA, 60 bp, Homo sapiens
tgtgagcaagattgtgttttagagaggaaacttgaaactccaagaaagcacttgatgttt

SEQ ID NO: 7998 - DNA, 60 bp, Homo sapiens
agaaccttcctctagaacccgacccaccaccatgaggtcctgcctgtggagatgcaggca

SEQ ID NO: 7999 - DNA, 60 bp, Homo sapiens
tgctggaactgacaagccagattctgggagccaaccctgattttgccaccctctggaact

SEQ ID NO: 8000 - DNA, 60 bp, Homo sapiens
ttctaagcctttgagactgttcctgagccttcagcactaacctatgagggtgagctggtc

SEQ ID NO: 8001 - DNA, 60 bp, Homo sapiens
gagatcagaggccctgtgacgatcgtgtcaggtaaaaagcgcagactcaccattattgaa

SEQ ID NO: 8002 - DNA, 60 bp, Homo sapiens
ggaaggtgtgaagaagaaggcagctgagtacctgaagcgggcagaggagatcctgcgcct

SEQ ID NO: 8003 - DNA, 60 bp, Homo sapiens
gggcctgtcactggtgcagaccacggacttcttttaccccttggtagaagatccctacat

SEQ ID NO: 8004 - DNA, 60 bp, Homo sapiens
ctatgctcgccttcaccctcgtgctgtcaactgccgcaagaagaagtgtggtcacaccaa

SEQ ID NO: 8005 - DNA, 60 bp, Homo sapiens
attgaggaagcttcatctgaccaatgtgggtgctggtttcttgtgaaatgtgtccctaag

SEQ ID NO: 8006 - DNA, 60 bp, Homo sapiens
cctggaagatagcatgcgtgggaagtaacagttgctaggcttcaatgcctatcggtagca

SEQ ID NO: 8007 - DNA, 60 bp, Homo sapiens
ctgaatcttgagccatttgtgactcaggaggactctgccttagagttggcattgcacgct

SEQ ID NO: 8008 - DNA, 60 bp, Homo sapiens
cagtacagcatacagggcagatgtcagagattatgatcacagggtgctgctcagatttcc

SEQ ID NO: 8009 - DNA, 60 bp, Homo sapiens
tacctgcggaacctgtccagcgatgatgccaatgtcctggtgtggcacgctctcctccta

SEQ ID NO: 8010 - DNA, 60 bp, Homo sapiens
atggaaaagatggggaagagcaaaatacatggagacgacgcaccctccaggatgctcgct

SEQ ID NO: 8011 - DNA, 60 bp, Homo sapiens
tcggtggagtgttcagcaagatcagacagcagtccaggtcaaaggcaaacacacacgctc

SEQ ID NO: 8012 - DNA, 60 bp, Homo sapiens
caacctttattaacccctggcaaaacttcccgtttgcatgtcaaatcacattgaagcctg

SEQ ID NO: 8013 - DNA, 60 bp, Homo sapiens
aaagcttcttactggtgaaacagcccagttgtagtaggtgccagtcagtcaaggcagggg

SEQ ID NO: 8014 - DNA, 60 bp, Homo sapiens
cagtgtctgaattgctgaggagatgtgggaattgcacacgggaaagctgtgtggtttcct

SEQ ID NO: 8015 - DNA, 60 bp, Homo sapiens
atgtcaatccgcgtggatggtaatgatgtgtttgccgtatacaacgccacaaaggaggcc

SEQ ID NO: 8016 - DNA, 60 bp, Homo sapiens
gcagcactcctcctacgctggatcggaagcagaagatggccttcttaaagagtttagaag

SEQ ID NO: 8017 - DNA, 60 bp, Homo sapiens
gttcattctgtacagtgaattttccgaacctctcaaagtatgttttccgttcttccacag

SEQ ID NO: 8018 - DNA, 60 bp, Homo sapiens
tcatgtgcagagcctggcccaactagagaatctgtgcaaacagctgtatgaaaccacaga

SEQ ID NO: 8019 - DNA, 60 bp, Homo sapiens
cagaaagccaaggtcggcgaactcaaagacgatgacttcgaaaggatctcagagctgggc

SEQ ID NO: 8020 - DNA, 60 bp, Homo sapiens
cgacctggcacggggcatgttcgtctttggctacgacaactacatggctcacgccttccc

SEQ ID NO: 8021 - DNA, 60 bp, Homo sapiens
ttctcctcctacctctgccctgtgagcccatccataaggctctcagatgggacattgtgg

SEQ ID NO: 8022 - DNA, 60 bp, Homo sapiens
ttcaccagtgcctttgccaaagaccctctcatttggacatacccagattcattccctggc

SEQ ID NO: 8023 - DNA, 60 bp, Homo sapiens; identical to SEQ ID NO: 4855

SEQ ID NO: 8024 - DNA, 60 bp, Homo sapiens
cttcagaaggatctacatgaggaaatgaactacatcactgcaataattgaggagcagccc

SEQ ID NO: 8025 - DNA, 60 bp, Homo sapiens
atcctgacagctacctctcagcaggagaaattcctctccccaaattatacatctcaatgg

SEQ ID NO: 8026 - DNA, 60 bp, Homo sapiens
ttactatgtcatggtcatctgctacgtctacttcacccgcatcatcgccatcctgctgca

SEQ ID NO: 8027 - DNA, 60 bp, Homo sapiens
aatgagacactctaacgagttttcagtctctctgtatgcctttgctatttaggggtccac

SEQ ID NO: 8028 - DNA, 60 bp, Homo sapiens
aaatggaagacacgatgagcagcacgacgacgctcaccactccccagaaccaagtggata

SEQ ID NO: 8029 - DNA, 60 bp, Homo sapiens
aaactgctggaggatcaagaagggcttcgtgcccaacatgcaggttgaaggtgttttcta

SEQ ID NO: 8030 - DNA, 60 bp, Homo sapiens
agtctcatctcagatcacagctctcagcatagggcttcatgcatcaccgcctctacagag

SEQ ID NO: 8031 - DNA, 60 bp, Homo sapiens
ggagtgccacaccttttgattctgagcatttgattctgacttctgtactctggtggccac

SEQ ID NO: 8032 - DNA, 60 bp, Homo sapiens
ccctctcggagcaggttgaggactgtgtgctgactgtggaaggaagtggcctcttcaaga

SEQ ID NO: 8033 - DNA, 60 bp, Homo sapiens
aggatcaagacaacccgttggagcccctgtgttccagaggacctgatgccaaggggtaat

SEQ ID NO: 8034 - DNA, 60 bp, Homo sapiens
aacttctacgcggaagccttcttcccagacatggttaacatggtggtcttaggcaagtac

SEQ ID NO: 8035 - DNA, 60 bp, Homo sapiens
agtcaaattggctgatctttccgttgcattcatgatgcaaaatcagtggcaaggtgccgg

SEQ ID NO: 8036 - DNA, 60 bp, Homo sapiens
atagggccttcctacagagcagcaagagtaggccaagcagaaagactgctgaggtaacac

SEQ ID NO: 8037 - DNA, 60 bp, Homo sapiens
cacatgccaaatgatgactacattttaccaacatatttagacgagtattcttgactagtg

SEQ ID NO: 8038 - DNA, 60 bp, Homo sapiens
gaaaatgacccagagtggtggaaatgcaggaagatcaatggtatggttggtctagtacca

SEQ ID NO: 8039 - DNA, 60 bp, Homo sapiens
tgaacaacatcctataccggttctcagacggatgggacatcatcaccttaggccaggtga

SEQ ID NO: 8040 - DNA, 60 bp, Homo sapiens
caaaaccagatgattcaactgaggcacatgaaggagatcccacaaatggaagtggagaac

SEQ ID NO: 8041 - DNA, 60 bp, Homo sapiens
aacagcagacccaagctcagggttgtatggtgctgctgaaaccgacaagaccagcctcat

SEQ ID NO: 8042 - DNA, 60 bp, Homo sapiens
caagtgatagattctctgactgtgaagatcatcctgcctgaaggagccaagaacattgaa

SEQ ID NO: 8043 - DNA, 60 bp, Homo sapiens
acagctaagtccaacaccagcatgtcgctgcagagaatcgtgcgtgtgtccctggagcat

SEQ ID NO: 8044 - DNA, 60 bp, Homo sapiens
cagctctgctacctggtaatgaaggaatacacatcctgaagatctcgtgactatactggc

SEQ ID NO: 8045 - DNA, 60 bp, Homo sapiens
cgacagcataggaccagagtccttagcattcgaaacattgaccaagaagagcggttgaag

SEQ ID NO: 8046 - DNA, 60 bp, Homo sapiens
aactgaagacaacatgggtggatgtggagttcgaacctggggatcgggtaaagataccag

SEQ ID NO: 8047 - DNA, 60 bp, Homo sapiens
ggtacaattgctctattgagtcaccacgaaaaggctggagcttcatgcatcctgggagac

SEQ ID NO: 8048 - DNA, 60 bp, Homo sapiens
cccacctgctgaatgatgcccttagcatccgggagagcaccttgggacctgaccatcctg

SEQ ID NO: 8049 - DNA, 60 bp, Homo sapiens
ctacgagaacgtgccgactattgacatccacatgaaccagatcggctttgagcgggagtg

SEQ ID NO: 8050 - DNA, 60 bp, Homo sapiens
taaccccaggatgaagcgggccagttccctcaacttcctcaacaagagcgtggaagagcc

SEQ ID NO: 8051 - DNA, 60 bp, Homo sapiens
cggacactggtatcagttctaaccacagtcaggactccgaaacaacagtaggagatgtgg

SEQ ID NO: 8052 - DNA, 60 bp, Homo sapiens
ttaatcttcgaatcatgacactgagtgcagaggaggtggcattccgacagcaggacatac

SEQ ID NO: 8053 - DNA, 60 bp, Homo sapiens
gtggagcagccatgcccggacgtgtactggttcccactgctgtcagaacaaatgtgtgat

SEQ ID NO: 8054 - DNA, 60 bp, Homo sapiens
ttcgggattttgggccatgcgcagaacctggccaagcagcagaggaacgaggtgtcgttt

SEQ ID NO: 8055 - DNA, 60 bp, Homo sapiens
cattgggaccctagaatagccaagaattatccacaagggagacacaaccctccagatgac

SEQ ID NO: 8056 - DNA, 60 bp, Homo sapiens
taagcagccagacccacaaggccaggtcctgtgctatcacagggtcacctcttttacagt

SEQ ID NO: 8057 - DNA, 60 bp, Homo sapiens
gagatgcaacattcactacacaggtcgctacgtttctgcaacaaactgcaaaattgtcca

SEQ ID NO: 8058 - DNA, 60 bp, Homo sapiens
gcaggatctgcctagggtgtgctggtttgtccttttcatacctttgtctcctaattgtgc

SEQ ID NO: 8059 - DNA, 60 bp, Homo sapiens
cagtcaaacgacttccagcgaaatttcttcagttatggtaggagaaacagaagcatcatc

SEQ ID NO: 8060 - DNA, 60 bp, Homo sapiens
actgcaagagattcgtgaggggttaaaacagccatccaagtcttcggttcaggggctacc

SEQ ID NO: 8061 - DNA, 60 bp, Homo sapiens
agagtgaatgttcagcctgagctagtgagctagattcattgaattgaaagttgcatagta

SEQ ID NO: 8062 - DNA, 60 bp, Homo sapiens
ggctcgatcctcagactttactcacatgctgcctcgtctctaaacagtggaataaggtga

SEQ ID NO: 8063 - DNA, 60 bp, Homo sapiens
tgatgctgagcgtacaggcagacaagagcgtagcctgctgttgcctccatcactatgaaa

SEQ ID NO: 8064 - DNA, 60 bp, Homo sapiens
tctgaggggatagttgatgagggagcaagtaccagcattggaccccacagcatagatgat

SEQ ID NO: 8065 - DNA, 60 bp, Homo sapiens
tttcccggagtgacgggtttagataacggaccggatgattaccctctcaatcgcattgcc

SEQ ID NO: 8066 - DNA, 60 bp, Homo sapiens
aacagcaacaaagtggtcatgagtggagtgaagtgctcgggaacggagctgtccctggcg

SEQ ID NO: 8067 - DNA, 60 bp, Homo sapiens
agctctctggaccggaaataccttgatgggctggatgtgtgccgcttccccttgctggat

SEQ ID NO: 8068 - DNA, 60 bp, Homo sapiens
tttctcttgggatctaacgtgggatcttctggacagacaaccgtgacatcagcagtgctg

SEQ ID NO: 8069 - DNA, 60 bp, Homo sapiens
gggtcattctatgggcaaagatgctgccttagttcaggtttgtcagaagcagggtctgga

SEQ ID NO: 8070 - DNA, 60 bp, Homo sapiens
tgaatgtggaagatgcctatattctgagagacaggacagtttcccaggaagatgggcaga

SEQ ID NO: 8071 - DNA, 60 bp, Homo sapiens
aggcacaggacgcggtgatggggcaggatctgatggtctctgtgatgctgatcaatcaca

SEQ ID NO: 8072 - DNA, 60 bp, Homo sapiens
cctcacacgtctgccacagcctttaattgctggcatgtaccttatgatgtctgttgacac

SEQ ID NO: 8073 - DNA, 60 bp, Homo sapiens
taggctgtgggaaaggaccaagtattcagcaagcggaaatgggagcagcaatggatgcgc

SEQ ID NO: 8074 - DNA, 60 bp, Homo sapiens
atccagcctcccattaccccaaggtactcccacacagctcatgtgctcaatggaaagctg

SEQ ID NO: 8075 - DNA, 60 bp, Homo sapiens
gccgtgccatgtgcaatgatgttggaacttgctcgtgccttagacaagaaactcctttcc

SEQ ID NO: 8076 - DNA, 60 bp, Homo sapiens
tttgtaatgcttgtgattccatctgggcaaaagtctgaagatctgaaataactttatatc

SEQ ID NO: 8077 - DNA, 60 bp, Homo sapiens
gcagcatctgccttgatatcctgcggtctcagtggtctccagcgttgactgtgtcaaaag

SEQ ID NO: 8078 - DNA, 60 bp, Homo sapiens
ctccatcagctgctcgaagcttaccatctgcctctacttcaaaggctacaatctcagatg

SEQ ID NO: 8079 - DNA, 60 bp, Homo sapiens
cgggtcaaaagaagacactgtaatttccctttagggagacgtgatgttcacttctgatgg

SEQ ID NO: 8080 - DNA, 60 bp, Homo sapiens
cctatcttcacggatgagtcctaccttgaactctataggaagcagaagaagcaccttaac

SEQ ID NO: 8081 - DNA, 60 bp, Homo sapiens
ccggacccaaaagttatgtgctctttagtgcctcaagttttccaagcatctctggtaaca

SEQ ID NO: 8082 - DNA, 60 bp, Homo sapiens
attcgtgcccaagaaccagagagtgggctttcagaagagactcaagtgaagtgcctgatg

SEQ ID NO: 8083 - DNA, 60 bp, Homo sapiens
caaggagaacttaatggcatgaaggattgtgtgacacattggaaaagccagcttactgcc

SEQ ID NO: 8084 - DNA, 60 bp, Homo sapiens
agtgctgctcctgtcattgtggccatggacgataccctgttccagttgaagttcacggcg

SEQ ID NO: 8085 - DNA, 60 bp, Homo sapiens
ttggacatactggttttaatacctgctttgcatattcacacatggtcaactgggacatgt

SEQ ID NO: 8086 - DNA, 60 bp, Homo sapiens
gaacacagacctctttcttgtgccttgttcacttctgttgaacccctcgtactgccgggc

SEQ ID NO: 8087 - DNA, 60 bp, Homo sapiens
ccagaggagctactgcggcagaaccagagggccctgaaccgtgccatgcgggagctggac

SEQ ID NO: 8088 - DNA, 60 bp, Homo sapiens
tcagcccttcacctccaagttggcattactgggacaggttttcctagactcctcataacc

SEQ ID NO: 8089 - DNA, 60 bp, Homo sapiens
cagcaacagcacggactacattgccatgcacgacgttgacctgctccctctcaacgagga

SEQ ID NO: 8090 - DNA, 60 bp, Homo sapiens
cactgtctgcgtctaccaagatgctggagagatttcccaacaatctacccaaacatcggg

SEQ ID NO: 8091 - DNA, 60 bp, Homo sapiens
cctcaacatgattactccagaaggctggttggttgaaacagtgcacagcaactgtgacct

SEQ ID NO: 8092 - DNA, 60 bp, Homo sapiens
cgatctaggattactctggacctcattcgggtgttatgagtatcccacgaaggccagacg

SEQ ID NO: 8093 - DNA, 60 bp, Homo sapiens
cctgaatcatcccagctcagatgcagccactgtctcttgtcaagtgggacctcatactat

SEQ ID NO: 8094 - DNA, 60 bp, Homo sapiens
ccactcgcatctgagcctgccgatgacactgttaatggagaatcatcctcatttgcacca

SEQ ID NO: 8095 - DNA, 60 bp, Homo sapiens
ggagtggccagtgttcggcgttgctcgggattcaagataccaccagttcagagctaaata

SEQ ID NO: 8096 - DNA, 60 bp, Homo sapiens
cgtgtgtgtatgtgagggcatgttgtccatatccctgtggaatacagaccgtgtaactgg

SEQ ID NO: 8097 - DNA, 60 bp, Homo sapiens
tccgcaggtctcatcccacactcttgagaagccttggtcactacagtggtcgcacatgtt

SEQ ID NO: 8098 - DNA, 60 bp, Homo sapiens
agggtttcgtgaaaacaacctccgagaaggggagaaacgcggagaggcaccaacacgagg

SEQ ID NO: 8099 - DNA, 60 bp, Homo sapiens
gtgattcttcaccagcatctggagatctagtcttggagtagttaatagccctgcttggtc

SEQ ID NO: 8100 - DNA, 60 bp, Homo sapiens
agataatgagcttcagtccccaagatctgcgaagacgtttgtgggtgatttttccaggag

SEQ ID NO: 8101 - DNA, 60 bp, Homo sapiens
tgcggattcagaaaagcacccaggaaggttgaacctcgaagatcagacccagggacaagt

SEQ ID NO: 8102 - DNA, 60 bp, Homo sapiens
cgtggttttggagatggggatgcctaacatgaagccaggtcatttgatgggagatccatc

SEQ ID NO: 8103 - DNA, 60 bp, Homo sapiens
agaacagcgacgatgcttatgtacagctggataacttgccaggaatgagtctcgtggctg

SEQ ID NO: 8104 - DNA, 60 bp, Homo sapiens
gacagggacagcccaggtcacacgtggggtcagcagaggtaccacgaagctaccttttgg

SEQ ID NO: 8105 - DNA, 60 bp, Homo sapiens
atattaggctcacacagtacatggatggcagtggaatgccaaagacaatgcagtcagaag

SEQ ID NO: 8106 - DNA, 60 bp, Homo sapiens
agtcctccggaaagagcctgtcaccccatctgcacttgtcctcatgagccgctccaatgt

SEQ ID NO: 8107 - DNA, 60 bp, Homo sapiens
acgagttcgtcaccgatgtgtgcaacggacgcaagatcgagctggctgtctttcacgatg

SEQ ID NO: 8108 - DNA, 60 bp, Homo sapiens
atgcatcgcctcttcaatcaccccaacatccttcgcctcgtggcttactgtctgagggaa

SEQ ID NO: 8109 - DNA, 60 bp, Homo sapiens
ttaggacgggcttcccagttagagacagtcactcgatctaggaatagcttgccaaaccag

SEQ ID NO: 8110 - DNA, 60 bp, Homo sapiens
gaattcttcatcataagcatgtagtgcagttttaccactacttcgaggacaaagaaaaca

SEQ ID NO: 8111 - DNA, 60 bp, Homo sapiens
acattggcctacatccttgccctctggagatgccttttcttctgtggggacacatagatt

SEQ ID NO: 8112 - DNA, 60 bp, Homo sapiens
cccacagtgagacttacagacgcatcctcaaggtagatgtgaggtttccactatcaatgc

SEQ ID NO: 8113 - DNA, 60 bp, Homo sapiens
gaagcaggtgatagaagagcaaaccacgtcccacgaatcccaataatgacagcttcagac

SEQ ID NO: 8114 - DNA, 60 bp, Homo sapiens
cgctcagatccttgatccaccagaaaatcagatgggaccatcaggtgatggacccaaaga

SEQ ID NO: 8115 - DNA, 60 bp, Homo sapiens
cggacagcatcactggttacgaggcaaatgcaagaacatgagcaggactctgagcttaga

SEQ ID NO: 8116 - DNA, 60 bp, Homo sapiens
gccagattttaaaagttgccaaccaggagatttaacaggtacagttacccgtttcaatgt

SEQ ID NO: 8117 - DNA, 60 bp, Homo sapiens
catgtgcaggtactggaaaacctccatcttggctcccagagctctaggaactcttcatca

SEQ ID NO: 8118 - DNA, 60 bp, Homo sapiens
tactttgagggtgttctcaagtgctacctgcatgagactctggagaccatcatcaacagg

SEQ ID NO: 8119 - DNA, 60 bp, Homo sapiens; identical to SEQ ID NO: 4855

SEQ ID NO: 8120 - DNA, 60 bp, Homo sapiens
tccatttgcagacccgacacctcagactgaaaccgtacaacagtggtttgggaatctgca

SEQ ID NO: 8121 - DNA, 60 bp, Homo sapiens
cccagacgatgaggatgccataaagaggatcgaccagtcagagttcgaaggctttgagta

SEQ ID NO: 8122 - DNA, 60 bp, Homo sapiens
ccagatttacagccacacaactctgggtctgaaccttccctgtctcgacagcgacggcaa

SEQ ID NO: 8123 - DNA, 60 bp, Homo sapiens
gagatgggctcagctcctggacgtgccacagacagaaagcataacatacactcgccagga

SEQ ID NO: 8124 - DNA, 60 bp, Homo sapiens
aagcgttcctggccttctgaactccatacagcctctacagccgtcccgcgttcaagactt

SEQ ID NO: 8125 - DNA, 60 bp, Homo sapiens
gtggaaacgttctctactacgaagtgatggtgactgggaatcttggaatccagtggaggc

SEQ ID NO: 8126 - DNA, 60 bp, Homo sapiens
cggaagactactccccaagctcctccgagactgttcgctcccctaactcgcccttttaat

SEQ ID NO: 8127 - DNA, 60 bp, Homo sapiens
aatgcacagagcctcagccaggagaaggtgctgccctcagacaagttcaaggactaccta

SEQ ID NO: 8128 - DNA, 60 bp, Homo sapiens
aaaatctgcccagagcctaccctcaccagacaaactctgtgctcctccaaaacatccttt

SEQ ID NO: 8129 - DNA, 60 bp, Homo sapiens
tacaggaactgccactacgccaacctcaacgggctctacgggagcacagtggaccatcag

SEQ ID NO: 8130 - DNA, 60 bp, Homo sapiens
agtttctctgccctgtcccctcctcacctgcttccctaccactcctcactgcattttcca

SEQ ID NO: 8131 - DNA, 60 bp, Homo sapiens
agagagtgctgggctgttcccttggctgcatacacagtgctaatgaggtgccttcgggaa

SEQ ID NO: 8132 - DNA, 60 bp, Homo sapiens
gcactgggataatccaaggccaggctttgaggttccaccgctacattatgtgactcttag

SEQ ID NO: 8133 - DNA, 60 bp, Homo sapiens
gagcgttctaagtctctgctgcttagtggccaagaggtaccatggttgtcatcagtcaga

SEQ ID NO: 8134 - DNA, 60 bp, Homo sapiens
tgagagccattggaagactgtcctctatggcaatgatctcagggctcagtggcaggaaat

SEQ ID NO: 8135 - DNA, 60 bp, Homo sapiens
ttggcaagggtaattttgggagtgtggagatgtgccggtatgaccctctacaggacaaca

SEQ ID NO: 8136 - DNA, 60 bp, Homo sapiens
agtcgaacctgctgcatactagccgctcgctgtcgtcgctgaaccgctcgctgtcatcca

SEQ ID NO: 8137 - DNA, 60 bp, Homo sapiens
ggcactggaagggtagttctggaaagctactttgttgagagtctcattcttccctggagt

SEQ ID NO: 8138 - DNA, 60 bp, Homo sapiens
tgcaattttcaggagacatattcaactcctctgctcttccaaacctggtgtctatccggc

SEQ ID NO: 8139 - DNA, 60 bp, Homo sapiens
tattcgatgtcaagcgaacgtggcccctaactgtggggtaaatgcggtggaacttgccaa

SEQ ID NO: 8140 - DNA, 60 bp, Homo sapiens
ccctcccttgacagtgtggactctgagtatgatatggggtctgttcagagggacctgaac

SEQ ID NO: 8141 - DNA, 60 bp, Homo sapiens
ttgaagttccacagcaagatgtgatcctgccagagtactaaacagcttccttcagatctg

SEQ ID NO: 8142 - DNA, 60 bp, Homo sapiens
tgcctgtcgcatgtttgtgtctgcctcgttccctcccctggtgcctgtgtctgcagaaaa

SEQ ID NO: 8143 - DNA, 60 bp, Homo sapiens
agagtatgaagctatggccgccatcttcaagattgccacccagcccaccaatcctcagct

SEQ ID NO: 8144 - DNA, 60 bp, Homo sapiens
cgtgttccagaagccggtcaagttccaggttgatatcacctacacggagggtggggaggc

SEQ ID NO: 8145 - DNA, 60 bp, Homo sapiens
tgcttgaaaaaggaagtttgtctgccatgcgtttcctcaccgccgtgaacttggagcatc

SEQ ID NO: 8146 - DNA, 60 bp, Homo sapiens
cgtttgcttttgttccaatgtcaatgtgaacgtccacatgaaacctacacactgtcatgc

SEQ ID NO: 8147 - DNA, 60 bp, Homo sapiens
tcgggctctcgtgtgtgcaaaaggtcagatgtgactgctgctgtttgcctggtttctgac

SEQ ID NO: 8148 - DNA, 60 bp, Homo sapiens
ttcaacagaccagggcatcttcttgtgtcttaaacaggcatctctccactgacagccggt

SEQ ID NO: 8149 - DNA, 60 bp, Homo sapiens
ctccatctgccaagaacattcagttggattccatcgtttggtttagcttgcttgcacggg

SEQ ID NO: 8150 - DNA, 60 bp, Homo sapiens
gattgagagctgttcaccatgtgtgcagcctgtgctccccttctatggatatgtgtgcaa

SEQ ID NO: 8151 - DNA, 60 bp, Homo sapiens
ggacagtgttacttcttctgcatgatgtgtggtagactccctttgctggcttgtgcagtg

SEQ ID NO: 8152 - DNA, 60 bp, Homo sapiens
ttcgaaggggacaacatctacaagttgtttgagaacatcgggaaggggagctacgccatc

SEQ ID NO: 8153 - DNA, 60 bp, Homo sapiens
tgtgttcatcgagctactggccacgagtttgcggtgaagattatggaagtgacagctgag

SEQ ID NO: 8154 - DNA, 60 bp, Homo sapiens
caccaacatctcagccgtgaactacgacttcgacgaggagtacttcagcaacaccagcga

SEQ ID NO: 8155 - DNA, 60 bp, Homo sapiens
gccacctcttatagcagacagccccaaagcaagatgtccattggatgcactgaatacgac

SEQ ID NO: 8156 - DNA, 60 bp, Homo sapiens
gcattctcctatgggcagaagccatatcgagggatgaaaggaagtgaagtcaccgctatg

SEQ ID NO: 8157 - DNA, 60 bp, Homo sapiens
gcgattcatgaggtcacacaagtgttatgacatcgttccaaccagttcaaagcttgttgt

SEQ ID NO: 8158 - DNA, 60 bp, Homo sapiens
caaattcgcataccacgttctctgtctgtaaaagctgcaagtgttctgaagagttttctt

SEQ ID NO: 8159 - DNA, 60 bp, Homo sapiens
gggatcagttagcaactatcgatcttgccaaaggagtgattcagatgctgaggctcaagg

SEQ ID NO: 8160 - DNA, 60 bp, Homo sapiens
atatctacctccaatggcagtccagggtttgaataccaccagcctggggacaagttcgaa

SEQ ID NO: 8161 - DNA, 60 bp, Homo sapiens
gtgtactttctgatcggagctgtttaagagttacggctggtcccacctcactggatcttg

SEQ ID NO: 8162 - DNA, 60 bp, Homo sapiens
cggatttacctaaaggctgaggttgctgatgaaaagctccatgtcacagtacgagatgca

SEQ ID NO: 8163 - DNA, 60 bp, Homo sapiens
attggaccatgtgccaaagcgtttcctcggaccccgttttctcgtctcccagggtgaaaa

SEQ ID NO: 8164 - DNA, 60 bp, Homo sapiens
taacagtgttctcaccagtggcgttggtgcagatgtggccaggatgtgggagatagccat

SEQ ID NO: 8165 - DNA, 60 bp, Homo sapiens
cacttccacagtcagcacggggatcacagacttagaaagttcaactggactttggcctac

SEQ ID NO: 8166 - DNA, 60 bp, Homo sapiens
agcctgtgcatgtatgtcttggacactgtacaaggtacccctttctggctctcccatttc

SEQ ID NO: 8167 - DNA, 60 bp, Homo sapiens
tgatattgtgagcagccagaaggtttggcttcctgccacatgatcggaccatcggctctg

SEQ ID NO: 8168 - DNA, 60 bp, Homo sapiens
gagatactgaacagatcttcagagaaggtccggttgaaattggtctcccatgctccatca

SEQ ID NO: 8169 - DNA, 60 bp, Homo sapiens
tagctgaagagaaggcaactggcaagctctttgctgtgaagtgtatccctaagaaggcgc

SEQ ID NO: 8170 - DNA, 60 bp, Homo sapiens
ttgaggaaagtgaaccttgggtgtgagggaccaatcctgtgacctcccagaaccatggaa

SEQ ID NO: 8171 - DNA, 60 bp, Homo sapiens
ttgtcttcgctggctcctaccccatctccaagataagcctgagccttagctcccagctag

SEQ ID NO: 8172 - DNA, 60 bp, Homo sapiens
cctctcctcccaaccatgagatcccaaggatggagaacaacttacccagtagctagaatg

SEQ ID NO: 8173 - DNA, 60 bp, Homo sapiens
caaagaggggaccttcttccagatgccttcccagttgtaaccggtaaaactgttaccaga

SEQ ID NO: 8174 - DNA, 60 bp, Homo sapiens
gctccctcctctaccagtgccactatttccttagccaatcccgaagtctccatactaaac

SEQ ID NO: 8175 - DNA, 60 bp, Homo sapiens
tgccagcgagttaccacgggaccagtcgcgtgtatggctgagactcattcccagtttcca

SEQ ID NO: 8176 - DNA, 60 bp, Homo sapiens
ccatcctgccggatgagtgtgggtgtgatacagcctacataaagactgttatgatcgctt

SEQ ID NO: 8177 - DNA, 60 bp, Homo sapiens
tatgtggcccacagtaggtgaagaatgtctggctccagccctttctctgtgccttcagca

SEQ ID NO: 8178 - DNA, 60 bp, Homo sapiens
attcgtgacctcaatagcctcatctcttcagactatgagctcctctcagaccccacacct

SEQ ID NO: 8179 - DNA, 60 bp, Homo sapiens
cactttccagcctatagcagaagcacattttcagactgcaatatagagactgtgttcatg

SEQ ID NO: 8180 - DNA, 60 bp, Homo sapiens
cagggaagaagctcactacaagctgtggatctcttgcatattccgctccagaaattctgc

SEQ ID NO: 8181 - DNA, 60 bp, Homo sapiens
cccagaacagatttcttcgcaagactatggaaaggaagtggacctctacgctttggggct

SEQ ID NO: 8182 - DNA, 60 bp, Homo sapiens
tgagctccttggagaagccccacctaaaactggcagactttggtttcgcacaacacatgt

SEQ ID NO: 8183 - DNA, 60 bp, Homo sapiens
tggacagaggggactctgggctatggacacagggtgacggtgacaaagatggctcagagg

SEQ ID NO: 8184 - DNA, 60 bp, Homo sapiens
catgcccaggtaaattcccaaaaggcagaattgacagttgtatctgctgtgcattcactc

SEQ ID NO: 8185 - DNA, 60 bp, Homo sapiens
ccacgcacattacactgaagcagatgacgatgactttgagccccatgcaatcattcgtca

SEQ ID NO: 8186 - DNA, 60 bp, Homo sapiens
ggatttcggcttcagcaatgaattcacctttgggaacaagctggacaccttctgtggcag

SEQ ID NO: 8187 - DNA, 60 bp, Homo sapiens
tgaggtcttggactccactacttgttagttatgttggcctggacagatggcaggtctgtc

SEQ ID NO: 8188 - DNA, 60 bp, Homo sapiens
tcacctgaaatctgtgaaaacaaaccttacaataataaaagtgacgtatggtcattcggg

SEQ ID NO: 8189 - DNA, 60 bp, Homo sapiens
tcaccagaaattgccactcgaagtgcacatggccttgaatctgatgtatggtcttttgga

SEQ ID NO: 8190 - DNA, 60 bp, Homo sapiens
caagggagaaggtatagtggaatgagtgtgagcatcgggctttgcagtcccatagaacag

SEQ ID NO: 8191 - DNA, 60 bp, Homo sapiens
cagctttcagtgtagtgagattattcctgtaggttatggggtataattcaggatttaact

SEQ ID NO: 8192 - DNA, 60 bp, Homo sapiens
aatcagcatctttggttacacgacagatccatgagcatgagcaggagaacgagttgcggg

SEQ ID NO: 8193 - DNA, 60 bp, Homo sapiens
gaacacattgcccaaggcctacgtctctacaggcctcatctggcttcagagaaggtatat

SEQ ID NO: 8194 - DNA, 60 bp, Homo sapiens
tcacctacaacacagacacgtttgagtccatgcccaatcccgagggccggtatacattcg

SEQ ID NO: 8195 - DNA, 60 bp, Homo sapiens
cccatgaaaccattcttcagacatcagtcaatggaagaaatggctatgaacagaaactac

SEQ ID NO: 8196 - DNA, 60 bp, Homo sapiens
aggacaccctgtaagaacagagcacacttgctggacagtgccagttccagatgggctgac

SEQ ID NO: 8197 - DNA, 60 bp, Homo sapiens
ctatcattgtgcctccactgaaaactcagcttggtgactgcactgtagcaacccaggcct

SEQ ID NO: 8198 - DNA, 60 bp, Homo sapiens
ttctttcgttgatctctgggctggggactgaattcctgatgtctgagtcctcaaggtgac

SEQ ID NO: 8199 - DNA, 60 bp, Homo sapiens
cacttgctaagggcaaatgaacgaagcgccaaccttcctttcggagtaatcctgcctggg

SEQ ID NO: 8200 - DNA, 60 bp, Homo sapiens
ccccagcgcagctttctgtagaaatggaatccgaggatttaagtggcagagaattgacaa

SEQ ID NO: 8201 - DNA, 60 bp, Homo sapiens
tccatcacaatcacaccccctgaccgctatgacagcctgggcttactggagctggaccag

SEQ ID NO: 8202 - DNA, 60 bp, Homo sapiens
ctacaacatgctgagctacagcccagaagccagacatgcctgtcttagctgacctgtttt

SEQ ID NO: 8203 - DNA, 60 bp, Homo sapiens
ccctgtatctggattgtaatgtgaatctttagggtaattcctccagtgacctgtcaaggc

SEQ ID NO: 8204 - DNA, 60 bp, Homo sapiens
atctgaaccctggtctctgtgtcccttagggcttatcacaccgttctccccagagtcacc

SEQ ID NO: 8205 - DNA, 60 bp, Homo sapiens
atatagcagaaacagtattagccatagactctattcaccaacttggattcatccacagag

SEQ ID NO: 8206 - DNA, 60 bp, Homo sapiens
tgcggccggaggaggccatggagcccgagtagctgcctggatcgctcgacctcgcatgcg

SEQ ID NO: 8207 - DNA, 60 bp, Homo sapiens
tgagcccagatgtgaagaattccatccacgtcggagaccggatcttggaaatcaatggca

SEQ ID NO: 8208 - DNA, 60 bp, Homo sapiens
acgtctgggttgtggacctgaaggcgaacgtgatatcaaagagcatgcatttttccggta

SEQ ID NO: 8209 - DNA, 60 bp, Homo sapiens
ggcgacgcttagtcttagaacctggaaggctggcacaacatttccctaaaactactgagg

SEQ ID NO: 8210 - DNA, 60 bp, Homo sapiens
catcttggcacagcgagcaggatccacaccagtcacctctggaccctgagagctgaatga

SEQ ID NO: 8211 - DNA, 60 bp, Homo sapiens
tgtaccccaatacatcccagagcgccaccctcttcttgcgaaaggttctctctgtacatc

SEQ ID NO: 8212 - DNA, 60 bp, Homo sapiens
cgccagctgacaggacatcttacaagagaatttgcacatctctggaagcttagcaatctt

SEQ ID NO: 8213 - DNA, 60 bp, Homo sapiens
ataagcctttttaaccttccaagactgaagactgcacaggtgacaagcgtcacttctcct

SEQ ID NO: 8214 - DNA, 60 bp, Homo sapiens
ccctccttgctgggggtagatgagaccctactactgaactccagttttgatctcgtgact

SEQ ID NO: 8215 - DNA, 60 bp, Homo sapiens; identical to SEQ ID NO: 4855

SEQ ID NO: 8216 - DNA, 60 bp, Homo sapiens
aacaaagtaacttgtcccggaccttttggaggggcgggaaaacaacggtttgcccgggca

SEQ ID NO: 8217 - DNA, 60 bp, Homo sapiens
gtcagttggcagtgatgcaccttgtgttgtaaaagtggaacccagtgacaatggacctct

SEQ ID NO: 8218 - DNA, 60 bp, Homo sapiens
agccgagtgaccacctcacttgaagctttgcccacagggacagtgctgacagacaagagt

SEQ ID NO: 8219 - DNA, 60 bp, Homo sapiens
ggccatgtcacagggatagatggacatttgttgacttggttttacaggtcattaccagtc

SEQ ID NO: 8220 - DNA, 60 bp, Homo sapiens
tgttcgtgcttcccctcgaacgctttctacaagatccactgcaaatcagtctttccggaa

SEQ ID NO: 8221 - DNA, 60 bp, Homo sapiens
ctggtaatgcctaatgtggtctgcctgtgaatctccccatgtagaatttgcccttaatgc

SEQ ID NO: 8222 - DNA, 60 bp, Homo sapiens
acggtttgagaagattggacaaggtgcttcaggcaccgtgtacacagcaatggatgtggc

SEQ ID NO: 8223 - DNA, 60 bp, Homo sapiens
aaactgtctacgcaaaggatattcaggacgtgggtgccttttccaccgtcaaaggtgtgg

SEQ ID NO: 8224 - DNA, 60 bp, Homo sapiens
cgcctgactacattgccccagagatccttcaggagatgttgtatggacctgcagtcgact

SEQ ID NO: 8225 - DNA, 60 bp, Homo sapiens
ggatgttctcagccccttgttctgggcaagaacccagagctccccagtgtggatactaat

SEQ ID NO: 8226 - DNA, 60 bp, Homo sapiens
tgcgaccacccctacattgtgaagctcctgggagcctactatcacgacgggaagctgtgg

SEQ ID NO: 8227 - DNA, 60 bp, Homo sapiens
acatccccctaatgagggtggtgcaatcggtgcgacacacgacgcggaaatccagcacca

SEQ ID NO: 8228 - DNA, 60 bp, Homo sapiens
ggccatcgtgggtgatgacgattgctctcttgcactcaaggacatttgatgctggtagta

SEQ ID NO: 8229 - DNA, 60 bp, Homo sapiens
ggctggtcggagtggcggagcgtcaagtcccctgtcggttcctccgtccctgagtgtcct

SEQ ID NO: 8230 - DNA, 60 bp, Homo sapiens
tgagtcccctgtccagcactgcctagtgttggagggtagaccaaggctgtgcatgattca

SEQ ID NO: 8231 - DNA, 60 bp, Homo sapiens
ttactttagagatcgcaattctatccagggtggagcacgccaatatcatcaaggtattgg

SEQ ID NO: 8232 - DNA, 60 bp, Homo sapiens
ccagtgtattggaggcagatgatgcattcgttggtttctcttatgcacctccttcagaag

SEQ ID NO: 8233 - DNA, 60 bp, Homo sapiens
gctgctgctgttactctcttctaggattctggtggtaaagtagagaaactcggacactat

SEQ ID NO: 8234 - DNA, 60 bp, Homo sapiens
acgaacgtcggaaacgacatcgagaagaacaggataaagctcgccgggaatgggaaagac

SEQ ID NO: 8235 - DNA, 60 bp, Homo sapiens
tcctttaccagaccacttctcagaaaatgcagcagactttgtgcgcatgtgcctgaccag

SEQ ID NO: 8236 - DNA, 60 bp, Homo sapiens
catgaacattggcttcctccatagagaagaaatcagtatctgagttgcataccaggcagt

SEQ ID NO: 8237 - DNA, 60 bp, Homo sapiens
ctgtttaacagaatatgagctgtctgtcatttacctacttctttcccactaaataaaaga

SEQ ID NO: 8238 - DNA, 60 bp, Homo sapiens
gctgattggtgttaagttgctagacactgcgaaaccaagctgactcacaagaagacctct

SEQ ID NO: 8239 - DNA, 60 bp, Homo sapiens
ttaggctgtgaggaaatggaaggatacggacctcttaaagcacacccgttcttcgagtcc

SEQ ID NO: 8240 - DNA, 60 bp, Homo sapiens
accggcacacaacacgtgcacaagaccggcccccagaaaaccggcgacacaccacaaggc

SEQ ID NO: 8241 - DNA, 60 bp, Homo sapiens
acccatggacacctccaactttgatgtggatgacgacaccctcaaccatccagggaccct

SEQ ID NO: 8242 - DNA, 60 bp, Homo sapiens
ctgtttgacaaagtggtggggaataaacgcctgaaagaagctacctgcaagctctatttt

SEQ ID NO: 8243 - DNA, 60 bp, Homo sapiens
aagtttcttggttcagagcaggaaaaccttcaaggagctgactgaccacgtagcatgggg

SEQ ID NO: 8244 - DNA, 60 bp, Homo sapiens
ggagacaaaagcaagatagccaaatgtgacatcaagctccattgtttcggaaatccagga

SEQ ID NO: 8245 - DNA, 60 bp, Homo sapiens
ggactcttctggggacacttggggtccacaatcccaggtccatactctaggttttggata

SEQ ID NO: 8246 - DNA, 60 bp, Homo sapiens
aagtctgtccccagacctctcaccaccatagacaaggtgtcagggaaacgggtagttaat

SEQ ID NO: 8247 - DNA, 60 bp, Homo sapiens
gccattcagcagcatatcagatgacttatttggcccatccgagtctgtgtagcagacagg

SEQ ID NO: 8248 - DNA, 60 bp, Homo sapiens
gcaaaccaacatgggaaatccagtgacagttgtgacagctaccacaggatcaaaacagaa

SEQ ID NO: 8249 - DNA, 60 bp, Homo sapiens
tatgtagtatgtcaggactcaatccctgagctcttgaccctggctacgcttacttggggt

SEQ ID NO: 8250 - DNA, 60 bp, Homo sapiens
cctggaatggaggctgggagatgtggcttatttgctgggtacgtgactatccctaataac

SEQ ID NO: 8251 - DNA, 60 bp, Homo sapiens
gggcacactgcttgcagttggctgtaatgatggccgaattgtcatctgggatttcttgac

SEQ ID NO: 8252 - DNA, 60 bp, Homo sapiens
ggctatctaggggctgctgggaagatggcggactcggtggctagccgatgaggaggccgc

SEQ ID NO: 8253 - DNA, 60 bp, Homo sapiens
ggacagagctgatggtgtccatgggttatacacgggaagagatccaggactcgctggtgg

SEQ ID NO: 8254 - DNA, 60 bp, Homo sapiens
aatgtaccaggtgaactgacggagctcagaagttttcctttacaccaactgtcaatgccg

SEQ ID NO: 8255 - DNA, 60 bp, Homo sapiens
ttcagtggctccaatgaggtcgaccagatgaaccgcattgtggaggtgctgggcatccca

SEQ ID NO: 8256 - DNA, 60 bp, Homo sapiens
tgaggctctgggtggaagaccccaagaaactgaagggaaagcccaaggacaatggagcca

SEQ ID NO: 8257 - DNA, 60 bp, Homo sapiens
tatagagtataactcatcgtttacagtatgttttagttggcagtatcatacctagatggt

SEQ ID NO: 8258 - DNA, 60 bp, Homo sapiens
atcaaacacgtggagaaggaccggatttccgactggggagagctgcctaatggcactcga

SEQ ID NO: 8259 - DNA, 60 bp, Homo sapiens
aaaactgctttcccttatgttcactgtgccataatgctgctcgcaggaaatggcatttta

SEQ ID NO: 8260 - DNA, 60 bp, Homo sapiens
aagacttccgccctcgatcaagatggtggttggacggccttcctaacctttacggggcct

SEQ ID NO: 8261 - DNA, 60 bp, Homo sapiens
gaggttcaaaaggaagtgcctcaaagcaaaggcaagcaaaggaaccccacgatgaacttg

SEQ ID NO: 8262 - DNA, 60 bp, Homo sapiens
ttttgcaagtcacctccccagttctccaacgcttacaaggtgtgctccgacaactcatgt

SEQ ID NO: 8263 - DNA, 60 bp, Homo sapiens
ggccttcgctgcctcgaacgtgcgcggctcgctcaacgtcaacctcaactcggtggtgct

SEQ ID NO: 8264 - DNA, 60 bp, Homo sapiens
cagtcaacagaacagtatgatccatttgctgagcacagacctccaaagattgcagaccgg

SEQ ID NO: 8265 - DNA, 60 bp, Homo sapiens
ctcccacagggatgttgcctagtggagtgttagctggaggacggcagaccctgcaaagtg

SEQ ID NO: 8266 - DNA, 60 bp, Homo sapiens
atattcctccaattcaggacccacacgacgggaagacaagttcatgtactttgagttccc

SEQ ID NO: 8267 - DNA, 60 bp, Homo sapiens
gacattgccagaggacttggcgaggatgtacagggatgatatcactgtcactgtggtgta

SEQ ID NO: 8268 - DNA, 60 bp, Homo sapiens
ttttacttttggcaggtaaatccaagctccctggagcacaaagagtgtttgagctcttct

SEQ ID NO: 8269 - DNA, 60 bp, Homo sapiens
gtcacaagcccaacatctcaggactcttgactgcaggttcctctgaaccccaaactgtaa

SEQ ID NO: 8270 - DNA, 60 bp, Homo sapiens
tttatagctgtctttttgggacctttttgtgcaactgtgaacagcagcgattcaaagagg

SEQ ID NO: 8271 - DNA, 60 bp, Homo sapiens
caacgtcaccactcatcttcccctctaccactatgagaaaggcctgttcaactacaagcg

SEQ ID NO: 8272 - DNA, 60 bp, Homo sapiens
aggcgtgatgcgtagttccggctgccggttgacatgaagaagcagcagcggctagggcgg

SEQ ID NO: 8273 - DNA, 60 bp, Homo sapiens
tagttccaaaaggaccaaatgggactgaaggggcatctcggacagtttgcaatagaactg

SEQ ID NO: 8274 - DNA, 60 bp, Homo sapiens
agctcttgtggaccttcaggaagcctttctaggaagaggattgccctcatagtgagctcc

SEQ ID NO: 8275 - DNA, 60 bp, Homo sapiens
cagcccctgacatctgccatcgatcttgcaccaagactgaacttgaacactgacattttg

SEQ ID NO: 8276 - DNA, 60 bp, Homo sapiens
ctaagcttgacatctgtgagtgactgagggagacaggaggaataccaggttattcatgga

SEQ ID NO: 8277 - DNA, 60 bp, Homo sapiens
gtacagtgagagttaacaatcctaggaatcctgcctgtcacaagctcccagttccctgtc

SEQ ID NO: 8278 - DNA, 60 bp, Homo sapiens
accaaaatgtcctcggtatttgaggatcagaacgcagcaacccatctcattcgccacgct

SEQ ID NO: 8279 - DNA, 60 bp, Homo sapiens
cctcagggagcagaggatgttcatgatccagactatcgctcagtacaagtttgtctacca

SEQ ID NO: 8280 - DNA, 60 bp, Homo sapiens
agcttcgcctcaacagcatcaagaagctgtccaccatcgccttggcccttggggttgaaa

SEQ ID NO: 8281 - DNA, 60 bp, Homo sapiens
gagttaacatcgaacggacgagcacacaaaggaaatataggctggcaacgcgggactaat

SEQ ID NO: 8282 - DNA, 60 bp, Homo sapiens
gggttggaacagggagagcagcagccatgtcagctacacgctcaaatgtgcagatgatta

SEQ ID NO: 8283 - DNA, 60 bp, Homo sapiens
ctgttcagtgaagacggtgtcaccctggatgacatccggaaaattgagcggaatcgacaa

SEQ ID NO: 8284 - DNA, 60 bp, Homo sapiens
cgccatgtcgggctcgttcgagctctcggtgcaggatctcaacgacctgctctcggacgg

SEQ ID NO: 8285 - DNA, 60 bp, Homo sapiens
atgcaaacccttggccagtgcaagcatcagccagaagaaccaccttcctcaggactccca

SEQ ID NO: 8286 - DNA, 60 bp, Homo sapiens
ggtccagactgagtgtcagtatgtctacctacatcagtgtgtaagagatgtcctcagagc

SEQ ID NO: 8287 - DNA, 60 bp, Homo sapiens
gctcacaggtggactgagaaatcagttacatcttaagtgacctacagggtatatgttggc

SEQ ID NO: 8288 - DNA, 60 bp, Homo sapiens
ggtaaaggaaggacgactggaagaggaagtagccttaaagataatcaatgatggggctgc

SEQ ID NO: 8289 - DNA, 60 bp, Homo sapiens
gctgcagtgtacgatggcagatgtgcttttagaagaggtacagcagtcaactaatgacac

SEQ ID NO: 8290 - DNA, 60 bp, Homo sapiens
agagcatctgagcacgtctctgacttccagtggcaacacagtttgaacgtggtgaaacag

SEQ ID NO: 8291 - DNA, 60 bp, Homo sapiens
gttggtctgggaagcatttcatggatagggagagctcctctcggtgaacagtccaaaact

SEQ ID NO: 8292 - DNA, 60 bp, Homo sapiens
gagactgactgtaaagtcttatcttttggcttctatgaacttccctgtacttggacaggg

SEQ ID NO: 8293 - DNA, 60 bp, Homo sapiens
atggacacttcgccatccaggcagaactaagccaggcataaccacagccaagcagattaa

SEQ ID NO: 8294 - DNA, 60 bp, Homo sapiens
cactttgtgaagttggttcgagcaagcagggcacatgacaccacacctatgattgttcac

SEQ ID NO: 8295 - DNA, 60 bp, Homo sapiens
caacctactagaaggcttgaatctcggtgtctttcctgcttccatgagagccgaggttca

SEQ ID NO: 8296 - DNA, 60 bp, Homo sapiens
atgtgtacagcctacccatgcagggactgggattcgaggacttccaggcgcatagggtag

SEQ ID NO: 8297 - DNA, 60 bp, Homo sapiens
tggagagccgtgatatgttccagttgcacatttcctgcaaggactccaaagtggtgaggt

SEQ ID NO: 8298 - DNA, 60 bp, Homo sapiens
gacctggtacccagtgatccccaccccaggatcctaaatcatgacttacctgctaataaa

SEQ ID NO: 8299 - DNA, 60 bp, Homo sapiens
attgaaagggctgtttatctgctcagtgctggtcaagatgtccaaggaacaagtgtgatt

SEQ ID NO: 8300 - DNA, 60 bp, Homo sapiens
ttgatttgtatccactgtcaccagcactgctcacttaggactttctggatccggacccag

SEQ ID NO: 8301 - DNA, 60 bp, Homo sapiens
aggtggcgtacgacggtgttgagatcactgtgcagaaagtcattcacacggaggattacc

SEQ ID NO: 8302 - DNA, 60 bp, Homo sapiens
caagctcgttttgacaggagccattcaagtagcagacaaagtttcttcagggaagagttc

SEQ ID NO: 8303 - DNA, 60 bp, Homo sapiens
gacccttttgagggtatggagagatggtatacagcaggtaactgtggattgcagaataaa

SEQ ID NO: 8304 - DNA, 60 bp, Homo sapiens
gtggaagcttgtgtcagtattgcccagttattgtctcaggatgaccttgagactttggtg

SEQ ID NO: 8305 - DNA, 60 bp, Homo sapiens
gtagatatgtgcaaggtagcatgatgagcaacttgagtttgttgccactgagaagcaggc

SEQ ID NO: 8306 - DNA, 60 bp, Homo sapiens
ccctgaaaatgggtggaagctatatgaccctcttttagagtatagaaggcagggaattcc

SEQ ID NO: 8307 - DNA, 60 bp, Homo sapiens
cccaagcccactccaaacaaagtgtaaggatcagagttctgtcaaggagcagcagttctg

SEQ ID NO: 8308 - DNA, 60 bp, Homo sapiens
aagtcccaagatgccagaaaggcagtctcccaaggacccaccatgcagaagtgtcaataa

SEQ ID NO: 8309 - DNA, 60 bp, Homo sapiens
gaggagtcggctctgagagctctgagggagaagctgtttgctcattcttcagatcttctc

SEQ ID NO: 8310 - DNA, 60 bp, Homo sapiens
accatccacagtcaatggctgtgctttcccttccaagccagggcttccaaagaccccact

SEQ ID NO: 8311 - DNA, 60 bp, Homo sapiens; identical to SEQ ID NO: 4855

SEQ ID NO: 8312 - DNA, 60 bp, Homo sapiens
tgaacaccatccctcccactagcctctccatacttactcctctcacagcccaaattctga

SEQ ID NO: 8313 - DNA, 60 bp, Homo sapiens
gtagcaaaggctacacagcagcccacagtccacagtctttttgggaaaattggcctgcca

SEQ ID NO: 8314 - DNA, 60 bp, Homo sapiens
tttccccttatccccactgctgtggaggtttctgtacctcgcttggatgcctgtaaggat

SEQ ID NO: 8315 - DNA, 60 bp, Homo sapiens
gtgcttatgggccctactctgtgaccaactgcggggagcatgacacaaccgaatacaaac

SEQ ID NO: 8316 - DNA, 60 bp, Homo sapiens
gaaacggctagttgatggggagtgctcaacagcacgactccctgaaaatgcagaaagaaa

SEQ ID NO: 8317 - DNA, 60 bp, Homo sapiens
agttgattgtagccaacgcaggagactctcgctgtgtggtatctgaggctggcaaagctt

SEQ ID NO: 8318 - DNA, 60 bp, Homo sapiens
gacgtcctaaacaaggatctgatgacgcaaaatggaataagctacgtcctcaacgccagc

SEQ ID NO: 8319 - DNA, 60 bp, Homo sapiens
agaccctgctgagagcatggagtccctagtgtgactggaatcctgaaagggcacttaatt

SEQ ID NO: 8320 - DNA, 60 bp, Homo sapiens
acaaggcaggaagagaatccatccacctctctggacagtaatggtgcagcattgcctgat

SEQ ID NO: 8321 - DNA, 60 bp, Homo sapiens
gccatcagttacgctgaagccatggatcaacttctttcttgtgtctcccagcacacgtgt

SEQ ID NO: 8322 - DNA, 60 bp, Homo sapiens
accacctgaagaacaagaaccggctggagaaggagtgggaagcgatgtgcgcctaccagg

SEQ ID NO: 8323 - DNA, 60 bp, Homo sapiens
tcttcccttatagttttctatgggaatgaggcggatacaggaaacaccctatctcctctg

SEQ ID NO: 8324 - DNA, 60 bp, Homo sapiens
atatagggaagaaggcttggcctacatctggatgccaacaccagatatgagcaccgaagg

SEQ ID NO: 8325 - DNA, 60 bp, Homo sapiens
agcgacttctccctggtcatggagagttccccaggagccactgggagcttcacctatgag

SEQ ID NO: 8326 - DNA, 60 bp, Homo sapiens
aagtttcagttactccaccagaagaatcccagaattcagacacacctccaaggccagacc

SEQ ID NO: 8327 - DNA, 60 bp, Homo sapiens
caggaaggaatttgggtctggagttctggctacttgaggaccaaaggcaggaaggatcct

SEQ ID NO: 8328 - DNA, 60 bp, Homo sapiens
ggcatgatggggattgctgcatatcagcagttggatgttcttgcctctgacagtagctta

SEQ ID NO: 8329 - DNA, 60 bp, Homo sapiens
gggaggaaaagttcttgtgcatggaaatgcagggatctccagaagtgcagcctttgttat

SEQ ID NO: 8330 - DNA, 60 bp, Homo sapiens
ttgatgactctgtgatacttagaccaagcaagagtgtaaaactccgaagtcctaaatcag

SEQ ID NO: 8331 - DNA, 60 bp, Homo sapiens
cagatgtcttgacgggatcactggggctctttgtgagtgagggtggccaaactaccgccg

SEQ ID NO: 8332 - DNA, 60 bp, Homo sapiens
ctgcagaaccagaattggtttccagagcctcatccaaaaggagtgggtcatgggtggcca

SEQ ID NO: 8333 - DNA, 60 bp, Homo sapiens
aaatcagctagacgctataccgtggactctccctggtccaccaccatgttgaagcccttg

SEQ ID NO: 8334 - DNA, 60 bp, Homo sapiens
gagtctctgtatggaagaacaaatgtgtgcattcacccccagtcacaatggtctccattg

SEQ ID NO: 8335 - DNA, 60 bp, Homo sapiens
gcagaaagtatcctgcagtttgtacacatggtccgacagcaagctaccaagagcaaaggt

SEQ ID NO: 8336 - DNA, 60 bp, Homo sapiens
catgagtattgtactagtttgcttttcaaatgctcccaaggtctcagatgaagcggtgaa

SEQ ID NO: 8337 - DNA, 60 bp, Homo sapiens
ttctgtgcgcactggtgatgacaaaggggagagcaatgacggcaagtctaaagtgaccca

SEQ ID NO: 8338 - DNA, 60 bp, Homo sapiens
cagagggtacaagctccagaacagtaaccaagtgggaaaataaagacttcttggatgact

SEQ ID NO: 8339 - DNA, 60 bp, Homo sapiens
ctgcgtgaatgaagctgagagcaagccaacagcaggcctaaaggaagtgtccatttcaca

SEQ ID NO: 8340 - DNA, 60 bp, Homo sapiens
tgacaccacgccagatcacagggcaccaggccagagatagtcttctttttgtcctttctg

SEQ ID NO: 8341 - DNA, 60 bp, Homo sapiens
tacagctgacagagacttctcttcaggagagactgccacatatcgtcgttgtcaccctga

SEQ ID NO: 8342 - DNA, 60 bp, Homo sapiens
cactcacacttggtcgactacttccccgagttcgatgggccacagagggacgcacaggcc

SEQ ID NO: 8343 - DNA, 60 bp, Homo sapiens
gacctggagaacatcatcttcaggatggcggatgttgggggacagcggtcggcgcagagg

SEQ ID NO: 8344 - DNA, 60 bp, Homo sapiens
ttggagtcgaccccaagcgacagagtgaccagaaacccttttacagtcacattcagagtc

SEQ ID NO: 8345 - DNA, 60 bp, Homo sapiens
tccccggagtccccttccaaaaagggacccatccccatccggcgtcactaatggaggacg

SEQ ID NO: 8346 - DNA, 60 bp, Homo sapiens
cccctcgcttctatgactgtgcttgcagaagagtaaacactctcggatgccgctgtcctg

SEQ ID NO: 8347 - DNA, 60 bp, Homo sapiens
atattgtcacatgacttgtgccacagacacgaataacatccaggtggtgttcgacgccgt

SEQ ID NO: 8348 - DNA, 60 bp, Homo sapiens
tgatcacctcatctgacctgcacaaacatggagagatatgggttgtccccaatactgacc

SEQ ID NO: 8349 - DNA, 60 bp, Homo sapiens
acatcaccagagccagtcccatgccaggaactaaggatgtcatgtagatcgtggggacag

SEQ ID NO: 8350 - DNA, 60 bp, Homo sapiens
ggtcctctggttagtctctcaaattgaggctgtttagggaaatccttattcagttggtgg

SEQ ID NO: 8351 - DNA, 60 bp, Homo sapiens
cctgagcacatataactgtcagctgctaaaagcttccagcaagaaatgcatccctgatcc

SEQ ID NO: 8352 - DNA, 60 bp, Homo sapiens
aaggtggaagaaggtccatatctttttctgtgggtgcttcaagtgttgttggaagtggag

SEQ ID NO: 8353 - DNA, 60 bp, Homo sapiens
agtagctgtgtgtccgaggtcagtgtgcggaatcacagccaaggacgtgaagagatgtac

SEQ ID NO: 8354 - DNA, 60 bp, Homo sapiens
ctgggtgaatgcgaccagggctgcctggcccttgctgagctccttggatggaagaaggag

SEQ ID NO: 8355 - DNA, 60 bp, Homo sapiens
catgaaggagagcctcgcattgtttgggactatcctggaactaccctggttcaaaagcac

SEQ ID NO: 8356 - DNA, 60 bp, Homo sapiens
agccatcgtggcccacttgacactgtgctcctccatcagctggtcacatgccaacacgtt

SEQ ID NO: 8357 - DNA, 60 bp, Homo sapiens
gatgtgtctgcaggaggagccactgtttttcctgaagttggagctagtgtttggcccaaa

SEQ ID NO: 8358 - DNA, 60 bp, Homo sapiens
gtgacagttcttcaggcatttctatttcacatcgattgacaatgcaataagtgaatttac

SEQ ID NO: 8359 - DNA, 60 bp, Homo sapiens
gaggagaacaggtatctctttccagaagtggacatgactagcacaaacttcacaggcctg

SEQ ID NO: 8360 - DNA, 60 bp, Homo sapiens
tgtcgccagctaccgggtttccaaaagctcctggctagaggaagatgatgaccctgttgt

SEQ ID NO: 8361 - DNA, 60 bp, Homo sapiens
ttgctgtcgtttcagacttggatcctataaacctgtcaattctgttccttttgaggatgg

SEQ ID NO: 8362 - DNA, 60 bp, Homo sapiens
caggagttctccaacatggaccttcgggacttccacaagtacatgaggagccacaaggca

SEQ ID NO: 8363 - DNA, 60 bp, Homo sapiens
ccaacagacccacattaaaggaaatactatagcattctttaggcagaacgaaatgatccc

SEQ ID NO: 8364 - DNA, 60 bp, Homo sapiens
aggcattggctgagaagtaccaagaccacgaggacatcatcattgctgagctggatgcca

SEQ ID NO: 8365 - DNA, 60 bp, Homo sapiens
tcaggctgaggacgtggctacctacaaggtcaattacaccagatggctctgttactgcca

SEQ ID NO: 8366 - DNA, 60 bp, Homo sapiens
gaattccctctgttccttcatctccgaggccgagagcctctgccagaactggcggggatg

SEQ ID NO: 8367 - DNA, 60 bp, Homo sapiens
tttcagacacagaagtctgtccatggctccttgtcacatccgcaaataccaggagagcga

SEQ ID NO: 8368 - DNA, 60 bp, Homo sapiens
cccacaaacacaggagggacacacatcaccaaaacccggctaacccgctaggaagacgcg

SEQ ID NO: 8369 - DNA, 60 bp, Homo sapiens
ctgattcgtgtacagtgacagagagggatattggaggctttttccccaacaggagtaact

SEQ ID NO: 8370 - DNA, 60 bp, Homo sapiens
ggattatgaaggagccactttaatgggatgtgagctaaatccacggatcccgtacacaga

SEQ ID NO: 8371 - DNA, 60 bp, Homo sapiens
gccttcttgcctgctgtgaatgaagtcgacaatcctaatgtggcactgaaccatacagct

SEQ ID NO: 8372 - DNA, 60 bp, Homo sapiens
ctaatttctgctcccctgagattcgtccttcagccccatcatgtgctttgggatgagtgt

SEQ ID NO: 8373 - DNA, 60 bp, Homo sapiens
ctcagtggccccaagagggagctgatatcatgaggataacattggcgggaggggagttaa

SEQ ID NO: 8374 - DNA, 60 bp, Homo sapiens
gagaaaacttgagacttcatcgtccatgtagaacacaccttttccaaagcttccagaagc

SEQ ID NO: 8375 - DNA, 60 bp, Homo sapiens
cacggagcacgttctcggtgtgcagctcatcctgactttctcctatcgattacacaggat

SEQ ID NO: 8376 - DNA, 60 bp, Homo sapiens
atgttattggaggcagcattgccccggtttttcaggggtgctactgaactctatcgcaca

SEQ ID NO: 8377 - DNA, 60 bp, Homo sapiens
gctgttacgggtactttgctcatacgagctttcatgttcagcatgcaatggaatcatgct

SEQ ID NO: 8378 - DNA, 60 bp, Homo sapiens
atggtgggcaccaaccacgtggaataccgctatggcaaggccatgccgctcatcttcgtg

SEQ ID NO: 8379 - DNA, 60 bp, Homo sapiens
agttctggtctccttttgactggactgtggctctgaaccttgagcatagtaccacggact

SEQ ID NO: 8380 - DNA, 60 bp, Homo sapiens
gtcatcgggatcgagtgttccagtatctctgattatgcggtgaagatcgtcaaagccaac

SEQ ID NO: 8381 - DNA, 60 bp, Homo sapiens
atggaagaatgggatatgctgaagaagccccttatgatgccattcatgtgggagctgcag

SEQ ID NO: 8382 - DNA, 60 bp, Homo sapiens
atgaaacaggctggtagaggaggtttctgagcctagcccaagggcttattcatcaccatg

SEQ ID NO: 8383 - DNA, 60 bp, Homo sapiens
gcagatggatggatgatggaccctttcctaatgagcctcctcaataagagagaagttctc

SEQ ID NO: 8384 - DNA, 60 bp, Homo sapiens
ggtctgtggagtggctggaggaggatgaacactatgattaccaccaggagattgcaaggt

SEQ ID NO: 8385 - DNA, 60 bp, Homo sapiens
ctgccagaaagtccaggtggcaccaccactttagaaggttctccatctgtgccttgtatt

SEQ ID NO: 8386 - DNA, 60 bp, Homo sapiens
gccgaatcaaggcggaacatgggtgaaagacgagtaaggggcaaatcacagcaatattcc

SEQ ID NO: 8387 - DNA, 60 bp, Homo sapiens
tttgcagaacccatcggtggattccagtgtgtgtttcctggctgttagtgacctgctgtc

SEQ ID NO: 8388 - DNA, 60 bp, Homo sapiens
gtttgccttgatgcagccaaagtgcgttccagttcaccccactcttgcttgtgtttcttc

SEQ ID NO: 8389 - DNA, 60 bp, Homo sapiens
gggatgatgttaatgactttggagcactgaaagttactgaagtgccttctgaatcaagga

SEQ ID NO: 8390 - DNA, 60 bp, Homo sapiens
ctgctccctttgaaagcattcattttgctagaactgttagacacattgcagtatgctgta

SEQ ID NO: 8391 - DNA, 60 bp, Homo sapiens
acccatggaatgatgacttcatgttcttctcgtgggtttgtgccgtgctgctttccaaat

SEQ ID NO: 8392 - DNA, 60 bp, Homo sapiens
ggtggtagtggcagtgttcgtgtgctcaggtctgaatcgccgagggaggaggcggtggag

SEQ ID NO: 8393 - DNA, 60 bp, Homo sapiens
ccagagacacgccatacgatcggagacactcccggacgcctagcacgcacaggggccaga

SEQ ID NO: 8394 - DNA, 60 bp, Homo sapiens
ggagagaattgaagaaagcgcactttcactcttaatgggagagctataaatggcagagct

SEQ ID NO: 8395 - DNA, 60 bp, Homo sapiens
tgaagaagcagtctgcagggcttgtgctgtggggcgctatcctctttgtggcctggaatg

SEQ ID NO: 8396 - DNA, 60 bp, Homo sapiens
agcttcaggcctcagtgtctgccagtcaagcttcacaggcattgtgatggggcagccttg

SEQ ID NO: 8397 - DNA, 60 bp, Homo sapiens
ggctctcctagtcctaccactgacttctcttatggaatacctgctgcagagatttcatgt

SEQ ID NO: 8398 - DNA, 60 bp, Homo sapiens
ccacctgaacctgtgtgttaccaatgctatgcgagaagacctggcggataactggcacat

SEQ ID NO: 8399 - DNA, 60 bp, Homo sapiens
gccagagtcacaggaaggacttcttccagggagattagtggtgatggagaggagagttaa

SEQ ID NO: 8400 - DNA, 60 bp, Homo sapiens
ccaaagcgacaattaccttgtatggcaagtcagatgaaggtgaaagtatgccaacatttg

SEQ ID NO: 8401 - DNA, 60 bp, Homo sapiens
gacctaaggtgttggtattttccaggtgtcgggggaaatgaactggtgaaggggttttgt

SEQ ID NO: 8402 - DNA, 60 bp, Homo sapiens
atgtatgcgcccaagtacctgctgaagaactacgaccggttccactacctgctggacaac

SEQ ID NO: 8403 - DNA, 60 bp, Homo sapiens
ggacacacagtgtgggttcaaattatttactcgagaagcagcttcacggacgttttcatc

SEQ ID NO: 8404 - DNA, 60 bp, Homo sapiens
cattctgtagactagaatttcttaaaagggtgttactgagttataagctcactaggctgt

SEQ ID NO: 8405 - DNA, 60 bp, Homo sapiens
aacgtcgccaagacctcgagaaatgcccccgaagagaaggcgtctgtaggaccctggtta

SEQ ID NO: 8406 - DNA, 60 bp, Homo sapiens
aatgagaatcatggtgtgacactcatctaatttatcttgttgtgatgttatggtcataat

SEQ ID NO: 8407 - DNA, 60 bp, Homo sapiens; identical to SEQ ID NO: 4855

SEQ ID NO: 8408 - DNA, 60 bp, Homo sapiens
cagggccactcttggcagagactttgggtttgtaggggtcctcaagtgcctttgtgatta

SEQ ID NO: 8409 - DNA, 60 bp, Homo sapiens
attgtggtcctagtcgtcagtgtgggtgtcacatggatcgtggtcagcatcctcctgggt

SEQ ID NO: 8410 - DNA, 60 bp, Homo sapiens
atcatagatgatggaagcccagatggaacaagggatgttgctgaacagttggagaagatc

SEQ ID NO: 8411 - DNA, 60 bp, Homo sapiens
aagctactcaatacgcgccacaacgtccgactgcactcacacgacgtgcgctatgggtca

SEQ ID NO: 8412 - DNA, 60 bp, Homo sapiens
tggtctccagaaccgctcccacggcaagataaagctgcgaaagagaaagtctaccttgta

SEQ ID NO: 8413 - DNA, 60 bp, Homo sapiens
gctgcagagcctggacaaatagaagctagaagagctattcggcaaacttggggcaatgaa

SEQ ID NO: 8414 - DNA, 60 bp, Homo sapiens
cagtaaccggcttatttcacgatcaggaactattgctgaagttggtaaatggttgcaggc

SEQ ID NO: 8415 - DNA, 60 bp, Homo sapiens
tctccctgttcttctatgtggtgacagatggcaaggaagtcctactaccagaggttgggg

SEQ ID NO: 8416 - DNA, 60 bp, Homo sapiens
gacttcctgaacgacaacattcgaagaggaattgagaactactatgatgatctggacttc

SEQ ID NO: 8417 - DNA, 60 bp, Homo sapiens
tgagcattgtccaagccctaagtatggttggcctaagctttgctgaagctaagatcagtc

SEQ ID NO: 8418 - DNA, 60 bp, Homo sapiens
tctcaatgtggttccctggaatctgaccctcttctccatcctgctggtcgtaggaggaat

SEQ ID NO: 8419 - DNA, 60 bp, Homo sapiens
cgacttcattgtaaagaaaactggacagaagcagctacactatgttggccattcccaggg

SEQ ID NO: 8420 - DNA, 60 bp, Homo sapiens
aatgtttgcatggtttaccctctgagttatgtttcttctagtgagcatgcctgctgtcac

SEQ ID NO: 8421 - DNA, 60 bp, Homo sapiens
ccattctgacaaaggtcccaaaccagttgtcttcctgcaacatggcttgctggcagattc

SEQ ID NO: 8422 - DNA, 60 bp, Homo sapiens
agatccacatcaccgaagctccctagaggggcaaaagatggagtgagccacaggaagttt

SEQ ID NO: 8423 - DNA, 60 bp, Homo sapiens
ctcgatattcctgtgcagaaacctggaccacgtctacaaccggctcgctcgataccgtta

SEQ ID NO: 8424 - DNA, 60 bp, Homo sapiens
gtcagtcaatagatggcatccctcatcagggttgccagatggtgataacagtgtaaggcc

SEQ ID NO: 8425 - DNA, 60 bp, Homo sapiens
cgtggaaggaagctccaggactggcgggatgggctcagcctgtatcaaagtcaccaaata

SEQ ID NO: 8426 - DNA, 60 bp, Homo sapiens
agatagtactgtgtgggatccagctggtgaacgcgaccattggtgtcttctgcggcgatt

SEQ ID NO: 8427 - DNA, 60 bp, Homo sapiens
gccccggatatctgtgttaccagccttgtctcggccacctcaaggataatcactaaattc

SEQ ID NO: 8428 - DNA, 60 bp, Homo sapiens
agtgggactgattgccgtgggtgtcggggcacagcttgtcctgagtcagaccataatcca

SEQ ID NO: 8429 - DNA, 60 bp, Homo sapiens
ctggattgctctccatacatcacgtggatatgagagtcaggcacataagctcttcatgcg

SEQ ID NO: 8430 - DNA, 60 bp, Homo sapiens
cccatccctgataaaggagccgtaaggctgcacccttgtgataacagaaacaaagggcta

SEQ ID NO: 8431 - DNA, 60 bp, Homo sapiens
ggctttcaggctagaggaagagcagaagatgaggccagaaattgctgggttaaaaccagc

SEQ ID NO: 8432 - DNA, 60 bp, Homo sapiens
atccagtacctgatggacctcggcgccaacctgtgggtcaccaagctctggaagttcatt

SEQ ID NO: 8433 - DNA, 60 bp, Homo sapiens
taatgagagaaatttaaatatggccgttaaattccaaaagtttcaagcctttgactgggg

SEQ ID NO: 8434 - DNA, 60 bp, Homo sapiens
tgatcaagttcaagtgggaaaacagtgcagtgtgggccaatgtctgggacacggtccaga

SEQ ID NO: 8435 - DNA, 60 bp, Homo sapiens
gctgctgcatgaacgaaactgattgtaatccccaggatctacacaatctgactgtggccg

SEQ ID NO: 8436 - DNA, 60 bp, Homo sapiens
ccaagtcagatggtacggacttcctttaggatctcaggcttctgcagttctcatgactcc

SEQ ID NO: 8437 - DNA, 60 bp, Homo sapiens
aagcctctattgccatgagagttctgtcacggtcactttactgtccccatcatcacccag

SEQ ID NO: 8438 - DNA, 60 bp, Homo sapiens
attcttcatgccccaggtgttcaacttcctctactcactgcctcagctcctgcatatcat

SEQ ID NO: 8439 - DNA, 60 bp, Homo sapiens
ccattccacagattttgaagtacaccgaaactggcttgctatcactcacagtttgccaat

SEQ ID NO: 8440 - DNA, 60 bp, Homo sapiens
tctaccctcaggacctggggttggttggactctgcccttccaaataaaccttgctaagtc

SEQ ID NO: 8441 - DNA, 60 bp, Homo sapiens
ccgatgaagtacagatgttgaagaggatatcgcaggacctaaacttgtgatcgtttgggg

SEQ ID NO: 8442 - DNA, 60 bp, Homo sapiens
ccaagatgcgctccattaggaagaggtggacgatctgcacaataagtctgctcctgatct

SEQ ID NO: 8443 - DNA, 60 bp, Homo sapiens
tggacctgagcctgattgtagagttcattctcatgttctaccgggacaagcccatcgact

SEQ ID NO: 8444 - DNA, 60 bp, Homo sapiens
cgcaatggaactgtagccactgctttagcatttatcacttccttccttactttgtcttgg

SEQ ID NO: 8445 - DNA, 60 bp, Homo sapiens
ctttggatccctgcatttttcttccacacttcagcaactgtgaccaggacattagttgac

SEQ ID NO: 8446 - DNA, 60 bp, Homo sapiens
gccctttccgctggatcagaaccagaacccagtcaagtaccactattatgacagcctcaa

SEQ ID NO: 8447 - DNA, 60 bp, Homo sapiens
atggtgaagctgaacagtaaccccagcgagaagggaaccaagccgccttcagttgaggat

SEQ ID NO: 8448 - DNA, 60 bp, Homo sapiens
agcataatctgccttttggtgcattacttggtcaattcagggttgaggagactgttgggg

SEQ ID NO: 8449 - DNA, 60 bp, Homo sapiens
actgcaatggaagtcggtcccagcagtggcttcttcgaaacgtcaccctgccagaaatat

SEQ ID NO: 8450 - DNA, 60 bp, Homo sapiens
caggtaggccatgacagttctggatggaaacccaggtcggtctgattccaaaactgcata

SEQ ID NO: 8451 - DNA, 60 bp, Homo sapiens
acgtggctgagtgaaatcttcctcgtcagtggtcaaggtgtgtcatccatacagctccat

SEQ ID NO: 8452 - DNA, 60 bp, Homo sapiens
gtgctgacacgcagctttgtggagtatgtggtgtacacagatgacccgcttgtggcccag

SEQ ID NO: 8453 - DNA, 60 bp, Homo sapiens
ggacactgtgaaatacactaacaggatggctgggtagagcaatctgggcactttggccaa

SEQ ID NO: 8454 - DNA, 60 bp, Homo sapiens
gaatggggcaggatgtcacctggaatcagcactaagtgattcagactttccttactttta

SEQ ID NO: 8455 - DNA, 60 bp, Homo sapiens
tccaggtttggtagcgtggaggagaactttgatggaaagagaaccttcccttctgtactg

SEQ ID NO: 8456 - DNA, 60 bp, Homo sapiens
agagccaagcttcaatgtctcttatgccctgcatttgtggaaccacatgaaccaggaggg

SEQ ID NO: 8457 - DNA, 60 bp, Homo sapiens
gtgaagctgacaccactgaagggagagttgagaggcagaaagagatcaagtccttggtga

SEQ ID NO: 8458 - DNA, 60 bp, Homo sapiens
aagagaaaggcctgcacacaagcccacagcacagctccctgccaaactgaagcatctgta

SEQ ID NO: 8459 - DNA, 60 bp, Homo sapiens
aaattgaagctgggggagactgtgcctgccgtccctacagtaggtttctgtgtggagaca

SEQ ID NO: 8460 - DNA, 60 bp, Homo sapiens
cagcaacgagaagctgtgcgagtttcacaagaccatctcctactgcaagacctgccttgg

SEQ ID NO: 8461 - DNA, 60 bp, Homo sapiens
ggcagcatgggcctggataagaacacagtgcacgaccaagagcatatcatggagcatcta

SEQ ID NO: 8462 - DNA, 60 bp, Homo sapiens
taccataagggactgtgccagatgttaggagaactactaaagtgcctaccccagctcatg

SEQ ID NO: 8463 - DNA, 60 bp, Homo sapiens
agcggcccctggacagttgcagagaaacacaggcttgtcgtgccgtttaagctttgcttg

SEQ ID NO: 8464 - DNA, 60 bp, Homo sapiens
ccccaatcccagaggcaacaatagagacacaggctgggttggtctgcccctcagtcaggc

SEQ ID NO: 8465 - DNA, 60 bp, Homo sapiens
tcccaagctacaggtggggtgggaaaggctttatcaggtatcatcaacaggttctcaatt

SEQ ID NO: 8466 - DNA, 60 bp, Homo sapiens
gcagacagagcttctctgggatgctgggattcttgcctgtatgaatgcatcaagtattca

SEQ ID NO: 8467 - DNA, 60 bp, Homo sapiens
aagtcagtggaggagctgagcagcaccgagtgccaccagtggtacaagaagttcatgact

SEQ ID NO: 8468 - DNA, 60 bp, Homo sapiens
atctgcagagtgagaagtccagccgcaccaccctccttgttcaactcaccttcgagggca

SEQ ID NO: 8469 - DNA, 60 bp, Homo sapiens
atatctttggtgctgtatttccttacgaggcgaagaaggacagggtggcggtgcagccca

SEQ ID NO: 8470 - DNA, 60 bp, Homo sapiens
tgaccctgcccttagcatgagccactggatgttccatcagcaggccctgcaggagtacat

SEQ ID NO: 8471 - DNA, 60 bp, Homo sapiens
acaaaatccatgaaagtgttcagcacaatgccgggcccatataaacgtcagtagttgttg

SEQ ID NO: 8472 - DNA, 60 bp, Homo sapiens
agctcggcctgctgtcgggcatctctgctgtcctccggctgtagggctacctgcctccct

SEQ ID NO: 8473 - DNA, 60 bp, Homo sapiens
tcgtacctgatggtaggaggcagtagttccccgcttcccttccgcgggagggagagttag

SEQ ID NO: 8474 - DNA, 60 bp, Homo sapiens
gtttctggtcctctatgcggagttcgtggtcctctttgtcatgctgattccatctcgaga

SEQ ID NO: 8475 - DNA, 60 bp, Homo sapiens
tggtcatagcgcaccctgacgatgaagccatgttttttgctcccacagtgctaggcttgg

SEQ ID NO: 8476 - DNA, 60 bp, Homo sapiens
gaaggatgagacaaaaggccagacagaaattggactttggttttcagacatgggactctc

SEQ ID NO: 8477 - DNA, 60 bp, Homo sapiens
ctgagttgatttgactttatctcagtactactcttgacctttcacaactttcgtaggttc

SEQ ID NO: 8478 - DNA, 60 bp, Homo sapiens
tcacagatggcagaggaagaggctctcagtccccacctgtacaacaacggaaaggtgtgt

SEQ ID NO: 8479 - DNA, 60 bp, Homo sapiens
ataattacttcaatgccatgtttgtcggtccgggctttgtccctctggggtggaaaccgg

SEQ ID NO: 8480 - DNA, 60 bp, Homo sapiens
gtcaagaggctaggtattcctgacagtcacattgtcctaatgcttgcagatgatatggcc

SEQ ID NO: 8481 - DNA, 60 bp, Homo sapiens
attttgatggacaaagtggcacatccagtggagcggtggtagatcctgatagacatgggg

SEQ ID NO: 8482 - DNA, 60 bp, Homo sapiens
gctcacagaactgcagggtatggtgagaaaccaactacggattgctgcaaaccacacctt

SEQ ID NO: 8483 - DNA, 60 bp, Homo sapiens
gcgtttggctcagagggctacagactatggccagaactcatctgttgattgctagaaacc

SEQ ID NO: 8484 - DNA, 60 bp, Homo sapiens
gaggcaccaagtcagactcggcatctgattcccaggagattaaaattcagcagccttcga

SEQ ID NO: 8485 - DNA, 60 bp, Homo sapiens
gaataatggtcctgttttaggacatgaagaagaagttgggagaaggacaaccttccgact

SEQ ID NO: 8486 - DNA, 60 bp, Homo sapiens
gagaagcagtaccgacaatgacgaagataccagatcccttcccaacccctttgcaccggt

SEQ ID NO: 8487 - DNA, 60 bp, Homo sapiens
ccccaggagaatatcatcgacactttcgtggtggagaacgcaaacggagaggtgacagat

SEQ ID NO: 8488 - DNA, 60 bp, Homo sapiens
aaatctccatcagagcaaggcagccagagaagcccctgagagggaatgattgggaagtgt

SEQ ID NO: 8489 - DNA, 60 bp, Homo sapiens
tgttgccttctctgattcattcacaaaactgtggtggttctgaccacctgtgacgagggg

SEQ ID NO: 8490 - DNA, 60 bp, Homo sapiens
gttatgttcagaaccccactggcttctgttcagaaatcagcagcccagacttctctcaaa

SEQ ID NO: 8491 - DNA, 60 bp, Homo sapiens
gaagatggaactctggagcacttcagagacttcccagagcttcttccaagggagaagata

SEQ ID NO: 8492 - DNA, 60 bp, Homo sapiens
tacaggtgccagtgcctccagaatgtggcagctcacaagcctcctgctgttcgtggccac

SEQ ID NO: 8493 - DNA, 60 bp, Homo sapiens
gagagcagtgtgagagaacatgaagatgactgagcagacaatcaggaatacagccaaggg

SEQ ID NO: 8494 - DNA, 60 bp, Homo sapiens
cagctcttgtgaacctagaaaaggcaccactgaaagtacttgaaaactggtggtcagtac

SEQ ID NO: 8495 - DNA, 60 bp, Homo sapiens
atgacatccacctgctgtactcagggaagacggtggaaatcaacaacacggatgccgagg

SEQ ID NO: 8496 - DNA, 60 bp, Homo sapiens
ctgctctaacacgtgaccacagtttagatgaacaatggaccaagtggaaggcaaagcaca

SEQ ID NO: 8497 - DNA, 60 bp, Homo sapiens
aggtgattgcatactcggaacatcgttaccgtatctttggggaaaccatcgatattgcag

SEQ ID NO: 8498 - DNA, 60 bp, Homo sapiens
gccaccacaacagcacacgaacacacgccgcggtacccacaccaagaacaccgaggcctc

SEQ ID NO: 8499 - DNA, 60 bp, Homo sapiens
ttctggatggagtacggcgactttgtcaggtacttcgactccgtggacatctgtaaggtg

SEQ ID NO: 8500 - DNA, 60 bp, Homo sapiens
ctcgctcttctgcgacttgtctacgccgctggcccagttccgcgaggacatcacgtggag

SEQ ID NO: 8501 - DNA, 60 bp, Homo sapiens
ttatgcccaatcggttttcacagctccagaggctgaccctcatccactggaagtctcagg

SEQ ID NO: 8502 - DNA, 60 bp, Homo sapiens
gttcctaatgagtagaggcctgcatgctccgtgaactggggatctttggtagccgtccat

SEQ ID NO: 8503 - DNA, 60 bp, Homo sapiens; identical to SEQ ID NO: 4855

SEQ ID NO: 8504 - DNA, 60 bp, Homo sapiens
tggggtgcttcttgtagccctcagctctccagtctctgctgatgaaatgggatccaggtg

SEQ ID NO: 8505 - DNA, 60 bp, Homo sapiens
agtccatgagtgatgtcagcgcagaagatgttcaaaacttgcgtcagctgcgttacgagg

SEQ ID NO: 8506 - DNA, 60 bp, Homo sapiens
gcaaagacccaagtgcaattggaaagaagcaggttccctgttttgcctcaatgctaacta

SEQ ID NO: 8507 - DNA, 60 bp, Homo sapiens
actgaaggctacaacaactgggtcttcatgtccacccacttctgggatgagaacccacag

SEQ ID NO: 8508 - DNA, 60 bp, Homo sapiens
cctcagatacagggagaaggacaaggcatacagcttattgattagagctggcaagcatct

SEQ ID NO: 8509 - DNA, 60 bp, Homo sapiens
tctgcctgggcttatgccctcagatggagacattggatgtggagctcctgctggatgcgt

SEQ ID NO: 8510 - DNA, 60 bp, Homo sapiens
agacaaccagtggggatgagaggctgtacccctcacccacatcctacatccatgagaatt

SEQ ID NO: 8511 - DNA, 60 bp, Homo sapiens
ggcaagttcaagttctacagaatcttactacaacatatgagattgttctctggcagccgg

SEQ ID NO: 8512 - DNA, 60 bp, Homo sapiens
taatactgtgggcaacgacactatgtttctagttacgtggcaggccagtggtcctcctga

SEQ ID NO: 8513 - DNA, 60 bp, Homo sapiens
actgtccagagcatccaggtccccaaccaggagttcggcttgagtgagaatgagcctggt

SEQ ID NO: 8514 - DNA, 60 bp, Homo sapiens
gccccttcactgaagacctttccagctttggtgatctacgattctatcacagcaagcaac

SEQ ID NO: 8515 - DNA, 60 bp, Homo sapiens
aactatcaccacaactgaagtgaggaacggacccatcattcccaagtgcccttgtgccct

SEQ ID NO: 8516 - DNA, 60 bp, Homo sapiens
ccttatattgctggaaactcagctgtgctccagactagagcctccttacctatgctatgg

SEQ ID NO: 8517 - DNA, 60 bp, Homo sapiens
aaactcgcaaaatgggtggctatccagagtgtgtctgcgtggccggagaagagaggcgaa

SEQ ID NO: 8518 - DNA, 60 bp, Homo sapiens
gaattagtaggttaaactaaacaacatactgtcataggaaaactggagagcttaaccaac

SEQ ID NO: 8519 - DNA, 60 bp, Homo sapiens
gaggtggttatgactcgtgctgcatgcctggtctttcctctgtttctccttctgaaagtt

SEQ ID NO: 8520 - DNA, 60 bp, Homo sapiens
cacttggtgggtgatcaggatcagtgtgacagtcttctcaaggcctatgtgcatgaattc

SEQ ID NO: 8521 - DNA, 60 bp, Homo sapiens
agagaaactgcagaattttgcacagttacctgcacaccgagtcacggactcctgcatcgt

SEQ ID NO: 8522 - DNA, 60 bp, Homo sapiens
tcccaattcctccaagacctatggcatcaagtggaagcgtcccacggaactgctgtcaaa

SEQ ID NO: 8523 - DNA, 60 bp, Homo sapiens
atccaagcctctcaacattgcctacagccacatctacagctcctacaggaatttcgtggg

SEQ ID NO: 8524 - DNA, 60 bp, Homo sapiens
ccccggaatatttcctccatgatgacatgaagaattgcggagttaattgcagtggggatg

SEQ ID NO: 8525 - DNA, 60 bp, Homo sapiens
atggttgggtgaaagtagaaagtacagatgtcagtgacctgctgcaccagtaccgggaag

SEQ ID NO: 8526 - DNA, 60 bp, Homo sapiens
ccgtggaaggaatagaccacgatgttacatccgcaaaggatggtgattactggagattgc

SEQ ID NO: 8527 - DNA, 60 bp, Homo sapiens
ctccatgtgtgctgtcctctgaaggcggttgtttagctctcacttttctggttcttatcc

SEQ ID NO: 8528 - DNA, 60 bp, Homo sapiens
acataggttagattctcattcacgggactagttagctttaagcaccctagaggactaggg

SEQ ID NO: 8529 - DNA, 60 bp, Homo sapiens
gatccaattctgtggagatactttttgttgagggatcttccttcttggtcttctgttgac

SEQ ID NO: 8530 - DNA, 60 bp, Homo sapiens
gtactggctgcgagtgttcctgagagttgaaagtgggatgacttatgacacttgcacagc

SEQ ID NO: 8531 - DNA, 60 bp, Homo sapiens
tctgcaagagaagagtcggaagaggtgtggcggcatcctagtgagaaaggactttgtgct

SEQ ID NO: 8532 - DNA, 60 bp, Homo sapiens
gtcagtagtcaccttgctcacagcaaagccagaaatgctctctccagggagtagatgtaa

SEQ ID NO: 8533 - DNA, 60 bp, Homo sapiens
ggagataggcatcttggtggagaaggctcaggatgagatcccagcactgtccgtgtcccg

SEQ ID NO: 8534 - DNA, 60 bp, Homo sapiens
ctgaccctagacaaagctcttgacatgacttactacctccaacatgaaacaagcagcccc

SEQ ID NO: 8535 - DNA, 60 bp, Homo sapiens
ggatccttatgttggataaactaccttcccaaaagagaacatcagaggttttcattgctg

SEQ ID NO: 8536 - DNA, 60 bp, Homo sapiens
ccccacctttggtgctttccagaatcccgtaacacctgattaactgaggcatccacttct

SEQ ID NO: 8537 - DNA, 60 bp, Homo sapiens
tctacaacaacatcagcgggctgactgactttggtgagaaggtggtggcagaaatgaacc

SEQ ID NO: 8538 - DNA, 60 bp, Homo sapiens
aaaatggatcctggcttccccaagctcatcgcagatgcctggaatgccatccccgataac

SEQ ID NO: 8539 - DNA, 60 bp, Homo sapiens
agtgctgacctcatcccagaaccccctgggaaatatcccctgtcctcagagctgtgtccc

SEQ ID NO: 8540 - DNA, 60 bp, Homo sapiens
ctagccctaccacttatgtcttggatgaagatgaacctcgattccttgaagaagttgatt

SEQ ID NO: 8541 - DNA, 60 bp, Homo sapiens
cagagagttaccagagttgcaagaggcaataaatggcttaactgtagatatggctgaagc

SEQ ID NO: 8542 - DNA, 60 bp, Homo sapiens
tacatccgtccttacaaccatccttgtcctccttggtaccgtatcaagctctttcccatg

SEQ ID NO: 8543 - DNA, 60 bp, Homo sapiens
ctgcttcttggaaagtctttggacatagcaccaggtgacatgcttgacaaggtggcaaga

SEQ ID NO: 8544 - DNA, 60 bp, Homo sapiens
cagtgatggaaaagctcagatgcagtcaccagcatgagaagcagtccagagtctaggcaa

SEQ ID NO: 8545 - DNA, 60 bp, Homo sapiens
gcgcatattaaatttcctattgactacccctattcaccacctaccttcagattcttgacc

SEQ ID NO: 8546 - DNA, 60 bp, Homo sapiens
ggtgattccgcagtgagagagtggctggggcatggaaggcaagattgtgtcccattcccc

SEQ ID NO: 8547 - DNA, 60 bp, Homo sapiens
tggaggggcaaaggtcgagggtagataggccttaacttagtccatagcgtcctcaccttc

SEQ ID NO: 8548 - DNA, 60 bp, Homo sapiens
agctctcctgacaaagctgtttgctcttgggttgggaggaagcaaatgcaagctgggctg

SEQ ID NO: 8549 - DNA, 60 bp, Homo sapiens
agttcaactgtttgttcctcagggttttcaaggacaacaacccctacagaaaataccacc

SEQ ID NO: 8550 - DNA, 60 bp, Homo sapiens
gaactccggaccttgcccatggagaagtttagagaggaactcttgtggagagctggttta

SEQ ID NO: 8551 - DNA, 60 bp, Homo sapiens
gccacttcagagactttgaccacaatcttcagctgtgtgtgggcaatcccaggaagacaa

SEQ ID NO: 8552 - DNA, 60 bp, Homo sapiens
ctcctgaccctccagcgggacaccctggttcccaccattccctgccttgctgacaataaa

SEQ ID NO: 8553 - DNA, 60 bp, Homo sapiens
ccatcgagtcatcttgggcaatgaactgccaaaattctatgatgagtgaaccttccccag

SEQ ID NO: 8554 - DNA, 60 bp, Homo sapiens
atgaggacttcttcctatacaagggaggcatctacagccacacgccagtgagccttggga

SEQ ID NO: 8555 - DNA, 60 bp, Homo sapiens
aatttggttgggagttgatggggccagatgagccagcattccagctctttcacccttcag

SEQ ID NO: 8556 - DNA, 60 bp, Homo sapiens
aacgagactttcagctcagtcatttccctgttgaatgaggatcccctgtcccaggacttg

SEQ ID NO: 8557 - DNA, 60 bp, Homo sapiens
aggcaccctgagttggtgctttggatcagggaagccactttgggacaggtccataaagtg

SEQ ID NO: 8558 - DNA, 60 bp, Homo sapiens
gccagattcctcagcagatgaatggaagtgactgtgggatgtttgcctgcaaatatgctg

SEQ ID NO: 8559 - DNA, 60 bp, Homo sapiens
ttaacggtcctcatgctgataccgccagtggatgccagaatttgcagtgtggttttcgag

SEQ ID NO: 8560 - DNA, 60 bp, Homo sapiens
tctgggaagaggtgactccactcacattctccaggctgtatgaaggagaggctgatataa

SEQ ID NO: 8561 - DNA, 60 bp, Homo sapiens
tctaacgccacacctagtgaaaacacaagtcccacagcaggaaccactgaacctggacat

SEQ ID NO: 8562 - DNA, 60 bp, Homo sapiens
ctctgtcctacctgaatgtcacccgcaaggcctactggcaggtccacctggaccaggtgg

SEQ ID NO: 8563 - DNA, 60 bp, Homo sapiens
cgatacagtgacgatttcaccgaagcaagagggtttccctccaaagggatatttcccatc

SEQ ID NO: 8564 - DNA, 60 bp, Homo sapiens
cgtgtaggtggttcagatcctgcgtaatggcagcatgaggacttaaaaggtggttttcat

SEQ ID NO: 8565 - DNA, 60 bp, Homo sapiens
agtactcaggccactccaatcaccctacaagatgccaaggaggtcccaggaagtccagct

SEQ ID NO: 8566 - DNA, 60 bp, Homo sapiens
aagtttcctcagcagtggtacctgtctggtgtcactcagcgggacctgaatgtgaaggcg

SEQ ID NO: 8567 - DNA, 60 bp, Homo sapiens
accctgtgtgcactgagcttcagcagctgagcctaggtctgtgctgtaaatcctaagatt

SEQ ID NO: 8568 - DNA, 60 bp, Homo sapiens
cctggtgtctataccaaagtctgccactacttggagtggatcagggaaaccatgaagagg

SEQ ID NO: 8569 - DNA, 60 bp, Homo sapiens
tttcgtcacccaaacattgtggactttgctggctactgtgctcagaacggcttctactgc

SEQ ID NO: 8570 - DNA, 60 bp, Homo sapiens
cttctaaggaaggacacacagtagctctctgcttgctgatagatggtttcccagtgtgag

SEQ ID NO: 8571 - DNA, 60 bp, Homo sapiens
gggcattacaaggattacttcgtgcctcagctctacagctttctcaaacggccttaaagg

SEQ ID NO: 8572 - DNA, 60 bp, Homo sapiens
agaggcttgcattaagacgcttcatggccaaggcttttctcagccaagtctaacaaccct

SEQ ID NO: 8573 - DNA, 60 bp, Homo sapiens
gcctggtctttgttgcactaacacgtctcctctctgggaaacgtcccttgtcaggagacg

SEQ ID NO: 8574 - DNA, 60 bp, Homo sapiens
gccaggcaacccttcagaaaggctttgctcctgctctcagatcagatcaagcattctttc

SEQ ID NO: 8575 - DNA, 60 bp, Homo sapiens
atgttattgcagctgagcagaagagtcagacggaatcgaaacgtgaacccagtggctctg

SEQ ID NO: 8576 - DNA, 60 bp, Homo sapiens
atgtggccctgtgtgggaccacactgtcatctcgctgctggcagaaaagcctgatcccag

SEQ ID NO: 8577 - DNA, 60 bp, Homo sapiens
agcacatggctcctccttaactgcgtctgctcaacctccctcagccctgtgaacagcatc

SEQ ID NO: 8578 - DNA, 60 bp, Homo sapiens
aagctctgttattctggcctgggtgcttgctccagactcaggaacatctggtcaacacaa

SEQ ID NO: 8579 - DNA, 60 bp, Homo sapiens
aatacaactctgcgacagagggaaatgacattgccctcgtggagatcacccctcccattt

SEQ ID NO: 8580 - DNA, 60 bp, Homo sapiens
cactcctctctccagctccacatgctgtacctggatcattctgaagcaaattccgagcat

SEQ ID NO: 8581 - DNA, 60 bp, Homo sapiens
ttacccaggtactactgagcgagtgtgcttgatccagggaacggttgaagcactgaatgc

SEQ ID NO: 8582 - DNA, 60 bp, Homo sapiens
cgatgggtgtcctgaggaaaatcttcgtgaaagatcttgacatgtgtcccctatacaaac

SEQ ID NO: 8583 - DNA, 60 bp, Homo sapiens
ccagctcagtatctgcaacaagaagtttcccacttgtggatgtttagtgcagccacagac

SEQ ID NO: 8584 - DNA, 60 bp, Homo sapiens
ttcatcaatgcccactggctctctgccaaagccaaaaaggtgtcaggcagtctccagcgt

SEQ ID NO: 8585 - DNA, 60 bp, Homo sapiens
cagacagatgtggttgcatcctaactccatgtctctgagcattagatttctcatttgcca

SEQ ID NO: 8586 - DNA, 60 bp, Homo sapiens
cgatggatactctgggccagcatattcagacacttattcctcagctggtgactccgtgta

SEQ ID NO: 8587 - DNA, 60 bp, Homo sapiens
ctcaggtggcaaggacggagctgtcccctagtgagggactgtgttgactgacgagccgag

SEQ ID NO: 8588 - DNA, 60 bp, Homo sapiens
caggtcgccatcataaacaactctatgtgcaaccacctcttcctcaagtacagtttccgc

SEQ ID NO: 8589 - DNA, 60 bp, Homo sapiens
ggaagccctttgttgtgcgagggtgttttccgaggggtcacttcctttggccttgaaaat

SEQ ID NO: 8590 - DNA, 60 bp, Homo sapiens
tgacaagagacggaaagcggtctgctcagtttgagcacaccctcctggtcacagacactg

SEQ ID NO: 8591 - DNA, 60 bp, Homo sapiens
gatatgtgcatgagacacttactgtgtataaggcttgcaacttgaatctgataggccggc

SEQ ID NO: 8592 - DNA, 60 bp, Homo sapiens
gccaacccaatgacccaggagtctacactcaagtgtgcaagttcaccaagtggataaatg

SEQ ID NO: 8593 - DNA, 60 bp, Homo sapiens
cactacaagaggtgaagatgacagtgcaggaagatcgaaagtgcgaatctgacttacgcc

SEQ ID NO: 8594 - DNA, 60 bp, Homo sapiens
aacattggagtcacgacccctttgaggccttcaaggattctgagggctacatctatgcca

SEQ ID NO: 8595 - DNA, 60 bp, Homo sapiens
ggaagtgtgtgagaactggctgtgacggcatcattggctcaaagctgcagtatgacaagt

SEQ ID NO: 8596 - DNA, 60 bp, Homo sapiens
gttgattctgctgtggtggtaagttgataccgtgtaactaatcccgtggatgcctcctcg

SEQ ID NO: 8597 - DNA, 60 bp, Homo sapiens
ggagggccaaggaaccaggtggggtccagcccacaacagtgttttttgcctggcccgtag

SEQ ID NO: 8598 - DNA, 60 bp, Homo sapiens
tgtgcggcatcctgctccgtctgcaggttgtgcttccggtgcggaggtcagggacaagat

SEQ ID NO: 8599 - DNA, 60 bp, Homo sapiens; identical to SEQ ID NO: 4855

SEQ ID NO: 8600 - DNA, 60 bp, Homo sapiens
caaatgagtgggctgagcatgtagactagcagctttttatcaaacctggcattgtcaggt

SEQ ID NO: 8601 - DNA, 60 bp, Homo sapiens
acactgtgaactcaatctccagggctccaaatctgcctagaaaacctctcgcttcctcag

SEQ ID NO: 8602 - DNA, 60 bp, Homo sapiens
tgtgaaaatcgctcaccctgagccagcattcagagaagctgcggaagaagcttgtagaag

SEQ ID NO: 8603 - DNA, 60 bp, Homo sapiens
cagccctactggagtctcggattctttacccaaagaggaagcagcagtgcctgcaatttt

SEQ ID NO: 8604 - DNA, 60 bp, Homo sapiens
taagaaaccctaagccaagaccctctacgaacattctttgggcctcctggactacaggag

SEQ ID NO: 8605 - DNA, 60 bp, Homo sapiens
cggggagcagattgccggcttcgtgaaggagttctcccacatcgcctttctcacgatcaa

SEQ ID NO: 8606 - DNA, 60 bp, Homo sapiens
agcccacggtgttcactcgagtctccgccttcatcgactggattgaggagaccatagcaa

SEQ ID NO: 8607 - DNA, 60 bp, Homo sapiens
gacttgccctcagcagcagggtgaaaggagatggtgcacatctggagacaaggaccaaaa

SEQ ID NO: 8608 - DNA, 60 bp, Homo sapiens
gaaggattccatgaagctgttggggaaatcatgtcactttctgcagccacacctaagcat

SEQ ID NO: 8609 - DNA, 60 bp, Homo sapiens
aagtacggatacctcaatgaacaggtccccaaagctcccacctccactcgattcagcgat

SEQ ID NO: 8610 - DNA, 60 bp, Homo sapiens
gtgaagtggtgtggtaagtttgggaccaactgggatccagatccaaaggtttctgcaggt

SEQ ID NO: 8611 - DNA, 60 bp, Homo sapiens
taacaagtaccccatattctcccacccagcatctagagcgagagcaggctcttgctaaac

SEQ ID NO: 8612 - DNA, 60 bp, Homo sapiens
tgtttctttgaacagtaaatcaggaacaccaatggaccaaaatgaacacagtcactgggg

SEQ ID NO: 8613 - DNA, 60 bp, Homo sapiens
agccgctcaatacctcatcagtcagcgggtcacctacgagcagggagtgagggcctcaaa

SEQ ID NO: 8614 - DNA, 60 bp, Homo sapiens
gggagctgctgctccatctgattgactatctcgtaaccagtgatggcaaagaccctgaaa

SEQ ID NO: 8615 - DNA, 60 bp, Homo sapiens
cccacccctacctctagtaaatttaagtccacctcacgttctggcatcacttggcctttc

SEQ ID NO: 8616 - DNA, 60 bp, Homo sapiens
gctggacggatggtagcagtctagggattaacttcctgtatgctgcaactcatgaacttg

SEQ ID NO: 8617 - DNA, 60 bp, Homo sapiens
gcctctaactggatcttaaggactaaagcagaatgtaggagagggattcttccaaaggcc

SEQ ID NO: 8618 - DNA, 60 bp, Homo sapiens
aatgctcagatggacttccaggtggaggtgacaacggagaagatcaccctgtggaacagg

SEQ ID NO: 8619 - DNA, 60 bp, Homo sapiens
tcagggttgctgaagaagatgaaacatcagcctgccatcgtctagaagagacattggcag

SEQ ID NO: 8620 - DNA, 60 bp, Homo sapiens
caccactttcctgtgcattttcactcctgagaagtgctcccctaactcagatcccctaac

SEQ ID NO: 8621 - DNA, 60 bp, Homo sapiens
ctgggactctggatggttacagcacggtaatgtttgcactcatctgacagaatccctgag

SEQ ID NO: 8622 - DNA, 60 bp, Homo sapiens
tggctggggtcaagctcctttaggactgggtggatggagaagacaccttgtgctcatggg

SEQ ID NO: 8623 - DNA, 60 bp, Homo sapiens
atgatgtggaaggagctcaaacagacgacttcagcagactcacctctggagggtcgttta

SEQ ID NO: 8624 - DNA, 60 bp, Homo sapiens
caagttgaggacttcttgctggtctagtcacgcatgcagtgttggggatgccttggtttt

SEQ ID NO: 8625 - DNA, 60 bp, Homo sapiens
cactgaagctggacaagagcctcaataaggacaccctggcgaggaagctggcagtgctca

SEQ ID NO: 8626 - DNA, 60 bp, Homo sapiens
cgtgaaatggattaagaacaccatagctgccaatagctaaagcccccagtatctcttcag

SEQ ID NO: 8627 - DNA, 60 bp, Homo sapiens
tccaatggagagctccaaggaattgtctcctggggctatggctgtgcccagaagaacagg

SEQ ID NO: 8628 - DNA, 60 bp, Homo sapiens
aagtctccctcacgggcaagatcctgcctgttggtggcatcaaggagaagaccattgcgg

SEQ ID NO: 8629 - DNA, 60 bp, Homo sapiens
ggaactgcaaaggtgggcacttgggcatacaatcttcaagccaaagcgaacccagaaaca

SEQ ID NO: 8630 - DNA, 60 bp, Homo sapiens
gcgggatgatgatgtgcctgcagatatggttgcagaagaatcaggtcctggtgcacaaaa

SEQ ID NO: 8631 - DNA, 60 bp, Homo sapiens
tatttccttctctggtgtgcttgatcccaggtgctgatagctgctgtgtgtgcgccagta

SEQ ID NO: 8632 - DNA, 60 bp, Homo sapiens
gttgaagctgttggttgggcacatccagatacaatctgtctcatggttgcaaacacgctg

SEQ ID NO: 8633 - DNA, 60 bp, Homo sapiens
gtgacctgtggtgtgatggtgaagccgactgctcagacagttcagatgaatgggactgtg

SEQ ID NO: 8634 - DNA, 60 bp, Homo sapiens
agccgacgagatgttcttgctgcctcttccggctgcggggcgagtagtcgtccgacgtct

SEQ ID NO: 8635 - DNA, 60 bp, Homo sapiens
gattctgtgcttgcaaccctgatttaatgcgagaacttggccttagtcctgatgctgtct

SEQ ID NO: 8636 - DNA, 60 bp, Homo sapiens
aatggaaaaccacatttgtgacgcaaaataccaccttggcgcctacacgggagacgacgt

SEQ ID NO: 8637 - DNA, 60 bp, Homo sapiens
aaaggatggctcctggttcatccagtcgctttgtgccatgctgaaacagtatgccgacaa

SEQ ID NO: 8638 - DNA, 60 bp, Homo sapiens
ctggtcctatgattatggcatcaagtactcatttgcctttgaactgagagacacagggcg

SEQ ID NO: 8639 - DNA, 60 bp, Homo sapiens
gttgccagctacgtcctggaacacctgtactagttgagaaagctgatggccttgtttcaa

SEQ ID NO: 8640 - DNA, 60 bp, Homo sapiens
aaaatcttgtgttgcaagggcaacctcgtccattttaactggcacctcagggattaaaat

SEQ ID NO: 8641 - DNA, 60 bp, Homo sapiens
tcggggtcttggtgtacgaattgaggatgatgtagtggtgactcaggactcacctctcat

SEQ ID NO: 8642 - DNA, 60 bp, Homo sapiens
ccatctgaatgtgttgggggctctgcacttgaaggcaggaccctcagacctcgctggtaa

SEQ ID NO: 8643 - DNA, 60 bp, Homo sapiens
taagtgaaaccttttaactacctttctttgctccaagtgaagtttggacccagcagaaag

SEQ ID NO: 8644 - DNA, 60 bp, Homo sapiens
tggcatcaccaagttcccgctcactgcccgtgtgcagaaaccggatatgaagccccgagt

SEQ ID NO: 8645 - DNA, 60 bp, Homo sapiens
cccatcccacttggtggagaagattgtctaccacagcaagtacaagccaaagaggctggg

SEQ ID NO: 8646 - DNA, 60 bp, Homo sapiens
tgcttccaaaaggggctgcttcatgtacggaaacagctttagtgatgagagcacccaggt

SEQ ID NO: 8647 - DNA, 60 bp, Homo sapiens
gccatatattattgtcaggtttatggtcagtcacctgtatttacctttggacaggggacc

SEQ ID NO: 8648 - DNA, 60 bp, Homo sapiens
atctctgcctttgagctgcagaccatcctgagaagggttctagcaaagcgccaagatatc

SEQ ID NO: 8649 - DNA, 60 bp, Homo sapiens
ggccctcattccttcagacccagttttcccccaccctccttaccccgctgggctaggtct

SEQ ID NO: 8650 - DNA, 60 bp, Homo sapiens
ccagtggctctgacagttctctctcagatggtcttcctgttcacctagcaaacatagcag

SEQ ID NO: 8651 - DNA, 60 bp, Homo sapiens
aaaacctcaagggctttcccacgttgacaccaagaaaccactgggcataatgcttcccca

SEQ ID NO: 8652 - DNA, 60 bp, Homo sapiens
gcagacgtttgccagcaactggaggaagataaacgcccacaacaatgggaaccacacatt

SEQ ID NO: 8653 - DNA, 60 bp, Homo sapiens
aatgttagtggaaagcggaatgacagacaccctctctggtgcacgctggggtttgtgcag

SEQ ID NO: 8654 - DNA, 60 bp, Homo sapiens
tcgtgtctgccagtgccttgcgcttcgagggccaaatcacagtctaccattatgacggtg

SEQ ID NO: 8655 - DNA, 60 bp, Homo sapiens
atgcactggatggatggaagtgtggtcaccagagaacacagaggctcctggtttctcacg

SEQ ID NO: 8656 - DNA, 60 bp, Homo sapiens
cagtattttggggaaattgggctgggaacgcctccacaaaacttcactgttgcctttgac

SEQ ID NO: 8657 - DNA, 60 bp, Homo sapiens
acgcacatcatggttggactggagagctgctccttcctggaggaggacttcatccccttt

SEQ ID NO: 8658 - DNA, 60 bp, Homo sapiens
tgaccaaatgagatccattcagcgactaactggcaaggcactcaaaacatgtcattcatt

SEQ ID NO: 8659 - DNA, 60 bp, Homo sapiens
tcttgtagagagatggacaaccaaagtcagtgggacaaactccagcacagaagcctgcga

SEQ ID NO: 8660 - DNA, 60 bp, Homo sapiens
ccgatgttcaccgtgctcaggaaattcaccattccacttaccttacttctggaaaccatc

SEQ ID NO: 8661 - DNA, 60 bp, Homo sapiens
tctcccaggagtcttccaaggttctcaacaccaatgggaccagtgggtttctcccaggtg

SEQ ID NO: 8662 - DNA, 60 bp, Homo sapiens
aacatgatgtcacctaaattcttaccttaaggacgtctacagggacccccgcccgaattc

SEQ ID NO: 8663 - DNA, 60 bp, Homo sapiens
agacggtgctggtgactcgtccacactgctcgcttcggatactccaggcgtctcccgttg

SEQ ID NO: 8664 - DNA, 60 bp, Homo sapiens
ctgccacggactttcagttggaagtgactcctcagaacattacgctgaaccccggctttg

SEQ ID NO: 8665 - DNA, 60 bp, Homo sapiens
cccctgcgtctctggcctcgccggtcttggggggatggttccatcatggcgtcaatgcag

SEQ ID NO: 8666 - DNA, 60 bp, Homo sapiens
gtcccatttctcaccaaaatgtcccctcatgttactaacaggctgtaactcatcagctgg

SEQ ID NO: 8667 - DNA, 60 bp, Homo sapiens
aaaagctggaacgggtgatcctagggagtgaggctgctcagcagcacccagaagaagtca

SEQ ID NO: 8668 - DNA, 60 bp, Homo sapiens
gatttctacagatgtcatacttgtaacaccacagatcgaaatgccatatgtgtgaactgc

SEQ ID NO: 8669 - DNA, 60 bp, Homo sapiens
cgttataagggtcggtttacagggagaatgctttgtgctggaaacctccatgaacacaaa

SEQ ID NO: 8670 - DNA, 60 bp, Homo sapiens
agtacacaacacgcatctcgccagtttgcctggcatcctcaaacgaggctctgactgaag

SEQ ID NO: 8671 - DNA, 60 bp, Homo sapiens
atatggggaccgttctcgtttcatccaactggtccagaaggcacggctagaggagagcaa

SEQ ID NO: 8672 - DNA, 60 bp, Homo sapiens
ggagagtcagctatcttgtctggttttcttgagacctcagatgtgtgttcagcagggctg

SEQ ID NO: 8673 - DNA, 60 bp, Homo sapiens
atcccgctgaaaccgctgtacgaggatttcactgccctcagcaatgaagcctacaagcag

SEQ ID NO: 8674 - DNA, 60 bp, Homo sapiens
ggtccagggttgctaggaaaagaaatcagcagacacaggtgtagaccagagtgtttctta

SEQ ID NO: 8675 - DNA, 60 bp, Homo sapiens
tgacttcagggacaaaactcagtgaagggtgagtagacctccattgctggtaggctgatg

SEQ ID NO: 8676 - DNA, 60 bp, Homo sapiens
tttccttgtcgagcacggtgcaaccccaggttacagttcctctgagtcatctcatcaatg

SEQ ID NO: 8677 - DNA, 60 bp, Homo sapiens
agggtctaaagagagagtcctcagcagagtcttcttgtgctgcctttgggcttccatgga

SEQ ID NO: 8678 - DNA, 60 bp, Homo sapiens
atgaagaccaacccattcgtgtggtcatcctgcagccgtgactacatcaccagctttcta

SEQ ID NO: 8679 - DNA, 60 bp, Homo sapiens
tgccccaaggctctttactgatgtcagaatcattgtttgcacctgctgggtatggccttt

SEQ ID NO: 8680 - DNA, 60 bp, Homo sapiens
tatctgtgggcttgagctaatcatatgcccctaaaacaggaggacgggagagagatatga

SEQ ID NO: 8681 - DNA, 60 bp, Homo sapiens
cgcgaccggcatgtacgagcaactcaagggcgagtggaaccgtaaaagccccaatcttag

SEQ ID NO: 8682 - DNA, 60 bp, Homo sapiens
tccgcaaccttgagcggcatccgtggagtgcgcctgcgcagctacgaccgcagcaggaaa

SEQ ID NO: 8683 - DNA, 60 bp, Homo sapiens
cctttcaagacagaaagagacaggagacatgagtctttgccggaggaaaagcagctcaag

SEQ ID NO: 8684 - DNA, 60 bp, Homo sapiens
tgtgtcatggggtaacatcccctgtggatcaaaggagaagccaggagtctacaccaacgt

SEQ ID NO: 8685 - DNA, 60 bp, Homo sapiens
atcagattctgttccaaacaagtattctgtagatccaaatggattaccagtgtgctacag

SEQ ID NO: 8686 - DNA, 60 bp, Homo sapiens
ccctgtttctgactggttgttctcaatgtggcattattctcatcctccactgctagagag

SEQ ID NO: 8687 - DNA, 60 bp, Homo sapiens
taaaacctagtaagcatgagctgtttccttagagtggagagagtggtgatggcagatctg

SEQ ID NO: 8688 - DNA, 60 bp, Homo sapiens
aggtctcgctcttcaacggcctctcgttccactgcgcgggtgtcctggtggaccagagtt

SEQ ID NO: 8689 - DNA, 60 bp, Homo sapiens
gtctctggaggtcatgaatgtggtgttgccacaaagcctggaatctacaccctgttaacc

SEQ ID NO: 8690 - DNA, 60 bp, Homo sapiens
cttaagcaatatggttggagggagaaaaactctatacaacaaccagcccattgacttcct

SEQ ID NO: 8691 - DNA, 60 bp, Homo sapiens
cgccaccctaaatacaacagggacactctggacaatgacatcatgctgatcaaactctcc

SEQ ID NO: 8692 - DNA, 60 bp, Homo sapiens
gggactcagaggctcccctgtgctcctgacctatgctcctggatacgctatgaactctca

SEQ ID NO: 8693 - DNA, 60 bp, Homo sapiens
tctccaaagtggaatctgaccaagcatgagagagatctgtctatgggaccagtggcttgg

SEQ ID NO: 8694 - DNA, 60 bp, Homo sapiens
cagaccctccctcagttccaatatgtgacctgtatcctaatggtgtatttcccaaaggac

SEQ ID NO: 8695 - DNA, 60 bp, Homo sapiens; identical to SEQ ID NO: 4855

SEQ ID NO: 8696 - DNA, 60 bp, Homo sapiens
acccatctacctacaggtctcctcctaccaacactggatctgggactgcctcaacgggca

SEQ ID NO: 8697 - DNA, 60 bp, Homo sapiens
cctgtctccagcagctttccctgttgatgtggatcacgcagtgctttctgcccgtgtttt

SEQ ID NO: 8698 - DNA, 60 bp, Homo sapiens
gaagatcgccaaggtcttcaagaaccccaagttcagcattctgaccgtgaacaatgacat

SEQ ID NO: 8699 - DNA, 60 bp, Homo sapiens
gtgctctagtttctgtctctcaggcactcgtaactaaggaccaccattggccattggtag

SEQ ID NO: 8700 - DNA, 60 bp, Homo sapiens
ggaccacaaggaacaccatatgaaggcggagtatggaaagttagagtggacctacctgat

SEQ ID NO: 8701 - DNA, 60 bp, Homo sapiens
gacccttaatagtccactgaccccggagaagattaggatggcctgtgaagacaagttcac

SEQ ID NO: 8702 - DNA, 60 bp, Homo sapiens
ctccaaaagagtgtcctgctatagactatactagacacacacttgatggtgctgcatgtc

SEQ ID NO: 8703 - DNA, 60 bp, Homo sapiens
gggaccctcaagaggaataccacttatgttacactcctgcactaaaggcacgtactgcag

SEQ ID NO: 8704 - DNA, 60 bp, Homo sapiens
gcccagaacaaacacccttcagagcctaaccaaagaacataagctgcaaaatgtgcaccc

SEQ ID NO: 8705 - DNA, 60 bp, Homo sapiens
gtcgcctgccacaggtgtctgcaattgaactccaaggtgcagaatggtttggaaagtagc

SEQ ID NO: 8706 - DNA, 60 bp, Homo sapiens
tatcgcttctgtgacgtcaaagacgagacctatgacttgctctaccagcaatgcgatgcc

SEQ ID NO: 8707 - DNA, 60 bp, Homo sapiens
tcatatggagggtacgtaacctcaatggtcctgggatcgggaagtggcgtgttcaagtgt

SEQ ID NO: 8708 - DNA, 60 bp, Homo sapiens
gggcttagatcattcctcagtgccggaggcgctcatgtaccctatgtaccgcttcactga

SEQ ID NO: 8709 - DNA, 60 bp, Homo sapiens
gcctgcctcatgatggtttggagatactgtctgtggatgtgaggtggggacttcattcat

SEQ ID NO: 8710 - DNA, 60 bp, Homo sapiens
cttaggccaactgtaacttcagtaatccctgacacgacagaggctgtatcaactgctagc

SEQ ID NO: 8711 - DNA, 60 bp, Homo sapiens
tgtcagtcgaagacttagccagctatcaagtcatgatccgctgtggagaagacattgcaa

SEQ ID NO: 8712 - DNA, 60 bp, Homo sapiens
gacgtcctgaggctggtgaaacagacagacagcctggtgatggtgaacttctacaacaat

SEQ ID NO: 8713 - DNA, 60 bp, Homo sapiens
cttgaggttcagagcatcagaatgaactctatgaatacatgtgtaagtgccagacagctg

SEQ ID NO: 8714 - DNA, 60 bp, Homo sapiens
ggtctgatggagctgcgtttcctgtgcatggactctgccctcagggtgcctgtccaggaa

SEQ ID NO: 8715 - DNA, 60 bp, Homo sapiens
aggggccaattttggatgagcatggagctgtcacttctcagctgctggatgacttgagat

SEQ ID NO: 8716 - DNA, 60 bp, Homo sapiens
aggggactggagcctgtcccagaacaagagcgccctggactgccctcatcagcacctaga

SEQ ID NO: 8717 - DNA, 60 bp, Homo sapiens
catcatactcaggtctccctactcctgccttagattcctcaataagatgctgtaactagc

SEQ ID NO: 8718 - DNA, 60 bp, Homo sapiens
actgcccttcccctacaccattctttggttcagtatttcaagacccctaagagaaatggt

SEQ ID NO: 8719 - DNA, 60 bp, Homo sapiens
agactggctcccacagacgctggactcactcccgtacgtctcccaggattgcctggactc

SEQ ID NO: 8720 - DNA, 60 bp, Homo sapiens
tgtgaaggtgacagtgggggaccctttgtcatgaagagcccctttaacaaccgctggtat

SEQ ID NO: 8721 - DNA, 60 bp, Homo sapiens
aggcttctacccgatcaaccacacggactgcctggtctccgcgctgcaccactgcttcga

SEQ ID NO: 8722 - DNA, 60 bp, Homo sapiens
gtcagttacctgggaattctgggctgccaggaaacgatttgggcctctgtcagtttcttt

SEQ ID NO: 8723 - DNA, 60 bp, Homo sapiens
atcaagccagtggaagcactattgactggacctacagccagggcatcaagtactccttca

SEQ ID NO: 8724 - DNA, 60 bp, Homo sapiens
acaacaggtggttccttgctggtgtgacctcatttggatacaagtgtgccctgcctaatc

SEQ ID NO: 8725 - DNA, 60 bp, Homo sapiens
aaagatgagaaattaccagaagcctcgccttttcctaagcaccagcggaaggagctgtgc

SEQ ID NO: 8726 - DNA, 60 bp, Homo sapiens
catcgtttctggctggggacgagaaaaagataacgaaagagtcttttcacttcagtgggg

SEQ ID NO: 8727 - DNA, 60 bp, Homo sapiens
tgtacacactctggcagcacaacaaggagtcactcctgaatttcgtggagacggtgcacc

SEQ ID NO: 8728 - DNA, 60 bp, Homo sapiens
cccaaacacttctcaatatggaccaaaagatcaccagtgtaaaacctcttctgcaaatcg

SEQ ID NO: 8729 - DNA, 60 bp, Homo sapiens
taaggcataaatgcaggtaattattcccagctgacctaaagtcaataaaacattctgttt

SEQ ID NO: 8730 - DNA, 60 bp, Homo sapiens
cacctgcttcaatcagctggtcctttgtgaagaacgtagagagaatgcggcataaccacc

SEQ ID NO: 8731 - DNA, 60 bp, Homo sapiens
gcgggcgacacgagggccgcggtgcagtgtccgacccgagagttgcggcctgagtcaccg

SEQ ID NO: 8732 - DNA, 60 bp, Homo sapiens
cctttaactagcataccccgaagtggagaagggtgcagcaggctcaaaggcataagtcat

SEQ ID NO: 8733 - DNA, 60 bp, Homo sapiens
ttccaggtgggctccagcggttcccagcgcgatgtcaactgctcggttatgggaccacaa

SEQ ID NO: 8734 - DNA, 60 bp, Homo sapiens
tggtgtctgaggaggtctgcagtaagctctatgacccgctgtaccaccccagcatgttct

SEQ ID NO: 8735 - DNA, 60 bp, Homo sapiens
gggctgtatgtagggtggaaacactctgatctgaagcccagctgactccactactaattt

SEQ ID NO: 8736 - DNA, 60 bp, Homo sapiens
agctggacctccaagtgctggacacccgcatgtgtaacaacagccgcttctggaacggca

SEQ ID NO: 8737 - DNA, 60 bp, Homo sapiens
gctgaaacttggcttttagctgcatggcatgttaaagtacctccgatgtggctggaagct

SEQ ID NO: 8738 - DNA, 60 bp, Homo sapiens
tcttgcaggttgatctttggcctgtttgcctccccttggagagggtttcgggctgtattt

SEQ ID NO: 8739 - DNA, 60 bp, Homo sapiens
acatgagccccatggaggcccaggagtttggcatcttagacaaggttctggtccaccctc

SEQ ID NO: 8740 - DNA, 60 bp, Homo sapiens
caaataacagcatcatctgtgctggagtggactgaccacacagggcaagagaacagttgg

SEQ ID NO: 8741 - DNA, 60 bp, Homo sapiens
ccgcagagagtggtaaaacactttcctggaatcagtatccgtgttgatgctgctttccag

SEQ ID NO: 8742 - DNA, 60 bp, Homo sapiens
ctggccattgcgtatttcacaggagatgcacaaaaggctgtggagtttgaaggctgggct

SEQ ID NO: 8743 - DNA, 60 bp, Homo sapiens
gtgtccgcctacatcgactggatcaacgagaaaatgcagctgtgatttgttgctgggagc

SEQ ID NO: 8744 - DNA, 60 bp, Homo sapiens
ctggatcaagaagatcataggcagcaagggctgattctaggataagcactagatctccct

SEQ ID NO: 8745 - DNA, 60 bp, Homo sapiens
aaggaaggtgcctgtgcagacattgccctggtgcgtctcgagcgctccatacagttctca

SEQ ID NO: 8746 - DNA, 60 bp, Homo sapiens
tcctgctgccttggggtgacaatctcagctccaggctacagggagaccgggaggatcaca

SEQ ID NO: 8747 - DNA, 60 bp, Homo sapiens
tggagccggtcacaaaagggcagacttgtagtagaattcagttgcaagagggattgggga

SEQ ID NO: 8748 - DNA, 60 bp, Homo sapiens
tttaactgtccacccaattccacgatgaacagaggcatggactcctgccgactctggtag

SEQ ID NO: 8749 - DNA, 60 bp, Homo sapiens
gcacagctaatgattcaatgcgagacaagattggcgtctgtgttgtggaggtttcaaata

SEQ ID NO: 8750 - DNA, 60 bp, Homo sapiens
agctgcccacaccctgtatcccaaggaacacgaagcgcaaagcaacgcctctttggatgt

SEQ ID NO: 8751 - DNA, 60 bp, Homo sapiens
tgggccgtaaaatccaaatccagcgctctggtcatctgaacctctacctgctcctggact

SEQ ID NO: 8752 - DNA, 60 bp, Homo sapiens
aggcgagaaagagaacacaaagccacaaatcggaaacacacgacaccaggacaggggaca

SEQ ID NO: 8753 - DNA, 60 bp, Homo sapiens
tacacttggccccttctcgtacttcttctgtgtggctgacagtctcagtttgccagtctt

SEQ ID NO: 8754 - DNA, 60 bp, Homo sapiens
gcacgagtttgaaaccgtcatacctccttctattaggaatggcatatactgaggtggtcg

SEQ ID NO: 8755 - DNA, 60 bp, Homo sapiens
ggccgtgcaagcttaggctggggattctggatgcaacgtctttacaaccttacctagata

SEQ ID NO: 8756 - DNA, 60 bp, Homo sapiens
cagctggacgggcacaccatgaggctgctgaccctcctgggccttctgtgtggctcggtg

SEQ ID NO: 8757 - DNA, 60 bp, Homo sapiens
ctgccctttggagaacaaaagaaagcagtcttccatcaaatcaccttaaaatgcacggct

SEQ ID NO: 8758 - DNA, 60 bp, Homo sapiens
agtacgggatctacaccaaggtcaccgccttcctcaagtggatcgacaggtccatgaaaa

SEQ ID NO: 8759 - DNA, 60 bp, Homo sapiens
gccctaaagaatgcaacctagtcaggttagctgaaccgacactcaaaacgctactgagtc

SEQ ID NO: 8760 - DNA, 60 bp, Homo sapiens
tgagcagtacgtgagtgtgcagaagatcgtggtgcatccatactggaacagcgataacgt

SEQ ID NO: 8761 - DNA, 60 bp, Homo sapiens
agctgtgtcaccatgtgggtcccggttgtcttcctcaccctgtccgtgacgtggattggt

SEQ ID NO: 8762 - DNA, 60 bp, Homo sapiens
tggttggctacggctttgaaggagcaaattcgaataacagcaagtattggctcgtcaaaa

SEQ ID NO: 8763 - DNA, 60 bp, Homo sapiens
catgtaaatattgttctgctgtctgggactcctgtctaggtgcccctgatgatgggatgc

SEQ ID NO: 8764 - DNA, 60 bp, Homo sapiens
ctccaaaactccctctgctgatactccttggagacaccctctttggccctcactacttga

SEQ ID NO: 8765 - DNA, 60 bp, Homo sapiens
ggcaacgtagaagaaagaacaaagaaccatctgaagtggatgacgctgaagataagtgtg

SEQ ID NO: 8766 - DNA, 60 bp, Homo sapiens
tccacagactccgccagagacacctagtcctgatgaaacgtctgctccttgtcctaatat

SEQ ID NO: 8767 - DNA, 60 bp, Homo sapiens
cacgtttcaggcaggcacctagcaattccatcacccgtacaggcaattccgtcttcttaa

SEQ ID NO: 8768 - DNA, 60 bp, Homo sapiens
tgcgtcaatagctcagtcctgcagtttgactgtttgcctgagaaatgcaatacccggggt

SEQ ID NO: 8769 - DNA, 60 bp, Homo sapiens
ggttcgcagccaggccagattgcgggtccaagtaccagctgtgcgttcagctcctgtcgt

SEQ ID NO: 8770 - DNA, 60 bp, Homo sapiens
acaagcactggtagtgggtctggcaatagttccagcaatgctactgggaacaccgttgct

SEQ ID NO: 8771 - DNA, 60 bp, Homo sapiens
atgccttccaatggatgtcttcccgtgtctccccgaacaccctatgggatgccatatctt

SEQ ID NO: 8772 - DNA, 60 bp, Homo sapiens
tactgacagtggaagacatatctcacctcaactctacacaaatccagctaacaccagccc

SEQ ID NO: 8773 - DNA, 60 bp, Homo sapiens
tgactcggaaccgaagaagctctgcgtacaagtggaaggagacgctattctcagtgatgc

SEQ ID NO: 8774 - DNA, 60 bp, Homo sapiens
gcccagatgcacaagttccagtcttcctagccctctgcaaattgggcgtcgtctatttct

SEQ ID NO: 8775 - DNA, 60 bp, Homo sapiens
cctggcccttctggtgggcatttggtatgtcctttctcttggggtgatttctgatgtttt

SEQ ID NO: 8776 - DNA, 60 bp, Homo sapiens
cttgcagtgatggttagggactcttctgagtaggagacgtaatcggcttttggtccatgg

SEQ ID NO: 8777 - DNA, 60 bp, Homo sapiens
tgaacatatgcaagaatatgcctgttcctgtgatgtggaggaaattttccgcaaggttcg

SEQ ID NO: 8778 - DNA, 60 bp, Homo sapiens
acagtcggagtcccaagctgcggttcggctgctgccgagaactgcaaggtgtggaatatt

SEQ ID NO: 8779 - DNA, 60 bp, Homo sapiens
ggtggtcccacttgactgttccaaagagcagcttctcagatcttcagtgttcactggtaa

SEQ ID NO: 8780 - DNA, 60 bp, Homo sapiens
caccccagcctttgccaggtatttccgctgtgcacgtggtgctctcttgaacccctccag

SEQ ID NO: 8781 - DNA, 60 bp, Homo sapiens
taggaggcaactttgggatggtgctagagcatggaaagcacagagaattggacaaacagg

SEQ ID NO: 8782 - DNA, 60 bp, Homo sapiens
ccagtaatccacgtcaggattcaccttagaagtttagcacacgcccttcaaaacctgttg

SEQ ID NO: 8783 - DNA, 60 bp, Homo sapiens
agcgcttcttgggaaagctgtcgatgcccgttcaaagactcctggagagacacgccatag

SEQ ID NO: 8784 - DNA, 60 bp, Homo sapiens
ctgggcctcagaactgtgctgcctgtgttcacgagggcatatatgaagaaggcatttcta

SEQ ID NO: 8785 - DNA, 60 bp, Homo sapiens
tactggagttggacaactgcctcctcatcactgatgtggccctggaacacctagagaact

SEQ ID NO: 8786 - DNA, 60 bp, Homo sapiens
tttaaaagggatccagtttccagctgcaggtttgttagagtctgttctacatgggcctgc

SEQ ID NO: 8787 - DNA, 60 bp, Homo sapiens
agcaggctcagcagatagaattgaagaccggagggatgagtgcttctccccacgtgctcc

SEQ ID NO: 8788 - DNA, 60 bp, Homo sapiens
attggagtccctgaaggacccaggatttgctgggagagggtgttgagttcactgtgccag

SEQ ID NO: 8789 - DNA, 60 bp, Homo sapiens
cggacccatacagtttgaatacagcatctggagtaaccgtattgttcgcgtcatgccagc

SEQ ID NO: 8790 - DNA, 60 bp, Homo sapiens
aactaccactgctgaggacagtagtaaaccccttgacctgagactgcggtgagtctgtaa

SEQ ID NO: 8791 - DNA, 60 bp, Homo sapiens; identical to SEQ ID NO: 4855

SEQ ID NO: 8792 - DNA, 60 bp, Homo sapiens
gcctgagcagctctatcagtacatggttggaggacataggcgctttcaaacaggaatgca

SEQ ID NO: 8793 - DNA, 60 bp, Homo sapiens
aaggctctgttccctgtgtgcaaaggtggatatgtcttcctttagtctcctcatggccac

SEQ ID NO: 8794 - DNA, 60 bp, Homo sapiens
gatgtgtttggccttaccaaagcaaaagagggtgcaagaatgtgggagtatgtctgccgg

SEQ ID NO: 8795 - DNA, 60 bp, Homo sapiens
tctgcttcttgcattgggaagtggtgacacacggttactgcggcttgggtgtcggtgacc

SEQ ID NO: 8796 - DNA, 60 bp, Homo sapiens
gaagcagatcctccgcatccggtgcgaggaagaagatgtggagatgagtgaggacgccta

SEQ ID NO: 8797 - DNA, 60 bp, Homo sapiens
gcccaaaaccttcagagattgacacgctgtcattttccatttccgttcctggatctacgg

SEQ ID NO: 8798 - DNA, 60 bp, Homo sapiens
cggggtttcttcgttgcattgcctgagaggagcggagtctgccaggtggtgtccatcatg

SEQ ID NO: 8799 - DNA, 60 bp, Homo sapiens
tttgtggaagcaatggtaaatgagaatgtcagtctcgtgatctcgcggcagttgctgact

SEQ ID NO: 8800 - DNA, 60 bp, Homo sapiens
attgaaagctgggtgtaggcactgcagggagagtgtggaggtctgacagggtaggaatat

SEQ ID NO: 8801 - DNA, 60 bp, Homo sapiens
acccacagagcccgtgaagaggtctggccgctaccactttgtgcctggaaccacagctgt

SEQ ID NO: 8802 - DNA, 60 bp, Homo sapiens
caagctgaggagtacctgtcatttgcctttgagcattgtcaccgttctagtcagaagaac

SEQ ID NO: 8803 - DNA, 60 bp, Homo sapiens
ttattccataaaaccagtttagggcacaggccagttcctgattagaacacaggacctgtg

SEQ ID NO: 8804 - DNA, 60 bp, Homo sapiens
gccagggacaagcttctgaaagcagtgtgatacccaagtcataggtgcttctcgtatgtg

SEQ ID NO: 8805 - DNA, 60 bp, Homo sapiens
gatacctcataaagaacacggattcactaggaagaggcgtcattaactgtgcccttttag

SEQ ID NO: 8806 - DNA, 60 bp, Homo sapiens
gcaatgaatttaacagtcgaaatctagtgaatgaatttaacagtcgaaatctagtgaatg

SEQ ID NO: 8807 - DNA, 60 bp, Homo sapiens
cagtgaagttcagggtgggcaaatgagtgtgtgtgaggtataggaaatgctgatgacttc

SEQ ID NO: 8808 - DNA, 60 bp, Homo sapiens
cacttgtctaacggttcacacgtggctatgatcacaagcaactttgaactggaatgctat

SEQ ID NO: 8809 - DNA, 60 bp, Homo sapiens
tgtttgctatgccacagtcaggaacaggtgtcagtgtggaggcagttgatccagtgttcc

SEQ ID NO: 8810 - DNA, 60 bp, Homo sapiens
ggaactgtgtttttttctgctttgttttttcagtttgctgtttctgtagccatattgtat

SEQ ID NO: 8811 - DNA, 60 bp, Homo sapiens
gacctttggaggccatgcttagacacattcctgtacctgagaacaaccacataggcagga

SEQ ID NO: 8812 - DNA, 60 bp, Homo sapiens
ccagaaccttccaagagatgatccagcgtctgtatgggtgcttcttgagagtctatatgc

SEQ ID NO: 8813 - DNA, 60 bp, Homo sapiens
ggaagatcgtgaacataactgagggcatgagtctcactagcacatggaggcccttttgga

SEQ ID NO: 8814 - DNA, 60 bp, Homo sapiens
gctcaggactgtggctaacatctgaggaataaagaagggctgacagaggaactgatgctg

SEQ ID NO: 8815 - DNA, 60 bp, Homo sapiens
gctactaggatgtcttccagcctcctgcagtcaaggagtaccactgtattgattagcctg

SEQ ID NO: 8816 - DNA, 60 bp, Homo sapiens
tggcccagtttgactacgggaggaagtgctcggaggtcgctcggctgacggagggcatgt

SEQ ID NO: 8817 - DNA, 60 bp, Homo sapiens
agaatctaggagagagcgaaattcgcgatgcaatgatggcaaaggccgagtacctctgcc

SEQ ID NO: 8818 - DNA, 60 bp, Homo sapiens
cgggatggataagaatactcctgtaagatacacagtgtattgcagccttattaaagtggc

SEQ ID NO: 8819 - DNA, 60 bp, Homo sapiens
agcagtgtcccatctggcttcgacccaacaaagttcattaacctgggatgaatggggttg

SEQ ID NO: 8820 - DNA, 60 bp, Homo sapiens
cacttcctgtcattggcttatacccctacctgtgtcattggccttaacaaggacttaaag

SEQ ID NO: 8821 - DNA, 60 bp, Homo sapiens
aaggttggccttgggaatagttggctgccaatctccctgctcttggttctcctctagatt

SEQ ID NO: 8822 - DNA, 60 bp, Homo sapiens
gacatcgacccagttgtagccagatcagtttatcacctagaagacattgtcagacagaag

SEQ ID NO: 8823 - DNA, 60 bp, Homo sapiens
cgtgattaagacaggtgtacgcatgatcagcctctcctattcccgaatctccttggctga

SEQ ID NO: 8824 - DNA, 60 bp, Homo sapiens
atggagccctctctgtaaagaagagtcatttgtgcaagtagacggggtctgtgggtgcag

SEQ ID NO: 8825 - DNA, 60 bp, Homo sapiens
ccaggaattaggcgggaatatagtggtgtggtcagcggattgcggaatgcgtttgaatag

SEQ ID NO: 8826 - DNA, 60 bp, Homo sapiens
aggaagtggtcttttcactacccttgccagaaacatgctaggcaccactgggctctgttt

SEQ ID NO: 8827 - DNA, 60 bp, Homo sapiens
tttctactccagtccaatgtaactatttagccctggattatacatactgtccaattttca

SEQ ID NO: 8828 - DNA, 60 bp, Homo sapiens
gaaaaggctttggcaattctttctcagcctacaccctcacttgttgtggatcatgagcga

SEQ ID NO: 8829 - DNA, 60 bp, Homo sapiens
gggataggcaagccatgacagcttccctgtttcacctacagaagtcttatctgagggatc

SEQ ID NO: 8830 - DNA, 60 bp, Homo sapiens
cccacatgatcagtggctttgaatgaaatacagatgcattatccagaactgaagttgccc

SEQ ID NO: 8831 - DNA, 60 bp, Homo sapiens
gtgctttgtgctgaccgtcagattgtgtcaagtcaggtgtgcaaattgaccacactccca

SEQ ID NO: 8832 - DNA, 60 bp, Homo sapiens
atgccacagagaatcacaatcaacagtgtggggaaagtcagggcagtggaagtggatgca

SEQ ID NO: 8833 - DNA, 60 bp, Homo sapiens
taagttaagaccttggatgtggttatgttgtcctaaagaataaattttgctgatagtagc

SEQ ID NO: 8834 - DNA, 60 bp, Homo sapiens
accactgtaaacagatttggcaccccaaccagacctgtgatgctgctcgacaagagagag

SEQ ID NO: 8835 - DNA, 60 bp, Homo sapiens
ttaagagagttgcggttgtttctcagggatgtaaccaagaggctggccacagataaacgc

SEQ ID NO: 8836 - DNA, 60 bp, Homo sapiens
cttactttgcctggaaagctacagcaatgggaaagaactatgtgaatgggaagactttcc

SEQ ID NO: 8837 - DNA, 60 bp, Homo sapiens
gctgcaacaaggtggaaacaagggctggagctgcgtttgttttgccatcactatgttgac

SEQ ID NO: 8838 - DNA, 60 bp, Homo sapiens
gagctccagaaacgcttcatcctgaatctgccaaccttcagtgttcgaatcattgacaaa

SEQ ID NO: 8839 - DNA, 60 bp, Homo sapiens
agcaagatcatcatgctcaggaacgacatttaccgctgccgagcgtcaggcatctttctt

SEQ ID NO: 8840 - DNA, 60 bp, Homo sapiens
ggctgggattagggtggttcaggaaaatgtgatgctgtttccccatgtttagccatggtc

SEQ ID NO: 8841 - DNA, 60 bp, Homo sapiens
ttgccagcgtgttggagagaccgctaccggtgaaccagcgcgggtttttcggacttgggg

SEQ ID NO: 8842 - DNA, 60 bp, Homo sapiens
gtggcctaaggagcagccttttggagaaggggttccattagatggagatgatcctgaaca

SEQ ID NO: 8843 - DNA, 60 bp, Homo sapiens
agaattgtcgtgctttgagaaaacacctgaggcagtgtgggagttgaacgaccctgctgt

SEQ ID NO: 8844 - DNA, 60 bp, Homo sapiens
acactcatgtggctagtgtttgccgaatgaaactcaactcaataaaaaacaaaaaccaaa

SEQ ID NO: 8845 - DNA, 60 bp, Homo sapiens
catagagcttgcgttgtagtaccactgtctatacctgatcctcaagggcacagatggggt

SEQ ID NO: 8846 - DNA, 60 bp, Homo sapiens
acttccacaggattaacgagaatgagaagtctcccagtcagaaccggaaagccaaggacg

SEQ ID NO: 8847 - DNA, 60 bp, Homo sapiens
gtcaaagggtgcaaaatctcacacaagactgaggcaggagaatagggtacagagataggg

SEQ ID NO: 8848 - DNA, 60 bp, Homo sapiens
cagcgctgtgtgatatcaaacaagcttatacacaatttggaggaaaacgtccctttggtg

SEQ ID NO: 8849 - DNA, 60 bp, Homo sapiens
aggagtggaaagagactctgaaggtgctaagacaccatcaagagaaattggaggctagtg

SEQ ID NO: 8850 - DNA, 60 bp, Homo sapiens
aatgcacacgactacaacagccgcagatacactgagacacagcgtgcacacagtacgatc

SEQ ID NO: 8851 - DNA, 60 bp, Homo sapiens
aagtcataagcaatgaatttaacagtcgaaatctagtgaatgatgatgatgccattgttg

SEQ ID NO: 8852 - DNA, 60 bp, Homo sapiens
gaactgaatgcaagctttccaaaagtgttcataaaaaagagctttactcagtgacttaat

SEQ ID NO: 8853 - DNA, 60 bp, Homo sapiens
tccagacagttgcccagcgcctcaagttccggctgaacctgtatgagttgaaggaaggtc

SEQ ID NO: 8854 - DNA, 60 bp, Homo sapiens
catgccagttatcaatgctgacaagagcctaacaagtgccaacttacagatgattacgca

SEQ ID NO: 8855 - DNA, 60 bp, Homo sapiens
ttgaagaccctgtggatatgccctgtggacatgacttttgtagaggatgttgggagtcgt

SEQ ID NO: 8856 - DNA, 60 bp, Homo sapiens
caccttagttcatgttgcagcttctttggtgctgtcagatcatagttggtatgaaatggg

SEQ ID NO: 8857 - DNA, 60 bp, Homo sapiens
gggtgggaatgttgagggcgccacgcagtctctggcggagcagatgaggaagatcgcctt

SEQ ID NO: 8858 - DNA, 60 bp, Homo sapiens
cacactgaagtctccaaatacctgggaagagtatggttccctgatgtgatgcctctctgg

SEQ ID NO: 8859 - DNA, 60 bp, Homo sapiens
gtatgtggcacttgaggcactgtatgtaaagtaaggaatgctttactagttctccttggt

SEQ ID NO: 8860 - DNA, 60 bp, Homo sapiens
gtgtgacctttccagccatgcgatattccccttggaagatgcttccccaggctataaatt

SEQ ID NO: 8861 - DNA, 60 bp, Homo sapiens
agagcagaatctacagatgctgcagacattcatcagccacagatgtgatggaaatcgaaa

SEQ ID NO: 8862 - DNA, 60 bp, Homo sapiens
cacacaccgcggcgcaagacgagcacgaagcccgacagacggagcaaccacctcagcaga

SEQ ID NO: 8863 - DNA, 60 bp, Homo sapiens
cattgcagagtcaggggtagagcggcaagtacttttgggagaccagatacccaaattcgc

SEQ ID NO: 8864 - DNA, 60 bp, Homo sapiens
aagaattgccgatatttctcaggtctacacacagaatgctgaaatgaggcctcttggttg

SEQ ID NO: 8865 - DNA, 60 bp, Homo sapiens
ctccaatggccaaggattccgtgtgtcatctgcaggagtgagtaggcctgctgtatttct

SEQ ID NO: 8866 - DNA, 60 bp, Homo sapiens
caagtcaaatccagacctatgttggatgttggtctactaggtgactgtctcctggaaatg

SEQ ID NO: 8867 - DNA, 60 bp, Homo sapiens
cacttcaggtgcttgattttgtgcaggatccgtgctttgcccaaggagatggtctcatta

SEQ ID NO: 8868 - DNA, 60 bp, Homo sapiens
gaggttatcaaggacatttaaggaatcctgatcctcagaacttctctgggacaatttcag

SEQ ID NO: 8869 - DNA, 60 bp, Homo sapiens
agttccagagaacctgctaccctttgcagtgcagtgcagaaacctcactgtgtccaatac

SEQ ID NO: 8870 - DNA, 60 bp, Homo sapiens
tgctgagtttggccctgagcagcagaaggaactgaacaaagccctggaagtctggagtgt

SEQ ID NO: 8871 - DNA, 60 bp, Homo sapiens
tacacgatttactgccaaaacagagtggagtacgagaaaagggtccgagcacaagccaag

SEQ ID NO: 8872 - DNA, 60 bp, Homo sapiens
caccagccctgcagctagcaagtcttgtgtttaggctcgtctgacctatttccttcagtt

SEQ ID NO: 8873 - DNA, 60 bp, Homo sapiens
agttctagactcaacggtgctctgcgccaggagcagaattttgctgaccgcttcctccct

SEQ ID NO: 8874 - DNA, 60 bp, Homo sapiens
ggctgtgcttcccagtgcattgtacatgtggagatgtgaatgcctactgcttacgatatc

SEQ ID NO: 8875 - DNA, 60 bp, Homo sapiens
gtaactgacacatcctctctttgcaagctgctgactgggcacactcatgccaagtttcag

SEQ ID NO: 8876 - DNA, 60 bp, Homo sapiens
cagtggcagttcagatgcggaccagcgagacccagccgctccagagcctgaagaacaaga

SEQ ID NO: 8877 - DNA, 60 bp, Homo sapiens
ggggcttattcaggtcatgattgtggtatttggagatgaacctccagtcttctctcgtcc

SEQ ID NO: 8878 - DNA, 60 bp, Homo sapiens
ccagccaccaaatagaaaaccagtggccatgaggttcttgcacttctagggaagccattt

SEQ ID NO: 8879 - DNA, 60 bp, Homo sapiens
ggctgatgctctagccatcaggttctttcaaatgcatctttacactcttgcacaaaagtt

SEQ ID NO: 8880 - DNA, 60 bp, Homo sapiens
gccagacgacaagcacacactatggcgctgaaacggattaataaggaacttagtgatttg

SEQ ID NO: 8881 - DNA, 60 bp, Homo sapiens
agttggcacttctgccatgagcagagaactgatgcgacttgttttgctgcttggtagcac

SEQ ID NO: 8882 - DNA, 60 bp, Homo sapiens
gctggcggacatcactttagaccctccacctaattgcagtgctggtcccaaaggcgataa

SEQ ID NO: 8883 - DNA, 60 bp, Homo sapiens
gagctctggaaaaaccccacagcttttaagaagtacctgcaagaaacctactcaaagcag

SEQ ID NO: 8884 - DNA, 60 bp, Homo sapiens
tcttggaaactgtcccattgcttcgtatttctgccaacgtagctctgcctgcctgtcaac

SEQ ID NO: 8885 - DNA, 60 bp, Homo sapiens
ttctgtatgggcacaagcgtctcagctatcagacggtgttcctggccctctgtctgctct

SEQ ID NO: 8886 - DNA, 60 bp, Homo sapiens
gggcaataacacagtgaggtttaaccccaacttctaccgcaatgggaaagtctgcttgag

SEQ ID NO: 8887 - DNA, 60 bp, Homo sapiens; identical to SEQ ID NO: 4855

SEQ ID NO: 8888 - DNA, 60 bp, Homo sapiens
acctaaagccagaaccccatagccaaggagttgaaggtcctccacaagagaaggggcctg

SEQ ID NO: 8889 - DNA, 60 bp, Homo sapiens
tagtgtggagcagtgaactgtgtgtggttccttctacttggggatcatgcagagagcttc

SEQ ID NO: 8890 - DNA, 60 bp, Homo sapiens
ggggacaacaaactaacagcttcctggcacaagcaggaactttgcaagactcaactttgg

SEQ ID NO: 8891 - DNA, 60 bp, Homo sapiens
gccccagtctaagctctgcttatgcctatcttgagatgcaattacacccaatttccaatg

SEQ ID NO: 8892 - DNA, 60 bp, Homo sapiens
ggcgctttcggttttcctgctgtaccttttctgaggagtctactaatccaagatccagga

SEQ ID NO: 8893 - DNA, 60 bp, Homo sapiens
tttgagcagaacgtgcagcgctccatgcggggtggctacatcggctccacctactttgag

SEQ ID NO: 8894 - DNA, 60 bp, Homo sapiens
aaggaggtgacgacactgaccgcagacccacccgatggcatcaaggtctttcccaacgag

SEQ ID NO: 8895 - DNA, 60 bp, Homo sapiens
agtgaattaactgtgtctcccttgtcttaggatattctgtagattgattgcagatttctt

SEQ ID NO: 8896 - DNA, 60 bp, Homo sapiens
caagtcctcagttaatgattcttgctttcatccctccagtatttgctgtgggagctcgtt

SEQ ID NO: 8897 - DNA, 60 bp, Homo sapiens
aaagacactggttatcagaggttggatttatgcaaacctgggccaaaggacagttagaag

SEQ ID NO: 8898 - DNA, 60 bp, Homo sapiens
ggcagctatggttacacaatggcataatgaagtctggaaaactcctctgactactgatgc

SEQ ID NO: 8899 - DNA, 60 bp, Homo sapiens
acttgagaatacggaacggtccgaggaaaccagtcgatctaaacagaagagtcgacgtcg

SEQ ID NO: 8900 - DNA, 60 bp, Homo sapiens
ccggataccagcgtttggatctatgcaaactaaacccctcagatactgatgcagttcgtg

SEQ ID NO: 8901 - DNA, 60 bp, Homo sapiens
ttctttcctgcagtagataggggagatggcactttaacaccgttatctgactcttcaaag

SEQ ID NO: 8902 - DNA, 60 bp, Homo sapiens
agtcacgatgatggcggccaccatcctgtggtgagctagcggattccctgcttgtctcgc

SEQ ID NO: 8903 - DNA, 60 bp, Homo sapiens
tgaagaaacatgtggatttgctgtggaatgacaagcttcaaggatttacccaggactcta

SEQ ID NO: 8904 - DNA, 60 bp, Homo sapiens
cttttcgatccgccatctgcggtggagccgcaaccaaaatgcagattttcgtgaaaaccc

SEQ ID NO: 8905 - DNA, 60 bp, Homo sapiens
agctaagggcctccaccagcatccgagcaggatcaagggccggaaataaaggctgttgta

SEQ ID NO: 8906 - DNA, 60 bp, Homo sapiens
ggtccgacttcctaggagcctggagttagcaaaggttgtctctggatttcattctctgag

SEQ ID NO: 8907 - DNA, 60 bp, Homo sapiens
ctatattgtgggtgagcgttatgtacctggagtgggaaatgtgaccaaagaagaggtcac

SEQ ID NO: 8908 - DNA, 60 bp, Homo sapiens
gtcctcagagactgtgccatttctattatgttgatgtatatgtacagtaccttgccaggg

SEQ ID NO: 8909 - DNA, 60 bp, Homo sapiens
atggctgcagtagacttcttagtggtatccagcgccacttgcagagggctgctttatcat

SEQ ID NO: 8910 - DNA, 60 bp, Homo sapiens
tccactctgcacttggtcctgcgcttgagggggggtgtctaagtttccccttttaaggtt

SEQ ID NO: 8911 - DNA, 60 bp, Homo sapiens
atcaccctgcctcatggcaccctctgtgaatgctacgatgagctgggcaatcgctaccag

SEQ ID NO: 8912 - DNA, 60 bp, Homo sapiens
ccttccctccgtttcccctcagtcaaacttgagccagcctctggatcgatgtgatcttat

SEQ ID NO: 8913 - DNA, 60 bp, Homo sapiens
aaattgtcctgcagaggttcattcccctgaccctttccccacattggtaagagtagctgg

SEQ ID NO: 8914 - DNA, 60 bp, Homo sapiens
aatgatgagaagacagcagctgattacaagattttaggtggttcagtccttcacctggtg

SEQ ID NO: 8915 - DNA, 60 bp, Homo sapiens
tggcagtgtgccagaagcccagtcagcattagactctacatcttcatctatgcagcccag

SEQ ID NO: 8916 - DNA, 60 bp, Homo sapiens
cattttcctcagtagagactagtgatgcattagcttctgggaacaaacttgtatcggttc

SEQ ID NO: 8917 - DNA, 60 bp, Homo sapiens
cctggacttctctgagtttgtcatccagccacagaatgagtcgaatccggagctgtacaa

SEQ ID NO: 8918 - DNA, 60 bp, Homo sapiens
gtattgcaagtactactcagactattgaacagatgtactgcgatcctctccttcgtcagg

SEQ ID NO: 8919 - DNA, 60 bp, Homo sapiens
cgatggtgttcctaccttggtcaagaaatggaaccacacctccaagaaaagctgacagat

SEQ ID NO: 8920 - DNA, 60 bp, Homo sapiens
agtaccactctcatctgctcagtacatctgcggcaactggctgccttcgatgctgtcatt

SEQ ID NO: 8921 - DNA, 60 bp, Homo sapiens
caccgtgattgagcttgtcagcagagctgaaagagaaagtagaaggatgtgcattgtttc

SEQ ID NO: 8922 - DNA, 60 bp, Homo sapiens
ccgctagaaggcttggatcttcagccatttcttgctaaggatagtccagctcaaattgtg

SEQ ID NO: 8923 - DNA, 60 bp, Homo sapiens
ctaaatgctggggcacatttcacatatcgactacctgagaaattgctttgtgtcccactg

SEQ ID NO: 8924 - DNA, 60 bp, Homo sapiens
cgcggtccagaccaacatgagagacttccagacagaactccggaagatactggtgtctct

SEQ ID NO: 8925 - DNA, 60 bp, Homo sapiens
aattatcatccactcacccagaacagctctccaaacttaacagccgtggcagtcagagct

SEQ ID NO: 8926 - DNA, 60 bp, Homo sapiens
ctctgcaggagctgggactcgtgccttctgctgttctcattgtggccaagaaatgtccca

SEQ ID NO: 8927 - DNA, 60 bp, Homo sapiens
gcactgagcaattcagatgtgattcgacaagtacacaacagtttcgccagacagcaaatg

SEQ ID NO: 8928 - DNA, 60 bp, Homo sapiens
ctggactggataaccaacctccagaggaaatcgtagctatcatcacctccatgggatttc

SEQ ID NO: 8929 - DNA, 60 bp, Homo sapiens
gccactatacagcctactgtcgcagtccagggacaggagaatggcacactttcaacgact

SEQ ID NO: 8930 - DNA, 60 bp, Homo sapiens
taggtgctctgagttgaggcaaagtagagcggcaacattaagtgctatgctagtcactta

SEQ ID NO: 8931 - DNA, 60 bp, Homo sapiens
ccctaatccataaaccagtgtcgttgcaaccccgtgggctgatcaataaagggaactggt

SEQ ID NO: 8932 - DNA, 60 bp, Homo sapiens
attttactgcaaaggtgttcatgttccttgtgaagtgtgggctcttaggaagcctgtggg

SEQ ID NO: 8933 - DNA, 60 bp, Homo sapiens
gaccaactgatgcagaaacaggaggtgtgagccagcaatcagatggagattctagtgctc

SEQ ID NO: 8934 - DNA, 60 bp, Homo sapiens
gctgcagtgtctgagcagcactcgacctcttcgggacttctgtctgagaagggacttccg

SEQ ID NO: 8935 - DNA, 60 bp, Homo sapiens
acagtgacaacggtagacgagagccaggttgtgacgcgttatgcctatgtactcttctac

SEQ ID NO: 8936 - DNA, 60 bp, Homo sapiens
gtgtagccaatgaggaaaaagttaccataatgacagcagttgtccgagaagtgacagctg

SEQ ID NO: 8937 - DNA, 60 bp, Homo sapiens
acacagacttgccggctctacctatcgccatcatggcagcctacatggcattacttgtga

SEQ ID NO: 8938 - DNA, 60 bp, Homo sapiens
atttggaagaggcgagataatgatgaaaccaaccagcagggggcttgaaggaggcgtcta

SEQ ID NO: 8939 - DNA, 60 bp, Homo sapiens
ccatttctgtcctctttatggaatgtagtcgacggatattgctgcacctcatcaggccat

SEQ ID NO: 8940 - DNA, 60 bp, Homo sapiens
aacgccttccagaaacttcagactcgacggaacttctggtctgtgactcacccagcaaag

SEQ ID NO: 8941 - DNA, 60 bp, Homo sapiens
attttcgtgtacgaggtctgcagcacttccgtggatggctcggaatgtgtcacgcttcca

SEQ ID NO: 8942 - DNA, 60 bp, Homo sapiens
aaaagtgcttcagaaagagaccaacattagcaggctctcaggagaagatgaaaggatggg

SEQ ID NO: 8943 - DNA, 60 bp, Homo sapiens
atcttacggctttctggtggtggagactggcatatcgcttacgttctactctatgggcct

SEQ ID NO: 8944 - DNA, 60 bp, Homo sapiens
cctggaggaatctgtgtcaatgagccctgaagaacgagccagatacctggagaactatga

SEQ ID NO: 8945 - DNA, 60 bp, Homo sapiens
tctggatgctgagtggagggagccactgagcacagcaaggcaccaaagcccctggagaaa

SEQ ID NO: 8946 - DNA, 60 bp, Homo sapiens
atggaaagtcccggaaacggagacacgacagtgtggagaacagtgacagtcatgttgaaa

SEQ ID NO: 8947 - DNA, 60 bp, Homo sapiens
catttcgcatcatcaagcgacagttcggcttcgtgaaagccagatacaaggggttgctga

SEQ ID NO: 8948 - DNA, 60 bp, Homo sapiens
gaattagacgaggatgtgaagattgtcattttgccagattacctggagattgcccgggat

SEQ ID NO: 8949 - DNA, 60 bp, Homo sapiens
ccagggtgggactgccggctccctgaggcagagagttgccgatttctatcgtcttcccgt

SEQ ID NO: 8950 - DNA, 60 bp, Homo sapiens
aagcagtaatgggtcggagagtagtcctgccaatgagaacggagacaggcatctacagca

SEQ ID NO: 8951 - DNA, 60 bp, Homo sapiens
aaagaggatatgatgggtttgaagtctaatgtccctacagccctctaagtctttgagggc

SEQ ID NO: 8952 - DNA, 60 bp, Homo sapiens
agcatccgaagggtggatgaggagcacgagcagcaggtggacatgcaggtccttgtctat

SEQ ID NO: 8953 - DNA, 60 bp, Homo sapiens
cttgagtccaatggaaatcagcacattccgaatccagttgaggtgaacctgactttcaca

SEQ ID NO: 8954 - DNA, 60 bp, Homo sapiens
ctgcagcgcttgttaatggtcacaataaatgccacttcaccaaggaagtctcagatgaac

SEQ ID NO: 8955 - DNA, 60 bp, Homo sapiens
tccctcagcctggattactgctttgtcctagaagatgaagatggcatatgtggttatgcc

SEQ ID NO: 8956 - DNA, 60 bp, Homo sapiens
tcgaaacctcaaagaacctcttctgacctttcgccttaacagagcctttatggaagcagc

SEQ ID NO: 8957 - DNA, 60 bp, Homo sapiens
tgttgccttggactgcaaagggaatgtagcctacgcaacctccacaggcggtatcgttaa

SEQ ID NO: 8958 - DNA, 60 bp, Homo sapiens
cttatctaccagtgcttctcaagctcttcattcagattggcttgctcggaattgccagcc

SEQ ID NO: 8959 - DNA, 60 bp, Homo sapiens
gcggctcagaggcttcaaagatcacttcaccttttgccaacagctaaacatcagcatctg

SEQ ID NO: 8960 - DNA, 60 bp, Homo sapiens
tcaacctagctgtttatggtaaagcccagaacagatcctatgagcgattggcacttctgg

SEQ ID NO: 8961 - DNA, 60 bp, Homo sapiens
atctcctggtgggattgctcagaggtctcagcaaggcttggtgtggttaggatgagttat

SEQ ID NO: 8962 - DNA, 60 bp, Homo sapiens
ccccgtgcttgcgacccctatttgggggtctgggtggctactggagggccttgcagaggg

SEQ ID NO: 8963 - DNA, 60 bp, Homo sapiens
gtactggggaccaagtaccctctggtcttttgtgaatggatggttttgtttcctatggga

SEQ ID NO: 8964 - DNA, 60 bp, Homo sapiens
aaactggctgtgagactctatttcggaccctgcaactcctattagtatcgcctggttggg

SEQ ID NO: 8965 - DNA, 60 bp, Homo sapiens
attttctggacaggagggaacacagggactatgccctacccactggctaccaactaaatg

SEQ ID NO: 8966 - DNA, 60 bp, Homo sapiens
gaaagaacacgctctctccaggcaggtctgaagctcaactctcttattgcctcacttcag

SEQ ID NO: 8967 - DNA, 60 bp, Homo sapiens
gatgtgctactgttgatgtctgattttgccgttcatgttagagcctactgtgaataagag

SEQ ID NO: 8968 - DNA, 60 bp, Homo sapiens
gccagtctctacaagtctgtggtttccaacagctgcaaggagatgtcttgttactcagac

SEQ ID NO: 8969 - DNA, 60 bp, Homo sapiens
gagctggttaggtgagctccataaaacccaaagggacttggtgtcaggagaggacatgga

SEQ ID NO: 8970 - DNA, 60 bp, Homo sapiens
ggagctgctactccagaaaatccagaaatagagctgcttcgcctagaactggccgaaatg

SEQ ID NO: 8971 - DNA, 60 bp, Homo sapiens
caagattgggagattgaaagaactctgtgagcagtatggcatatggcttcatgtggaggg

SEQ ID NO: 8972 - DNA, 60 bp, Homo sapiens
ttcctacaatgagaatgcacactccagtcttggtggttccttcgtgtggggcttgatcgt

SEQ ID NO: 8973 - DNA, 60 bp, Homo sapiens
catggtttgcactggccatcacaccaatgctcatctacctctggaaagcttccctggaat

SEQ ID NO: 8974 - DNA, 60 bp, Homo sapiens
catttatgccaagcttcgcaacaaggtgacacccaacggctacacgctggaccagtgcat

SEQ ID NO: 8975 - DNA, 60 bp, Homo sapiens
ctggagaagctgagcaggttccatgccaagttcaccctcgagtactcctgagcaccccag

SEQ ID NO: 8976 - DNA, 60 bp, Homo sapiens
tagctggaaaacctgtgttcaagttccaacttgccaaatttaaggcacctctggaagctg

SEQ ID NO: 8977 - DNA, 60 bp, Homo sapiens
gcttaatagggtggtaccctggaaaggatctgggaagtggtagaatttctggtctgtact

SEQ ID NO: 8978 - DNA, 60 bp, Homo sapiens
atctcgagcagcgataggacagctccctgcaaagccatcttagcaactttctcactgaga

SEQ ID NO: 8979 - DNA, 60 bp, Homo sapiens
tcgatgttgccgtctggcgagcccttagccttgctgtaaggaaggcttccgtcacccttg

SEQ ID NO: 8980 - DNA, 60 bp, Homo sapiens
gcccagctcttgtttctgagctgttagacttcttcttcattagtgaacctctgttcaagt

SEQ ID NO: 8981 - DNA, 60 bp, Homo sapiens
gaccatgcagaggagggcagggctagcatttacaaatcagtcttttccaactcttccaaa

SEQ ID NO: 8982 - DNA, 60 bp, Homo sapiens
tcatggtggaaatggagaagaagttggagaaaggccagtccatcgacgacatgatccccg

SEQ ID NO: 8983 - DNA, 60 bp, Homo sapiens; identical to SEQ ID NO: 4855

SEQ ID NO: 8984 - DNA, 60 bp, Homo sapiens
cgacttcgcaacactggggttcaggtgactcataaccatgttgaggatggattccatgga

SEQ ID NO: 8985 - DNA, 60 bp, Homo sapiens
cagtaccctctttcttgccaccctttccaatgcatcttctaccctgctacctcagtgatt

SEQ ID NO: 8986 - DNA, 60 bp, Homo sapiens
acgaccgaacgatccagaatggggatatgtgcctgttcgacatgggcggtgagtattact

SEQ ID NO: 8987 - DNA, 60 bp, Homo sapiens
ctaaacgagtgaatgaggtgatcgtggggaatgaccagctcatggagatctgagttctga

SEQ ID NO: 8988 - DNA, 60 bp, Homo sapiens
acatggctttagtagtctggagaaatctactccccttggccaggacatgctgctgctact

SEQ ID NO: 8989 - DNA, 60 bp, Homo sapiens
tgttctgtgttgtttccttagacctgtggtgtccgctgcaacagctactagccacgtgta

SEQ ID NO: 8990 - DNA, 60 bp, Homo sapiens
actcttgccaatggcggcatctcgcccatcacgagggagagcgtgctgagtgcggaagcc

SEQ ID NO: 8991 - DNA, 60 bp, Homo sapiens
atccattctgtggtgaaacatttccacgcaaaccagacctcaaagggacacacaggtggg

SEQ ID NO: 8992 - DNA, 60 bp, Homo sapiens
actgatcttcctggacaggagtggtgaccatgaagtagagcagtgggctttgccttctga

SEQ ID NO: 8993 - DNA, 60 bp, Homo sapiens
tactaagacactgctctgcccagagctgaagtctggccccaccatgagtcctgtgtccag

SEQ ID NO: 8994 - DNA, 60 bp, Homo sapiens
tccaaatcctggttcagatggaagaaatagcaggagagaggacccattagctggcagacc

SEQ ID NO: 8995 - DNA, 60 bp, Homo sapiens
tttgcccaatgtgaagcagtagataatgggtgtcagcaggtcctgtggctctatggagag

SEQ ID NO: 8996 - DNA, 60 bp, Homo sapiens
tgctgcagaccagcttctaactggggtccatacctggaacaacatcgtggggaaagatat

SEQ ID NO: 8997 - DNA, 60 bp, Homo sapiens
tgagtgaccaccatccaggctgagactgaaaggagcagaggctggaactacagtattctt

SEQ ID NO: 8998 - DNA, 60 bp, Homo sapiens
ttctggtgtcggacaagcttctgagacgtcatgaggagattctgcctttgccaggtgact

SEQ ID NO: 8999 - DNA, 60 bp, Homo sapiens
aaatgcccttgaatctagctttgccttggagaccccagtgggtgctgctcctgccgtttt

SEQ ID NO: 9000 - DNA, 60 bp, Homo sapiens
ttctcagatggtggagggtgctgggagctggcagggtccttccagacagtctcagcctct

SEQ ID NO: 9001 - DNA, 60 bp, Homo sapiens
ttagcatctgctgcagaggtcccctctacagctcccatgtctgggaagaagcacagacca

SEQ ID NO: 9002 - DNA, 60 bp, Homo sapiens
tcaagcaattctgtccccatcaaggggtcagctggagagacccaagaccctatctgttca

SEQ ID NO: 9003 - DNA, 60 bp, Homo sapiens
tgtcgatctacgttccaattggggccgtaccatggcggagaagactcaaaagagtgtgaa

SEQ ID NO: 9004 - DNA, 60 bp, Homo sapiens
gtccagttaagtgcagacacttgggtcagattcagcatttggatggcaattggcttcctg

SEQ ID NO: 9005 - DNA, 60 bp, Homo sapiens
acatccacgacaactacttcctggtcaacctggtggacaatgacttcccactggacaact

SEQ ID NO: 9006 - DNA, 60 bp, Homo sapiens
ccccaatgttatgggtatgatgtgctggtctcctcctctggataagatgggcaacagtgt

SEQ ID NO: 9007 - DNA, 60 bp, Homo sapiens
ttatgccagaagctgaaccgcctgaagccgctggaggactccaccatggagacgtcactg

SEQ ID NO: 9008 - DNA, 60 bp, Homo sapiens
aagcgcctgtccacgatcagggcggggcaaggggaagaaatctcgcgataggagagcggt

SEQ ID NO: 9009 - DNA, 60 bp, Homo sapiens
tcccaaatgctaagaaggagcatgtgcccacctggcttcagaacactcatgtctacagct

SEQ ID NO: 9010 - DNA, 60 bp, Homo sapiens
cctcgccgctgctccttcgtaaggccacttccgcacaccgacaccaacatgaacggacag

SEQ ID NO: 9011 - DNA, 60 bp, Homo sapiens
ctggaatcctgatgtggaaagcaggggtttctggtctactggctagagctaaggaagttg

SEQ ID NO: 9012 - DNA, 60 bp, Homo sapiens
tgtggaatttctgtctactgccacaacagaggttctgcggaagggagtatgtacaggctg

SEQ ID NO: 9013 - DNA, 60 bp, Homo sapiens
gctattccacaaacctccagttaacctaacacatgaccctaacctagccatttaccatac

SEQ ID NO: 9014 - DNA, 60 bp, Homo sapiens
ttttcttgggtcatgcctgtctccgtggctctgtcaaccttcggagggatcaatggttac

SEQ ID NO: 9015 - DNA, 60 bp, Homo sapiens
caccggaggaagaccctgagtaacaagctccgtctcttgtagccaagtcagctgaattta

SEQ ID NO: 9016 - DNA, 60 bp, Homo sapiens
ccaaccactgtgtgttttcagcaaatgaagatcatgaaaccatccgaaactatgctcagg

SEQ ID NO: 9017 - DNA, 60 bp, Homo sapiens
catggccccagcacaactccgtagggagcctggagtatccttccatttctcagccaaata

SEQ ID NO: 9018 - DNA, 60 bp, Homo sapiens
cagtttcttcttccaagtctaccagcaccttcagtaacacacctggaacaggaacccagc

SEQ ID NO: 9019 - DNA, 60 bp, Homo sapiens
cataggactgatgatcctcctcacctctgcgttttcagccggttcaggacaaagtccaat

SEQ ID NO: 9020 - DNA, 60 bp, Homo sapiens
aaagcttctctctgtcccttggcttctgtgtggtcccagaagatatgcctcctccagttt

SEQ ID NO: 9021 - DNA, 60 bp, Homo sapiens
caggaagtactcataaggttctttagctgtcacttagggataacactgtctacctcacag

SEQ ID NO: 9022 - DNA, 60 bp, Homo sapiens
gctgtttgagatgctatgtgctctccccaaagtgacaaccgtctgagtcttgtgctcttc

SEQ ID NO: 9023 - DNA, 60 bp, Homo sapiens
tgagggttgactgactggagagctcaagtgcagcaaagagaagtgtcagagcatgagcgc

SEQ ID NO: 9024 - DNA, 60 bp, Homo sapiens
acatctcctgcctgcgtgcattcctcacatcctggccttgggccaaactgctcagcctca

SEQ ID NO: 9025 - DNA, 60 bp, Homo sapiens
ggtaccaagctgttgctgacaaatgatccattggaagcagcgcatggaggcaatgtatta

SEQ ID NO: 9026 - DNA, 60 bp, Homo sapiens
ccgctgtgaggcatacctcaaggccatgctaagcactggctttaagatccccaagaagaa

SEQ ID NO: 9027 - DNA, 60 bp, Homo sapiens
cagaaatctcgcaaggtggactccaagagtcttttccactacaggcagtacagtgctgga

SEQ ID NO: 9028 - DNA, 60 bp, Homo sapiens
attcagttgaagtgttttgatgtgcatgtgtacttcctaaggtgaaatgcatctatatac

SEQ ID NO: 9029 - DNA, 60 bp, Homo sapiens
gctgttggaaaaatagcaccaatactacactagctcaacacaaggttgccacaatcctgt

SEQ ID NO: 9030 - DNA, 60 bp, Homo sapiens
aaactgaaggaccatatgctgatccccgtgagcatgtctgaactggaaaaggtggatggg

SEQ ID NO: 9031 - DNA, 60 bp, Homo sapiens
ggggctccgaattgtggaaataggagacgagaacgcgacgctggatggcactgacgttct

SEQ ID NO: 9032 - DNA, 60 bp, Homo sapiens
tacttttacgccttgcagctgtggaacttggtcttacagcctctgctcttctgcccaaac

SEQ ID NO: 9033 - DNA, 60 bp, Homo sapiens
ggggcttggactccagcttggttgctgccactctgttgaagcagctgaaagaagcccaag

SEQ ID NO: 9034 - DNA, 60 bp, Homo sapiens
aaatggaaaaacctccgaaatagggtcatttctcgtcaagtgggaaacaggtgtcctttt

SEQ ID NO: 9035 - DNA, 60 bp, Homo sapiens
acacctgtctatgtgtcctcaccaacctgggagaatcacaatgctgtgttttccgctgct

SEQ ID NO: 9036 - DNA, 60 bp, Homo sapiens
caaagaggccaactgcccagagccacagaaaatggaggataattgaggctaagtaacctg

SEQ ID NO: 9037 - DNA, 60 bp, Homo sapiens
gaacttcatccgtcctttgacatcgtggtcaactgttcaggccttggaagcagacagctt

SEQ ID NO: 9038 - DNA, 60 bp, Homo sapiens
cctgtgggtatagaagttggtcctcagcctcaaggggttctgagagctgatatcttggat

SEQ ID NO: 9039 - DNA, 60 bp, Homo sapiens
gaaggtgcagccgtcagaccaagttggcaaagtcatctacaagcagttcaaacagatccg

SEQ ID NO: 9040 - DNA, 60 bp, Homo sapiens
gctgttgactcacaatgatccaaaagaactgctttctgaagcaagtttccaagaagctct

SEQ ID NO: 9041 - DNA, 60 bp, Homo sapiens
atgacagagatgtccttggaattagtgacacactgattcgactttctgtgggcttagagg

SEQ ID NO: 9042 - DNA, 60 bp, Homo sapiens
aaagatcctgcagagtgtagtcagatgtgaggtctcaccgtgctacaagccagagaagag

SEQ ID NO: 9043 - DNA, 60 bp, Homo sapiens
tggtttccaggacaacaccttatgaaccaaagagaggcgtacccttatctgtgaatccgg

SEQ ID NO: 9044 - DNA, 60 bp, Homo sapiens
tgtgttactggtaaacccatcagccaagggggaatccatggacgcatctctgctactggc

SEQ ID NO: 9045 - DNA, 60 bp, Homo sapiens
cttacgctctctgtctggctgtacgtctggtgttctcaatgcttttctagcaactgttgg

SEQ ID NO: 9046 - DNA, 60 bp, Homo sapiens
gctggatgcagtggaaccttcaccgtgcagaacagagaacttgagtgtattcgagagatc

SEQ ID NO: 9047 - DNA, 60 bp, Homo sapiens
gacgtggcaatgccgctgaacttcactggaggtcaattgcacagcagaatgttccagaat

SEQ ID NO: 9048 - DNA, 60 bp, Homo sapiens
atgatcccactgacctactcttgcctgctggagggtaatgagaagctttggttctgccat

SEQ ID NO: 9049 - DNA, 60 bp, Homo sapiens
gcccatctgcccaaacttttgtatttgatctctgttttgatgtcgaaccccaaagcactg

SEQ ID NO: 9050 - DNA, 60 bp, Homo sapiens
tcattcaggccagagacacagagaccacatagcccagtgattaaaccccggtttcactct

SEQ ID NO: 9051 - DNA, 60 bp, Homo sapiens
ggaaatcgcattcttcatgtgagaaatgcaccttctcctgctgctacttcttccattgca

SEQ ID NO: 9052 - DNA, 60 bp, Homo sapiens
agctggagggagtcgaagctgatggttggaagacggatttgctttggtattctgcttcca

SEQ ID NO: 9053 - DNA, 60 bp, Homo sapiens
acaggtcattgagaactgcccagtgaccggcattcgtgtgtggacggatgattttggggt

SEQ ID NO: 9054 - DNA, 60 bp, Homo sapiens
gtgtcagatgaggaacaccactatcttaattttgcgatacactgcatttgctggtgctat

SEQ ID NO: 9055 - DNA, 60 bp, Homo sapiens
actggcttcatcctggcactgaccaggaaagactgcctctgaccctcttagcagacagag

SEQ ID NO: 9056 - DNA, 60 bp, Homo sapiens
agactcttccacctctttttgcctgaatggcctttgggcacaaggtcagaggctggatgt

SEQ ID NO: 9057 - DNA, 60 bp, Homo sapiens
gactcttacccagcgcatgtctttatcagtgtgtactcgtgacgatttgtgtgaaaatag

SEQ ID NO: 9058 - DNA, 60 bp, Homo sapiens
ccttgcccttcagatctctgagaacttgtttagcaacaaagtcctcaatgccttgaaacc

SEQ ID NO: 9059 - DNA, 60 bp, Homo sapiens
agagtttaagccagcatgatccagatgggttcagcagtctggtcagtgagaaagggccga

SEQ ID NO: 9060 - DNA, 60 bp, Homo sapiens
taagcacgtgggttgggttgtcctgcttggctgcggagggagtggaacctcgatattggt

SEQ ID NO: 9061 - DNA, 60 bp, Homo sapiens
gagggcagtcagtttagcacaaagcaatactaggctgaaggagagacctgagaactttcc

SEQ ID NO: 9062 - DNA, 60 bp, Homo sapiens
ccatcgcagatgtgcagatcaagaatgaagaggagctggagaagtgccctatgtctttgg

SEQ ID NO: 9063 - DNA, 60 bp, Homo sapiens
tctgactcctgctcagacccatcacctttgccggggaatgatgtctggagaacccctgca

SEQ ID NO: 9064 - DNA, 60 bp, Homo sapiens
tttaaagacccatgcaagagcctggtttgtcatccctgccctagcccaatctgaggctaa

SEQ ID NO: 9065 - DNA, 60 bp, Homo sapiens
caaagtcagggatgaggagcaggaggactattcaagataaacttctgtaacctatgcata

SEQ ID NO: 9066 - DNA, 60 bp, Homo sapiens
atagaaaccaccagctttgtgtctcctaagtgggttccccagatgggtgaccacactgaa

SEQ ID NO: 9067 - DNA, 60 bp, Homo sapiens
cggccctgaagctgggaagaccaacactgtcatctgaagttggaatcatcatctgtgata

SEQ ID NO: 9068 - DNA, 60 bp, Homo sapiens
acccttgatcttggagtctcacagcagactgcatgtgaacaactggaaccgaaaacatgc

SEQ ID NO: 9069 - DNA, 60 bp, Homo sapiens
gggaattgctagctgttccagacaactataaggtgatttttctgcaaggaggtgggtgcg

SEQ ID NO: 9070 - DNA, 60 bp, Homo sapiens
acctcctggaaacagtccacttgggcgcaaaacccagtgccttccaaatgagctgcagtc

SEQ ID NO: 9071 - DNA, 60 bp, Homo sapiens
cgtgggtgcaacccttggccagcgagatgctttgacacagccccttaagatgttttaagg

SEQ ID NO: 9072 - DNA, 60 bp, Homo sapiens
ctgcgatttcattgtcagtgctacaggagttacaccaaatgtagaaccttttctccatgg

SEQ ID NO: 9073 - DNA, 60 bp, Homo sapiens
gagatgctttggtagcaggaggagtgagtcagacaccttcataccttagctgcaagagtg

SEQ ID NO: 9074 - DNA, 60 bp, Homo sapiens
ctgcagcctacgtgttagggcttatcattccttgcactgtgctggtgatcaagtttgtcc

SEQ ID NO: 9075 - DNA, 60 bp, Homo sapiens
gttgaattcctgcatgaactgaatgttccatttttcaaagttggatctggagacactaat

SEQ ID NO: 9076 - DNA, 60 bp, Homo sapiens
ccaggccgtctcttgctccctaattcatttcccaggaagctgtgatacagggtgaaataa

SEQ ID NO: 9077 - DNA, 60 bp, Homo sapiens
caaaagtgcctcaacgacatgctctggaaatcccaaatgccacagtctgaggttgatatc

SEQ ID NO: 9078 - DNA, 60 bp, Homo sapiens
acagggccacaggagcagaagctgggtgggctgaagaggcctggaaacgagagtcttaat

SEQ ID NO: 9079 - DNA, 60 bp, Homo sapiens; identical to SEQ ID NO: 4855

SEQ ID NO: 9080 - DNA, 60 bp, Homo sapiens
ccccgttcaatgttgtggcctggcacgggaattatacaccctacaagtacaacctgaaga

SEQ ID NO: 9081 - DNA, 60 bp, Homo sapiens
ggggcacagtgttcaagactctgaagtccttgtataaaacccatgcttgctatgagtaca

SEQ ID NO: 9082 - DNA, 60 bp, Homo sapiens
aagcagagcatatggacatcgaccatctccagccatctggctaccaagcatctcaaggaa

SEQ ID NO: 9083 - DNA, 60 bp, Homo sapiens
tagtcttgactctttgtgtgtgactgtttctcatgtttgaatgtgtgactaggagatgat

SEQ ID NO: 9084 - DNA, 60 bp, Homo sapiens
tctaagcccaaagattaactagagtccctccaaccttatagattgttggctttcacaatc

SEQ ID NO: 9085 - DNA, 60 bp, Homo sapiens
ctgccaggatgccgaaggataccccactagcacccctgagggggtcatgtggtcaataaa

SEQ ID NO: 9086 - DNA, 60 bp, Homo sapiens
caacgccatgtaccacaggtgcctggactacgtgttggaggagctgaagcacaacgccaa

SEQ ID NO: 9087 - DNA, 60 bp, Homo sapiens
tcaggaaagccaggactcaggggagaagcaaacccccaggattgaaggctagggttctag

SEQ ID NO: 9088 - DNA, 60 bp, Homo sapiens
ggtgaggagaaaacaggaaacgggctttctctgaattggtaaatgggaaagaagtgagca

SEQ ID NO: 9089 - DNA, 60 bp, Homo sapiens
agccggtgccatctgtgggggctttgggccaggggtctccggacagcatgagcgtgggct

SEQ ID NO: 9090 - DNA, 60 bp, Homo sapiens
ataagcattccagatgcttgcagcttcctgcatccaggagatgctgtgttccccgtgatg

SEQ ID NO: 9091 - DNA, 60 bp, Homo sapiens
ctcctattccggactcagacctctgaccctgcaatgctgcctaccatgattggcctcctg

SEQ ID NO: 9092 - DNA, 60 bp, Homo sapiens
atggcagatgccctgctagagcgaggctactcactggtatcaggtggtactgacaaccac

SEQ ID NO: 9093 - DNA, 60 bp, Homo sapiens
ccacacactgctgttgcaaaagtggttgcagatagggtgcaagacaaaacttgccctgtg

SEQ ID NO: 9094 - DNA, 60 bp, Homo sapiens
aacgtacatgtgtttggagtggagggaaacagcgatgagctcgatgagccgatcaagact

SEQ ID NO: 9095 - DNA, 60 bp, Homo sapiens
gccaaaagcataacgaatgccatgaacgagctgcggcatgatcttgacgttgtcagcgac

SEQ ID NO: 9096 - DNA, 60 bp, Homo sapiens
ggtggctctccacctagatgaggaagataagctgaggcacttcagggagtgcttttatat

SEQ ID NO: 9097 - DNA, 60 bp, Homo sapiens
atgcaccttccagccaccataggagactacacagacttctattcctctcggcagcatgct

SEQ ID NO: 9098 - DNA, 60 bp, Homo sapiens
ttcaaggctttcgaggaggagcagaacctgcggggtaacctcaccaacatggagaccaat

SEQ ID NO: 9099 - DNA, 60 bp, Homo sapiens
cccatgacaaatcgttctacagtttccaaatctatcttggaccagtcaatttcctccttc

SEQ ID NO: 9100 - DNA, 60 bp, Homo sapiens
ctggacatccaggtaggtgaacatgccaatgactatgcagaaattgctgctaaagacaag

SEQ ID NO: 9101 - DNA, 60 bp, Homo sapiens
agcatctcccccttcatgaggaaaggcatggctggggactggaagaccaccttcaccgtg

SEQ ID NO: 9102 - DNA, 60 bp, Homo sapiens
gtggaagcctttcagcacgctgtcagtggagacttcatgcttaaccagtacaccaagaca

SEQ ID NO: 9103 - DNA, 60 bp, Homo sapiens
ggatacagtggagattccatacaggccttacttagctccttgcgatactgtgagccagag

SEQ ID NO: 9104 - DNA, 60 bp, Homo sapiens
gagaagaacctgaatgatgagatcttggataggatcatccatcacacctcatttgaagtg

SEQ ID NO: 9105 - DNA, 60 bp, Homo sapiens
cacaccttctgggaaaggaacctgccctctgtttctggcctgctgaagatcattggattt

SEQ ID NO: 9106 - DNA, 60 bp, Homo sapiens
gcaacaatggatattgcctgtgtttgccactgtgtttccctgcctctcaattcgctgaaa

SEQ ID NO: 9107 - DNA, 60 bp, Homo sapiens
gcgtcctggaaaggccccagcgcacggacatctgaggagctgtttccgttcctctgcccg

SEQ ID NO: 9108 - DNA, 60 bp, Homo sapiens
actgcagagccctctggaaccacatctgtgcaggtgccaaccactgaagtcataagcact

SEQ ID NO: 9109 - DNA, 60 bp, Homo sapiens
acggagtcttatctgaactacacttactgaacagcttgaaggccttttgagttctgctgg

SEQ ID NO: 9110 - DNA, 60 bp, Homo sapiens
gccttcttccaactcaggtagaacacacctgtctttgtcttgctgttttcactcagccct

SEQ ID NO: 9111 - DNA, 60 bp, Homo sapiens
gctgattggagtcagctggaacataccactgcctctagactaaggccagcagatttagca

SEQ ID NO: 9112 - DNA, 60 bp, Homo sapiens
acaagtttgtcctgcgctttgccatctgttctcgcacggtggaatctgcccatgtgcagc

SEQ ID NO: 9113 - DNA, 60 bp, Homo sapiens
cacctatatcatgcctgcccaccttcagacaggcgtagatgatgtcaagggcgtcttctt

SEQ ID NO: 9114 - DNA, 60 bp, Homo sapiens
ttgagacaggcggtcaagcaggtgctgaagtgtgatgtgactcagagccagccactgggg

SEQ ID NO: 9115 - DNA, 60 bp, Homo sapiens
cccggaaatcgagaggaagatccattagttctttggggacgttgtgattctctgtgatgc

SEQ ID NO: 9116 - DNA, 60 bp, Homo sapiens
aatgagctgcagcatgatctcgatgttgtcagtgatgcccttgctaaggtcagcaggaag

SEQ ID NO: 9117 - DNA, 60 bp, Homo sapiens
accttaaatgggagggaagttggggtgtctgctttgggaccagaggaagatagcttgaga

SEQ ID NO: 9118 - DNA, 60 bp, Homo sapiens
caggacgactgttttcccaacacgggtaaatctagtaccatgtcgtagttactctcaggc

SEQ ID NO: 9119 - DNA, 60 bp, Homo sapiens
aaaggcgtcagggagactcactggcctgcagagagaggcactttgcaccacagacagata

SEQ ID NO: 9120 - DNA, 60 bp, Homo sapiens
ggaattgtggggcaatccgttcttagggactggatacttctggctggctgagtatagtac

SEQ ID NO: 9121 - DNA, 60 bp, Homo sapiens
ggacgcccggcaggtcagctggagggccgtgctgagcgccaaccgcctgtacgtggagct

SEQ ID NO: 9122 - DNA, 60 bp, Homo sapiens
acaagaacggcagctttgccaatttgagaatttacccacatggattggtgttgctggacc

SEQ ID NO: 9123 - DNA, 60 bp, Homo sapiens
atgcagcaattccagaaccccgacttcccacccgaagtagaggaacaggatgccagcacc

SEQ ID NO: 9124 - DNA, 60 bp, Homo sapiens
gcccaagctttagcgctgccgggttcttggagtcctgtgggatgagtcagggttctgaat

SEQ ID NO: 9125 - DNA, 60 bp, Homo sapiens
ggaagatgagcctctgtttacaagcagcctttggggtccatcctgtgatgagcttgatca

SEQ ID NO: 9126 - DNA, 60 bp, Homo sapiens
cacagtatggccggcgacattagctagcgctcgctctactctctctaacgggaaagcagc

SEQ ID NO: 9127 - DNA, 60 bp, Homo sapiens
gcatgaactgtagtgctttaaacaatcatctccttaacaggggtcgtaagcctggtttgc

SEQ ID NO: 9128 - DNA, 60 bp, Homo sapiens
ccggtttagtgaccccatgacttacagccggttcttacctcttaggtgaaggagatgaca

SEQ ID NO: 9129 - DNA, 60 bp, Homo sapiens
caagagagtgtttcttcactcaactcaggtggcatttggggtgacatctcaaaggccagg

SEQ ID NO: 9130 - DNA, 60 bp, Homo sapiens
gctcccaacgtggtggaggatgagattgatcagtacctcagcaaacaggacgggaagatt

SEQ ID NO: 9131 - DNA, 60 bp, Homo sapiens
agcagaggtagccgagactggagcctagaggctggatcttggagaatgtgagaagccagc

SEQ ID NO: 9132 - DNA, 60 bp, Homo sapiens
cttgactttgttcacagcatgtagggtgatgagcactcacaattgttgactaaaatgctg

SEQ ID NO: 9133 - DNA, 60 bp, Homo sapiens
tctccaagttccaggcttccggtccttagccttcccaggtgggactttaggcatgattaa

SEQ ID NO: 9134 - DNA, 60 bp, Homo sapiens
gatgaagaatcctatactggagcgcctggcagagcagatcgcgaccctttgtgccaccct

SEQ ID NO: 9135 - DNA, 60 bp, Homo sapiens
attaaacgaggtcagttcagatgccaacagggaaaatgcagctgccgagtcagggtctga

SEQ ID NO: 9136 - DNA, 60 bp, Homo sapiens
ccaaaggagagtgggcctaactcatgtgagcttgataactgatgaactcattgggagcat

SEQ ID NO: 9137 - DNA, 60 bp, Homo sapiens
ttgctgcagaagctcagagagtcctctctaatgctcctagaccagggacttgacccatta

SEQ ID NO: 9138 - DNA, 60 bp, Homo sapiens
gagagcaccttgcagttccccgagaactttctgattcacagtctcattttgacagcatga

SEQ ID NO: 9139 - DNA, 60 bp, Homo sapiens
tgtctcggaaactcagagccgggttcctcccgggtttctgccgggtttctccctgcggct

SEQ ID NO: 9140 - DNA, 60 bp, Homo sapiens
cagcctctccaaacatgtaggaggaaatgaggaaatcgctgtgttgttaatgcagagaac

SEQ ID NO: 9141 - DNA, 60 bp, Homo sapiens
aatggggaataccagtctcctattaacctaaactcaagagaggctaggtatgacccctcg

SEQ ID NO: 9142 - DNA, 60 bp, Homo sapiens
agtagagtctgtgggaaaggtggtacaggaagacggtcgtatgctgctcatagcagtgct

SEQ ID NO: 9143 - DNA, 60 bp, Homo sapiens
gtaaggagagcatcagtgtcagctcagagcagctggcacaattccgcagccttctatcaa

SEQ ID NO: 9144 - DNA, 60 bp, Homo sapiens
gcgggcttgtgctctggtgcttccagggcgttagcgactcatgcaccggacccgttaacg

SEQ ID NO: 9145 - DNA, 60 bp, Homo sapiens
ccaggccactaatgagggcacaaggtcctagagacattaggtccacatgaatagcagaac

SEQ ID NO: 9146 - DNA, 60 bp, Homo sapiens
aacactggaagacacgtatcccttcgcctggacaaggagcacttggtcaacatatctgga

SEQ ID NO: 9147 - DNA, 60 bp, Homo sapiens
gcagctaagaagtcttaggcagcagcccagacatgtatagaggggcagttagagggagaa

SEQ ID NO: 9148 - DNA, 60 bp, Homo sapiens
acgaggcccaggtgttctccctcgatgctccccacagcacctacaacctctactgcccct

SEQ ID NO: 9149 - DNA, 60 bp, Homo sapiens
tcactcgcatctcctacaagaatgatgcctactttcttcaagacctgagcctggagctcc

SEQ ID NO: 9150 - DNA, 60 bp, Homo sapiens
cattttggaagagagtttttcatcttagagattggtgaacaagtgtgagggtgtgagaaa

SEQ ID NO: 9151 - DNA, 60 bp, Homo sapiens
gacaggaagtgagatggcttcagttcatgagacgggatctgagttagacatcaccagtgg

SEQ ID NO: 9152 - DNA, 60 bp, Homo sapiens
aactacaagggcgatgtggccatgagcaagattgagcacttcatgcctttgctggtacag

SEQ ID NO: 9153 - DNA, 60 bp, Homo sapiens
atctcaagagtgtttccctccaaacctgatagctgcctattcctgtctggttggggctgt

SEQ ID NO: 9154 - DNA, 60 bp, Homo sapiens
ccaaagagtagcaagaggatcgggtgtatcaacaagagatgttcaagaacttttgacaca

SEQ ID NO: 9155 - DNA, 60 bp, Homo sapiens
aggtcaaagggcacgaagttgtgcctacagctgttaccatagtaaccgaggaccggatgt

SEQ ID NO: 9156 - DNA, 60 bp, Homo sapiens
ccaacaaaagcgggcagtctgtgttatataatgctctgttttctagtcagtcatctaagg

SEQ ID NO: 9157 - DNA, 60 bp, Homo sapiens
ttccgttccagaaaattcagcacagcatcaccgcgcaggaccatcagcccactccagata

SEQ ID NO: 9158 - DNA, 60 bp, Homo sapiens
atgtgttttggaagctggtgctggtgttgccggatgtagaggagcagtccccagagagtt

SEQ ID NO: 9159 - DNA, 60 bp, Homo sapiens
cccacgctgcttgggacttgaaatctgtggccgaaggaccgtcactacataacttcaaaa

SEQ ID NO: 9160 - DNA, 60 bp, Homo sapiens
tacgtgcaaggtgttagtggagagcaaacttcgaggacgtaccctggaggaggtggtcat

SEQ ID NO: 9161 - DNA, 60 bp, Homo sapiens
ggatgctgtggcccactgccatgaggcagagaggaacatagctttgcgttcaagtttaga

SEQ ID NO: 9162 - DNA, 60 bp, Homo sapiens
cacagcttagcgcactgctccttagcttttcgctttgccacagtggaaagcagattttcc

SEQ ID NO: 9163 - DNA, 60 bp, Homo sapiens
aaaagtagagcagctgatggaatggagttccagacgctcaatcttccgaatgaatggtga

SEQ ID NO: 9164 - DNA, 60 bp, Homo sapiens
caagcacagagctgaaaactgaatgtgcagtggtgttgggaagtcttgctatgggtactg

SEQ ID NO: 9165 - DNA, 60 bp, Homo sapiens
gtcttgtttttgcttcattgcatgacataacccttcccctcaagctgttcctatatatac

SEQ ID NO: 9166 - DNA, 60 bp, Homo sapiens
gtatgttgtacaggtgatcttctccgtgacgtttgcattttcttgcaccatgtttgagct

SEQ ID NO: 9167 - DNA, 60 bp, Homo sapiens
ctttattaatttggattgcctgaacagtgtatcccatgatgatgaaggaaaatggagaga

SEQ ID NO: 9168 - DNA, 60 bp, Homo sapiens
ggtcctctgccctgatctgtgtaactcttatcttgggtacttgagcagacggtatattcc

SEQ ID NO: 9169 - DNA, 60 bp, Homo sapiens
tgagctaccctgacagactggcagccgagcgtatccacgcagagcgcatggcatcgctga

SEQ ID NO: 9170 - DNA, 60 bp, Homo sapiens
tacccagtcgagtcctcttgtggagcccacagtcctcatggagctaacttctcaaatgtt

SEQ ID NO: 9171 - DNA, 60 bp, Homo sapiens
aagtttgtccctggctgtttcgtgtgtctagaatctcggacctgcagtagcaacctcacc

SEQ ID NO: 9172 - DNA, 60 bp, Homo sapiens
ggatttggcctttttgattaaattcctgctcccctgcaaataaagcctttttacacatct

SEQ ID NO: 9173 - DNA, 60 bp, Homo sapiens
ctaccagaccactgaaggagttcctggaagccctgcgtacgtagcactgaagactatttt

SEQ ID NO: 9174 - DNA, 60 bp, Homo sapiens
gtcagctgcccactgatactcctttggaaaatggtgcgctgtggatcaagacactttggt

SEQ ID NO: 9175 - DNA, 60 bp, Homo sapiens; identical to SEQ ID NO: 4855

SEQ ID NO: 9176 - DNA, 60 bp, Homo sapiens
agcaggaaagtgacgtttgagggtccccttctcaaccgcattgctgctggggctggggat

SEQ ID NO: 9177 - DNA, 60 bp, Homo sapiens
gccacacggtctttgagctgagtcgaggtggaccctttgaacgcagtcgccctacagccg

SEQ ID NO: 9178 - DNA, 60 bp, Homo sapiens
taatgtactcctgggaactgggtaggacatatccatattgtagttcccaaggtgtctggt

SEQ ID NO: 9179 - DNA, 60 bp, Homo sapiens
cttaaatgtcctgtcacgactgttgtttagcagtgacccagatgtgttagcagacgtgtg

SEQ ID NO: 9180 - DNA, 60 bp, Homo sapiens
cggtggcaaattcaagtcctgttaaccccgtggtgttctttgatgtcagtattggcggtc

SEQ ID NO: 9181 - DNA, 60 bp, Homo sapiens
ttgccttagggctctctgcccagtaacaggcatcgaacggtgcagactgaagacgccctc

SEQ ID NO: 9182 - DNA, 60 bp, Homo sapiens
aagatgctcctcgtgctgatgagattacacgtcgattagcagtttgtaacatggactggg

SEQ ID NO: 9183 - DNA, 60 bp, Homo sapiens
gaggttatgttcatgaggatagcaaaagcttatgctgctttaacggatgaagagtcccgg

SEQ ID NO: 9184 - DNA, 60 bp, Homo sapiens
ggagcatggccaacaggaaggtcagcttcttactgatgtgtgtggattcttacagaatgt

SEQ ID NO: 9185 - DNA, 60 bp, Homo sapiens
acccttatgaacctctactggttcctgtacatcgtggcgtttgcagccaaggtgttgaca

SEQ ID NO: 9186 - DNA, 60 bp, Homo sapiens
ccgctgtttccttgggtacagatttgagtgttcatgtgatgagactgtaaacctcatttt

SEQ ID NO: 9187 - DNA, 60 bp, Homo sapiens
ttacatccgagctgggactctaatcatggctctgcatgactcttccgattacctgctgga

SEQ ID NO: 9188 - DNA, 60 bp, Homo sapiens
ttggagagcgagcagttcctgacggagctgaccagacttttccagaagtgccggacgtcg

SEQ ID NO: 9189 - DNA, 60 bp, Homo sapiens
ggctctcttcctgtctttgtggctccggaaaggcgtttgggatgccaacgatgaggctgc

SEQ ID NO: 9190 - DNA, 60 bp, Homo sapiens
atggacaacttcaccgagatcatcaagaccgccaagattgaggacgagacgcaggtgtca

SEQ ID NO: 9191 - DNA, 60 bp, Homo sapiens
gtacctggtcttagcatctggacagacctcttattagctcttcgtagtggtgcatttagg

SEQ ID NO: 9192 - DNA, 60 bp, Homo sapiens
attccagcgaacacacacaggtgtcctgccgttggaccttcacctcctagagataaacca

SEQ ID NO: 9193 - DNA, 60 bp, Homo sapiens
acaagcatatgctactggcaggatcaaccaggacacctgcctctacgagtgctcccccaa

SEQ ID NO: 9194 - DNA, 60 bp, Homo sapiens
ggtacctgaagctgaacctgagccagcagaagagtacactgagcaaagtgaagttgaatc

SEQ ID NO: 9195 - DNA, 60 bp, Homo sapiens
gaaagttggtccagatatatgtcacagaacttttcacttgtatactactcttacaatgga

SEQ ID NO: 9196 - DNA, 60 bp, Homo sapiens
actgaagctctgtcacaggaggacttagtgcatgcaattggcgaaagtgcagcattgggg

SEQ ID NO: 9197 - DNA, 60 bp, Homo sapiens
agctgcatggaaggtggaggacagaagccctgtggatccccggatttcacactccttctg

SEQ ID NO: 9198 - DNA, 60 bp, Homo sapiens
acctggggacaggtcgattgctggaccagggcaaagaagaagccctgccatctgtgccct

SEQ ID NO: 9199 - DNA, 60 bp, Homo sapiens
tatagtggagacccagaggatgagaaaacttctctgcctcagcagaagagtggcagctga

SEQ ID NO: 9200 - DNA, 60 bp, Homo sapiens
gttttctgagcagaatgtacgaggtgtgccatcccaaaaccagctgctaccctgtccttt

SEQ ID NO: 9201 - DNA, 60 bp, Homo sapiens
tccaacattccccagtatccccagcttctgctgcgctggtttgcggctttgggaaataaa

SEQ ID NO: 9202 - DNA, 60 bp, Homo sapiens
agaagatgctcacttcatctatggttaccccaagaaggggcacggccactcttacaccac

SEQ ID NO: 9203 - DNA, 60 bp, Homo sapiens
agttccgaggagcacctgggaagctctgggtgcaggatagcagtccagagtccatggccc

SEQ ID NO: 9204 - DNA, 60 bp, Homo sapiens
tgaggtgcccagtctgcttgtctatggaaggctgtctggaggggacaacagaagagatct

SEQ ID NO: 9205 - DNA, 60 bp, Homo sapiens
aaaggctgagatgaagtggactgagtagaactggaggacaagagtcgacgtgagttcctg

SEQ ID NO: 9206 - DNA, 60 bp, Homo sapiens
cgcagttcaacaacatcttcttcttggattgacggatgacggctcaccgagagcatatct

SEQ ID NO: 9207 - DNA, 60 bp, Homo sapiens
tgtgggaaacccttttgcgtggtccttaggcttacaatgtgcactgaatcgtttcatgta

SEQ ID NO: 9208 - DNA, 60 bp, Homo sapiens
gcgctgcatgtgctgggtacatttcttggcacttgggaatcagtagtcaagcgaaaccct

SEQ ID NO: 9209 - DNA, 60 bp, Homo sapiens
aacattctggatctgaccctcccagtctcatctcctgaccctcccactcccatctcctta

SEQ ID NO: 9210 - DNA, 60 bp, Homo sapiens
agctgtggtctgagcccactgctggtcctggtggtaaccgctctgtccaccctattatct

SEQ ID NO: 9211 - DNA, 60 bp, Homo sapiens
cggctcctttcaggatttcagtcacatcttcctgctttgtccagaacacattgaccaagc

SEQ ID NO: 9212 - DNA, 60 bp, Homo sapiens
tgtaaccaagattcctgtcaatcccatctgcagggaactctgggaccttctctggtagct

SEQ ID NO: 9213 - DNA, 60 bp, Homo sapiens
ccctctgcctcatggcaaaggcttgccccaaatctcaacttctcagacgttccatacccc

SEQ ID NO: 9214 - DNA, 60 bp, Homo sapiens
agagtgtagctgtaagggcagtgcccatgtgtacattctgcctagagtgtagcctaaagg

SEQ ID NO: 9215 - DNA, 60 bp, Homo sapiens
tttatagggagtagaaccgtctctcttcttagttggtgactgtttggggcctggtatttt

SEQ ID NO: 9216 - DNA, 60 bp, Homo sapiens
tacaaaggaggacaagaccctctcaggctgtcccaagctcccaagagcttccagagctct

SEQ ID NO: 9217 - DNA, 60 bp, Homo sapiens
cttgagaaaggtggaaagttcacagtacgtggaaaaccgacacttgaagacctggagcaa

SEQ ID NO: 9218 - DNA, 60 bp, Homo sapiens
caggcgcagggaaggacggccagggtgacacggaagcatgcgacggctgctgatccctct

SEQ ID NO: 9219 - DNA, 60 bp, Homo sapiens
gggtggggttgagttgggggtattttctaattttttttgtacatttggaacagtgaccaa

SEQ ID NO: 9220 - DNA, 60 bp, Homo sapiens
cttttcacttgtgccattaagcaagcactgtagcaaaagccacttccacatggccctggc

SEQ ID NO: 9221 - DNA, 60 bp, Homo sapiens
acttttactgtagccctttgattccagagagggagctttgctggcaaaagcagtttttgc

SEQ ID NO: 9222 - DNA, 60 bp, Homo sapiens
ggggttgagtgttacagagagtagtctgaagattcctgtgtaaaagcaaagctaacaagc

SEQ ID NO: 9223 - DNA, 60 bp, Homo sapiens
agggtcaccgtgctccgggttttctgacagtcggtgtttcctgggcctttggagtggctg

SEQ ID NO: 9224 - DNA, 60 bp, Homo sapiens
taagcactcacgcaaaggtaaatgaacacgttttaaatgtgtgtgttgctaattttttcc

SEQ ID NO: 9225 - DNA, 60 bp, Homo sapiens
ttccatagtccactcttaggggaaccagcaaagcctcatggcagttggctccatctggac

SEQ ID NO: 9226 - DNA, 60 bp, Homo sapiens
agctgagctatcaggtgcccatcttttctggtcccagcagtggtgaggagagcacaggca

SEQ ID NO: 9227 - DNA, 60 bp, Homo sapiens
gatgacctcggaagcatttccacagatggtgtcagggtttcaagaagtcttagggcttcc

SEQ ID NO: 9228 - DNA, 60 bp, Homo sapiens
aaaatgcagtgctttactttaaactaaggggaactttgcggaggtgaaaacctttgctgg

SEQ ID NO: 9229 - DNA, 60 bp, Homo sapiens
gggatcattgccctgaacgtggatgactcagtttcaggcccacacctctcagtgacgttc

SEQ ID NO: 9230 - DNA, 60 bp, Homo sapiens
cttttcactggctgactctcccatatctgcaagagattctgcaggaactgggtgtgcaca

SEQ ID NO: 9231 - DNA, 60 bp, Homo sapiens
cagacttcctgattactcctgatttctactgggacagagaaaacctggaaggactttacg

SEQ ID NO: 9232 - DNA, 60 bp, Homo sapiens
ccctctgctactgtgttacattctgattgtcttgtatggaccagaagagagctttgggac

SEQ ID NO: 9233 - DNA, 60 bp, Homo sapiens
tgacagatgaggatcgtttatccaagaggaggagcattggagagaccatctccctgcagg

SEQ ID NO: 9234 - DNA, 60 bp, Homo sapiens
gacctgatagtaaggtgcaaaggtccaaacctgggcttgtctccacttcacgtcacaaaa

SEQ ID NO: 9235 - DNA, 60 bp, Homo sapiens
ggctccccattacaatcttttcgagatcttttcccttgctaaccggatctgatttgtgcg

SEQ ID NO: 9236 - DNA, 60 bp, Homo sapiens
ggtcagtgaatgcggttcagcctgctacctctcctgtcttcatagaaccattgccttaga

SEQ ID NO: 9237 - DNA, 60 bp, Homo sapiens
cttaggaagagcctcgtgtcacaacacgtgtccctacaggcaaagtgtcctggcatttaa

SEQ ID NO: 9238 - DNA, 60 bp, Homo sapiens
taagaccctagagaagcccgatcttggattcctcagtcctcaggtgtttgtgtacgtggt

SEQ ID NO: 9239 - DNA, 60 bp, Homo sapiens
gtcctggagagttactgcctttcatgatctgatcttttgtaatgaaactacaagtgcaac

SEQ ID NO: 9240 - DNA, 60 bp, Homo sapiens
atgttgaatggcgtggactcgctactccgttcttcacagctgccttccagaatgtgttca

SEQ ID NO: 9241 - DNA, 60 bp, Homo sapiens
tcatctggtccacggtgattctggaactgtggaagcgtggctgtgccaacatgacctaca

SEQ ID NO: 9242 - DNA, 60 bp, Homo sapiens
tatttgcagagacacctgagaatcgatggctcagtctgctctggagccacagtctggcgt

SEQ ID NO: 9243 - DNA, 60 bp, Homo sapiens
cctctcaggagacagtgaggctgcccctcctaccacctacctcattctgcctactcaccc

SEQ ID NO: 9244 - DNA, 60 bp, Homo sapiens
acaggatttaccggctgaggtctcgtggttccaccaagatgtccatacacctgattcaca

SEQ ID NO: 9245 - DNA, 60 bp, Homo sapiens
tgaatactacgtaactccatccaagtcaagaaattgccagcttctcggaagcccactgtg

SEQ ID NO: 9246 - DNA, 60 bp, Homo sapiens
tctacccagtcggttacttggacaagcaagtgcctgataccagcgtgcaagagacagacc

SEQ ID NO: 9247 - DNA, 60 bp, Homo sapiens
aaggacgtactcgtcttggtgagagcgtgagctgctgagatttgggagtctgcgctaggc

SEQ ID NO: 9248 - DNA, 60 bp, Homo sapiens
aggactcgttggggaggtggcctgcgcttgtagagactgcatccccgagacgatggcgga

SEQ ID NO: 9249 - DNA, 60 bp, Homo sapiens
gtcatctgtctctgccacgtctgctttggacacttcaaatacctcagtgcccacaactac

SEQ ID NO: 9250 - DNA, 60 bp, Homo sapiens
gatattgctgttatatcaataacatggcacaacaagaactgtctgccaggtcattcttcc

SEQ ID NO: 9251 - DNA, 60 bp, Homo sapiens
atcttggtgcagcacaaagtccggagtggcgtctcgggcatcgtgggcatggaggtggat

SEQ ID NO: 9252 - DNA, 60 bp, Homo sapiens
ggctggagagcgcctatgagaagcacctcatcatcaaagttgtcctgttccagtttgtca

SEQ ID NO: 9253 - DNA, 60 bp, Homo sapiens
tgtccacggagatgcctcggcagtggaatccaatttctttccagccacaacctaccccat

SEQ ID NO: 9254 - DNA, 60 bp, Homo sapiens
cctcacttcctggaaagatctagattgttattgctgtttgagctgtctcagtgggataag

SEQ ID NO: 9255 - DNA, 60 bp, Homo sapiens
tggttgggtcagccgcaatgggtggcattctcctagctttaattgaaggagctggtatct

SEQ ID NO: 9256 - DNA, 60 bp, Homo sapiens
gcgttagtctggagaagttggactagtgaggtaatggatgtcatcaatctcaggaatgct

SEQ ID NO: 9257 - DNA, 60 bp, Homo sapiens
tatatcgttcctcctgagcagcaacccacagtaggtaggaaaatgggctgtttcacaggc

SEQ ID NO: 9258 - DNA, 60 bp, Homo sapiens
gtgctttctgcatgcttagagcatgttcttggaacatggaattttataagctgaataaag

SEQ ID NO: 9259 - DNA, 60 bp, Homo sapiens
gaattcggcaccggttgagaggtagtgccaatgctgtgaggatccgagccccccagattg

SEQ ID NO: 9260 - DNA, 60 bp, Homo sapiens
tgctctgaaagctctgttccagctcagcaggttggaggagaggtcagtgctctttgcggt

SEQ ID NO: 9261 - DNA, 60 bp, Homo sapiens
gcaggtcaccagaagaccctgagaaacttccgatagccaagcctaataatgcctatgaat

SEQ ID NO: 9262 - DNA, 60 bp, Homo sapiens
atttggctttgtcctgcccaagtgggctgcagactgagtgctgcccttgtagcttcccca

SEQ ID NO: 9263 - DNA, 60 bp, Homo sapiens
gttccctgtactggtgggtgacatggacaacagtggcagtctcaacgctcaggtcattca

SEQ ID NO: 9264 - DNA, 60 bp, Homo sapiens
tacaacagtgtcatccgcctgtacctggagcagcaagtgcaattttacgaaacgattgca

SEQ ID NO: 9265 - DNA, 60 bp, Homo sapiens
ccacccgtcttcaatctctgttctgctcccagatgccttctagattcactgtcttttgat

SEQ ID NO: 9266 - DNA, 60 bp, Homo sapiens
gtgaagatgtattccggcagaatagtgagtagaatgacatgcttactatacagaaggcaa

SEQ ID NO: 9267 - DNA, 60 bp, Homo sapiens
ggcattcctctgagtttacaagcagagactcactccaacccaaactagctgggagttcag

SEQ ID NO: 9268 - DNA, 60 bp, Homo sapiens
aaaggtcatccaaggaggaagccgagatggcctacaaagacttcctgctccagtccagca

SEQ ID NO: 9269 - DNA, 60 bp, Homo sapiens
atacatcaacatgctgaccaggcctaggtatgggaaaagacacaaagaggacacgctggc

SEQ ID NO: 9270 - DNA, 60 bp, Homo sapiens
agaggaacaaattgagcaggccatcaaagagcatttgaatcaaggcagctctcaggagac

SEQ ID NO: 9271 - DNA, 60 bp, Homo sapiens; identical to SEQ ID NO: 4855

SEQ ID NO: 9272 - DNA, 60 bp, Homo sapiens
ctgcctccttcaccctccgttgacagtatatgtcatgcctcactttcttctagctgagct

SEQ ID NO: 9273 - DNA, 60 bp, Homo sapiens
ggacattactggtgtagaatctaccgcccttctgacaactctgtctctaagtccgtcaga

SEQ ID NO: 9274 - DNA, 60 bp, Homo sapiens
gcacaggatctggagatgggccgataaagtcagtacgcaaaagaagagtacgaaaggact

SEQ ID NO: 9275 - DNA, 60 bp, Homo sapiens
gcctggggagatgttgttttcatgctgcttccaccatcacactggggtttctggatggga

SEQ ID NO: 9276 - DNA, 60 bp, Homo sapiens
gattacaatcaggggttcagtccaccagaattttgctgacttcacttttgcaactggcaa

SEQ ID NO: 9277 - DNA, 60 bp, Homo sapiens
catgatgtgaatgggtgtgaacgatacttggctatgttaagtgccttgtccgcaccttgc

SEQ ID NO: 9278 - DNA, 60 bp, Homo sapiens
gctactagatgaagccacttctgccttagacacagaaagtgaaaagacggtgcaggttgc

SEQ ID NO: 9279 - DNA, 60 bp, Homo sapiens
ttacacggatgcggtcaataataccagggtggtgggacacagcattgccaggatgctcga

SEQ ID NO: 9280 - DNA, 60 bp, Homo sapiens
accacctctcaggtgaagaaccgtcaggaattcccatctcacaggctgtggtgtagatta

SEQ ID NO: 9281 - DNA, 60 bp, Homo sapiens
tttaagggaccctaacctccaaaagaggtacccattggcgctcaaccgaattgctgctca

SEQ ID NO: 9282 - DNA, 60 bp, Homo sapiens
gactatcgtcttcctacacataggaggctcattctctggacacactatcacctattacat

SEQ ID NO: 9283 - DNA, 60 bp, Homo sapiens
gccatttgcacaggcctttgccacaacagagaagtagtttggtcagctaaaactcagctg

SEQ ID NO: 9284 - DNA, 60 bp, Homo sapiens
gtgaagctgaatgatggtcacttcatgcctgtcctgggatttggcacctatgcgcctgca

SEQ ID NO: 9285 - DNA, 60 bp, Homo sapiens
aggccatcttcctgcgcaacctcatgcaggagtgcttcatcaaaatcagtgcggcctatg

SEQ ID NO: 9286 - DNA, 60 bp, Homo sapiens
acactgttggcacttataggtaacgtgattgattcagtatcttagagtttacagtttgtg

SEQ ID NO: 9287 - DNA, 60 bp, Homo sapiens
attagtcgatcgagatgaggaagtaaagagttttcgagtgttgcaggctcatgggtgtgc

SEQ ID NO: 9288 - DNA, 60 bp, Homo sapiens
tgaagggattagtacaatttctccaaagtactgtacctatcttcagcaagaatgcaaaag

SEQ ID NO: 9289 - DNA, 60 bp, Homo sapiens
agaacattgcccgagactctgagaacagctccgaggaagagttctttgatgcccacgaag

SEQ ID NO: 9290 - DNA, 60 bp, Homo sapiens
gttagtgcctgacactctaatggctttgtgatactgatatgacttaggttcctttcctgg

SEQ ID NO: 9291 - DNA, 60 bp, Homo sapiens
ctgatcaactgataatgggtgagagagcaggtaagagccaaagtcaccttagtggaaagg

SEQ ID NO: 9292 - DNA, 60 bp, Homo sapiens
aagacagtggtcaacaggaagacccagcagctccaccctcccaagtgacaggccattttc

SEQ ID NO: 9293 - DNA, 60 bp, Homo sapiens
tggtgttttcctcaagaagactactggaactggatgacctcagaatgaactggattgtgg

SEQ ID NO: 9294 - DNA, 60 bp, Homo sapiens
ttctggacgtgagtggtgggtcctgctcctatctctccaaaccccatacccttcaatgct

SEQ ID NO: 9295 - DNA, 60 bp, Homo sapiens
atctgagttctttaagggttcacaggacaacgaagtgcatgtggcagtgtgctggcagtg

SEQ ID NO: 9296 - DNA, 60 bp, Homo sapiens
gcttcgggctgaaccttttgagggctacttggagccaaatgagacagtggacatttctct

SEQ ID NO: 9297 - DNA, 60 bp, Homo sapiens
aagatcaagatcgtagagggaatctgcctcctgtctggggatgatgctgagtgggatgac

SEQ ID NO: 9298 - DNA, 60 bp, Homo sapiens
actgctgacacagatggtgtccaagggcttcctaggtcgtaaatctgggaagggctttta

SEQ ID NO: 9299 - DNA, 60 bp, Homo sapiens
ggctggctaaggacacattagcaaacacaaggaaagcagcatggctcctctggtacagaa

SEQ ID NO: 9300 - DNA, 60 bp, Homo sapiens
gtgcctaccatgttctccacaaggagcttcctgaagtcaccaactccgtcttccatgaaa

SEQ ID NO: 9301 - DNA, 60 bp, Homo sapiens
ttagcacggatagtttcctggtcccaagtgggtgtggagccttccattatgggaatagga

SEQ ID NO: 9302 - DNA, 60 bp, Homo sapiens
gagctacggaaggagggctttgacccggctattgtgaaagacccgctgttctatctagat

SEQ ID NO: 9303 - DNA, 60 bp, Homo sapiens
cgtggctttccagtggcccacagcatctatggaatcccatctgtcatcaattctgccaat

SEQ ID NO: 9304 - DNA, 60 bp, Homo sapiens
tcaactgcctccgtttccacactgtgcacctttcactttccctacccagctttcctacat

SEQ ID NO: 9305 - DNA, 60 bp, Homo sapiens
aggtgccgagaggttgccctgatgggctctgcccgctggacatgttcttgaatgccatgt

SEQ ID NO: 9306 - DNA, 60 bp, Homo sapiens
gaattttgatattggaatagcctgctaagaggtacatgtgggtattttggagttactgaa

SEQ ID NO: 9307 - DNA, 60 bp, Homo sapiens
ggtgtctggttctgtgcccgtctctgagacagtctctgtgtggaatttgccttaaactga

SEQ ID NO: 9308 - DNA, 60 bp, Homo sapiens
gtccaggatttccaggaagataaggagctcttcagatactgcactctccccgagattctg

SEQ ID NO: 9309 - DNA, 60 bp, Homo sapiens
gtttggaggcctttcaagatctctcttaactcactgtgttacggagatatggacaaaacc

SEQ ID NO: 9310 - DNA, 60 bp, Homo sapiens
cgagaccgaggacgagaagaagcgctttgaggaaggcaaagggcggtacctgcagatgaa

SEQ ID NO: 9311 - DNA, 60 bp, Homo sapiens
acacggtttctggctgaagagcaggcagggctggaacggcgtctcagagagatgcatgaa

SEQ ID NO: 9312 - DNA, 60 bp, Homo sapiens
tgagatcgagtagtaacagccactccaactctccacctccagcttctagcaccagggacc

SEQ ID NO: 9313 - DNA, 60 bp, Homo sapiens
ctctaaggagagctaccaggttgtcaccgcagtctgctaaccaattccagtctggtccat

SEQ ID NO: 9314 - DNA, 60 bp, Homo sapiens
ttcccactgtgccatgatacagtctgcatcttatagcagtgcctttgtctcagggcctct

SEQ ID NO: 9315 - DNA, 60 bp, Homo sapiens
ctgggacatctcactccactcctacctcccttaccaccaggagcattcaagctctggatt

SEQ ID NO: 9316 - DNA, 60 bp, Homo sapiens
ctaagagttgtgagatgactggggtccttgatgtgaccctgtgatatcctgtctcaggat

SEQ ID NO: 9317 - DNA, 60 bp, Homo sapiens
ggcaaagaaggccacttctactacaacatctctgaggtgaaggtcacagagctgcaactg

SEQ ID NO: 9318 - DNA, 60 bp, Homo sapiens
gagagcaacttgacatcatgaatgatctctccaacagggtctggagtatcagccaggagc

SEQ ID NO: 9319 - DNA, 60 bp, Homo sapiens
acaccgagagacgccagagtacagacgcggagagaccctctgctcaggcttctgcctctg

SEQ ID NO: 9320 - DNA, 60 bp, Homo sapiens
gacatcaggatgtgatggtggcaggtgggatggagagcatgtccaatgttccatatgtaa

SEQ ID NO: 9321 - DNA, 60 bp, Homo sapiens
tggcccccctccaggcatgctggcctcccaataaagctggacaagaagctgctatgaaaa

SEQ ID NO: 9322 - DNA, 60 bp, Homo sapiens
gtctctgcagccaactgagactatcttgctgtgccctgagccttcctagggtttagaaga

SEQ ID NO: 9323 - DNA, 60 bp, Homo sapiens
cgacattgagtaccgcaagaaatgggacagcaacgtcattgagacttttgacatcgcccg

SEQ ID NO: 9324 - DNA, 60 bp, Homo sapiens
aggtggccaaggtattgctgtcatcattcagagcacagcctgaagagaccagtgagctca

SEQ ID NO: 9325 - DNA, 60 bp, Homo sapiens
tctgagtggggaaagggactaaggtggtctgaggaccccacagagtcaggaagattgaga

SEQ ID NO: 9326 - DNA, 60 bp, Homo sapiens
tgcacggactcatcctgacctcggccgggccactctggcttctctgtgcccctgtaaata

SEQ ID NO: 9327 - DNA, 60 bp, Homo sapiens
caaacaaagcttgcttcagcatttcccagacattcttcctctggaatatggtggtgaaga

SEQ ID NO: 9328 - DNA, 60 bp, Homo sapiens
cctctgccactgtggacacatcctctccaccctctgggcctcagtgtcttgatgtatcat

SEQ ID NO: 9329 - DNA, 60 bp, Homo sapiens
cccagaagcagtggctgggaggtggtgtcctaagtaaggatctgtgcagaggacaaataa

SEQ ID NO: 9330 - DNA, 60 bp, Homo sapiens
tttccctctaaagaaccctgggacttctgagaacgtgaagttccaaccttttggcggagg

SEQ ID NO: 9331 - DNA, 60 bp, Homo sapiens
tgagcccttaatgcaagggtattgggaatggctcgttagaagagttccctcctggattgc

SEQ ID NO: 9332 - DNA, 60 bp, Homo sapiens
ggtggttcccatgtctatacattcaggagtgtctctgctgaggagccactgcacttgttt

SEQ ID NO: 9333 - DNA, 60 bp, Homo sapiens
tttgatgcctatttccaccagaagaggaagcttggggtgtgactgtggggaggactccat

SEQ ID NO: 9334 - DNA, 60 bp, Homo sapiens
tgctggactaccacctgctcactgacaacttcccctgccactttgtctctgcctttggag

SEQ ID NO: 9335 - DNA, 60 bp, Homo sapiens
cttcttaagggtccttgctgtatagacagtcctgcttcagaagttgctgctttgtttgtc

SEQ ID NO: 9336 - DNA, 60 bp, Homo sapiens
atgaacaagaatgcaacggagagactgtggtctactgggaagtgaagtacccttttccca

SEQ ID NO: 9337 - DNA, 60 bp, Homo sapiens
gcctctccagacccctgtcacggctcccaggaaaaaccctaagtgcctgtgatagagaaa

SEQ ID NO: 9338 - DNA, 60 bp, Homo sapiens
caatggttcctccagtaacttctgctagaaacacagaatttggtctgtatctgacactag

SEQ ID NO: 9339 - DNA, 60 bp, Homo sapiens
tgaagaacgagatcaaccccagcctttctgcagatgtccctaaggtagaggtgttggaac

SEQ ID NO: 9340 - DNA, 60 bp, Homo sapiens
tgcccggctgcctggggaatcagctagaagccaagctggacaaaccagatgtggtgaact

SEQ ID NO: 9341 - DNA, 60 bp, Homo sapiens
acctgaaaatgcaacagcgcatcatgaacctgatctgtgacccggacctaaccaaggtga

SEQ ID NO: 9342 - DNA, 60 bp, Homo sapiens
ccttttgcctattacacgccagggaaaggcgcttacttgtggatctgccttgctcactat

SEQ ID NO: 9343 - DNA, 60 bp, Homo sapiens
gctgcttatttgcatgccgacttacacatatttgcatgttcgttgactatcaaagagtgc

SEQ ID NO: 9344 - DNA, 60 bp, Homo sapiens
ggagtaacggactctgcttctctgcagtgcaaagggtgtaagggactctgcttctctatt

SEQ ID NO: 9345 - DNA, 60 bp, Homo sapiens
gcaaatgaagacagtaagatgggctcaacagtcactgccgctgttatcgggatcatcgtg

SEQ ID NO: 9346 - DNA, 60 bp, Homo sapiens
gctgcaaagggaagcagattctgtatatgttggtaactacccaccaagagcacatgggta

SEQ ID NO: 9347 - DNA, 60 bp, Homo sapiens
ctatcacacaggatagataagaagattggttaaacagttttgtgtagatctttttggtgc

SEQ ID NO: 9348 - DNA, 60 bp, Homo sapiens
ctcttcatgtgttaaccactgccttcctggaccttggagccacggtgactgtattacatg

SEQ ID NO: 9349 - DNA, 60 bp, Homo sapiens
ggtgcccctaagactcgggactgctgtgcctttcacacttgaatgaagagaaacacctga

SEQ ID NO: 9350 - DNA, 60 bp, Homo sapiens
tctcccctgactagggatcaccatatctcgccaagacctcggtaccctggttacgaactt

SEQ ID NO: 9351 - DNA, 60 bp, Homo sapiens
ctctcgcacacacagaaggactgcaggcagaatggcacaacagaagtcaagaaccagaca

SEQ ID NO: 9352 - DNA, 60 bp, Homo sapiens
gactcatcctgtctgctaactccagacctcccagcttgaagccaaatctttccatgtgag

SEQ ID NO: 9353 - DNA, 60 bp, Homo sapiens
cacctggcgaatctcagctggaagtggtggtcaagcagagagaacgattgcaggcaccac

SEQ ID NO: 9354 - DNA, 60 bp, Homo sapiens
gcctgtgggttctgccggtggggcttcaggagtaataaagtgtcaccctatccttgtaaa

SEQ ID NO: 9355 - DNA, 60 bp, Homo sapiens
ccaggagcagcaaaggggcctgctgagctctggttaggttacagctggaggtgtgtatat

SEQ ID NO: 9356 - DNA, 60 bp, Homo sapiens
atttggttacttggactatgcccagtctcggttccagttctacttccagcagaaggggca

SEQ ID NO: 9357 - DNA, 60 bp, Homo sapiens
agcaatggctaaaggaaagtatctctgatgtcggctttgggatgctgaagtctgtcaagg

SEQ ID NO: 9358 - DNA, 60 bp, Homo sapiens
cctgggaatacttcagacatctccaaactcatccttgtgtatagtctcacacccttcccc

SEQ ID NO: 9359 - DNA, 60 bp, Homo sapiens
ccgacctgtgcaagagtgaattcaatgtgtacagtcaggaagtcattactgtccttgggg

SEQ ID NO: 9360 - DNA, 60 bp, Homo sapiens
agagcaagagttgagagaaatggcatggagcacaatgaagcaagaacaaagcacaagagt

SEQ ID NO: 9361 - DNA, 60 bp, Homo sapiens
ggagaagcagcagcaaacatttgctagtcagacaagtgacagggaatggattccaaacag

SEQ ID NO: 9362 - DNA, 60 bp, Homo sapiens
agcccagaacaggacattaagttcagtggccatgttagctgggtcgggaagacatccatg

SEQ ID NO: 9363 - DNA, 60 bp, Homo sapiens
acttagaacatgtccacaagaccacaaactaaacagtaaatggaatattctctgtgaaaa

SEQ ID NO: 9364 - DNA, 60 bp, Homo sapiens
atccggctggagtgcatatctagagggtggtacccaaagcccctcacagtgtggagggac

SEQ ID NO: 9365 - DNA, 60 bp, Homo sapiens
tgaggactttggtgtgaatgaagacttggctgattcagatgccagggccttgtatgaagc

SEQ ID NO: 9366 - DNA, 60 bp, Homo sapiens
gccaattccgttttcatgccgaatctaagaagccacaacttgctttgtcagcttcagggc

SEQ ID NO: 9367 - DNA, 60 bp, Homo sapiens; identical to SEQ ID NO: 4855

SEQ ID NO: 9368 - DNA, 60 bp, Homo sapiens
ggacttccaaggaagatgccatgaaagcttacatcaacaaagtagaagagctaaagaaaa

SEQ ID NO: 9369 - DNA, 60 bp, Homo sapiens
ggcaataatggagaccagtcccacaagatgacaaccagtcgttgtgtgcggctgatgtta

SEQ ID NO: 9370 - DNA, 60 bp, Homo sapiens
ctcgagattaatccaccttgggggtcgcatggcagcccgcgatatggagagcagacagtt

SEQ ID NO: 9371 - DNA, 60 bp, Homo sapiens
agctgccgtggtggctaaagatagaagccctgggcaatggatcatctgtgtggaaggaga

SEQ ID NO: 9372 - DNA, 60 bp, Homo sapiens
caggaagcaccttcatccagtcctgattcttggaataatccagtgatgatgaccctcacc

SEQ ID NO: 9373 - DNA, 60 bp, Homo sapiens
gagaaaattgacactcagacttgccctaatcatgcactttacttaaggaaagatcgagaa

SEQ ID NO: 9374 - DNA, 60 bp, Homo sapiens
cacaactttgagaaggtagcactggagagaattggaatgggtggcggtaattggtgatac

SEQ ID NO: 9375 - DNA, 60 bp, Homo sapiens
ggggctatagggatccatttttgagtttggttccgtaccctgttactaccacagttggtc

SEQ ID NO: 9376 - DNA, 60 bp, Homo sapiens
ttgagaacatctacatccggagccaacctgtggcgcaaatctatgtccatggggacagct

SEQ ID NO: 9377 - DNA, 60 bp, Homo sapiens
gactccagagagtaagatcagattcgtccacaaagagatgggcataataccaagctgggg

SEQ ID NO: 9378 - DNA, 60 bp, Homo sapiens
acagtaggaactggggagtaaatctgttccctacagtttgctgctgagctggaagctgtg

SEQ ID NO: 9379 - DNA, 60 bp, Homo sapiens
ccaacctacctcccacaaagcaggcacgagtcattcccatacaatgcaacatccggaatg

SEQ ID NO: 9380 - DNA, 60 bp, Homo sapiens
ggacctactgagattgcctacaagagaaagacaagcttttcaacatagtgtgtgatgctg

SEQ ID NO: 9381 - DNA, 60 bp, Homo sapiens
tgcccgcaatgccttggggaatgtcttcgtcagtgagctgctggaaactctggcccagct

SEQ ID NO: 9382 - DNA, 60 bp, Homo sapiens
ctggagtttctgacggagctggtcatcagcctggagaagctggagaatgacaagagcttc

SEQ ID NO: 9383 - DNA, 60 bp, Homo sapiens
ggccctccaaacccctgtgttccccaaatgttccatgcccttctttgtatcactgactat

SEQ ID NO: 9384 - DNA, 60 bp, Homo sapiens
ctgtgtcctggtagaaccatgtgatagtgaaccaaaacatgaccattgattccttttccc

SEQ ID NO: 9385 - DNA, 60 bp, Homo sapiens
aaacgaattcacggtgggggaggaatgtgagctggagacaatgacaggggagaaagtcaa

SEQ ID NO: 9386 - DNA, 60 bp, Homo sapiens
ccagacgactattctacacagtggaacttggtcatggagaagctaaagtgctgtggggtg

SEQ ID NO: 9387 - DNA, 60 bp, Homo sapiens
ctaaccttcacgattaactgtgaaatgtacgtcatttgtgcaagaccgtttgtccacttc

SEQ ID NO: 9388 - DNA, 60 bp, Homo sapiens
ctgaagaacgaacatttcagtaccaggattctcttccatcactgcctgttccttcacttg

SEQ ID NO: 9389 - DNA, 60 bp, Homo sapiens
ctgaggccgtgctcttcacctatgtgggaaaggcctgggaagtgaacaaagggaccaact

SEQ ID NO: 9390 - DNA, 60 bp, Homo sapiens
ttggccctgtagcagatgatggctatggagtttcctacatgattgcaggcgagaacacga

SEQ ID NO: 9391 - DNA, 60 bp, Homo sapiens
agtagccctcggtgaagccccagaccacagctatgagtcccttcgtgtgacgtctgcgca

SEQ ID NO: 9392 - DNA, 60 bp, Homo sapiens
gttcataccgtagtagcatcaaacaatgggtcagtgttctcggtggaagttgatgggtcg

SEQ ID NO: 9393 - DNA, 60 bp, Homo sapiens
tatctgaaacgtcctaagcagagttaatcctggctgctcaggagaggcgacacatttcaa

SEQ ID NO: 9394 - DNA, 60 bp, Homo sapiens
gagctgattgcaagagagattgtctttgacaagtagacatctgcccacatcctggagtcc

SEQ ID NO: 9395 - DNA, 60 bp, Homo sapiens
actagcatccactgattggaccttatggtcacccaactcaaggacagccaccaagaagtg

SEQ ID NO: 9396 - DNA, 60 bp, Homo sapiens
gacaccattaggagatacctcagtgcacagaagcctctcttgaatgatggccagttcagg

SEQ ID NO: 9397 - DNA, 60 bp, Homo sapiens
caggcaaccccaaaggagcaatggtcactcaccgaaacatagtgagcgattgttcagctt

SEQ ID NO: 9398 - DNA, 60 bp, Homo sapiens
tatcccggcatccttgaccagaagtttgaggtctccagtgttgccgactgcttggactct

SEQ ID NO: 9399 - DNA, 60 bp, Homo sapiens
atatctgaagcccagctgcatagagaacagtgtcaccatctgagccctagagtgactcta

SEQ ID NO: 9400 - DNA, 60 bp, Homo sapiens
ctgtgatgaccactacagcagagtaaagcatgtccaaggaaggatgtgctgttacctctg

SEQ ID NO: 9401 - DNA, 60 bp, Homo sapiens
ccatacagagtctaagattgatcgagacaagtcttttatacttgaggaacacatggacaa

SEQ ID NO: 9402 - DNA, 60 bp, Homo sapiens
tcactccggacgggattgacctgcggctgagccatgaagctcttagacaaatctatctct

SEQ ID NO: 9403 - DNA, 60 bp, Homo sapiens
attcccaagtgcctgtcctcattggctatggggaggcaaagttcgtgtccagctctatga

SEQ ID NO: 9404 - DNA, 60 bp, Homo sapiens
agcacttgcgttctcggggctgtcgatttcctgccacctgggcagataacctggagattt

SEQ ID NO: 9405 - DNA, 60 bp, Homo sapiens
ctgtctttctcacggatgccgcattggttactcttcaccacagactttagcagatcagtc

SEQ ID NO: 9406 - DNA, 60 bp, Homo sapiens
actcagcgagcagaagtcatacggatcctctccacaatggattccccttccacgtaggaa

SEQ ID NO: 9407 - DNA, 60 bp, Homo sapiens
aagttttgggctatggactctcaggtgatgctggtcacataactgcccctgatcctgaag

SEQ ID NO: 9408 - DNA, 60 bp, Homo sapiens
ccttctccttatctgctgcccatctttccaggaagtcaggatggagtcagacaactaacg

SEQ ID NO: 9409 - DNA, 60 bp, Homo sapiens
taccgggccaagctgcctctgaggatatttctggctgtcgccaactccatggctttccag

SEQ ID NO: 9410 - DNA, 60 bp, Homo sapiens
tctctgctccgcggggacccagacgaggctcgggactttgcagccggccttagtgctcgc

SEQ ID NO: 9411 - DNA, 60 bp, Homo sapiens
tcattcaagtggccaagacctctgctgcacaggctatccatccaggatgcggttttcttt

SEQ ID NO: 9412 - DNA, 60 bp, Homo sapiens
cctctgaggagtgaaagggatttgtttgcaacgtgctttgaaggccacataaaaagccct

SEQ ID NO: 9413 - DNA, 60 bp, Homo sapiens
cataaggccgagcagaggttcttcgtctcaagaggaactgacttctgttgagcactcaac

SEQ ID NO: 9414 - DNA, 60 bp, Homo sapiens
ggattataccacagtggagagcgggtcacaggacatgatgcagggtccaggtttctgttt

SEQ ID NO: 9415 - DNA, 60 bp, Homo sapiens
gatgtccgagaggtcattgctagaatcgtggatggaagcagattcactgagttcaaagcc

SEQ ID NO: 9416 - DNA, 60 bp, Homo sapiens
gctgtgacctggatgtcttggccagcaagaaggtacaacgtccttggagaaaacatgcaa

SEQ ID NO: 9417 - DNA, 60 bp, Homo sapiens
acgtggccatgtgaggccaggttgaggccctttgtagacaacatacagttgctcagcctg

SEQ ID NO: 9418 - DNA, 60 bp, Homo sapiens
acagcggaagtgaccccagcagcatggagaccagagcccactacaactcatccaacaaga

SEQ ID NO: 9419 - DNA, 60 bp, Homo sapiens
gcccatcagagcatcggtttcaaaggcatcctgctctttggcacaaaggcccagaaagaa

SEQ ID NO: 9420 - DNA, 60 bp, Homo sapiens
agctagaatgagttaccagagagcagcttgggaggttgattctggtcgtcgaaataccta

SEQ ID NO: 9421 - DNA, 60 bp, Homo sapiens
ggaaaagatacagttaccaaagataatggcatccgtccttcctcactggagcagatggcc

SEQ ID NO: 9422 - DNA, 60 bp, Homo sapiens
ctttcagcaatcgcaacaatggagctgcgggaccaagccaaaagactgacagccaagata

SEQ ID NO: 9423 - DNA, 60 bp, Homo sapiens
tgggcctttccgcctcctcaccactgtgcctcaagttcctcatctaagtggccctggcct

SEQ ID NO: 9424 - DNA, 60 bp, Homo sapiens
tgtctggggattgttgggacaggttttggtgactctgtgcccttgctctctaacttctga

SEQ ID NO: 9425 - DNA, 60 bp, Homo sapiens
aaacctggagaagtcgtcaggaaccagactacagtggaccctggagaaccttgaagaaca

SEQ ID NO: 9426 - DNA, 60 bp, Homo sapiens
gtatggtatcagttaattccagtctgagcttctctgtcaacttcagtttctctctcagtt

SEQ ID NO: 9427 - DNA, 60 bp, Homo sapiens
gttgaacaccattgcaaagcatatcgatgcagaatactgacgtctataggagtgggaccc

SEQ ID NO: 9428 - DNA, 60 bp, Homo sapiens
cttcctcattgccgtgagaggactgaacggagggaggatcaatattgcttcctgctccct

SEQ ID NO: 9429 - DNA, 60 bp, Homo sapiens
ttccaggttttgacctgcaggcagtgctctctaacaggaccatcacagcttctgaactga

SEQ ID NO: 9430 - DNA, 60 bp, Homo sapiens
ccgtgggggccattgtcctcaccggcggggataaggcctttgcagctggagctgatatca

SEQ ID NO: 9431 - DNA, 60 bp, Homo sapiens
ccttgtccacaaattcgtcattggccacttaaagggtgcctctgccaactggtggaatca

SEQ ID NO: 9432 - DNA, 60 bp, Homo sapiens
cccagcgctcagggtgcgaggagcggtggctagtgatcgaccgtaaggtgtacaacatca

SEQ ID NO: 9433 - DNA, 60 bp, Homo sapiens
cttctatatgggacccgaattagacactgctgaatcctgtacagccttactcataaataa

SEQ ID NO: 9434 - DNA, 60 bp, Homo sapiens
acatgaagctgtttgatgccagtcccaccttctttgctttcctactgggccacatcctgg

SEQ ID NO: 9435 - DNA, 60 bp, Homo sapiens
gagatgttcatggatgaaacctacctgatgagcaaccggtttgtcctctccactagccag

SEQ ID NO: 9436 - DNA, 60 bp, Homo sapiens
gcaatgcagagggacaaagggctgtgctacacttcccagttacattctgaagctcataaa

SEQ ID NO: 9437 - DNA, 60 bp, Homo sapiens
agaaatgtaccaggctgtgtgtgagggaacctggaggctctgatcacctggccaacccac

SEQ ID NO: 9438 - DNA, 60 bp, Homo sapiens
gtttatggagtgcatgtgccagatcatgagggtcgcattggcatggcctccatcaaaatg

SEQ ID NO: 9439 - DNA, 60 bp, Homo sapiens
ctcggctgcttcagtgatgactccccatggtcaggaattacggaaagacccctccatata

SEQ ID NO: 9440 - DNA, 60 bp, Homo sapiens
aagaatgctgagaagcccaatatgcagagaaacaataccctgggcataagcactaccaag

SEQ ID NO: 9441 - DNA, 60 bp, Homo sapiens
tcctggacaagatccttgtgaagctcaagatgcagctcaactctgaagggaagattccgg

SEQ ID NO: 9442 - DNA, 60 bp, Homo sapiens
tttgggctgaagcaccccactagaagggtgtctccttagcctggagggagggacatacac

SEQ ID NO: 9443 - DNA, 60 bp, Homo sapiens
ctctatgcctgttgacagaaaccttctgggagctttgtcgctgcctgtatctgaaacagc

SEQ ID NO: 9444 - DNA, 60 bp, Homo sapiens
gtcctcccagctcacctccatctatgcatctcatctctggatttggtgatcagactctat

SEQ ID NO: 9445 - DNA, 60 bp, Homo sapiens
aaagcagcaagccaagatggcggagtactgccgactgatctttggggatgcccttctcat

SEQ ID NO: 9446 - DNA, 60 bp, Homo sapiens
tacgaggacaagcagaaactcaagcggaccgagatcatcagccgctcctggttcccctct

SEQ ID NO: 9447 - DNA, 60 bp, Homo sapiens
aagcagtgcttgtaaaccatcgcgtgcaatgagccagatggagtaccatgagggttgcta

SEQ ID NO: 9448 - DNA, 60 bp, Homo sapiens
ctcctgaagaggtgcgacttgatccctctgatgctgactttgttgatgtgattcacacgg

SEQ ID NO: 9449 - DNA, 60 bp, Homo sapiens
ttactacaagtgtccctgtgagcgtggcctgacctgtgagggagacaagaccatcgtggg

SEQ ID NO: 9450 - DNA, 60 bp, Homo sapiens
aacgagccttcgttcatcttctctgtgacaagagcaccctgcctaccctgtttagagcaa

SEQ ID NO: 9451 - DNA, 60 bp, Homo sapiens
gaggattcttggaaacaaagatagtaggaaacaagggtggaaaaatagggagagacaaca

SEQ ID NO: 9452 - DNA, 60 bp, Homo sapiens
aacccgaagtcgtcttcatcggggactccttggtccagctcatgcaccagtgcgagatct

SEQ ID NO: 9453 - DNA, 60 bp, Homo sapiens
caaacaacttccaactaatcactggcacggaaccagacaccattgaggcttcaaacttcc

SEQ ID NO: 9454 - DNA, 60 bp, Homo sapiens
atgcctcctttgccggagcttggaacagactcacggccagcgaagtgagttcaatggctg

SEQ ID NO: 9455 - DNA, 60 bp, Homo sapiens
aaccaactcctcaaggtttcgctgccgaagcttgccaacgtgcagctcctggataccgac

SEQ ID NO: 9456 - DNA, 60 bp, Homo sapiens
gctcacagggaaaaccagaaataccgggtatatgtcgtgataccacttctgccagggttc

SEQ ID NO: 9457 - DNA, 60 bp, Homo sapiens
ggaaaaccttgaataattaggtatcctaggtaagagcccctaaacatcaagcaatctgtg

SEQ ID NO: 9458 - DNA, 60 bp, Homo sapiens
ccctgcgacacctagctgaactatggtttggtgtctgatcttgagaggttgatgtaacct

SEQ ID NO: 9459 - DNA, 60 bp, Homo sapiens
tcaaggataacctacctgcctgcagagaagtgcgaaggtcttgctggatgacttttcacc

SEQ ID NO: 9460 - DNA, 60 bp, Homo sapiens
agaggtcactcagggtcaatactcagggtcagtgcaggttatgagatccttggggtccac

SEQ ID NO: 9461 - DNA, 60 bp, Homo sapiens
acctgactctgcctccctctacttccccgactcttgagcgcccagcttcagtcccacccc

SEQ ID NO: 9462 - DNA, 60 bp, Homo sapiens
agatgtgccgttagagtgcatagtatccctgggcactggacgttatgagagtgatgtgag

SEQ ID NO: 9463 - DNA, 60 bp, Homo sapiens; identical to SEQ ID NO: 4855

SEQ ID NO: 9464 - DNA, 60 bp, Homo sapiens
catccctgagcgcttcaacgagaccatcggcctccagcacattaaggtgtacctcttcga

SEQ ID NO: 9465 - DNA, 60 bp, Homo sapiens
gtcatcctgcaatcatgaacagttgtgtgtttggcatatggagatatgaggagaaatgct

SEQ ID NO: 9466 - DNA, 60 bp, Homo sapiens
ctgtgtttcgcattaagcacacacatctggccctgacttctggagatggatccttccatc

SEQ ID NO: 9467 - DNA, 60 bp, Homo sapiens
aacaacatgaagtactgggagaagaaccagtccatcgccatcgagctctctgacctggtt

SEQ ID NO: 9468 - DNA, 60 bp, Homo sapiens
aggtcatgagatgagttccttgtaggtaccagcttctggctcaagagttgaaggtgccgt

SEQ ID NO: 9469 - DNA, 60 bp, Homo sapiens
gtcgtactgatcatgagagactggctgatactcaaagttgcagttacttagctgcatgag

SEQ ID NO: 9470 - DNA, 60 bp, Homo sapiens
caacagactacgtgccctttgaggatggcaaacaatttgagctgtgcatctacgtacatt

SEQ ID NO: 9471 - DNA, 60 bp, Homo sapiens
tgattatggctgctaagggatcttttccaaacagagtgagggtcttttcaagagggaggc

SEQ ID NO: 9472 - DNA, 60 bp, Homo sapiens
tttgcccgattactgaggctgcaagaaagttcacaaggggaacatcctcccccagaagat

SEQ ID NO: 9473 - DNA, 60 bp, Homo sapiens
cctgtgcctgttttcccttctgcgctaccttgagtagttggagcacttgatacatcacag

SEQ ID NO: 9474 - DNA, 60 bp, Homo sapiens
tgacctgtgtggatgtcttccgtcccagcaacccctgggagctggccaagactgtttttg

SEQ ID NO: 9475 - DNA, 60 bp, Homo sapiens
agaatgagcgctatgacgcagtccagcactgccgctacgtggatgaggtggtgaggaatg

SEQ ID NO: 9476 - DNA, 60 bp, Homo sapiens
tggtaacctcagtctcctgtaagacctcctaccacatggcgagtatacaccaatcaggag

SEQ ID NO: 9477 - DNA, 60 bp, Homo sapiens
gggttttctgatcatatggctgatgtgttatgggcagtatggatgtcttcatttgttgct

SEQ ID NO: 9478 - DNA, 60 bp, Homo sapiens
gccaagatgactgatttgggggctactcgctttacagctacctgattttcccagcatcgt

SEQ ID NO: 9479 - DNA, 60 bp, Homo sapiens
ggaaggaagctgtatgtgaacacctggatatatggaaccctacttggctgcctgtgggtt

SEQ ID NO: 9480 - DNA, 60 bp, Homo sapiens
ccttctacaacaccaagaagaagttcttcacttcaggaacagtcacagtgcaggtgctgg

SEQ ID NO: 9481 - DNA, 60 bp, Homo sapiens
tacttcttcaagatggccttctacaatggctggatcctcttcctggctgtgctcgccatc

SEQ ID NO: 9482 - DNA, 60 bp, Homo sapiens
attccagctcctccgtgcttcctcagttacacaaaggacctcagctgcttctcccacttg

SEQ ID NO: 9483 - DNA, 60 bp, Homo sapiens
cctcataagagaaccacacccttctccaaaagtgctggtactgcatcagtgagatgagta

SEQ ID NO: 9484 - DNA, 60 bp, Homo sapiens
cgcgcctacctcaagtatgggaaggaaaatgccatcgtggttctcaaccacaagtttgaa

SEQ ID NO: 9485 - DNA, 60 bp, Homo sapiens
ctcagtgaaatgcagagttctccatgcacctaaagctcctttgtcgctctcatggctgtc

SEQ ID NO: 9486 - DNA, 60 bp, Homo sapiens
attacttcgggatcctcaaggaggcgagagtgaccgtgttccccttcaacatcctggaca

SEQ ID NO: 9487 - DNA, 60 bp, Homo sapiens
caagggaattcattggcaacttcctagaactgtttggacctgatggagcatggaagcaga

SEQ ID NO: 9488 - DNA, 60 bp, Homo sapiens
tttgcagcaggctctccgctctttccagcaaagctgctcagagagggtgtccagcacagt

SEQ ID NO: 9489 - DNA, 60 bp, Homo sapiens
ggacaatgccatccatgtttgtgctgtagacttgctgctgctgaatcctttctggggact

SEQ ID NO: 9490 - DNA, 60 bp, Homo sapiens
tgctttaacccttttctgctttcctgcccaaggataggactggtggaacaaggtggtgtc

SEQ ID NO: 9491 - DNA, 60 bp, Homo sapiens
ggggcccaaatcccagcaaagtgctacagcagttgttggtgcttcaacctgaacagcagt

SEQ ID NO: 9492 - DNA, 60 bp, Homo sapiens
gatgcacgagaaaaccaaacagatactgctcaaagagccaccaccacttacgattttgat

SEQ ID NO: 9493 - DNA, 60 bp, Homo sapiens
ctgctgtaccctggagccacgctgttcttccaaatcagcatgagtttggatgtggccagt

SEQ ID NO: 9494 - DNA, 60 bp, Homo sapiens
gatttcaacttgagcaaagagacggttaaatggtatcagctgactgcggcaacatacttg

SEQ ID NO: 9495 - DNA, 60 bp, Homo sapiens
ccatccacccaagggaaatggaaggcaagaaacacgaaggatcatgtggtaactgcgaga

SEQ ID NO: 9496 - DNA, 60 bp, Homo sapiens
ttcccacctcagcttcacagtgtatgcagcacacaacattccagaaacctgggtgcacag

SEQ ID NO: 9497 - DNA, 60 bp, Homo sapiens
ccccgttttgctgactcattccataactggagaaagaagctccattgaccgaagccacag

SEQ ID NO: 9498 - DNA, 60 bp, Homo sapiens
agaagaggcccatcgtgttcgcccatccgtcctggaggactgagtagcttccgtcgtcct

SEQ ID NO: 9499 - DNA, 60 bp, Homo sapiens
ttgccatggatggggacccaaagacctgcagccaccagtgcttcactagcgtgcagacca

SEQ ID NO: 9500 - DNA, 60 bp, Homo sapiens
gcctttcatttggagtcctaggagagcatggccgaggagtcactgaacactatggaatca

SEQ ID NO: 9501 - DNA, 60 bp, Homo sapiens
ttttgagaatgggaagaggggtggtagttcatggctgccatcctagcagtggctctagga

SEQ ID NO: 9502 - DNA, 60 bp, Homo sapiens
caaagtgccctggtacgtgctagccggaaaccatgaccaccttggcaatgtctctgccca

SEQ ID NO: 9503 - DNA, 60 bp, Homo sapiens
ttttattggcacaagggactcctgggtctgagtaatgcaacagtggaatggcatattcca

SEQ ID NO: 9504 - DNA, 60 bp, Homo sapiens
gttctccaaagatgctgctcccaagggctgccaagtgtttgccagggaacggtagattta

SEQ ID NO: 9505 - DNA, 60 bp, Homo sapiens
gagtgatgaatagccgaggcatctggctggcctacatcatcttggtaggattgctgcata

SEQ ID NO: 9506 - DNA, 60 bp, Homo sapiens
ctgagtgagtgggagagtacctgtgtgtttcgtaacggccttgatccccttgatagatgt

SEQ ID NO: 9507 - DNA, 60 bp, Homo sapiens
gacaggggctgaaaatgtgctaaagcgcatgaccatcattggggttatcctcagtttcag

SEQ ID NO: 9508 - DNA, 60 bp, Homo sapiens
tgattaagcttcaggactgttttgtaaagcgaggtgggaccgatgtggcacacgccagct

SEQ ID NO: 9509 - DNA, 60 bp, Homo sapiens
ttacattggagggccaatggctggtccttcaagtgctgttttgaagtgcagatttccatt

SEQ ID NO: 9510 - DNA, 60 bp, Homo sapiens
atgcctccaaagacagaggactcactactgccatatgaagtagctcattccatttggcag

SEQ ID NO: 9511 - DNA, 60 bp, Homo sapiens
cctcttcccaggggattgaacagaagcttaatgtttacaagtgtttgaatttgtgatctg

SEQ ID NO: 9512 - DNA, 60 bp, Homo sapiens
tggtgctgtgggcaggtgcattctacctcttccacgtacaggaggtcaatggcttatata

SEQ ID NO: 9513 - DNA, 60 bp, Homo sapiens
tctgtttctcaaggtgcaggtgggaagcacacctcaggaccaaagaatcgtcgggtacat

SEQ ID NO: 9514 - DNA, 60 bp, Homo sapiens
gctggtgggagactttgtagatgttgggctatatgttggggtgatggtagctcctgatgt

SEQ ID NO: 9515 - DNA, 60 bp, Homo sapiens
tgcgagttttggagaagcgggatggtacagtgctacgactacagcagtatagctccggtg

SEQ ID NO: 9516 - DNA, 60 bp, Homo sapiens
ccatactaggagcgtcagtgagggttttcatagcttttggaaatactttggtctctgaac

SEQ ID NO: 9517 - DNA, 60 bp, Homo sapiens
tccagcctgggactgctgtgatggggtatcacggtgatggtcccattaaacttccactct

SEQ ID NO: 9518 - DNA, 60 bp, Homo sapiens
ggctactttgcagccaagttcctgctgcgtttgctggactgatgtacttgtttgtgaggc

SEQ ID NO: 9519 - DNA, 60 bp, Homo sapiens
agatggccgggaactcgatcctgctggctgctgtctctattctctcggcctgtcagcaaa

SEQ ID NO: 9520 - DNA, 60 bp, Homo sapiens
ccagaccaaggggaccaccaccctgaagacttacctagacaccctccctgaagtgaacat

SEQ ID NO: 9521 - DNA, 60 bp, Homo sapiens
ctacaccatggcgatcaacacgctggcccagagtagtcttgtctccgaatggggaatttt

SEQ ID NO: 9522 - DNA, 60 bp, Homo sapiens
ttgcagactcttactcggagaagagccagttctgtttctgtgggcatgtgctgaccatca

SEQ ID NO: 9523 - DNA, 60 bp, Homo sapiens
gtgccaccacaccgacggtaccatgaaggacgaggtagctctactggctgctgtcaccct

SEQ ID NO: 9524 - DNA, 60 bp, Homo sapiens
accctggttttcctcctgtgaccctttcggggccgggctctcaccctaaagaagcagccc

SEQ ID NO: 9525 - DNA, 60 bp, Homo sapiens
agcattgaaaagccacaagttgaccaaagctgagaagctccagctgctgaaccaccggcc

SEQ ID NO: 9526 - DNA, 60 bp, Homo sapiens
tgaggatgtagagagaacaggtgggctgtattcacgccattggttggaagctaccagagc

SEQ ID NO: 9527 - DNA, 60 bp, Homo sapiens
cagcacctactccgtgtcagtggtggagaccgactacgaccagtacgcgctgctgtacag

SEQ ID NO: 9528 - DNA, 60 bp, Homo sapiens
tctacagccatcctgcacttcagactatttgtcggagcacggatctaccacaccattgca

SEQ ID NO: 9529 - DNA, 60 bp, Homo sapiens
gcactgctgattgtcactcttttactttcctggttcccctttgacttcacacacttgacg

SEQ ID NO: 9530 - DNA, 60 bp, Homo sapiens
gccttatccagtcaaagcggatgctggccacagaaaggccactcaggatgtcctttgtgt

SEQ ID NO: 9531 - DNA, 60 bp, Homo sapiens
ccagcagccaccacagcgcctgcttcctcggccctgaaatcatgcccctaggtctcctgt

SEQ ID NO: 9532 - DNA, 60 bp, Homo sapiens
ttcgtctactcctttctgggtcctaacccttttgtcgcctggatgcacttcctggtcttc

SEQ ID NO: 9533 - DNA, 60 bp, Homo sapiens
gcagtgacccacccacctacctttgcatcacctacctttgcaccaattaccttttcagat

SEQ ID NO: 9534 - DNA, 60 bp, Homo sapiens
gatctggatggagtggttcaacaaagaaggcaagacatggaaggatatagcagttctggt

SEQ ID NO: 9535 - DNA, 60 bp, Homo sapiens
agatggactggatggtaggacggatccttgacactttggacgtggagggtttgagcaaca

SEQ ID NO: 9536 - DNA, 60 bp, Homo sapiens
ccagcttctggtggctgctatgtcacctcattatgcagatgtttcggagaacaggttacc

SEQ ID NO: 9537 - DNA, 60 bp, Homo sapiens
gctacagttgaaaccctcacaccacgcaggaagaggtcatcatcatgtcggacgatttct

SEQ ID NO: 9538 - DNA, 60 bp, Homo sapiens
aggaaaacattgctggggtcttcaacaagtcctgtgccatctcctacacgagctacagga

SEQ ID NO: 9539 - DNA, 60 bp, Homo sapiens
catcagctggaactggcaaagcagctacacaaagagggtcatctcttctattgtacctgc

SEQ ID NO: 9540 - DNA, 60 bp, Homo sapiens
ctgcccctttgacgccggccgtcgcgatatgcggagactggatttcagcttcgtggtcgg

SEQ ID NO: 9541 - DNA, 60 bp, Homo sapiens
gtcggcctgtactcgctcgagagcatcagcttggcggagaacacccaagatgtgcgggac

SEQ ID NO: 9542 - DNA, 60 bp, Homo sapiens
atgatgctcttctacaaactctggatgttggaatacaccacgcagaccctcactgcctgg

SEQ ID NO: 9543 - DNA, 60 bp, Homo sapiens
gactccgttagagggaaaatgggtttctctgggtgaattccaacgaagcatacctagggg

SEQ ID NO: 9544 - DNA, 60 bp, Homo sapiens
aaggctcacttctggacctggaccaactcctgggagaacttcagacagggcattgatttc

SEQ ID NO: 9545 - DNA, 60 bp, Homo sapiens
aggactatcaaggattgaagaggctgttgtggctggagggaccagggcagagtgaggatt

SEQ ID NO: 9546 - DNA, 60 bp, Homo sapiens
gaacttgagcagccttgcccagaagtatgctgagaaagcaacccagttcatccagcgtgc

SEQ ID NO: 9547 - DNA, 60 bp, Homo sapiens
ccagaggtgctgcaagccctgaaacagcttcagctgctcaaggcccagttagacgcagct

SEQ ID NO: 9548 - DNA, 60 bp, Homo sapiens
gaggagctgaaggacccaacagcacaccctcagtggtttctgaaaggaagcaaagttctt

SEQ ID NO: 9549 - DNA, 60 bp, Homo sapiens
gagcagcaaatgaaggaatctacactgaagtttcgaactgagatctaagaaggtctttct

SEQ ID NO: 9550 - DNA, 60 bp, Homo sapiens
tctgggtcctcaaagaggaacaaagtcatcaagctagtggacatcacggacatccagaag

SEQ ID NO: 9551 - DNA, 60 bp, Homo sapiens
attgaagactatttccaccatctggagcgagagctcgccaaggctgagaagctgtctctg

SEQ ID NO: 9552 - DNA, 60 bp, Homo sapiens
ctatcgccggcatcctctcaagtggttacctgttcaagaatcaagcacagacgacaagaa

SEQ ID NO: 9553 - DNA, 60 bp, Homo sapiens
tcagagagaataattgccctgaccacatttgcctttcagtaggaggaggctgtgaaatag

SEQ ID NO: 9554 - DNA, 60 bp, Homo sapiens
aagacagtgactgcctgccagatcctgcagcgagtggaagacaacaccctcatctcctat

SEQ ID NO: 9555 - DNA, 60 bp, Homo sapiens
ttgtcacaggccagggaggtggcaccaccaggcgaagcttggcgagattgtgtcgtcaag

SEQ ID NO: 9556 - DNA, 60 bp, Homo sapiens
cgagtaacaggcatgaagtgaagagaaatcgctgtaacaggaagacagcaaagcagatgc

SEQ ID NO: 9557 - DNA, 60 bp, Homo sapiens
gagctccttgaacacaatgaggcatatacatggacaaatcccacctgctgtgtgcataat

SEQ ID NO: 9558 - DNA, 60 bp, Homo sapiens
gccagctgattcagggtggtgtggcagaatgtgtcttggctcttgggtttgagaagatga

SEQ ID NO: 9559 - DNA, 60 bp, Homo sapiens; identical to SEQ ID NO: 4855

SEQ ID NO: 9560 - DNA, 60 bp, Homo sapiens
gaaaattccaaatactcatgtctcaagtaagcttaaactacaacttgtcacataaaggaa

SEQ ID NO: 9561 - DNA, 60 bp, Homo sapiens
agcatcaggggaaaagtttgcctatgtgccatttggagctgggcgtcatcgttgtattgg

SEQ ID NO: 9562 - DNA, 60 bp, Homo sapiens
aagtctcactttgctcccacatggaacacccaattctgcgtctccctgtagccagagaca

SEQ ID NO: 9563 - DNA, 60 bp, Homo sapiens
gcttttctcctggcatcagaaagtggtggcgttttctgtactggattgcaccaaggaagc

SEQ ID NO: 9564 - DNA, 60 bp, Homo sapiens
ccgagctgtccatagctgcagtgaaagatgaagagcaagaccttctctaggttttctagc

SEQ ID NO: 9565 - DNA, 60 bp, Homo sapiens
cctgcttcctgattgcgcagactgaaactagctaaacctgaatgtacctactagggcacc

SEQ ID NO: 9566 - DNA, 60 bp, Homo sapiens
ttcccagactgtgttacctccagaacctgttcagttgtgtaagtcagagcagcgtccatc

SEQ ID NO: 9567 - DNA, 60 bp, Homo sapiens
agctatcgcagaccagcatcctgtcccttgctgattcccacacggagttcttcgatgcca

SEQ ID NO: 9568 - DNA, 60 bp, Homo sapiens
tggtttaggtaacagttagatgtttcctaagaatgcaaactgccttttccacacaaaggc

SEQ ID NO: 9569 - DNA, 60 bp, Homo sapiens
ccctagcacaaaacacagatcttaaagaacgcttacgcagaatccatgccgagtctctgc

SEQ ID NO: 9570 - DNA, 60 bp, Homo sapiens
tctggaatgcactgcttgctgcttgccgagctggagatgttggagtgctaaagctgcagc

SEQ ID NO: 9571 - DNA, 60 bp, Homo sapiens
ttccaaaggctgctcctgacacactatgtggcatacctgaagctcaacaccaaggtcagg

SEQ ID NO: 9572 - DNA, 60 bp, Homo sapiens
gcaggtgggtctacaagaaggctctccccctaataaggaggagcttatcaccttttattg

SEQ ID NO: 9573 - DNA, 60 bp, Homo sapiens
gccggggaggctcaagttcgccactttactcagaccgatgcacagtcttcccattttaca

SEQ ID NO: 9574 - DNA, 60 bp, Homo sapiens
gcattttttggtagtgcctgtccatacctattgtcattgtttgccttgtaatctgttttt

SEQ ID NO: 9575 - DNA, 60 bp, Homo sapiens
taaccacagggcctgagaagtcttgctttatgggctcaagaatgccatgcgctggcagta

SEQ ID NO: 9576 - DNA, 60 bp, Homo sapiens
caccaaggcctacgagatggccctcaagaagtaccatggctggatcgtgcagaagatctt

SEQ ID NO: 9577 - DNA, 60 bp, Homo sapiens
tgaagttgggttggctctttgtgaacctctcatccccacagcagaatcaccaacactctc

SEQ ID NO: 9578 - DNA, 60 bp, Homo sapiens
agaggcaggagaacctccccgatgagatctaccatgtctatagctttgccctgagatgag

SEQ ID NO: 9579 - DNA, 60 bp, Homo sapiens
agagaccacgtttccctgactgtcatagagaatcatcatcgccactgaaaaccaggccct

SEQ ID NO: 9580 - DNA, 60 bp, Homo sapiens
attcactcgctcttttcattcacgaaggtagtgaggcctagtggaaagccatggagagcg

SEQ ID NO: 9581 - DNA, 60 bp, Homo sapiens
ataaaaccagagctgacaatgacactctggaacattgcataccttctgtacattctgggg

SEQ ID NO: 9582 - DNA, 60 bp, Homo sapiens
tcaccgctttcatcttcagcctctttctctacatgaaggcgcaggtagccccagtttcgg

SEQ ID NO: 9583 - DNA, 60 bp, Homo sapiens
gaggaaattctttcccagtctgtcgatttatgcctcagccacttgcctgtgctacaattc

SEQ ID NO: 9584 - DNA, 60 bp, Homo sapiens
ctttcaatgacgtttattgcgccagcaagttcgcgctcgaaggcttatgcgagagtctgg

SEQ ID NO: 9585 - DNA, 60 bp, Homo sapiens
gtaaatggacgtgtcataagagataaggctgccatagaatcacagcagcttctggcttag

SEQ ID NO: 9586 - DNA, 60 bp, Homo sapiens
tggaaatctcgtttaaccttcaaactggcgatgtcaagggttccaagtcctccacctccg

SEQ ID NO: 9587 - DNA, 60 bp, Homo sapiens
tgttcgtgtgtgtgtcgttgcaggccttattcatgggctcaccgctgaggttcgacgggc

SEQ ID NO: 9588 - DNA, 60 bp, Homo sapiens
aaaatggctggacattgcgtcaggaaatcaaaatcaccagcaagtttcgaggcaaatacc

SEQ ID NO: 9589 - DNA, 60 bp, Homo sapiens
gccccactctccacccgctgaatgcagggcgcatgctgctacttggcggctcaagcccgc

SEQ ID NO: 9590 - DNA, 60 bp, Homo sapiens
tggctgtccctggttgtaaattcgagggtctgcatatctgatgttcaggtagacctgggc

SEQ ID NO: 9591 - DNA, 60 bp, Homo sapiens
tttctctatccctacccacaaccctgggaagttggagcaagaggggcatactattgggct

SEQ ID NO: 9592 - DNA, 60 bp, Homo sapiens
catcatcatgtacaaccttgtgagcctgaacagcctcaaattcacagagctggttgcccg

SEQ ID NO: 9593 - DNA, 60 bp, Homo sapiens
aggcaaagcgcctttacacaggcctcggaaaacaatggagtgagcacaagatgccctgtg

SEQ ID NO: 9594 - DNA, 60 bp, Homo sapiens
ggaccactccaggctttacagatgactcactccattcctaggtcacttgaagccaaactg

SEQ ID NO: 9595 - DNA, 60 bp, Homo sapiens
ctgggactgggtgcactggttcctgaagatgcgcgcctatgactacatgtgcatgggctt

SEQ ID NO: 9596 - DNA, 60 bp, Homo sapiens
tgtctcctccagcgtggtggaagttgggttaggagtacggagatggagattggctcccaa

SEQ ID NO: 9597 - DNA, 60 bp, Homo sapiens
tatcctgcatgccacgttgccaggcatcttcatgctgctgctcatcttctttgccttcct

SEQ ID NO: 9598 - DNA, 60 bp, Homo sapiens
gcctcagggaggagtgagcacctaaatgaacgcagtaaaccttcatggaccaacagtgat

SEQ ID NO: 9599 - DNA, 60 bp, Homo sapiens
gcctcggtcaatggtggaagttgtcacaagctggaacctgcccatgtcttattggctaaa

SEQ ID NO: 9600 - DNA, 60 bp, Homo sapiens
ctggctcgaaacatctgaagggttcgcagtgataaaggaggcatttgacagcactagcag

SEQ ID NO: 9601 - DNA, 60 bp, Homo sapiens
tacccagtcctggcctggcacagtgcccgctgctggtgccaagcgtggacagaggaacct

SEQ ID NO: 9602 - DNA, 60 bp, Homo sapiens
tggcaggtgtccagtacctaatcacgctctgttccttgcttttgccttcaagggaattcc

SEQ ID NO: 9603 - DNA, 60 bp, Homo sapiens
gttatgccatggtggtctgtggagacattgccgtctatcccagtggtaatgctcgtccca

SEQ ID NO: 9604 - DNA, 60 bp, Homo sapiens
aaagcagaggaacccatgacatccaagggcgtgaaaggatcagagctgactggacatagt

SEQ ID NO: 9605 - DNA, 60 bp, Homo sapiens
cacaccggtggccagttctgcaatcagcatcctttcaacaactcctgttgacaacagcac

SEQ ID NO: 9606 - DNA, 60 bp, Homo sapiens
acaatggtggccagttctgaaacgagcacactttcaacaactcctgctgacaccagcaca

SEQ ID NO: 9607 - DNA, 60 bp, Homo sapiens
gcgggatgaggacaggtcttctttcctgccagagggagctctgaagacaactagagaatt

SEQ ID NO: 9608 - DNA, 60 bp, Homo sapiens
ttccagatgccctggcacctctagggaccaactgggactcattatggaagaatggggtga

SEQ ID NO: 9609 - DNA, 60 bp, Homo sapiens
tccagctgctaaaccatgccacagacgtgtactctgtttcgacagcactactgctcctgt

SEQ ID NO: 9610 - DNA, 60 bp, Homo sapiens
ggcaatgcaggagtgtggattaagcaccagactgtattctcattcaaccatgaccgtgcg

SEQ ID NO: 9611 - DNA, 60 bp, Homo sapiens
gtgaattcttattggaagccaggtctctcctctcattagatcaaaagggacttatgtaca

SEQ ID NO: 9612 - DNA, 60 bp, Homo sapiens
ccattgacctcaggcatggatgcttctgagctaacaccaagggcttgggagagaatcatt

SEQ ID NO: 9613 - DNA, 60 bp, Homo sapiens
cagaattgcctgagaactgcaatgaacaatctgacaaatgtgaagctggccaaaagtcgg

SEQ ID NO: 9614 - DNA, 60 bp, Homo sapiens
gatctttgttcttgacctctagaccccaagatgtgaacagtgcacgtgttaatgtcatct

SEQ ID NO: 9615 - DNA, 60 bp, Homo sapiens
ccgcttacagcaacctcgcctttcacttcaaggccatcccacagatttacagacaagcaa

SEQ ID NO: 9616 - DNA, 60 bp, Homo sapiens
actccccttggctgttgtgcttcatggccagcactcttgatgagggtcttggtctataaa

SEQ ID NO: 9617 - DNA, 60 bp, Homo sapiens
agtttacttccctctaagcaagtatgcttgacatgcctaacacagcattcccttaaacat

SEQ ID NO: 9618 - DNA, 60 bp, Homo sapiens
ctcctctgatccccgtgtaagactgccctggtgtcggcacttaggaatgtgtaaatggta

SEQ ID NO: 9619 - DNA, 60 bp, Homo sapiens
tatggttctgtcaatgcacatcttcgtgtctgttttcctcatgtatccattgtgagcagc

SEQ ID NO: 9620 - DNA, 60 bp, Homo sapiens
atgactgtcaccgcatagcaaaactcatggctgatgtggtagaagaggagacacggcgat

SEQ ID NO: 9621 - DNA, 60 bp, Homo sapiens
ccaaagtcaaagcaaccatacttcacctagagaagacagtattggcaatcatgacacctg

SEQ ID NO: 9622 - DNA, 60 bp, Homo sapiens
gtcgacacgcacaggcccaccaatgacggggaccatcattcagacaagcaaagctcacaa

SEQ ID NO: 9623 - DNA, 60 bp, Homo sapiens
ggaagaaaatggagagagtgcaatggacagcacagtggccaaagaaggcactaatgtacc

SEQ ID NO: 9624 - DNA, 60 bp, Homo sapiens
tttaaccgccatccactgcttccacgaggctcgtctggacgatgagtgtgccttttacac

SEQ ID NO: 9625 - DNA, 60 bp, Homo sapiens
cattgtgcatagtcaaggaaatcctagggccacctccagttcatttgtgtgggaacaagg

SEQ ID NO: 9626 - DNA, 60 bp, Homo sapiens
gaagtgacttctgagtagttatcactgtgtctgcctctgttacactgtgctgctttgctt

SEQ ID NO: 9627 - DNA, 60 bp, Homo sapiens
acgtggggaagcgggaacacggggtgtctgcgcatgtttcctcctcctagctccatcact

SEQ ID NO: 9628 - DNA, 60 bp, Homo sapiens
ttgatcatcctgtttgccgtttccaccatgactgaaggcagacccttggctatctcacct

SEQ ID NO: 9629 - DNA, 60 bp, Homo sapiens
aagaaggcaacaatcctcaaggtcccccacctccagcaggaggcaatccccagcagcctc

SEQ ID NO: 9630 - DNA, 60 bp, Homo sapiens
aggctgcactacttctgcatcaacgctttctgcaaccagtacacctcacacctctacttc

SEQ ID NO: 9631 - DNA, 60 bp, Homo sapiens
gaaatattagttggaagacttcacaaagactgctgataactatctgtgattgataggaaa

SEQ ID NO: 9632 - DNA, 60 bp, Homo sapiens
atggtccacgcaaaagctaccaatacccacagctgcatcgtccacgcaaaagctacccat

SEQ ID NO: 9633 - DNA, 60 bp, Homo sapiens
gacaagtcattctaggtgtctccactgtttcagttctcgcgttcgttcattcttgtgctt

SEQ ID NO: 9634 - DNA, 60 bp, Homo sapiens
ggtcaggaacttgaagggatgcttggagtgagtagatttgagggtccagttatggagtgc

SEQ ID NO: 9635 - DNA, 60 bp, Homo sapiens
catggtgtccaactttccaggaatcgtcaccagctttatccgcttctggcttttctggaa

SEQ ID NO: 9636 - DNA, 60 bp, Homo sapiens
tggcccatcaggttgtcttagcaacagccttcaagtgaaaggcaatactgtctgtgatgg

SEQ ID NO: 9637 - DNA, 60 bp, Homo sapiens
actgattctgtggacctgaaatccccgtttggaagtccttctgctgaagctgtgtcctct

SEQ ID NO: 9638 - DNA, 60 bp, Homo sapiens
gccaatcagttccattgacagtcatgatgcagacagccttcccaaacgctcttcagaagc

SEQ ID NO: 9639 - DNA, 60 bp, Homo sapiens
gcaggaatccccttgaagaaacctcagccctctctgttgagacaccaagttacgtcaaag

SEQ ID NO: 9640 - DNA, 60 bp, Homo sapiens
caaagggacataggattacagactcccaggatctctccttcaacccatgagccactggaa

SEQ ID NO: 9641 - DNA, 60 bp, Homo sapiens
tactcacatggcaagaggtggtgatcgccagctcagggaaggtgggggttccttcatcct

SEQ ID NO: 9642 - DNA, 60 bp, Homo sapiens
tgatgaaaacgtgaagcacatctcctgtcccctgctcatcctgcacgctgaggacgaccc

SEQ ID NO: 9643 - DNA, 60 bp, Homo sapiens
ggtagctaaggactgatgttgaaagtgtattcagtctatagtaagctgatgtcaggtcag

SEQ ID NO: 9644 - DNA, 60 bp, Homo sapiens
aatcctacttgctgagcatgggaatagctaacccagttaccagagaaacctacggctcag

SEQ ID NO: 9645 - DNA, 60 bp, Homo sapiens
gcggttgattgccagtttgtgtactgttgcttggatgcggcacagtggttggtaatggaa

SEQ ID NO: 9646 - DNA, 60 bp, Homo sapiens
caagaagaaggactacacccaggtggactacttaatcaacgggatgtatgcggactcaga

SEQ ID NO: 9647 - DNA, 60 bp, Homo sapiens
gaattctctccacacctaggcaataattacgcttaatcttcagcttctatgcaccaagcg

SEQ ID NO: 9648 - DNA, 60 bp, Homo sapiens
catgtcactgcttcaagatactgaggataggaagattgcaaccactccatcaaccacccc

SEQ ID NO: 9649 - DNA, 60 bp, Homo sapiens
ggatagacagtttgtcccagtctttcccacctcaatatcaggaagctgtagaacctacag

SEQ ID NO: 9650 - DNA, 60 bp, Homo sapiens
agaactgggaccctgtgcagcagccacttctcccaccactttcctgagatcacaagtcat

SEQ ID NO: 9651 - DNA, 60 bp, Homo sapiens
aacttcgtcaccttcttcattgctggtcacgagacctctgccaaccacttggcgttcaca

SEQ ID NO: 9652 - DNA, 60 bp, Homo sapiens
aaagaactacgggcagctggacatctttccagcccgggatacctaccatcctatgagcga

SEQ ID NO: 9653 - DNA, 60 bp, Homo sapiens
gactcacttctgcaatcacttccaagactacattgacttctttgaagactactgcctccc

SEQ ID NO: 9654 - DNA, 60 bp, Homo sapiens
ctttgccctctatcctgagtaactaatggacatcttctcatgcaaggtttacatgaagcc

SEQ ID NO: 9655 - DNA, 60 bp, Homo sapiens; identical to SEQ ID NO: 4855

SEQ ID NO: 9656 - DNA, 60 bp, Homo sapiens
tcgactgcgacgcaggtgtacctccccctgccttccaacccctttccacgagctatattt

SEQ ID NO: 9657 - DNA, 60 bp, Homo sapiens
tcatgaggcttctcagccctggatttcctgctgccatcctcacccagcacccacaactag

SEQ ID NO: 9658 - DNA, 60 bp, Homo sapiens
ggaaagcagtttcccgaaaaccagttcctccattagaagaggccctcaaacaaattcagg

SEQ ID NO: 9659 - DNA, 60 bp, Homo sapiens
atgctcttgtgaaggagtttgggacactggctgttgcccggtgtttcagcactttcagtt

SEQ ID NO: 9660 - DNA, 60 bp, Homo sapiens
gtgagaaaccaaatgataggttgtagagcctgatgactccaaacaaagccatcacccgca

SEQ ID NO: 9661 - DNA, 60 bp, Homo sapiens
ctcagactgaaacgacgttgtactacatctctgatcaaagaacaggagagttcccaggcc

SEQ ID NO: 9662 - DNA, 60 bp, Homo sapiens
tactggtgcggaatctgaactcggatgatcaggctgttgtgctgaaggccctgagattgg

SEQ ID NO: 9663 - DNA, 60 bp, Homo sapiens
gacaggaggaaagtagaagagatcaaggcagagttatttggtcatggaagaacaactgac

SEQ ID NO: 9664 - DNA, 60 bp, Homo sapiens
atgaaggtttacttgagcttttgtgattcaaagttcaggggtggtaaggactctggtacc

SEQ ID NO: 9665 - DNA, 60 bp, Homo sapiens
ccaaagtatagggacagtaccgtctgtggatcttgctgctcgatatgagagtgctgctgt

SEQ ID NO: 9666 - DNA, 60 bp, Homo sapiens
gagctggagttgtccttgcattaccttcttctgccctatctgctgctaggtgtaaacctg

SEQ ID NO: 9667 - DNA, 60 bp, Homo sapiens
ctcaggaaaccaccaagtgcctcggatggtggctgcccacggcgcttctgctgagaccct

SEQ ID NO: 9668 - DNA, 60 bp, Homo sapiens
gagggccagactatgccactgcagagacctttgacattagaacaatgatgtctcctgatg

SEQ ID NO: 9669 - DNA, 60 bp, Homo sapiens
accaaccgacactttgaagtcctgaagaatcacacggatgtgtggttcgtgttcctgcct

SEQ ID NO: 9670 - DNA, 60 bp, Homo sapiens
ctatggagaaaactgctaaagggtatccctgacctttatgatgatgcagctattttcgag

SEQ ID NO: 9671 - DNA, 60 bp, Homo sapiens
tgtatgcaactgctgtgtggctcgatatgatcaacactgcctgtggactggacggtgcat

SEQ ID NO: 9672 - DNA, 60 bp, Homo sapiens
gaagcagatgatgccccgagtatatctacacttgggctgcaacaagaaacaacagagccc

SEQ ID NO: 9673 - DNA, 60 bp, Homo sapiens
gtagcttctcctttgtctcccatccactctgacacctaagccccactcttttcccattag

SEQ ID NO: 9674 - DNA, 60 bp, Homo sapiens
agaggggatacctgggttctaacctctaaataggggagatcccagcctccacaaagaggc

SEQ ID NO: 9675 - DNA, 60 bp, Homo sapiens
ctgaccagtttgagctgattctctctttgaagagtccttcttgattgcagtgcagtactg

SEQ ID NO: 9676 - DNA, 60 bp, Homo sapiens
atgggtttttcaaggatagacattggctttttaccgaattccctgagctggcacctagcc

SEQ ID NO: 9677 - DNA, 60 bp, Homo sapiens
ttcccttggtgtcagggacctgagagtaagcacatgacagcgtctgcttgcgttgtgtct

SEQ ID NO: 9678 - DNA, 60 bp, Homo sapiens
cagggccttgaaagtccatctctgacccaaaacaatccaaggaggtagaagacatcgtag

SEQ ID NO: 9679 - DNA, 60 bp, Homo sapiens
aaaatgaaccagcgattcagcaggtgctcaagcgcctctgtgacctccatgccatacatg

SEQ ID NO: 9680 - DNA, 60 bp, Homo sapiens
ggaaggagatccagagatttctcaggaagcacctcattccagatgtgaccagtcaactct

SEQ ID NO: 9681 - DNA, 60 bp, Homo sapiens
cggctgtaccaatggagcctgaagagttcggcgcagttcctggggtctccacagctgagg

SEQ ID NO: 9682 - DNA, 60 bp, Homo sapiens
ggaaatagccatttggaagctttggttatgaaacatgtggagtgtattaagtgcagcttg

SEQ ID NO: 9683 - DNA, 60 bp, Homo sapiens
gcgaaagggagacttggtagccatctttcctccagtcctacatggtgaccctgaaatctt

SEQ ID NO: 9684 - DNA, 60 bp, Homo sapiens
aggctgggctctctcgacacgttgctcagccagtcactccttcccctgtggattgatgaa

SEQ ID NO: 9685 - DNA, 60 bp, Homo sapiens
ataccaacaccgtgaatatcgtgtgtggccttaaccaaggaacagaagccctttagaact

SEQ ID NO: 9686 - DNA, 60 bp, Homo sapiens
ttacactcagctttctggtggcgacagttgctgtagggctttatgccatgtgaatgcagg

SEQ ID NO: 9687 - DNA, 60 bp, Homo sapiens
accctccgctgcagaggattgaggcttaattctgagctggccctttccagccaataaatc

SEQ ID NO: 9688 - DNA, 60 bp, Homo sapiens
acttctgctacgatggatcaccctacaggagctacgaggatttcaacatggagttcctgg

SEQ ID NO: 9689 - DNA, 60 bp, Homo sapiens
ctccagaacaggaccaagctgactgtacttgaaggagacattctggatgagccattcctg

SEQ ID NO: 9690 - DNA, 60 bp, Homo sapiens
gggaatgacaaacatgacacagtccttagagcgaatgaagcaaagttggaaagaagcccc

SEQ ID NO: 9691 - DNA, 60 bp, Homo sapiens
aaggagggctggaatggtacatcacataggcaagtcctgccctgtatttaggctttgcct

SEQ ID NO: 9692 - DNA, 60 bp, Homo sapiens
agcatgccctgagctctctgaaagttgtcgccctggaatagggtcctgcagggtagaata

SEQ ID NO: 9693 - DNA, 60 bp, Homo sapiens
ccagtgcctcagtgctgcaattgagggctaaatcccaagtgtctcttgactggctcaaga

SEQ ID NO: 9694 - DNA, 60 bp, Homo sapiens
tacattcatctggaggctgcgtcctgaggagtgtcctgtctgctgggctacaaaccagga

SEQ ID NO: 9695 - DNA, 60 bp, Homo sapiens
tccttcatggagaacatgccgtggtacatggcaaggtagcactggctgtatccttgaact

SEQ ID NO: 9696 - DNA, 60 bp, Homo sapiens
cgaatacactggcaaaggcaacactttgcttggacccttctccccagttctgataccact

SEQ ID NO: 9697 - DNA, 60 bp, Homo sapiens
attgggagggcttcttgcaggctgctgggctggggctaagggctgctcagtttccttcag

SEQ ID NO: 9698 - DNA, 60 bp, Homo sapiens
ttctggtggctgttttgctatgcagtggatgcttatctggtgatccggagatcggcagga

SEQ ID NO: 9699 - DNA, 60 bp, Homo sapiens
ttaaatccgaggagaagcgagcactcagtgatgagcaggacctttgaggtactgaccaga

SEQ ID NO: 9700 - DNA, 60 bp, Homo sapiens
agtgaacaactactgggcactgaacttgacctccatgctctgcctgacttccagcgtcct

SEQ ID NO: 9701 - DNA, 60 bp, Homo sapiens
ttcaaacatccggccttcaagaggcgcaggcgggtgaattcggactgtgactctgtgtta

SEQ ID NO: 9702 - DNA, 60 bp, Homo sapiens
ggtgctggactggactcttgttcactttaccttctgccaaatgcagagagggaggccagt

SEQ ID NO: 9703 - DNA, 60 bp, Homo sapiens
gagagatcagtaaacttcgaccatccccagaaagagatgccctcattcagctttcagaaa

SEQ ID NO: 9704 - DNA, 60 bp, Homo sapiens
tagccatgcccatggagcttctcaaggaagctgtcactcatctgatcacagccattcaca

SEQ ID NO: 9705 - DNA, 60 bp, Homo sapiens
tcaggtgatggagttctggcaaggtcaaaccaaccgcctgcatgaccggatagtctttcg

SEQ ID NO: 9706 - DNA, 60 bp, Homo sapiens
acgagacacagcctccctcagcactactccttcagaatcgcctcgtgctcaggctacatc

SEQ ID NO: 9707 - DNA, 60 bp, Homo sapiens
ttcgcgtccagtaaagacactggtaactgcggtttcagccaacactcttcatggcagtgt

SEQ ID NO: 9708 - DNA, 60 bp, Homo sapiens
agcaacatcgctatgcaggtgcggaagctggtgggcactcagcaccctctgcttaccaca

SEQ ID NO: 9709 - DNA, 60 bp, Homo sapiens
cctctggtgaccgcccctacctggcatccctctaacccaggaggagcgtggggaaagggg

SEQ ID NO: 9710 - DNA, 60 bp, Homo sapiens
gcaaaattcccccttgtcacagaaaccagggactcttcaggatttgagatggccttgagt

SEQ ID NO: 9711 - DNA, 60 bp, Homo sapiens
caccagatcagtttcagagactgcttaaaattaatccagactggaaaacccacagacttc

SEQ ID NO: 9712 - DNA, 60 bp, Homo sapiens
gtggatttcaggcttcccgtagactggaagaatctggctcaaaacctgcttgcctcgcag

SEQ ID NO: 9713 - DNA, 60 bp, Homo sapiens
tggatgccaaaagccgagttctgtttcctcttgggttgggacatgctgctgagtacgtca

SEQ ID NO: 9714 - DNA, 60 bp, Homo sapiens
ggtctttgttccgcacccttttttcacaggggtgaaagcggggcctctgggtctcttttt

SEQ ID NO: 9715 - DNA, 60 bp, Homo sapiens
gtgaaggaacgaagaccctttctggcctcagaatgtactgaactgcctaaagctgagaag

SEQ ID NO: 9716 - DNA, 60 bp, Homo sapiens
ccctggctcacaaatggtgggatgaacaaggagtatatgcacctcttcattccatgaatg

SEQ ID NO: 9717 - DNA, 60 bp, Homo sapiens
ggatggctacatgcctcgtcagtacagtctacagaattgggaagcacgtctactgctgga

SEQ ID NO: 9718 - DNA, 60 bp, Homo sapiens
ttttccatctccctacgaatcctctgaagcttttacccaagccctttcttgcctctccag

SEQ ID NO: 9719 - DNA, 60 bp, Homo sapiens
ttgctggtggtcgtgaaggctctaaacacctgcatggcaatgaggccaaccttctccgct

SEQ ID NO: 9720 - DNA, 60 bp, Homo sapiens
agaattttccagttactctgggattgggtttgctaagcatcccctctggcccctgatctg

SEQ ID NO: 9721 - DNA, 60 bp, Homo sapiens
gccccaaccagatgtccttcaccttcgcctctcccacgcaggtgttcttcaacggtgcca

SEQ ID NO: 9722 - DNA, 60 bp, Homo sapiens
acagggaacactgatgactcactcattggcagaaattcctcctctgaaagtactgaggat

SEQ ID NO: 9723 - DNA, 60 bp, Homo sapiens
actttattggcttcctctgatatgcaagtggtgctggcagtcctcaatctcctatatgta

SEQ ID NO: 9724 - DNA, 60 bp, Homo sapiens
tttcgctacagcatggtggcctactggagacaggctggactcagctacatccgatactcc

SEQ ID NO: 9725 - DNA, 60 bp, Homo sapiens
aacttgtatgtagggtgatgaccctctttgtcctaggtgtaccctttcctcatctctatt

SEQ ID NO: 9726 - DNA, 60 bp, Homo sapiens
ctctgtggtcagaccatttgccaagcttgtgaggcctcctgttcaggtatacggtattga

SEQ ID NO: 9727 - DNA, 60 bp, Homo sapiens
gaattacaccacttactcattgtgtcacgtagcaagtgtgcaaactgccatccattgtcc

SEQ ID NO: 9728 - DNA, 60 bp, Homo sapiens
cgctggtgaacgctgctgtgacttactcgaagcctcgattggccacattttggtactacg

SEQ ID NO: 9729 - DNA, 60 bp, Homo sapiens
agccaggacgtctgaagaaagttcagggcattggctggtacctggatgagaagaacctgg

SEQ ID NO: 9730 - DNA, 60 bp, Homo sapiens
agccaactgttttcacagacgtggaagaccacatgttcatagccaaggaggagtccttcg

SEQ ID NO: 9731 - DNA, 60 bp, Homo sapiens
tttgatccgcaaacctgcctcgttcatgaccagcatctgcgatgagcgaggacaggagct

SEQ ID NO: 9732 - DNA, 60 bp, Homo sapiens
tgaaagcttcgtccgagaaacgccaggacagacgatggcagaggagagggctcctgtgac

SEQ ID NO: 9733 - DNA, 60 bp, Homo sapiens
aatcacagatccatttaagcttgcagaagagtctgacagtatgaagtccagatgtgtccc

SEQ ID NO: 9734 - DNA, 60 bp, Homo sapiens
aacagtgatacctcagtgcagaggtcacttgtggagcaaatgcgtgacatgggcagtcga

SEQ ID NO: 9735 - DNA, 60 bp, Homo sapiens
gtgccgcttgcctctactacctgtcccctctgaaactggagcacttggctcttatctact

SEQ ID NO: 9736 - DNA, 60 bp, Homo sapiens
aggaggagtgccgggtgctctccatacagagccacgtcatccgcggctacgtgggcaacc

SEQ ID NO: 9737 - DNA, 60 bp, Homo sapiens
ccctggatctttgtcaatgcctactcctctctaaagtgttctcagaagtggtgatgcagg

SEQ ID NO: 9738 - DNA, 60 bp, Homo sapiens
tggagcagatcatcacctccatgaagtgcatcatggggcaggatggcaccagccttggta

SEQ ID NO: 9739 - DNA, 60 bp, Homo sapiens
attggctgtggcactgggctgagtggaagttatctgtcagatgaagggcactattgggtg

SEQ ID NO: 9740 - DNA, 60 bp, Homo sapiens
ttctcctttcactgctgtcaatgacctgggacatctgcttgggagagctggctttaatac

SEQ ID NO: 9741 - DNA, 60 bp, Homo sapiens
gttaaatagccttcatactgtggatttttcctcctactaactaatatgtgggaaattaag

SEQ ID NO: 9742 - DNA, 60 bp, Homo sapiens
tagtggccatatgcagggaatggtgcttctggctgtggcacgcactggatcacccaggtc

SEQ ID NO: 9743 - DNA, 60 bp, Homo sapiens
gagagaggcagggatcttgagcagattttatctcagtacattacgttcgtcaagcctgcc

SEQ ID NO: 9744 - DNA, 60 bp, Homo sapiens
cagggacaaggagaccagtcgcgacgagttcatcttctactccaagagactgatgcggct

SEQ ID NO: 9745 - DNA, 60 bp, Homo sapiens
cttggtgctatgacagtgtgagactcaggttgtctgtagagaatgaaaggagcagtggcc

SEQ ID NO: 9746 - DNA, 60 bp, Homo sapiens
ctttgcacagcatgaggcaaaaatgtccagccacccccaggcatctgttagcagagtctg

SEQ ID NO: 9747 - DNA, 60 bp, Homo sapiens
ggtatactcgttacaggccctagaggttctaatggtccagggttaagtgagaggagactg

SEQ ID NO: 9748 - DNA, 60 bp, Homo sapiens
atatgtcgagcttggagatcagctcctcgtgcttcagcctggagacgaaattgccgttat

SEQ ID NO: 9749 - DNA, 60 bp, Homo sapiens
aagacactgtgtgggtagggcactgagctgctgcagtttcacagggaaggctgcacctat

SEQ ID NO: 9750 - DNA, 60 bp, Homo sapiens
gcaacaaatgaagtagcccagctcatccagggagggcggcttatcaaacacgagatgact

SEQ ID NO: 9751 - DNA, 60 bp, Homo sapiens; identical to SEQ ID NO: 4855

SEQ ID NO: 9752 - DNA, 60 bp, Homo sapiens
cctccatgagagctatccgtgccagatatgaccctttcctacagacaagacaccgaatag

SEQ ID NO: 9753 - DNA, 60 bp, Homo sapiens
cagaagatgctacaaaacctcatgcctactgtctgccactgctggagaaggaatcatggt

SEQ ID NO: 9754 - DNA, 60 bp, Homo sapiens
gaagggtactccaggcgagaggcggacgcgagtcgtcgtggcaggaaaagtgactagctc

SEQ ID NO: 9755 - DNA, 60 bp, Homo sapiens
aaaagctcaagaggagaacaagaaaatcgtactggctggatgcgttcctcaagcccagcc

SEQ ID NO: 9756 - DNA, 60 bp, Homo sapiens
tgtatgaacgcagcggcggacctgtgaggggatccgacttgccggcagaacttacgctgc

SEQ ID NO: 9757 - DNA, 60 bp, Homo sapiens
ggttccagccagcatcacattttttagtccctctggcctcacatacagtctcaagcacat

SEQ ID NO: 9758 - DNA, 60 bp, Homo sapiens
ggatccgggtacagatctcagcagtgcatagcgaggaagacattgaccgctgcgtggagg

SEQ ID NO: 9759 - DNA, 60 bp, Homo sapiens
actgcttctggtctccagggacagtgctgctggaaaggctagtgatgagcttcaccctgg

SEQ ID NO: 9760 - DNA, 60 bp, Homo sapiens
atgccgagccactgcttggtccatctacacaagaactgcattccccagtatacactaggt

SEQ ID NO: 9761 - DNA, 60 bp, Homo sapiens
cttgcctatcaccgctggaacgggcacacagacatgattgatcaggatggcttatatgag

SEQ ID NO: 9762 - DNA, 60 bp, Homo sapiens
gcttgctcgcatacagacggacagtgtggtggcaacattgaaagcctcgtaccctggcct

SEQ ID NO: 9763 - DNA, 60 bp, Homo sapiens
aagcaggcaaatctctgttgttctatgcccaaaactgccccaagatgatggaagttgggg

SEQ ID NO: 9764 - DNA, 60 bp, Homo sapiens
ccgtaacagtggagcagccaagtttgtcttcaggcacaatgaccctgaccacctaaagaa

SEQ ID NO: 9765 - DNA, 60 bp, Homo sapiens
atcaaagaggccctgatggcacatggacttggcaacagggtatcggtgatgagctacagt

SEQ ID NO: 9766 - DNA, 60 bp, Homo sapiens
agcagggttctgggaattttgcaagttatcctgtggccaggtgtggtctcggttaccaaa

SEQ ID NO: 9767 - DNA, 60 bp, Homo sapiens
cttaggctgctggaagccacctgctttggggagaatgcacagtttccagcagacatttcc

SEQ ID NO: 9768 - DNA, 60 bp, Homo sapiens
ttaatctgctgtatgatcggggcacaaagtttggcctcttcactccaggatccagaattg

SEQ ID NO: 9769 - DNA, 60 bp, Homo sapiens
ccatatcctcagttcttcttagcctctgtctccttccctgggaccctctcatatcctctt

SEQ ID NO: 9770 - DNA, 60 bp, Homo sapiens
ccgtcccaaattcgccctactcacccgttccatttattctggccaaggtgctattctaga

SEQ ID NO: 9771 - DNA, 60 bp, Homo sapiens
tgtcccatctgccaccaagaacaaagtggccattacagtgcctgctccacagcttgggca

SEQ ID NO: 9772 - DNA, 60 bp, Homo sapiens
caaggtcccatctccaaggtgcgtcatatgcaggaatggcttgaaacaagaggaagtcct

SEQ ID NO: 9773 - DNA, 60 bp, Homo sapiens
aaactgtgacacagcccagcagtctcagtgcccagaagggtttgacctgccaccagttat

SEQ ID NO: 9774 - DNA, 60 bp, Homo sapiens
atgtggcgaatatcttcccttacaagggttatatatggaattatggtaccctccctcaga

SEQ ID NO: 9775 - DNA, 60 bp, Homo sapiens
agttggccttttgcccgtggtgtgctagtagctttggctgatgctaagctttcctggtat

SEQ ID NO: 9776 - DNA, 60 bp, Homo sapiens
ctgttctgaaagctaagcgactgtacgtgctactaaaaatgtctgacactgaaataattt

SEQ ID NO: 9777 - DNA, 60 bp, Homo sapiens
ccagttttcagcctacagcagattatcagctcggtgacttttctttctgccaccatttag

SEQ ID NO: 9778 - DNA, 60 bp, Homo sapiens
cttcttccactgctttctctcatgggctacttcaaagacaaggaacccctaacagcgtac

SEQ ID NO: 9779 - DNA, 60 bp, Homo sapiens
tcataggatgacgctggagatccccacacttactctaccctcttggcaaattggcattcc

SEQ ID NO: 9780 - DNA, 60 bp, Homo sapiens
agcattaaccgagacaagcacttggcagtggcttacttccaacgagggatgctctactac

SEQ ID NO: 9781 - DNA, 60 bp, Homo sapiens
aaaagccagagacatacttgatgcccaaagatggcaagagtaccgcgacagacatcaccg

SEQ ID NO: 9782 - DNA, 60 bp, Homo sapiens
gcaggatgttgagttaatctgctagattgcagtactaatggtagtggtttagtgtcttca

SEQ ID NO: 9783 - DNA, 60 bp, Homo sapiens
aggtgtccaggatgtggaggtgcacttggaggaccagatggtcttggtacacaccactct

SEQ ID NO: 9784 - DNA, 60 bp, Homo sapiens
cacaactgtgtgctctgctttccagcatcttggttgggttaaaagtggcttgggcagtgg

SEQ ID NO: 9785 - DNA, 60 bp, Homo sapiens
ggtatttgagcatattggaaagaagactcccatcgcagttcggttctccactgttgctgg

SEQ ID NO: 9786 - DNA, 60 bp, Homo sapiens
ctagtacggattccacgtttgagtcccaacatctccagtatgtgtgctgctcggctctcc

SEQ ID NO: 9787 - DNA, 60 bp, Homo sapiens
aagatgctaggcgtgacaccgttccctccaaaagcagacctcggaatcactgccaaataa

SEQ ID NO: 9788 - DNA, 60 bp, Homo sapiens
tcaacacacagatctcctactccatccagtcctgaggagccttaggatgcagcatgcctt

SEQ ID NO: 9789 - DNA, 60 bp, Homo sapiens
cgcgggctacaacgtcaaattcgatatgttcagcaagatctgcgtgaacggggacgacgc

SEQ ID NO: 9790 - DNA, 60 bp, Homo sapiens
agagtctggctactctctcgtttcctttctgttgctcgtagctgctgaaattcctctccg

SEQ ID NO: 9791 - DNA, 60 bp, Homo sapiens
gagcattctcaaatggaacacagacagtgtagaagaattcctgagtgaaaagttggaacg

SEQ ID NO: 9792 - DNA, 60 bp, Homo sapiens
gatggattgccacaaagacgagaaaggcaccatctatgactatgaggccatcgcacttaa

SEQ ID NO: 9793 - DNA, 60 bp, Homo sapiens
tgactaagagaccactcggtcctagcctccagacaccccacaatactcctctgagcctga

SEQ ID NO: 9794 - DNA, 60 bp, Homo sapiens
ccgatactgtgtaacattcagggcactatgtgaacttgtaagtgtgaccatactgcatgt

SEQ ID NO: 9795 - DNA, 60 bp, Homo sapiens
attagtgccatgtgcctttcacacagggtttgcatttatcagtctgttttccgatgatgt

SEQ ID NO: 9796 - DNA, 60 bp, Homo sapiens
ggtgagacccaaagaaagctggaaccatgctgactttgtacactgtgaggacacagagtc

SEQ ID NO: 9797 - DNA, 60 bp, Homo sapiens
ctgtggcttccaagtcttagaacctcaactgacatatagcattgggcacactccagcaga

SEQ ID NO: 9798 - DNA, 60 bp, Homo sapiens
gggactcagtacctgagcctcaatcaagccttatccaccaaatacacagggaagggtgat

SEQ ID NO: 9799 - DNA, 60 bp, Homo sapiens
tcaattatggagtggaaacccacgaagcctacaagcaaaggtctctggctagcgacatca

SEQ ID NO: 9800 - DNA, 60 bp, Homo sapiens
gctgccacgtcacaggcccaaaggactcttcttcagcagcatctttgcaaaatgtctttc

SEQ ID NO: 9801 - DNA, 60 bp, Homo sapiens
gcctctggcactgatgtgaaacagttggaccaaggcaataaggatgtacgtcataaagga

SEQ ID NO: 9802 - DNA, 60 bp, Homo sapiens
atacctgtctcggaaactgggcctggattccattgccttcggctacctgcaaaccacctt

SEQ ID NO: 9803 - DNA, 60 bp, Homo sapiens
gcagatgccttcttcgttatgatgtttacccttatgatggtggcttattcagccagttcc

SEQ ID NO: 9804 - DNA, 60 bp, Homo sapiens
gcgggggctcccacgatcgtattgacctctggaagaagacagacactttcccacgggagc

SEQ ID NO: 9805 - DNA, 60 bp, Homo sapiens
agcagtggctgtgggaagagcacagtggtccagctcctggagcggttctacgaccccttg

SEQ ID NO: 9806 - DNA, 60 bp, Homo sapiens
caccctaagggctgggtggctgtctcaaggacacattgaatacgttgtgaccatccagaa

SEQ ID NO: 9807 - DNA, 60 bp, Homo sapiens
tgaaatccgcattgatggcctcaatgtggcagacatcggcctccatgacctgcgctctca

SEQ ID NO: 9808 - DNA, 60 bp, Homo sapiens
cctgtgaactgccccataagattgctccatggcatgaaggatgacattgtaccttggcat

SEQ ID NO: 9809 - DNA, 60 bp, Homo sapiens
gaagaacctgcaaccccgaatttattgtccctttgctgggtattttgtggaatctcaccc

SEQ ID NO: 9810 - DNA, 60 bp, Homo sapiens
tgtgtgagtatgttgaccacctgcatgagcatttcaagtatcccgtgatgatccagcggg

SEQ ID NO: 9811 - DNA, 60 bp, Homo sapiens
cctgctggaacaagtgcaggcctgcttttctcgcccaccatctgtcgttgtgtcctgtgc

SEQ ID NO: 9812 - DNA, 60 bp, Homo sapiens
aagatgagttggacccattgccagtgagtctgaatgtcactgacagccctgtgttgtgct

SEQ ID NO: 9813 - DNA, 60 bp, Homo sapiens
tcactctgcgctttgccaaagtcgcttctctgccatagctgcacagaccttaaaccctga

SEQ ID NO: 9814 - DNA, 60 bp, Homo sapiens
tgggaatggtcaaacctgaacctcagatctacaagtttctgctggacaccctgaaggcca

SEQ ID NO: 9815 - DNA, 60 bp, Homo sapiens
gatcaagacagaccaattccagtttggatcagagccttgggagcagcattgactcccttt

SEQ ID NO: 9816 - DNA, 60 bp, Homo sapiens
ttcccactgcatgaccctctatccctgccatctgtccccatggtttccagctcaatccac

SEQ ID NO: 9817 - DNA, 60 bp, Homo sapiens
cctagaggatcccctgactttggacgcaggaccaggacctttataaggtggaaggcttga

SEQ ID NO: 9818 - DNA, 60 bp, Homo sapiens
gaggaccggcttcggagagtctatcatggcagctcggactggtcatacggccttgagaag

SEQ ID NO: 9819 - DNA, 60 bp, Homo sapiens
agacaggcactgtgtgggcacgaggttttacaggggtggtcagacctcaggctttaatga

SEQ ID NO: 9820 - DNA, 60 bp, Homo sapiens
gtgacgtttacaacaggtcgtttctggagaacctgaaagtgaacacggagaatctgctgc

SEQ ID NO: 9821 - DNA, 60 bp, Homo sapiens
agacttccagcgagttcttgatgtgaatctcatgggcaccttcaatgtgatccgcctggt

SEQ ID NO: 9822 - DNA, 60 bp, Homo sapiens
atcctctgtcctgttcctgtgtgacatgcaggagaagttccgccacaacatcgcctactt

SEQ ID NO: 9823 - DNA, 60 bp, Homo sapiens
cgagtgctccagagtcgggtctgctttccaaagtataggacatttgaagaactggtatgc

SEQ ID NO: 9824 - DNA, 60 bp, Homo sapiens
gcccagaaatttgctgaatacactcacaaatctcctagagtccattccctaatcctctgc

SEQ ID NO: 9825 - DNA, 60 bp, Homo sapiens
aaccaagaaggagcatctgcactccgagaaagatgtgttctgtaactgccccagtgtgac

SEQ ID NO: 9826 - DNA, 60 bp, Homo sapiens
ccctggtatccacggttccccagagctttggggaccacgcgaaaacctccaagatatttt

SEQ ID NO: 9827 - DNA, 60 bp, Homo sapiens
actttatgacctagaaggaaactgtcgtgtgtcccatacattgccatcaactttgtttcc

SEQ ID NO: 9828 - DNA, 60 bp, Homo sapiens
aaacatgtgcaacgaggttactgccgataatgaaacctcatggtaagcccaacgtgtgga

SEQ ID NO: 9829 - DNA, 60 bp, Homo sapiens
ttttgccactagaaacatgtgcaacgagttactgccgataatgaaacctcatgacctgga

SEQ ID NO: 9830 - DNA, 60 bp, Homo sapiens
aacttctctaccctgaccctcctcctgggacagcgtttcgggaggtttcttggcctcact

SEQ ID NO: 9831 - DNA, 60 bp, Homo sapiens
aagtccagcctctattgaggatttgatgcgacggcctcacggggctttggaggtgaaaga

SEQ ID NO: 9832 - DNA, 60 bp, Homo sapiens
ttttggtgaggcagaaagctggacagacaccacaagagcgagtggaagaagtccttagtg

SEQ ID NO: 9833 - DNA, 60 bp, Homo sapiens
gcctgcggttctcgaaagctggctgttggcagcatggagacccagtttcccagttgttaa

SEQ ID NO: 9834 - DNA, 60 bp, Homo sapiens
caccttttcatccagtctcagcgtggggtgaagcctagcagctatgaggatccattatct

SEQ ID NO: 9835 - DNA, 60 bp, Homo sapiens
cttcaagaccgtgatggacatcgataccagcggcaccttcaatgtgtctcgtgtgctcta

SEQ ID NO: 9836 - DNA, 60 bp, Homo sapiens
accttgcacacatccaggagaggcctgcttcttgtatagtgaaatccatgagcgtggatg

SEQ ID NO: 9837 - DNA, 60 bp, Homo sapiens
caccaaggaggcctttgacagatcctttgaggtgaacctgcgtgcggtcatccaggtgtc

SEQ ID NO: 9838 - DNA, 60 bp, Homo sapiens
gcctcaggctgtttagggaccattgcctgtcttggtcacatgagtctgtctccttacttt

SEQ ID NO: 9839 - DNA, 60 bp, Homo sapiens
ctggaacctgaggaagtggtaaacaggctgatgcatgggattctgactgagcagaagatg

SEQ ID NO: 9840 - DNA, 60 bp, Homo sapiens
attcctctcctactttagagcatccagcacgctcaaagtttaagagcatttagccatcgc

SEQ ID NO: 9841 - DNA, 60 bp, Homo sapiens
tttcaggggaattcaacgacctgagaaaggtcaccaaggagcagtgggacaccatagaag

SEQ ID NO: 9842 - DNA, 60 bp, Homo sapiens
tttgcggaatcttgtacccaggacagagtcctagtgtgtgccctaccctggctcaggctt

SEQ ID NO: 9843 - DNA, 60 bp, Homo sapiens
tctgctgtccaagagaatgtcatgctgggaacgccatcatcggtggtgttagcttcacat

SEQ ID NO: 9844 - DNA, 60 bp, Homo sapiens
cattgtcgccatcagcagcatccagggcaagatgagcattccttttcgatcagcatatgc

SEQ ID NO: 9845 - DNA, 60 bp, Homo sapiens
ttttcccacaacagacgggacaacttgcagagctgcaaccccaggacagagctggagcca

SEQ ID NO: 9846 - DNA, 60 bp, Homo sapiens
ttctcagctatccgttctcagcacagcggtgtagacatctgcatcaacaatgctggcttg

SEQ ID NO: 9847 - DNA, 60 bp, Homo sapiens; identical to SEQ ID NO: 4855

SEQ ID NO: 9848 - DNA, 60 bp, Homo sapiens
agccaaggagaagcagctgttaaaggagggcaacgctttcaacgtgtcatccttcgtact

SEQ ID NO: 9849 - DNA, 60 bp, Homo sapiens
actactaattgagcaacctacgcactcagttgactacgtaaatctgtcaggtcttttgtg

SEQ ID NO: 9850 - DNA, 60 bp, Homo sapiens
tacaattgcgtcagcagtggagggcaatgtctctattctgcctgcccgatctttaccaaa

SEQ ID NO: 9851 - DNA, 60 bp, Homo sapiens
aattcaaacctgttgtccagagaccagtcccaaaagacacatccctgcactctgccctga

SEQ ID NO: 9852 - DNA, 60 bp, Homo sapiens
gacagttgatctgagccatcagcaagaagtcaagttgaaggacaaggacagcagtacaaa

SEQ ID NO: 9853 - DNA, 60 bp, Homo sapiens
tgcatgaacaacacagctgtcttcttgccagtcctggttggcttcaatccagtgagcatg

SEQ ID NO: 9854 - DNA, 60 bp, Homo sapiens
attctccaagtcccggctgcttatgtacctatcgagccagattcaccaccgtcattatca

SEQ ID NO: 9855 - DNA, 60 bp, Homo sapiens
tgattgtggagtcctgcatggaagggatctgtaagccagaccctaggatctacaagctgt

SEQ ID NO: 9856 - DNA, 60 bp, Homo sapiens
gaataaagtcctgcctgagttggttcagggcaacgtgtgccctctggtcaatgaggttct

SEQ ID NO: 9857 - DNA, 60 bp, Homo sapiens
tgaagacctagtgctcccagactcaacactgggactctgagttcctgagccccacaacaa

SEQ ID NO: 9858 - DNA, 60 bp, Homo sapiens
actcaactttggggccatcactctcaacagcatggatgccactagtgagcgggactttgt

SEQ ID NO: 9859 - DNA, 60 bp, Homo sapiens
gccaacagaaggtaaacctaccaagtcaaccaaaccatacaagaatggccaactctcgaa

SEQ ID NO: 9860 - DNA, 60 bp, Homo sapiens
acgtaatgtccgtagttcgctcatccgtccatgccagatggattgtggggaaggtgattg

SEQ ID NO: 9861 - DNA, 60 bp, Homo sapiens
tgaatttgtggtagatgacttgccaatccggggctttgtgggctacatggaggagagtgg

SEQ ID NO: 9862 - DNA, 60 bp, Homo sapiens
ttgacgaagatgatggaggtggatgtgcgggcaatgagaagagctatctccaggaacact

SEQ ID NO: 9863 - DNA, 60 bp, Homo sapiens
acctggacacaacttgctcaaaggctggtgacttgtgggccattcatctacaaccaagtc

SEQ ID NO: 9864 - DNA, 60 bp, Homo sapiens
tttggagatggctacatgatcacggtgcggaccaagagcagccagagtgtgaaggacgtg

SEQ ID NO: 9865 - DNA, 60 bp, Homo sapiens
ggcttctccagctgtaaaatggacacacaatcctcctccagggactgctgtgaaatcaag

SEQ ID NO: 9866 - DNA, 60 bp, Homo sapiens
caacagccaaatcagcaaggccaccagacctctcatgtctacatgccaatcagttcacct

SEQ ID NO: 9867 - DNA, 60 bp, Homo sapiens
cacgtgcaaatggagccggtatgacacactttcttacaacaacagccactgtgttggctg

SEQ ID NO: 9868 - DNA, 60 bp, Homo sapiens
gctgggctattccatccatctggaagcacatttgagcctccaggcttctccttgacgtca

SEQ ID NO: 9869 - DNA, 60 bp, Homo sapiens
gtgtatttggaactgcagggctatttctacagccactacttgggaacacaggaaaatctt

SEQ ID NO: 9870 - DNA, 60 bp, Homo sapiens
acgccgctgacggatcggtgttacttgacaatgacacaggctctggaggccaggctcggg

SEQ ID NO: 9871 - DNA, 60 bp, Homo sapiens
gtctgttcttctgcttgccgcacagctttccccgatgctccactgtgtgacctaggcaca

SEQ ID NO: 9872 - DNA, 60 bp, Homo sapiens
ctgcatctctgtttcagaagaccaagagggtgacttaccagactgagtatttctggggac

SEQ ID NO: 9873 - DNA, 60 bp, Homo sapiens
ggaagttaagttttcctggtttatgccatcggcaccgtactggatcctggccaccgacta

SEQ ID NO: 9874 - DNA, 60 bp, Homo sapiens
ccaagttgtcttggacttctacaccacactcagacttctggaaagttttctgtacctcat

SEQ ID NO: 9875 - DNA, 60 bp, Homo sapiens
tccagataccactgagctcgctgcccatgatgcagagctttcgaggataggctttattct

SEQ ID NO: 9876 - DNA, 60 bp, Homo sapiens
gaccagatggagtcttaacacttccagcaaactcaatctcagcatgtgaccaatggcttc

SEQ ID NO: 9877 - DNA, 60 bp, Homo sapiens
cagtgggcagtgatgaagcaacactgagcatgacagtggagaatatccccagtatgccta

SEQ ID NO: 9878 - DNA, 60 bp, Homo sapiens
atttcctgtcttccttcctaggtggctgctttgcagggctttggctgttacctttccctg

SEQ ID NO: 9879 - DNA, 60 bp, Homo sapiens
tgctggaacctgtcggaactccatgccttcctcgcctgctcacctgctcgacgctggaat

SEQ ID NO: 9880 - DNA, 60 bp, Homo sapiens
gctgcaaacctcagcatggaacgctatgccctagtatttggtgtaaataccttcattgcc

SEQ ID NO: 9881 - DNA, 60 bp, Homo sapiens
gtcgacatgcccatcctgacattgtatgctacgagaactcttctgatgatggaatttcga

SEQ ID NO: 9882 - DNA, 60 bp, Homo sapiens
tgggcgagcatgggggctgccagcgtctgttgtggaaagtagctgctagtgaaatggctg

SEQ ID NO: 9883 - DNA, 60 bp, Homo sapiens
gctctagatcgactgatggatggaagaacggtgttagttattgcccatcgtctgtccacc

SEQ ID NO: 9884 - DNA, 60 bp, Homo sapiens
ttgttccatttgaagactaattgggagtccatctctctattggcactgggttcgattgcc

SEQ ID NO: 9885 - DNA, 60 bp, Homo sapiens
ggtgtgaagctcagctccttctcgacagtgggtgagtctctgctctacatgctggagaag

SEQ ID NO: 9886 - DNA, 60 bp, Homo sapiens
gggggtcctcagcaaattaccggaatactagtaagaaggttaccagggggtggaatgggg

SEQ ID NO: 9887 - DNA, 60 bp, Homo sapiens
gaattccgcaaattcgggttccttgctatcactgtttgcatcagcgcgatacgccagcgg

SEQ ID NO: 9888 - DNA, 60 bp, Homo sapiens
cagaagctgctcagttgcttacaagtttcagtgagaagaattgagaacttttcagagaag

SEQ ID NO: 9889 - DNA, 60 bp, Homo sapiens
gggacttctacccggtttgggttctgctttcttataccaagtggctgctgtggtaactac

SEQ ID NO: 9890 - DNA, 60 bp, Homo sapiens
cgccgaactgctggcgcaaaacaccgtgctgctgatcacccacgatccgatggaggcctg

SEQ ID NO: 9891 - DNA, 60 bp, Homo sapiens
cattgctgaacctggagacaaacagtgcagggccattgtaaacacgtacttctctctcgc

SEQ ID NO: 9892 - DNA, 60 bp, Homo sapiens
gctgggattgggctaaggactgtggtcttatctgtccacatacagccaaaatgcctatcc

SEQ ID NO: 9893 - DNA, 60 bp, Homo sapiens
ggagcgggaagactctttgaaatgcctgcggtgctagagcgactgagccgctataatagc

SEQ ID NO: 9894 - DNA, 60 bp, Homo sapiens
ggagatctgaggtcattctggaacctatatccacttatacctggaaaacatcttggtacc

SEQ ID NO: 9895 - DNA, 60 bp, Homo sapiens
ggggcaggttattggatgcagagaagatctgctcggaattgtagccatatgttacagatc

SEQ ID NO: 9896 - DNA, 60 bp, Homo sapiens
taaaatcctcagtgtcatggagctggactcgtaccctctctacgccatctacctcatcgt

SEQ ID NO: 9897 - DNA, 60 bp, Homo sapiens
cagtgctcattggaagcttgtcggattcttgacactttgggattgcttcggcaggaagca

SEQ ID NO: 9898 - DNA, 60 bp, Homo sapiens
cttgtgtctgtggactctgctcagctgtgtccgtaggagtcggatgtgtctgtgctttat

SEQ ID NO: 9899 - DNA, 60 bp, Homo sapiens
tggcttttcccctgcctgtgagtgacatcggttcaggaggagacagtcaggaagcctcct

SEQ ID NO: 9900 - DNA, 60 bp, Homo sapiens
cagcgttgcatgtcgtgaccaactagacattctgtcgccttagcatgtttgctgaacacc

SEQ ID NO: 9901 - DNA, 60 bp, Homo sapiens
ctgtcctccagataccactgagcctcttgcccatgattcagagctttcaaggataggctt

SEQ ID NO: 9902 - DNA, 60 bp, Homo sapiens
gctgtagacagcctcaaccagatgtcgggaaacatgctgaacctgagtgatgcaccaaat

SEQ ID NO: 9903 - DNA, 60 bp, Homo sapiens
tagctactgaaaatggctgggtaagcaagtcaagggtgttggaggaggtcaagagagagc

SEQ ID NO: 9904 - DNA, 60 bp, Homo sapiens
agacatccgagagacccttgggatcaacgtggtccggaacagtgtctcaactggccaggc

SEQ ID NO: 9905 - DNA, 60 bp, Homo sapiens
ctggcccacacagaaaggtggcaagaagatcgggaagactgagtagggaaggcagggctg

SEQ ID NO: 9906 - DNA, 60 bp, Homo sapiens
aggggagcatctttctccagatcactggcttgacctttttcgtctccttggacttcctag

SEQ ID NO: 9907 - DNA, 60 bp, Homo sapiens
cggtgtgtctagcaccaagactggcacaaagaaccaacttctgaaaagacgctagcctta

SEQ ID NO: 9908 - DNA, 60 bp, Homo sapiens
gaggaagagtgttagaggagaaaactgctgctgagagtattggcaggcttggcctcagtt

SEQ ID NO: 9909 - DNA, 60 bp, Homo sapiens
atactgtaaggtaatgagcttcagaacaggcaacctgaccctgcagaggtcgcgtgctgt

SEQ ID NO: 9910 - DNA, 60 bp, Homo sapiens
cgcgcaccaacagagccggttctcagggcgctttgctccttgttttttccccggttctgt

SEQ ID NO: 9911 - DNA, 60 bp, Homo sapiens
cagatccggagaaggtgcatctcacctggaccaaggacaagtcggtggcagagaagaata

SEQ ID NO: 9912 - DNA, 60 bp, Homo sapiens
ggaccctgagtttgggtggaggaatgtcttcttcttgctgtttgccgttaacctgttagg

SEQ ID NO: 9913 - DNA, 60 bp, Homo sapiens
cacacaggagctacagtacatattggcaggaaaaggtaaactttcgtaatctcattggaa

SEQ ID NO: 9914 - DNA, 60 bp, Homo sapiens
ccctcattgtctgggtctattcccacacttactgagtacagatgaaggaaagtggtagca

SEQ ID NO: 9915 - DNA, 60 bp, Homo sapiens
gcccatgactgcagaagactgaacaggtatcagcacatcagatgtcttttagactccaag

SEQ ID NO: 9916 - DNA, 60 bp, Homo sapiens
attctgtagctcctggctccgtagtctcgcggacagctctctttcctggaagatgtttct

SEQ ID NO: 9917 - DNA, 60 bp, Homo sapiens
tcttactgagcagctatcaagtggcagttacaggcacaaattggtggaggctggaggatg

SEQ ID NO: 9918 - DNA, 60 bp, Homo sapiens
ggtaccagagcctatggaaagggtgtggcttggaacatttgggagactgagcttgattct

SEQ ID NO: 9919 - DNA, 60 bp, Homo sapiens
ggcattggatctatcttggatatcatacatggtcagagaagcctttaggagaagaatcag

SEQ ID NO: 9920 - DNA, 60 bp, Homo sapiens
gaagtgaagctgccgactgtgcatgactgctctgaacgtctgaaatgagagtgccatgta

SEQ ID NO: 9921 - DNA, 60 bp, Homo sapiens
ggatccagcagcagaacacttcaactactccgtgatggctgacatccgggaactgatcga

SEQ ID NO: 9922 - DNA, 60 bp, Homo sapiens
ctctcttcatctttgagatgcttggccataacagggtccatacacatcttctggtttact

SEQ ID NO: 9923 - DNA, 60 bp, Homo sapiens
tgttcttgaagctgggctgtctctctccatgttggcctgtcaccagacccgagtcaatta

SEQ ID NO: 9924 - DNA, 60 bp, Homo sapiens
aggcttccagctcagtcccacagccccttgcttctaagggatccagagacctgctccaga

SEQ ID NO: 9925 - DNA, 60 bp, Homo sapiens
ccccaagttatccacagcctccttcccgaccaagaccctatccacctggacctccatttt

SEQ ID NO: 9926 - DNA, 60 bp, Homo sapiens
ccggctagacccttaaatcagaatctctgaggctgggaactgccatgctgtgtgtacttt

SEQ ID NO: 9927 - DNA, 60 bp, Homo sapiens
cgagcagcgtgcaaataggtggtctcttcatccgaaacacagatcaggaatacactgctt

SEQ ID NO: 9928 - DNA, 60 bp, Homo sapiens
ctgccccacattctcccagtggctctaccagcctcacccatcaaaccagtgaatttctca

SEQ ID NO: 9929 - DNA, 60 bp, Homo sapiens
ctcagtagttagatcaaagcaaatgtggactgaatctgcttgttgatcagtgtttgaaga

SEQ ID NO: 9930 - DNA, 60 bp, Homo sapiens
aatagcaccttaggccactgcccctaagctggggtggaaccggaatttgggtcaatacat

SEQ ID NO: 9931 - DNA, 60 bp, Homo sapiens
aacaacccagcactgccaggaacagaggcgctggtgataggcatcctcgtggtcatcatc

SEQ ID NO: 9932 - DNA, 60 bp, Homo sapiens
ctcctgagaaattgctgcaacacagaaaaccctccaggttgttaccgttacgcggaagac

SEQ ID NO: 9933 - DNA, 60 bp, Homo sapiens
cctgctttatgaccaagattcatcctcaaataagccacatgtacccttctgacaaagctg

SEQ ID NO: 9934 - DNA, 60 bp, Homo sapiens
aagctttcttccttggatgtgttcatcattggtgcagtagccaaagcgattgccaccacg

SEQ ID NO: 9935 - DNA, 60 bp, Homo sapiens
ctccccttcctgcacccgtacccccgtggtctttgaataaagtctgagtgggcggcaaaa

SEQ ID NO: 9936 - DNA, 60 bp, Homo sapiens
caagtaacgtagtcatatcatcgcgctctgatctggtggcatctggctgtgcaaggaaga

SEQ ID NO: 9937 - DNA, 60 bp, Homo sapiens
tcctgaagctacaggcactttgtcatgtgatttttgagtctcaatttaaggctttgtaaa

SEQ ID NO: 9938 - DNA, 60 bp, Homo sapiens
agaaggttctagatgctaacaagatggcggcacccagtcagcagaggctggttgtagttt

SEQ ID NO: 9939 - DNA, 60 bp, Homo sapiens
cagcaacagggaagtcagcctttgtggaggtgctggtagagccacatcacccttacatat

SEQ ID NO: 9940 - DNA, 60 bp, Homo sapiens
ttgggatttgtgctatcagcccaagtttccccacgcatcacttttaagccaatagctccg

SEQ ID NO: 9941 - DNA, 60 bp, Homo sapiens
ctacctggctagagtttcttctcatcagagcactgggacattaaacccaccttttcccag

SEQ ID NO: 9942 - DNA, 60 bp, Homo sapiens
agctccctgttccggatcctgggtgggctctggcccacgtacggtggtgtgctctacaag

SEQ ID NO: 9943 - DNA, 60 bp, Homo sapiens; identical to SEQ ID NO: 4855

SEQ ID NO: 9944 - DNA, 60 bp, Homo sapiens
gatgccagtggagaagaggtacaacagtgtcctgttcggaggtctcattggctcggcatt

SEQ ID NO: 9945 - DNA, 60 bp, Homo sapiens
ccaattttagtgttggacaaagacaactggtgtgccttgccagggcaattctcaggaaaa

SEQ ID NO: 9946 - DNA, 60 bp, Homo sapiens
gcctccatgtctattcttgttgcctgtccagatgccaaaactctgtgttgctgcagggtt

SEQ ID NO: 9947 - DNA, 60 bp, Homo sapiens
gagaaatgctgccaaggccaggaacaggaagtctgctttgctgaagagggacaaaaactg

SEQ ID NO: 9948 - DNA, 60 bp, Homo sapiens
agtctcttccggttgaaaagtctgactcggtgagcatcctgacgactccatttccttctg

SEQ ID NO: 9949 - DNA, 60 bp, Homo sapiens
tccatctagcaggaaaagccatatcttgcaccagcagcatgaatggtccctccacactct

SEQ ID NO: 9950 - DNA, 60 bp, Homo sapiens
cattgcaaataacaaattagtttctctattacttcatttccttctagcctgctttattct

SEQ ID NO: 9951 - DNA, 60 bp, Homo sapiens
aaagagtgacctccctttgccttttgcacacgcacctggaaaagacacagaagccaacct

SEQ ID NO: 9952 - DNA, 60 bp, Homo sapiens
ggttcagaacctgacaggccggaacctgtctgacttcctggtcaagacctacccgcgcct

SEQ ID NO: 9953 - DNA, 60 bp, Homo sapiens
tgccctaccagcctgcacatgggtagaagaggccaaattgaggcacccaagtgatccact

SEQ ID NO: 9954 - DNA, 60 bp, Homo sapiens
tgcctggaccctgaagaagccttctgagtctgtggctcaacgtgcgatgtgcagtgcaag

SEQ ID NO: 9955 - DNA, 60 bp, Homo sapiens
ctagaacacccactggccagtcctagagctcctgtccctacccactctttgctacaataa

SEQ ID NO: 9956 - DNA, 60 bp, Homo sapiens
tggcgtaagcccactgctgattgtcagcctctttgtcttctacctgagcgactacatcct

SEQ ID NO: 9957 - DNA, 60 bp, Homo sapiens
aaaatgccaccaatgttctccatgcccaaacctggagggcgaagggagttggggggcaaa

SEQ ID NO: 9958 - DNA, 60 bp, Homo sapiens
gagggaaatagaagggctgcgttacacaaaataaacaatggcattgtcataggccttcct

SEQ ID NO: 9959 - DNA, 60 bp, Homo sapiens
gtctgcactactacaccctgcatgcttcgaaactctgacagcatactggaggccattcag

SEQ ID NO: 9960 - DNA, 60 bp, Homo sapiens
ggctaaggaagctggcattgagaatgtgaacagcacaaaattctagcagaaggccccatg

SEQ ID NO: 9961 - DNA, 60 bp, Homo sapiens
tgggctttgacaaacttcctctgtggggtaccatcctcatctcggtgggatgtgcagttt

SEQ ID NO: 9962 - DNA, 60 bp, Homo sapiens
actctttggtgtctgtgctcaaaagactgccttctccagtgcccagtgtatgagtgtgtg

SEQ ID NO: 9963 - DNA, 60 bp, Homo sapiens
tttcacttcatgttctaccccaagagactcccgatgtcggctgtggagggttaaagggat

SEQ ID NO: 9964 - DNA, 60 bp, Homo sapiens
cacttctacccagaaggatggacagctaatagcgtacttggggatgaggagcaaggaata

SEQ ID NO: 9965 - DNA, 60 bp, Homo sapiens
atctgaagattggctatttcagccagcaccatgtggagcagctggacctaaacgtcagtg

SEQ ID NO: 9966 - DNA, 60 bp, Homo sapiens
ctggacaagatgggtaagggcttcattccttcaacaagtcaagtcatacttggcctctcc

SEQ ID NO: 9967 - DNA, 60 bp, Homo sapiens
agcaccattgccaagcactacagttggagcacagccttctgggtggctgaagtgatttgt

SEQ ID NO: 9968 - DNA, 60 bp, Homo sapiens
tggggagcatcatctcttcgaccctaaagatgtcaaaggtgtgcagcttccaaacggcat

SEQ ID NO: 9969 - DNA, 60 bp, Homo sapiens
tgacgtcgatgatgatacaggtgtgctgagtgagctgtgctgccagccatcgcagaggag

SEQ ID NO: 9970 - DNA, 60 bp, Homo sapiens
agcagcatccacttcgaggcgtaccgtgtgaagcgcctcaacgagggcagcagcgccatg

SEQ ID NO: 9971 - DNA, 60 bp, Homo sapiens
ttggaactttgcatcatctcaggtagaacgtgagtctcctgtcactatatttaaacaaga

SEQ ID NO: 9972 - DNA, 60 bp, Homo sapiens
gtattcttcacggcagccagaagttaatggtggtagcagctgaggtatggttgttggacg

SEQ ID NO: 9973 - DNA, 60 bp, Homo sapiens
atctttgcccaggatctgaaaggcaatacttttgaggtgtagttctcaggaaggactgag

SEQ ID NO: 9974 - DNA, 60 bp, Homo sapiens
ctgagaaatagctctgattaagaatctttcccactcagcctgcactttgttattgtgcta

SEQ ID NO: 9975 - DNA, 60 bp, Homo sapiens
aaataccgtgtccaatctgggaggaaactggccttctacagtagctctttggcttgtaga

SEQ ID NO: 9976 - DNA, 60 bp, Homo sapiens
ttccacgtcattgtggccccttgttatgacaagaagctggaggctcttcaggaaagcctt

SEQ ID NO: 9977 - DNA, 60 bp, Homo sapiens
atgtacttctccagcctcgtgtccttcctgggctgcctgtactcctccctgtttgtcatt

SEQ ID NO: 9978 - DNA, 60 bp, Homo sapiens
aagatgctcttgggacactgcaagggacaggattcttcaggcgtcgcttggaactgtggt

SEQ ID NO: 9979 - DNA, 60 bp, Homo sapiens
tatttctgtgagaaagttcacttttccagtggctcaaaaatttgttttaggtcagagatt

SEQ ID NO: 9980 - DNA, 60 bp, Homo sapiens
aactggctgtttctcctttgtttccaccatccatccaacctggctcatagcatttgatac

SEQ ID NO: 9981 - DNA, 60 bp, Homo sapiens
ctttgcacctggatctgtacctggccatagttgggctactggccatcactgctgtataca

SEQ ID NO: 9982 - DNA, 60 bp, Homo sapiens
ggacacatcgagaagtaccaacccagtgaccttcatgtccaacatgctctatgcctgcag

SEQ ID NO: 9983 - DNA, 60 bp, Homo sapiens
tgctcttccaaagctaccttttcatgctggggatctacaccatcactctgtgctccctct

SEQ ID NO: 9984 - DNA, 60 bp, Homo sapiens
ggcttcagattcaggaaaagagcacaatggagtcaggggaaagcacaagcaccggaagcc

SEQ ID NO: 9985 - DNA, 60 bp, Homo sapiens
gagctctatacaggtactaagactagcaggggacaccaagactctgcacaaccagattgc

SEQ ID NO: 9986 - DNA, 60 bp, Homo sapiens
gagacaagaaatccagtttcccaccaccttggactcctcccacaatctgggactttcact

SEQ ID NO: 9987 - DNA, 60 bp, Homo sapiens
gacatgtgtaaggtagacgcctatggccactggcttgaccaccttggaagtcaatgacta

SEQ ID NO: 9988 - DNA, 60 bp, Homo sapiens
agtgcatacaggaagcactgcgtgaacattccaaccccaactacgacaagacctctgccc

SEQ ID NO: 9989 - DNA, 60 bp, Homo sapiens
aactgctttgaggatgcggtctactgggagatgcctgaagggaacagcactgtctacatc

SEQ ID NO: 9990 - DNA, 60 bp, Homo sapiens
acagaatcctcaagttccacagtggactcctcctgggactttattcctctgtagctatct

SEQ ID NO: 9991 - DNA, 60 bp, Homo sapiens
tgctctactgcatggagtacctggaagccaacctggactggctgcgtgccaagctcgacc

SEQ ID NO: 9992 - DNA, 60 bp, Homo sapiens
cttgtgccatatttgagggatttgggtctgaactgcccaacctaccacaacccagcagat

SEQ ID NO: 9993 - DNA, 60 bp, Homo sapiens
cccataggggtccagcagggggatgacatcaaaagtcaaggagggcttgatgtccaccag

SEQ ID NO: 9994 - DNA, 60 bp, Homo sapiens
ccaactctctactacacaggcctgataactctgtacgaggcttctctaacccctagtgtc

SEQ ID NO: 9995 - DNA, 60 bp, Homo sapiens
actctaccctttgacgtggtaaagacccaacgccaggtcgctctgggagcgatggaggct

SEQ ID NO: 9996 - DNA, 60 bp, Homo sapiens
gcagggtgctaacgtatctctaggctgttttctccaccaactggagcactgatcaatcct

SEQ ID NO: 9997 - DNA, 60 bp, Homo sapiens
caagctcatcatctccccgttcaccctcgtctactacacttaccagtgcttccaaagcac

SEQ ID NO: 9998 - DNA, 60 bp, Homo sapiens
gggcttcccaagctctttccacagccacatcagtcagggcatggctccaatccattcttt

SEQ ID NO: 9999 - DNA, 60 bp, Homo sapiens
tggaggctctctctgcctagtctacagtactgacagaaagcaaggacatgcggcctgcat

SEQ ID NO: 10000 - DNA, 60 bp, Homo sapiens
aaattaggcttctaagaaaggatgggactctgccctccaggcaaggagtaaatggcccca

SEQ ID NO: 10001 - DNA, 60 bp, Homo sapiens
gacctggtggtctatggcctgggtcaagatgagggtctttcagtgttcctgtttacaaca

SEQ ID NO: 10002 - DNA, 60 bp, Homo sapiens
gcggcatagcgcacagcgcgccttagcagcagcagcagcagcagcggcatcggaggtacc

SEQ ID NO: 10003 - DNA, 60 bp, Homo sapiens
tcctggtgttactcccagcaatctcgtacttctaactctggctcagcatctgcttctgag

SEQ ID NO: 10004 - DNA, 60 bp, Homo sapiens
cttagacctgacatctggctatcacacagacagaatccaaatgcatgtgcttgttctacg

SEQ ID NO: 10005 - DNA, 60 bp, Homo sapiens
gttacactgtattgcaagatagcacacagaagttggctgcgtcaagtagaggcgacattt

SEQ ID NO: 10006 - DNA, 60 bp, Homo sapiens
caggggatcttctgccggctgccccagaggacagtgggtggagtggtacctacttattaa

SEQ ID NO: 10007 - DNA, 60 bp, Homo sapiens
gacagcaacccctttgatgccactgcagggtatcgtagtctgacctatgaagaggttcta

SEQ ID NO: 10008 - DNA, 60 bp, Homo sapiens
ttgatgctcaccctggttcaggcccagaggtccaagctatactgtgcaggacatggccag

SEQ ID NO: 10009 - DNA, 60 bp, Homo sapiens
tgcgtccaggacttgcagagccctacgtgaaggtccagctcatgctgaaccagaggaagt

SEQ ID NO: 10010 - DNA, 60 bp, Homo sapiens
tcctcctccacgttggacaattatgtcaaaaacaggattgtctacatggatgatctcact

SEQ ID NO: 10011 - DNA, 60 bp, Homo sapiens
agaagatggtgactggagtggccagtgccctgtcctccagataccactgagctcactgcc

SEQ ID NO: 10012 - DNA, 60 bp, Homo sapiens
ttgggctacgtctggcttgcatggtctcccaagggaatcagccccatcaacaaagttcaa

SEQ ID NO: 10013 - DNA, 60 bp, Homo sapiens
ccgtcctaccctgggctcacatggggcctgtgcccacccctcttgagtgtcttggggaca

SEQ ID NO: 10014 - DNA, 60 bp, Homo sapiens
ccccagttgctcaggtgcttgaccaagtactcccagatccctagtgtcctggtcatgaac

SEQ ID NO: 10015 - DNA, 60 bp, Homo sapiens
atagtcatgatcccagcgagacccagagatgcctgtaatggtgagactttggatccttcc

SEQ ID NO: 10016 - DNA, 60 bp, Homo sapiens
ctcgctgacacagagaaaccccaacgcgaggaaaggaatggccagccacaccttcgcgaa

SEQ ID NO: 10017 - DNA, 60 bp, Homo sapiens
acacgttagacagaacattggccctgtggctgcttttcgaaatgcagtgtttgtcaaaca

SEQ ID NO: 10018 - DNA, 60 bp, Homo sapiens
gtcgtcccttcagaatgtgagaaatattgcggtaccaaggttggctgtaccaacatcgcc

SEQ ID NO: 10019 - DNA, 60 bp, Homo sapiens
atgtctctgaccaagactgagaggaccatcattgtgtccatgtgggccaagatctccacg

SEQ ID NO: 10020 - DNA, 60 bp, Homo sapiens
gcatcgccttgttccaagggctttccaacatcgccttcaactgcatggtcttgggtaccc

SEQ ID NO: 10021 - DNA, 60 bp, Homo sapiens
cctcctggctgtggtggtctttattcacggctactatgcctgaactctatctgagccatt

SEQ ID NO: 10022 - DNA, 60 bp, Homo sapiens
acctgaaggacttcgtgtcagcccttcctgacaagctagaccatgaatgtgcagaaggcg

SEQ ID NO: 10023 - DNA, 60 bp, Homo sapiens
ctgctttctgttcacttcatcagcaagagtcaggacggggatagcatctcgctataaccg

SEQ ID NO: 10024 - DNA, 60 bp, Homo sapiens
agtatggggcatggctcagcctggtggaccgtgcccaggtgaaggcttttgtggatctaa

SEQ ID NO: 10025 - DNA, 60 bp, Homo sapiens
taaatcagcaaggatgagcagaaaatgagctgagcttagctctgccctggaacctaccag

SEQ ID NO: 10026 - DNA, 60 bp, Homo sapiens
tcagctgggagcatcattctcctgctttgtacatagggtgtggtcccctggcacgtggcc

SEQ ID NO: 10027 - DNA, 60 bp, Homo sapiens
agggctgggtaggcaggtgtcttggacccacctgaaatgcagtatcatctgatttactct

SEQ ID NO: 10028 - DNA, 60 bp, Homo sapiens
agacagcagggtctgagagaggagccacagtccctaatgacacccactcctagccctgag

SEQ ID NO: 10029 - DNA, 60 bp, Homo sapiens
aacagcagggcttataccaacggggaatctgaggtggccatcaaaatcccaattaagcac

SEQ ID NO: 10030 - DNA, 60 bp, Homo sapiens
caaaagcatccaagaaaaacaaggcctgttcaaaaacaagacaacttcctctcactgttg

SEQ ID NO: 10031 - DNA, 60 bp, Homo sapiens
gccaggagaggccaaagaacctttactccaggacacaaatgtgtgacgactgaaatcagg

SEQ ID NO: 10032 - DNA, 60 bp, Homo sapiens
agatgccaagatcctgtgtatcgatgaggccacagcaagtgtggaccagaagacagacca

SEQ ID NO: 10033 - DNA, 60 bp, Homo sapiens
aattgctgttcttgggaacccaaagatactgctgctagacgaagctacgagcgcactgga

SEQ ID NO: 10034 - DNA, 60 bp, Homo sapiens
ctgcacagaatccttggtgaacaggcgaccatgcttttcagctctggaagtcgatgaaac

SEQ ID NO: 10035 - DNA, 60 bp, Homo sapiens
gaaagaggagtcgaggttggatgttggggcttctgcatcaactccgtgttttcctcactt

SEQ ID NO: 10036 - DNA, 60 bp, Homo sapiens
cgccacccacatgccaactgacttgatgcttaataaaactgctgctgcctgtttgattct

SEQ ID NO: 10037 - DNA, 60 bp, Homo sapiens
atcgccagtgaagctgctatggagcaacaggaaactggtgataaagctcagctgaacgac

SEQ ID NO: 10038 - DNA, 60 bp, Homo sapiens
aatgatgaccactggatcgtcgacacagactacgacacgtatgccgtacagtactcctgc

SEQ ID NO: 10039 - DNA, 60 bp, Homo sapiens; identical to SEQ ID NO: 4855

SEQ ID NO: 10040 - DNA, 60 bp, Homo sapiens
tctgtgccacagttaagagggtctggtacccttgcaggacctttgtaggttgtgggaaaa

SEQ ID NO: 10041 - DNA, 60 bp, Homo sapiens
catggctcctcaccaccgagacagttggttttgcatgtctgcatgaaggtctacctgaaa

SEQ ID NO: 10042 - DNA, 60 bp, Homo sapiens
ggatcttcagcagctattccttttgggacactggttgccatattggccctttggttctgc

SEQ ID NO: 10043 - DNA, 60 bp, Homo sapiens
agggtaggaagatggaagaaatagggaaagagcccttttatagcccaccgtagtggtggg

SEQ ID NO: 10044 - DNA, 60 bp, Homo sapiens
ttcgagagcagatggaacgacatctaaatctgtgaataaagcagcaggcctgtcctggcc

SEQ ID NO: 10045 - DNA, 60 bp, Homo sapiens
gtctacctcctctcaccctgccacagattcttcctatcacacagggatgccagttgtatt

SEQ ID NO: 10046 - DNA, 60 bp, Homo sapiens
ggccagagcagacagacctactgcttgaagtaaacattgcaaggaagccaatttgtgcgt

SEQ ID NO: 10047 - DNA, 60 bp, Homo sapiens
agactgtctatcctcaagggagccagacccagtgactccaatggacagccagagggtaca

SEQ ID NO: 10048 - DNA, 60 bp, Homo sapiens
tgcaaaatctgcattgagcagagggaggtgtggaagcgttctggagcgtggttcttcaaa

SEQ ID NO: 10049 - DNA, 60 bp, Homo sapiens
ggccttcacctggtatcacagaaagacaactgggatattggtgttaaggggcatatcggc

SEQ ID NO: 10050 - DNA, 60 bp, Homo sapiens
tctacaggcctgcagcccctaagtgcaaacacagcatgggtccagaagacgtggtctaga

SEQ ID NO: 10051 - DNA, 60 bp, Homo sapiens
tcttgagaggaatgtccccgagttggacaaggaggctgtttctgcacatcagctcatttc

SEQ ID NO: 10052 - DNA, 60 bp, Homo sapiens
tctgtgctacagattgccatggcgtttggcttgggtattggcaccctggtacaggctctg

SEQ ID NO: 10053 - DNA, 60 bp, Homo sapiens
tttcaaccacacgggacaaggaagtatctgcagtcaggccatcatgctcataactgatgg

SEQ ID NO: 10054 - DNA, 60 bp, Homo sapiens
gcatcgtggtaatggtgctgttctcgctcttcgtggattaactttccctgatgccgacgc

SEQ ID NO: 10055 - DNA, 60 bp, Homo sapiens
gggaaaacccttgaagaacaaggcgtggctcacaatgtgaaagcgatggtgcttgaacta

SEQ ID NO: 10056 - DNA, 60 bp, Homo sapiens
ggtaacttctattactgggttgtcaacttctgcgatagcaactaacgggtttgttcgtgg

SEQ ID NO: 10057 - DNA, 60 bp, Homo sapiens
agtgactggtatcactggtttatccacctctgctattgccacaaatggatgtgtcagagg

SEQ ID NO: 10058 - DNA, 60 bp, Homo sapiens
ctggatcctccttctgagcacactgactggaagaagctatggacagccgtcattacaaga

SEQ ID NO: 10059 - DNA, 60 bp, Homo sapiens
cccgtcatactaccagctgagatggtggtgggcataaggagaatttgtgcctataaccct

SEQ ID NO: 10060 - DNA, 60 bp, Homo sapiens
atgacgatcatcacacctcgtgtcgttacctcagccatcggtctagcatatcagtcactg

SEQ ID NO: 10061 - DNA, 60 bp, Homo sapiens
tcatcgtctacatttccagcaacacaggtgacccgagtgacaagcgggacgaagacaaaa

SEQ ID NO: 10062 - DNA, 60 bp, Homo sapiens
acgggcatcagccatcaaggcactggacgtctacttctggatctgctatgtcttcgtgtt

SEQ ID NO: 10063 - DNA, 60 bp, Homo sapiens
catttcttcaatatgtgttgacaaccagccctgtggttctgggtagcaaaggaaatacag

SEQ ID NO: 10064 - DNA, 60 bp, Homo sapiens
agaatacagagagtggaatccggagctcatcaagcccaagaagctgctgaaccccgtgaa

SEQ ID NO: 10065 - DNA, 60 bp, Homo sapiens
cccactggctgcatgtcagggtgtcagatccttaaacgtgtgtgaatgctgcatcatcta

SEQ ID NO: 10066 - DNA, 60 bp, Homo sapiens
ccagtgagctttgggagatcattccctaaaggtatgtgggttgtctgaagtcagaaacat

SEQ ID NO: 10067 - DNA, 60 bp, Homo sapiens
gcagtgtaattgggtgcaaatgtatgatagagttcttggtaaacagaaccagactctgac

SEQ ID NO: 10068 - DNA, 60 bp, Homo sapiens
atttccatcaccatcagcagtgactgggctgaacccagagatccctctaaccaggaggat

SEQ ID NO: 10069 - DNA, 60 bp, Homo sapiens
gcagtggccatagggatggcaaagaggaagtagagatagagtcattaggacttagtgcca

SEQ ID NO: 10070 - DNA, 60 bp, Homo sapiens
aggttcacaactgtatccagaaggagaacaaggactctctccactccaacacagccaacc

SEQ ID NO: 10071 - DNA, 60 bp, Homo sapiens
ttcgtgtgtctgagtctcttcactgagaggatgtgcatccaggggagtcagttcaacgtc

SEQ ID NO: 10072 - DNA, 60 bp, Homo sapiens
catcagctctgttcatgagtgctcagagtccctgctaatgtaattggaagcttggtacac

SEQ ID NO: 10073 - DNA, 60 bp, Homo sapiens
attccttgtttcagttcattcatccttctctcctttccgctcagactgtagagctcggtc

SEQ ID NO: 10074 - DNA, 60 bp, Homo sapiens
gttttcccccactaaatagaaatgagggtccttagtctgtttctgacaatctgttaattt

SEQ ID NO: 10075 - DNA, 60 bp, Homo sapiens
tgctccgtagagacagttcagccagtcatttctgcattggagagacttctcatactttct

SEQ ID NO: 10076 - DNA, 60 bp, Homo sapiens
aaagagagcttaaaacaggcagggggtttaacctggtgggaacgcatggatggaagaccc

SEQ ID NO: 10077 - DNA, 60 bp, Homo sapiens
agccgcaaagtggggctcatgaaccgcgccgtgcaactgctcatcctggcctacgtcatc

SEQ ID NO: 10078 - DNA, 60 bp, Homo sapiens
gctgcctccatttctctagatctgtgctctccgatgtggcagtcagtaaccataggtgac

SEQ ID NO: 10079 - DNA, 60 bp, Homo sapiens
atacagatgtagaaggtgggtagggctacaggggtgggtgatttagggacagccagggtc

SEQ ID NO: 10080 - DNA, 60 bp, Homo sapiens
ctgccaacccactcccacaaccgccaaaagatggagatgctatcaagaagaagtttgtgg

SEQ ID NO: 10081 - DNA, 60 bp, Homo sapiens
catctaagtccccagaggagatgcgaaaactcttcatccagagggccaagaagatcgaca

SEQ ID NO: 10082 - DNA, 60 bp, Homo sapiens
acagatcgcttggatgaagacgggaacactgcacttcactttgctgcaagggaaggccac

SEQ ID NO: 10083 - DNA, 60 bp, Homo sapiens
tggacatctacctctgggtcagctttgtgttcgtgttcctctcggtgctggagtatgcgg

SEQ ID NO: 10084 - DNA, 60 bp, Homo sapiens
ccaaagaagtttctgatagtgtctgcacaacagcaaaccaacatttggtgaggaattagc

SEQ ID NO: 10085 - DNA, 60 bp, Homo sapiens
ctgccttctgcctgtttaatctggtctattgggtctcctacctctacctgtgaggaggta

SEQ ID NO: 10086 - DNA, 60 bp, Homo sapiens
acacagtgcagatacaaacagctgccatatctcacctcagatgaagctatgtgtcaatgc

SEQ ID NO: 10087 - DNA, 60 bp, Homo sapiens
gggttgcccaggcatagttttggccgaaatgctctggaacgacatgtggcgcaaaagaaa

SEQ ID NO: 10088 - DNA, 60 bp, Homo sapiens
ttcacccgcatcctggacagtttgctcgatggttatgacaacaggctgcgtcctggattt

SEQ ID NO: 10089 - DNA, 60 bp, Homo sapiens
actgggcacagctcttcacaccattcattctggtcatttcccccaaaggcatcccagcct

SEQ ID NO: 10090 - DNA, 60 bp, Homo sapiens
ctcctccggatttggaatgacgggaaaatcctttacactttgaggctcaccatcaatgct

SEQ ID NO: 10091 - DNA, 60 bp, Homo sapiens
tttccgaatctccatcaggcgcgctcatagttgtccccattgtctacccacacaaatcct

SEQ ID NO: 10092 - DNA, 60 bp, Homo sapiens
tgtgaagtgaaacctcactcctgtccagtgaccgagccactgcaaagcacagctgatcct

SEQ ID NO: 10093 - DNA, 60 bp, Homo sapiens
caaaataaccggccacactcccaaactccaagacagccatacttccagcgaaatggtacc

SEQ ID NO: 10094 - DNA, 60 bp, Homo sapiens
ccattgaagttaacaacggacttgggaaatctcaggctaagaacaacaagaagcctcccc

SEQ ID NO: 10095 - DNA, 60 bp, Homo sapiens
atgaatgaggtctcaggcggcattggcgataccaggaattcagcaatatcctttgacaac

SEQ ID NO: 10096 - DNA, 60 bp, Homo sapiens
ggagcatgcagctccttttctgaggatgatgacagtgcctctacatctgaagaatcagag

SEQ ID NO: 10097 - DNA, 60 bp, Homo sapiens
tgcccaagcctccacacccacagaccccaaaggtttggctcaactctgagctcctttcca

SEQ ID NO: 10098 - DNA, 60 bp, Homo sapiens
gccgctggggctcctgggcatcctctctggggagctgctggccgcttagcgttgtttgat

SEQ ID NO: 10099 - DNA, 60 bp, Homo sapiens
ctaatgggttcgtttcagaagtgcctcactgttctcgtgacctggagttaaccggaacag

SEQ ID NO: 10100 - DNA, 60 bp, Homo sapiens
cctggtcacgtctgttacctgatgggacgacaggtttcatcaaccagaaaggaattgatt

SEQ ID NO: 10101 - DNA, 60 bp, Homo sapiens
cgatgagatgctcaacaggaccaaggatgcagagacctacttcaactacaagtatgggtg

SEQ ID NO: 10102 - DNA, 60 bp, Homo sapiens
ctccatccgccgtctgtccacccgcaggcggtagaaacacctggagcgatggaatccggc

SEQ ID NO: 10103 - DNA, 60 bp, Homo sapiens
cccaactcacccaagcagcaacgagcaacaatcggaaaccaaatactggagagaaaacca

SEQ ID NO: 10104 - DNA, 60 bp, Homo sapiens
tcgccgctcaacctgctgctgcttggcctctgcatcttcctgctctacaagatcgtgcgc

SEQ ID NO: 10105 - DNA, 60 bp, Homo sapiens
tggtcatgaggaacctactgaagccgcagacaacgccagttatccaggctctgcgaagga

SEQ ID NO: 10106 - DNA, 60 bp, Homo sapiens
gcgcatcctgctcgcggtcaatgggaaagtcttcgacgtgaccaaaggcagcaagttcta

SEQ ID NO: 10107 - DNA, 60 bp, Homo sapiens
gagcctgaccagagacaacctctccggactttcagcagatatgcaggactacggtttaat

SEQ ID NO: 10108 - DNA, 60 bp, Homo sapiens
catcaccataacatagcagtgaatcagtctcagtggtattgctgatagcagtattcagga

SEQ ID NO: 10109 - DNA, 60 bp, Homo sapiens
ctcctatcaacctatgaggacttcagattggttttaggacaggagcaagcaatggagtct

SEQ ID NO: 10110 - DNA, 60 bp, Homo sapiens
ggaagtttgcagaaattgttcagctgtattatgctgtcgtatggctccactgcagaaagc

SEQ ID NO: 10111 - DNA, 60 bp, Homo sapiens
agggcgaggataccaggaacatcaccaataaatcggactgtgccgaggccagttaccggt

SEQ ID NO: 10112 - DNA, 60 bp, Homo sapiens
agcaactggtacaactggtcacctactcttgcccctctgtaaatcaagccaactgtgacc

SEQ ID NO: 10113 - DNA, 60 bp, Homo sapiens
atcctcaccgtcatgctccagttctttgtgcacttcctgagccttgtctacctgtaccgt

SEQ ID NO: 10114 - DNA, 60 bp, Homo sapiens
ggtgctgtcacaccttgtaacgtcagatacaaatgtctctatccaatttcatgagttcca

SEQ ID NO: 10115 - DNA, 60 bp, Homo sapiens
gtcttttcaggcatctaccgcaacattatcttctgctctgtagtcttgggcacattcatc

SEQ ID NO: 10116 - DNA, 60 bp, Homo sapiens
cacctatgaagctattccctaaataaggcatttcccaagttagtcgctacctaatcagcc

SEQ ID NO: 10117 - DNA, 60 bp, Homo sapiens
aggctcgtagggagcaggatcatgccagaaatagggatggaagtgcatcctctgggaaaa

SEQ ID NO: 10118 - DNA, 60 bp, Homo sapiens
tattgtgacaatcgcgctgctcactttcctgctccacctgggcattgaaaccaaaacctg

SEQ ID NO: 10119 - DNA, 60 bp, Homo sapiens
tcaatgcatctacgagtcggagaacccaaggattgccagcaacaaccagaaatcaggagg

SEQ ID NO: 10120 - DNA, 60 bp, Homo sapiens
acagacctgcccaagatccccataccgagtgtgcctacgttccagccgtctacacctgtc

SEQ ID NO: 10121 - DNA, 60 bp, Homo sapiens
agcagagaaaggtgaaagccaggttgaccattgctgccgttctgtacttgcttttcatga

SEQ ID NO: 10122 - DNA, 60 bp, Homo sapiens
agccagagccaggatgtagccaatctctctagccctagtcgcgtgtcgttgtccaatgct

SEQ ID NO: 10123 - DNA, 60 bp, Homo sapiens
gtctgctccatccatgtgtctgtttgggggtctatctctccatccctctgttggtgctgt

SEQ ID NO: 10124 - DNA, 60 bp, Homo sapiens
tagcatagcttttgtcacggtcactagctgatccctcaggtctgctgcaaacacagcatg

SEQ ID NO: 10125 - DNA, 60 bp, Homo sapiens
ctcctttccattcccctgggtgtctcatgctgctctttgactgtttcagcttgaacatgc

SEQ ID NO: 10126 - DNA, 60 bp, Homo sapiens
gccaccagtcatccagaatttccttcctgaatctccatgctcatatgcaatgtctacatc

SEQ ID NO: 10127 - DNA, 60 bp, Homo sapiens
caagtctgctacctcttcatccccaggaagcccactacatagtttggaaacatcactctg

SEQ ID NO: 10128 - DNA, 60 bp, Homo sapiens
cttgatatctacctgtctgttcagccaggacaacaaatggcttccaagcctgaagaatac

SEQ ID NO: 10129 - DNA, 60 bp, Homo sapiens
actaggtgctgaatctcctgcaaaactggctgcctggaggccctgagccacccagatctg

SEQ ID NO: 10130 - DNA, 60 bp, Homo sapiens
agtccggtgagaggacacgatctttacctgcacaatcagactgtaagcccagcagagaac

SEQ ID NO: 10131 - DNA, 60 bp, Homo sapiens
agcaccttgtgcccttgccagtgaacgcagggtttgccattgctaccaagcaagcaccac

SEQ ID NO: 10132 - DNA, 60 bp, Homo sapiens
tgacatccgcaggagcctggaggagattggcatccagaactattccacaaccagcagctg

SEQ ID NO: 10133 - DNA, 60 bp, Homo sapiens
taagcagctgtatcccctttgccatggtgatagcagaccattcacatgggagcttctggt

SEQ ID NO: 10134 - DNA, 60 bp, Homo sapiens
gtcctcagatcgactggatggttcctgtcacgttacaactgctagtttggacggagaaac

SEQ ID NO: 10135 - DNA, 60 bp, Homo sapiens; identical to SEQ ID NO: 4855

SEQ ID NO: 10136 - DNA, 60 bp, Homo sapiens
gggcctcttgagtaggccactttggaagcaaactgattaaacagcaccatcaagtccgta

SEQ ID NO: 10137 - DNA, 60 bp, Homo sapiens
agtatttctcaggccttctccatcctcctcgtacttcagctccctcctcaactgggactt

SEQ ID NO: 10138 - DNA, 60 bp, Homo sapiens
cccgtttgctacatctttttttctatgaaatatgtgaatggcaataaattcatctagact

SEQ ID NO: 10139 - DNA, 60 bp, Homo sapiens
ctgtgcctgatgtcgggacagccctgctgtcagatgaaaacagaatgacacgtaaaatcc

SEQ ID NO: 10140 - DNA, 60 bp, Homo sapiens
gcatgccagcctgaaaattccaaatctagcctctgaatgtcttggctccatctcttcaga

SEQ ID NO: 10141 - DNA, 60 bp, Homo sapiens
gaaattgcagatcatgagtgaatacctgtgggatccagagagaaggatgtttctggcccg

SEQ ID NO: 10142 - DNA, 60 bp, Homo sapiens
gaagaacgagaagaagtccctcaaccagagcctggccgagtggaagctcttcatctacaa

SEQ ID NO: 10143 - DNA, 60 bp, Homo sapiens
tctgagagttccagggcgtaaatgccgggcaatttcaggatcagcaggtccacaaaattc

SEQ ID NO: 10144 - DNA, 60 bp, Homo sapiens
ttgggcttaccttgcccgtcagttccctgccaaatcatccccaaagtggtttggagcaac

SEQ ID NO: 10145 - DNA, 60 bp, Homo sapiens
gttctaagaacagagggagaaccactgcacacaccaagtgttggtatgagggaaacaacc

SEQ ID NO: 10146 - DNA, 60 bp, Homo sapiens
ttcccagcagttgtgtggcgtaaagaaactcccatggtcatgtgactccagatacttctg

SEQ ID NO: 10147 - DNA, 60 bp, Homo sapiens
gggtctaatcaggcctgtgtctgcctccttcttgaatagcccagtgaattcatctaaaca

SEQ ID NO: 10148 - DNA, 60 bp, Homo sapiens
aatggaagacctaaggcagacaggaaggaagcacaaaagacaagcattgggtcagaccca

SEQ ID NO: 10149 - DNA, 60 bp, Homo sapiens
tttggacgtcagcctgtggatttgatacgacttaaccacgtcagaggaaggactttggca

SEQ ID NO: 10150 - DNA, 60 bp, Homo sapiens
agagtacaaggcccgaagggtagtgatggtgctaaactcaacatggatttggctgagctc

SEQ ID NO: 10151 - DNA, 60 bp, Homo sapiens
tcgccgccatgacggggctagcactgctctactccggggtcttcgtggccttctgggcct

SEQ ID NO: 10152 - DNA, 60 bp, Homo sapiens
cagtctcactccagtgcaacacacttcagttttctgggaactcctgatggaaagtggctg

SEQ ID NO: 10153 - DNA, 60 bp, Homo sapiens
ggtcttcccattgtccagccatcgaagcagaaacagtaacagaggatcagtggtcccaaa

SEQ ID NO: 10154 - DNA, 60 bp, Homo sapiens
ccttcttgctctgcctttgagttgttccgtgatcattctgaataagcatttgcctttata

SEQ ID NO: 10155 - DNA, 60 bp, Homo sapiens
gtcgccctcatcctctccacaaagtagaccctctccgagcccaccagccacagaatatta

SEQ ID NO: 10156 - DNA, 60 bp, Homo sapiens
atagatgcactatggccctgaagaacagccaaaggtgcacaggttcgaagacaccagact

SEQ ID NO: 10157 - DNA, 60 bp, Homo sapiens
ataaacctagcatggcgcccctatgagcgggcgcagtgattataggctttcgctctaaga

SEQ ID NO: 10158 - DNA, 60 bp, Homo sapiens
tttagatgccctcacgaatatgaagcttagcacagctctagttacattcttatgatatgg

SEQ ID NO: 10159 - DNA, 60 bp, Homo sapiens
ggattcccatttaatacagatgaaataaatttccccatggacaacctttgttttgtgggc

SEQ ID NO: 10160 - DNA, 60 bp, Homo sapiens
ttaagaccacctcccttcctatgtctctcagcagcacgttggggcacacttgttcatctt

SEQ ID NO: 10161 - DNA, 60 bp, Homo sapiens
ggaacgcgtgctgggtttctgccaccttttcctgccggacgagcagttccccgaaggctt

SEQ ID NO: 10162 - DNA, 60 bp, Homo sapiens
attctttcttcagcccatgtaaacatgaaaataagggttaaaaatgacttcattatgggg

SEQ ID NO: 10163 - DNA, 60 bp, Homo sapiens
cacagaccatcatgaaggctcgtttaaagggagcacagacaggtcgaaacctcctgaaga

SEQ ID NO: 10164 - DNA, 60 bp, Homo sapiens
ttctgtcttagaccaggaggacagagtttgctttcatattttccctgtaagtaagagggc

SEQ ID NO: 10165 - DNA, 60 bp, Homo sapiens
ccagagttgcatacagaccaatttctgcatcagtgttatctcgaccagaggctagtagga

SEQ ID NO: 10166 - DNA, 60 bp, Homo sapiens
ttagttccatttgtaaaagggttactctcatactccttatgtacagaaatcacatgaaaa

SEQ ID NO: 10167 - DNA, 60 bp, Homo sapiens
atctactccttccactgcgagtatgtcagcagcctgagcaagaagggtagtctcctcgtg

SEQ ID NO: 10168 - DNA, 60 bp, Homo sapiens
tcatagccctcagcccttccctcgtttccaggcctctccccaggcttgccatcagccttc

SEQ ID NO: 10169 - DNA, 60 bp, Homo sapiens
ggttggcacgttggatgtcttggttggcttgtcagatgaactggctaaactggatgcatt

SEQ ID NO: 10170 - DNA, 60 bp, Homo sapiens
gcgtgttttcctttgccttttttgcactttggtgaattacgtgcctccataacctgaact

SEQ ID NO: 10171 - DNA, 60 bp, Homo sapiens
agcagcagaagaaaattcagatgtccaatttgatgaatcaagcgagactcaaagtcctca

SEQ ID NO: 10172 - DNA, 60 bp, Homo sapiens
tgtggctcacctgcctgtccggggtgtagtacgctgtcctagcggctgcccagttctcct

SEQ ID NO: 10173 - DNA, 60 bp, Homo sapiens
agaacgatgatcgtcacctctgtgcctgagttctccctgttgtctcaaagcggtacccat

SEQ ID NO: 10174 - DNA, 60 bp, Homo sapiens
ccagatcaccgatgagatggcagagcagctcatgaccttggcctatgataatggcatcaa

SEQ ID NO: 10175 - DNA, 60 bp, Homo sapiens
agatgatctccatgaaggacttgctggcagccaacaaggcctcgttggccatcctgcaga

SEQ ID NO: 10176 - DNA, 60 bp, Homo sapiens
atatgcggttgattgttccaccaggtttccaacaggggtctcttttagaccacggtgtcc

SEQ ID NO: 10177 - DNA, 60 bp, Homo sapiens
acacatggactcacgcatcggctggctgcacaacctgggcgaccagataggcaaacccta

SEQ ID NO: 10178 - DNA, 60 bp, Homo sapiens
catgtgcagttgtcagttggtacatctaaactccctccatcctgactcacgtggacttag

SEQ ID NO: 10179 - DNA, 60 bp, Homo sapiens
atgcactggaagaactgccagaatgtggctcatgctctgagtactgttcctgtacctgac

SEQ ID NO: 10180 - DNA, 60 bp, Homo sapiens
tagaactcagcgttgccaggtgtgctgccatctgctgttcggcccaacctcagagtgaag

SEQ ID NO: 10181 - DNA, 60 bp, Homo sapiens
gggtttccgctctgggctctggcaagttgaacaatcctagccattgacaatcgtgatagt

SEQ ID NO: 10182 - DNA, 60 bp, Homo sapiens
cccagccactctgatatactggcttctgacttatgggctgcttactagtctcaagagata

SEQ ID NO: 10183 - DNA, 60 bp, Homo sapiens
tgtggggacctgagagcacctggaatttgttggaagcagatcagagcacacgtacgaaaa

SEQ ID NO: 10184 - DNA, 60 bp, Homo sapiens
cagcccatcttcctaaaagggaccagcttatggaaggctcgaccttgaggggaaagtttt

SEQ ID NO: 10185 - DNA, 60 bp, Homo sapiens
tgccattgtcagcagctgtgaaaaccctgaggagaccaccacttccgccacacatgaata

SEQ ID NO: 10186 - DNA, 60 bp, Homo sapiens
gtgagattaggggttgggaaggaaaatcccttttcccccagtggcctagggagtttccaa

SEQ ID NO: 10187 - DNA, 60 bp, Homo sapiens
cctcatggggaatgtctgggaagctggggacattgctatgcaaatgtgtgaatcttagtc

SEQ ID NO: 10188 - DNA, 60 bp, Homo sapiens
atttgccaccaaagcttcaaaagatggctggaggagcagctaggatggaagggaaccttc

SEQ ID NO: 10189 - DNA, 60 bp, Homo sapiens
tcctgggttacacagctttaccgaccaccagaggctgatgaaacgccggaagtccgttta

SEQ ID NO: 10190 - DNA, 60 bp, Homo sapiens
gtgaatacttggaagtcgtttcaggacatggggcatagaaactgaggagtagctgagagg

SEQ ID NO: 10191 - DNA, 60 bp, Homo sapiens
ccatggtttacactgtcacctggctgttcttcggcttcatttggtggctcattgcttata

SEQ ID NO: 10192 - DNA, 60 bp, Homo sapiens
cgccatccaggtttaaccctgcaagctgtttccacatcagaactcccttcaaacacaaag

SEQ ID NO: 10193 - DNA, 60 bp, Homo sapiens
tggccagaagcatcgctccccttcaaccaaccgcgttgatggacacccactgtgtgccag

SEQ ID NO: 10194 - DNA, 60 bp, Homo sapiens
actgactcttcaaggacgtgccctctttgctctcagaaccttggggaaggtggctggact

SEQ ID NO: 10195 - DNA, 60 bp, Homo sapiens
cccagccaacagcatgaactcagagcattgttttagggttggaggaggaacacgctttct

SEQ ID NO: 10196 - DNA, 60 bp, Homo sapiens
tctggcttcagctatcagggcaccctccccagggattggaaacggatgacgggcctctag

SEQ ID NO: 10197 - DNA, 60 bp, Homo sapiens
gctggggtttgccatgatgggcttctcagtcctaatgttcttcttgctcggaacaaccat

SEQ ID NO: 10198 - DNA, 60 bp, Homo sapiens
gtctccaagcctctgtcttttctgggatgtggtattggtgctttgtgtctagggcagagt

SEQ ID NO: 10199 - DNA, 60 bp, Homo sapiens
cccaacttagccacgtctggcctgtgtccttgggcagtcacactacctctctgattttgt

SEQ ID NO: 10200 - DNA, 60 bp, Homo sapiens
acttcagaagcaacatttctggcctgacctggaaggtgaaggtgaaggtgagaccctgta

SEQ ID NO: 10201 - DNA, 60 bp, Homo sapiens
gcttgctgtgtgaattgacaagcacttttactgacaaatggtgaggctcagtcagaacct

SEQ ID NO: 10202 - DNA, 60 bp, Homo sapiens
aacgacccattcaacgtctacatcgagtccgatgcctggcaagagaaggacaaggcctat

SEQ ID NO: 10203 - DNA, 60 bp, Homo sapiens
ctgccaattgcaccacagctaaccaaaactgcgttaataagagcaagctactgaccgatg

SEQ ID NO: 10204 - DNA, 60 bp, Homo sapiens
cagacacagctaacgcagaatgcagtcagttgtccatacctcccctctaatttgctcaag

SEQ ID NO: 10205 - DNA, 60 bp, Homo sapiens
cagtaatgaggactttagagaggaaaacttgaaaacagccaactgtaccttggctaacac

SEQ ID NO: 10206 - DNA, 60 bp, Homo sapiens
gccactcaacatcattgacatcctggcgctcctgccgttctacgtgtcgctgctgctggg

SEQ ID NO: 10207 - DNA, 60 bp, Homo sapiens
tcaagaacgagatggacttctggaaggtggacctcaagttcctggacgactgttgcaaga

SEQ ID NO: 10208 - DNA, 60 bp, Homo sapiens
ctgtcgtccacaggggatgggatttctgattcagtatggaccccttccaataagcccatt

SEQ ID NO: 10209 - DNA, 60 bp, Homo sapiens
ccaagctaacatctgacgtccagacatgaagagatgccagtgccacgaggcaaatccaaa

SEQ ID NO: 10210 - DNA, 60 bp, Homo sapiens
gagccagcactttctttctgatgatgcttgttgaacggtccactttctttgatgagtgga

SEQ ID NO: 10211 - DNA, 60 bp, Homo sapiens
agttgccaatatgcgcaaaagcctcctcattggctgccaggtgacaggaaaactgcttca

SEQ ID NO: 10212 - DNA, 60 bp, Homo sapiens
tgacttaatcacagaactcaatgaccggagcgaagacctggagaagcagattggcagcct

SEQ ID NO: 10213 - DNA, 60 bp, Homo sapiens
gtaagaaaggcagcggatcgtctggaggaagagatagaggaacatgcttttgacgacaat

SEQ ID NO: 10214 - DNA, 60 bp, Homo sapiens
gaaacttaaaggaattgacggaattccagcaatatccacgcgaaccatctcggcctagag

SEQ ID NO: 10215 - DNA, 60 bp, Homo sapiens
actctccacaccacagtactcagagtgacacatgtccgctggcccaggaagaaattttag

SEQ ID NO: 10216 - DNA, 60 bp, Homo sapiens
ctgcagcgatacatcgaagggctcaagaagcgccggagcaagaggctgtacgtgaattaa

SEQ ID NO: 10217 - DNA, 60 bp, Homo sapiens
ggggtaatttctgtgcacttacaacaagctgagtgttcatgttccatggtgggctgtgca

SEQ ID NO: 10218 - DNA, 60 bp, Homo sapiens
gcttatatgctgaagctcacagaatgggcttcttgcctgacagcaagtcaaagaatgagt

SEQ ID NO: 10219 - DNA, 60 bp, Homo sapiens
tgcgtggatggccctgcaaaccattgagcgtaggatttgttgcattatgctagagcacca

SEQ ID NO: 10220 - DNA, 60 bp, Homo sapiens
cactcatttcttggggtcgtattcctgatttcagaagaggatcataactgaaacaacata

SEQ ID NO: 10221 - DNA, 60 bp, Homo sapiens
tcaagttttgacggtttatgctgggcactgccagactgaaccagagctggaacacaataa

SEQ ID NO: 10222 - DNA, 60 bp, Homo sapiens
cctgtgcccagtacagaaaggtgttactaaccagtcttttgaatcacttagcagcttgct

SEQ ID NO: 10223 - DNA, 60 bp, Homo sapiens
gtccaagtgcaatcgccttacttgccatacaaatgctcctaggcctcatgctagaggctt

SEQ ID NO: 10224 - DNA, 60 bp, Homo sapiens
tacgatcaagacaccttttgtccagacagctcccttagcgttgcctggaaaagccacaga

SEQ ID NO: 10225 - DNA, 60 bp, Homo sapiens
acaagaacaagcggcaggatgagctgattgtcctcaacgtgagtgggcggaggttccaga

SEQ ID NO: 10226 - DNA, 60 bp, Homo sapiens
cataagcaaatgagagattcgatcagtgtgcctgaaaccttactacaagggaccttcagg

SEQ ID NO: 10227 - DNA, 60 bp, Homo sapiens
ccgcagacagtgatggaaatagacgggctcctgggaaacaagccgcattccaagaagtag

SEQ ID NO: 10228 - DNA, 60 bp, Homo sapiens
cacaaagacttcaacaattgcacatcttcattctcccaactgagtgtagtatgtggagca

SEQ ID NO: 10229 - DNA, 60 bp, Homo sapiens
cccctatggttctaatcagcgttatccgggttctgatgtcagaatcctgggaacctgaac

SEQ ID NO: 10230 - DNA, 60 bp, Homo sapiens
tacttgaactcactccctcacggggagagagaccacacgcagtattgagctgcctgagtg

SEQ ID NO: 10231 - DNA, 60 bp, Homo sapiens; identical to SEQ ID NO: 4855

SEQ ID NO: 10232 - DNA, 60 bp, Homo sapiens
acatctccaagatgcacatgatcctgtatgacctgcagcagaatctgagcagctcacacc

SEQ ID NO: 10233 - DNA, 60 bp, Homo sapiens
tggcttacccaggatggaaacactgcagttcttacttgcattcccactgcctttcatggg

SEQ ID NO: 10234 - DNA, 60 bp, Homo sapiens
cagtgtgggctacatagtcctttgcagtctgacaatgccaccgacagtcctaagagctct

SEQ ID NO: 10235 - DNA, 60 bp, Homo sapiens
cccagcactgtccccatggagctggtggctgacaaagatgtagtttccatcagtcaataa

SEQ ID NO: 10236 - DNA, 60 bp, Homo sapiens
ggccactgattcctttgagtctcacaaaaccctacttaggtcatcagggcaggagttctc

SEQ ID NO: 10237 - DNA, 60 bp, Homo sapiens
caacatgcgcttcatgcagttccgcgccaaggacagctactctctggctctttccaaact

SEQ ID NO: 10238 - DNA, 60 bp, Homo sapiens
cagttatctgggagctgatggttcagtcactgtattacccaaatctttcctgccagctgc

SEQ ID NO: 10239 - DNA, 60 bp, Homo sapiens
atcagagccacagacagaggagcagcctggccaaaatcaacatcgtctaccaggagctca

SEQ ID NO: 10240 - DNA, 60 bp, Homo sapiens
ctcccaccactggaactggaccttcgtcatcagcaccctgctcttctgcctcatcgcccg

SEQ ID NO: 10241 - DNA, 60 bp, Homo sapiens
ggtggactttgatatgacaacaacccctccatcacaagtgtttgaagcctgtcagattct

SEQ ID NO: 10242 - DNA, 60 bp, Homo sapiens
aactgattcacctggcagagacctaccccatccacatgcacagccagctggaccacctta

SEQ ID NO: 10243 - DNA, 60 bp, Homo sapiens
ggaagggctaggcaagtcatggtggatctgcggaaaacctgcttcctcgtcgtggagcac

SEQ ID NO: 10244 - DNA, 60 bp, Homo sapiens
agacctccatcagcatgaggaaggaaaccctggacagacttgggggcgattatggcgact

SEQ ID NO: 10245 - DNA, 60 bp, Homo sapiens
ctgaacaagaggatttcctcacatcatttccttgtgtctggacatcaggggtaacaactg

SEQ ID NO: 10246 - DNA, 60 bp, Homo sapiens
ctttgatgaagtacagtctgagttaccatcatgcacaagtagaactgctcttggacttgt

SEQ ID NO: 10247 - DNA, 60 bp, Homo sapiens
gttcagtgactgtaaactctatgaaaccagaaaccgaatctgcctcttgctgggatctct

SEQ ID NO: 10248 - DNA, 60 bp, Homo sapiens
ttttaacatagagaactgtcaccctgaggtaacagggtcaactggcgaagagcaggccag

SEQ ID NO: 10249 - DNA, 60 bp, Homo sapiens
ctttcaccaataaagaggccttccttgatgttgattccagtccagaagggtctgggactg

SEQ ID NO: 10250 - DNA, 60 bp, Homo sapiens
ccatgtcaccacctgaacattccccaaacagagaaggaacccagcatctcagggccactg

SEQ ID NO: 10251 - DNA, 60 bp, Homo sapiens
agggccttttgtggattgacagtagtcccctccgtaggagctcacagtctagattagaag

SEQ ID NO: 10252 - DNA, 60 bp, Homo sapiens
ttttggacagtgacccatgatatctgccttcgtttgcccctctgactgttggaatcccac

SEQ ID NO: 10253 - DNA, 60 bp, Homo sapiens
atgtatacaagcattgggaggattcgatctgctaagtttgttggaaaagatctggcagag

SEQ ID NO: 10254 - DNA, 60 bp, Homo sapiens
ggtccgccttcctatgtctcattttggtagccactgatgccagcttcttggttcaatact

SEQ ID NO: 10255 - DNA, 60 bp, Homo sapiens
gtgggagatgcgttgtatgggactggaagcaagaggttcattcaaagagaaactcatggg

SEQ ID NO: 10256 - DNA, 60 bp, Homo sapiens
tcctctatccagaggcattctttgggaagtagagtcaagccactgattcatgggaggagc

SEQ ID NO: 10257 - DNA, 60 bp, Homo sapiens
aggattcctcctcaacatcattggagtcctgatcatcgcactggccatcaacagctgggg

SEQ ID NO: 10258 - DNA, 60 bp, Homo sapiens
ttgacaaagctaaggaaaagtcacctattcaaagccagatctaataccacttaccacctc

SEQ ID NO: 10259 - DNA, 60 bp, Homo sapiens
tctcatcatctctggtgtttccaaggtgcccattgctcaggacgagttggcgctatccct

SEQ ID NO: 10260 - DNA, 60 bp, Homo sapiens
aagccggaaagcccgatttgggagtgagaagccttaagagaagcagcgaaagcagatctg

SEQ ID NO: 10261 - DNA, 60 bp, Homo sapiens
tggctagtgtcaccaaggacacagcgtccgactcccctgcaggaattgacaaccctgtgt

SEQ ID NO: 10262 - DNA, 60 bp, Homo sapiens
gcattagtgctgaagcatattgacttgaggaaaacgccttccttggagtttggcatgatg

SEQ ID NO: 10263 - DNA, 60 bp, Homo sapiens
caacagacacagtctgacagcagacacaagtgagaggcaagccaaggagattctgattcg

SEQ ID NO: 10264 - DNA, 60 bp, Homo sapiens
gccacctagaaaggggcccattcagcctcgtctctttacagaagtagttttgttcatgaa

SEQ ID NO: 10265 - DNA, 60 bp, Homo sapiens
agacccttggaaatgccaccatggagaaatgcaaccacatctttgtggacactggcctac

SEQ ID NO: 10266 - DNA, 60 bp, Homo sapiens
ccaaactctggaaatgttcctgaccacctaagccctcaacaacgtaatgcctgtatgtgc

SEQ ID NO: 10267 - DNA, 60 bp, Homo sapiens
cccaatggtggaaaggaagatttacagtctagcggctaagtacctcctacacatttccca

SEQ ID NO: 10268 - DNA, 60 bp, Homo sapiens
gacatccctgtgagcagatacaatagccaatgcaagaatctgtgtgttccttgctgtacg

SEQ ID NO: 10269 - DNA, 60 bp, Homo sapiens
ccttctactctgtgtacttcatttgcattcctcctaccagtagcaaatccacccaatgct

SEQ ID NO: 10270 - DNA, 60 bp, Homo sapiens
gcaaaaggcggtgagtgtgtctgagttacttgcagatcttggtggtcagctgggtctatt

SEQ ID NO: 10271 - DNA, 60 bp, Homo sapiens
gctgggaacagtgaatggtgggccgcagcattggcatgatgggccaggggtcccacaggc

SEQ ID NO: 10272 - DNA, 60 bp, Homo sapiens
ggggttgctgactacatacccttcaaccacgagcacatcacagccaatttcacacagtac

SEQ ID NO: 10273 - DNA, 60 bp, Homo sapiens
gagctggtagttacgttgtccgcaatggagaaaacttggaggttcgctggagcaaatact

SEQ ID NO: 10274 - DNA, 60 bp, Homo sapiens
agaagccacccatgagatgtcttttccttctccatcatcttagagccaagttatatgttc

SEQ ID NO: 10275 - DNA, 60 bp, Homo sapiens
gaacctgacaagcactcactcctggtgggagacttcagggaagatgatgacactgcatta

SEQ ID NO: 10276 - DNA, 60 bp, Homo sapiens
tctgatagactgagctccttccaccagaaggcactgcctgcaggaagaagatgatctgat

SEQ ID NO: 10277 - DNA, 60 bp, Homo sapiens
ggacaaatggcatcacttatgcctccgttgcccttgccaccagcaaagcccttgttaagt

SEQ ID NO: 10278 - DNA, 60 bp, Homo sapiens
gtactttttagagcgactgccggaagtgactgcggacgaatcggcgtttgccgaggctgg

SEQ ID NO: 10279 - DNA, 60 bp, Homo sapiens
cccaacaagaaggtctgcattgaatctgagcacagcatggacactctgcttgcaaccctg

SEQ ID NO: 10280 - DNA, 60 bp, Homo sapiens
tgactcccggactaacgtggatctcaagaatgatcagacgcccagtgaggtcctcatcat

SEQ ID NO: 10281 - DNA, 60 bp, Homo sapiens
acaccacagggatggcgagaagtatttgttgacattgatccacaggtttctgataaactg

SEQ ID NO: 10282 - DNA, 60 bp, Homo sapiens
cagtaacatacccaacgtagcatggtaagggatggagttcatataaaacccagacagttc

SEQ ID NO: 10283 - DNA, 60 bp, Homo sapiens
tgagagacttaaacctaatcacacgataatcacactaaatgtaaatggtccaaatacccc

SEQ ID NO: 10284 - DNA, 60 bp, Homo sapiens
ctagtgacaagctcctggtcttgagatgtcttctcgttaaggagtagggccttttggagg

SEQ ID NO: 10285 - DNA, 60 bp, Homo sapiens
gcttagcggggatgtctggaacattgataacaacttctgaggccctggggatcctcacat

SEQ ID NO: 10286 - DNA, 60 bp, Homo sapiens
cctcacatttacgagcttgcggccagtaatgagtgactttgccaatggactaggctggcg

SEQ ID NO: 10287 - DNA, 60 bp, Homo sapiens
tgggcgaagtgtacgatcaagaggtcggtacctcctattacgccgtggctgtggtcagga

SEQ ID NO: 10288 - DNA, 60 bp, Homo sapiens
tggaactggactcgtcttccattgaaaagcggtttgcctttggcttcctgcagcagctgc

SEQ ID NO: 10289 - DNA, 60 bp, Homo sapiens
tttctgcttcccacaggttttcagcattctatcgtcctgttgtgctcagccccaacatcc

SEQ ID NO: 10290 - DNA, 60 bp, Homo sapiens
tagactccaatcacgtgtctcggattgcttgtctcgggtcacccaacactgccaccataa

SEQ ID NO: 10291 - DNA, 60 bp, Homo sapiens
tcttcttcaagtcttggagaaatggtatctgggacattccgagcaactcccacatcaaca

SEQ ID NO: 10292 - DNA, 60 bp, Homo sapiens
tttggagtgattcacctgaaaagcatgtgactgaagccgcttagtgctgtggcctcactg

SEQ ID NO: 10293 - DNA, 60 bp, Homo sapiens
caaagaccattggcattcagaggatgctggacattaactggaactgctacttccaattca

SEQ ID NO: 10294 - DNA, 60 bp, Homo sapiens
caagctactggtgagctggcagacctgattcaacaactcagcgagaagtttggaaagaac

SEQ ID NO: 10295 - DNA, 60 bp, Homo sapiens
gcctctccagagaagtttggtttctttgctgcaagaggaatgaggctctgtaaccttatc

SEQ ID NO: 10296 - DNA, 60 bp, Homo sapiens
ctgccgctctcagaccaagctgatatttgagatcggctttctcaggaaccacatgttcct

SEQ ID NO: 10297 - DNA, 60 bp, Homo sapiens
gaacagtgtccttgacagcattcagtcctgaggattaccagaatgttgctggcacattag

SEQ ID NO: 10298 - DNA, 60 bp, Homo sapiens
gcactgtagcacttaacagattgccatggacaccagttgcgaagggaaatagtgccttac

SEQ ID NO: 10299 - DNA, 60 bp, Homo sapiens
gttcaatgcactaagttccagatcccagaccaagtctgtgtttgagattggactctgcag

SEQ ID NO: 10300 - DNA, 60 bp, Homo sapiens
gctgagatgtgaatgatgcagcaacctggatttggctttgactatagcacaaatgtgggc

SEQ ID NO: 10301 - DNA, 60 bp, Homo sapiens
aaatcaagactcacatccctttcctagtcccccacatccaaagcccctcagcctgccttg

SEQ ID NO: 10302 - DNA, 60 bp, Homo sapiens
attactgtaagaaaggggtgattttgcccatttgggaaccccaagacccttcttttgggg

SEQ ID NO: 10303 - DNA, 60 bp, Homo sapiens
gatctaccctgtgactcagccacttgccccagttcataaccccattagtgtctaagaaga

SEQ ID NO: 10304 - DNA, 60 bp, Homo sapiens
ccacagggtgcaggtaacccttggtctgtaagcaccaccgatccagggatcattgtctaa

SEQ ID NO: 10305 - DNA, 60 bp, Homo sapiens
gccaaaatggagtaatgctttatggtcccttgtaagtagtggagctgctctgtttaggtg

SEQ ID NO: 10306 - DNA, 60 bp, Homo sapiens
cttggttcataaaccagaaaaggtcacatggacggaagcagcaggaagcattcgggatgg

SEQ ID NO: 10307 - DNA, 60 bp, Homo sapiens
cctcccatggatcatcaaggtgaaacactttggtattctttggcaatcagtgctcctgta

SEQ ID NO: 10308 - DNA, 60 bp, Homo sapiens
cccagacacagtcacccacgaagattacgtgaccacaagattgtgatacttgaaggagga

SEQ ID NO: 10309 - DNA, 60 bp, Homo sapiens
ctggactggaccccaggtttcctttacatgagatcccatttctcaccctggactaagaca

SEQ ID NO: 10310 - DNA, 60 bp, Homo sapiens
cacctttccagtggtggcctctggagaaccagtgtctgttcctgacaacttgctgaaaat

SEQ ID NO: 10311 - DNA, 60 bp, Homo sapiens
ctgtccaggatgcttgttcggctcacagaagtggatgtctatgacgaggaggagatcaat

SEQ ID NO: 10312 - DNA, 60 bp, Homo sapiens
atcagccaccttcacctcctggtggtcaaagagtatgagatgcctctgtaccgcaagtac

SEQ ID NO: 10313 - DNA, 60 bp, Homo sapiens
ggggttccaggcatggtttaggccctgttccagcaataagaaccaatctgctgtacaatc

SEQ ID NO: 10314 - DNA, 60 bp, Homo sapiens
gaccctgtggagaaattcgttgttcccactgaaatggactgactgtaacgattgacacca

SEQ ID NO: 10315 - DNA, 60 bp, Homo sapiens
tgtgttcctccctgtgtgacataggtgggataatcacccccttcatagtcttcaggctga

SEQ ID NO: 10316 - DNA, 60 bp, Homo sapiens
caccgtggacgatgtcctggagcatggaggggagtttcactttttccagaagcaaatgtt

SEQ ID NO: 10317 - DNA, 60 bp, Homo sapiens
tgctaacgaggcagagccggtgtttgatgagcgggagggtgtggacgagtacaatgagat

SEQ ID NO: 10318 - DNA, 60 bp, Homo sapiens
ctttcacagaccagaccggcacaggctttgagctcattataaccacactccttgtctcgt

SEQ ID NO: 10319 - DNA, 60 bp, Homo sapiens
agcaccagctctctgtcctcgcaatagcccgagtgcaggcagaacgcagtcatttgtgtt

SEQ ID NO: 10320 - DNA, 60 bp, Homo sapiens
tgaggggctatcaatgtgtagataaagccctgagtaggcaagagcagtgagatccactgc

SEQ ID NO: 10321 - DNA, 60 bp, Homo sapiens
tagctcagtccatgggaggctctcctgtccctgaaagctgacacccacctttcaccactt

SEQ ID NO: 10322 - DNA, 60 bp, Homo sapiens
gcgcgtcgatcggatcaatcacttttctagaggaagtagcagtccctcttgtgagagcgc

SEQ ID NO: 10323 - DNA, 60 bp, Homo sapiens
ttcaacagcgagcaggagaccatcacctccctctacaagaccagtttccgggtggacgtt

SEQ ID NO: 10324 - DNA, 60 bp, Homo sapiens
gaccagtattctcgaattctcttcccagttgcatttgcaggattcaaccttgtgtactgg

SEQ ID NO: 10325 - DNA, 60 bp, Homo sapiens
gctgtggagaggatgaggcatatgcgttgtcagttggaatccctccaaatggattgcaag

SEQ ID NO: 10326 - DNA, 60 bp, Homo sapiens
tggacctacgggctcacggtgtctgccggggtcttcatcccgtccctgctcatcggggct

SEQ ID NO: 10327 - DNA, 60 bp, Homo sapiens; identical to SEQ ID NO: 4855

SEQ ID NO: 10328 - DNA, 60 bp, Homo sapiens
ggaccgttctctgtccccaggtcctgtctctgcacagaaacttgaactccaggatggaat

SEQ ID NO: 10329 - DNA, 60 bp, Homo sapiens
gggcatttgccttagtgcgttgtggtacaaccacgaacagtgctgttggggatctaatga

SEQ ID NO: 10330 - DNA, 60 bp, Homo sapiens
ctcttcaactagaatcatagagttctggatgtaaagcgggaaggacattacagaccatgg

SEQ ID NO: 10331 - DNA, 60 bp, Homo sapiens
acaacccaggattccacagatttagtggataacatgtcacctgaagagattgaggcctgg

SEQ ID NO: 10332 - DNA, 60 bp, Homo sapiens
attccgtgcccacttcacatctcccctaccagcagattctgcgaaagcaccaaatttctc

SEQ ID NO: 10333 - DNA, 60 bp, Homo sapiens
tatgcctcagctctgtgttaagcctgctcatcccaccagcagctggaattggagtagctt

SEQ ID NO: 10334 - DNA, 60 bp, Homo sapiens
ccctttcaccacctcgaggagatttgctccccattagcgaatgaaattgatgcagtccta

SEQ ID NO: 10335 - DNA, 60 bp, Homo sapiens
gtgagaaagaacaagagaagctgcaactcctggacccttttgtcctcagtgtgtggttcc

SEQ ID NO: 10336 - DNA, 60 bp, Homo sapiens
ccctgatgacatgtgtgtgatgaggaccatgacccttgaacccccttacctaacgtaact

SEQ ID NO: 10337 - DNA, 60 bp, Homo sapiens
gctcagctgcccttcactcccacctgctgccaaagtccctgtgctaatgggattacaaat

SEQ ID NO: 10338 - DNA, 60 bp, Homo sapiens
ctggaactcatctttgtcaatgaagacaggtccaacgcagacctcaccactctgatgcac

SEQ ID NO: 10339 - DNA, 60 bp, Homo sapiens
actgtacatttccccatctccgacctgaaatggatgcccctttctggtgtaatcaaggcg

SEQ ID NO: 10340 - DNA, 60 bp, Homo sapiens
attatacccttgctgtgtacaagtccccagagtatgagtcccttggttttgagcttactg

SEQ ID NO: 10341 - DNA, 60 bp, Homo sapiens
gagacagttgaccgagaactacagaaagctggctatgacaatgcccatagtgctccttcc

SEQ ID NO: 10342 - DNA, 60 bp, Homo sapiens
gtccatctcctatctactttgcaaacattggtttctttaggcggaaacttatcgatgctg

SEQ ID NO: 10343 - DNA, 60 bp, Homo sapiens
cgagctggagcgtgagatccgcatcatcaacacggagcagtacatgcactcgctgacgtg

SEQ ID NO: 10344 - DNA, 60 bp, Homo sapiens
atctacagcctctatacgtccttcttcgccaacctcatctacttcctcatgggcacctca

SEQ ID NO: 10345 - DNA, 60 bp, Homo sapiens
ggtggatgcagaaacacaagattccactggatgcttcagtgcttgatattggaactggaa

SEQ ID NO: 10346 - DNA, 60 bp, Homo sapiens
aaagccacctcatttccaaacatctcactcaggaagggaggctcaatgtaacctcagggg

SEQ ID NO: 10347 - DNA, 60 bp, Homo sapiens
aagaccttcatacctagacctgttccgcacaccacggctccgacacatctcactgtgctg

SEQ ID NO: 10348 - DNA, 60 bp, Homo sapiens
tggctgcctccttcaactgcatcttcctgtatactggggaactgtatcccacaatgatcc

SEQ ID NO: 10349 - DNA, 60 bp, Homo sapiens
ggaagtgtcatctacctggtgaaaatgcctcttcaggaacagagcttatagagacaaaag

SEQ ID NO: 10350 - DNA, 60 bp, Homo sapiens
gtttgggaagggatgcctatccagctccttcagctgcctcttcctctacacaagtgaatt

SEQ ID NO: 10351 - DNA, 60 bp, Homo sapiens
ggtgttcctggtctttcactgacaattccaacattctttacttacagtggaccaatggat

SEQ ID NO: 10352 - DNA, 60 bp, Homo sapiens
ctacaagtgatcatctgctacaacccaactactggccaggcaaggaaactcaactttaga

SEQ ID NO: 10353 - DNA, 60 bp, Homo sapiens
tacttggggctgagtttgagcaagactccctaacctgtgtctggacaagtctgatgtcct

SEQ ID NO: 10354 - DNA, 60 bp, Homo sapiens
cagctgccggctacctgattggaggtgccctgctgaatatctacacggaaatgggccgac

SEQ ID NO: 10355 - DNA, 60 bp, Homo sapiens
tcatcatctgccccttcctgctcatgctgctctactggtcgtgagtacactctgcacagc

SEQ ID NO: 10356 - DNA, 60 bp, Homo sapiens
actgaacaccgttggaattgccaaattctcatgttttactgctgtgatgtcattgtcctt

SEQ ID NO: 10357 - DNA, 60 bp, Homo sapiens
atggttttcaggatgctgacagctgcaagcaacaggcactgccaaattcagggaacagtg

SEQ ID NO: 10358 - DNA, 60 bp, Homo sapiens
cgcccacttctctccagatgaagggaagacattcataggtcccaaatctgcccattcaga

SEQ ID NO: 10359 - DNA, 60 bp, Homo sapiens
atcgatatgttgtcatggattttcttatggaccatcctgattatccattttcagatgaat

SEQ ID NO: 10360 - DNA, 60 bp, Homo sapiens
cccaaacccctggtttaagtaggtagaaggaggatgcctaatcctacaaagtgacccttt

SEQ ID NO: 10361 - DNA, 60 bp, Homo sapiens
ctccgttgtacctgctggggaattcacctcgttactgcttgatatcttccaccccttaca

SEQ ID NO: 10362 - DNA, 60 bp, Homo sapiens
ataaacaaccacttaaaccctccggatctgagcctcccgcagaggaatgcagaatgacgc

SEQ ID NO: 10363 - DNA, 60 bp, Homo sapiens
tactacctgtggaccaccttcatggctgtcatcgtgggcatcttcatggtctccatcatc

SEQ ID NO: 10364 - DNA, 60 bp, Homo sapiens
attggtggcatgaaacacaagggcagagtcctcagggacttcttcgacagcctcaatgag

SEQ ID NO: 10365 - DNA, 60 bp, Homo sapiens
ggaaagtatggggaaggagccaagcaggagacgttcacctttgccttaactttggtcttc

SEQ ID NO: 10366 - DNA, 60 bp, Homo sapiens
cagtggaagcaagaaagtcaaggacgctggcacagactgtatagacagtgattgtcctat

SEQ ID NO: 10367 - DNA, 60 bp, Homo sapiens
gacacactaatcgaactatgaactacaaagcttctatcccaggaggtggctatggccacc

SEQ ID NO: 10368 - DNA, 60 bp, Homo sapiens
tctgtggcttcctgacctttggagctgctgtggatcctgacgtgctcctgtcctatccct

SEQ ID NO: 10369 - DNA, 60 bp, Homo sapiens
gtccggtttgctgtgtggatgctgataggcttcatcatctactttggctatggcctgtgg

SEQ ID NO: 10370 - DNA, 60 bp, Homo sapiens
ggacctaccaccaatcctcctagttcgtgggaatcatcagagtgtccttaccttctattc

SEQ ID NO: 10371 - DNA, 60 bp, Homo sapiens
acatctggggagtcatgctcttcattcgcctctcctggattgttggagaagctggaattg

SEQ ID NO: 10372 - DNA, 60 bp, Homo sapiens
agcctatgagatcatgagggagctcgatgtcagctatgtgctggtcatttttggaggcct

SEQ ID NO: 10373 - DNA, 60 bp, Homo sapiens
tgcctcctgaggtgacacagcctgtaggaacatacacagctgggatcagcctgcagccat

SEQ ID NO: 10374 - DNA, 60 bp, Homo sapiens
ccactgaagacaaaggcttctattaccaacagatgtcagatgcgaaggcaaacggccgga

SEQ ID NO: 10375 - DNA, 60 bp, Homo sapiens
actgagtgttagtagtcattttggtccaactgcatgtcaacccttccatttcaatcccag

SEQ ID NO: 10376 - DNA, 60 bp, Homo sapiens
gtgttgagtggttctccgtaaaagtataagtgctaacactacgaagaaatgcacacgatc

SEQ ID NO: 10377 - DNA, 60 bp, Homo sapiens
accaagaggtttgaggacatgattgcacccttccgtctgaatgatggcttcaaggatgag

SEQ ID NO: 10378 - DNA, 60 bp, Homo sapiens
aaggacaaggacactctgacattcggcttgatccatgtccaggtgcaactgtgtgtacac

SEQ ID NO: 10379 - DNA, 60 bp, Homo sapiens
ttcattgcacagctcagccagcagtccttggacttcgtaaagatcatcaccatcctggtc

SEQ ID NO: 10380 - DNA, 60 bp, Homo sapiens
cagacagttcacggctgacttcgcgtttggggaatcagtatgtcaacgtgatgaacatgc

SEQ ID NO: 10381 - DNA, 60 bp, Homo sapiens
gcggtgtttattgcacagttgaatgacctggacttgggcattgggcagatcatcaccatc

SEQ ID NO: 10382 - DNA, 60 bp, Homo sapiens
gtcatagtagatgaatgcaaggtaactctggcagccaatggaaagtcagccgactgcagt

SEQ ID NO: 10383 - DNA, 60 bp, Homo sapiens
gggattctgtgtagagccgaggaaaccatttccctaagagaagctctgttccttggcttg

SEQ ID NO: 10384 - DNA, 60 bp, Homo sapiens
ctgttctccggttctgtgaggaacaacattgcttatgggctgcagagctgcgaagatgat

SEQ ID NO: 10385 - DNA, 60 bp, Homo sapiens
ttggagaagactgctatgcattggcttttggagttccaggactgctcatggtaattgcac

SEQ ID NO: 10386 - DNA, 60 bp, Homo sapiens
caaggactttgggaacatcaacaattgccggatggacctctacttcttcctgctggctgg

SEQ ID NO: 10387 - DNA, 60 bp, Homo sapiens
tctgattggtggtcatgtgaaggccgaccagcttgatatgctgccagatctcttcgcgcg

SEQ ID NO: 10388 - DNA, 60 bp, Homo sapiens
tggacagcaagggggaggagtccaagatcagctaccccaacatcttcttcatgattgaca

SEQ ID NO: 10389 - DNA, 60 bp, Homo sapiens
tccctgatactcttctcacctgtgtaacttgtagctcttcctctatgccttggtgccgca

SEQ ID NO: 10390 - DNA, 60 bp, Homo sapiens
ccagtgacacaactcatccagaactgtcttagtcataccatccatccctggtgaaagagt

SEQ ID NO: 10391 - DNA, 60 bp, Homo sapiens
tactctcctccccactcatgtgcctgcatgctgccataggatcattgctgggcatagcag

SEQ ID NO: 10392 - DNA, 60 bp, Homo sapiens
tgtgtggcttcaacagcaccctcgcatgcatagcgataggaggcatgttctacgtcatca

SEQ ID NO: 10393 - DNA, 60 bp, Homo sapiens
acatcacgtcctgcatgtcccacaccattttttcatgaccttgtaatatactggtctctg

SEQ ID NO: 10394 - DNA, 60 bp, Homo sapiens
tgcaagaggactggggtctcctgccctctctgttgagccaggaatcccaagtgaggggtt

SEQ ID NO: 10395 - DNA, 60 bp, Homo sapiens
ggtatgacagcagttatctgtacttaccctcttgacatggttagggtccgcctagcattc

SEQ ID NO: 10396 - DNA, 60 bp, Homo sapiens
tttggccaggtacggagatacaagggcctcatggactgtgccaagcaggtgctacaaaag

SEQ ID NO: 10397 - DNA, 60 bp, Homo sapiens
ggtaagcccttcaatttgtttcttcaatatttctttcatttgtagggatatttgtttttc

SEQ ID NO: 10398 - DNA, 60 bp, Homo sapiens
cagaacccgcctggcagcggacgtgggaaagtcaggcacagagcgcgagttccgaggcct

SEQ ID NO: 10399 - DNA, 60 bp, Homo sapiens
atagccactggcagctttgaagaacgggacacctttagagaagcttgatcttggaggcct

SEQ ID NO: 10400 - DNA, 60 bp, Homo sapiens
tgcatgaagtggattgatcatgagcaaatgatgtgcttatttctccctcactgttgaata

SEQ ID NO: 10401 - DNA, 60 bp, Homo sapiens
aagctcaaagaggacaattccagtatatctgcccaaggcagcaacaagctcttttgtgtt

SEQ ID NO: 10402 - DNA, 60 bp, Homo sapiens
gcggggaaaggcgaatgggtgcttttgaatgtgttcgtaaagtgtatcagacagatggac

SEQ ID NO: 10403 - DNA, 60 bp, Homo sapiens
aggaactggcaagatcctgctacccagagggtgaatgggtatctttcccggaataatcct

SEQ ID NO: 10404 - DNA, 60 bp, Homo sapiens
ctggagattcttcaattcactgggcaaaccatatgcctaagtctatcctctgatggaggc

SEQ ID NO: 10405 - DNA, 60 bp, Homo sapiens
ctaacgctgggatgaaagatgagattcagaggtgactgagaatcatgtgagtgatggctg

SEQ ID NO: 10406 - DNA, 60 bp, Homo sapiens
acaatactagtgatgtctaccagtcctgctacttctggggtgcctgtctcctggaatgga

SEQ ID NO: 10407 - DNA, 60 bp, Homo sapiens
gctggcctattttggacgtgtgaggatgtggatggaggtgatgaaaaccaccctatcatc

SEQ ID NO: 10408 - DNA, 60 bp, Homo sapiens
ggtgttgtccgtgtctgttgaccaatctctattcagcatcgtgtgggtccctaagcacaa

SEQ ID NO: 10409 - DNA, 60 bp, Homo sapiens
tagttttcactgtgatccagtaccagccgatcacctacaaccactaccagtacccaggct

SEQ ID NO: 10410 - DNA, 60 bp, Homo sapiens
tggtgacagttaatgactgtgatgccaaactcaagagtgacgggaccatcgcagccatca

SEQ ID NO: 10411 - DNA, 60 bp, Homo sapiens
acacgggtgtatggcattcagaggttctgccgagacatccacatgatgctgggcttcaag

SEQ ID NO: 10412 - DNA, 60 bp, Homo sapiens
cactaaggtgggatggatagcagggtctcaggcacaaccagtaatggagagacaaaacca

SEQ ID NO: 10413 - DNA, 60 bp, Homo sapiens
ctaacgcaaacccctgacttcatggatgaggaacctggagaccaaagagacaaagggact

SEQ ID NO: 10414 - DNA, 60 bp, Homo sapiens
accacttgatgtctgaggataccttccatctcaacctacctcgagtggcgagtccagaca

SEQ ID NO: 10415 - DNA, 60 bp, Homo sapiens
tcccctgtgtagagcctgcatctgtctgtccttccttccattgctcccagtgccaaactt

SEQ ID NO: 10416 - DNA, 60 bp, Homo sapiens
ccacttttacatggtcacctacaggagagaggaggtgctgcaagactctctggtagaaaa

SEQ ID NO: 10417 - DNA, 60 bp, Homo sapiens
cagcagtcccacaacattctggatctgcttcgaacctggaatatccggatggtcaccatc

SEQ ID NO: 10418 - DNA, 60 bp, Homo sapiens
agctgctgctccttctagtgtgggtggctgtagtaggggaggctcagacaaggattgcat

SEQ ID NO: 10419 - DNA, 60 bp, Homo sapiens
tgccttgcccacaggtgcgggaccatctgatgtgatgtgaatactcttcccacatacatt

SEQ ID NO: 10420 - DNA, 60 bp, Homo sapiens
gtctcgtgggattattgattcctgatccaagaagggtcctctggggttcttccaacaacc

SEQ ID NO: 10421 - DNA, 60 bp, Homo sapiens
tgagaccattcctcagacccaagagatcatcagtgtcacgctgcaggtgcttagtctctt

SEQ ID NO: 10422 - DNA, 60 bp, Homo sapiens
tctagcatggttcagtccttgaaagtggcctgttgggtggagggtggaaggtcctgtgca

SEQ ID NO: 10423 - DNA, 60 bp, Homo sapiens; identical to SEQ ID NO: 4855

SEQ ID NO: 10424 - DNA, 60 bp, Homo sapiens
tcccaaagaagttctggtatgaacttgaggacacatgtccagtgggaggtgagaccacct

SEQ ID NO: 10425 - DNA, 60 bp, Homo sapiens
tttcttgactggaggccatcaaccctcttggttgaggccttgttctgagccctgacatgt

SEQ ID NO: 10426 - DNA, 60 bp, Homo sapiens
ctctgcacaatagctaggatgactaagagaacattgcttcaagaaactggtggatttgga

SEQ ID NO: 10427 - DNA, 60 bp, Homo sapiens
gcttccagagaatagtccatctaaaggcttccaactcacccgacaggaaatagttgctct

SEQ ID NO: 10428 - DNA, 60 bp, Homo sapiens
gacactatgggcacacgactcctcccagctctgtttcttgtcctcctggtattgggattt

SEQ ID NO: 10429 - DNA, 60 bp, Homo sapiens
tttgccctgacctctggccttgcagtgatccttgacttcctcctgcagatgtcagccttt

SEQ ID NO: 10430 - DNA, 60 bp, Homo sapiens
aaagcaagcctttgtgcaacgggacaatgctaggactgggagagtcacagccatcgactt

SEQ ID NO: 10431 - DNA, 60 bp, Homo sapiens
gcaacaactaaatgactcctctgtcatcatcagcgccctcaagacctacctggtgtcggg

SEQ ID NO: 10432 - DNA, 60 bp, Homo sapiens
aaatcatcgactgactgcttgattcaggctgttcaaggtgaaggattcatgagtctatat

SEQ ID NO: 10433 - DNA, 60 bp, Homo sapiens
caacaatatgctgttgactgcagagctgtatcttcagtggtgtgatgaagctacagtagg

SEQ ID NO: 10434 - DNA, 60 bp, Homo sapiens
tctgtggtctgggcagaactgcataaccctagatcaccaaagctgagagcctttaggagt

SEQ ID NO: 10435 - DNA, 60 bp, Homo sapiens
ttaagtctcctagtgttgctgtggttcagccaaaggcagcagtggcagccactcagtgat

SEQ ID NO: 10436 - DNA, 60 bp, Homo sapiens
tcccctgctcagtgtccggaaagaagtcagtcatccctgttggcagtaaatcttcccaca

SEQ ID NO: 10437 - DNA, 60 bp, Homo sapiens
ccgcttctttccttgatcttccctacggtgcttcatggagttcttcattacatcatcagc

SEQ ID NO: 10438 - DNA, 60 bp, Homo sapiens
ttcatcaagatcctgcgagcagatggtatcactggcctctaccgagggttcctggtcaat

SEQ ID NO: 10439 - DNA, 60 bp, Homo sapiens
gaaagctgtttggaaaacctaaaagatgttgtcacacttctgttttctttacctgtgcct

SEQ ID NO: 10440 - DNA, 60 bp, Homo sapiens
tgcagacacagccaccgagtttgcctggacaacctcccatgtactctgggacctttgact

SEQ ID NO: 10441 - DNA, 60 bp, Homo sapiens
ctcacctagtgttttcaagaaaattgagccaccgtctaagaaatcaagaggtttcacatt

SEQ ID NO: 10442 - DNA, 60 bp, Homo sapiens
ggctctgatacctgcttttaaaatggagctagaatgcttgctggattgaaagggagtgcc

SEQ ID NO: 10443 - DNA, 60 bp, Homo sapiens
tgaagatgagaccactgtggagttggaagggcaggatgaaaaccaagaaggagattttga

SEQ ID NO: 10444 - DNA, 60 bp, Homo sapiens
caattgcctccagctcattagccactgaatgggtgaaaggaaagacggtggaggaagcct

SEQ ID NO: 10445 - DNA, 60 bp, Homo sapiens
cctgctgtgtgtcctgttccatgttccggttccatccaaatacactttctggaacaaaaa

SEQ ID NO: 10446 - DNA, 60 bp, Homo sapiens
gccacacatttaaagtctgaagtccaccagaacttggaagaaagctgttaactcaacatc

SEQ ID NO: 10447 - DNA, 60 bp, Homo sapiens
aagaacctgggccttccctgaaccccttgggcttccagccaatcttcattcgccaaacct

SEQ ID NO: 10448 - DNA, 60 bp, Homo sapiens
gaacgcgacttccacaaacctggattttttatgtacaaccctgaccgtgaccgtttgcta

SEQ ID NO: 10449 - DNA, 60 bp, Homo sapiens
aacagtacccaccatggccctgagtatatgcgctgtagcccacatctagtcttgtctgca

SEQ ID NO: 10450 - DNA, 60 bp, Homo sapiens
gatggcattgtacagctgaaactccagggttcttgtaccagctgccctagttcaatcatt

SEQ ID NO: 10451 - DNA, 60 bp, Homo sapiens
ttgatggcttgatcatccctcagcatttctcccaaccagatcggtgactcctaaaatctg

SEQ ID NO: 10452 - DNA, 60 bp, Homo sapiens
gcagaggttggaccgacttgttgagccattacgtgcaacatgtacaactaaggtaaaggc

SEQ ID NO: 10453 - DNA, 60 bp, Homo sapiens
agcagacaccactctggtttcttcactgcattcagcaatgcctgaagttagtgctcaggc

SEQ ID NO: 10454 - DNA, 60 bp, Homo sapiens
tttcaggctgagattcttcttcaggaaaatgaggagcagaactggccacccttggctgct

SEQ ID NO: 10455 - DNA, 60 bp, Homo sapiens
gagctgagcctcaagtacctgtgtaaaagagctcccatctgatctgcagtcattacagaa

SEQ ID NO: 10456 - DNA, 60 bp, Homo sapiens
tgagcccagtgtcatcttgtggcctggagtcgaggtcttggccaggacataacaagctgt

SEQ ID NO: 10457 - DNA, 60 bp, Homo sapiens
gttccaaatactgtgcatccttctgaggaagcagtaaagcccaggaaagaatgctcctgc

SEQ ID NO: 10458 - DNA, 60 bp, Homo sapiens
ccctactgggaaagcaaaatcagaatagagaaatactgaactcacttgataaggaagctg

SEQ ID NO: 10459 - DNA, 60 bp, Homo sapiens
tggacatcagccccaggtattggggtgattttggtcatgacagtgtgcctgtcccactgt

SEQ ID NO: 10460 - DNA, 60 bp, Homo sapiens
cgtgagcgagctgactgacaagctggggctacagcacttacgcagccgcacgtggtatgt

SEQ ID NO: 10461 - DNA, 60 bp, Homo sapiens
gagtgttactcgttactgttgaggtcagtgcttcgtggcaaatggctgtactggatatcc

SEQ ID NO: 10462 - DNA, 60 bp, Homo sapiens
cagttcttctttgtgaacctgtgagtactccacagtttactgggggaaaaggcttcagta

SEQ ID NO: 10463 - DNA, 60 bp, Homo sapiens
ccagcctcctcttcctggacgagatggacgccttgtgtccccagcggggcagtcgagcac

SEQ ID NO: 10464 - DNA, 60 bp, Homo sapiens
gctttgggtgcagccgtggaatcctgatgtaaaagcataggttcttgcattactgagtaa

SEQ ID NO: 10465 - DNA, 60 bp, Homo sapiens
ccccgttcctcagtcctgtatcatccatacttgtactaccttgtcctatgaagctctgag

SEQ ID NO: 10466 - DNA, 60 bp, Homo sapiens
gcctcaggagagtcaccttttctcacggccctggccttaactcatatcttaggcattcct

SEQ ID NO: 10467 - DNA, 60 bp, Homo sapiens
ctgaaaaggctgatgttcactaatgggaagaatgaaatgacccttcacctcttaagggaa

SEQ ID NO: 10468 - DNA, 60 bp, Homo sapiens
caattttgaggaggttgttccgacctggaagcgttaaactgctgcatgtcatctggcgtc

SEQ ID NO: 10469 - DNA, 60 bp, Homo sapiens
actggcacagtcctttgcattctactggtgtggatgtagatctgcagcgaataaccctgc

SEQ ID NO: 10470 - DNA, 60 bp, Homo sapiens
ccagacaccatgatgcctcccgaagtccagttgatcatagaaccagagatgtggatagtc

SEQ ID NO: 10471 - DNA, 60 bp, Homo sapiens
ggggatttagggctattataggaatagtttgttgtcagaagcactttcacttgaagaacc

SEQ ID NO: 10472 - DNA, 60 bp, Homo sapiens
ttcccctgaggaaccaacctcttgtgctgagagctttcgggttgacctggacaagtctgt

SEQ ID NO: 10473 - DNA, 60 bp, Homo sapiens
cctcagataatgagggaacctggggtacttaaaatgccaaatgaacgtatacttgatcct

SEQ ID NO: 10474 - DNA, 60 bp, Homo sapiens
ggggctgataacatccggaaatactggagccgctactaccaaggatctcaaggggtaata

SEQ ID NO: 10475 - DNA, 60 bp, Homo sapiens
ccatctgtactcccctcatcctcctaatgttgagaaaatcaaatttcctgggtgtgtcct

SEQ ID NO: 10476 - DNA, 60 bp, Homo sapiens
ttggcatctgagtcctttccctgtccccacaagcccttctactccctgtttgcctttcct

SEQ ID NO: 10477 - DNA, 60 bp, Homo sapiens
ggtagtgtttccaggccaagggtcgactgcaggttgtttgagaaatgatgagtaggtcag

SEQ ID NO: 10478 - DNA, 60 bp, Homo sapiens
taatgttgctgcttcattagttggtgggagaagggacacatccactcttggaggaatata

SEQ ID NO: 10479 - DNA, 60 bp, Homo sapiens
ttctgcatcgacatgctcaacgccaagctggctgtccaaaagtatgaggagctgttccca

SEQ ID NO: 10480 - DNA, 60 bp, Homo sapiens
aaaatccaagcaagtggaatacttcagctgtttgcaagtctgttgactccacagtcttcc

SEQ ID NO: 10481 - DNA, 60 bp, Homo sapiens
gtgctgttgttatgatgtgcttaacagggaacgtgattagtgaaaggaagataaacgtgg

SEQ ID NO: 10482 - DNA, 60 bp, Homo sapiens
gcgtttctcttcactgtgagttgtctttggtcctcccacttggtacttgtatcttgatgc

SEQ ID NO: 10483 - DNA, 60 bp, Homo sapiens
atatgcttcccgcattgtcctagtcccagttgtattctcacaggtgttatgtgcaggaca

SEQ ID NO: 10484 - DNA, 60 bp, Homo sapiens
cgaaaaggcgttcctcacgttagctgaagatatccttcgaaagacccctgtaaaagagcc

SEQ ID NO: 10485 - DNA, 60 bp, Homo sapiens
tacaagcctgggaaggccctttcagagacggagctcaagaatgccatcagcatccaccat

SEQ ID NO: 10486 - DNA, 60 bp, Homo sapiens
atgagcctcagggcttctgttaagagtctgtctgagaaagccggtctgcgctgttcctcg

SEQ ID NO: 10487 - DNA, 60 bp, Homo sapiens
catcagtctgaacgctgtatccttggtcaacctggtgatgagctgtggcatctccgtgga

SEQ ID NO: 10488 - DNA, 60 bp, Homo sapiens
cagcagcaatgtggaagcagccaaaaggttggccaaacgcctttatcagctggacagatt

SEQ ID NO: 10489 - DNA, 60 bp, Homo sapiens
caggtgtcggaggtgttcaatacagtggcccaagagctactgcagagaagcgacgaggag

SEQ ID NO: 10490 - DNA, 60 bp, Homo sapiens
gaagaagttcctgagaatgggttacagatgtcatgttagctgggagtcttcccacatgtg

SEQ ID NO: 10491 - DNA, 60 bp, Homo sapiens
tctcaggccatctccccggttgttgtgcacagccacgaaacaaaagaacagtggccagaa

SEQ ID NO: 10492 - DNA, 60 bp, Homo sapiens
gggaccagattgaccggttcagtaaagagaacggtttcacaggttggacagaaacatcag

SEQ ID NO: 10493 - DNA, 60 bp, Homo sapiens
ctaccatgacctaagcaagtttacttcagtcaggagagatcgtaatgacttctgggaagg

SEQ ID NO: 10494 - DNA, 60 bp, Homo sapiens
gagggactgtccaagaaagaaggtgaaagagaaataccacgtctgtactgcctaatttgt

SEQ ID NO: 10495 - DNA, 60 bp, Homo sapiens
gagcttacaaagcatggcaggccaagggctcgaccacaggccagcattagcagaacatat

SEQ ID NO: 10496 - DNA, 60 bp, Homo sapiens
agcagtagctgcagaatcgaatgcaaccttctttaatataagtgctgcaagtttaacttc

SEQ ID NO: 10497 - DNA, 60 bp, Homo sapiens
gtagcaactgagggggtggctagcagcaaacaagtatggagctagcacaagagctaagaa

SEQ ID NO: 10498 - DNA, 60 bp, Homo sapiens
caacacaggcccagaaaattgtgtcccagaaggatgtcagtaattgtgactaggccaggc

SEQ ID NO: 10499 - DNA, 60 bp, Homo sapiens
tgttgttgaagtgtacagggtaaccaagcgtgtggagctggggataaaagccactgcagt

SEQ ID NO: 10500 - DNA, 60 bp, Homo sapiens
gtaaatacaatggcataaaagtaactttctctgaagatgtgatgttcaggctgtgaaata

SEQ ID NO: 10501 - DNA, 60 bp, Homo sapiens
gcgtcatgccaaagcagcagaagacagcccatattgggtttctccagcatattccaagac

SEQ ID NO: 10502 - DNA, 60 bp, Homo sapiens
cagacgcaagtaagagacacgcaggaagaaccaaaacaggaaaaggaatgacagagggcg

SEQ ID NO: 10503 - DNA, 60 bp, Homo sapiens
gattaacccagagtcgcctctcttcaaaatgcacacaattaagacggtcctgctgtaaca

SEQ ID NO: 10504 - DNA, 60 bp, Homo sapiens
tacgccaacgtgaagcagtggctgcaggagattgaccgctatgccagcgagaacgtcaat

SEQ ID NO: 10505 - DNA, 60 bp, Homo sapiens
taacccagtatccactccagttgcacttcccacaccagctctttctccaagtttgatggc

SEQ ID NO: 10506 - DNA, 60 bp, Homo sapiens
cgcatttcaagacatccagacgctattaccaacattttcctgtgcattaacctctgcatg

SEQ ID NO: 10507 - DNA, 60 bp, Homo sapiens
gttcaccgatcttgacctgcagcatgtagctaaagaaactggagggtttgtggctagaga

SEQ ID NO: 10508 - DNA, 60 bp, Homo sapiens
cacagccagcacagtttcgacaggtcaaggaagagctgtttcagtaaagaatgaagtgaa

SEQ ID NO: 10509 - DNA, 60 bp, Homo sapiens
acttcttttttaatttgggtaggattttggactgggttttggcaacaaatagggtcttat

SEQ ID NO: 10510 - DNA, 60 bp, Homo sapiens
tgtagaacctcaaacaggatggaacatcagtggatggcaggaggttgggaattcttgctg

SEQ ID NO: 10511 - DNA, 60 bp, Homo sapiens
tggtgttccacatgtgcctgtttccacgccagcaccttgacttggcagcatggagccaag

SEQ ID NO: 10512 - DNA, 60 bp, Homo sapiens
atgttcctggagaccagcgctctcacaggcgagaacgtggaggaggcgttcctcaagtgt

SEQ ID NO: 10513 - DNA, 60 bp, Homo sapiens
agattgtacagcagtctgatgcgttttcaggagcagacatgacacagctttgcagggagg

SEQ ID NO: 10514 - DNA, 60 bp, Homo sapiens
gaagtggtgtcatctcagcaacctactaccaactgccagtcatcatgtactgaaggcgaa

SEQ ID NO: 10515 - DNA, 60 bp, Homo sapiens
gactacatcacctctctccctttggaaacagtcaagtgtacttcacactactagatgtta

SEQ ID NO: 10516 - DNA, 60 bp, Homo sapiens
gccatcacctcatctcaatccagccaaatcaaccatctagagcacacaggccgagagaaa

SEQ ID NO: 10517 - DNA, 60 bp, Homo sapiens
ggtccagtccattgaagaccctattttgggtgatccctatcttgcagaatgtctgtagga

SEQ ID NO: 10518 - DNA, 60 bp, Homo sapiens
tactgtgagccaaaccgaaagtccgtctttaacagggtctccacgacgcttccggtgcct

SEQ ID NO: 10519 - DNA, 60 bp, Homo sapiens; identical to SEQ ID NO: 4855

SEQ ID NO: 10520 - DNA, 60 bp, Homo sapiens
gccctggcatgacgagctggagcagatcgtgctgcacaaccggagaagacagaattacct

SEQ ID NO: 10521 - DNA, 60 bp, Homo sapiens
tgtcagccttcgccgcggtctatgtgtcgatgtacttcaactcggtcatctcggacacca

SEQ ID NO: 10522 - DNA, 60 bp, Homo sapiens
acctgtggcttcccatgacactccttgcttgttgtgttgcttcctattggctagcttcct

SEQ ID NO: 10523 - DNA, 60 bp, Homo sapiens
gggaggtccaaactttgtccctgttctctgtgttccttacctttctgtccctgtgtatag

SEQ ID NO: 10524 - DNA, 60 bp, Homo sapiens
acttcatcgggaggatcgtcattggccagtactcttcaggcccctctgagaccaaccact

SEQ ID NO: 10525 - DNA, 60 bp, Homo sapiens
ctcaacacagtatgccaagtggattccagcctcatggcctagcaaaagaacagactccct

SEQ ID NO: 10526 - DNA, 60 bp, Homo sapiens
catcacactcaccctaacctactggcggacagcgatcccagtttgccttgccaaataaac

SEQ ID NO: 10527 - DNA, 60 bp, Homo sapiens
ggggttagaattccagatctccaacgtgaagtttgaagatgtgggaggcaatgatatgac

SEQ ID NO: 10528 - DNA, 60 bp, Homo sapiens
tgagccaacacacagatttgtcgcctctgtccccgaagacacctgcaccctccatgcgga

SEQ ID NO: 10529 - DNA, 60 bp, Homo sapiens
ttcaacatcaagaccctggagcaccgaggattcaagctgaacatctgggatgtgggtggc

SEQ ID NO: 10530 - DNA, 60 bp, Homo sapiens
ctcatcgagtagatgttataggaaggactagatcatggtcacccagtgtccctcctccac

SEQ ID NO: 10531 - DNA, 60 bp, Homo sapiens
ccccgccattcccttacacctaccccacctacaactgaagacaatgcactttacagatat

SEQ ID NO: 10532 - DNA, 60 bp, Homo sapiens
catagatttggcaactcctttacatcatacttggacatatcaagcattggtgcacgatgt

SEQ ID NO: 10533 - DNA, 60 bp, Homo sapiens
cttgacaccctccacagtctttccaagttggactcttcctctcatcagtactagttgtca

SEQ ID NO: 10534 - DNA, 60 bp, Homo sapiens
ttatagaggcaagtgcaaaaacctgtgatggtgtacaatgtgcctttgaagaacttgttg

SEQ ID NO: 10535 - DNA, 60 bp, Homo sapiens
actgcccacaggactgcagaagaaacgtcaaccgggagaaaaccgagtgactctgatatt

SEQ ID NO: 10536 - DNA, 60 bp, Homo sapiens
ctgtatgtcttgatgacactacagtaaagtttgaaatatgggatacagctggtcaagaac

SEQ ID NO: 10537 - DNA, 60 bp, Homo sapiens
aagactagcctggtggagcgctacgtgcacgaccgctttctggtggggccttatcagaac

SEQ ID NO: 10538 - DNA, 60 bp, Homo sapiens
taagtggctatagaagtcgggcggacccggaacccagaggacgcgacaccatgacttatg

SEQ ID NO: 10539 - DNA, 60 bp, Homo sapiens
cagaccgttttagcacggaaacctaaaatgtgcagcttccttgagtggcgagatctgaag

SEQ ID NO: 10540 - DNA, 60 bp, Homo sapiens
agtgccatcacacgcaaattcaagctagagccatctgtgagcctggtaaacgtgctagat

SEQ ID NO: 10541 - DNA, 60 bp, Homo sapiens
atgtttcgcagaaaagtgtccccaaggaagtgccaccaggtactaagtcctctccaggtt

SEQ ID NO: 10542 - DNA, 60 bp, Homo sapiens
tagggaagggacgagtctaggctgagggcaagatgggaggtcagaggtgacagaagcgtt

SEQ ID NO: 10543 - DNA, 60 bp, Homo sapiens
tctcgggctatttcgttagcatcgacgcccatgctgaagagtgcttctttgagcgggtca

SEQ ID NO: 10544 - DNA, 60 bp, Homo sapiens
tttcatgtgcttggcttgccgattgaaggcccagaaatccctgctgtatcgtgatgctga

SEQ ID NO: 10545 - DNA, 60 bp, Homo sapiens
ctggtgctttgtggtggctgcagaagaccagttttgttgagaactgcttttcagcctgga

SEQ ID NO: 10546 - DNA, 60 bp, Homo sapiens
aagaactgcaacggggtggtcatgatgttcgacattaccaagcagtggaccttcaattac

SEQ ID NO: 10547 - DNA, 60 bp, Homo sapiens
gttaaagccgttgctgttgatccaactgaagagtactttgttacaggatctgccgaaggc

SEQ ID NO: 10548 - DNA, 60 bp, Homo sapiens
tctttgatgagctggattcgattgccaaggctcgtggaggtaacattggagatggtggtg

SEQ ID NO: 10549 - DNA, 60 bp, Homo sapiens
tctcaattcgtagcctgaggctcagtgaaggaaacatgcagaaagaatgcctgagacgcc

SEQ ID NO: 10550 - DNA, 60 bp, Homo sapiens
ctgaggcagggttgttagaggactgtgtcatcctcaccaagctcattacatctgccaggg

SEQ ID NO: 10551 - DNA, 60 bp, Homo sapiens
cggcagacctaagagttgcctctgagttagctctttggaatcgtgaacacaggtgtgcta

SEQ ID NO: 10552 - DNA, 60 bp, Homo sapiens
gagaatctagcacttctccacttgtagctgcactttaagtctcagcagaagatacgatcg

SEQ ID NO: 10553 - DNA, 60 bp, Homo sapiens
tgtcaccctctcaccagcgtcggaaagctgcctcttttcagaacctccattctctgctga

SEQ ID NO: 10554 - DNA, 60 bp, Homo sapiens
gggcactctacctggctaactggatcaggcggtaccagactgagaatttctatgaccaaa

SEQ ID NO: 10555 - DNA, 60 bp, Homo sapiens
accccggaagtggtctggggctgatcttgccttgaggaagacccaggccatgttcccaaa

SEQ ID NO: 10556 - DNA, 60 bp, Homo sapiens
cagtgacttcagatatgcagaccatagagcaggaatcacccattatggcaaaaccaagaa

SEQ ID NO: 10557 - DNA, 60 bp, Homo sapiens
gtcctcatttgatagcatctgtctcctgcagacctcatcattccacagtatttccctgcc

SEQ ID NO: 10558 - DNA, 60 bp, Homo sapiens
ctggtctgcctcaggtacagaagggcgacctctgtgccatttctttggtggggaacagag

SEQ ID NO: 10559 - DNA, 60 bp, Homo sapiens
tgtgacttggagtgagaacaacgaacatgtcctcatcacctgtagtggcgatggctcgct

SEQ ID NO: 10560 - DNA, 60 bp, Homo sapiens
cagttcttgcacatacaagacaccgctgcagtcagctaggacctttccgccatgtattct

SEQ ID NO: 10561 - DNA, 60 bp, Homo sapiens
catgtcgatgatggaagcattgtggctgcgtttgagtttctggagcttgaactccccgcc

SEQ ID NO: 10562 - DNA, 60 bp, Homo sapiens
tcccaggggtctgtgcgcgagaaggcaggcgggtttttctaccggaagtccgctctagct

SEQ ID NO: 10563 - DNA, 60 bp, Homo sapiens
taccatgggaggaaaacttcttcctggcctgggctccgtgccgctctgtttgccaaccgt

SEQ ID NO: 10564 - DNA, 60 bp, Homo sapiens
caaacaggatgttgctggagcactgtcagtagaagaaatcactgaactactcagtctcca

SEQ ID NO: 10565 - DNA, 60 bp, Homo sapiens
gagtccgcgatggcttcagtgacagatggtaaaactggagtcaaagatgcctctgaccag

SEQ ID NO: 10566 - DNA, 60 bp, Homo sapiens
aaactggaaaagcctcaggagcaaccagtcagtgaaggaggctgttcctgctaatgtccc

SEQ ID NO: 10567 - DNA, 60 bp, Homo sapiens
aatagtacactgtctcctttaaggaaggaagcgtgatgaatgaatgatgtgtagacttga

SEQ ID NO: 10568 - DNA, 60 bp, Homo sapiens
tgaggatttcaggtctccctgtcccaggaggcttgtgccaagatggcatcagctggagac

SEQ ID NO: 10569 - DNA, 60 bp, Homo sapiens
cggaaggaaagacacagtcatcaagcctctgttggttgaacctgaaggactagagaagga

SEQ ID NO: 10570 - DNA, 60 bp, Homo sapiens
gtatttctgggaaaagccagcttctgtttgcactggtcttcacaactcgttacctggatc

SEQ ID NO: 10571 - DNA, 60 bp, Homo sapiens
cacagtctccaaagtcacctgattctctgtggaaaatgaaaggcattgaaggaaaccaga

SEQ ID NO: 10572 - DNA, 60 bp, Homo sapiens
caccaatcgcggaggagattgacctgctggtgttcgacctcaagaccatgcgggaggtga

SEQ ID NO: 10573 - DNA, 60 bp, Homo sapiens
tctatgttcagaccactggagaggatagagaggtaaaaggtggcgacagtttcccttagg

SEQ ID NO: 10574 - DNA, 60 bp, Homo sapiens
tgatgctgcccacatcacacctgacaactttgagctctgcgtcaagactctccggatctt

SEQ ID NO: 10575 - DNA, 60 bp, Homo sapiens
acagtcaatgagtggcggaaatggacaggcagcaaatcagactctcagtcctcagatgtg

SEQ ID NO: 10576 - DNA, 60 bp, Homo sapiens
gagccacatgaaatcaagaggagacactttggcgttcttcaagcagaactgaggctgcga

SEQ ID NO: 10577 - DNA, 60 bp, Homo sapiens
tggaggacctgaaggagtccattgctgaggtgacggagctggagcagatccgaatagagt

SEQ ID NO: 10578 - DNA, 60 bp, Homo sapiens
cactgactagaacttaatctggtactttacagttttgcaccaactctgccaagccactgg

SEQ ID NO: 10579 - DNA, 60 bp, Homo sapiens
acagccaccccactatgccgcaggccgccctacccaccttcaggcagcctatgggacgca

SEQ ID NO: 10580 - DNA, 60 bp, Homo sapiens
gactttccaaatgcatcctgcaaagagagagatagctgatagggactgacaagcacactg

SEQ ID NO: 10581 - DNA, 60 bp, Homo sapiens
atgccatcgaggaggtgaacaacaatgtgaaactgctcacggagatggtgatgagccaca

SEQ ID NO: 10582 - DNA, 60 bp, Homo sapiens
atatctcgggccttctacaaccatgggctcctctgtgcatcctatcccatccccatcatc

SEQ ID NO: 10583 - DNA, 60 bp, Homo sapiens
tgaaggccgtggaggatgctattgcacgcaagcgggccaagatccccgggaaagcatagg

SEQ ID NO: 10584 - DNA, 60 bp, Homo sapiens
gaaggtccagcactccaacgcgaagaatgccgtgcttttcgaggccatcagcttaatcat

SEQ ID NO: 10585 - DNA, 60 bp, Homo sapiens
taaccaagtgtccaccaactacctgctaagagccgggagcatggaacgtgttgggattta

SEQ ID NO: 10586 - DNA, 60 bp, Homo sapiens
tcacaaccttccagtgtggatgttacagggtggcccccattctaccgatgtgaaaactga

SEQ ID NO: 10587 - DNA, 60 bp, Homo sapiens
gtgttcccaagagactgaggattcctagagatatcttgaaagcccttctgagcccttggg

SEQ ID NO: 10588 - DNA, 60 bp, Homo sapiens
gtctacactgagacacagcagaacacgattggagtggactttaccgtgcgttcccttgat

SEQ ID NO: 10589 - DNA, 60 bp, Homo sapiens
aatgaaattggaaaggttccaagaaacgggcgaacaggggttacaaaaaggcgggacggg

SEQ ID NO: 10590 - DNA, 60 bp, Homo sapiens
atctagtttccaaagacatcagcatttgtgcttacttccacctcagtctaccagccccac

SEQ ID NO: 10591 - DNA, 60 bp, Homo sapiens
ccttcgcagaaaagaacaacttgtccttcatcgagacctcagccttggattccactaacg

SEQ ID NO: 10592 - DNA, 60 bp, Homo sapiens
agacctaccagatcagagggaagtcaatgaacggcaagctcgggaactggctgacaaata

SEQ ID NO: 10593 - DNA, 60 bp, Homo sapiens
gaggtattggaagagatgcttgacaatggttttccattggctaccgagtcgaacattctt

SEQ ID NO: 10594 - DNA, 60 bp, Homo sapiens
gtggacaagtcctggattcctgaaggagtggtgcgatcaaatggtcatgcctctacggat

SEQ ID NO: 10595 - DNA, 60 bp, Homo sapiens
ctgggaggtgttatgtctcttcagctgggaaaactagctcttcagagaagcctcgggtaa

SEQ ID NO: 10596 - DNA, 60 bp, Homo sapiens
gcctgacagtggtatacaaaagcagtatagatctctatttctatgtgattggcagctcct

SEQ ID NO: 10597 - DNA, 60 bp, Homo sapiens
atggagcagatctgagaaatgtttgtactgaagcaggtatgttcgcaattcgtgctgatc

SEQ ID NO: 10598 - DNA, 60 bp, Homo sapiens
atcaacgtaaagcagtttgccaagtttgtggtggaccttagtgatcaggtggcacctact

SEQ ID NO: 10599 - DNA, 60 bp, Homo sapiens
gttatcccttgctactttactgatacctttatcattcctgagacagtttgctaatttaaa

SEQ ID NO: 10600 - DNA, 60 bp, Homo sapiens
gccgctcatccacttccagtttgctggtctccctgctagaaaacacattgtactgtgctt

SEQ ID NO: 10601 - DNA, 60 bp, Homo sapiens
ctcatcctgggtttgcttctgaccttgtcatgtgtgtgccaccaaacacgttattggcac

SEQ ID NO: 10602 - DNA, 60 bp, Homo sapiens
cggtttagaaagaatccccattccagcagtagatttaactgatctctgaggttcagtatc

SEQ ID NO: 10603 - DNA, 60 bp, Homo sapiens
gataatgccaaagtcagcatttgtcctgggttcccttgtgtgatctgtttggactatgtt

SEQ ID NO: 10604 - DNA, 60 bp, Homo sapiens
gcgtgggcgcagtgagaagaaggctatcaatgatctagacagagacttttggaataacaa

SEQ ID NO: 10605 - DNA, 60 bp, Homo sapiens
atcacccagttgacccatctctcagcctctctgagcttggaagaagcctgttctgagcct

SEQ ID NO: 10606 - DNA, 60 bp, Homo sapiens
caggagcaggaagatcttgaactgaagcacaattccacattaaaacagctgatgagggag

SEQ ID NO: 10607 - DNA, 60 bp, Homo sapiens
atcaacccacagaaggatgaggctctggagacggagaaggtgcagtacacgttgccagac

SEQ ID NO: 10608 - DNA, 60 bp, Homo sapiens
gggctttgatgaactaggtggacttctcaaaccaacagtggcctctcagaaccagaacct

SEQ ID NO: 10609 - DNA, 60 bp, Homo sapiens
ggagcctcattcgtaccatgccaaacgcattcactcggggcagtattaaccgttctagaa

SEQ ID NO: 10610 - DNA, 60 bp, Homo sapiens
gggtgtggctgactctcagcttttcttctacccacaacttctgcccatacacacgttaga

SEQ ID NO: 10611 - DNA, 60 bp, Homo sapiens
gaggatacaaccaggaaatgcaacggtgtcagattgtgttcaaaatgtctagaaaggctt

SEQ ID NO: 10612 - DNA, 60 bp, Homo sapiens
catcaactcagattgttgccaatgccaaaggcgctgtgactggggcaaaagatgctgtga

SEQ ID NO: 10613 - DNA, 60 bp, Homo sapiens
ctggcctggttctcaagtgtttcctagacagagaggcacctgggtcagtattagtctatt

SEQ ID NO: 10614 - DNA, 60 bp, Homo sapiens
ggtgtggatttcaaaataagaactatagagttagacgggaaaacaatcaagcttcaaata

SEQ ID NO: 10615 - DNA, 60 bp, Homo sapiens; identical to SEQ ID NO: 4855

SEQ ID NO: 10616 - DNA, 60 bp, Homo sapiens
gctgcattgttggatgacaactctttttgtcacagttagagaatgaggttgactaatgca

SEQ ID NO: 10617 - DNA, 60 bp, Homo sapiens
tgaggaatttcatccagacggaagctgtggtcagcaagcccttcagcctctttgacctca

SEQ ID NO: 10618 - DNA, 60 bp, Homo sapiens
cttggcttccactcagcatcagcgtggcagtcaccaccccagtgaggacctcgatgtcca

SEQ ID NO: 10619 - DNA, 60 bp, Homo sapiens
tgtatattgcagacagacccaaagtggcactgaattttcttgctcaccttttaaaaactt

SEQ ID NO: 10620 - DNA, 60 bp, Homo sapiens
atggagcctacaatggcccagtaccaggctatcagcaaacacctccccaaggtatgtcaa

SEQ ID NO: 10621 - DNA, 60 bp, Homo sapiens
gaaaattcaccacctctagctcctcactgttctttgtaattaacacgctgttggtaatct

SEQ ID NO: 10622 - DNA, 60 bp, Homo sapiens
tgatgcataaatgaggtcactgttgatcagtgttgctagtagcttggcagctcttcataa

SEQ ID NO: 10623 - DNA, 60 bp, Homo sapiens
gatgggatcatggattttctgggcataagtggctgttctgggagtcattccaaagagaga

SEQ ID NO: 10624 - DNA, 60 bp, Homo sapiens
aacagcaggatgagcagttggagctggtctctggcagcatcggggtgctgaagaacatgt

SEQ ID NO: 10625 - DNA, 60 bp, Homo sapiens
agtgatgcccactccgtggagtcgctgactgcccagaacctgtcattgcattcgggcacg

SEQ ID NO: 10626 - DNA, 60 bp, Homo sapiens
tggcaaagtgggttttgcgcagtggcttagacctagaaaagaatcgtgacgggcaggaaa

SEQ ID NO: 10627 - DNA, 60 bp, Homo sapiens
ctccacatacgattctacttgtcaaattgcccaagaaattgctgagaaaattcaacaacg

SEQ ID NO: 10628 - DNA, 60 bp, Homo sapiens
ggttgatcctcttgtactgggagaggtgccttttgtatccccaattaaaggtagaaaacc

SEQ ID NO: 10629 - DNA, 60 bp, Homo sapiens
ttctgcaaagcagcatggacagccattgtcccgaggcagtagaagcaacttgggtcctgt

SEQ ID NO: 10630 - DNA, 60 bp, Homo sapiens
attactggactagagggttgagccacccacttgccatttgctcctgtccttccaggaaat

SEQ ID NO: 10631 - DNA, 60 bp, Homo sapiens
atccaatggatacaaaggggacactacacccaatctgcgtcttctctgtagcattacagg

SEQ ID NO: 10632 - DNA, 60 bp, Homo sapiens
tgtgtgaactggtgaacgatgagaatgtgcagcaggtgctagaggagcttcgagggtact

SEQ ID NO: 10633 - DNA, 60 bp, Homo sapiens
cgtccatggtatctactgtagtcctgcagatggaaatcctatcctactaacagctggctc

SEQ ID NO: 10634 - DNA, 60 bp, Homo sapiens
gtaagcgaagtcaaagaagtatacctcgacctggttaagaaaggcgttcagtttcctccc

SEQ ID NO: 10635 - DNA, 60 bp, Homo sapiens
actgcgaggagattgagccccttcaggtggacgaagaggaagtgctggcattgctggaaa

SEQ ID NO: 10636 - DNA, 60 bp, Homo sapiens
ggactggaggacaatgtcacctgcctatcaagtcccatcagcactgttatagttggtcag

SEQ ID NO: 10637 - DNA, 60 bp, Homo sapiens
ttacagggtttcctcccgagtaatccaatctcactccccttgtaagggaattctggggca

SEQ ID NO: 10638 - DNA, 60 bp, Homo sapiens
cccttccttgcgtgtcagcacggatgctgtgactgccacctgcgtcctcgtcaagtgccc

SEQ ID NO: 10639 - DNA, 60 bp, Homo sapiens
ggagaggtgtatgtttggggaagcaacaagcatgggcaactggctaatgaggctgctttc

SEQ ID NO: 10640 - DNA, 60 bp, Homo sapiens
gcggctcctgctatcacatgggtccaaccccagggtggtggatgacgacggcatgaccag

SEQ ID NO: 10641 - DNA, 60 bp, Homo sapiens
aggacctgcatagactatgtctgtgcaaagtgcctgagtgtctgctttcacctcagtctg

SEQ ID NO: 10642 - DNA, 60 bp, Homo sapiens
aaagccattgatctggtgacgaaagccacagaggaggacaaagccaagaactacgaggag

SEQ ID NO: 10643 - DNA, 60 bp, Homo sapiens
acaaagtgccggataacaagaacacccacacgttgctcctggctggtgtgttccggggtg

SEQ ID NO: 10644 - DNA, 60 bp, Homo sapiens
catgcagagggttaatcctgcttcctaaagcctcaagtacatgcctcctgcttagttcac

SEQ ID NO: 10645 - DNA, 60 bp, Homo sapiens
atgaacaggatcaacagctggagatggtgtctgggagcatccaggttctgaagcacatgt

SEQ ID NO: 10646 - DNA, 60 bp, Homo sapiens
gttgggtcacaccattgacttgaacagtggctccaaagcagggtcttcgtgctgttaaag

SEQ ID NO: 10647 - DNA, 60 bp, Homo sapiens
gtcgactggaactttgcccagaaggaactgctggagcagcaaggcatcgacataaagctg

SEQ ID NO: 10648 - DNA, 60 bp, Homo sapiens
atgagattcttaagagaggttgcaatgtgaatgatagagatggattgacagatatgactc

SEQ ID NO: 10649 - DNA, 60 bp, Homo sapiens
agccagacaacaggaatgtgcagctactatgaaatgctccaagcaggatggatgccttca

SEQ ID NO: 10650 - DNA, 60 bp, Homo sapiens
gccgggtgtctcgccgcagcctccggagaggaacagaccctcactctctctgtcagaaaa

SEQ ID NO: 10651 - DNA, 60 bp, Homo sapiens
tgatctcctttgcgcacaatgtagcagcacaagggaagtacattgctatagttagtacaa

SEQ ID NO: 10652 - DNA, 60 bp, Homo sapiens
tatctgctgctaacgtggctgcttctccgagagcacattgaggtccagacagatccaaac

SEQ ID NO: 10653 - DNA, 60 bp, Homo sapiens
ggcgcacgcagtatggcgcccaacatctacttggttcgccagcggatcagtcgactcggc

SEQ ID NO: 10654 - DNA, 60 bp, Homo sapiens
gcgatagtgaagagagttttagcatcagtatacagtctggctttgaagctatgagtcagg

SEQ ID NO: 10655 - DNA, 60 bp, Homo sapiens
ctgggctcaaagttggccctgttccagtattggttatgagtcttctgttcatcgcttctg

SEQ ID NO: 10656 - DNA, 60 bp, Homo sapiens
ggatgccaatcctgtttgttgtccgtatgtcctgaaaacatgagggactggcagatgtca

SEQ ID NO: 10657 - DNA, 60 bp, Homo sapiens
cattcaatactgcctcaccttgtcaagatgtcaaacagctgactagtggagttgccatgg

SEQ ID NO: 10658 - DNA, 60 bp, Homo sapiens
gagcagaaggcacatcttagagctgcacaagaccgtgtcctttccctagaaactagtgtc

SEQ ID NO: 10659 - DNA, 60 bp, Homo sapiens
gaggaccatcacaacctgagcagcacaggttccagttacagccatcccttgtcataactt

SEQ ID NO: 10660 - DNA, 60 bp, Homo sapiens
tgcactgtggcagcatcagacgtactcgtcataagtgagaggcgtgtgttgactgattga

SEQ ID NO: 10661 - DNA, 60 bp, Homo sapiens
gtgtccctcagcaagtgaccattgggaaacctgtctcctggatctcttgtggatattacc

SEQ ID NO: 10662 - DNA, 60 bp, Homo sapiens
aagtttcggaaagcactttgtgacagagatgttggggtcatggctgcctccttgcatata

SEQ ID NO: 10663 - DNA, 60 bp, Homo sapiens
gtagatcttcaaagtgatgctgctctgcaggtggacatttctgatgctcttagtgagcgg

SEQ ID NO: 10664 - DNA, 60 bp, Homo sapiens
accacgttcccatcacccacctcattgatccactgaccaaatccttaaccctagcgatgg

SEQ ID NO: 10665 - DNA, 60 bp, Homo sapiens
tacatggtcagtgggcttttaggctagtggcatcagtttcccagaatcagacttttgaag

SEQ ID NO: 10666 - DNA, 60 bp, Homo sapiens
aagcccggggagggatcccgcctttgaaaataaagctgttatgggtgtcattcaggaaaa

SEQ ID NO: 10667 - DNA, 60 bp, Homo sapiens
ttaaaggaagctgtgaaggagatacagacctcagccaagtccagagagtgggacatggag

SEQ ID NO: 10668 - DNA, 60 bp, Homo sapiens
aagactccgccaaaaccatgacagagtaaacacaccaacgccaccacctgcgctgcacga

SEQ ID NO: 10669 - DNA, 60 bp, Homo sapiens
ctgcgctatgccatcaacaactgccgctcaatcgacatggacaactacatgctctcgaga

SEQ ID NO: 10670 - DNA, 60 bp, Homo sapiens
atctgtggacctgaatgttgatccctcgcttcagattgacatacctgatgcgctcagtga

SEQ ID NO: 10671 - DNA, 60 bp, Homo sapiens
gcagaattgctagaacctttaatgccagctattcgtgcatgtttggagcatcgacacagc

SEQ ID NO: 10672 - DNA, 60 bp, Homo sapiens
gccctgggaaacatgtctaaagaggatgccatggtggagtttgtcaagctcttaaatagg

SEQ ID NO: 10673 - DNA, 60 bp, Homo sapiens
tgcccggccaggaataagcttttgacttacccaattcagataggttgatctttggggttt

SEQ ID NO: 10674 - DNA, 60 bp, Homo sapiens
tcacttgactcagagagtgatggtctgacttcatcgaaaccattggtcaatcttcattga

SEQ ID NO: 10675 - DNA, 60 bp, Homo sapiens
tgtttcccctggagacctgactggtctgtggttcccacaggaacagggttgtcttttgag

SEQ ID NO: 10676 - DNA, 60 bp, Homo sapiens
aaccccactgaacacaagcggggtgcaggtgatctgcatgaaggggaaggccaagtacaa

SEQ ID NO: 10677 - DNA, 60 bp, Homo sapiens
tcaatgcagaggctgcgagcagcaagctgcagagcagcaacatcttcactgtcgccaaga

SEQ ID NO: 10678 - DNA, 60 bp, Homo sapiens
ctgagctagagctgtactgcctcacgtacacccccacctctgtaaatggtccttgattaa

SEQ ID NO: 10679 - DNA, 60 bp, Homo sapiens
aacgaggtgacggaaattatgcgtaacaacttcggcaaggtcctggagcgtggtgtgaag

SEQ ID NO: 10680 - DNA, 60 bp, Homo sapiens
ttcctgactgacctgagcaaggtcttactaagcagtcccatctctgtgggaggcatgcaa

SEQ ID NO: 10681 - DNA, 60 bp, Homo sapiens
atcatcatctgctgtgtgatcctgggcatcgtcatcgcctccactgttgggggcatcttc

SEQ ID NO: 10682 - DNA, 60 bp, Homo sapiens
cccttcaaatttgggatataggagggcagacaataggaggcaaaatgttggataaatata

SEQ ID NO: 10683 - DNA, 60 bp, Homo sapiens
agtgctcaggggagaaaacgcctctgccaagtccttgcattcagttgttcagactctaga

SEQ ID NO: 10684 - DNA, 60 bp, Homo sapiens
tgttctcttagcaaccgtctgtagcaaagaagtgcttccagcatcactccagcaacacgc

SEQ ID NO: 10685 - DNA, 60 bp, Homo sapiens
cactgcatggcctcctgtcactgtgaatcgtggcccagtctcagtttgtagtttctcatt

SEQ ID NO: 10686 - DNA, 60 bp, Homo sapiens
gtggctgaaagacacggaggcctcaaaagaggagaccagctgctatcagtgaacggagtg

SEQ ID NO: 10687 - DNA, 60 bp, Homo sapiens
gtaggtggtgattttgaggctgtaacatgcccagaagctgttgtggccgacacttcaaca

SEQ ID NO: 10688 - DNA, 60 bp, Homo sapiens
ggaagacgaagaagacgattagaccatttggtcctagagtctgctgggacagagtcctgt

SEQ ID NO: 10689 - DNA, 60 bp, Homo sapiens
gtcagttcggaccactgcaccaacactgtcgtatccttgttaaaatggtgtgtaccttac

SEQ ID NO: 10690 - DNA, 60 bp, Homo sapiens
gggctcttcgtcaccaaacttcactttggaaggacatgagaaaggcgtgaattgcattga

SEQ ID NO: 10691 - DNA, 60 bp, Homo sapiens
cttcatccccttctgcgtggatgccctgcaggacgtggaccattactgtcccaactgcag

SEQ ID NO: 10692 - DNA, 60 bp, Homo sapiens
ttgaggagctgggaagctctggtggatgctatgaactcacttgctgaagagcagcgttca

SEQ ID NO: 10693 - DNA, 60 bp, Homo sapiens
gtgtttagactccactgatgtcgtggcgctttaggggaagaagttggtgtttcgctgggc

SEQ ID NO: 10694 - DNA, 60 bp, Homo sapiens
agctgatggtggagcacacgcccgacgaggagagcatcgactggaccaagatcgagccca

SEQ ID NO: 10695 - DNA, 60 bp, Homo sapiens
tgtccaacacagtgatgcggctcatcgagaagcgggctttccaggacaagtactttatga

SEQ ID NO: 10696 - DNA, 60 bp, Homo sapiens
ctccagtatgtgaaggttaattgctgtgctccacagatcttgtctattggcccctgtaga

SEQ ID NO: 10697 - DNA, 60 bp, Homo sapiens
atgtctggcgttgagaagccaagagtctctgtcaactctctcattgcccagtggtgacat

SEQ ID NO: 10698 - DNA, 60 bp, Homo sapiens
agtcttattggtgcccaatggggtaatctgtgcctcttccccaaaagcaatgacaggcac

SEQ ID NO: 10699 - DNA, 60 bp, Homo sapiens
ggcctagcctccaggccatacgcttttcttgagtttgacagcatcattcagaaagtgaag

SEQ ID NO: 10700 - DNA, 60 bp, Homo sapiens
atgttgtcttgtgcccttaactacgaactgaattgtattaaacactacaaagccatcttg

SEQ ID NO: 10701 - DNA, 60 bp, Homo sapiens
tcaaggccataacagtggaagaacagtcatatgccattggaagtcttggccagcagtcct

SEQ ID NO: 10702 - DNA, 60 bp, Homo sapiens
atgtccttgaacagtggcctcactcccagtgatccaggtgagttctgtgtggatgtgggg

SEQ ID NO: 10703 - DNA, 60 bp, Homo sapiens
actgtgttatctgcgccttcgatgaagtgagacccttggggagaacgggctgtggatgaa

SEQ ID NO: 10704 - DNA, 60 bp, Homo sapiens
gtgatggactctgtgacatggtcaggttgagctgaagccacagtttctctgtgctgtgtt

SEQ ID NO: 10705 - DNA, 60 bp, Homo sapiens
gaagaggagtccttgcaaatgcgcttgcaggtcgggatgagaaggaaatcagtcatgttc

SEQ ID NO: 10706 - DNA, 60 bp, Homo sapiens
gatgggacatgggacattgctccgctcttatcaaggttcttcctggatttgagaacatcc

SEQ ID NO: 10707 - DNA, 60 bp, Homo sapiens
gcttaggccattgatatcgcagttcttcctatcagcttcagtgacccagggtctgaactg

SEQ ID NO: 10708 - DNA, 60 bp, Homo sapiens
ctcgtttgtgtgagcgtgggtcagaccgccaaagtaggacttcatcgtttacctacctat

SEQ ID NO: 10709 - DNA, 60 bp, Homo sapiens
tgaccctaagaataagcactgtgtgtttcaaggtgacctcctgctcttcagctgtgcagg

SEQ ID NO: 10710 - DNA, 60 bp, Homo sapiens
cctgctcttcactggcattgctgtgctaggaattgtcatgctgaaacggatccactcctt

SEQ ID NO: 10711 - DNA, 60 bp, Homo sapiens; identical to SEQ ID NO: 4855

SEQ ID NO: 10712 - DNA, 60 bp, Homo sapiens
gctgccatcatggtgactgtcatggttctacagaaatgccctccatgtgtccctctaatg

SEQ ID NO: 10713 - DNA, 60 bp, Homo sapiens
gcagaaccttccacagagctgcttcatctgctgcccaaggagccttccaggggaattagt

SEQ ID NO: 10714 - DNA, 60 bp, Homo sapiens
caaatgctgtgacctgtttggctcccatctatacctccccatgacacctaggctgtcagt

SEQ ID NO: 10715 - DNA, 60 bp, Homo sapiens
gcccatcaccatcaaggacgacaagggcaacctcaaccgctgcatcgcagacgtggtctc

SEQ ID NO: 10716 - DNA, 60 bp, Homo sapiens
cgttttgtggccgacgaagaactcgtgcacttgctgctggacgaagtggtggcctctgct

SEQ ID NO: 10717 - DNA, 60 bp, Homo sapiens
ggttttggcaagagtatagcataagtgatacctcacattgcatgacatcaggaggcttat

SEQ ID NO: 10718 - DNA, 60 bp, Homo sapiens
ggtatgtcccagcacatgtagacctcacatggcttgcactcagtgacaccaaatccatga

SEQ ID NO: 10719 - DNA, 60 bp, Homo sapiens
gcagctcccacgacacacggagagactgactgatacgagatttggaaagctatgtagaca

SEQ ID NO: 10720 - DNA, 60 bp, Homo sapiens
acctggtagacctcattgcctttcttcgtagcacctttgctgtattcacacaccttcctg

SEQ ID NO: 10721 - DNA, 60 bp, Homo sapiens
ggagggatcacatactctgaagtgcgttgtgcttatgaagtttctcaggcacataaatcc

SEQ ID NO: 10722 - DNA, 60 bp, Homo sapiens
agtaagctcatcgacaaacaactccaggacgaaaagatgggctacatgtgtacgcaccgc

SEQ ID NO: 10723 - DNA, 60 bp, Homo sapiens
tgtttggtgaagtttgcttttccccataaaacactccaggaacaactgacgtgacagttg

SEQ ID NO: 10724 - DNA, 60 bp, Homo sapiens
ggagtggaatcttcctcatgtacctgtttcctctctggatgttgtcccactgaattccca

SEQ ID NO: 10725 - DNA, 60 bp, Homo sapiens
agttgtgactgttggacagttcaaaattggtctgatccatggacatcaagttattccatg

SEQ ID NO: 10726 - DNA, 60 bp, Homo sapiens
gagaagctagatgacttggtgtccaaatccgaggtgctgggaacacagtctaaagccttc

SEQ ID NO: 10727 - DNA, 60 bp, Homo sapiens
tctagaattttctgtaaaccctgctactgggtttgaagagttttagtcatcctttaacaa

SEQ ID NO: 10728 - DNA, 60 bp, Homo sapiens
acaccatgaagcaactgccagtcttggaacctggagacaagcccaggaaagcaacatggt

SEQ ID NO: 10729 - DNA, 60 bp, Homo sapiens
ctgaattatgccctttttagtgtgtattaggatgtgggctggtttgcttttctaccacct

SEQ ID NO: 10730 - DNA, 60 bp, Homo sapiens
tccccacaacgccatggggcagagccaactctcgagcgcgtgatcgaagcccgcagtttt

SEQ ID NO: 10731 - DNA, 60 bp, Homo sapiens
accgctccctcaggagtcgcctaggccgcgcagtctcccgacttctcgtcaggctttcgc

SEQ ID NO: 10732 - DNA, 60 bp, Homo sapiens
tctccctggaaaaggagacatgaatgtctgcaatgatacttcctgacaagaagttgatac

SEQ ID NO: 10733 - DNA, 60 bp, Homo sapiens
gctacaatccagcactaactatccatgtccagggtaaggatcgagatcgagaagcccaca

SEQ ID NO: 10734 - DNA, 60 bp, Homo sapiens
tgtaaagttcatgccatccaggcatttaagagcgatcctcatcccttcagcaatatgtat

SEQ ID NO: 10735 - DNA, 60 bp, Homo sapiens
catttcctatcttcctgtgtcttgtgcatgggaagcagccttcagtgccttcatgaattc

SEQ ID NO: 10736 - DNA, 60 bp, Homo sapiens
ggatggatgccttcaatcaggaaaaggtgaaccagatccagaagactgtgatcgagccct

SEQ ID NO: 10737 - DNA, 60 bp, Homo sapiens
agtctcgggtgactcaatatgaaagggacttcgagaggatttcaacagtggtccgaaaag

SEQ ID NO: 10738 - DNA, 60 bp, Homo sapiens
ctagatttactgcttcttgcacccgtaatacttatggttaccctcattgacatcttgggt

SEQ ID NO: 10739 - DNA, 60 bp, Homo sapiens
agactggcttcagtacagagaccttgccacctacaaaggcctctttccagagaacttcac

SEQ ID NO: 10740 - DNA, 60 bp, Homo sapiens
cctgtgccatcgtgctccctcctgatgggcaccgtggtggaggaagtcacccagctgttt

SEQ ID NO: 10741 - DNA, 60 bp, Homo sapiens
atttatgtcccgagaccttagcctggctgagtggagcctgagacctgcacaacagctcat

SEQ ID NO: 10742 - DNA, 60 bp, Homo sapiens
tcacccaggcaccttcgcttccagatgctgccaggctgtcactcaattcggtcatttcat

SEQ ID NO: 10743 - DNA, 60 bp, Homo sapiens
aaagatactcccagctgacagggtgataaaaggcagggaagaattgggcctgtgctgatc

SEQ ID NO: 10744 - DNA, 60 bp, Homo sapiens
gcctcacaaacctgttattccagtgtaatctgcagtgtcgtaactaaagttactggcttg

SEQ ID NO: 10745 - DNA, 60 bp, Homo sapiens
ccctggaccatctgaatggagcagccaagttcagtcccacatttctgtactgttcctctt

SEQ ID NO: 10746 - DNA, 60 bp, Homo sapiens
ccaagctctttggtcaagaaactccagagcagagagaagccagaataaaggtgctagaag

SEQ ID NO: 10747 - DNA, 60 bp, Homo sapiens
tcagccctttcgctgtcctagttggcaatggcagtgtcttggccataacatctgtgtgaa

SEQ ID NO: 10748 - DNA, 60 bp, Homo sapiens
gtcttgtggcccaactaccagagaacgctgtcccccgacatcccactccaaagtgtgcca

SEQ ID NO: 10749 - DNA, 60 bp, Homo sapiens
cagcagagattcctctgtcctggatggcacagacagtcagacagggaatgatgaagaggc

SEQ ID NO: 10750 - DNA, 60 bp, Homo sapiens
actctcgtgcttattgcagatgctgtggttggcctcacaagcaacgccttatgctgatgt

SEQ ID NO: 10751 - DNA, 60 bp, Homo sapiens
ctgtccctggatcgccttgtcataattgggtctgttccttttactaccactcttgagtcc

SEQ ID NO: 10752 - DNA, 60 bp, Homo sapiens
tggactgtggcatgacattctgcaatactttgctgaattgaacactattgtgtcttaaat

SEQ ID NO: 10753 - DNA, 60 bp, Homo sapiens
tttgaacttcaagaagatgaagccctacgaagagtgcagtatctcctcctgtctcgtcca

SEQ ID NO: 10754 - DNA, 60 bp, Homo sapiens
actccaatcccagaattgctcactgagcgctatgccaccgaagcgttgacctgaacatat

SEQ ID NO: 10755 - DNA, 60 bp, Homo sapiens
gagaacgcgattcagacgatggagctgcggaactacttctccctgtactgcctgcaccag

SEQ ID NO: 10756 - DNA, 60 bp, Homo sapiens
tcatatagacggaaaatgaaatgctagaactgccgttctttggatcgccactctatgggg

SEQ ID NO: 10757 - DNA, 60 bp, Homo sapiens
gcaccctcggtgaatccttggtgatgattttggcaactttgggaataaatggcaattccc

SEQ ID NO: 10758 - DNA, 60 bp, Homo sapiens
gcttcgaatgtatcaagcactgaaagaagcccttgggataattggggacatcagcacggc

SEQ ID NO: 10759 - DNA, 60 bp, Homo sapiens
attactaccagggccggaggattaccatcaccggaaatgctgacctgacctttgaccaga

SEQ ID NO: 10760 - DNA, 60 bp, Homo sapiens
tccattgcgggcaagaatgtcatgctggactgtggaatgcacatgggcttcaatgacgac

SEQ ID NO: 10761 - DNA, 60 bp, Homo sapiens
ccgtccacattttgcacagtgcctttacagatttacgtatgggctgatgaagaggccttc

SEQ ID NO: 10762 - DNA, 60 bp, Homo sapiens
aggatgcagtggaagtctcaacctggagaagatgctatacaatgcaagaggtgaactctg

SEQ ID NO: 10763 - DNA, 60 bp, Homo sapiens
cccataatctggctcatggtacctgttcttctatccaaacctttcaattcatgctacctg

SEQ ID NO: 10764 - DNA, 60 bp, Homo sapiens
cttgtgctccatgcaggatgatgacagaattgatctgatgttactgccttgatggtctct

SEQ ID NO: 10765 - DNA, 60 bp, Homo sapiens
gccacagatttgtgcaagatgcacagaacaaagtgacccacctatcagagaccagatctg

SEQ ID NO: 10766 - DNA, 60 bp, Homo sapiens
gggcactgtacccctttgaatccagaagccatgatgaaatcactatccagccaggagaca

SEQ ID NO: 10767 - DNA, 60 bp, Homo sapiens
gattctggctcaaactctcaggttaacagtcttccggcagaatggtgtgaagctcttcac

SEQ ID NO: 10768 - DNA, 60 bp, Homo sapiens
tcgggtttctccctacattcctgctccccagttttcatgtggggtactcaactgacattc

SEQ ID NO: 10769 - DNA, 60 bp, Homo sapiens
gaggatctgtgcccttatactggtctcaggacatttcaactatgatgcctaaaccaccta

SEQ ID NO: 10770 - DNA, 60 bp, Homo sapiens
ccccaccatgtcccgggtttctttcttcgagagtatagaaccgttcattcttgctttgtg

SEQ ID NO: 10771 - DNA, 60 bp, Homo sapiens
ggtgtgaaagggaagtcaaagtcagcttgttcagacttactgggtaatcagccaagttca

SEQ ID NO: 10772 - DNA, 60 bp, Homo sapiens
gctcgggatgctctagtgaatgcagtcattgactccctttcagcttaccgttcttcagtc

SEQ ID NO: 10773 - DNA, 60 bp, Homo sapiens
ctcaccccatgtacggcaacatcctggcatcgtgctcctatgaccggaaagtcattatct

SEQ ID NO: 10774 - DNA, 60 bp, Homo sapiens
gcagttctcatccctctcattggaatagtggcagctcaactcctgaagtgggaaacgaag

SEQ ID NO: 10775 - DNA, 60 bp, Homo sapiens
atcgatggcgagaatgcgggtagcctcacacacatcgaagctcagaacaagatccgggcc

SEQ ID NO: 10776 - DNA, 60 bp, Homo sapiens
tcctcgcaagaccgctctgggagagaaataagcactgggagattggaagcactgctaaca

SEQ ID NO: 10777 - DNA, 60 bp, Homo sapiens
ctgcagggacttttgctctgctgtcctggaccctgtgtgcctcataagggctattctttc

SEQ ID NO: 10778 - DNA, 60 bp, Homo sapiens
ggtccgggattgggaatccgcccatctgggggcctcttctgctttctcgggaattttcat

SEQ ID NO: 10779 - DNA, 60 bp, Homo sapiens
gtttgaagtcttgtgtatttgtctgtgttaatgctgtcaggaggaactgactaagatgtt

SEQ ID NO: 10780 - DNA, 60 bp, Homo sapiens
accttgtacaggcagcatggagaaactaagacagagtgtcctgcccaagtgatggcactg

SEQ ID NO: 10781 - DNA, 60 bp, Homo sapiens
accttccactgcggtaccaacctgtgcatcttcgagacgtggcgctgtgacggccaggaa

SEQ ID NO: 10782 - DNA, 60 bp, Homo sapiens
agggagttgagaaactgtggcacaaggcgagagctggtttcctctgccctgttagagctg

SEQ ID NO: 10783 - DNA, 60 bp, Homo sapiens
cacctatgacgctgaccacgattcaagcaacagcaactgtgcagtgattgtccacggtgc

SEQ ID NO: 10784 - DNA, 60 bp, Homo sapiens
gggtagggtttgggagcttggccctacggtttgtaaaagaaacacatgtcgtgattctaa

SEQ ID NO: 10785 - DNA, 60 bp, Homo sapiens
tttggctgatcctcatcatgaaccgtgcttttagcaggaagaaagacaaaacatggatgc

SEQ ID NO: 10786 - DNA, 60 bp, Homo sapiens
agaacaatgaagcccagtgtaacgtcagtccacagaaatagccacagcttccagtggtgg

SEQ ID NO: 10787 - DNA, 60 bp, Homo sapiens
tgttttatcatcctctcaaagttggtagaactctggggaggtaaagatggaccagtggga

SEQ ID NO: 10788 - DNA, 60 bp, Homo sapiens
tccacggcttcaaagaccaagttggggaagataactggcagcagttctctgagcaattcc

SEQ ID NO: 10789 - DNA, 60 bp, Homo sapiens
atgccattcaggctgatgaagagcagttgcgagttcagctggatacgattcagggtgaac

SEQ ID NO: 10790 - DNA, 60 bp, Homo sapiens
cagaggaaataccctggtggagccctccttccatagaaccagagatggcatctgtggatt

SEQ ID NO: 10791 - DNA, 60 bp, Homo sapiens
gcatagcctgtcaagcagcaaaattgtcacccagagatactgctaaacagactggaattg

SEQ ID NO: 10792 - DNA, 60 bp, Homo sapiens
cccaagttgaagggttcttcccatagcccagaccaccctggatgcctcatggagaattaa

SEQ ID NO: 10793 - DNA, 60 bp, Homo sapiens
gtgacattgagctcctcggatagaatgcatgctcttagtctcaagattgttctccttggc

SEQ ID NO: 10794 - DNA, 60 bp, Homo sapiens
accctgaggagaggactcgagatcaacagcaaacctgtccttccaccaatcaaccctcag

SEQ ID NO: 10795 - DNA, 60 bp, Homo sapiens
tcagtcagcgaacagttcaaggaccctgagcagacaactttcatctgcgtatgcattgct

SEQ ID NO: 10796 - DNA, 60 bp, Homo sapiens
ctacttcacagttttcactctgagctcccagttctctctgatagtgagcgagacatgaag

SEQ ID NO: 10797 - DNA, 60 bp, Homo sapiens
aaagcccgaacttccaaagcctgtttccaagtgggcacttctgaggagatgaagatgctg

SEQ ID NO: 10798 - DNA, 60 bp, Homo sapiens
aggaagccaacgttaacttgcaggccacgtgacataaccacccaaagagccagttgctct

SEQ ID NO: 10799 - DNA, 60 bp, Homo sapiens
cctaagtcactgaggtgtgattgggccaatgttggcatgaggttcttgctctacttccag

SEQ ID NO: 10800 - DNA, 60 bp, Homo sapiens
tgagactgttctccctgacactgtgagagtgtgctgggaccttcagctaaatgtgagggt

SEQ ID NO: 10801 - DNA, 60 bp, Homo sapiens
atctatacacactggcaacaaacctcagagcttggtcggaagcggaaggcagaggaagat

SEQ ID NO: 10802 - DNA, 60 bp, Homo sapiens
tttactttggagcactctgtgtgaagctgtttggtggaacccatgcatctggtgtggtcc

SEQ ID NO: 10803 - DNA, 60 bp, Homo sapiens
aataagccttgttcttaggtttggaacagtctggtctcctgtgtttcatgtttcacctaa

SEQ ID NO: 10804 - DNA, 60 bp, Homo sapiens
gattgccaaccagttcatgagcaagcaactcagtcccaaactacagttcttgttgtgacc

SEQ ID NO: 10805 - DNA, 60 bp, Homo sapiens
tgttttggattccatcatttgggctttcaaacatactatgaggaatgtcgcagatacggg

SEQ ID NO: 10806 - DNA, 60 bp, Homo sapiens
ctccacttgttcagggcttttcttaatactgaacgtagcataagggcttctggaacccag

SEQ ID NO: 10807 - DNA, 60 bp, Homo sapiens; identical to SEQ ID NO: 4855

SEQ ID NO: 10808 - DNA, 60 bp, Homo sapiens
cttggtaactcacctcgacttgtcattacgcctctaactgacaggtgttacagaacattg

SEQ ID NO: 10809 - DNA, 60 bp, Homo sapiens
cctgggattggacagtgtatcctaacaagtcccatgtctggttctgtgtctaaaggcctg

SEQ ID NO: 10810 - DNA, 60 bp, Homo sapiens
aagccgccatggcctaccacagcttcctggtggagcccatcagctgccacgcctggaaca

SEQ ID NO: 10811 - DNA, 60 bp, Homo sapiens
ccaaaagagaaccaacgcttgccaaatcctgacaattcagaaccagctctctgtgacccc

SEQ ID NO: 10812 - DNA, 60 bp, Homo sapiens
accgggagacaagtgtgggtccctctcactgggcttcattctgtggaccaggatcattat

SEQ ID NO: 10813 - DNA, 60 bp, Homo sapiens
ttaaggagaaggcggctcaccttgcctccatgtttggacacggggatttcccgcagaata

SEQ ID NO: 10814 - DNA, 60 bp, Homo sapiens
gtgaagctgcaacatcaactggcatacacatccctgtgatcatgagtctggctcaaagcc

SEQ ID NO: 10815 - DNA, 60 bp, Homo sapiens
acaggcaaaacagaaaccactaaagacatgggacgatgcctcgggaaagacgtcgtggtt

SEQ ID NO: 10816 - DNA, 60 bp, Homo sapiens
ctgacggatcggtgttacctttgcctcatgggagctttgcagcttgaccttgggggtgca

SEQ ID NO: 10817 - DNA, 60 bp, Homo sapiens
ggccggcggggacggggaaaacggagaccaccaaagacctgggtaaggccttggccatac

SEQ ID NO: 10818 - DNA, 60 bp, Homo sapiens
ggccggcggggacggggaagacggagaccaccaaggacttggctaaagctcttgctgtac

SEQ ID NO: 10819 - DNA, 60 bp, Homo sapiens
ggcaacatctacaaaggccttgctcagactggcgcctggggctgctttgacgaatttaat

SEQ ID NO: 10820 - DNA, 60 bp, Homo sapiens
aacggagactgtcaaagatctagcaaaatccttaggcaaacattgtgtggtcttcaactg

SEQ ID NO: 10821 - DNA, 60 bp, Homo sapiens
gtgacgcaaacactctgccaaagattgagcagtcacagcatctcttccaagcacataagg

SEQ ID NO: 10822 - DNA, 60 bp, Homo sapiens
cacttcccctctgcattttcccatcacatagaagactttgacctgtgaagctgccatctg

SEQ ID NO: 10823 - DNA, 60 bp, Homo sapiens
ttgaacccattcgatgagccagaagcatttgtgaccataaaggattctcctccccagtct

SEQ ID NO: 10824 - DNA, 60 bp, Homo sapiens
cccatcaggactcttgtgaaaagagaggatatgttcacacctagcgtcagtattttccct

SEQ ID NO: 10825 - DNA, 60 bp, Homo sapiens
agaagtatcatcagtcccagaatctagcagtgagacgtccgcctatcctgaagctgggtt

SEQ ID NO: 10826 - DNA, 60 bp, Homo sapiens
tggcaccgctaagctgcagagcaggaacatcgtgatgcatctgcctttacccaccaagct

SEQ ID NO: 10827 - DNA, 60 bp, Homo sapiens
gccagaagtaccagactagatggacctgcctgcataggagtttggaggaagttggagttt

SEQ ID NO: 10828 - DNA, 60 bp, Homo sapiens
gctgtatggtgtctactgcttcagagcatacaactgaatgtgcccttagagcgcatcagt

SEQ ID NO: 10829 - DNA, 60 bp, Homo sapiens
ggtaactctcacaatggaagatccccagccatatgaagacaacctagctggacgatcagt

SEQ ID NO: 10830 - DNA, 60 bp, Homo sapiens
gaaacatctcacgaatttcaaatctgatctgctcagcttagcgactgaagattaatgctg

SEQ ID NO: 10831 - DNA, 60 bp, Homo sapiens
gcggctggtacgaccgcaagatcattggtgccttcaagaacctagtggacatcaactttg

SEQ ID NO: 10832 - DNA, 60 bp, Homo sapiens
ttccaggttccatccaccaccttgccaatggtgtagctgtcctctcagaactcctgtgtg

SEQ ID NO: 10833 - DNA, 60 bp, Homo sapiens
ttgggggctatgagcaatgtgatgctggctggctgtcggatcagaccgtgaggtatccca

SEQ ID NO: 10834 - DNA, 60 bp, Homo sapiens
tccctttcctgactgttggtggggctgtcagaccatgccttcttctacagcttcattgtt

SEQ ID NO: 10835 - DNA, 60 bp, Homo sapiens
tcctgttaccctccaagcggtccaaagactactggattgccaagggatcagctttgctct

SEQ ID NO: 10836 - DNA, 60 bp, Homo sapiens
gttgagtgggagattggctttgcctttagcgtgtaaatggaagcactgccattagactga

SEQ ID NO: 10837 - DNA, 60 bp, Homo sapiens
atgtcatcttgtgctagccactggattttgcagattttcctgtccatgcaagcaaggacg

SEQ ID NO: 10838 - DNA, 60 bp, Homo sapiens
tacgggttcgagtatctgggtaattcccctaggctggttattacaccactcacggataga

SEQ ID NO: 10839 - DNA, 60 bp, Homo sapiens
tcggcacaagaactatctacgtgtggttggaaacatggaggccaggtttgcagttgcaac

SEQ ID NO: 10840 - DNA, 60 bp, Homo sapiens
gtcatcgcgcagcaactcattaccattaggaacgccaaagcggcaaagctctctagattc

SEQ ID NO: 10841 - DNA, 60 bp, Homo sapiens
gagactaccaaagacctaggacgtgcccttggcatgatggtctatgtattcaactgttca

SEQ ID NO: 10842 - DNA, 60 bp, Homo sapiens
tgctctgatccatcagttaaccacgttccagtttgaagggcaggagatttccctggactc

SEQ ID NO: 10843 - DNA, 60 bp, Homo sapiens
ggcacgaggatctgtcagccgctccctctgggcttccgtcctccgcccgcgcccgacgga

SEQ ID NO: 10844 - DNA, 60 bp, Homo sapiens
aaagcaactgttatcagaacgatttggtcgaggctcacggactgtggacctggagctaga

SEQ ID NO: 10845 - DNA, 60 bp, Homo sapiens
gcttttccttcaagaagtctttcaagctgagcggcttctccttcaagaagaacaagaagg

SEQ ID NO: 10846 - DNA, 60 bp, Homo sapiens
gggaagacggaaactactaaagacctggacagacccctgggcaccatggtgtatgtcttc

SEQ ID NO: 10847 - DNA, 60 bp, Homo sapiens
ccatgattgctgaaatagtcctatactcctgtgggtttgtcactgctcgaccactgtctg

SEQ ID NO: 10848 - DNA, 60 bp, Homo sapiens
ctattaccatgaatcctggctatgcaggacactctgaattgccggacaatcttaaggttc

SEQ ID NO: 10849 - DNA, 60 bp, Homo sapiens
aggtactctccgttgtggctgttcaggtgaagtccgtccaggacgccatacgcgataaaa

SEQ ID NO: 10850 - DNA, 60 bp, Homo sapiens
ggcaagacggaaacgacaaaggacctggggtaaggccttagccatacagacagttgtgtt

SEQ ID NO: 10851 - DNA, 60 bp, Homo sapiens
agatcgttgcgacctaccgcctgtgctcggaacaactgtcctctcagcatcattacgact

SEQ ID NO: 10852 - DNA, 60 bp, Homo sapiens
ctggggctgttttgatgagtttaacagaattgaattgcctgtattatcagtggcagcaca

SEQ ID NO: 10853 - DNA, 60 bp, Homo sapiens
aatgccagtgctcgagacaacaccatcaacctgatccacacgttccgggactacctgcac

SEQ ID NO: 10854 - DNA, 60 bp, Homo sapiens
gcacatgttttgtacttggtacacgagaaaacccagctttcatcttttgtctgtatgagg

SEQ ID NO: 10855 - DNA, 60 bp, Homo sapiens
attttctatccaagatgtggtacaacctcttaccctgcaagttcagagacccctggtctc

SEQ ID NO: 10856 - DNA, 60 bp, Homo sapiens
ccccagattcttcagcttgatcctggaggtcttttctagtctgagcttctttagctaggc

SEQ ID NO: 10857 - DNA, 60 bp, Homo sapiens
tccacgcttagggcagggatctgggaaattccagtgatctcctttagcagagccctttta

SEQ ID NO: 10858 - DNA, 60 bp, Homo sapiens
gggtaaatcctacccaagccttaaaccacttggcagctatgtgaatgacttccttgcaag

SEQ ID NO: 10859 - DNA, 60 bp, Homo sapiens
aagagtgtgacagttgttcagtctgcattttcgatcatgggctacatgccgagtgctggg

SEQ ID NO: 10860 - DNA, 60 bp, Homo sapiens
gggacccacctacgtgtggactttcaacctgaagactaaggaaaacccatccaagtgggt

SEQ ID NO: 10861 - DNA, 60 bp, Homo sapiens
catttacaacttttacaagggggtgccaacatttgtgggccacctttgtggcgaaggtgg

SEQ ID NO: 10862 - DNA, 60 bp, Homo sapiens
caagatgtacacaatcttttgcctttatttcgtaaagttttatacagaagagagaagagc

SEQ ID NO: 10863 - DNA, 60 bp, Homo sapiens
aggtgatgtttgaggcaccatcagagttaacacaaagaccccaagtagggtgctatatcc

SEQ ID NO: 10864 - DNA, 60 bp, Homo sapiens
tgcccaacttcaggtgactctcaagtggagggcctctgaacccaagccaagccatcgcat

SEQ ID NO: 10865 - DNA, 60 bp, Homo sapiens
attttaaatccggagcttgctacacttgctggaaatctggccactgggcaaggaatgccc

SEQ ID NO: 10866 - DNA, 60 bp, Homo sapiens
tcggcttagtggctgaagactgacactgcccgatcgcctcggttgaagccccctagacca

SEQ ID NO: 10867 - DNA, 60 bp, Homo sapiens
tttcggcttccccaggccccaacaggcagcctatgggacctactgctacgccgagaatta

SEQ ID NO: 10868 - DNA, 60 bp, Homo sapiens
acgtggccatgtgggccgcaaaaatccagttgtacttttctgccgagagggaccaccaga

SEQ ID NO: 10869 - DNA, 60 bp, Homo sapiens
tccgcagctcagaccctttcttcagctctgaaagagaaacacgtatcccacctgacatgt

SEQ ID NO: 10870 - DNA, 60 bp, Homo sapiens
gactcagatgtggaacaggccctgcagacctttgccaagacctcaggcaccatgaataac

SEQ ID NO: 10871 - DNA, 60 bp, Homo sapiens
aacattctgaccaacaatcagactctgcggcttctcatggggcaggggcttccagtggtg

SEQ ID NO: 10872 - DNA, 60 bp, Homo sapiens
agcgacctttgaccccaaccactgaggttctctatgcaagatggagagaggatgcaccct

SEQ ID NO: 10873 - DNA, 60 bp, Homo sapiens
caaggagcagctggtgaagaacacatatgtcctgtgaccgccctgtcgccaagaggactg

SEQ ID NO: 10874 - DNA, 60 bp, Homo sapiens
ggcgctggaacgatgtcccctgcaactacaacctaccctatgtctgcaagaagggcacag

SEQ ID NO: 10875 - DNA, 60 bp, Homo sapiens
tgcccttctgcacaggagagcaaggcacttgcagtagtgatctatgccagcaaaacatca

SEQ ID NO: 10876 - DNA, 60 bp, Homo sapiens
caagatggatgcaaagaggctagtgcctcagagagaactgtacggggtttgtgactggaa

SEQ ID NO: 10877 - DNA, 60 bp, Homo sapiens
gtgtgcttgcatcgtgttgtgcagaaggagtagagatcctgcttacgagctcctcatcac

SEQ ID NO: 10878 - DNA, 60 bp, Homo sapiens
gggcaatgggaatgggagttaatcttcttgtggccaacacacatcatgtcagcctaaata

SEQ ID NO: 10879 - DNA, 60 bp, Homo sapiens
taatcaggtgctttgtaaccaagcacatcggaaccagagggtggaggttggtgtggaaga

SEQ ID NO: 10880 - DNA, 60 bp, Homo sapiens
tgtcctctccattgagcttccaacagacatgccccagaagcactggataaaccgaggggt

SEQ ID NO: 10881 - DNA, 60 bp, Homo sapiens
gtgattcttctgcctcctcacccacagaggaagagcaggagcagggggagatcggtgcct

SEQ ID NO: 10882 - DNA, 60 bp, Homo sapiens
agagctcctgctttcccgagaaaacgtggaccaggaggctctgctcagctatgccaggga

SEQ ID NO: 10883 - DNA, 60 bp, Homo sapiens
gcgggcgcggtggagcccggggccggcctgctctccggggccgaggtgacacgcacggct

SEQ ID NO: 10884 - DNA, 60 bp, Homo sapiens
tgaccttcgtgctggggctgctttctggctttttggtctggagacgatgccgcaggagag

SEQ ID NO: 10885 - DNA, 60 bp, Homo sapiens
caagatggttccccaccttctgaatacacctggttcaaagatgggatagtgatgcctacg

SEQ ID NO: 10886 - DNA, 60 bp, Homo sapiens
aggcactgcaggctgagcaggggaagtcagacatggagaggaaaatcgcagaattggaga

SEQ ID NO: 10887 - DNA, 60 bp, Homo sapiens
ttctacctccgaaaacgcaacaagacgggcaagcatgacgtccaggtcctgactgccaag

SEQ ID NO: 10888 - DNA, 60 bp, Homo sapiens
ggggtactcttgtcaaaaggcacattggtgcgtgtgtgtttgctagctcacttgtccatg

SEQ ID NO: 10889 - DNA, 60 bp, Homo sapiens
tctttcacaatcaacagtgttgacatgaagagcctgccggactggacggtgcaaaatggg

SEQ ID NO: 10890 - DNA, 60 bp, Homo sapiens
ccagatggctctttcacttcatccgagggctccagtgggaagagcaagaagaggtcgtca

SEQ ID NO: 10891 - DNA, 60 bp, Homo sapiens
ccctgacgctcttccacaccgttcagtcaacagagaaacaggaacaaaggaacagcatca

SEQ ID NO: 10892 - DNA, 60 bp, Homo sapiens
agggcccaaaggcaggcgacagcatcctgacggttgatgtggcctgaaagcacttagcgg

SEQ ID NO: 10893 - DNA, 60 bp, Homo sapiens
atgtaagaaaagctgatgaggctggtgacgttcagcctttgtcaataaacctgtcatgtg

SEQ ID NO: 10894 - DNA, 60 bp, Homo sapiens
agaaaaccctggtaagtaatgagggctgagtttgcacagtggtctggaatggactgggtg

SEQ ID NO: 10895 - DNA, 60 bp, Homo sapiens
cagtaaagggtggaggtgatatggcattctgaaagtagggagggactaagtcagtcgtca

SEQ ID NO: 10896 - DNA, 60 bp, Homo sapiens
atgagaggaggcagcaggactgtccccttgaaggagaatcatcaggaccctggacctgat

SEQ ID NO: 10897 - DNA, 60 bp, Homo sapiens
tcctacccagccagatccaaactctagtcaaagaagggtccccaaatgtcccagaacact

SEQ ID NO: 10898 - DNA, 60 bp, Homo sapiens
ctagagcaaagcaaagtagcttcgggtcttgatgcttgagtagagtgaagaggggagcac

SEQ ID NO: 10899 - DNA, 60 bp, Homo sapiens
tgcccgtctgatggggagatggctgatgcccagaacatttcactggacagcccagggagt

SEQ ID NO: 10900 - DNA, 60 bp, Homo sapiens
tttcactcttcaaagccaaagaggctacactgctcctggctgtgtcgaacctgtgctttg

SEQ ID NO: 10901 - DNA, 60 bp, Homo sapiens
tgcttccaaagccagaaccctggggttagcaccgtggtgctgggtgcctatgacctgagg

SEQ ID NO: 10902 - DNA, 60 bp, Homo sapiens
ggagtgaaagcacttcagaatttaaaccaggatactccctgcatgatacatctgtggcag

SEQ ID NO: 10903 - DNA, 60 bp, Homo sapiens; identical to SEQ ID NO: 4855

SEQ ID NO: 10904 - DNA, 60 bp, Homo sapiens
aattgcagagtactggctgatggagtaaatcgctaccttttgctgtggcaaatgggcccc

SEQ ID NO: 10905 - DNA, 60 bp, Homo sapiens
tgggcctgcaattggccaacttctttgccttcactaacagctccctgaatccagtaattt

SEQ ID NO: 10906 - DNA, 60 bp, Homo sapiens
ggctctactttcaggccacatggctaaagaaggtttcagaaagaagtggggacagagcag

SEQ ID NO: 10907 - DNA, 60 bp, Homo sapiens
tcaagctgggcttctacgcctacttgggcgtcctgctggtgctaggcctgctgctcaaca

SEQ ID NO: 10908 - DNA, 60 bp, Homo sapiens
gaccagcagcaatcctgggcagccagtggctcttgtagagaagacttaggatacctctct

SEQ ID NO: 10909 - DNA, 60 bp, Homo sapiens
ggatgctgaaacggcaagtcagtgtatcgatttctagtgctgtgaagtcagcccctgaag

SEQ ID NO: 10910 - DNA, 60 bp, Homo sapiens
tcaccaaatcagtgaccatcgttgtcctgtccttcttcctgtgttggctgcccaaccagg

SEQ ID NO: 10911 - DNA, 60 bp, Homo sapiens
acctttgggaacctacaccacatttccctgctcttctccacaatcaacagtagcgccaac

SEQ ID NO: 10912 - DNA, 60 bp, Homo sapiens
caagactgctcctctctgccgactacaacagattggagccatggctttggagcagaacca

SEQ ID NO: 10913 - DNA, 60 bp, Homo sapiens
ttgcagctcaacgcatttcaagattcgggcagcattgtcctggaaatcgcagacgacggc

SEQ ID NO: 10914 - DNA, 60 bp, Homo sapiens
tttccttttgctcttaagttgtggagagtgcaacagtagcataggaccctaccctctggg

SEQ ID NO: 10915 - DNA, 60 bp, Homo sapiens
ggggaaagtggaaggagaaatgcagccgatatagagtcattatgtttgcaaagcccctgg

SEQ ID NO: 10916 - DNA, 60 bp, Homo sapiens
actttggagcacagcacagccagaaaggggctgcatttgtgcccaggtcaggagcaaatt

SEQ ID NO: 10917 - DNA, 60 bp, Homo sapiens
ttggtgtctagcaagaccctgtgctccatggaagaagccatcaatgagaggatccaggag

SEQ ID NO: 10918 - DNA, 60 bp, Homo sapiens
aaccatgtgctgtaccaagagtttgctcctggctgctttgatgtcagtgctgctactcca

SEQ ID NO: 10919 - DNA, 60 bp, Homo sapiens
ttattctgaggaatacagtgagcagatatgggcagcagccaggtagggcaaaggggtgaa

SEQ ID NO: 10920 - DNA, 60 bp, Homo sapiens
tcatctaagccttctggttttatgggtcagagttccgactgccatcttggacttgtcagc

SEQ ID NO: 10921 - DNA, 60 bp, Homo sapiens
tccatttgccttattgctacttcaagctctttaaatcaccatcttccctatttctgcgag

SEQ ID NO: 10922 - DNA, 60 bp, Homo sapiens
cggagaattagagttcagctcagctgggcatggagttaagatccctcacaggacccagaa

SEQ ID NO: 10923 - DNA, 60 bp, Homo sapiens
cttgtcctgaagtattggagttcatgtctaacttcttcccagggcattatgtacagtgct

SEQ ID NO: 10924 - DNA, 60 bp, Homo sapiens
gctcagtagtggcagcagtaaggacaatgtacccaatcactctctgtattgctgtttcca

SEQ ID NO: 10925 - DNA, 60 bp, Homo sapiens
agctttcttccactgttgtctgaaccccatcctctatgctttccttggagccaaatttaa

SEQ ID NO: 10926 - DNA, 60 bp, Homo sapiens
ctgttcatcctaccctaatgccagttccagcttcatctacccttgagtcatattgaggca

SEQ ID NO: 10927 - DNA, 60 bp, Homo sapiens
agtatctcctcgcaagctgggtaatcgatgggggagtctgaagcagatgcaaagaggcaa

SEQ ID NO: 10928 - DNA, 60 bp, Homo sapiens
ccttcattcaacagatatccatcatgcacttgctatgtgcaaggcctttttaggcactag

SEQ ID NO: 10929 - DNA, 60 bp, Homo sapiens
agccctctcaagttaaacgaactgaactaggcctggtggaaggaggcgcactttcctcct

SEQ ID NO: 10930 - DNA, 60 bp, Homo sapiens
ttcttgcaccatggtaaagaatgtgtgtggtaaatctccgtttatatgtagttggaaaaa

SEQ ID NO: 10931 - DNA, 60 bp, Homo sapiens
gcctgtagctattgggataattcgggaaatccacagggacagttcaagtcatctttgtcc

SEQ ID NO: 10932 - DNA, 60 bp, Homo sapiens
ctcattgtcactctgatgttcatgtgaactggttgcttcgggctctttgatctgtcacct

SEQ ID NO: 10933 - DNA, 60 bp, Homo sapiens
atcagagcagcagtgaaaacaagtgctggcaccaccaggcacctcacagaaatgagatca

SEQ ID NO: 10934 - DNA, 60 bp, Homo sapiens
agggagatcccatccccttgtctgaactggagccatgggcacaaagggcccagattaaag

SEQ ID NO: 10935 - DNA, 60 bp, Homo sapiens
gggaaaggaaatggcattgctgctttcaaccagcgactaatgcaatccattcctctcttg

SEQ ID NO: 10936 - DNA, 60 bp, Homo sapiens
ttgtcacacagggcagtcattcagcaccagagcacgtgatggtctgagactctcttagga

SEQ ID NO: 10937 - DNA, 60 bp, Homo sapiens
tgctcagctcccacggagacccacagtctctcctgggacaactagggctgcgaatctaga

SEQ ID NO: 10938 - DNA, 60 bp, Homo sapiens
gggaccaaagactagacagaattcagtaagtcacatgaagtaatggtcatgcctgtacat

SEQ ID NO: 10939 - DNA, 60 bp, Homo sapiens
tcctccggaacgtgttgactgaagagtccgtggttagggagagcaagtcattcacgcgct

SEQ ID NO: 10940 - DNA, 60 bp, Homo sapiens
tgagagaataagtcatgttccttcaagatcatgtaccccaatttacttgccattactcaa

SEQ ID NO: 10941 - DNA, 60 bp, Homo sapiens
cagacggattttacttctggagacatggcatacggttactgacttatgagctaccaaaac

SEQ ID NO: 10942 - DNA, 60 bp, Homo sapiens
ccagaaacccatccctgggtacatcgtgaggaacttccactaccttctcatcaaggatgg

SEQ ID NO: 10943 - DNA, 60 bp, Homo sapiens
agcatccctagaaagccatgtgcagccaccagtccattgggcaggcagatgttcctaata

SEQ ID NO: 10944 - DNA, 60 bp, Homo sapiens
tggagaacagatgcacgagaaatccatcccctacagccaggagacccttgtggttgacta

SEQ ID NO: 10945 - DNA, 60 bp, Homo sapiens
tggctagtagtctctggcaccctgtccgtctccagccagccagctcatttcactttacac

SEQ ID NO: 10946 - DNA, 60 bp, Homo sapiens
ccttcaggccaaccatgccagaggaagttaccagacccaattatccagggattatgtacc

SEQ ID NO: 10947 - DNA, 60 bp, Homo sapiens
aactaaaacttcatcttccccaagtgcggggagtacaaggcatggcgtagagggtgctgc

SEQ ID NO: 10948 - DNA, 60 bp, Homo sapiens
tcatgcacctgggcagatacatcccattccttcctagtgagaagctggaaagaaccagct

SEQ ID NO: 10949 - DNA, 60 bp, Homo sapiens
ggtaaagaacaacagtggtgccagtcatcaaacatacagtgcgtcctattgagtcactgc

SEQ ID NO: 10950 - DNA, 60 bp, Homo sapiens
gactctctcaacccagggacacccaaggatatgtcttctgaagatcaaggcaagaacctc

SEQ ID NO: 10951 - DNA, 60 bp, Homo sapiens
gccaaggtctttctgatcctccacttcattattggcttcacggtgcctatgtccatcatc

SEQ ID NO: 10952 - DNA, 60 bp, Homo sapiens
tctggtttaactggttggaacgactaaagcacgctggcgcaaggaaagctctcaacttcg

SEQ ID NO: 10953 - DNA, 60 bp, Homo sapiens
acaaggagtgacggcctgaccccctgggctctaaagaggaatgtctgctgttgcacatct

SEQ ID NO: 10954 - DNA, 60 bp, Homo sapiens
cacccttaaaagcaacagaaatgacgtctggaagctgaaatgtgaaactgtcaagatggc

SEQ ID NO: 10955 - DNA, 60 bp, Homo sapiens
gtcaaatgacacgagccttcctgacaagtgtaactcattcctacacaacaaggcggagtg

SEQ ID NO: 10956 - DNA, 60 bp, Homo sapiens
ggctccgtagtgaaatgaacgctccctaccataaagagaagttagaggtcaggaacatgc

SEQ ID NO: 10957 - DNA, 60 bp, Homo sapiens
ccagtgtagggaattgaggaagaagctgcaagaggaagaacaccatagtaaggagctcag

SEQ ID NO: 10958 - DNA, 60 bp, Homo sapiens
agacactgcgccaggaacaccggaaggagatgcaggccatggtggcagatttcagtagtg

SEQ ID NO: 10959 - DNA, 60 bp, Homo sapiens
tgtcccagtgtcggagagacctggaggccgtgaactccagactccacagccgggagctga

SEQ ID NO: 10960 - DNA, 60 bp, Homo sapiens
gatctggaagagccatgtttctggtgaaaagaagacaaaactgagggcaactcctgaagc

SEQ ID NO: 10961 - DNA, 60 bp, Homo sapiens
gtccgtgttccatcctccacgcacccccacctatcgttggttcgcaaagtgcaaagcttt

SEQ ID NO: 10962 - DNA, 60 bp, Homo sapiens
ttacggagagcaacctacagaccagctcctgttagctcgtggtcctcaaggactcagaaa

SEQ ID NO: 10963 - DNA, 60 bp, Homo sapiens
tttaaccacaaaacgccatcgtcgtcagggtaagctctgctctctacaaagactcgcgag

SEQ ID NO: 10964 - DNA, 60 bp, Homo sapiens
tatagtggttgagcatgaggagttcgaaagctgcaggcaagctctgcacaaacaactgca

SEQ ID NO: 10965 - DNA, 60 bp, Homo sapiens
aagattgaatgcctgcaaggggacagagacctgtgcagcttggatacccaggacctacaa

SEQ ID NO: 10966 - DNA, 60 bp, Homo sapiens
agtgtcaggaattgtgttgtgagttggaagagctacagcatcatcgccaggtcagtgagg

SEQ ID NO: 10967 - DNA, 60 bp, Homo sapiens
tgggcaggctgaaagatggcggcggcgtctgtctctgcggcttctggttctcacttgtcg

SEQ ID NO: 10968 - DNA, 60 bp, Homo sapiens
gacccctcaacatcctaagacacatccagaatcatgcagttattgtcggctttcttgggc

SEQ ID NO: 10969 - DNA, 60 bp, Homo sapiens
tttcagttaccctttaaggagtccctttgtctttgggaaagtagcagaatggtccgcttc

SEQ ID NO: 10970 - DNA, 60 bp, Homo sapiens
cggcagctctcacctttctgtgacttgttcggaattaactcctctggatggaaacttcca

SEQ ID NO: 10971 - DNA, 60 bp, Homo sapiens
cagccttttgtaggattactacaggttaatgtgagttgaggaagacagtctttctcaaac

SEQ ID NO: 10972 - DNA, 60 bp, Homo sapiens
accccggaccccagcgctgtctcttcccgccgcccgaaccaccatgacccacttcaacaa

SEQ ID NO: 10973 - DNA, 60 bp, Homo sapiens
acaaagggcctaatgagaaccaatcatcatggaagtcagttgcgggggcagcccataagg

SEQ ID NO: 10974 - DNA, 60 bp, Homo sapiens
cttgtgccctcaaatcagttgtccctccagatgagaagcactggaatgatctggctttgg

SEQ ID NO: 10975 - DNA, 60 bp, Homo sapiens
cctggcttctggtcattgccctgataatcacgtggtcagctgttgccatcgttatgtttg

SEQ ID NO: 10976 - DNA, 60 bp, Homo sapiens
gtcccttggcaaatctgttctttcaaagcataccttccccaaatgagcctacctacttct

SEQ ID NO: 10977 - DNA, 60 bp, Homo sapiens
atcgacaccatccccaaccagctcttcatcaacctcactgacctactatacctggacctc

SEQ ID NO: 10978 - DNA, 60 bp, Homo sapiens
atactctgcactcaactttcctcatggctggctccttgtcatcattcagctccaccttcc

SEQ ID NO: 10979 - DNA, 60 bp, Homo sapiens
ttttctgagcgcgttgcctgttgagtggtagcctttcccctcaaccagcaatggaggagc

SEQ ID NO: 10980 - DNA, 60 bp, Homo sapiens
cacccacaaggccatttacagcttcttcattgaacactgtatctcttgagagaggtggcc

SEQ ID NO: 10981 - DNA, 60 bp, Homo sapiens
aagtccatcaagtacctcatctgcacccggtacaagtggctcatcatcaagatcgtgctg

SEQ ID NO: 10982 - DNA, 60 bp, Homo sapiens
gtctcctgtatgttgagtctagaattgctgtgttgttcttagaagcagtctttgggcaac

SEQ ID NO: 10983 - DNA, 60 bp, Homo sapiens
tctacgccttcccgaactatgctgccatgaagctggtgaagcccttcagctgaggactct

SEQ ID NO: 10984 - DNA, 60 bp, Homo sapiens
ggtgggcgaaacctccaaaagaccattttcccatgacaatgcagattttggcaaagctgc

SEQ ID NO: 10985 - DNA, 60 bp, Homo sapiens
tgattaatcctcaattcatgtggccttacgggatggtgggtctgggaccccaattcattc

SEQ ID NO: 10986 - DNA, 60 bp, Homo sapiens
agggagcagacatggggttcagtgcatggattgggatgctctacatggaccattatcaca

SEQ ID NO: 10987 - DNA, 60 bp, Homo sapiens
gccctgcctttggttcctggacatttggtattctgccctccactctggtactatcagagt

SEQ ID NO: 10988 - DNA, 60 bp, Homo sapiens
aacgcctatgggagagtatggagcgctcagatgaggaaaatctcaaggaggagtgcagca

SEQ ID NO: 10989 - DNA, 60 bp, Homo sapiens
tttgattggatattctcctcggactgtgtgcaggttgcagaggaagagtagatgagccgg

SEQ ID NO: 10990 - DNA, 60 bp, Homo sapiens
gcaccaaaggcctagtgacttttacacagttgtgaagatccacagcaatgacatggataa

SEQ ID NO: 10991 - DNA, 60 bp, Homo sapiens
gaactgcttctgtgtgccctgttttcatcccaagatttctcacttcatcctctcctacct

SEQ ID NO: 10992 - DNA, 60 bp, Homo sapiens
aaaaagcagagattacatcttcaaacaaaaagcccatcttagatgtcacaaagccaaaac

SEQ ID NO: 10993 - DNA, 60 bp, Homo sapiens
tcagtttgtgggtgcttgcttgaatgatcccagccagtttgccattgtcactcaatacat

SEQ ID NO: 10994 - DNA, 60 bp, Homo sapiens
ggtgttccgtgtaaatagccagcctgtctctttctcggtgataaaacacaccctctctgg

SEQ ID NO: 10995 - DNA, 60 bp, Homo sapiens
ccactccagagaacagagagcaaagccacggaaaacgcacaataaataacacagacacag

SEQ ID NO: 10996 - DNA, 60 bp, Homo sapiens
accagtcatcgtaccaagtagggatcaaccaacggttccatgcagctcgccacaaatttc

SEQ ID NO: 10997 - DNA, 60 bp, Homo sapiens
cctgggggataccagctgagtctgaattctgctctaaataaagacgactacagaaggaaa

SEQ ID NO: 10998 - DNA, 60 bp, Homo sapiens
tagatgctgctaactgttcctcggctgatcgttttgtgacccttctgctgcctacaatcc

SEQ ID NO: 10999 - DNA, 60 bp, Homo sapiens; identical to SEQ ID NO: 4855

SEQ ID NO: 11000 - DNA, 60 bp, Homo sapiens
aaattcttggctggtaaccgcgaaaccgactggagcaggagctgggagaactggagaaaa

SEQ ID NO: 11001 - DNA, 60 bp, Homo sapiens
ctagctttacctgtgcctgcagacatccttttactggtgacaactgcactatcaagcttg

SEQ ID NO: 11002 - DNA, 60 bp, Homo sapiens
caggagccagaagaagtaaggctaaatctctgacagatccaagccaagaatctcatacag

SEQ ID NO: 11003 - DNA, 60 bp, Homo sapiens
gcaaccgtgagatccgagactgtccaaagattaccctagaacatcttggtatctgctgcc

SEQ ID NO: 11004 - DNA, 60 bp, Homo sapiens
gaagaagcaacaagatagtaagaaactggcatcactgtcaatccaaaatgagaaacgtgc

SEQ ID NO: 11005 - DNA, 60 bp, Homo sapiens
ccaacaaagcattgcagggactggtttggctgaaagacaaagaagcaacacattgtaaac

SEQ ID NO: 11006 - DNA, 60 bp, Homo sapiens
ccttcttgggaattgcttcgtttgccattttcttatggagaactgtccttgttgtgaagg

SEQ ID NO: 11007 - DNA, 60 bp, Homo sapiens
aaggctcatcaagtcccgaggaaagtctcagtccaaacacctcaatgtccaaatagcggc

SEQ ID NO: 11008 - DNA, 60 bp, Homo sapiens
ggaacaacggtggttggatgaacagcaacagataatggaatctcttaatgtactacacag

SEQ ID NO: 11009 - DNA, 60 bp, Homo sapiens
ccgattgtgccactcctgattttgttcctgagcctagtcctcatgacttgcctatggatg

SEQ ID NO: 11010 - DNA, 60 bp, Homo sapiens
agcaactggaagaagacattgccctgtttgaggctcagtacttggcccaagctgaggaca

SEQ ID NO: 11011 - DNA, 60 bp, Homo sapiens
ctttgtatcaaggaggaaatcagcttttgcttagtgatcaggagttaacagagcagtttc

SEQ ID NO: 11012 - DNA, 60 bp, Homo sapiens
ccttcatcaagcagcagcaaaggttgcctctgagcgggacactgacattgcttctttaca

SEQ ID NO: 11013 - DNA, 60 bp, Homo sapiens
atttgctgctctatgactgtatgccgtggacaagagatgcctgggcgtcaccatgccaca

SEQ ID NO: 11014 - DNA, 60 bp, Homo sapiens
ccttacagaagcacaggaaactgtaccttcacgatgtctacatctggatgcagagaatga

SEQ ID NO: 11015 - DNA, 60 bp, Homo sapiens
gtaggcagcccttctaggccatctagtgctagtagtagctctagtaatgttaagagcaaa

SEQ ID NO: 11016 - DNA, 60 bp, Homo sapiens
acagcttagaaatgaacttcagctagagcaaagccgagcagccaatcaagaacaacgagc

SEQ ID NO: 11017 - DNA, 60 bp, Homo sapiens
ttctgggacaagctgagcaagctgtatgaacgccacgtttgtgaagagctgagggtatca

SEQ ID NO: 11018 - DNA, 60 bp, Homo sapiens
tgcggagttcaccaacgccattcgtcgagaaaagaagttgaaggccagagttcaagagct

SEQ ID NO: 11019 - DNA, 60 bp, Homo sapiens
agaaccagcctaggaacactcgggatgacaccccttatcacaccaaggacagcaagtttt

SEQ ID NO: 11020 - DNA, 60 bp, Homo sapiens
atagagacaggtctcatcgggaggaaatggaggtccatgagctggagaagtccaagcggg

SEQ ID NO: 11021 - DNA, 60 bp, Homo sapiens
gaactggaacagatatccagaactagtgaactttccgaagcaccccagaaatccctgggc

SEQ ID NO: 11022 - DNA, 60 bp, Homo sapiens
ggtgggagtggccagtgttggcggttcttagagcagatgtgtcattgtgttcatttagag

SEQ ID NO: 11023 - DNA, 60 bp, Homo sapiens
caatgcctctgtttaccagcccctgaagaaatgaaggccagctgtgtgttgtgcccaaaa

SEQ ID NO: 11024 - DNA, 60 bp, Homo sapiens
gctgggtgagaggctgacagaagacgaagtggagaagttgatggctgggcaagaggactc

SEQ ID NO: 11025 - DNA, 60 bp, Homo sapiens
tccgggatagtcttcaaggtctcaacgaaggcgttggccaaggcatttggttccgcggcc

SEQ ID NO: 11026 - DNA, 60 bp, Homo sapiens
tgatgcagagcctgcactctggcactcgctgaagaatctggaaggttgcggtttgctctt

SEQ ID NO: 11027 - DNA, 60 bp, Homo sapiens
atggatctgaagtagagatcagcaggaagccttgctgcctgggacatagagatcatctgg

SEQ ID NO: 11028 - DNA, 60 bp, Homo sapiens
aacctgagacctggctttgtgaccgtcagcacagcccacgtatatacacccttgcctttt

SEQ ID NO: 11029 - DNA, 60 bp, Homo sapiens
gggtctgatcctcttgatggagaaactgcagcagcatggaaattgttgggtactgtggca

SEQ ID NO: 11030 - DNA, 60 bp, Homo sapiens
cagcccgagctgtgctcctgcgacagcccttcgagaagctgcagatgtcttcagatgacg

SEQ ID NO: 11031 - DNA, 60 bp, Homo sapiens
caccagcggaaactgagtttaagtccactgaaagtctctaaggaagtatcctcttgctgc

SEQ ID NO: 11032 - DNA, 60 bp, Homo sapiens
cgtaaagcctgatggtgagaatagagctcgcttccttccagggaaagatctgaccgaaaa

SEQ ID NO: 11033 - DNA, 60 bp, Homo sapiens
taacaggaacgaacgagcggagaagcacaagagggaagctaggcggcagagtgccaggga

SEQ ID NO: 11034 - DNA, 60 bp, Homo sapiens
aagtgcaacgcctgtggaaagggtgaagctacaggaagctctctcccagcttgatttcca

SEQ ID NO: 11035 - DNA, 60 bp, Homo sapiens
tggccaacattggaaagcactagagggcaatgggattaaaccaacctgcttggtctctat

SEQ ID NO: 11036 - DNA, 60 bp, Homo sapiens
accagcttgctagtcgggccgttttaatcgtcagaggcgctgcttccgcggcggttgggg

SEQ ID NO: 11037 - DNA, 60 bp, Homo sapiens
gggaaatacccagaaaagaaacggctaaagctctggcatcatcatcccagaacatggtca

SEQ ID NO: 11038 - DNA, 60 bp, Homo sapiens
gggctaatgacactatctgtgccaatgagttggaaatagagcgcctcaccatgagggtca

SEQ ID NO: 11039 - DNA, 60 bp, Homo sapiens
atcagatagaagctaacaaggaccaaagtggagctgaaagcaccatacctgatgctgatc

SEQ ID NO: 11040 - DNA, 60 bp, Homo sapiens
tccggtaagcatgaccccggagatagagagagtgaggcgaaaccaggagcagctgagtgc

SEQ ID NO: 11041 - DNA, 60 bp, Homo sapiens
atgcactcagtgctctcagacctccacgaggctgttcccacagtggttggcattcctgat

SEQ ID NO: 11042 - DNA, 60 bp, Homo sapiens
tgccaaatggaaccagaggaagtggagatcatggcaacagagctactgaaaggacgagag

SEQ ID NO: 11043 - DNA, 60 bp, Homo sapiens
gaatgtctcagttcacagaagctggagatagaccttttaaagtctagtaaagaagagctc

SEQ ID NO: 11044 - DNA, 60 bp, Homo sapiens
accagtataaagagcagatggagaaggccaacgctcggatgaagcagcttaaacgccagc

SEQ ID NO: 11045 - DNA, 60 bp, Homo sapiens
ttgatcctgaagacataccagctatggaacgcctgacccaggaagtcttacttcttcggg

SEQ ID NO: 11046 - DNA, 60 bp, Homo sapiens
tcacccagtctgtctcagctggagtcttccctcacagaggactctcaacttggacaaaat

SEQ ID NO: 11047 - DNA, 60 bp, Homo sapiens
aaattaagccactgtgctgccttagattccgtgggtcatgagccatgagtcctgggacat

SEQ ID NO: 11048 - DNA, 60 bp, Homo sapiens
ggaacggaggcttcacgagtgtcaggagagtctgcagtgctgcaaggggaagtgtgcaga

SEQ ID NO: 11049 - DNA, 60 bp, Homo sapiens
ctacctcagatccatcttcatccattgcattggaaactgctttatgctgctgcagtctgc

SEQ ID NO: 11050 - DNA, 60 bp, Homo sapiens
cagagctgcaagggagagggttccagaagcattgccttttgcctcgtctaataggatcct

SEQ ID NO: 11051 - DNA, 60 bp, Homo sapiens
taaacatcaggaggtggggatcatgaggaatcaccctagagtttgtctgccatagtctat

SEQ ID NO: 11052 - DNA, 60 bp, Homo sapiens
ggcctaacagcgcattcctttgattggtccttgagtgaccagagacttagtgcccttgta

SEQ ID NO: 11053 - DNA, 60 bp, Homo sapiens
gccttcagtgctgcccatgaagagcaatggaagttaaaggagcaacagctgaaagtgcag

SEQ ID NO: 11054 - DNA, 60 bp, Homo sapiens
gcactttcagtggattggtcatctgggttctaaagggaagagtctgtgctactaaccatt

SEQ ID NO: 11055 - DNA, 60 bp, Homo sapiens
tagatgaagaaaacactgtcatggttgcttcggcctcagtcagtcagtcccagcttccag

SEQ ID NO: 11056 - DNA, 60 bp, Homo sapiens
cagtatgtgccagttaaaacccatgaagaggttaaaatgacactgaatgacacgttagcc

SEQ ID NO: 11057 - DNA, 60 bp, Homo sapiens
accccgccctctgacttcttgccctttggaaatggtgcagcactctggcatttatcaccc

SEQ ID NO: 11058 - DNA, 60 bp, Homo sapiens
gcgacggtatctatagccctttatacgagcgatggatcttgagctctccttccatgttgt

SEQ ID NO: 11059 - DNA, 60 bp, Homo sapiens
tagttcatagtcctctcctggttccggtcaaagcctttcctcagccttcacccaaccttt

SEQ ID NO: 11060 - DNA, 60 bp, Homo sapiens
tcagatcaaggagcttggaaaccggctgtgggatgtggccgacttcgtgaagccacctca

SEQ ID NO: 11061 - DNA, 60 bp, Homo sapiens
tccacaagtgactctcgctgaccttggacactcacccagggtgccaacccttcaatgcct

SEQ ID NO: 11062 - DNA, 60 bp, Homo sapiens
cttcacagaagccgtggcttacatccaggcccagtacgagagcaagaacaagtcagccca

SEQ ID NO: 11063 - DNA, 60 bp, Homo sapiens
gcagagctagagagattgcaagctgaaaatacctcggagtgggacaagagggaaatactt

SEQ ID NO: 11064 - DNA, 60 bp, Homo sapiens
gacctgactggtgaccagagcagatccctgccgtacaagctgatctccctgctaaatgaa

SEQ ID NO: 11065 - DNA, 60 bp, Homo sapiens
aagccatgaagccagtagacaagacagatattctgtatgctggaggggatacaggatgat

SEQ ID NO: 11066 - DNA, 60 bp, Homo sapiens
ttatggacttcccttcatccttgctgcattcacagtcgacctacagtgacttcaggccca

SEQ ID NO: 11067 - DNA, 60 bp, Homo sapiens
ggcactaaggaatcttagaaacacacaaggaatactgaaggacactcagctacatttgga

SEQ ID NO: 11068 - DNA, 60 bp, Homo sapiens
cacctggtacctcaaagatgactcatctacaggttgtttcctattgagactttcccaggg

SEQ ID NO: 11069 - DNA, 60 bp, Homo sapiens
accatggggaacagcaggagtctttggggatgataagagtcatggatgtgatctgggtag

SEQ ID NO: 11070 - DNA, 60 bp, Homo sapiens
gactgtaatcaggatatggaagagatgatgtctgagcaggaaaatccagattccagtgaa

SEQ ID NO: 11071 - DNA, 60 bp, Homo sapiens
gtggccagtggcttggtggaagacaaatcagaactaactgggcaacccgaaagcctcccg

SEQ ID NO: 11072 - DNA, 60 bp, Homo sapiens
actacgtaaggactccaagatgtacaaggaccgcatcgaggccatcctgctgcagatgga

SEQ ID NO: 11073 - DNA, 60 bp, Homo sapiens
gcccgtgcttgagcaggttggtaattctgactgtcactatcaggaaggactaaaagactc

SEQ ID NO: 11074 - DNA, 60 bp, Homo sapiens
cctgcaaacccatttccagctcctagtagctttcctcccaaaggctttctttccaatcct

SEQ ID NO: 11075 - DNA, 60 bp, Homo sapiens
gccaggagtggtttgcccggtacttcacattctgaaagaattgtgttggcacagctctgt

SEQ ID NO: 11076 - DNA, 60 bp, Homo sapiens
tttgcagcgactggcatactatgtggatgtgacagtggcgtttgtaatgagagcactttc

SEQ ID NO: 11077 - DNA, 60 bp, Homo sapiens
atgagatcaagtggtttaaggtacacacgtgcaaacgtctgcctggcacatgcaggtgct

SEQ ID NO: 11078 - DNA, 60 bp, Homo sapiens
aatattgagctgggcaacaacaacaggaacaaagaatctgggagcagggcagtgctccag

SEQ ID NO: 11079 - DNA, 60 bp, Homo sapiens
ggctgaagatggcccaatggaggagtccaaaccaaagcccaggtcgttcatgcccaactt

SEQ ID NO: 11080 - DNA, 60 bp, Homo sapiens
ctctgtcttccatgggagccaactacagcagctacctggccaaggctgaccagaagagag

SEQ ID NO: 11081 - DNA, 60 bp, Homo sapiens
ttcctgggctgcagagagctgggcggagtgtggaattcttctcgggaggcagtgctgggt

SEQ ID NO: 11082 - DNA, 60 bp, Homo sapiens
aaggacgacagcaaagggaaatctgaggaggagctgtctgacctcttccgcatgtttgac

SEQ ID NO: 11083 - DNA, 60 bp, Homo sapiens
gaagagatgatcgctgagttcaaggctgcctttgacatgtttgatgctgatggtggtggg

SEQ ID NO: 11084 - DNA, 60 bp, Homo sapiens
tggaggagctgctgaccacgcagtgtgaccgcttctcccaggaggagatcaagaacatgt

SEQ ID NO: 11085 - DNA, 60 bp, Homo sapiens
caaagagtgtttgctttcaaatgccatgggttacacttttatgggcatgactataaccat

SEQ ID NO: 11086 - DNA, 60 bp, Homo sapiens
cgtggtgcctcctttgatcccgccaaagatcccagaaggggagcgcgttgacttcgatga

SEQ ID NO: 11087 - DNA, 60 bp, Homo sapiens
cacttgctcttctgtgattattgtcatgtattaggctaatgctgtgttgtctcccacctg

SEQ ID NO: 11088 - DNA, 60 bp, Homo sapiens
ctggaggggcttagaaacaaaaactggatgaaagagtatgcatgaagaaaagcttctttg

SEQ ID NO: 11089 - DNA, 60 bp, Homo sapiens
actctacagttccaacgtgctgttccattcactcttctggccaacctgtatgatggctgg

SEQ ID NO: 11090 - DNA, 60 bp, Homo sapiens
ggggacaccttctttatcatcagcaaaggaacggtaaatgtcactcgtgaagactcaccg

SEQ ID NO: 11091 - DNA, 60 bp, Homo sapiens
ttgcacagactggtccacagggctcctgaaggaagcccctggatctttggggtaaaagga

SEQ ID NO: 11092 - DNA, 60 bp, Homo sapiens
ctgcccgagactcgccatttctgcccgtgaatttgtgtctgatcgctttgtacagatttg

SEQ ID NO: 11093 - DNA, 60 bp, Homo sapiens
aaccagcatgaacgacaccctgttctcccactctgttccctcctcaggaagtccttttat

SEQ ID NO: 11094 - DNA, 60 bp, Homo sapiens
aacctccaaagattcgcatcccaagacacctgaagcaaacctatatccgcagagttggag

SEQ ID NO: 11095 - DNA, 60 bp, Homo sapiens; identical to SEQ ID NO: 4855

SEQ ID NO: 11096 - DNA, 60 bp, Homo sapiens
tgaatgctaagtccatcaccctttccggcacactgccaaataaacagctatttaaggggg

SEQ ID NO: 11097 - DNA, 60 bp, Homo sapiens
ccaaagtgcttaggccaggacttttaccacctggagctagtgtcccagctgaagctaaaa

SEQ ID NO: 11098 - DNA, 60 bp, Homo sapiens
ttctgttccctccatctatgcacagctttcccccactctctctaatcctgtatctttctg

SEQ ID NO: 11099 - DNA, 60 bp, Homo sapiens
gcctaagctgggatctgaataccccttctctgtagctgctagtgagccttcccatttaga

SEQ ID NO: 11100 - DNA, 60 bp, Homo sapiens
ttcgagtataaggagcatgacttccggatggctcccaagttcctgacacctctcatagac

SEQ ID NO: 11101 - DNA, 60 bp, Homo sapiens
tcagcccactgtgtctgcccgatgctcacctgtccagaggccaacgctaccaaggtctgt

SEQ ID NO: 11102 - DNA, 60 bp, Homo sapiens
cacctaacacatatgacactttgatggactcttaaacctcctaatcgaacatggcctccc

SEQ ID NO: 11103 - DNA, 60 bp, Homo sapiens
atagctaccaaccgagcaggacagaactcattcagcctggagcttgtggttgctgctaaa

SEQ ID NO: 11104 - DNA, 60 bp, Homo sapiens
gctcctggaactccggacaaacaactaccagctttcagatgaactacgcaagaatggtgt

SEQ ID NO: 11105 - DNA, 60 bp, Homo sapiens
ccaggccagactaactgggctcaaggggtgctggaaggcgcagagattggagtgccctgc

SEQ ID NO: 11106 - DNA, 60 bp, Homo sapiens
tgagacgggcatcgcaggagtctctgccacccactcaggattgggaattgtctttagtgc

SEQ ID NO: 11107 - DNA, 60 bp, Homo sapiens
aatgctatgaaagggcagtgagacaagacctcatcctacctccctgaccagctctggctt

SEQ ID NO: 11108 - DNA, 60 bp, Homo sapiens
ctaaagggagcatgtttcacagtggctggactaccgagagcttggactacacaatacagt

SEQ ID NO: 11109 - DNA, 60 bp, Homo sapiens
cttgtttcttggcttttgctcctggagttaagcttactgcccaggtgacttgtgcattgc

SEQ ID NO: 11110 - DNA, 60 bp, Homo sapiens
cccagcagtagaagatgttggtaggattcttggctctgatacagagtcttggatgtcccc

SEQ ID NO: 11111 - DNA, 60 bp, Homo sapiens
ggcttcttgtagatgtgaatctggctacactggacagcactgtgaaaagacagactttag

SEQ ID NO: 11112 - DNA, 60 bp, Homo sapiens
gtgacgatggccaaacctacaacaatccttgcatgctctgtcatgaaaacctgatacgcc

SEQ ID NO: 11113 - DNA, 60 bp, Homo sapiens
cctgctttctccaagacagattttcggaacacatttccctaccctaaagcgacatcccag

SEQ ID NO: 11114 - DNA, 60 bp, Homo sapiens
tggaagagaacctgactcaagtgggcagtatcctgggaaatctaaaagacatggccctga

SEQ ID NO: 11115 - DNA, 60 bp, Homo sapiens
aataatcaggacggagtggtggccagccagcctgctcgtgtagtggacgaacgggagcag

SEQ ID NO: 11116 - DNA, 60 bp, Homo sapiens
actttgtcctgaaaattccctggttctgttccattttgagcgaaattggccttgggaaaa

SEQ ID NO: 11117 - DNA, 60 bp, Homo sapiens
ctgccctggaacagcttcttgaaggttatgaccagcaagaccaagatcaggtgtcagatg

SEQ ID NO: 11118 - DNA, 60 bp, Homo sapiens
gctgatctgtaaacccttaccccttgctgttcagagagctactctttgtagtgttcttgc

SEQ ID NO: 11119 - DNA, 60 bp, Homo sapiens
tgactccctctggtttccggtcaggtcggtcggtccccactatgggcctggagctgtacc

SEQ ID NO: 11120 - DNA, 60 bp, Homo sapiens
gtcattcagaacgaggtggatgctttctggtgtttctgtggcttcatggagctcgtgcaa

SEQ ID NO: 11121 - DNA, 60 bp, Homo sapiens
catggccaccaagtttgcacacttgaagctgttgctgcgacacgctgaccctgactttta

SEQ ID NO: 11122 - DNA, 60 bp, Homo sapiens
ccagcaggcagagaaaatcctgaaggagcaagagcggctggcctacataaaccccgacct

SEQ ID NO: 11123 - DNA, 60 bp, Homo sapiens
gcccagtggatgatcctactgctcccagcaacctctacatccaggaatgagtccctaggg

SEQ ID NO: 11124 - DNA, 60 bp, Homo sapiens
gagaggcggatggaaactgaggggtgaaacgagggaaagggtaggtacatgcgtattatt

SEQ ID NO: 11125 - DNA, 60 bp, Homo sapiens
tcttggacgagcgctctagctctgtgggaaggttttgggctctctggctcggattttgca

SEQ ID NO: 11126 - DNA, 60 bp, Homo sapiens
ctggcgtccaagggatatcgcgcgaggttcgcagccaataaggaggcggatgtgacggcc

SEQ ID NO: 11127 - DNA, 60 bp, Homo sapiens
agggctgctgcctcagctccaagacaagaatgaacctggctgtgtcagtcattttgtctt

SEQ ID NO: 11128 - DNA, 60 bp, Homo sapiens
gatcaacagcctggggaaactgccgacgctcaaggatggtgatttcatcttgaccgaaag

SEQ ID NO: 11129 - DNA, 60 bp, Homo sapiens
gattctgaacttaccgactggctgagagtgaatggagctgatgaagacactataagccgg

SEQ ID NO: 11130 - DNA, 60 bp, Homo sapiens
atggccttgtaacagccattgttcccaacagcatcacttaggggtgtgaaaagaagtatt

SEQ ID NO: 11131 - DNA, 60 bp, Homo sapiens
cctgaggtcacagaatgaatagatcaccaagagtatgaggctcctgctctgatttcctcc

SEQ ID NO: 11132 - DNA, 60 bp, Homo sapiens
gacagaaagcaatagtaagcagcagcagcagagagacaacacgatgacgcagcagacaga

SEQ ID NO: 11133 - DNA, 60 bp, Homo sapiens
gccagtgcaattcaaaggcctggattaatggcttcagcttggtctttcatcaccaccttc

SEQ ID NO: 11134 - DNA, 60 bp, Homo sapiens
tgcagaaaggacctgccctgataatgtcccttccccagattctcaagcagatgcccaagg

SEQ ID NO: 11135 - DNA, 60 bp, Homo sapiens
tacgagtcagccaaagtcttgaacgtggaccccgacaatgtgaccttctgtgtgctggct

SEQ ID NO: 11136 - DNA, 60 bp, Homo sapiens
gagactaattgaggaacagaaacagattcaccagcatcgaagactgacaagagctcagtc

SEQ ID NO: 11137 - DNA, 60 bp, Homo sapiens
atgggcaggatctcttgttctctcctgagtgtctttctactctcctgagcgtctttctgc

SEQ ID NO: 11138 - DNA, 60 bp, Homo sapiens
gctctaagatagataggtgtttgtccttttaccatcgagctacttcccataataaccact

SEQ ID NO: 11139 - DNA, 60 bp, Homo sapiens
acctcaggctgaagtctatctccgcatgtatcagctggagtctgggaagttacctcgaag

SEQ ID NO: 11140 - DNA, 60 bp, Homo sapiens
cgtcagaagccagaccttttcctgatttgacatccagtggattcctgtaattccaagccc

SEQ ID NO: 11141 - DNA, 60 bp, Homo sapiens
ttccccaccaagagattcagggtcacaggtttttccccacacctctgaactcagggccta

SEQ ID NO: 11142 - DNA, 60 bp, Homo sapiens
tttgccagaatgggactgtgaactgggtactcttaccatgcagacacacatgcctgtgtg

SEQ ID NO: 11143 - DNA, 60 bp, Homo sapiens
tattgagaggaacaaagagcttataaatacattaggacctggaattcagttgtcgagcca

SEQ ID NO: 11144 - DNA, 60 bp, Homo sapiens
tctctgccagtggagccagaaatgacagcccaacacagataccagtgtcctcagatgtct

SEQ ID NO: 11145 - DNA, 60 bp, Homo sapiens
gagagctagtgatgacagaaggatgtggaatgtcttcttgacatcattgtgtattgctgg

SEQ ID NO: 11146 - DNA, 60 bp, Homo sapiens
tccttatctgaaactagacatcctctgcagccagaagaacaagaagtaggcattgacccc

SEQ ID NO: 11147 - DNA, 60 bp, Homo sapiens
gtggaggcctaccgagagatcatccgtgacaacaacatggacttcactgacatcatcaag

SEQ ID NO: 11148 - DNA, 60 bp, Homo sapiens
ctcagtggtctccttcatagagtgagagggcttgagaccctccctcaaccggactaatta

SEQ ID NO: 11149 - DNA, 60 bp, Homo sapiens
gtacaaagcataattagctgtggactgtacaaaagcaggaagcaggttggacatggcttt

SEQ ID NO: 11150 - DNA, 60 bp, Homo sapiens
gaggttgagctggtccggaatccctaagccagtgcgtccaatgacgtggaagctcctctc

SEQ ID NO: 11151 - DNA, 60 bp, Homo sapiens
actaccacactcctgcagaccctgagccagcagagagggactgaggcggacagtggtcac

SEQ ID NO: 11152 - DNA, 60 bp, Homo sapiens
ggtcatgaagaagaacatgatgttcatcaagacctgtgcctgccattacaactgtcccgg

SEQ ID NO: 11153 - DNA, 60 bp, Homo sapiens
atggtctgggcactggacttagatgactttgccggcttctcctgcaaccagggccgatac

SEQ ID NO: 11154 - DNA, 60 bp, Homo sapiens
actaatgtgtccgccaccttgaccttcaataccagcaagatcactgggttcctgaagcca

SEQ ID NO: 11155 - DNA, 60 bp, Homo sapiens
tcatatgtgggaaggcagaggatctctgaggagttccctggggacaactgagcagcctct

SEQ ID NO: 11156 - DNA, 60 bp, Homo sapiens
gcagtaggacaagtaatccataccgtgttccggccaatctggaaaatgtcggctttgagg

SEQ ID NO: 11157 - DNA, 60 bp, Homo sapiens
aaggaggctgtcctctcatccttacccaagaactggggaaagccaacactactgactttg

SEQ ID NO: 11158 - DNA, 60 bp, Homo sapiens
cctgggaatcaagggaaaagatctctgtctcttctgtgcagaaattcagggcaagcctac

SEQ ID NO: 11159 - DNA, 60 bp, Homo sapiens
atgagccccagtgaggtcagcgattaggaaactgccccattgaacgccttcctcgctaat

SEQ ID NO: 11160 - DNA, 60 bp, Homo sapiens
aaatcatccgtggccatgcagccttcacgagtgatcccaagcccacaatagaggtcagtg

SEQ ID NO: 11161 - DNA, 60 bp, Homo sapiens
gtgccacctgctgtggactgttttctttgcctagtgactagtgacctgtgttgtctaaac

SEQ ID NO: 11162 - DNA, 60 bp, Homo sapiens
gtcccacctactacatagatactaatgctctgcgtgttccgagggagaatatggaggcca

SEQ ID NO: 11163 - DNA, 60 bp, Homo sapiens
agccacctttctggcccacagctcccaccaccacttcctgtatgggctccttgaagagga

SEQ ID NO: 11164 - DNA, 60 bp, Homo sapiens
caagctggtgctgtgtaggccacaaggcatctgcatgagtgactttaagactcaaagacc

SEQ ID NO: 11165 - DNA, 60 bp, Homo sapiens
ctagaaataaatttaactgaggatgtaaaagacctctacaaggagagttcaatgcgtagc

SEQ ID NO: 11166 - DNA, 60 bp, Homo sapiens
aagttactcaaggatttgctctggggatcaagtgtggggcttcctatgcgcaggtgatgc

SEQ ID NO: 11167 - DNA, 60 bp, Homo sapiens
ggacaggattcactgtgtggcttatgtcttagacatcaactctattgacaatctctactc

SEQ ID NO: 11168 - DNA, 60 bp, Homo sapiens
tgacctgtctcagaaccacgtgctggttggcaggaagaacctcaggctcctggacgaaat

SEQ ID NO: 11169 - DNA, 60 bp, Homo sapiens
caatgcagatgttagcaaaagaatgagactacttcatatgtcctaattggaaaaagtctc

SEQ ID NO: 11170 - DNA, 60 bp, Homo sapiens
tctgaaatgtacctggttctgcccttggaagccacttcctgctcatgccactaacagcat

SEQ ID NO: 11171 - DNA, 60 bp, Homo sapiens
gaatgagcaagaatggaagatcaagctgcaagtgcttgaccctgtacccaagcctgtcat

SEQ ID NO: 11172 - DNA, 60 bp, Homo sapiens
gtccagcaccactacaactctcactatgaaaagtttggcgacttcgtctggagaagtgag

SEQ ID NO: 11173 - DNA, 60 bp, Homo sapiens
aaccacgaggagtccagagaggaaacgcggagcggagacaacagtacctgacgcctcttt

SEQ ID NO: 11174 - DNA, 60 bp, Homo sapiens
aacctagagcccaaggttcagagtcacccatctcagcaagcccagaagtatctgcaatat

SEQ ID NO: 11175 - DNA, 60 bp, Homo sapiens
atggagatacctgaggctattgctcaagcccaggccttggacatttagtgactgttagcc

SEQ ID NO: 11176 - DNA, 60 bp, Homo sapiens
aattactgagaggcagtttggtggcatgctacttgcctacagtggggtgcagtccaagaa

SEQ ID NO: 11177 - DNA, 60 bp, Homo sapiens
ggcagccagacaggaaatgacatcggagagagagacaagatcacagagaatccagtcagt

SEQ ID NO: 11178 - DNA, 60 bp, Homo sapiens
accacaagtacacttagcgtggagaagctggtgatctagactgagaatcagcctgagctt

SEQ ID NO: 11179 - DNA, 60 bp, Homo sapiens
aaaacgagcggcgctctttcgggccgggacaggggtttgaatgccctggcttacggtcct

SEQ ID NO: 11180 - DNA, 60 bp, Homo sapiens
gagctagtgcttttaggagaacagataaatgtggtctcagccagccctagagactgcttc

SEQ ID NO: 11181 - DNA, 60 bp, Homo sapiens
gtagcccacccatgagaagcaagagaccttaaaggcttcctatcccaccaattacaggga

SEQ ID NO: 11182 - DNA, 60 bp, Homo sapiens
gaccaagatgatgatgaggatttagttgacacctgtgcttttctgcacatcaagacaggt

SEQ ID NO: 11183 - DNA, 60 bp, Homo sapiens
aagaaccttctaggcaagtacaccgaatgactcagtccagagggtcagatgctgctgtga

SEQ ID NO: 11184 - DNA, 60 bp, Homo sapiens
ggccatccaggacaccacgattctcccaaagtaccttgaactcttagtgattgagactca

SEQ ID NO: 11185 - DNA, 60 bp, Homo sapiens
agaatggttttggagctcgagatcttcatgggttagacttgctggtcagacccaggagca

SEQ ID NO: 11186 - DNA, 60 bp, Homo sapiens
aaagactgtgccctcagacgtggacagctagggtctgctgcatctgcccccttcttacct

SEQ ID NO: 11187 - DNA, 60 bp, Homo sapiens
gatggacagtgtggtcaaggaccttaaagacaaggccaaagagactgcagatgccatcac

SEQ ID NO: 11188 - DNA, 60 bp, Homo sapiens
agcatgcaggacctgaccctgatccgggacgaggacgcactgcccctgcagaggcctgac

SEQ ID NO: 11189 - DNA, 60 bp, Homo sapiens
acagaagccaaactggaagtggaggagccaagggattgacaaacaacagagccttgacca

SEQ ID NO: 11190 - DNA, 60 bp, Homo sapiens
gccacactgcggtccctttcccgggcctgcctctctcagcatcccctctagctccttaca

SEQ ID NO: 11191 - DNA, 60 bp, Homo sapiens; identical to SEQ ID NO: 4855

SEQ ID NO: 11192 - DNA, 60 bp, Homo sapiens
atgacttcaacttcaactatcgcattcagtgctgcactagcacagtcaaccaagcccagg

SEQ ID NO: 11193 - DNA, 60 bp, Homo sapiens
gcctttgatttcctggactggacagacggcgagtgaattctctagaccttgggtactttc

SEQ ID NO: 11194 - DNA, 60 bp, Homo sapiens
caccagtggttcctcctccctgttaaagactaatgctcagatgctgtttacggatattta

SEQ ID NO: 11195 - DNA, 60 bp, Homo sapiens
catctaagctcctgtatcagcactcctcatcatcactcatctgccaagctcctcaatcat

SEQ ID NO: 11196 - DNA, 60 bp, Homo sapiens
tattttctggtggcctcatggggtggttctaggactggatttcctggtgaggtccaagct

SEQ ID NO: 11197 - DNA, 60 bp, Homo sapiens
ctcccacaccacttaatgaggtttgaggccaccaaaagatcaacagacaaatgctccaga

SEQ ID NO: 11198 - DNA, 60 bp, Homo sapiens
ctggaagtgaagatgcctccaagaaagatggggctgttgagtctatctcagtgccagata

SEQ ID NO: 11199 - DNA, 60 bp, Homo sapiens
aatacacttggactgataagtggagggtgaggtacactaactgggctgctgatgagccca

SEQ ID NO: 11200 - DNA, 60 bp, Homo sapiens
tgacgcgtggttctgcaattggatctccgtgcagggtccgggagcaaacggggacgagtt

SEQ ID NO: 11201 - DNA, 60 bp, Homo sapiens
tagctggccaagactactgggccgtgctttctggaaaaggcatttcagccacgctgatga

SEQ ID NO: 11202 - DNA, 60 bp, Homo sapiens
ttttggggtgccactcagaggattgtgattgtgaacaatgttgttgactagcactgtgag

SEQ ID NO: 11203 - DNA, 60 bp, Homo sapiens
acaggctcttcttccaacaccccagaggaaacagacgacgttgacaattccagccttgat

SEQ ID NO: 11204 - DNA, 60 bp, Homo sapiens
aaagcagagtatgaagagagatggccctttcacccctgctatttggactgggagtcagag

SEQ ID NO: 11205 - DNA, 60 bp, Homo sapiens
gcagcctgcttcagagacgaatagttgtttccctgctagcctcagcctccattgtggtat

SEQ ID NO: 11206 - DNA, 60 bp, Homo sapiens
atggattcaaggatttgcattgtgggccctaatggtgtggggaagagtacgctactcctg

SEQ ID NO: 11207 - DNA, 60 bp, Homo sapiens
ctcaaacctaccactcaggaatgtttgctggggccgaaagaacagtccattgaaagggag

SEQ ID NO: 11208 - DNA, 60 bp, Homo sapiens
ctgtggtgacagcccagtacgactgcctcggctgtgtgcatcctatatcaacgcagagcc

SEQ ID NO: 11209 - DNA, 60 bp, Homo sapiens
tggagagcagagcaccaagatcgttctggcaggaacagccagtgggaggttccagctgag

SEQ ID NO: 11210 - DNA, 60 bp, Homo sapiens
tgaaggagtgcagaaagaggacatcccacctgcagacctcagtgaccaagtcccggacac

SEQ ID NO: 11211 - DNA, 60 bp, Homo sapiens
caagtatggctttgtccctatgactcagaggagggtttgtcgggcaaattcaggtggatg

SEQ ID NO: 11212 - DNA, 60 bp, Homo sapiens
agcgctggaagtgggtctcccgaaaccggctattcaacctgggtaccatgcagtgcctgg

SEQ ID NO: 11213 - DNA, 60 bp, Homo sapiens
tgatggaggctggcaagggaaagtttcagctcactgtgaagccagactccccaactgaaa

SEQ ID NO: 11214 - DNA, 60 bp, Homo sapiens
tccctgcacaggtgcctagtggggaggaccagacggccctgtccctggaagagtgcctta

SEQ ID NO: 11215 - DNA, 60 bp, Homo sapiens
ggagccacctatgaagaggctctaacagtttataacctgaaccgcaccactcctggagtg

SEQ ID NO: 11216 - DNA, 60 bp, Homo sapiens
cactctgattcacagccaaggatccagaaggccaaggtcttgttaaggggctactggaaa

SEQ ID NO: 11217 - DNA, 60 bp, Homo sapiens
atggatgtcaaacacctgcaccttgagataatcctacaaccacatgcagttgtgggaccg

SEQ ID NO: 11218 - DNA, 60 bp, Homo sapiens
aaggagctgctgaccagcatctacttcctgatgcacgaggaggtcatcgaggacgagaac

SEQ ID NO: 11219 - DNA, 60 bp, Homo sapiens
acagaaacagctcaaggaaagcttccgggcatttgtggaggacagtgaggacgaggacgg

SEQ ID NO: 11220 - DNA, 60 bp, Homo sapiens
taatggatacacagaggttgcagcagatggtgtgggtacctcacccagatatcatccagg

SEQ ID NO: 11221 - DNA, 60 bp, Homo sapiens
gggagacacatcctttcaccaaacttgtggttgatctgacagatatagaccctgatgtag

SEQ ID NO: 11222 - DNA, 60 bp, Homo sapiens
ctcagtcagtaattgccaaagctgctctagccttgaggagtgtgagaatcaaaactctcc

SEQ ID NO: 11223 - DNA, 60 bp, Homo sapiens
ttcgccgcaacctgggcacctacaaccgcaaatatgcccattatcccaacaagctgtgca

SEQ ID NO: 11224 - DNA, 60 bp, Homo sapiens
tattacgacatgaacgcggccaatgtgggctggaacaactccaccttcgcctaagagccg

SEQ ID NO: 11225 - DNA, 60 bp, Homo sapiens
ggatcacagctgctttctgttgtcattgctgttgtccctctgctacgttcctattgtcat

SEQ ID NO: 11226 - DNA, 60 bp, Homo sapiens
gttaatgaacccagcatcctggaaatgagcagaggagtcaagctcacggatgtggcccct

SEQ ID NO: 11227 - DNA, 60 bp, Homo sapiens
agatgttcacgtcccagtgggtgtggactcttctcttcatgatacggatgtgcggaccat

SEQ ID NO: 11228 - DNA, 60 bp, Homo sapiens
cttccaggttaaggttctccgagaagacagcagagctgctttccgcctctttgagaccaa

SEQ ID NO: 11229 - DNA, 60 bp, Homo sapiens
atgtcccaccctccctagaggggcaccttttcatggtctctgcacccagtgaacacattt

SEQ ID NO: 11230 - DNA, 60 bp, Homo sapiens
tcaggagcactcggaatgggacaagctcttcatcatgctggagaactcgcagatgagaga

SEQ ID NO: 11231 - DNA, 60 bp, Homo sapiens
ctaagcctgatgacccctgtcctgaaggctggcagagtttccccgcaagtctttcttgtt

SEQ ID NO: 11232 - DNA, 60 bp, Homo sapiens
cccagctcagcatttccacaccaagcagcaacagcaaatcacgaccactgatagatgtct

SEQ ID NO: 11233 - DNA, 60 bp, Homo sapiens
gctgaagctgaagaagatggggacctgcagtgcctgtgtgtgaagaccacctcccaggtc

SEQ ID NO: 11234 - DNA, 60 bp, Homo sapiens
ctcagcgggaaggattttgggtaaatctgagagctgcgataaagtcctaggttcccatat

SEQ ID NO: 11235 - DNA, 60 bp, Homo sapiens
tgatgtcttcatctgtatggggtggaaaaatcaccgggaatcccccttcagttctttgaa

SEQ ID NO: 11236 - DNA, 60 bp, Homo sapiens
cactgtgatagaggctgaggaatccaagaaaatggccagtaagatcaatgtgacggcagg

SEQ ID NO: 11237 - DNA, 60 bp, Homo sapiens
cagaactccacaacagtgttacgaattgtgatcctcctctcaggctaacaaaaccttccc

SEQ ID NO: 11238 - DNA, 60 bp, Homo sapiens
catcagcatctgtcctctagaacacacggaagtgaagattcctgaggatctaacttgcag

SEQ ID NO: 11239 - DNA, 60 bp, Homo sapiens
ggaggactttcatagccttaggcagaaattgagccactgtatttcctgtgcttcatcagc

SEQ ID NO: 11240 - DNA, 60 bp, Homo sapiens
cagcactgcctgctgtactcagctctaccgaaagccactctcagacaagctactgaggaa

SEQ ID NO: 11241 - DNA, 60 bp, Homo sapiens
acccagaacagcaccaaggtcagaggggacacctgtattcatacaccagctgcctgactg

SEQ ID NO: 11242 - DNA, 60 bp, Homo sapiens
cttttgacaccttagttccttactgtttacagtttaggagtactgataggggttcatgct

SEQ ID NO: 11243 - DNA, 60 bp, Homo sapiens
tctgggaggcagttctgttgccactctctctcctgtcaatgatggatctcagaaataccc

SEQ ID NO: 11244 - DNA, 60 bp, Homo sapiens
gctgccaaaagatctcgtgagaagcgtcgactgaatgacctggttttagagaacaaacta

SEQ ID NO: 11245 - DNA, 60 bp, Homo sapiens
aaggctggactgggttggctgcagtgtggtgtttagtggataccacatcggaagtgattt

SEQ ID NO: 11246 - DNA, 60 bp, Homo sapiens
gagcgtcttgaattccctgatggtgaaatgtccagcaaaagagtgcaatgaggaggtcag

SEQ ID NO: 11247 - DNA, 60 bp, Homo sapiens
agtttcattctcctgcctgtagcagtgagaaaaagctcctgtcctcccatcccctggact

SEQ ID NO: 11248 - DNA, 60 bp, Homo sapiens
attccacccctagatcaagaatcctgctccactaagaatggtgctaaagtaaaactagtt

SEQ ID NO: 11249 - DNA, 60 bp, Homo sapiens
agtgctgccctcttaccatgcacacgggtgctctccttttgggctgcatgctattccatt

SEQ ID NO: 11250 - DNA, 60 bp, Homo sapiens
aagacaagtccagacactctacacctggctccctgctctgggccctagcaacagagatga

SEQ ID NO: 11251 - DNA, 60 bp, Homo sapiens
cgggcttgaattcctgtcctgtgaaggaagccaaccagagtacgttggaaaacttcttgg

SEQ ID NO: 11252 - DNA, 60 bp, Homo sapiens
taaaggcagcagctcaaggatggcactcagatctccatggcccagcaaggccaagataaa

SEQ ID NO: 11253 - DNA, 60 bp, Homo sapiens
atgtagcagccactgtcatttctcagtggttttgcctaaccaaacttcttcctaaggaga

SEQ ID NO: 11254 - DNA, 60 bp, Homo sapiens
ctattcaagcctattattggcacaaggggaaaacggcagaagggagccctctcattgctg

SEQ ID NO: 11255 - DNA, 60 bp, Homo sapiens
ccactgcccaaagccatcttcctgcctactggatgctacagtgactgtggatacgggggt

SEQ ID NO: 11256 - DNA, 60 bp, Homo sapiens
aggtccaactatgtgctcaaaggacaccgggatgtgcagcgtacactctctccaggcaac

SEQ ID NO: 11257 - DNA, 60 bp, Homo sapiens
gcctgagcatagcatttcgtggtgtgtatctcagagcatccagttaggggtgtgcaagtt

SEQ ID NO: 11258 - DNA, 60 bp, Homo sapiens
atgtgtctccttgaattgatgaggatgctcctgggagggatgcgtgactatgtggtgttg

SEQ ID NO: 11259 - DNA, 60 bp, Homo sapiens
ctggaactaaagggatctgaaacaacattcatgtgtgaatatgctgatgagacagcaacc

SEQ ID NO: 11260 - DNA, 60 bp, Homo sapiens
ggggaagccttattaggctgaaactagccagtcacattgagagaagcagaacaatgatca

SEQ ID NO: 11261 - DNA, 60 bp, Homo sapiens
tttgtgcagattctttaccccctgggagccccaattcgatcccctgtcacgtgtgggcaa

SEQ ID NO: 11262 - DNA, 60 bp, Homo sapiens
aacgtgaagatcaaacaagaacacaacaagcccctactgatttctgggtttctgccacgg

SEQ ID NO: 11263 - DNA, 60 bp, Homo sapiens
caggacttgggctgcttcaggctgaacgctgggagaccacttcctgtgctgacacacaga

SEQ ID NO: 11264 - DNA, 60 bp, Homo sapiens
tcatcttgctggttctgattggagtgcaaggaaccccagtagtgagaaagggtcgctgtt

SEQ ID NO: 11265 - DNA, 60 bp, Homo sapiens
ctaagtggaatagcctccctgtaactccagctctgctccgtatgccaagaggagacttta

SEQ ID NO: 11266 - DNA, 60 bp, Homo sapiens
gaacctctggccttgaggtgtcatgcgtggaaggataagctggtgtacaatgtgctttac

SEQ ID NO: 11267 - DNA, 60 bp, Homo sapiens
ccctcaatttccaaccccatccccatttgctgtccagagtgtgaccacagttaacggtta

SEQ ID NO: 11268 - DNA, 60 bp, Homo sapiens
ccttgctgatggtgacattgcacctggatgtactatccaatctgtgatgacattccctgc

SEQ ID NO: 11269 - DNA, 60 bp, Homo sapiens
cagtgcagcagcaacccacagacatctgtatcatcaagctttccctacaccaaagtcgga

SEQ ID NO: 11270 - DNA, 60 bp, Homo sapiens
ccaaagccaataacacacagctaacacacagctcccataaccgctgattctcagggtctc

SEQ ID NO: 11271 - DNA, 60 bp, Homo sapiens
acagacaagatctaagtggagaaggaatgcgtcctgtggctgcagagatccttggagctt

SEQ ID NO: 11272 - DNA, 60 bp, Homo sapiens
tttggaatgagactgatcctgagttcgtcattgaccacatggacgcaaacaaggcagggc

SEQ ID NO: 11273 - DNA, 60 bp, Homo sapiens
gggccccaacctgggattgctgagcagggaagctttgcatgttgctctaaggtacatttt

SEQ ID NO: 11274 - DNA, 60 bp, Homo sapiens
atagtccatgtctgtgatgtgagccaagtgatatcctgtagtacacattgtactgagtgg

SEQ ID NO: 11275 - DNA, 60 bp, Homo sapiens
agagccgtatggcaaaggccaagagagcagcacggacatcaaggctccagagggctttgc

SEQ ID NO: 11276 - DNA, 60 bp, Homo sapiens
ggctggccatcacttcctgtcccaagcaaacctgggcagacccagccttgaccaagaata

SEQ ID NO: 11277 - DNA, 60 bp, Homo sapiens
atgctcatgcaggttgcaccccagtcctggattagccctcttgatggatgaagacactga

SEQ ID NO: 11278 - DNA, 60 bp, Homo sapiens
tttctgcccatccttcagcgagctgcagagaaatttcgtgaaacatcggccaactaagct

SEQ ID NO: 11279 - DNA, 60 bp, Homo sapiens
catcaagtggtacaacgcctggaacgagaagcgcagggtctacgaagaatagggtgaaaa

SEQ ID NO: 11280 - DNA, 60 bp, Homo sapiens
cggaaagtgatgttcaccccagttgcaaagtaacagcaatgaagtgctttctcttggagt

SEQ ID NO: 11281 - DNA, 60 bp, Homo sapiens
aagatcacgccactggactgtctatgaacttgcaaacaggctgatacctttgtgaagttg

SEQ ID NO: 11282 - DNA, 60 bp, Homo sapiens
ctcttccaactgaagaaggtcaggtctgtcaactccttgatggtggcctctctgacttac

SEQ ID NO: 11283 - DNA, 60 bp, Homo sapiens
tttgtcaaaaggaagtctctaggttctgagctctggctttgccttggctttgccagggct

SEQ ID NO: 11284 - DNA, 60 bp, Homo sapiens
ggaaaaccaggcgtaggtctggagtctcacttgtctcacttgtgcagtgttgacagttca

SEQ ID NO: 11285 - DNA, 60 bp, Homo sapiens
ttattcattggtctaatttattcaaagggggcaagaagtagcagtgtctgtaaaagagcc

SEQ ID NO: 11286 - DNA, 60 bp, Homo sapiens
gaggctttctccaggaggattagcttggagttctctatactcaggtacctctttcagggt

SEQ ID NO: 11287 - DNA, 60 bp, Homo sapiens; identical to SEQ ID NO: 4855

SEQ ID NO: 11288 - DNA, 60 bp, Homo sapiens
ccattgctcatcctaggaagacgggttgagaatccctaatttgagggtcagttcctgcag

SEQ ID NO: 11289 - DNA, 60 bp, Homo sapiens
ttttactgggcatctcctgagcctaggcaatagctgtagggtgacttctggagccatccc

SEQ ID NO: 11290 - DNA, 60 bp, Homo sapiens
tggagaaactgaagacggagtcagagcgtctggagcagcacacgcagaagtcagtcaact

SEQ ID NO: 11291 - DNA, 60 bp, Homo sapiens
acctgaggtggccaagaagtttcccaacatgaagatacagatccatgtctcagcctccac

SEQ ID NO: 11292 - DNA, 60 bp, Homo sapiens
gcatatcctgagccatcggtgaaactaacagataagcaagagagatgttttggggactca

SEQ ID NO: 11293 - DNA, 60 bp, Homo sapiens
aaagcagtgtgggttgattctgaggtgcactgtgggaaagagcttgtcgctgcggtgttg

SEQ ID NO: 11294 - DNA, 60 bp, Homo sapiens
gcttcactggttgagtgttgctctctagtttccagaggcttaatcacaccgtcctccacg

SEQ ID NO: 11295 - DNA, 60 bp, Homo sapiens
agaacaaacccacctgagcaccccagacaccttcctcaacccaggcgggtggacagggtc

SEQ ID NO: 11296 - DNA, 60 bp, Homo sapiens
ctgcaccagaccatgcttcagtgagagactgtctcagatgaccaataccaccatgcaaac

SEQ ID NO: 11297 - DNA, 60 bp, Homo sapiens
ggctattaccgctgtgtcctgacatttgcccatgaaggccagcaatacaacatcactagg

SEQ ID NO: 11298 - DNA, 60 bp, Homo sapiens
tccttgtggaaccgagaggctgagactaacccagaaacatccaattctcaaactgaagct

SEQ ID NO: 11299 - DNA, 60 bp, Homo sapiens
ctcctgcagtctctctgtgtggctgtaacttacgtgtactttaccaacgagctgaagcag

SEQ ID NO: 11300 - DNA, 60 bp, Homo sapiens
gagtggagcccctgtatccgacggaacatgaagtccatcagctgtcaagaaatcccgggc

SEQ ID NO: 11301 - DNA, 60 bp, Homo sapiens
caaggatggaccacacagaggctgcctctcccatcacttccctacatggagtatatgtca

SEQ ID NO: 11302 - DNA, 60 bp, Homo sapiens
atgttccatatcagagctgtgatcttgagagccctctccttggctttcctgctgagtctc

SEQ ID NO: 11303 - DNA, 60 bp, Homo sapiens
cctccagtagtggacaacaggttttcaccatagcctacgttaacccatttttgagccaag

SEQ ID NO: 11304 - DNA, 60 bp, Homo sapiens
caatcagcgccttgtgcaggtaatttgacagagtgttggatgtgtcatgtcatcatgtca

SEQ ID NO: 11305 - DNA, 60 bp, Homo sapiens
aataccattgctactgttgaacctacaccagctcctgccactgaaccaacggtggacagt

SEQ ID NO: 11306 - DNA, 60 bp, Homo sapiens
gtacaccccaagaacgctgtcatttcctgggccaagttgggacccggacggcctcaccat

SEQ ID NO: 11307 - DNA, 60 bp, Homo sapiens
tccctgaacccagcctgacaaatcacagtgagaatgttcaccttataggcttgctgtggg

SEQ ID NO: 11308 - DNA, 60 bp, Homo sapiens
aagagcatgcaggtacccttctccagatgttgcttctcatttgcggagcaagagattccc

SEQ ID NO: 11309 - DNA, 60 bp, Homo sapiens
atgattggcatgactcccaggagaagccagcgatggagaaatggagagcgcaggacttct

SEQ ID NO: 11310 - DNA, 60 bp, Homo sapiens
aggaccaaaccagaaacctccaattctcatgtggaagcccatgccctcaccctccaacat

SEQ ID NO: 11311 - DNA, 60 bp, Homo sapiens
aagccaccagactgacaaatgtgtatcggatgcttttgttcagggctgtgatcggcctgg

SEQ ID NO: 11312 - DNA, 60 bp, Homo sapiens
tcacaggactctgcctcctcttcaactgaccagcctccatgctgcctccagaatggtctt

SEQ ID NO: 11313 - DNA, 60 bp, Homo sapiens
cagattctgagtcactttgaaaagctggaacctcaggcagcagttgtgaaggctttgggg

SEQ ID NO: 11314 - DNA, 60 bp, Homo sapiens
ttatcctgcaacataactctgctgatcgtcaccatcgttgccaccatgctggtgttggct

SEQ ID NO: 11315 - DNA, 60 bp, Homo sapiens
aatgaaacggctggtttgtgtgctcttggtgtgctcctctgcagtggcacagttgcataa

SEQ ID NO: 11316 - DNA, 60 bp, Homo sapiens
tgcgtacccactaatcgccttgagacatcccctttgcagctgcgtatagcgaggcgcacc

SEQ ID NO: 11317 - DNA, 60 bp, Homo sapiens
accttccagtgtctcggagggattcccctaacctcattccccaaccacttcattcttgaa

SEQ ID NO: 11318 - DNA, 60 bp, Homo sapiens
tcatatcaggacatcctgtgagactcttccccctgactcccccattgtgttaagaaccca

SEQ ID NO: 11319 - DNA, 60 bp, Homo sapiens
ctggctgtgacaatggtttcaccatccttagaccaagggatgggacctgatgacctggga

SEQ ID NO: 11320 - DNA, 60 bp, Homo sapiens
cagagtggaatgcttcctagaagttactgaatgcaccatggtcaaaacggattagggcat

SEQ ID NO: 11321 - DNA, 60 bp, Homo sapiens
tctctcccctggaaaggacaccatgagcactgaaagcatgatccgggacgtggagctggc

SEQ ID NO: 11322 - DNA, 60 bp, Homo sapiens
gactacaatgtccagtttctcccctagactcaggcttcctttggagattaaggcccctca

SEQ ID NO: 11323 - DNA, 60 bp, Homo sapiens
tcggtaggctgccattcccgcattaacagccaacaatgcctgaagcgtagccttcatgga

SEQ ID NO: 11324 - DNA, 60 bp, Homo sapiens
gccttcctgctctttctcatgcttcatatctctctcccgtcctcctgttttaggggcata

SEQ ID NO: 11325 - DNA, 60 bp, Homo sapiens
ggggtttaaacgtaactgaaaatccacaagacagaatagccagatctcagaggagcctgg

SEQ ID NO: 11326 - DNA, 60 bp, Homo sapiens
ctgaggcagccagcagatctcagcagcccagtccaaataaactccctgtcagcagcaaaa

SEQ ID NO: 11327 - DNA, 60 bp, Homo sapiens
gtttaggctactctgctggataaagaggccatctcaaagagcactgagacatcagacaag

SEQ ID NO: 11328 - DNA, 60 bp, Homo sapiens
gttattcacctccctgatgcctgctttcagttgagggttgggggcaatgatgagcatatg

SEQ ID NO: 11329 - DNA, 60 bp, Homo sapiens
gtatacctagagtacctccagaacagatttgagagtagtgaggaacaagccagagctgtg

SEQ ID NO: 11330 - DNA, 60 bp, Homo sapiens
tgccaccctggaggccacctcttctaagagtcccatctgctatgcccagccacattaact

SEQ ID NO: 11331 - DNA, 60 bp, Homo sapiens
gcacctgcacccaccgcaagaaacaaactgacatcggaagcaagagggaggattcctgta

SEQ ID NO: 11332 - DNA, 60 bp, Homo sapiens
gtatcctgaaaagagctccattcaagaagtcatgggcctacctccaagtggcaaagcatc

SEQ ID NO: 11333 - DNA, 60 bp, Homo sapiens
aacatccacacgagcacatcacgtcaaaacacgacgagacttgcaggcaacagagagaca

SEQ ID NO: 11334 - DNA, 60 bp, Homo sapiens
ttgagagcatgcctgtgggagtcatggacatgaagggatgctgcaatgtaggaaggagag

SEQ ID NO: 11335 - DNA, 60 bp, Homo sapiens
accctgtccctatctctaccactatagatgagggtgaggagtagggagtgcagccctgag

SEQ ID NO: 11336 - DNA, 60 bp, Homo sapiens
cagtttggtcagatgatgactggttgaagaagttttctgggaagacgcttgaagagaata

SEQ ID NO: 11337 - DNA, 60 bp, Homo sapiens
ccagggagtgtcatgctggggtttgctagggatggagtggctcagcgtctgtgccaaatc

SEQ ID NO: 11338 - DNA, 60 bp, Homo sapiens
cctcagacttgataccaccccttcctgtaacagtgcgagaccacttcatgccttgcaggt

SEQ ID NO: 11339 - DNA, 60 bp, Homo sapiens
ttagtttctccaagcaggacatggacaaggatgatctaggaagactttggaaagagtagg

SEQ ID NO: 11340 - DNA, 60 bp, Homo sapiens
tgtgatacagcctcttcaatcagattgtaagttacctgaaagctgcagttcacaggctcc

SEQ ID NO: 11341 - DNA, 60 bp, Homo sapiens
cctactttgaagagtgtgggggaaagcctacgcttctccctgaagtttacagctcagcta

SEQ ID NO: 11342 - DNA, 60 bp, Homo sapiens
tcacaactgcagccactgacacctcagaagcaagatggtgctctgaatgtcacagcaatg

SEQ ID NO: 11343 - DNA, 60 bp, Homo sapiens
caacacaggggcagtctccaggacctccacaccattaacaagatgagccttgtgctccct

SEQ ID NO: 11344 - DNA, 60 bp, Homo sapiens
tccgggttctggaaggccctgaccttcatggccgtcggaggaggactcgcagtcgccggg

SEQ ID NO: 11345 - DNA, 60 bp, Homo sapiens
gttgctggtcacattcctggcaggatgccaggccaaggtggagcaagcggtggagacaga

SEQ ID NO: 11346 - DNA, 60 bp, Homo sapiens
agccagcctccagaggatgagctggataggctgacgaagaagctggttcacgacatgaac

SEQ ID NO: 11347 - DNA, 60 bp, Homo sapiens
aaaatggaagagacgcccctgctgacgaggaaaatggggagcaagaggctgacaatgaag

SEQ ID NO: 11348 - DNA, 60 bp, Homo sapiens
ggctacattgattggcttctctagaaacccgacactcaatgggagtgagaactggggcag

SEQ ID NO: 11349 - DNA, 60 bp, Homo sapiens
ggcgtctcctgaacctgagtagagacactgctgctgagatgaatgaaacagtagaagtca

SEQ ID NO: 11350 - DNA, 60 bp, Homo sapiens
caccatggcatatgtgtggggcaaaggtcatggagatgtccgtaaggtcttgccaagaaa

SEQ ID NO: 11351 - DNA, 60 bp, Homo sapiens
tgaagaagtgctgttccctcaatctgataggttccagccttatatgcaggaggtggtgcc

SEQ ID NO: 11352 - DNA, 60 bp, Homo sapiens
ttttcagactcctcaaacttgactaaatgcagcgatgctcccagcccaagagcccatggg

SEQ ID NO: 11353 - DNA, 60 bp, Homo sapiens
ccagtccaaggtgttctggaggtctattacacaagcttgaggtgtagatgtgtccaagag

SEQ ID NO: 11354 - DNA, 60 bp, Homo sapiens
tcgtggcctctactcctgcacagccactgagaacaactttaagcacgtcgtcacacgagt

SEQ ID NO: 11355 - DNA, 60 bp, Homo sapiens
gatttcccagttggaacttgtgcagcaaagtttgggagctactgatggacatgtgaaaag

SEQ ID NO: 11356 - DNA, 60 bp, Homo sapiens
gccactgtcatatgctacctttcctatctcttccctcatcatcttgttgtgggcatgagg

SEQ ID NO: 11357 - DNA, 60 bp, Homo sapiens
cagctgcttcggatccacactgtatctgtgtcatccccacatgggtcctcataaaggatt

SEQ ID NO: 11358 - DNA, 60 bp, Homo sapiens
agcacagtgctccggatcctccaatcttcgctcctccaatctccgctcctccacccagtt

SEQ ID NO: 11359 - DNA, 60 bp, Homo sapiens
tgttatacaccatgtccctggactggagtgtcacgaccagacagtctgcagccagagact

SEQ ID NO: 11360 - DNA, 60 bp, Homo sapiens
gtgcattggtgaaagagaccttggcactgctttctactcatcgaactctgctgatagcca

SEQ ID NO: 11361 - DNA, 60 bp, Homo sapiens
ctttgacgtactgacagccatggagaatgtggagagtgaccccaaaactgaccgccctaa

SEQ ID NO: 11362 - DNA, 60 bp, Homo sapiens
agcgacgggaagcccgtcagcctgagctacagatgcccatgccgattcttcgaaagccat

SEQ ID NO: 11363 - DNA, 60 bp, Homo sapiens
gctcggctgtaaacagctctgtgtttctggggacaccagccatcatgtgcctggaaatta

SEQ ID NO: 11364 - DNA, 60 bp, Homo sapiens
gggtttcgcctccgcctgtggatgctgcgcctctccgaacgcaacatgaaggtgctcctt

SEQ ID NO: 11365 - DNA, 60 bp, Homo sapiens
ggcctgactgaccaggtgtctcatcatgccagattaaagacagactgacagttcatctcc

SEQ ID NO: 11366 - DNA, 60 bp, Homo sapiens
cagctggggtcatcagggtactttcaagaagggctcgtgcaggacatcaaacagcctccg

SEQ ID NO: 11367 - DNA, 60 bp, Homo sapiens
cacctatggcgtcttgctactgctcccggttatcgcgctctttgcagttttgaccatttt

SEQ ID NO: 11368 - DNA, 60 bp, Homo sapiens
acaggcgggaagtccatctacggaagccgctttcctgacgagaactttacactgaagcac

SEQ ID NO: 11369 - DNA, 60 bp, Homo sapiens
ataccatgaagctctgcgtgactgtcctgtctctcctcatgctagtagctgccttctgct

SEQ ID NO: 11370 - DNA, 60 bp, Homo sapiens
tctgtcatgctagaagtgccaaaggcgaagttgccaaagcagccaaggtgaagcagaaag

SEQ ID NO: 11371 - DNA, 60 bp, Homo sapiens
tcacggatgaaaccgtatgcccgcatggaggagtatgagaggaacatcgaggagatggtg

SEQ ID NO: 11372 - DNA, 60 bp, Homo sapiens
caggagtttgtgaccaagaacttcaagagtcaagacagaaggaagccaagggagcagtgc

SEQ ID NO: 11373 - DNA, 60 bp, Homo sapiens
gtttgatactcccagtcttgtcattgccagctgtgttggtagtgctgtgttgaattacgg

SEQ ID NO: 11374 - DNA, 60 bp, Homo sapiens
gtgtgtattgagcatctgtaatgtgccagcattgtgcccaggctagggggctatagaaac

SEQ ID NO: 11375 - DNA, 60 bp, Homo sapiens
gatgaccagagcatccaaaagagtgtggagaccatcaaggaagacatgaatgtcaagttt

SEQ ID NO: 11376 - DNA, 60 bp, Homo sapiens
gccacttctaaggacgccattcagagcagagcattagcagaatttcaccatgctttgggg

SEQ ID NO: 11377 - DNA, 60 bp, Homo sapiens
gtcaccatcagttgtcggatgagtcagggcattagcagttatttagcctggtatcagcaa

SEQ ID NO: 11378 - DNA, 60 bp, Homo sapiens
ccccacttcctaccagatgcaatgtttgggcaaccaggagccctaggtagcactccattt

SEQ ID NO: 11379 - DNA, 60 bp, Homo sapiens
caagtcgcctccagaccgcagacatgaaacttgtcttcctcgtcctgctgttcctcgggg

SEQ ID NO: 11380 - DNA, 60 bp, Homo sapiens
ggaggaagcctgactgtcctttggctgcatctcccgaccatggccaaggagggcttttct

SEQ ID NO: 11381 - DNA, 60 bp, Homo sapiens
actggggttactggtggccatgaaggagtccctgctgctgtcagaacagaagacctcgct

SEQ ID NO: 11382 - DNA, 60 bp, Homo sapiens
cgggagtatattattgtggcagagatattacttggaactactcctgtgacaattggggcc

SEQ ID NO: 11383 - DNA, 60 bp, Homo sapiens; identical to SEQ ID NO: 4855

SEQ ID NO: 11384 - DNA, 60 bp, Homo sapiens
tcccctggagggacagtcacactcacttgtggcttgagctctgactcagtctcttctagt

SEQ ID NO: 11385 - DNA, 60 bp, Homo sapiens
caggctgtggatgaggctgactattactgtcaggtgtgggccagcagtagtgatgtaata

SEQ ID NO: 11386 - DNA, 60 bp, Homo sapiens
atggcctgggctctgctgctcctcactctcctcactcaggacacagggtcctgggcccag

SEQ ID NO: 11387 - DNA, 60 bp, Homo sapiens
ctgcaagtccagccggagtgttttatctgactccaacagtaggaacctcttagcttggtt

SEQ ID NO: 11388 - DNA, 60 bp, Homo sapiens
ccccaaactcctcatctatagtaatgatcagtgcccctcaggggtccctgaccgattctc

SEQ ID NO: 11389 - DNA, 60 bp, Homo sapiens
ggcattggatgaggctgactattactgtcaggcgtgggacgttaaccctgaagtccatgt

SEQ ID NO: 11390 - DNA, 60 bp, Homo sapiens
ggagactctcctgtacagcctctgggttcaccgtcagtagcaactacatgagctgggtcc

SEQ ID NO: 11391 - DNA, 60 bp, Homo sapiens
tggagtgggttgcccgtattaagagcaaaactaatggtgggacaacagactacgctgcac

SEQ ID NO: 11392 - DNA, 60 bp, Homo sapiens
agaccctcacgctgacctgcaccgtctctgggttctcactcagcaatgctagaatgggtg

SEQ ID NO: 11393 - DNA, 60 bp, Homo sapiens
aactctggtaagccaacgtatgcccagggcttcacaggaggacggtttgtcttttccttg

SEQ ID NO: 11394 - DNA, 60 bp, Homo sapiens
tgtccctgagcagacggagtatgccaccattgtctttcctagcggaatgggcacctcatc

SEQ ID NO: 11395 - DNA, 60 bp, Homo sapiens
tacttctcaccctcctcgctcactgcacaggttcttgggccaattttatgctgactcagc

SEQ ID NO: 11396 - DNA, 60 bp, Homo sapiens
agagtgggagagtggacttgggatgattctccccaggacaactactacatggacgtctgg

SEQ ID NO: 11397 - DNA, 60 bp, Homo sapiens
ctcaacgagcagttcaggctccagaacaccaccattgggttaactgtgtttgccatcaag

SEQ ID NO: 11398 - DNA, 60 bp, Homo sapiens
ctgcgccacgagatatccgcgctactctgaaatgatgggtggtgttcgaaaacacttcta

SEQ ID NO: 11399 - DNA, 60 bp, Homo sapiens
cagaagcccaggtatttcgatcttttgagcggtcaatatcgcagagttgccggtgcgttt

SEQ ID NO: 11400 - DNA, 60 bp, Homo sapiens
tgataactggcctccgacttttggccaggggaccaaactggaggtcaagcgaatcgtggc

SEQ ID NO: 11401 - DNA, 60 bp, Homo sapiens
gtgccacgaaatatccgcgctactcggatatgatgactggtgttcgaaaccacttctaca

SEQ ID NO: 11402 - DNA, 60 bp, Homo sapiens
aagatggtgttgcagacccaggtcttcatttctctgttgctctggatctctggtgcctac

SEQ ID NO: 11403 - DNA, 60 bp, Homo sapiens
tgtttaaatggtgcatgtaaaacctcatggtactacaactgcctggtgacagactcacca

SEQ ID NO: 11404 - DNA, 60 bp, Homo sapiens
gcgtgtcacttcctctgaactgttactgcctgaatggagtcctggacgacattgggtttt

SEQ ID NO: 11405 - DNA, 60 bp, Homo sapiens
tgccacttggccaccaggactccttgttctgctctggcaagagactactctgcctgaaca

SEQ ID NO: 11406 - DNA, 60 bp, Homo sapiens
ctaactacaaaggggaacaaggaaacctcttgggagataatgaaaatattctgcatcagc

SEQ ID NO: 11407 - DNA, 60 bp, Homo sapiens
ttccaggggaaagagccactctctcctgcagggccagtcagagaattagcaccagtttct

SEQ ID NO: 11408 - DNA, 60 bp, Homo sapiens
ggcccccaaactcctcatctatggtaataatcagtgggcctcaggggtccctgaccgatt

SEQ ID NO: 11409 - DNA, 60 bp, Homo sapiens
caaaccaacaagatggtgatgctgtcctgcgaggctaaaatctccctcagtaacatgcgc

SEQ ID NO: 11410 - DNA, 60 bp, Homo sapiens
accttgtctcccagctcagggctctttcctccacaccattcaggtctttctttccgaggc

SEQ ID NO: 11411 - DNA, 60 bp, Homo sapiens
tccttgcatagtctctcttgtcaagtcagaacagccaggtagagcccttgtccaaacctg

SEQ ID NO: 11412 - DNA, 60 bp, Homo sapiens
taggcccacgaacccacgagaatgtcctctgacttccagccacatccatctggcagttgt

SEQ ID NO: 11413 - DNA, 60 bp, Homo sapiens
tgacagccgcagacacggctgtgtattactgtgcgaggctcgggatgggagcttttgatt

SEQ ID NO: 11414 - DNA, 60 bp, Homo sapiens
gtgtattactgtgcgagagagcctgattggttattatggggggacaggggtgctctggac

SEQ ID NO: 11415 - DNA, 60 bp, Homo sapiens
gacgacacggccgtgtatttttgtgtcagactggcgacttattattatttcggtctggac

SEQ ID NO: 11416 - DNA, 60 bp, Homo sapiens
ttattactgtgcgagaaatgcgggtggagatggattcagcccatactactttcaccattg

SEQ ID NO: 11417 - DNA, 60 bp, Homo sapiens
tggggacgagctcgaatattactgcgggacgtgggataccagcctggctgctgtggtgtt

SEQ ID NO: 11418 - DNA, 60 bp, Homo sapiens
agctggatgcactgctggtcttcccaggccaagtggctcaactctcctgcacgctcagcc

SEQ ID NO: 11419 - DNA, 60 bp, Homo sapiens
gcagaacgggtaaactctgtttcctttgtccgtcctgttgtgagtaactgaagcctaggc

SEQ ID NO: 11420 - DNA, 60 bp, Homo sapiens
gggaagccttttgcaaatagtagagtatcagttgcaggtgccaatgactaactttttgaa

SEQ ID NO: 11421 - DNA, 60 bp, Homo sapiens
gacaacagtgtgaacgaccagaccaaaatccttgtggttaatgctgcctactttgttggc

SEQ ID NO: 11422 - DNA, 60 bp, Homo sapiens
cgggacatgtggagagcctactctgacatgagagaagccaattacatcggctcagacaaa

SEQ ID NO: 11423 - DNA, 60 bp, Homo sapiens
acacagggtcactgagctttgtgtccccaggaactggtatagggcacctagaggtgttca

SEQ ID NO: 11424 - DNA, 60 bp, Homo sapiens
gcagagaagactgaaggtaagatttcagaggtactggatgctgggacagtcgatcccctg

SEQ ID NO: 11425 - DNA, 60 bp, Homo sapiens
aacttgtcagttcctctcaacgtttaaggaatcctgtcttcaattctaccatgctgagct

SEQ ID NO: 11426 - DNA, 60 bp, Homo sapiens
actgtctgactttgggaaccagggatcccacagaaatgttttggagagcgggaggtttcc

SEQ ID NO: 11427 - DNA, 60 bp, Homo sapiens
catgggacgagtcatgcatcctgaaacaatgaacacaagtggacatgatttcgaagaact

SEQ ID NO: 11428 - DNA, 60 bp, Homo sapiens
ctgcagctgtccctgaagttgaactttcggatcagcctgaaaacactttcctacacccta

SEQ ID NO: 11429 - DNA, 60 bp, Homo sapiens
aaagcctgacctttcaaatccatgatgaatgccatcagtccctcctgctgttgcctccct

SEQ ID NO: 11430 - DNA, 60 bp, Homo sapiens
tgatggagagtcgtgttcagcatctatgatgtaccaggaaggcaagttccgttatcggcg

SEQ ID NO: 11431 - DNA, 60 bp, Homo sapiens
tttaaaggcaaatgggagagaccctttgaagtcaaggacaccgaggaagaggacttccac

SEQ ID NO: 11432 - DNA, 60 bp, Homo sapiens
gcctgatgaggggaaactacagcacttggtgatgatatcgtgggtgagttcattttccag

SEQ ID NO: 11433 - DNA, 60 bp, Homo sapiens
ttattataaaggtgactgcaccctgcagccaccagcactgcctggctccacgtgcctcct

SEQ ID NO: 11434 - DNA, 60 bp, Homo sapiens
tacatacaccccttccacctcgtcatccacaatgagagtacctgtgagcagctggcaaag

SEQ ID NO: 11435 - DNA, 60 bp, Homo sapiens
ttttctcaccctatggggtggcctcggtgttggccatgctccagctgacaacaggaggag

SEQ ID NO: 11436 - DNA, 60 bp, Homo sapiens
actccttggcctccgcagccgatcacatgaaggtggtgccaagtctcctgctctccgtcc

SEQ ID NO: 11437 - DNA, 60 bp, Homo sapiens
attcaaccggcccttccttgtggtgatcttttccaccagcacccagagtgtcctctttct

SEQ ID NO: 11438 - DNA, 60 bp, Homo sapiens
ggggatgagtgatgccttcagccaaagcaaagctgatttctcaggaatgtcttcagcaag

SEQ ID NO: 11439 - DNA, 60 bp, Homo sapiens
cacaggaggtgttatgacagggagaactggacatggaggcccacagtttgtggcagatca

SEQ ID NO: 11440 - DNA, 60 bp, Homo sapiens
caacaaaccctttgtcttcttaatgattgaccaaaataccaagtctcccctcttcatggg

SEQ ID NO: 11441 - DNA, 60 bp, Homo sapiens
ctgtggcatccagagtccctgcctggaccagcctctccactcatgtgactctttccaacc

SEQ ID NO: 11442 - DNA, 60 bp, Homo sapiens
cagacacccagaacatcttcttcatgagcaaagtcaccaatcccaagcaagcctagagct

SEQ ID NO: 11443 - DNA, 60 bp, Homo sapiens
acacagacaacaggacctgccgagtggagtgcagtgacaacctcttcactcaaaggactg

SEQ ID NO: 11444 - DNA, 60 bp, Homo sapiens
ccactccagcagagcagagaggctgaatagattccacaacctggtttgccagttcatctt

SEQ ID NO: 11445 - DNA, 60 bp, Homo sapiens
gtggagaagccagatggcaattcagacaaaggtatactcttcctgcttcatgggtggtgg

SEQ ID NO: 11446 - DNA, 60 bp, Homo sapiens
ccgtcgttgatgttattcgggaattaggcatctgccctgatgatgctgctgtaatcccca

SEQ ID NO: 11447 - DNA, 60 bp, Homo sapiens
ctgaaggtcagggtcacccaagcaacaaagtcccgagcaatgaagtcatccactcctgca

SEQ ID NO: 11448 - DNA, 60 bp, Homo sapiens
ccaggaggcgtctgacacagtatgatgatgaagatcccatggggcagcatcccagtactg

SEQ ID NO: 11449 - DNA, 60 bp, Homo sapiens
cttccagcacccgccaacagaattcatacgagaaggcgacgatgaccggactgtgtgccg

SEQ ID NO: 11450 - DNA, 60 bp, Homo sapiens
acaccgcctatctggtggagaagatgagagggcaatttggctgggtgtctgaactggcaa

SEQ ID NO: 11451 - DNA, 60 bp, Homo sapiens
agtatggtgctagtggataagcatggcatggacaaagagcgctatgtctccctggtgatg

SEQ ID NO: 11452 - DNA, 60 bp, Homo sapiens
tcagagacacctgccaatcccctgctgttaagccttcgatttgaagcctttgaggaggat

SEQ ID NO: 11453 - DNA, 60 bp, Homo sapiens
gagtttcccattgggacatatctgaactatgaatgccgccctggttattccggaagaccg

SEQ ID NO: 11454 - DNA, 60 bp, Homo sapiens
ggtgaagggtacaagttaagtgggagtgtttatcaggagtgtcaaggcacaattccttgg

SEQ ID NO: 11455 - DNA, 60 bp, Homo sapiens
tgtatttttgcagttcctccctataccagcttccttacagctgttctgatttcctgtcgt

SEQ ID NO: 11456 - DNA, 60 bp, Homo sapiens
gaaaaccactttggtagtgccagtgtgactcatccacaatgatttctccagtgctcatct

SEQ ID NO: 11457 - DNA, 60 bp, Homo sapiens
ctgtctcagcattgggactgtgttagcaactattattgtggaataacccagaacattgga

SEQ ID NO: 11458 - DNA, 60 bp, Homo sapiens
atatgccaaggagatggcacgtggagtccccgaacaccatcatgtggagacatttgcaat

SEQ ID NO: 11459 - DNA, 60 bp, Homo sapiens
ccgaagggcatgatcttcctatgtccttgactaggcatgacgagtcatttgaggtcagat

SEQ ID NO: 11460 - DNA, 60 bp, Homo sapiens
ggtcccaccaacagttcagaaacctaccacagtaaatgttccaactacagaagtctcacc

SEQ ID NO: 11461 - DNA, 60 bp, Homo sapiens
tagctcagccacctcacctgcctatcattcctgcattcctactttgagggtctcatcatg

SEQ ID NO: 11462 - DNA, 60 bp, Homo sapiens
aggcagctccagcaggaccttggcttgtctgacaggaaatgcttgtggtcgttggttatt

SEQ ID NO: 11463 - DNA, 60 bp, Homo sapiens
gaagacctggactattgaatggagcagaaattcacctctctcactgactattacagttgc

SEQ ID NO: 11464 - DNA, 60 bp, Homo sapiens
gtcacagggactgaaaacctctcctcatgttctgctttcgattcgttaagagagcaacat

SEQ ID NO: 11465 - DNA, 60 bp, Homo sapiens
gaggtcgagatgccgtcagagaatccctgatccacgtcccgctagagacctttctgcaga

SEQ ID NO: 11466 - DNA, 60 bp, Homo sapiens
tcacgagggtctgcgcatgaagcaaggaagcttctggctgtgaagatggcaagaaggcct

SEQ ID NO: 11467 - DNA, 60 bp, Homo sapiens
gtgaggtgctctggacagtcgctgaaatcactgaatgcctcctcaggtcatttagcactt

SEQ ID NO: 11468 - DNA, 60 bp, Homo sapiens
cggggaggtagacgagctgttcgacgtaaagaacgccttctacatcggcagctaccagca

SEQ ID NO: 11469 - DNA, 60 bp, Homo sapiens
actgagaagctggaacagtggctttgtgagaagttgtgagtgtctgctgtccttggcacc

SEQ ID NO: 11470 - DNA, 60 bp, Homo sapiens
tgcaccggacccggagccgccatgcccaagtgtcccaagtgcaacaaggaggtgtacttc

SEQ ID NO: 11471 - DNA, 60 bp, Homo sapiens
agagcccggaagatttcagccatgcctcacagctccgacagcagtgactccagcttcagc

SEQ ID NO: 11472 - DNA, 60 bp, Homo sapiens
aatggagcttcatgtcctcgtgcaggaagtactcatcgactgatgtggcagactttgctc

SEQ ID NO: 11473 - DNA, 60 bp, Homo sapiens
gcagatgaaatggacagtaatgtgagttcagactttgggcatcttgctcttggctggaac

SEQ ID NO: 11474 - DNA, 60 bp, Homo sapiens
caggtccaaccctaagtgagacatgtttctccaggatgccaaaggaaatgctacctcgtg

SEQ ID NO: 11475 - DNA, 60 bp, Homo sapiens
tggtgggcatgggagatgcctgtgtaatttcgtccgaagctgccaggaagaagaacagaa

SEQ ID NO: 11476 - DNA, 60 bp, Homo sapiens
aagactaaggagacaagcgtcaactggtgtctggctgatggctatgacctggagatcctg

SEQ ID NO: 11477 - DNA, 60 bp, Homo sapiens
tttcgggatggggagccaaagctgctccagggacctgactctgggctagggcatgaactg

SEQ ID NO: 11478 - DNA, 60 bp, Homo sapiens
agtgaaatcggctttctcctcagactctgtccctggtaaggagtgacaaggaagctcaca

SEQ ID NO: 11479 - DNA, 60 bp, Homo sapiens; identical to SEQ ID NO: 4855

SEQ ID NO: 11480 - DNA, 60 bp, Homo sapiens
gccaacactcaggacaccaagaattcaagacatcagttctgcttggcacaagtatcgtgg

SEQ ID NO: 11481 - DNA, 60 bp, Homo sapiens
tagtgcgtgcagatggtgagagataagatctatagcctctgcagcggaatctgttcacac

SEQ ID NO: 11482 - DNA, 60 bp, Homo sapiens
gcgaacagtggcaccagcctctagtctcaatgtgaggtttgactccaggacgatgaattt

SEQ ID NO: 11483 - DNA, 60 bp, Homo sapiens
agtgaaggatgtgcctacctcagcgatgatggtgcagcaacagctagatgttacaccgaa

SEQ ID NO: 11484 - DNA, 60 bp, Homo sapiens
ggcgcacacaccaagtagggagctagtcaggcagtttgcttaaggaacttttgttctctg

SEQ ID NO: 11485 - DNA, 60 bp, Homo sapiens
cctccgtattcacgtcagctgcagaatgcttcagaacacctgggtcgacaccatgtacat

SEQ ID NO: 11486 - DNA, 60 bp, Homo sapiens
gaccctgttatctactgtttcctcaccaagaagttccgcaagcacctcaccgaaaagttc

SEQ ID NO: 11487 - DNA, 60 bp, Homo sapiens
catgaagactttccatatcaagagacatggtattgactcaacagtttccagtcatggcca

SEQ ID NO: 11488 - DNA, 60 bp, Homo sapiens
cccctgagctccaacggccataacagctctgactcccacgtgaggccacctttgggtgca

SEQ ID NO: 11489 - DNA, 60 bp, Homo sapiens
ctcagagcctacgcttggtccagaacatcaaactccaaaccctggggacaaacgacatga

SEQ ID NO: 11490 - DNA, 60 bp, Homo sapiens
atgggaagattgtgacctgccagcttcaggatgcagatgggaagttcctctccaatgaca

SEQ ID NO: 11491 - DNA, 60 bp, Homo sapiens
ctccaggagacaggatcagttttacggaaacaactcagttagtatagagatgaggtccgc

SEQ ID NO: 11492 - DNA, 60 bp, Homo sapiens
tctagaagcaggcagaattggcccaagggtgagaaccagtagcatctgctgtccatcaag

SEQ ID NO: 11493 - DNA, 60 bp, Homo sapiens
atcgcctcctgaaacgaacgagaaactgacgaatccacaggtgaaagagaagtaacggcc

SEQ ID NO: 11494 - DNA, 60 bp, Homo sapiens
ttgaagaatgaccatgagacacagtggccatgggtggatctgaaagctggtgttgagcct

SEQ ID NO: 11495 - DNA, 60 bp, Homo sapiens
gcggggaacaagcagagttctcttgtggagtgtcttatcacctcttatcctcatgcaaat

SEQ ID NO: 11496 - DNA, 60 bp, Homo sapiens
tataggggcagcagaagctgcaccatgtccatgtcacccacggtcatcatcctggcatgt

SEQ ID NO: 11497 - DNA, 60 bp, Homo sapiens
agttggggagaactgtcaagaagagtgaagagagtgccaaagcggagatctgttcacctg

SEQ ID NO: 11498 - DNA, 60 bp, Homo sapiens
ggggaatggcggtcaatgtgtattctacctcgataacccaagagactatgagcagacatg

SEQ ID NO: 11499 - DNA, 60 bp, Homo sapiens
gggactgtgtttgcctcttagaggttcccaggccactagaggagataaagggaaacagat

SEQ ID NO: 11500 - DNA, 60 bp, Homo sapiens
gaaatgattgggcctatgcggcccgagcagttcagtgatgaagtggaaccagcaacacct

SEQ ID NO: 11501 - DNA, 60 bp, Homo sapiens
aaagtgctgcggagcaagaggaggccgttgattcacttcacgctttcagcgaatgacaaa

SEQ ID NO: 11502 - DNA, 60 bp, Homo sapiens
tttgagcacttctttctgcacaaagaggggatctctaaggacccctcacgcctcgttgga

SEQ ID NO: 11503 - DNA, 60 bp, Homo sapiens
acagggaatgggactcggctggtggtggagaaagaacatcctcagctaggggctggtaca

SEQ ID NO: 11504 - DNA, 60 bp, Homo sapiens
attcacctcacaaatgtggcagttttctctgtggagaatggtggtctccgtggcagactg

SEQ ID NO: 11505 - DNA, 60 bp, Homo sapiens
gcccttcccagagatcttctcactgaagtactggatccgttacaagcgtcagggagctgc

SEQ ID NO: 11506 - DNA, 60 bp, Homo sapiens
ctgctgactcaagttcttcagttcacgatcttctagttgcagcgatgagtgcacgagtga

SEQ ID NO: 11507 - DNA, 60 bp, Homo sapiens
aatcgaaagtagactcttttctgaagcatttcctgggatcagcctgaccacgctccatac

SEQ ID NO: 11508 - DNA, 60 bp, Homo sapiens
agtttgcaccagcgctctggaatcgagttacgcgcgaaagggcagagtttctggaggaaa

SEQ ID NO: 11509 - DNA, 60 bp, Homo sapiens
ctgtggaagaagcacaggctcctgtcctcagatcccgggaacctcagcaacctctgccgg

SEQ ID NO: 11510 - DNA, 60 bp, Homo sapiens
gctgcctggaatcctcaaacctgtcactttggtcagatgtgcagaccattactaaggtct

SEQ ID NO: 11511 - DNA, 60 bp, Homo sapiens
acttttggatgatgatgatggcatgtatggtgagcgagaggcaaccagtgtccctagagg

SEQ ID NO: 11512 - DNA, 60 bp, Homo sapiens
gtccttgggcagttctcaaatgttggagtggaacattggggaggaaattctgaggcaggt

SEQ ID NO: 11513 - DNA, 60 bp, Homo sapiens
ccgtggagctgacaagttttccttgctttcctgatactctttggcgctgacttggaattc

SEQ ID NO: 11514 - DNA, 60 bp, Homo sapiens
ctccattattcccttctaagccagagacccttatccactgctcctctaggtggcccattt

SEQ ID NO: 11515 - DNA, 60 bp, Homo sapiens
cacagactgagccttccggagcatggactcgctccagaccgttgtcacctgttgcattaa

SEQ ID NO: 11516 - DNA, 60 bp, Homo sapiens
acatacactgagagtcagtcctccttaaggtcctcctactccagcccaacctccctcagc

SEQ ID NO: 11517 - DNA, 60 bp, Homo sapiens
tcccgagtgcttcatgtgcagtgactgcggcctgaacctcaagcagcgtggttacttctt

SEQ ID NO: 11518 - DNA, 60 bp, Homo sapiens
gcttggtgaaggcgttccagtatgtagaaacacatggagaagtctgcccagcgaactgga

SEQ ID NO: 11519 - DNA, 60 bp, Homo sapiens
gcgcacttacacgagaagacattcatggctttgggcagaaggattgtgcagattgtcaac

SEQ ID NO: 11520 - DNA, 60 bp, Homo sapiens
acactgaccatcttcaagagtcccgttcccttgccaccccttcacgtgcaccctcaattt

SEQ ID NO: 11521 - DNA, 60 bp, Homo sapiens
aggtgcctccaggaggtgagccctgggtgcagctggtctctgaatgacgttacaccctca

SEQ ID NO: 11522 - DNA, 60 bp, Homo sapiens
acctgccctacgactacggcgccctggaacctcacatcaacgcgcagatcatgcagctgc

SEQ ID NO: 11523 - DNA, 60 bp, Homo sapiens
ggagcgagcaaacagaacaaccgcacgcaagatttatactagcagaaagacgatcagcac

SEQ ID NO: 11524 - DNA, 60 bp, Homo sapiens
tgacagggacttcgggcagaggagaacataactgaatcttgtcagtgacgtttgcctcca

SEQ ID NO: 11525 - DNA, 60 bp, Homo sapiens
tgaagatagcagggatgctgtgttcacccttcttggtagaagctaaggtgtgagctggga

SEQ ID NO: 11526 - DNA, 60 bp, Homo sapiens
attggagagggacgctcttccgcctgcctgtacccggaagtgacgttatgtacgttcccc

SEQ ID NO: 11527 - DNA, 60 bp, Homo sapiens
cttgtcagcaacactgtgtcccttcgccccgccgttcttctctgctgcatttggacatca

SEQ ID NO: 11528 - DNA, 60 bp, Homo sapiens
taatcccagatccagctggaaagctgaagtatttcgataaactgaattgagaaatacttc

SEQ ID NO: 11529 - DNA, 60 bp, Homo sapiens
aggtgggtgaattttctggagccaataaggaaaagcttgaagccaccattaatgaattag

SEQ ID NO: 11530 - DNA, 60 bp, Homo sapiens
gggagggactttgttcaggaagaaatccgtgtctccaaccacactatctacccatcacag

SEQ ID NO: 11531 - DNA, 60 bp, Homo sapiens
aaggccccaaccatcgttgggaaatcatctctaaatcccatcctctttcgaggtgttggg

SEQ ID NO: 11532 - DNA, 60 bp, Homo sapiens
ccgaggcctgcctggagccccagatcaccccttcctactacaccacttctgacgctgtca

SEQ ID NO: 11533 - DNA, 60 bp, Homo sapiens
ttagcagacaccagagccacactcaaatggctaagtaggttatgacctctctggattatt

SEQ ID NO: 11534 - DNA, 60 bp, Homo sapiens
gtcagtttacactgctgtatacttcttcttctgtgtccctaaggcctggtacagtgccaa

SEQ ID NO: 11535 - DNA, 60 bp, Homo sapiens
gacaaggaggtaccttccggtacacctttcatggcgatcctcatgctacatttgctgcat

SEQ ID NO: 11536 - DNA, 60 bp, Homo sapiens
ctagatacccatggcatcagtttttacctgaaagccttgctttttccttgtgccttagga

SEQ ID NO: 11537 - DNA, 60 bp, Homo sapiens
cctaagcatatcgtaaagctgttcaaatactcgagcccagtcttgtggatggaaatgtag

SEQ ID NO: 11538 - DNA, 60 bp, Homo sapiens
agaagatcagacagagtacctagaagagaggcgggtcaaagaagtagtgaagaagcattc

SEQ ID NO: 11539 - DNA, 60 bp, Homo sapiens
ccaccggcatgtgacttcttgtactaagtcctacgaagctgcaaaggctgagcagaatac

SEQ ID NO: 11540 - DNA, 60 bp, Homo sapiens
ccgcatacagaacacgtccagcagaccttccggacggagatcaaaatctgagtgcctctc

SEQ ID NO: 11541 - DNA, 60 bp, Homo sapiens
gtgaggggtgatgccctgagatttagcttcaagaatatgccatggctcatgcttcccata

SEQ ID NO: 11542 - DNA, 60 bp, Homo sapiens
gaagcccccactactaaatggcctctctccactaccccgactatccctgcacataaactc

SEQ ID NO: 11543 - DNA, 60 bp, Homo sapiens
cgtgcaagtaaccacggggtccatcttttacatctggtacacacaacagacgctcagttg

SEQ ID NO: 11544 - DNA, 60 bp, Homo sapiens
cacactccctcacatcctgtttctgactttggaatggactcaggaaaactaggcccctct

SEQ ID NO: 11545 - DNA, 60 bp, Homo sapiens
aaatgcagtttagccattcacagaagccctgggcatcacggagcacaagctccatagtgt

SEQ ID NO: 11546 - DNA, 60 bp, Homo sapiens
atctggatgatggaccccaaggatgtccgtgagtggcaacatgaggagttctaccgctac

SEQ ID NO: 11547 - DNA, 60 bp, Homo sapiens
cctaaatggactcgtacagcttatatgcttgtacgttctgatgtcccccatgtcttcaga

SEQ ID NO: 11548 - DNA, 60 bp, Homo sapiens
gaaaagaatagagaagatagggaaattagaagactttagtgtcagtcaccaaagaaggcc

SEQ ID NO: 11549 - DNA, 60 bp, Homo sapiens
ggggccttttgagctagaagctttctattctgatccccaaggagttccatatccagaagc

SEQ ID NO: 11550 - DNA, 60 bp, Homo sapiens
cgagtcagaacacagacggacacacacacaggtctgcgacgagatgacacaaaaccgaca

SEQ ID NO: 11551 - DNA, 60 bp, Homo sapiens
cggtgctcagttgaactgcgctgcagctcttggttttttgtggcttccttcgttattgga

SEQ ID NO: 11552 - DNA, 60 bp, Homo sapiens
ctcgactcgaattccaaagattcagcaactggttaaagagttcttcaatggcaaggaacc

SEQ ID NO: 11553 - DNA, 60 bp, Homo sapiens
aaaagcggcccgacctgcttgcggtgtagtgggcggaccgcgcggctggaggtgtgagga

SEQ ID NO: 11554 - DNA, 60 bp, Homo sapiens
gtcacttcaaaacacaccaacggtacccagcaccatctgggagtctgcctcaatgaattt

SEQ ID NO: 11555 - DNA, 60 bp, Homo sapiens
gcgagagtcatatttgagatggtgttctgagccatagttctctaacatctccgtctacat

SEQ ID NO: 11556 - DNA, 60 bp, Homo sapiens
tgtgaaaggttctttgcaagaggaaagccttagggacaagattcccgaagaggacaggcg

SEQ ID NO: 11557 - DNA, 60 bp, Homo sapiens
gcagcagacaccagcagaaaataaggcagagtctgaagaaatggagacctctcaagctgg

SEQ ID NO: 11558 - DNA, 60 bp, Homo sapiens
tagaaaaaggatatacaaatggctttaaacatgtgaaagaatgttcaacttcactcacaa

SEQ ID NO: 11559 - DNA, 60 bp, Homo sapiens
ggatgctgccaggggcagtgaagtgtttaggtgaaggacaagtaggtaagaggacgcctt

SEQ ID NO: 11560 - DNA, 60 bp, Homo sapiens
agagcagtgctgagtaacaccaggctcctcaggcaccttcaccatcggcaggtgacctaa

SEQ ID NO: 11561 - DNA, 60 bp, Homo sapiens
tcataattgccgtctggaccattgattgattgtgaccagtagcagaagggtgcctgttac

SEQ ID NO: 11562 - DNA, 60 bp, Homo sapiens
gtccaggagcaggacatcgagactttacatggctctgttcacgtcacgctgtgtgggact

SEQ ID NO: 11563 - DNA, 60 bp, Homo sapiens
tgaagcccaggactgcgttgtatgctttccatccactcaccttaccccatagcatcttgc

SEQ ID NO: 11564 - DNA, 60 bp, Homo sapiens
tggggccgtttggctgcactaactttggtagctcagtgtgcatctagagtgggactgggg

SEQ ID NO: 11565 - DNA, 60 bp, Homo sapiens
gctgttttgtcctagagtgaacttgtggcttatggccagtgctgtttggtggtctgcctt

SEQ ID NO: 11566 - DNA, 60 bp, Homo sapiens
cctgcacgtgcgccggctcctgcaagtgcaaagagtgcaaatgcacctcctgcaagaaga

SEQ ID NO: 11567 - DNA, 60 bp, Homo sapiens
gcattctctatatggcagctgaaacagccaaggaactgactcctttcctgctgaaatcaa

SEQ ID NO: 11568 - DNA, 60 bp, Homo sapiens
ggacaatcagggaaactttaccaatgaagatgagttatacctgaacctgactgacagccc

SEQ ID NO: 11569 - DNA, 60 bp, Homo sapiens
gcgatgtggttctcagcattgatggaataaatgcacaaggaatgactcatcttgaagccc

SEQ ID NO: 11570 - DNA, 60 bp, Homo sapiens
tgtggagcatgaagcccgtgttcccaagaaaatcctcaagtgcaaggcagtgtctcgaga

SEQ ID NO: 11571 - DNA, 60 bp, Homo sapiens
ggccatgttccacttggaaatggcatgcaaaagccatcatagagaaacctgcgtaactcc

SEQ ID NO: 11572 - DNA, 60 bp, Homo sapiens
gggcccctatgccatcctgtatctatacgcagtcatcgcagacgtgacttccatctcccc

SEQ ID NO: 11573 - DNA, 60 bp, Homo sapiens
ctcgtgcttccgtttgtgcactctggctgctgtagtgtatgcttctctgtgtcctgatat

SEQ ID NO: 11574 - DNA, 60 bp, Homo sapiens
ctcccctgtaaatgggggctccattagttctgctgccgagactaataaagatttggttgg

SEQ ID NO: 11575 - DNA, 60 bp, Homo sapiens; identical to SEQ ID NO: 4855

SEQ ID NO: 11576 - DNA, 60 bp, Homo sapiens
catgggctggacttacggcttgtcaccattccttcattcttctccaagagtgcttgcatc

SEQ ID NO: 11577 - DNA, 60 bp, Homo sapiens
ccacgtatcaggtgacaagaggtctagcaagtctcaacagttgtgtggaccccattctct

SEQ ID NO: 11578 - DNA, 60 bp, Homo sapiens
tggggttgggacctcagatgggaagggtggtgctaagatcctcctgacctcaaagtgtat

SEQ ID NO: 11579 - DNA, 60 bp, Homo sapiens
gatggactacaaaggaagttatctgcgaatctgcttgcttcatcccgttcagaagacagc

SEQ ID NO: 11580 - DNA, 60 bp, Homo sapiens
aatcaaactgcctgtctccctggtcctgccatattcatagggtgtccatgcacacatggt

SEQ ID NO: 11581 - DNA, 60 bp, Homo sapiens
ttgttggctcttcttcagggcacacttccactactctctaagacctcctgcctaagtgca

SEQ ID NO: 11582 - DNA, 60 bp, Homo sapiens
ctcggggtcacacactttctgatcctgagcaaaacagagaccaatgtctactttaagctg

SEQ ID NO: 11583 - DNA, 60 bp, Homo sapiens
acgtgtcagcagctgtggccaagactgtgaggatgacgctagtgattgtggtcgtctatg

SEQ ID NO: 11584 - DNA, 60 bp, Homo sapiens
ctaacaatcgaagcccaacaaacagtacgggtatgtggaaggactcgcctaaatcttcca

SEQ ID NO: 11585 - DNA, 60 bp, Homo sapiens
tatatgggagtcctaacgatcacccaccattctgagaaatggttggtatctatggacccc

SEQ ID NO: 11586 - DNA, 60 bp, Homo sapiens
ccctatcagcatcacatcagcattagggatggtcctcttaggagccaaagacaacactgc

SEQ ID NO: 11587 - DNA, 60 bp, Homo sapiens
ccgtctggaaattatggagagtgctcaactggtaaggagaacgtagaagtagccctaggg

SEQ ID NO: 11588 - DNA, 60 bp, Homo sapiens
gaggatggagatggtaataatcagggttgggtggagaatatctgaggaaactgcacttga

SEQ ID NO: 11589 - DNA, 60 bp, Homo sapiens
tcttatccattcccggacacagtgcagaggagaagcagtctgtatggcagaaagcaatgg

SEQ ID NO: 11590 - DNA, 60 bp, Homo sapiens
atgattcctaaagaagaggcttcctagaccagcacaggctcgagaaagacatcccctagg

SEQ ID NO: 11591 - DNA, 60 bp, Homo sapiens
ccgagagatgttgtagtggccaaggaacgagaccaagatgatcacattgactggctcctt

SEQ ID NO: 11592 - DNA, 60 bp, Homo sapiens
caagaagatgttcaggagcgcctggcttatgcagagcaattggtggtggagctaaaagat

SEQ ID NO: 11593 - DNA, 60 bp, Homo sapiens
tgttccctagactgctgtaaacagaagtgaatcagacttttctccagctacctttcaaaa

SEQ ID NO: 11594 - DNA, 60 bp, Homo sapiens
ccccagtttgccattttggatgaatgcacaagtgcagttagtgtcgacgtggaaggctac

SEQ ID NO: 11595 - DNA, 60 bp, Homo sapiens
atctggagcaccctgcgtttggcattgtctatgttaggccagagcgatgcctatggggca

SEQ ID NO: 11596 - DNA, 60 bp, Homo sapiens
ggaagcctgcgagttccggaagccttggtaatccagattcggctaggaaaagacaagctt

SEQ ID NO: 11597 - DNA, 60 bp, Homo sapiens
aatttggagcaaggcttagcagaagacggcggcatgagcagcgtgactcaggagggcaga

SEQ ID NO: 11598 - DNA, 60 bp, Homo sapiens
ctgcatagtctacaaacaagtctctgaaaataggtgaatttctagctcttcatggtcctg

SEQ ID NO: 11599 - DNA, 60 bp, Homo sapiens
gagatgggtatatcagtaagaagagggcacaagaactggctctggagaccaaagcagttg

SEQ ID NO: 11600 - DNA, 60 bp, Homo sapiens
gctttcacaaccaaagttctgggccattcagacatcagccttgatcctccggacaaaact

SEQ ID NO: 11601 - DNA, 60 bp, Homo sapiens
gaaggccaagtaggagcctggtcagacactcacaataaagacagttgctgaactgcaccc

SEQ ID NO: 11602 - DNA, 60 bp, Homo sapiens
gggccgctgagtcacttcttctacttcttcatggaacattggatccctcctgaggtcccc

SEQ ID NO: 11603 - DNA, 60 bp, Homo sapiens
tttgcttcttgttggcgatgtggctcaggctgcagatgtggccatcgaacaccggaatga

SEQ ID NO: 11604 - DNA, 60 bp, Homo sapiens
acaacacaggtattacaggaataacggaagccgttaaagagatcacactggaaaataagg

SEQ ID NO: 11605 - DNA, 60 bp, Homo sapiens
ttgctatctaagatctccctccagttgtcactccaggagagcagccgtctccttgtcggg

SEQ ID NO: 11606 - DNA, 60 bp, Homo sapiens
aaatcatggactatctcctgtgcctgctcaccctgctgggctcctacattgagctgcccg

SEQ ID NO: 11607 - DNA, 60 bp, Homo sapiens
tatcaagtgggttggctgattccattcttctgttaccgactttttgacttcgtcctcagt

SEQ ID NO: 11608 - DNA, 60 bp, Homo sapiens
gtcatcgagcagctcggtgggaagcagctggtcatgaaccacatgcatcatgaagaccag

SEQ ID NO: 11609 - DNA, 60 bp, Homo sapiens
gtggaagtgggtgaattctactttttatgttggagtggaccaatgtctatcaagagtgac

SEQ ID NO: 11610 - DNA, 60 bp, Homo sapiens
tgctgctggtgttggcctatgccctgcacatgctcatctacctgcggtatctggaccaac

SEQ ID NO: 11611 - DNA, 60 bp, Homo sapiens
tcctggttcaggacctctaccccagcgagagcacagcagaggacgacattcagccttccc

SEQ ID NO: 11612 - DNA, 60 bp, Homo sapiens
tgtggcctacaacccctggatggacatcaggcaacgggaagacgtccaagccttaaacat

SEQ ID NO: 11613 - DNA, 60 bp, Homo sapiens
aggcctggaaagaccacaagctgcacatcgaccacgagattgaaaccctgcagaacaaaa

SEQ ID NO: 11614 - DNA, 60 bp, Homo sapiens
aagatgaactatcggttaatgatgttacagtcctgttctgggccaacctgtcgcactcca

SEQ ID NO: 11615 - DNA, 60 bp, Homo sapiens
agaaaacgtggtgagtcctgagttccactgctgtgcttcagtcaactgaccaaacactgc

SEQ ID NO: 11616 - DNA, 60 bp, Homo sapiens
tcaaaatgtctaagagaatgtatccccataggcccgttatgatggtgatcagccacgctg

SEQ ID NO: 11617 - DNA, 60 bp, Homo sapiens
gcatcactatgcaggaatggtgtcccttatggatgaagcagtaggaaatgtcactgcagc

SEQ ID NO: 11618 - DNA, 60 bp, Homo sapiens
ctgagccacagaaagctccttccagaccttatcaggataccagaggaagttatggcagtg

SEQ ID NO: 11619 - DNA, 60 bp, Homo sapiens
tgtggatttacctgtcagtccatctgatggtgtcctacctaattcaactcatgaagatgg

SEQ ID NO: 11620 - DNA, 60 bp, Homo sapiens
actcatctccctggtgcttaacctgctggagttggtgcacctgctgtgtcgctgcctcag

SEQ ID NO: 11621 - DNA, 60 bp, Homo sapiens
attctgcacacactgctggcatcaggagaagacgcccttgactttactcaagaaagcgag

SEQ ID NO: 11622 - DNA, 60 bp, Homo sapiens
gaggtggacctttctcacgtgtatcttgcctatactgaggagagtctgcgtcagtctttg

SEQ ID NO: 11623 - DNA, 60 bp, Homo sapiens
agtttgccagtcatctgcagcagctacaggatgccctcaatgagctgacggaggagcaca

SEQ ID NO: 11624 - DNA, 60 bp, Homo sapiens
ggcaaaccctggtcctcctggatcgacgccgccaaattacactgctccgacaatgtagat

SEQ ID NO: 11625 - DNA, 60 bp, Homo sapiens
ggcattctccgtcaccaacaatgttattcggctgaaacctccttctaatgtggtgtcccc

SEQ ID NO: 11626 - DNA, 60 bp, Homo sapiens
aggagcagcttccttctgggactggacagttttgctccgttcccaccgtccccgtccctt

SEQ ID NO: 11627 - DNA, 60 bp, Homo sapiens
aacttttcaggaggtactgtgaggaagagcaggcaccagcagcagaatggggaatggaga

SEQ ID NO: 11628 - DNA, 60 bp, Homo sapiens
ggatgttagcagatttcccatagtgcctcgctagtggcgggcatgataacacacgccgga

SEQ ID NO: 11629 - DNA, 60 bp, Homo sapiens
tggggctcacttttcatccttccccaacttccctagtccccgtactaggttggacagccc

SEQ ID NO: 11630 - DNA, 60 bp, Homo sapiens
cttgtcggtcaaaagcgaagcactgagcttgcctactgtcagagactggaccttagaaga

SEQ ID NO: 11631 - DNA, 60 bp, Homo sapiens
cggcaactgctccacctcattcgtgtcctcccgatgatacgaagttgatagaggatgaat

SEQ ID NO: 11632 - DNA, 60 bp, Homo sapiens
aggcccaggacgaacctgcagagtcgctgagcgagttcaagcccttctttgggaatataa

SEQ ID NO: 11633 - DNA, 60 bp, Homo sapiens
agagaaagtcacctgcccaagaaacaccgagtgaggccatagcaactcccctacatcaaa

SEQ ID NO: 11634 - DNA, 60 bp, Homo sapiens
ggatggaaatccaactaatgagaccgcactccttggcttgttcctgcgtgtttcacccaa

SEQ ID NO: 11635 - DNA, 60 bp, Homo sapiens
attggctcaagctacccaggaaagaacggatctttatgcaaagcagggtcgaggaagcca

SEQ ID NO: 11636 - DNA, 60 bp, Homo sapiens
taatacataattctgatgaacacaaggacattcagagttgtacagtagaagttcattttc

SEQ ID NO: 11637 - DNA, 60 bp, Homo sapiens
gagaggtggcagcaaaagaaaataccgtaagggcaacctgaaaagtaggaaacggggcga

SEQ ID NO: 11638 - DNA, 60 bp, Homo sapiens
cgtgcagagccacatcctccacttggaacacgatctggttcatgtgaccaggaagaacca

SEQ ID NO: 11639 - DNA, 60 bp, Homo sapiens
cagttgatcatcaaggggatggcagcagtggaactgaacaagaagtggagagttcatctg

SEQ ID NO: 11640 - DNA, 60 bp, Homo sapiens
tgtgaatttgagtcctggctctgctttgtgactgggcttgagaactctgggctgacctat

SEQ ID NO: 11641 - DNA, 60 bp, Homo sapiens
tgagaaggaccctgggagctctgggaatttggagtgaccaaaggtgtgccctgtacacag

SEQ ID NO: 11642 - DNA, 60 bp, Homo sapiens
ctttacctacccctcagttttccttaaaacgcgcacacaactctagagagtgttaagaat

SEQ ID NO: 11643 - DNA, 60 bp, Homo sapiens
cctcctcagctctgcaagtagtttagtaggaatgaagtggaagtccaggcttggattgcc

SEQ ID NO: 11644 - DNA, 60 bp, Homo sapiens
gtattttgacctgacttgtcagctcttgggcaaagcagaagtggacggagcatcatttct

SEQ ID NO: 11645 - DNA, 60 bp, Homo sapiens
agaacaagcgcatgacaataagcagattggtcttggaggaggacagccagagtactgagc

SEQ ID NO: 11646 - DNA, 60 bp, Homo sapiens
ctggtaatgctactctcagctctacgtcggacacaccattgtagttctcatcggattctg

SEQ ID NO: 11647 - DNA, 60 bp, Homo sapiens
gacggatggactgaatgcgctactcgggaaggacatgatgagcgacctgacgcggaatga

SEQ ID NO: 11648 - DNA, 60 bp, Homo sapiens
agcaccgccttcgacattcgcttcaatcctgacatcttctcaccaggggttcgtttccct

SEQ ID NO: 11649 - DNA, 60 bp, Homo sapiens
acaggggccactcggagtcgcccgagaagtaagtttgtgtgtaaggtggagtctcaccgt

SEQ ID NO: 11650 - DNA, 60 bp, Homo sapiens
tgctttctctttgtcgcccactcttcattcctgtttctcctcagttcccctgtgcagatg

SEQ ID NO: 11651 - DNA, 60 bp, Homo sapiens
accaagtccagcaggaactgtctgggacctttgctcatctgtgtcagcaagttgacgtca

SEQ ID NO: 11652 - DNA, 60 bp, Homo sapiens
ctgtggcctgtgaggtctgccagtctttagtgaaacacagctctggaataaaaggaagtt

SEQ ID NO: 11653 - DNA, 60 bp, Homo sapiens
ttggcatctgtggccgagttgctgttgccgggtgatagttggagcggagacttagcataa

SEQ ID NO: 11654 - DNA, 60 bp, Homo sapiens
gagaatggaccaatggtgccacggagcacatcgctgacgctgattgtgttccttttccac

SEQ ID NO: 11655 - DNA, 60 bp, Homo sapiens
gggctgtagagacagtcttcttggattcagatcctgactccacttagctatgtaacctgg

SEQ ID NO: 11656 - DNA, 60 bp, Homo sapiens
tccttattggagaagccctcagagctcatgtcacattcatcctctttcctgtccctcacc

SEQ ID NO: 11657 - DNA, 60 bp, Homo sapiens
gtaagggtaactaaggaagtggatgctacatctaaagaggccaaatccttcttcaagcag

SEQ ID NO: 11658 - DNA, 60 bp, Homo sapiens
ttgtactgtagccgagaagaccaccatcatgcacataaaaggagcttttcagcagccacc

SEQ ID NO: 11659 - DNA, 60 bp, Homo sapiens
acagagatactgcatttccaggtgctagccatgaatcttcaggcaacccaccattacgag

SEQ ID NO: 11660 - DNA, 60 bp, Homo sapiens
tgatattctgagtgctcccgacctccaaaaggtcctcaacatcctggagcgaacaaatga

SEQ ID NO: 11661 - DNA, 60 bp, Homo sapiens
ggatcacatctctgctcacctcaggtgttatgctcagaacaaccctgaattccgggcctt

SEQ ID NO: 11662 - DNA, 60 bp, Homo sapiens
gtattacagaaatgccacaggctccacttaaattgaaaagcaagctaacccctcttgata

SEQ ID NO: 11663 - DNA, 60 bp, Homo sapiens
gaggattgattacgccaacctgaccggaatctctgtcagcagcctgagcgacagtctttt

SEQ ID NO: 11664 - DNA, 60 bp, Homo sapiens
gggtcatgtgaaggtggtgcgctacttagtcaaagaagtcaatcagtttccatcagattc

SEQ ID NO: 11665 - DNA, 60 bp, Homo sapiens
tgtggatgagcgcgtggactccgacagcaagtctgaagttgaagctctaactgaacaact

SEQ ID NO: 11666 - DNA, 60 bp, Homo sapiens
ccagcacaagtatcaccccacagcaggcagctatcagcttcaatttgccctgcagcaact

SEQ ID NO: 11667 - DNA, 60 bp, Homo sapiens
cagaaatgtgctgccctacggattcagttcttccttcagatggctgtgtatcggagaaga

SEQ ID NO: 11668 - DNA, 60 bp, Homo sapiens
aagggtgtggcacagggtttgactcggagttctggggtcagaaggtcatttcgcaaatcg

SEQ ID NO: 11669 - DNA, 60 bp, Homo sapiens
cttgagaacaccaacctacaacttgaagtacaattcacctggaatgactcgctccaatgt

SEQ ID NO: 11670 - DNA, 60 bp, Homo sapiens
gagaccattgcattctggctggtttgtgctggtttaacgacatctaagaaggtttagaaa

SEQ ID NO: 11671 - DNA, 60 bp, Homo sapiens; identical to SEQ ID NO: 4855

SEQ ID NO: 11672 - DNA, 60 bp, Homo sapiens
ccacagtgaaatcagtgagccagaccaactctacatctcctgcctaacctactgcctaag

SEQ ID NO: 11673 - DNA, 60 bp, Homo sapiens
atgggctacatctccaaggtgtctggcggaggcgagaaggtccagcacgtcaaagatatc

SEQ ID NO: 11674 - DNA, 60 bp, Homo sapiens
agcaacgtccatatggtgaagaagattagcatcacagagcgaagctgcgatggagcagca

SEQ ID NO: 11675 - DNA, 60 bp, Homo sapiens
tctcactgtactctagtcctgacttggggtgcagagggctgcttgcaatcctgtttgtaa

SEQ ID NO: 11676 - DNA, 60 bp, Homo sapiens
tacaaggaagtcttcacgaggagcagtgagaactcagcgtcgtcgacgttctaagtctcc

SEQ ID NO: 11677 - DNA, 60 bp, Homo sapiens
ggggcaccttctgttcactcccacaaagtggtgtctggttctcactgagacgttttaaga

SEQ ID NO: 11678 - DNA, 60 bp, Homo sapiens
gaggccgagtcctggtaccgcagcaagtgtgaggagatgaaggccacggtgatcaggcac

SEQ ID NO: 11679 - DNA, 60 bp, Homo sapiens
cttcccccaggcagctaatggcagtgccaaggacctggccatactccagtgccatgggga

SEQ ID NO: 11680 - DNA, 60 bp, Homo sapiens
gccactcaagcagagatagagagcatagttaaacccaaagttcttgtgaaagaagctgag

SEQ ID NO: 11681 - DNA, 60 bp, Homo sapiens
aaagcaaggtgcacgttggtctttgattgttctgtcctcacagcagagccagctttcccc

SEQ ID NO: 11682 - DNA, 60 bp, Homo sapiens
atacaaagtgaagatggaggagatcagccaactggaggctgcagagagtatcgccttccg

SEQ ID NO: 11683 - DNA, 60 bp, Homo sapiens
gggattcagaggtgcatccacggatcttcttgagctgtgacgtgtttttatgtggctgcc

SEQ ID NO: 11684 - DNA, 60 bp, Homo sapiens
caagacagaggccaaagccaaggaagatgacaagaccctctcaaaagagcctagcaagcc

SEQ ID NO: 11685 - DNA, 60 bp, Homo sapiens
agattcttactccgaaatataggtacacatcctttgctctgtgcagagggaattacatcc

SEQ ID NO: 11686 - DNA, 60 bp, Homo sapiens
gcaaccactgcagctgggccaagtcgcttagctcttcggtggttgtcacacgtccggagg

SEQ ID NO: 11687 - DNA, 60 bp, Homo sapiens
gcagctttccacagttaattacccaggtttgatttggtcagtggtaaagagtgcaggagt

SEQ ID NO: 11688 - DNA, 60 bp, Homo sapiens
tccatgtgagggtggattcagctcggacctgccaagatcctgagtgacaggcaaagccaa

SEQ ID NO: 11689 - DNA, 60 bp, Homo sapiens
gaagtcctgaaagagcaggtatccatcaaagcggccatcaaagcggcgaacagggattta

SEQ ID NO: 11690 - DNA, 60 bp, Homo sapiens
attgaaggaggccttgaacagcctctcccagctctcctactcaacaagctcatccaaaag

SEQ ID NO: 11691 - DNA, 60 bp, Homo sapiens
tattctcgtagctgtgccgggtacttacccaccaccatgtcgaacaagagaacaaagcac

SEQ ID NO: 11692 - DNA, 60 bp, Homo sapiens
tcaaggatgagaatgcagcgttgatccgcgtcatcagcaaactctccaagtgacccggag

SEQ ID NO: 11693 - DNA, 60 bp, Homo sapiens
atattggagcccagcttatcgtggaagagtgtcccagcacttatagcctaactggcatgc

SEQ ID NO: 11694 - DNA, 60 bp, Homo sapiens
gctctgggcacatttcctgttcttgaattctgctcctgaagagggtgaacaaatggggca

SEQ ID NO: 11695 - DNA, 60 bp, Homo sapiens
gaagaggagcgaaatatccagtgggactaagcagttgtcactctgttcttcactcctacc

SEQ ID NO: 11696 - DNA, 60 bp, Homo sapiens
atcaggacagggcttttgccactgcacgcttgaacttctccggacagaggaacatctgta

SEQ ID NO: 11697 - DNA, 60 bp, Homo sapiens
atcagggtagctgaaggaaatccacacacccagagcatctcggagttcagactctcagac

SEQ ID NO: 11698 - DNA, 60 bp, Homo sapiens
ccatctgtgtagttttcagtagctgtcaagtgtgtcttacttaccttcccccagacgtag

SEQ ID NO: 11699 - DNA, 60 bp, Homo sapiens
gtgcaagtgagtccctctttactacaagcaaaagagaaaactcagcaatctctggcagcc

SEQ ID NO: 11700 - DNA, 60 bp, Homo sapiens
cggagactcagcccagttcaccaaggcgctggccatcatcctccacctgctctacctgct

SEQ ID NO: 11701 - DNA, 60 bp, Homo sapiens
ccacagaccaatgaatggagaatggtggcttcaatgagcaaaaggagatgcggagttggg

SEQ ID NO: 11702 - DNA, 60 bp, Homo sapiens
atgggagctgtctgggatgttgatccttgagaacttggccctgtgctttagacccaagga

SEQ ID NO: 11703 - DNA, 60 bp, Homo sapiens
gcacgagctccagcttctttaacagcaggtgataccctgtcagtcccagcccctgcagtt

SEQ ID NO: 11704 - DNA, 60 bp, Homo sapiens
aaaagcctccttagattcaaactggattccgacctcggttccactggtcaccattcaact

SEQ ID NO: 11705 - DNA, 60 bp, Homo sapiens
cggggtcgtccgcaaagcctgagtcctgtcctttctctctccccggacagcatgagcttc

SEQ ID NO: 11706 - DNA, 60 bp, Homo sapiens
atcgagtgtgtgaagctcttgctgtcctacggggccaaggtcaaccctcccctgtacaca

SEQ ID NO: 11707 - DNA, 60 bp, Homo sapiens
gtggaaagcactcctgcccgattagtaggaggacctctggttgatacggatattgctctt

SEQ ID NO: 11708 - DNA, 60 bp, Homo sapiens
agtgggagcatagatgatgacagggatagcttgcccgaatggtgcttagaggatgctgaa

SEQ ID NO: 11709 - DNA, 60 bp, Homo sapiens
tttgtggtcggacagactgattgggagaagatcacagatgaaagtggtcacctggctgaa

SEQ ID NO: 11710 - DNA, 60 bp, Homo sapiens
tcacgactgccccttcactgcatgtccccaaactcagcatgactcctgtcctcttcaata

SEQ ID NO: 11711 - DNA, 60 bp, Homo sapiens
aagagggaaactggaagccaaacactgtacagtattgtgtagaaagtcacctccctactc

SEQ ID NO: 11712 - DNA, 60 bp, Homo sapiens
gcccttgcactgtgcctgtatggtgtcagatgctgactgtgtggagttacttctggaaaa

SEQ ID NO: 11713 - DNA, 60 bp, Homo sapiens
ctggtcagtgttttgcagaaaactcttgttggcttcatttgggattcttgttctattagc

SEQ ID NO: 11714 - DNA, 60 bp, Homo sapiens
caccagtgagagggagatcaaaagctaagaactaccctgtagccaggactacaactgtgt

SEQ ID NO: 11715 - DNA, 60 bp, Homo sapiens
aaccccaacagaaccagacgcagactcaccataccacgcagcagacattcctgaacccgg

SEQ ID NO: 11716 - DNA, 60 bp, Homo sapiens
ccttccagtgatctggaccaggaagacggattgctgctgggtcatgatttccacatcatg

SEQ ID NO: 11717 - DNA, 60 bp, Homo sapiens
gaggacagagaacctcaggtgttcttatgctagtgcttgctgagtgcatactaagaaagc

SEQ ID NO: 11718 - DNA, 60 bp, Homo sapiens
gagcagctgatcaaagaccagcaagacaagatctgtgctgtgaaggccaacatcctcaag

SEQ ID NO: 11719 - DNA, 60 bp, Homo sapiens
caaggctgtttgggtataggggtcaggtaccaatgaagaatcacgacttgtctcactcct

SEQ ID NO: 11720 - DNA, 60 bp, Homo sapiens
gactggctaggagaccttgggcagtacctacagtcttgctgtttctgtttcatctgcaag

SEQ ID NO: 11721 - DNA, 60 bp, Homo sapiens
tcaacagcaatctgaagactctgactaacatgcagaatctacccaataccacactgcccc

SEQ ID NO: 11722 - DNA, 60 bp, Homo sapiens
gaaacatactgtctatgtgttgcccaattgctgtttgtccactctgaattctggaccctt

SEQ ID NO: 11723 - DNA, 60 bp, Homo sapiens
cctggagtctgaatcttttcgaccaaacctaagtgatcccagtgaacttttactgccaga

SEQ ID NO: 11724 - DNA, 60 bp, Homo sapiens
taattacggagcagacacgaacacacggaactatgaaggacagaccccattggctgtttc

SEQ ID NO: 11725 - DNA, 60 bp, Homo sapiens
cagctgtttttaggctgttccttgtactcttaggatatttgagtcacttgtgtcaaccac

SEQ ID NO: 11726 - DNA, 60 bp, Homo sapiens
atcacagtgctcaaacaggtccaggagctgatcatcaacaaagaccccacactactggac

SEQ ID NO: 11727 - DNA, 60 bp, Homo sapiens
aactctccagcccatgaggagttcaagacgatgctgctgatcgctcattactatgccacg

SEQ ID NO: 11728 - DNA, 60 bp, Homo sapiens
ggtggctcggccagtgaaaccaacatcgaagagaaggtgctggcatccagtcccatcatg

SEQ ID NO: 11729 - DNA, 60 bp, Homo sapiens
aatctagacctccttcttcatccataagtggactgtgccagtacaatacatgcctcagcc

SEQ ID NO: 11730 - DNA, 60 bp, Homo sapiens
gaaagcatccgtcatgaagttaccaggctaacatcagagaacatgatgatcccagacttt

SEQ ID NO: 11731 - DNA, 60 bp, Homo sapiens
agaggcccgcattgaggccagcctgcagcacgagatcacccggctgaccaacgaaaactt

SEQ ID NO: 11732 - DNA, 60 bp, Homo sapiens
ctacgatcctctgcggatttacctcttttcagatggactggtccgctttgccagttgcaa

SEQ ID NO: 11733 - DNA, 60 bp, Homo sapiens
ttctgccaaatgccattaatgctgctttatccttaggccctagagatactgaaagtcctg

SEQ ID NO: 11734 - DNA, 60 bp, Homo sapiens
gaccttggtctcgaagccatacgtggttgtctgctttcctaaggactcccatttccagta

SEQ ID NO: 11735 - DNA, 60 bp, Homo sapiens
gggcactgatgactctgcaacagaatatgacaccatcttcccaggcaaaagcaacatctg

SEQ ID NO: 11736 - DNA, 60 bp, Homo sapiens
aaacgtgtgtgtcagttggaccatgtgggaccctgatggacctgaaagaccaggatcggt

SEQ ID NO: 11737 - DNA, 60 bp, Homo sapiens
cttgtagaacacaaagctgatttggaagtgtcaaaccgacatgggcatacgtgcttgatg

SEQ ID NO: 11738 - DNA, 60 bp, Homo sapiens
agaatccttacgtgccctgaaacgaggcctggagaacaccttgcacgatgccaagcactg

SEQ ID NO: 11739 - DNA, 60 bp, Homo sapiens
gagggttcctgtttggattagaccatagttgacccatctggcattgccaacgaagccttc

SEQ ID NO: 11740 - DNA, 60 bp, Homo sapiens
ccccagattcctgttgcttcagtcactcctacagcatcactatcaggagctggtacatac

SEQ ID NO: 11741 - DNA, 60 bp, Homo sapiens
caactaccagtacatcaccaacttcgagtggtacatcagcatcctggtggagctgacccg

SEQ ID NO: 11742 - DNA, 60 bp, Homo sapiens
gagggcagaaaatacgcaagaggaactccgagaattccaggagggaagccgagaatatga

SEQ ID NO: 11743 - DNA, 60 bp, Homo sapiens
catccttgagccgtgcctggtactggagaagctgcttcttctgggtctctatagtctcca

SEQ ID NO: 11744 - DNA, 60 bp, Homo sapiens
ggacaggagacagatgacactatactgttcatcgtctaggaaaggaccccacactgatgg

SEQ ID NO: 11745 - DNA, 60 bp, Homo sapiens
ttttgacttggcaatgagctcttcaatcagctctttccgggacttcggtttctcccgctc

SEQ ID NO: 11746 - DNA, 60 bp, Homo sapiens
ccagacagccaactcagagtgactggtcaatggagaacactttgaacgagccatctttgc

SEQ ID NO: 11747 - DNA, 60 bp, Homo sapiens
gaggaacaccaggatgctttggaacttatcatgagcaaatatcggaaacagatgttacag

SEQ ID NO: 11748 - DNA, 60 bp, Homo sapiens
ggatgcccaacaaaccacattgatgaatatggaaatagctgattatgaacgtttgatgaa

SEQ ID NO: 11749 - DNA, 60 bp, Homo sapiens
tggagtcattgtgggttatttttggtgggatggaggatcttaaaaatgcctaattgtgag

SEQ ID NO: 11750 - DNA, 60 bp, Homo sapiens
atgcacattggaagctcccaccccatattgttcttcaaagtggaggtctcccctgatcca

SEQ ID NO: 11751 - DNA, 60 bp, Homo sapiens
acagaaagaaccccaactgtgcactttcctcaaatgagtaggagcttcagcaaacccggc

SEQ ID NO: 11752 - DNA, 60 bp, Homo sapiens
agactgtgagaatccgcaaagctgggtatgcggtccgaagaccctttcaggacttttaca

SEQ ID NO: 11753 - DNA, 60 bp, Homo sapiens
ctttgtggacgaagtaagagccatcatccccagagtccccagtttaagtgtaccatggct

SEQ ID NO: 11754 - DNA, 60 bp, Homo sapiens
acattcccactcaaggctcagaacttggctcgcattggtagctggaggtggtagaatttg

SEQ ID NO: 11755 - DNA, 60 bp, Homo sapiens
ggagattctagggcctgcagagctaaatccacaccatctacttgtgagtcctctacaggt

SEQ ID NO: 11756 - DNA, 60 bp, Homo sapiens
aatcatctgctggggtggtgctgggtgacaataccctgctgcaagggcgggttaaggccc

SEQ ID NO: 11757 - DNA, 60 bp, Homo sapiens
gtaggtcatgttaagcttcttgcacattaatatgattatggaaggaaaggcagtgaagca

SEQ ID NO: 11758 - DNA, 60 bp, Homo sapiens
gatgagaagtcagaaatggaagaggccctgacagccattacagaggaattggccgtttcc

SEQ ID NO: 11759 - DNA, 60 bp, Homo sapiens
tgcatcaaaggagggacatacggagattgtgcaggatctgctcgacgctggaacatatgt

SEQ ID NO: 11760 - DNA, 60 bp, Homo sapiens
aaagaagtccaagctcacagaggaggtgaccaagaggctgcatgacggggagtccacagt

SEQ ID NO: 11761 - DNA, 60 bp, Homo sapiens
caccatcagtggccaggattcgtggattgagcagcaggtcctggaagccaaccccatcct

SEQ ID NO: 11762 - DNA, 60 bp, Homo sapiens
ccagcccatgtcccaagttgtgccaagggaatgcctcttgccacccaccatcctgcccag

SEQ ID NO: 11763 - DNA, 60 bp, Homo sapiens
tacatggtccaggactacgcccagatgaaccacatccaggtagagaagatagagccgtct

SEQ ID NO: 11764 - DNA, 60 bp, Homo sapiens
gggagtgagtgtgcccttcacactgtgacattgtgacattgtgacaagctccatgtcctt

SEQ ID NO: 11765 - DNA, 60 bp, Homo sapiens
gggaagattgggatgattctgcacaagcaaaaatgactgaagtttatgtatagacacacc

SEQ ID NO: 11766 - DNA, 60 bp, Homo sapiens
gactttgagttaggataaggatgataggatgggtgctggagatgccctgccttgcttatt

SEQ ID NO: 11767 - DNA, 60 bp, Homo sapiens; identical to SEQ ID NO: 4855

SEQ ID NO: 11768 - DNA, 60 bp, Homo sapiens
cacttgcatccagctgatctaggtcacacctggctcttggctgccatgtggcttattaac

SEQ ID NO: 11769 - DNA, 60 bp, Homo sapiens
cccatgtctgaaaaccaaagtccaatttctgtctggccttttgtctcatccttcttggca

SEQ ID NO: 11770 - DNA, 60 bp, Homo sapiens
cccgggttcgtttcccggccaatgcaccacagcggccttgggtttgggctccagccccag

SEQ ID NO: 11771 - DNA, 60 bp, Homo sapiens
cgagcacacaaagaacaccggaaccacaattaggacgacacaagaggacaacaccgcgga

SEQ ID NO: 11772 - DNA, 60 bp, Homo sapiens
ccctcccaaagaaccttctgtcccatctgagcaggacaaggcccctgttgctgatgataa

SEQ ID NO: 11773 - DNA, 60 bp, Homo sapiens
aattacctgagcgaccaggactacatttcccaagaggctctgctccaggagtccaggaaa

SEQ ID NO: 11774 - DNA, 60 bp, Homo sapiens
gagctgtcggatggcaccttttccgtcacgtcagcctattctagtgccccagatggcagt

SEQ ID NO: 11775 - DNA, 60 bp, Homo sapiens
cgtggatcacctgcaacaagctctgatactccaggggatacttaagccctcatcacttca

SEQ ID NO: 11776 - DNA, 60 bp, Homo sapiens
atcagcagcatcgaggcccagctgagcgagctccgcagtgagatggagtgccagaaccaa

SEQ ID NO: 11777 - DNA, 60 bp, Homo sapiens
atttagccatgtctgccatgggtccagaaatgggaaagggaattgctgtccttgccctgt

SEQ ID NO: 11778 - DNA, 60 bp, Homo sapiens
atcgacgtcgctaggctgctcctcgatgaacatggggcttgcctttcagcagaagacagc

SEQ ID NO: 11779 - DNA, 60 bp, Homo sapiens
cggcgagggacagggctcaccctcccagctgctgtctgacgatgaaaccaaagacgacat

SEQ ID NO: 11780 - DNA, 60 bp, Homo sapiens
aacaagcctcttgctcagtaaagagacaaaagccacacaggagtaggtgccactgacctc

SEQ ID NO: 11781 - DNA, 60 bp, Homo sapiens
ccgaaatgtgttcagcgttgaagctggatatcggctctcagatgaccaaatagtcaacca

SEQ ID NO: 11782 - DNA, 60 bp, Homo sapiens
actggacacttcggaaggaaacatcacaaagcagctggtcaagaggctcacatctgcaga

SEQ ID NO: 11783 - DNA, 60 bp, Homo sapiens
tggagctgcagggacccgtttggacccacagcctctgttctagagatgcttgtataggct

SEQ ID NO: 11784 - DNA, 60 bp, Homo sapiens
gcctgcagaatgactacacagagggctgttatgatctccttccagaagcagacatcgaca

SEQ ID NO: 11785 - DNA, 60 bp, Homo sapiens
cctctgccagggtttcttagcggtttctctgtggatgttttggcatctttagacacctgg

SEQ ID NO: 11786 - DNA, 60 bp, Homo sapiens
gggaggctagctgttgtcgtggttgctcggaggcacgtgtgcagtcccggaagcggcgag

SEQ ID NO: 11787 - DNA, 60 bp, Homo sapiens
atcgaggacctgaggaacaagatcattgcggccaccattgagaatgcgcagcccattttg

SEQ ID NO: 11788 - DNA, 60 bp, Homo sapiens
gatctctaacccctctgatcgtggcgcatggcttggggattaaactacccttgaagagga

SEQ ID NO: 11789 - DNA, 60 bp, Homo sapiens
gcggcctcttgtccctggcatgatccggcttcgcatatctgcctgctctatcgttatgat

SEQ ID NO: 11790 - DNA, 60 bp, Homo sapiens
tcagcagacgtggcaagacccttcctcaacgaggagaagccagttaaacgttccatcatc

SEQ ID NO: 11791 - DNA, 60 bp, Homo sapiens
ccatggattcctacctaaaccagtcatatggcatggacaatcacagtggtggtggtgggg

SEQ ID NO: 11792 - DNA, 60 bp, Homo sapiens
tcccaaactgtttcttgatttcctaaatgtgcgacacttgccctctctaccaaaggcaga

SEQ ID NO: 11793 - DNA, 60 bp, Homo sapiens
agaagctcaggaagcaagcatggaaacagatcctaagccatagacaggctaattgcccac

SEQ ID NO: 11794 - DNA, 60 bp, Homo sapiens
aggtcagtgtggaggtggattccgctccgggcaccgatctcgccaagatcctgagtgaca

SEQ ID NO: 11795 - DNA, 60 bp, Homo sapiens
gaacagagtcttggtaacatgacaatcaggctccagagtctgaccatgacagctgagcag

SEQ ID NO: 11796 - DNA, 60 bp, Homo sapiens
tggacaccttcacacgtaccacaaatagcaccctgagtccactcaaaagctgccagctgg

SEQ ID NO: 11797 - DNA, 60 bp, Homo sapiens
acaggatgttttgtgcggattggcatcggaaaccacaacagcaaaccagtttaccgggtc

SEQ ID NO: 11798 - DNA, 60 bp, Homo sapiens
gccgccatgaacatgcaaaacgctgaaggattttttgaagaacccggattcaccgtgctg

SEQ ID NO: 11799 - DNA, 60 bp, Homo sapiens
ggtttgccacttcatcttgcactgttccccaaactttggactgagctatgccagactcag

SEQ ID NO: 11800 - DNA, 60 bp, Homo sapiens
tggcgtctctgaagccaatagctgggccatgaagatgatcttggctgtggagagccagaa

SEQ ID NO: 11801 - DNA, 60 bp, Homo sapiens
ttagcaaggaacaaaagcagagactccaggagcaggaggagatgctccgagagcaggagg

SEQ ID NO: 11802 - DNA, 60 bp, Homo sapiens
gcacaagtcctcatacaacagttttctgaagaatcaggagaattagtagatgcagagtta

SEQ ID NO: 11803 - DNA, 60 bp, Homo sapiens
tgatcagcccatgtagtgttggtcacttgggcctttcacctgccatggtaccttttgttc

SEQ ID NO: 11804 - DNA, 60 bp, Homo sapiens
tgtccagatgtgcctctttggctgggggttctggtggacgtttcaagtggcattttgtac

SEQ ID NO: 11805 - DNA, 60 bp, Homo sapiens
aatttgtagggtaggctatcaggaagtgcaggctggaaacatgcaggagctgtccctgaa

SEQ ID NO: 11806 - DNA, 60 bp, Homo sapiens
agctgctgtacccaaaatccttccttgtccaacatctgaagacacagctgatctggcagg

SEQ ID NO: 11807 - DNA, 60 bp, Homo sapiens
acaagatcatggccaccaccatcgacaactcccgggtcatcctggagatcgacaatgcca

SEQ ID NO: 11808 - DNA, 60 bp, Homo sapiens
attctcaggcaccagtccctgtccggaatgccacccacatcttccatttccatgtcccct

SEQ ID NO: 11809 - DNA, 60 bp, Homo sapiens
acatgggctccgagagcacctacagtgagtgtgagaccttcacggacgaggacaccagca

SEQ ID NO: 11810 - DNA, 60 bp, Homo sapiens
ggcccccgtggctgcttctcatcgaccccaaaacatgcttgagtcatacaagcttgataa

SEQ ID NO: 11811 - DNA, 60 bp, Homo sapiens
ccagacctactatcttattgttgcctggcctcacgggaacaagcaaggagtcatatatcc

SEQ ID NO: 11812 - DNA, 60 bp, Homo sapiens
acccacctagagcatcaacaaagaatagaatctaaagtttgtaaggcagccatcgccaca

SEQ ID NO: 11813 - DNA, 60 bp, Homo sapiens
cagactgactctcaacccaaagtcttccaccagccaatcagtgcacatcctgtgtcatca

SEQ ID NO: 11814 - DNA, 60 bp, Homo sapiens
tgttctcgtcaagtacagctctgcaccgttgtggctctagatcactgttcagcagctgaa

SEQ ID NO: 11815 - DNA, 60 bp, Homo sapiens
cagaaatgtagagagtcctgttcgagtccatccactgttggctcttccctaacgacaagg

SEQ ID NO: 11816 - DNA, 60 bp, Homo sapiens
gcaggggtgatctctgcttcctgtaccttgacatgcaaaaggctctcctaatactccaca

SEQ ID NO: 11817 - DNA, 60 bp, Homo sapiens
actctgaaggcagggaccctctgaccatcgccatggaaacagccaacgctgacatcgtca

SEQ ID NO: 11818 - DNA, 60 bp, Homo sapiens
gataaggacggcaacactcctctccatgtggctgcaagatacggtcatgagcttttgatt

SEQ ID NO: 11819 - DNA, 60 bp, Homo sapiens
tactagtttctgatggcagtgaaggtgtctgaatggtcctgagggctagaacctgctgca

SEQ ID NO: 11820 - DNA, 60 bp, Homo sapiens
tgctctcaaaggggaaatcccatcacctcagctaaccagaccgaagaagagaattggacg

SEQ ID NO: 11821 - DNA, 60 bp, Homo sapiens
ctgtcaggatggaggaaggtggatcggacagtgattccagtgaggaggaatatagcagaa

SEQ ID NO: 11822 - DNA, 60 bp, Homo sapiens
tccttggcagtggactcagaaagccaacatgtggctcctcccagcccataaccagtattt

SEQ ID NO: 11823 - DNA, 60 bp, Homo sapiens
ttcttcctcccattcaggatgcccacggctggagctgcctctctcatccactttccaata

SEQ ID NO: 11824 - DNA, 60 bp, Homo sapiens
aaaacaattgaacgtggcacacccgattaaggcggcactgagctgggccatgccccatta

SEQ ID NO: 11825 - DNA, 60 bp, Homo sapiens
actgaagaaagatcaagagcttcctgcttcacgggactgaatcctacaattgttcaggaa

SEQ ID NO: 11826 - DNA, 60 bp, Homo sapiens
ctggtttcagattcaggtggacaaaggacaagtgataaaatccaagaatatccacagctc

SEQ ID NO: 11827 - DNA, 60 bp, Homo sapiens
ggtaggtctctttatccctattgtacagatgagaaaactgagtccagttaagttcggccc

SEQ ID NO: 11828 - DNA, 60 bp, Homo sapiens
gcagtttgttccaaagctgcttgaacttgcaagactaccaggagtccattccctctaacc

SEQ ID NO: 11829 - DNA, 60 bp, Homo sapiens
ggtggctatacgaaaccttcacaatctgcatgctggactttattacagcttcccaagccc

SEQ ID NO: 11830 - DNA, 60 bp, Homo sapiens
tggcaagagtgagatctcggagctccggcgcaccatgcaggccttggagatagagctgca

SEQ ID NO: 11831 - DNA, 60 bp, Homo sapiens
ggactgcctctctgaaagagttcagatcatattcaggggtgaatccaacaccatggaaga

SEQ ID NO: 11832 - DNA, 60 bp, Homo sapiens
tacaaggagaagagcaagagcgtcaagcagacctgtgacaagtgtaacaccatcatctgg

SEQ ID NO: 11833 - DNA, 60 bp, Homo sapiens
ggagtcgggttcacccttccatcgtattctcccaactacacattgtaaagcctgagaaac

SEQ ID NO: 11834 - DNA, 60 bp, Homo sapiens
agaggcgttcttcctggtatgtggatgccagcgatgtcctaaccactgaggatccccagt

SEQ ID NO: 11835 - DNA, 60 bp, Homo sapiens
tgctgttgacggatgaccggaacctgcgtgtgaaggcgctcacaaggaatgttcctgtac

SEQ ID NO: 11836 - DNA, 60 bp, Homo sapiens
ctggaccaaaggaacatagccctagtttaagagaacgaagaccacagcaagaactccaga

SEQ ID NO: 11837 - DNA, 60 bp, Homo sapiens
gaacttgaaagcaaaaccaatacactccgtttatcacagactgtggctccaaactgcttc

SEQ ID NO: 11838 - DNA, 60 bp, Homo sapiens
tggggaaaacgcagctacacctggagcaaggtctcttcccggcttggcaatctcagctgt

SEQ ID NO: 11839 - DNA, 60 bp, Homo sapiens
agaagagggtccctacgaagctctgtataatgccatctcctgccattcgttggacagcat

SEQ ID NO: 11840 - DNA, 60 bp, Homo sapiens
tcgggactactgtggctggacacctctgcacgaggcctgcaactacgggcatctagaaat

SEQ ID NO: 11841 - DNA, 60 bp, Homo sapiens
gatgccatcaaggagtccctgctgtacttgtacatggacaggacctggatgccctatata

SEQ ID NO: 11842 - DNA, 60 bp, Homo sapiens
tgaagctgctccgctacgaggaggagttcctccggaagagcaacctgaaggccccgtcca

SEQ ID NO: 11843 - DNA, 60 bp, Homo sapiens
gactcggatgacaacagtcccctgcatatcgctgctcttaacaaccatccagacatcatg

SEQ ID NO: 11844 - DNA, 60 bp, Homo sapiens
tatcgaaagtgtcgcatcaaactctctggctatgcatgggtcactgcctgctctcacatc

SEQ ID NO: 11845 - DNA, 60 bp, Homo sapiens
cacttggtggggttcccacacaagctcctccacctcttgaagcaacttcatcatcacaaa

SEQ ID NO: 11846 - DNA, 60 bp, Homo sapiens
cctgctgcactagatgccagctgtgtcacttagcagcaaggtgacctcagcaaagttgtt

SEQ ID NO: 11847 - DNA, 60 bp, Homo sapiens
gctcctttgacctcgtgtgagaacccctttgccagagtgagacgtgtgcagaatgaacta

SEQ ID NO: 11848 - DNA, 60 bp, Homo sapiens
actgcctgttggggacaggagatgcatggacagtgtgctcaagctgtgggcatgtgcttg

SEQ ID NO: 11849 - DNA, 60 bp, Homo sapiens
ccagatggatttctgtagccataccaaagccagggtgttttcattcatgcggatactagt

SEQ ID NO: 11850 - DNA, 60 bp, Homo sapiens
cctgaattcaactccattgcactgggccacaagacaaggccatctatccatggttgtgca

SEQ ID NO: 11851 - DNA, 60 bp, Homo sapiens
aagagtgttggacttgtgtgaaaggagatgtgcgtgttggaatctgcttttccaagccgc

SEQ ID NO: 11852 - DNA, 60 bp, Homo sapiens
caaaatccgatttctacaacactacagagcactgtttgcatccccatcctcaagacagta

SEQ ID NO: 11853 - DNA, 60 bp, Homo sapiens
cgctgtggaaacatgggtgctctgctctgtagttacctactaagggaaaaggcaagcaag

SEQ ID NO: 11854 - DNA, 60 bp, Homo sapiens
acccttgcctcaagaaatcagatgggaccaatttagtgtccttccacctgtgagccaagc

SEQ ID NO: 11855 - DNA, 60 bp, Homo sapiens
acagcaacatgtagaagatgttcagcgtgcagggcttgctttcacaaacagtgcttccag

SEQ ID NO: 11856 - DNA, 60 bp, Homo sapiens
tcctgcctgtgctcctctgtgcccaggctggctctcccccaaccctagcatgtatactct

SEQ ID NO: 11857 - DNA, 60 bp, Homo sapiens
ccttgaggactctacccacggctaaggtcttcatttccctcccaccgaaccttgatttca

SEQ ID NO: 11858 - DNA, 60 bp, Homo sapiens
gtagaggagttggtggatggcaaggttgtctcgtctcaagtcagcagtatttctgaggtg

SEQ ID NO: 11859 - DNA, 60 bp, Homo sapiens
acagaattccagcaaggagagtactgcacaggaagaatgaccaggaggcatacagagggt

SEQ ID NO: 11860 - DNA, 60 bp, Homo sapiens
actcccgaacctctccacaaggtgtatgaggagaaaaccaagctgccttcctccgtggag

SEQ ID NO: 11861 - DNA, 60 bp, Homo sapiens
cttcaagctttaagaagtctagcttcctgtgaaatgtgagaggaagtcagcactcatttc

SEQ ID NO: 11862 - DNA, 60 bp, Homo sapiens
attctccagcctcattggttggtctgagatttggggaccaagtacttcagatcaatggtg

SEQ ID NO: 11863 - DNA, 60 bp, Homo sapiens; identical to SEQ ID NO: 4855

SEQ ID NO: 11864 - DNA, 60 bp, Homo sapiens
ccagtgggcatgtattagccagtcattgtaacctcgtgtctagtagaacaatgtacaagg

SEQ ID NO: 11865 - DNA, 60 bp, Homo sapiens
cagactctcccactccagaatgtagaagcctgtctctgtacctctaactggcagcaagtt

SEQ ID NO: 11866 - DNA, 60 bp, Homo sapiens
gcttgcttgggatctttgggttcacctctggcacactcaggtaacaacatgtcatggtga

SEQ ID NO: 11867 - DNA, 60 bp, Homo sapiens
ttcatggatgctggagtggagcacgatgacgtagcagagctgctgcaggagctacaaagc

SEQ ID NO: 11868 - DNA, 60 bp, Homo sapiens
tggcatctacttcgtatgactattgcagagtgcccatggaagacggggataagcgctgta

SEQ ID NO: 11869 - DNA, 60 bp, Homo sapiens
ttacataaacggagactccaaatacatgcgacctccttccaaagacgggagctatgtgaa

SEQ ID NO: 11870 - DNA, 60 bp, Homo sapiens
taaagcaggaactagaatccatgaaagcaaagctgtcctccacccagcagtctctggcag

SEQ ID NO: 11871 - DNA, 60 bp, Homo sapiens
ggctgctttgaagtctgtctgttaagtccaacatttgggaacccttggaaatagcttctg

SEQ ID NO: 11872 - DNA, 60 bp, Homo sapiens
ttcatgtgtgccaaggctgatgcaggatttgttctctgtccagcagtcacttcggccaga

SEQ ID NO: 11873 - DNA, 60 bp, Homo sapiens
catcaatcccattgcataggtttagagagagcacgtgtgaccactggcattcatttgggg

SEQ ID NO: 11874 - DNA, 60 bp, Homo sapiens
cactaagctcaggactgtaatatgggacaagaacaacatcactgcacaaggctttcagat

SEQ ID NO: 11875 - DNA, 60 bp, Homo sapiens
catttctccaagggaaaacgagctagaggagaccagtacctcaagacaaactgacacaca

SEQ ID NO: 11876 - DNA, 60 bp, Homo sapiens
ggcattttcatgtgcctttgaccaagtgttcagaatttgcttgactctaacctggagagc

SEQ ID NO: 11877 - DNA, 60 bp, Homo sapiens
cctctcagggatcatatccacaagtgctcgtgctgtgcgaggatctcactggttgtttat

SEQ ID NO: 11878 - DNA, 60 bp, Homo sapiens
ggacaaaggtatctaaggctgtctctacaagtgaattgaagaccgaaggtgtttcccctt

SEQ ID NO: 11879 - DNA, 60 bp, Homo sapiens
cgagcctactaaggtcgaatccgccgtagcatgtcgaaggagaggacgaagcaagagcaa

SEQ ID NO: 11880 - DNA, 60 bp, Homo sapiens
gttctaaatgctgaacaacttcagaaactcctttacctgctggagtcaacggaggatcct

SEQ ID NO: 11881 - DNA, 60 bp, Homo sapiens
acaagaggaaaaataatcaaggcaactcgtttcaggcaaagagagctcgacttaacaaga

SEQ ID NO: 11882 - DNA, 60 bp, Homo sapiens
tggagttcctggaccagctgctgctgcagaacatccggcatcacagtcattttcactctg

SEQ ID NO: 11883 - DNA, 60 bp, Homo sapiens
gctcgggagtacaactggaacgtgaagaacaaagctagcaagggctatgaggaaaactac

SEQ ID NO: 11884 - DNA, 60 bp, Homo sapiens
aagaccatctccaacagccggaagctgatgaacatcgccttcaatgacatgaaccccttc

SEQ ID NO: 11885 - DNA, 60 bp, Homo sapiens
aggtgctgaataactgcaaaacaacagcagatgagttgaagaagctaatccgtctgcaga

SEQ ID NO: 11886 - DNA, 60 bp, Homo sapiens
tggagaagcatcatgtgccaagtgacttcaatgtcaatgtgaaggtggatacaggtccca

SEQ ID NO: 11887 - DNA, 60 bp, Homo sapiens
ttcactagcggattccattctttgggttaaagctgcctccagcctcaggagcagtgtgga

SEQ ID NO: 11888 - DNA, 60 bp, Homo sapiens
tgggcttcacgtcttcccctggatttgcttagtactcagccagtgccacagtttgaagat

SEQ ID NO: 11889 - DNA, 60 bp, Homo sapiens
aaggcttagaggacagtgtggccaagaccttcgagaaatgcatcattgaagccgtgagct

SEQ ID NO: 11890 - DNA, 60 bp, Homo sapiens
gatcagtgaaggaaaccgtggttactgaggccctgttgaaaagtgcacgtcttgtccaat

SEQ ID NO: 11891 - DNA, 60 bp, Homo sapiens
cctgagacgaccagcactgggagttaggtacggtctgaagttatgtctagataagacttc

SEQ ID NO: 11892 - DNA, 60 bp, Homo sapiens
aatggtctgtgtgttatcagctgcgactggttcactgcgtctggacaagcctcatgggga

SEQ ID NO: 11893 - DNA, 60 bp, Homo sapiens
gtgactgtgacagtagagagtccttcatcctctgaagttgaagaggttgatgattcttca

SEQ ID NO: 11894 - DNA, 60 bp, Homo sapiens
aggaaaagtcagcccttgactgagggccagatcatccctggagtgcacctctactaagat

SEQ ID NO: 11895 - DNA, 60 bp, Homo sapiens
gccggacaagctgaggtccgcgactcgtcgctaagattccccaaaactgagatttcaaga

SEQ ID NO: 11896 - DNA, 60 bp, Homo sapiens
ccagcgttccagacatttgcgataagtttaagcagataaccaaagggagtttcgtgatgg

SEQ ID NO: 11897 - DNA, 60 bp, Homo sapiens
gctcacagcagcgtaacttccagcttctggtaatcactcatgatgaagattttgtggagc

SEQ ID NO: 11898 - DNA, 60 bp, Homo sapiens
gccctggtcaagtactttgacaagcccgtgtgcatgatggccaggattaccagtgcaaaa

SEQ ID NO: 11899 - DNA, 60 bp, Homo sapiens
gccagtttaggctcagtgaacaaactgatctagctctgaatgtatgtttcctgacgtttt

SEQ ID NO: 11900 - DNA, 60 bp, Homo sapiens
agaaggtggtcatagctctacctttaatataccaataaaataaacagcttacaatttctg

SEQ ID NO: 11901 - DNA, 60 bp, Homo sapiens
acgcacagtactaggtcaggtggtgctcccgggtgaggagctgctcctgccggaacagga

SEQ ID NO: 11902 - DNA, 60 bp, Homo sapiens
catcagctctggcattgaggaccctgtgccaacgctgcacctgaccgagcgagacatcat

SEQ ID NO: 11903 - DNA, 60 bp, Homo sapiens
agccagagtaggaccagttagacccagggtgtggacagctccttagcatcttatctctgt

SEQ ID NO: 11904 - DNA, 60 bp, Homo sapiens
aactttctcctttgttctcaggccttccaggtagtccccttcctggacttaagagtgcaa

SEQ ID NO: 11905 - DNA, 60 bp, Homo sapiens
cggctgcagatagagattgggaagctgagggcagagttggacgaggtcaacaagagcgcc

SEQ ID NO: 11906 - DNA, 60 bp, Homo sapiens
gcttcacaggaaagaaagctgcttagcatgacaaatcatggcctgggcattaaagcctaa

SEQ ID NO: 11907 - DNA, 60 bp, Homo sapiens
cccagaaagccatctacagggttccctaggccaggtggagatgaggatgggtaacagtat

SEQ ID NO: 11908 - DNA, 60 bp, Homo sapiens
accagccaccatgagcactcccacaatactggtcgcaacagcagtccatgcatatcgata

SEQ ID NO: 11909 - DNA, 60 bp, Homo sapiens
gctgtttccctttctattctgaacaactgtctccatttttcaagtgtgagagataagggc

SEQ ID NO: 11910 - DNA, 60 bp, Homo sapiens
acttcctacattctgggactaccgtgaagcctggagtagggagagcgagtttgggagctg

SEQ ID NO: 11911 - DNA, 60 bp, Homo sapiens
ggatgtggtgctgaagcaggtgcactgtgaagagttcatccccgagtttgagaagcaata

SEQ ID NO: 11912 - DNA, 60 bp, Homo sapiens
ggaagaaaggggttccagaaaagtccccagtcttggagaagtcctccatgccaaagaaga

SEQ ID NO: 11913 - DNA, 60 bp, Homo sapiens
caggccccacattagcacaagcccaggcatgggagaaacagctgctgaggaaataaaact

SEQ ID NO: 11914 - DNA, 60 bp, Homo sapiens
cttcttggaatggctgcagtgaggccgtgtcattggctcacaaaagtgactcataggtaa

SEQ ID NO: 11915 - DNA, 60 bp, Homo sapiens
gtttcttatttatttgcctctgaaggaaggttggcctgaagaactgaaagaacctcttat

SEQ ID NO: 11916 - DNA, 60 bp, Homo sapiens
caaactcagactattctgcttagccttcattagtcatctgggtgtgagtgtgtcttgttc

SEQ ID NO: 11917 - DNA, 60 bp, Homo sapiens
cgaccttatttgcctcgagccaagattccggcctggcgagagtttgtgcggcgacatgaa

SEQ ID NO: 11918 - DNA, 60 bp, Homo sapiens
ccacccactttggggagccattagaaaaggtggcctctgtggggaattctagacccacag

SEQ ID NO: 11919 - DNA, 60 bp, Homo sapiens
gaggacttccggacctggttcattgacctgtggaacaactctatcattccctatctacag

SEQ ID NO: 11920 - DNA, 60 bp, Homo sapiens
cggacagtgcacggtacacagcagctcctgccgttggctcaacgcggaaatctccgccag

SEQ ID NO: 11921 - DNA, 60 bp, Homo sapiens
gaggagcagtgcagagatctcaataagaggcttgaaagggagacgttacagagtaaagac

SEQ ID NO: 11922 - DNA, 60 bp, Homo sapiens
ggtgttgaaatgcttctctagcccaaacagcgacatgctaaagtccccttcttcagagtc

SEQ ID NO: 11923 - DNA, 60 bp, Homo sapiens
gactcccttctgtcccctaattccctgagctgtagatcctctggtgatgagtatgttgca

SEQ ID NO: 11924 - DNA, 60 bp, Homo sapiens
aacaggcacacaagtgtgaggagttgctaaatgctcagcatcagaggctccttgaaatgc

SEQ ID NO: 11925 - DNA, 60 bp, Homo sapiens
gatccatttcttggtaatcaaagcacatttgtttggtcttcctccaaccctttgcatttg

SEQ ID NO: 11926 - DNA, 60 bp, Homo sapiens
gacagagcacacaagtgcataaggctgttgtcttcggcttgggtgaaatgacagttcctc

SEQ ID NO: 11927 - DNA, 60 bp, Homo sapiens
agccctggacttgcatgtttgagaaggcttccaaccacatcttcactcagactcttggaa

SEQ ID NO: 11928 - DNA, 60 bp, Homo sapiens
agccagacctcaccgcagccctgaaagagatccgcacgcagtatgaggcaatggcgtcca

SEQ ID NO: 11929 - DNA, 60 bp, Homo sapiens
tctgctcttgatagtcaaagaccatggacaacaactgtcatctgaaggactcttctagaa

SEQ ID NO: 11930 - DNA, 60 bp, Homo sapiens
tggaaaggaatgagtgtttcagacttagctgacaagctctctactgatgatctgaactcc

SEQ ID NO: 11931 - DNA, 60 bp, Homo sapiens
agctggaagaatatcgtgcacaaggcagagtgctcaggcttccgttgaagaactcaccgt

SEQ ID NO: 11932 - DNA, 60 bp, Homo sapiens
ctgggctcacattctggctttgtccataacaatgctctgggatttcagggagttccctca

SEQ ID NO: 11933 - DNA, 60 bp, Homo sapiens
ggacactttgggtatattcatgggcattgtttccatctgtcttttctacctgtgccaccc

SEQ ID NO: 11934 - DNA, 60 bp, Homo sapiens
gggattactgctattggaggaacttcaactatttccagtgagggcacacagcattcttat

SEQ ID NO: 11935 - DNA, 60 bp, Homo sapiens
aatcagggtccagctccttgaagctctcagccatcgtggtggacagagccatgaggggaa

SEQ ID NO: 11936 - DNA, 60 bp, Homo sapiens
cccctcatacgacttcagctcctcacttggactcctcttgaggcaaaatgtcgtgacttt

SEQ ID NO: 11937 - DNA, 60 bp, Homo sapiens
atcaaccgtgctatgcagaaaccccaggaagagtacagcatcggtgtgctggacatttac

SEQ ID NO: 11938 - DNA, 60 bp, Homo sapiens
agatgtccaccaaggcttatctctttcaagccatcctacgtaacccagtcaccctagact

SEQ ID NO: 11939 - DNA, 60 bp, Homo sapiens
aaaagaagccacagaacaggaagcggtcatgaaagtgccatggatgaacactggaggtgg

SEQ ID NO: 11940 - DNA, 60 bp, Homo sapiens
ctggttttctccattgcattgttaggcatggtgacaagtgacagagttcttgccctctgt

SEQ ID NO: 11941 - DNA, 60 bp, Homo sapiens
gatccatctttctccactcaccgcagcgtacttggcacttcagtttcaaacacgtagtcc

SEQ ID NO: 11942 - DNA, 60 bp, Homo sapiens
gctcccacagagctttgagtaacttcttggttgtgcagtctgcaggcaatgttggcattg

SEQ ID NO: 11943 - DNA, 60 bp, Homo sapiens
catcaacattcaccaccttatggtggagctcaagaagcataagcccaacttctgatgtgc

SEQ ID NO: 11944 - DNA, 60 bp, Homo sapiens
attggtgaagctctaacggctgttttgactggcgtagccggagccggcgacgtgaggcgg

SEQ ID NO: 11945 - DNA, 60 bp, Homo sapiens
agatagagacaaaacatttctatcacaccggcaatttcctatgtgtcccatcccaatcaa

SEQ ID NO: 11946 - DNA, 60 bp, Homo sapiens
acatcactcctcagaaagtaaggatgatcagggtttgtcttctgacagttctagctctct

SEQ ID NO: 11947 - DNA, 60 bp, Homo sapiens
gttacgggacttagagggcattggcaaatcactgaagtactacagagacacttaccatcc

SEQ ID NO: 11948 - DNA, 60 bp, Homo sapiens
aatcatgaaccttgcctggacatttgccacctaaacgatcagtgtggtgctgcgttctgg

SEQ ID NO: 11949 - DNA, 60 bp, Homo sapiens
aactcaccaagctcatacggcagcagcacgagatgtgcctgaaccactcaaaccaattca

SEQ ID NO: 11950 - DNA, 60 bp, Homo sapiens
ttggtctcctatgcatgaagctgcaatccacggacatcagctgtctctgaggaacctcat

SEQ ID NO: 11951 - DNA, 60 bp, Homo sapiens
acatgtgaaaccaaagcctgctctctcctaaggctctcattcagcctatcttgcgaggcc

SEQ ID NO: 11952 - DNA, 60 bp, Homo sapiens
acagagagattacgaactgaagaaggccgcctatgacatcgaggtcaacacccgccgagc

SEQ ID NO: 11953 - DNA, 60 bp, Homo sapiens
gctcggaggagccaggatctccactgtggagcatgcagggctctggtggatgaactagaa

SEQ ID NO: 11954 - DNA, 60 bp, Homo sapiens
ccttatatccttctggacaactggagtagtcttttaacgaactttcttctggtaacccgg

SEQ ID NO: 11955 - DNA, 60 bp, Homo sapiens
tgcagatgcctagtatttccattctgaccgttgccctccttgttcttcttgcctccctag

SEQ ID NO: 11956 - DNA, 60 bp, Homo sapiens
tctatgtgttcagtcccatcttggttacacagaaatggtagccctgctgctggagttcgg

SEQ ID NO: 11957 - DNA, 60 bp, Homo sapiens
cttcctgggtgttacgggcaactgctcacacagttgtttctctgtgaacatttccagtgt

SEQ ID NO: 11958 - DNA, 60 bp, Homo sapiens
taaacctctggggttctggaccaagttcgacgtggctgattggctggagtggctgggttt

SEQ ID NO: 11959 - DNA, 60 bp, Homo sapiens; identical to SEQ ID NO: 4855

SEQ ID NO: 11960 - DNA, 60 bp, Homo sapiens
tgagaatgtggagaactcccatggagaggcagaatggcaggaggtttcatgtcccgcgtt

SEQ ID NO: 11961 - DNA, 60 bp, Homo sapiens
gacggtgttatgcttgggtgttagtgaggctgatatgtcatgtcaatcgataaaccctac

SEQ ID NO: 11962 - DNA, 60 bp, Homo sapiens
gtactctcttcataggattgtaaaggtgttctaatccaattgcatgatgtagtaagcctc

SEQ ID NO: 11963 - DNA, 60 bp, Homo sapiens
tttctgcccagcaaaagcacgtatgcttcaggggccttctgagaccaccttccccactga

SEQ ID NO: 11964 - DNA, 60 bp, Homo sapiens
agtaactagaaagtcggctcctagctctccaactctagactgtgaaaagatggactccgc

SEQ ID NO: 11965 - DNA, 60 bp, Homo sapiens
agtggcaaagttgaagggacaaggcactgtgaggggaaggcagagcctcactgtgtttaa

SEQ ID NO: 11966 - DNA, 60 bp, Homo sapiens
tgcctgaaggaatcacctgagcctgtccgtccaccaggagtggggagatgcccccatcca

SEQ ID NO: 11967 - DNA, 60 bp, Homo sapiens
cgcaggcatcgatcaagcagtagctcttcttatggctccagaaggaaacgaagtcgaagt

SEQ ID NO: 11968 - DNA, 60 bp, Homo sapiens
cctgtccttttcaccccatcctgcaatcctccgtgcagaggaactacactgttgtattct

SEQ ID NO: 11969 - DNA, 60 bp, Homo sapiens
gatcattactgcccagtgatgatgagctgaagtggggtgcaaaggaagtggaagatcatt

SEQ ID NO: 11970 - DNA, 60 bp, Homo sapiens
ctggggagatgcggttcacaatgcctcggtataggaggctgtgttgagctgacattcaaa

SEQ ID NO: 11971 - DNA, 60 bp, Homo sapiens
ggggagaggatagtggtgggaacagacaaataaggaagcggggaggactggataattggt

SEQ ID NO: 11972 - DNA, 60 bp, Homo sapiens
ttcctgggtggaagacattggggataacctgtactatggacactaccacgggtttgggga

SEQ ID NO: 11973 - DNA, 60 bp, Homo sapiens
tgctgtatgttatttcttgctctgttatcttttgccctcttagaatgtccctctcttggg

SEQ ID NO: 11974 - DNA, 60 bp, Homo sapiens
agccgcgcagttctctgcaggtgcagatgcaggcagtggaggtggcctgagcaggcagaa

SEQ ID NO: 11975 - DNA, 60 bp, Homo sapiens
ttggtcagaaactccaagacttagcagagcacagtgatcccgaagtgagagataaagtca

SEQ ID NO: 11976 - DNA, 60 bp, Homo sapiens
aggggccgccaccaaggctgtgacgaaggacgaagatgaatggaaagaattggagcaaaa

SEQ ID NO: 11977 - DNA, 60 bp, Homo sapiens
aaacactggaatcccaagtaaagaagagtgagtcaggtgtactaaaaggacaggaagccc

SEQ ID NO: 11978 - DNA, 60 bp, Homo sapiens
cccaaccatatacacatgggagcaggacctccacctcagtttaaccggatggaagaaatg

SEQ ID NO: 11979 - DNA, 60 bp, Homo sapiens
tgtgcctcagttcccttcagcgcagaagcctctgctgtccttggaggagactctgaatgt

SEQ ID NO: 11980 - DNA, 60 bp, Homo sapiens
gtttgtaatggcttatggggaacattgtgagcttcctacctgacatgttggcagaagtag

SEQ ID NO: 11981 - DNA, 60 bp, Homo sapiens
ttctgtcaaaacagcccatttcccggcagaaggtgtggaacctgcattgggcaatgaaaa

SEQ ID NO: 11982 - DNA, 60 bp, Homo sapiens
gtgttcacattcacacttaatgacttccttggcaccaatcatgtatttcaccgtttgcac

SEQ ID NO: 11983 - DNA, 60 bp, Homo sapiens
tcaagttagcatgctttctccagctgccctatcacctgccagctcatcacaaagaaccac

SEQ ID NO: 11984 - DNA, 60 bp, Homo sapiens
ttcggcgggggctgcacgtgcgcaggggtgtggaaacttaccggctgagccatggataca

SEQ ID NO: 11985 - DNA, 60 bp, Homo sapiens
tgactttagaaccgcatgatacggtggaaggagcactggactagtcgtcactaccctttt

SEQ ID NO: 11986 - DNA, 60 bp, Homo sapiens
acttcaaggagaaggacggctacaaacccgacgttaagatcgaatacgtggatgagacgg

SEQ ID NO: 11987 - DNA, 60 bp, Homo sapiens
agaaaagacagttcaggttctgtgtccccaaacactcttagccaggaggagggtgatcag

SEQ ID NO: 11988 - DNA, 60 bp, Homo sapiens
ctgaggaagagctgaagagtttctgagtctgtgagcttcttacatggctccaaatggtca

SEQ ID NO: 11989 - DNA, 60 bp, Homo sapiens
atgccaagacagtggagtgggactggaaactgctcacctatgtcatggaggaagaggtaa

SEQ ID NO: 11990 - DNA, 60 bp, Homo sapiens
tgaatgtggacattgcttgtgctgtggctgatggggaaaatgcctttcagggcctagaac

SEQ ID NO: 11991 - DNA, 60 bp, Homo sapiens
tacactaagaactctttgttacatcaggtattgcactctcagtctcgccatgttgaagtc

SEQ ID NO: 11992 - DNA, 60 bp, Homo sapiens
atgagagcaagagtatagtatggtacccaccttgggctcggattgggactgaagctggaa

SEQ ID NO: 11993 - DNA, 60 bp, Homo sapiens
cttcttagcgtgtccctgatgactctgtcctctgttagatggtcgttgtgcttctgagta

SEQ ID NO: 11994 - DNA, 60 bp, Homo sapiens
gacgtcactaagaggccttgtgtagaagtacaccagcatcattgtagtagagtgtaaacc

SEQ ID NO: 11995 - DNA, 60 bp, Homo sapiens
atactcagaagccaataacatgacaggagctgggactggtttgaacacagggtgtgcaga

SEQ ID NO: 11996 - DNA, 60 bp, Homo sapiens
cctttagtcttttgggtcgcgtagttgctgaaacctaagtacctgcagcctacaggataa

SEQ ID NO: 11997 - DNA, 60 bp, Homo sapiens
acctggtcacccggcagcggtatgggaaaagagacggcccggacaggcttctttccaaaa

SEQ ID NO: 11998 - DNA, 60 bp, Homo sapiens
ttttacacactgcgaggcccagctttctaggggacttttgcacatgtcatgcagctcagc

SEQ ID NO: 11999 - DNA, 60 bp, Homo sapiens
aagagtcaggcagtgaaggaccgggcaggcagcattgtcttgaaggtgctcatctctttt

SEQ ID NO: 12000 - DNA, 60 bp, Homo sapiens
aactggacttgattctactggtatgcaaaacaggcatgctagtaagcagtcagtcgtggc

SEQ ID NO: 12001 - DNA, 60 bp, Homo sapiens
accctggcagagaagctggggggcagtgcggtcatctccctggagggcaagcctttgtga

SEQ ID NO: 12002 - DNA, 60 bp, Homo sapiens
gacctattaacaagacaaaatgcctctatcccacaagccagatgcaggtctggggttcaa

SEQ ID NO: 12003 - DNA, 60 bp, Homo sapiens
ggggtctgaatgtaactcaccatgtggtgtgcaaggttcccctgcattgtattgctcact

SEQ ID NO: 12004 - DNA, 60 bp, Homo sapiens
acagccattaggcgtcagcatcttgacttttccccagcatcacaaacagccatttcctcg

SEQ ID NO: 12005 - DNA, 60 bp, Homo sapiens
catcgccatgcaccctcaggtcaacatctacagcgtcacccgtaagcgctacgcgcacct

SEQ ID NO: 12006 - DNA, 60 bp, Homo sapiens
agtgaagcaggctctgaaggctccaggactactgctcaccagcagcagaaagcttgtaat

SEQ ID NO: 12007 - DNA, 60 bp, Homo sapiens
ttgcaaatcagtggctctccctctttaaaccaagttggacgccagatgggtaagtgcgac

SEQ ID NO: 12008 - DNA, 60 bp, Homo sapiens
gagtgagctctaaccaggctcatttgctctctccactactcatctctggaattagccgct

SEQ ID NO: 12009 - DNA, 60 bp, Homo sapiens
acacaaaagatggagcgccaagaccacagcgaccaccgaagcaaagagggagagaaacaa

SEQ ID NO: 12010 - DNA, 60 bp, Homo sapiens
aattgaatgtaaagactggaagctcggcagagcagaactctgaacaacgtgcctcaggag

SEQ ID NO: 12011 - DNA, 60 bp, Homo sapiens
ccctgcctctacttgacttggaattggctgaagactacacaggaatgcatcgttcccact

SEQ ID NO: 12012 - DNA, 60 bp, Homo sapiens
aactcggtggagaagcctgtgtcctcgattctgtccagaaccccgtctgtggcaaagagc

SEQ ID NO: 12013 - DNA, 60 bp, Homo sapiens
gaggccatgctcaacttctgtgaaaaggagaccaagaaacttatgcagagggagatgtcc

SEQ ID NO: 12014 - DNA, 60 bp, Homo sapiens
cttctcgggggactcctacctagtgctgcacaatggcccagaagaggtttcccatctgca

SEQ ID NO: 12015 - DNA, 60 bp, Homo sapiens
catagggagtgaagtggagttatggtttcattcaatagagtattgctgattatacttgag

SEQ ID NO: 12016 - DNA, 60 bp, Homo sapiens
ccaggagtggcaccatgttgcagggacaaccatccccatttggcttctccttaaaacaca

SEQ ID NO: 12017 - DNA, 60 bp, Homo sapiens
tttctctctgcccaccttgacacagtaacttcctcttatagtcaagatgatgattaagtg

SEQ ID NO: 12018 - DNA, 60 bp, Homo sapiens
aagtggggttcttcagccaggaggacctggacaagtatgacatcatgttactggacacct

SEQ ID NO: 12019 - DNA, 60 bp, Homo sapiens
gctgaggaacggaaatctgcagtatgacctccactactggctgggcaatgagtgcagcca

SEQ ID NO: 12020 - DNA, 60 bp, Homo sapiens
agggatgatcccattccaccctgtccactctggatgagaattggccacctgatggttatt

SEQ ID NO: 12021 - DNA, 60 bp, Homo sapiens
gctagtcggaatgcaaacttttgacgtcctgattgctccagggccctcttccaactcagt

SEQ ID NO: 12022 - DNA, 60 bp, Homo sapiens
atccttgagagcctggaacgcatcgtggaacgtctgaggcagccaccctctatctctgca

SEQ ID NO: 12023 - DNA, 60 bp, Homo sapiens
aaggaagagacagatggtctgcatgaagagctggagtttattcggatccttggagcagat

SEQ ID NO: 12024 - DNA, 60 bp, Homo sapiens
ccagaagtctgtgactaccttgtcactactttaggcccattccacaaagcccatctctgg

SEQ ID NO: 12025 - DNA, 60 bp, Homo sapiens
tagagggcatagctggccacagtgctacaccacctgcctgattgccaagggtgcccagca

SEQ ID NO: 12026 - DNA, 60 bp, Homo sapiens
ttgagagcaccctgcattctgcctcatggtgcagttagcgatcacaggccttcagaagta

SEQ ID NO: 12027 - DNA, 60 bp, Homo sapiens
gccagcaaattggacaagtcctcaaagagatagtgcaattggttctaccaaggcccttcc

SEQ ID NO: 12028 - DNA, 60 bp, Homo sapiens
cagctggcagagagcacagtgatcaccagcgtgagtggtggaggaggacacttggatatt

SEQ ID NO: 12029 - DNA, 60 bp, Homo sapiens
gaagtcttcagaaaggacagctgcttttcccagctcttctggggtgatctatacagttgc

SEQ ID NO: 12030 - DNA, 60 bp, Homo sapiens
gaaagaaggtgggaagccattgtcatgcaagccgtccagtggcaaacacgtctacaaaag

SEQ ID NO: 12031 - DNA, 60 bp, Homo sapiens
ggtagcacagtggacagtctttgatcatcatgtagaatatggctatgaatcaggaaagag

SEQ ID NO: 12032 - DNA, 60 bp, Homo sapiens
ctgctgcatccatggtggtagttgccactgcaaagtccacaaaactagaaacagtcccgg

SEQ ID NO: 12033 - DNA, 60 bp, Homo sapiens
aaaagacactcctccacttatcccctccgtgatatggctcttcgcatgctgagtactgga

SEQ ID NO: 12034 - DNA, 60 bp, Homo sapiens
caacgtggcagaggttacccagtcggagatcgcccagaagcaaaagctacagactgtact

SEQ ID NO: 12035 - DNA, 60 bp, Homo sapiens
aatctgaccgcctcaacgccattctgagatcacctcactgcctctcatttgccttaccca

SEQ ID NO: 12036 - DNA, 60 bp, Homo sapiens
ttcttcttcagtgcctgttggagaacaccccagttttagaggatgtccttgggaggatcg

SEQ ID NO: 12037 - DNA, 60 bp, Homo sapiens
caccttagaggtgtgacctcactagcgttgactgagcgagtctgttgtggagaagaactt

SEQ ID NO: 12038 - DNA, 60 bp, Homo sapiens
gacttcctctatttgtcaaggtacgcgatacgactcaggaaccttgcggacgactatcat

SEQ ID NO: 12039 - DNA, 60 bp, Homo sapiens
gtggaacagctcactgaatacagcacagacaaggacgagcctccaaaggacgtctttgat

SEQ ID NO: 12040 - DNA, 60 bp, Homo sapiens
atggaccagatatcaagagagccatccatagggagctggctgggggtttccgtgggagct

SEQ ID NO: 12041 - DNA, 60 bp, Homo sapiens
gatatacaagacaaggtgaagcctcggaagttattccaatggaaacagctggagaactta

SEQ ID NO: 12042 - DNA, 60 bp, Homo sapiens
gcgactctttgagatgcttggacgaaaatgcttgacgctggccactgcagttgttcagct

SEQ ID NO: 12043 - DNA, 60 bp, Homo sapiens
ccaagactctccatgtgaagatgagtgggaaagcagattctacttccatccgatttccga

SEQ ID NO: 12044 - DNA, 60 bp, Homo sapiens
gaacgatatagagatgcacaaacagttgaacttagaagtagcagtattggctttatgtaa

SEQ ID NO: 12045 - DNA, 60 bp, Homo sapiens
aggccaagtgtagaagtccctccaccaccgccaaataggatgtaccctcctccacctcca

SEQ ID NO: 12046 - DNA, 60 bp, Homo sapiens
ggaaaatagcttgaatgttggtgaaagacttagcggagtgggagggcagtgaaatctaga

SEQ ID NO: 12047 - DNA, 60 bp, Homo sapiens
ccctgtcttaaatgaaacaaagaaaaggagaaaaattccggaggggggatctaaaggggg

SEQ ID NO: 12048 - DNA, 60 bp, Homo sapiens
ttctttcaagggacacaggcagcttctctccttgtcctctggggaggtgctgacccctca

SEQ ID NO: 12049 - DNA, 60 bp, Homo sapiens
acagaagaatttctggagttcatttcagatggagcactggccattgaagtatggggccac

SEQ ID NO: 12050 - DNA, 60 bp, Homo sapiens
gttgttacggaaagcagcagtgtaccagtgtcactctggagtacagcgggagaaacacaa

SEQ ID NO: 12051 - DNA, 60 bp, Homo sapiens
cctgctcacggagaaggcggcgcccgtcatgaacgtcatccacagcatcttcagcctcgt

SEQ ID NO: 12052 - DNA, 60 bp, Homo sapiens
gtacatcgccaagtttcagggagaagacacggtcgtgatcgcgtccaagccttatgcatt

SEQ ID NO: 12053 - DNA, 60 bp, Homo sapiens
taccctgagatgagtgcccatgagcgctccttggatttcctcattgaactgctgcacaag

SEQ ID NO: 12054 - DNA, 60 bp, Homo sapiens
cagctcgcttcaggaggccgaaccccgttcccaccaaccctctcagctcagacgcggggt

SEQ ID NO: 12055 - DNA, 60 bp, Homo sapiens; identical to SEQ ID NO: 4855

SEQ ID NO: 12056 - DNA, 60 bp, Homo sapiens
gggtaaatgatgtctgtaatgggttgagttactgagatgacaatctcctgtgccatttgg

SEQ ID NO: 12057 - DNA, 60 bp, Homo sapiens
attcaacagagagtacacacacagccacgtctgcgtcagtgccagcgagagcaagctctc

SEQ ID NO: 12058 - DNA, 60 bp, Homo sapiens
tgtcccatctgtacgccctaatgtgccattccctagaggggaacaaccaagtgccgtgga

SEQ ID NO: 12059 - DNA, 60 bp, Homo sapiens
cgtcattagagcaggttgttgccagttactgtaatctctgatcttgaacaatgggaaaag

SEQ ID NO: 12060 - DNA, 60 bp, Homo sapiens
ctctccagagacagccaggtccttggcttcttacgcatccttccagaaagagtttcaaca

SEQ ID NO: 12061 - DNA, 60 bp, Homo sapiens
taagtggcatggtctaagtgtccggccacgtttgtaacggggatgcggccataggggata

SEQ ID NO: 12062 - DNA, 60 bp, Homo sapiens
ggcccctctgttgagtaccccaaagcgagagcggatggtgctaatgaagacagtagaaga

SEQ ID NO: 12063 - DNA, 60 bp, Homo sapiens
agagggcgagatgtacgaagacgacgaggaggagtcggaggcccagggccccaagtgaaa

SEQ ID NO: 12064 - DNA, 60 bp, Homo sapiens
tgctggggacaagggaacctgacacagaagtgatcacagttgagaaatccagccctgcta

SEQ ID NO: 12065 - DNA, 60 bp, Homo sapiens
agggccattgctgggctaggtgcaccgtaactgcttgtgtatcttgtaaatagccagcca

SEQ ID NO: 12066 - DNA, 60 bp, Homo sapiens
ctgagagctggagagttggtgataagcgagacgaacacatttcctgccctcatacacaca

SEQ ID NO: 12067 - DNA, 60 bp, Homo sapiens
gtctgggagtatgtttgtgtgtctttccagctttatcctgtagcgtgtctttgttctgtg

SEQ ID NO: 12068 - DNA, 60 bp, Homo sapiens
gaagaagacttctttctctacatggtgttcctggtacagctgacccattgtggcactggt

SEQ ID NO: 12069 - DNA, 60 bp, Homo sapiens
atgagcataagcgttcactgaccaagactccagccagaaagtctgcacatgtgaccgtgt

SEQ ID NO: 12070 - DNA, 60 bp, Homo sapiens
cgatggatagtcggaatagagccgccccaactcagatcctacaacacgcaagttccttct

SEQ ID NO: 12071 - DNA, 60 bp, Homo sapiens
aaggtagaagcggcacaccgtctcgccggacacgcgtctctggagcggtacgaaggcctg

SEQ ID NO: 12072 - DNA, 60 bp, Homo sapiens
tcctgggctcctaccctgtagatgacggctgccgcatccacgtcattgaccacagtggcg

SEQ ID NO: 12073 - DNA, 60 bp, Homo sapiens
ggatgtgcctgagtgcaaaactcagtagactcctctttgtcacttctctggagatccagc

SEQ ID NO: 12074 - DNA, 60 bp, Homo sapiens
cagcttgttagtgatcaggccaaccatgttcttgccagagcaggtgaaggaaatgaggag

SEQ ID NO: 12075 - DNA, 60 bp, Homo sapiens
atcaagacacggtctgagcgggagatcgagcagctgaaggagcacctgcgtcttgccatg

SEQ ID NO: 12076 - DNA, 60 bp, Homo sapiens
gtaattgctcacattgtgcagtactatgttgtacagaccacgtgaaagggaatgctggtc

SEQ ID NO: 12077 - DNA, 60 bp, Homo sapiens
accgcgccttagccgcgaagttctagttcttgctgccggtcctaacgtcccgcagtcttc

SEQ ID NO: 12078 - DNA, 60 bp, Homo sapiens
ttcctgccgtcgcgtttgcacctcgctgctccagcctctggggcgcattccaaccttcca

SEQ ID NO: 12079 - DNA, 60 bp, Homo sapiens
atgttaaagatcatcgaaataaagctatgataaaccttcacatccagaaagacaacccca

SEQ ID NO: 12080 - DNA, 60 bp, Homo sapiens
tcaggccacaggtcttggctttctccttatcaccatttgctgttatcacggcacacagca

SEQ ID NO: 12081 - DNA, 60 bp, Homo sapiens
cttggtttatgagacagttgcaaaggatgtggtttctcaggccctcgatggctataatgg

SEQ ID NO: 12082 - DNA, 60 bp, Homo sapiens
ggtgctagtgaaactggaccttcggaagaaggcagcatgtattgctgagcagtatcatac

SEQ ID NO: 12083 - DNA, 60 bp, Homo sapiens
tgtgtagcatagagatgggtacttgaatgttggccttattgtgagtaaaacgtggtcccc

SEQ ID NO: 12084 - DNA, 60 bp, Homo sapiens
caacaagcctaccattaatgaggatgccaacgtcaaacttatccgtgagctgcgagctga

SEQ ID NO: 12085 - DNA, 60 bp, Homo sapiens
gccaaagaatgaatggcaacggtcacaaacccgtagcagtcgggtcccaaaaaccgggcc

SEQ ID NO: 12086 - DNA, 60 bp, Homo sapiens
gctggtctgtggcccaaggaaggccactccacattaagctgcccaataaactgcttttaa

SEQ ID NO: 12087 - DNA, 60 bp, Homo sapiens
ggatgtgccatatcattgaacggaactaaagtctgtgacagtggatatagctgctggacc

SEQ ID NO: 12088 - DNA, 60 bp, Homo sapiens
cgggagagaacaacaaagaacaacacagaaaacaagaacaaaacacgcacaacgcaaaga

SEQ ID NO: 12089 - DNA, 60 bp, Homo sapiens
aattaccacatcccacccaagagttccatccctcactacagtgccacagacacaaggcca

SEQ ID NO: 12090 - DNA, 60 bp, Homo sapiens
cagcctgcgattatacaaggatttacacatgcttcctctggtgctttacttcccaaacct

SEQ ID NO: 12091 - DNA, 60 bp, Homo sapiens
caagatgaagcagaaggagatccaggtaatagacatgagcctcgtgaacaaggaccccga

SEQ ID NO: 12092 - DNA, 60 bp, Homo sapiens
aaaatgtcagtcaccttcactgggaacaacacagccgtccaggaactcaagcgggtctca

SEQ ID NO: 12093 - DNA, 60 bp, Homo sapiens
cgctccgagggccagcgccacccgctccgcagccggcaccatgcgcgagatcgtgcacat

SEQ ID NO: 12094 - DNA, 60 bp, Homo sapiens
ttttctatggagcctccgtatgttttaggcccatgaccttcgtgaggtgacgggcactca

SEQ ID NO: 12095 - DNA, 60 bp, Homo sapiens
agaggcctgcgctgcacacgcgcagaccgagcatccgcgtcaagaggcgaagagagcgcg

SEQ ID NO: 12096 - DNA, 60 bp, Homo sapiens
cctgcttttgtcactcggctttggctcgggacttcaaaatcagtgatgggagtaagagca

SEQ ID NO: 12097 - DNA, 60 bp, Homo sapiens
gtcagagcattttgttgcctcaggctgtgttacctcaatttcagagtaagtagtggttga

SEQ ID NO: 12098 - DNA, 60 bp, Homo sapiens
agttcccttccaggaagcctgcagcgttcacgaagtgacattgatgtgaatgctgctgca

SEQ ID NO: 12099 - DNA, 60 bp, Homo sapiens
tctgggctacctcagggtcaccacccatgtattgggcttagtcaggattgacagatacat

SEQ ID NO: 12100 - DNA, 60 bp, Homo sapiens
gctaaagagatcatctacacgttaaaagagcgggcgtatgtggagcagatcgagaaggcg

SEQ ID NO: 12101 - DNA, 60 bp, Homo sapiens
cttctgagctatacgtcaaaagacacataagcttcaaaagtcaagacaaacctcatttgc

SEQ ID NO: 12102 - DNA, 60 bp, Homo sapiens
gaggaggagatatgagccgtatgggatgtattctgacgatgatgccaacagtgatgcctc

SEQ ID NO: 12103 - DNA, 60 bp, Homo sapiens
gggtcaaactgccaacaagtgctcctagacctactcgatttcttcgttcccaacaagaac

SEQ ID NO: 12104 - DNA, 60 bp, Homo sapiens
cttgattccctggaggaagaccttgactttcttcgagatcaatttactaccacagaagtc

SEQ ID NO: 12105 - DNA, 60 bp, Homo sapiens
ggttcaggaggtgtcaataggttgaacttgtgagaaggcactgaatctgccatccacatc

SEQ ID NO: 12106 - DNA, 60 bp, Homo sapiens
cagttgaacaaggtctccctaaggacatctttgattggcgaagagtggcccagtcccaga

SEQ ID NO: 12107 - DNA, 60 bp, Homo sapiens
ctggggtccattttacaatccattatttttgaccactgctatgtgttcaagtagtatgag

SEQ ID NO: 12108 - DNA, 60 bp, Homo sapiens
ctgctgtccatgacactgagtccagatcttcacatgaggcatgggtcgattctcgcctgc

SEQ ID NO: 12109 - DNA, 60 bp, Homo sapiens
aaaacagactcagcgaagaattcctcacagcccatcccagataccagttcctctgcctga

SEQ ID NO: 12110 - DNA, 60 bp, Homo sapiens
attgaattccagagcctactaacctcctgtatctcttcttctggcacaaccctacccttc

SEQ ID NO: 12111 - DNA, 60 bp, Homo sapiens
agtgtccgtttgcattccagaaggatgttcacgtcccagtatgcccactctgtaataccc

SEQ ID NO: 12112 - DNA, 60 bp, Homo sapiens
tccctggccacctctacagccctgaactcttgagacaactctctccagcaatagctgccc

SEQ ID NO: 12113 - DNA, 60 bp, Homo sapiens
gggacctggaaaagaacccaaagaaaacctgagtggacaggttcatttctggaatgcaga

SEQ ID NO: 12114 - DNA, 60 bp, Homo sapiens
cccgcttctagcccctctctcattctctaggttcacttttgaagaaccaaatgacctcac

SEQ ID NO: 12115 - DNA, 60 bp, Homo sapiens
gcaggttgaagccatgtctacatgaaagtcctcagtaagtgttagagggaacagggcgga

SEQ ID NO: 12116 - DNA, 60 bp, Homo sapiens
ccaagtctgccatcttggtgccgagtgagaagaaggtcgccatcatacgtactcctccaa

SEQ ID NO: 12117 - DNA, 60 bp, Homo sapiens
ggtcagtctaacagtttgcctgctgtatttatagtaaccattttcctttggactgttcaa

SEQ ID NO: 12118 - DNA, 60 bp, Homo sapiens
caagggcactacataacctctctggtaactccttgacattcttcagattaacttcaggat

SEQ ID NO: 12119 - DNA, 60 bp, Homo sapiens
accaactggtgatggaaggttacaagtggcacttcaatgagacggtgctcactgtgtggt

SEQ ID NO: 12120 - DNA, 60 bp, Homo sapiens
tttattcttccgctgtctgcctgcagcagtactactgtcaacatagtgtaaatggttctc

SEQ ID NO: 12121 - DNA, 60 bp, Homo sapiens
acaatgcttctctccaagcaattcgtgcagtgggatgagctactttgccagctagaggcc

SEQ ID NO: 12122 - DNA, 60 bp, Homo sapiens
attatggtacagggccaaagacttgagacgtggtgttttacatggtgactcacattatga

SEQ ID NO: 12123 - DNA, 60 bp, Homo sapiens
gagacagaaacactgagattttttgacttgcccacagtcatggtctctgtagaatctgaa

SEQ ID NO: 12124 - DNA, 60 bp, Homo sapiens
tccaggggaatgtagagccacgtccagggtgctcttttctgagagtatttcgagttattt

SEQ ID NO: 12125 - DNA, 60 bp, Homo sapiens
gaaacgtcataagctgagcaacctctccgtgtagtaacagcggatacctgtctatttcac

SEQ ID NO: 12126 - DNA, 60 bp, Homo sapiens
ctaaactgttggatgagattaggagatcagaggctggaccttctcttgataatgcttgtt

SEQ ID NO: 12127 - DNA, 60 bp, Homo sapiens
atgtgggccttagcctccaggtccagactactactctatgttctccagaagggtgctaag

SEQ ID NO: 12128 - DNA, 60 bp, Homo sapiens
agtggagcctgagaagaaagatcctgagaaggaacctcagaaagttgccaatgagccctc

SEQ ID NO: 12129 - DNA, 60 bp, Homo sapiens
catctggggacacagcctcagtacccagtcttttccctagttcctgaaactttcctagga

SEQ ID NO: 12130 - DNA, 60 bp, Homo sapiens
aaagttcaagatcagggagagagtctgtatccacagccagtgatcagccttcccactctc

SEQ ID NO: 12131 - DNA, 60 bp, Homo sapiens
gaggtctgtgccaggacttactcaacaaattccagtgcctctgtgatgttgcctttgctg

SEQ ID NO: 12132 - DNA, 60 bp, Homo sapiens
ctcccgttctctgtcatcggttccctcaatggagtccacatgtttgggcagaatctggag

SEQ ID NO: 12133 - DNA, 60 bp, Homo sapiens
atcatcctagccctaagtctggcctatgagtgactacaaaaaggattagactgagccgaa

SEQ ID NO: 12134 - DNA, 60 bp, Homo sapiens
cccttcggtgacgacataaaactctacaccagagagcccctaaaacccgacacatctacc

SEQ ID NO: 12135 - DNA, 60 bp, Homo sapiens
gtattcaggttcattggcttttgctggatgatccacctaaagaagttacctaatttggcc

SEQ ID NO: 12136 - DNA, 60 bp, Homo sapiens
cattcttctgtaaagagagccttccttcatcaactgaagctatttgggtattctcaaagg

SEQ ID NO: 12137 - DNA, 60 bp, Homo sapiens
actacgaagtgctatccgtgcgagaacagctattccacgagaggatccgcgagtgtatta

SEQ ID NO: 12138 - DNA, 60 bp, Homo sapiens
tgggtcagttagttgactgggtcgattagttggctatcctgggcccctggctttcgtttt

SEQ ID NO: 12139 - DNA, 60 bp, Homo sapiens
atacaagacaggcaagaacaagtggttcttccagaaactgcggttttagatgctttgttt

SEQ ID NO: 12140 - DNA, 60 bp, Homo sapiens
gcctccagcttttaccagtttaacatccaaagttcacagcatcagcattcatggtgtaag

SEQ ID NO: 12141 - DNA, 60 bp, Homo sapiens
aaattgtgtcctggcttacaatagtaaggacaggctaagagctggacagaagaaaactcc

SEQ ID NO: 12142 - DNA, 60 bp, Homo sapiens
ttctgcttctcggcaaggagcgatttgctggtgtagacatccgtgtccgtgtaaagggtg

SEQ ID NO: 12143 - DNA, 60 bp, Homo sapiens
taagttctaggcaattatacggggactcagaaggacctggccgctgccttcattgagttt

SEQ ID NO: 12144 - DNA, 60 bp, Homo sapiens
gtgcagcatggctctaacaagagaagagatcacagaaacgtgaggatcaagaagccggac

SEQ ID NO: 12145 - DNA, 60 bp, Homo sapiens
acccaataacctttcaaaacgcaaactgctgccatcatgacccttggccataatatgatt

SEQ ID NO: 12146 - DNA, 60 bp, Homo sapiens
gtattttcaaccaccaggaacttggatacagtgtgctttagaatccagggaacttcttgc

SEQ ID NO: 12147 - DNA, 60 bp, Homo sapiens
acatgatcaagtccttctatactgcaagtcttttgatagatgtcataacagtatttggag

SEQ ID NO: 12148 - DNA, 60 bp, Homo sapiens
tgagaagatggagcatgcagtggaagaggtgaagaacagcctgcagctctttgaggagta

SEQ ID NO: 12149 - DNA, 60 bp, Homo sapiens
ggaacctgtaccaatgcaggatcaagaacaagtactcaatgacacagtggatggcaagga

SEQ ID NO: 12150 - DNA, 60 bp, Homo sapiens
attcagcatctgagggctgcaagtacagaaggaatctattctcagcagggcatagggcac

SEQ ID NO: 12151 - DNA, 60 bp, Homo sapiens; identical to SEQ ID NO: 4855

SEQ ID NO: 12152 - DNA, 60 bp, Homo sapiens
ttgagggctgcagttctactcaggctggtggagaactctggcttttggaagcgagagtaa

SEQ ID NO: 12153 - DNA, 60 bp, Homo sapiens
ccagctaagtaccttcttccagaggtgacggtgcttgactatggaaagaaatgtgtggtc

SEQ ID NO: 12154 - DNA, 60 bp, Homo sapiens
actggaggccaaggagtgccagtcagaatgggaacttctgcaggacattggagacatctt

SEQ ID NO: 12155 - DNA, 60 bp, Homo sapiens
ctggcagtgggagaagatcaaggccaactgccctcacattgtacagtttggctctactga

SEQ ID NO: 12156 - DNA, 60 bp, Homo sapiens
gaattagttcgttctgctgaaactcattccctgccctcagacacatcctattccgaacag

SEQ ID NO: 12157 - DNA, 60 bp, Homo sapiens
catggcgagatactgcatgtttgctgttccacaaagcagtggcttagctgccatcttgct

SEQ ID NO: 12158 - DNA, 60 bp, Homo sapiens
agaacagccccatctctttcgcctgcacacttggaactcagcaagaagggactgtttcta

SEQ ID NO: 12159 - DNA, 60 bp, Homo sapiens
ggaggaaggatgagtctgagggttccggttgtcttggcctgagaccacccaaggtctttt

SEQ ID NO: 12160 - DNA, 60 bp, Homo sapiens
ttcagtaagctgtgtggtgaggctaccagtggaagagacatcccttgacttttgtggcct

SEQ ID NO: 12161 - DNA, 60 bp, Homo sapiens
ccagtatcctgagatgaagtaaatgcagtgttctactgcctgatgtgaaagagagctatg

SEQ ID NO: 12162 - DNA, 60 bp, Homo sapiens
acctgtacaacacggagatcctcaaacagtcggaccagatgacagccaaactctgctaac

SEQ ID NO: 12163 - DNA, 60 bp, Homo sapiens
gggcagtgagttcgacacaccatgccgactgtcagcgtgaagcgtgatctgctcttccaa

SEQ ID NO: 12164 - DNA, 60 bp, Homo sapiens
ctttcgtgctcatggtggcttggctttgactctccaaagagcaataaatgccacttggag

SEQ ID NO: 12165 - DNA, 60 bp, Homo sapiens
aggacaagggcacacaactggttccgttaagcccctctctcgctcagacgccatggagct

SEQ ID NO: 12166 - DNA, 60 bp, Homo sapiens
gcatatactggaactgaaatgcgcacagttgctgaaaaggttgatgccgtcagaattgtt

SEQ ID NO: 12167 - DNA, 60 bp, Homo sapiens
taacagggaccacagacccctcaccactcacagattcctcacactggggaaataaagcca

SEQ ID NO: 12168 - DNA, 60 bp, Homo sapiens
tgtgcagttcttgtgccccaacatcagcgtggcctacaggctcctggagggtgagggtct

SEQ ID NO: 12169 - DNA, 60 bp, Homo sapiens
tattccatccggaagcagtacatatctgaggagtcgaccctctcaggccagcagagtgaa

SEQ ID NO: 12170 - DNA, 60 bp, Homo sapiens
ttacttactggattctccttgcactttacctgttcttttccagagctgacagcacgggct

SEQ ID NO: 12171 - DNA, 60 bp, Homo sapiens
ccttccgcacggtgtccgagtggctggagtccatcaagatgcagcagtatacggagcact

SEQ ID NO: 12172 - DNA, 60 bp, Homo sapiens
agctggtcaccctgctggatgacaacagcctgcacctttggagcctgaaggtcaagggcg

SEQ ID NO: 12173 - DNA, 60 bp, Homo sapiens
attagccagtaaactttctcaaccccagagcaaatcaagctttcctttgcctgggaggaa

SEQ ID NO: 12174 - DNA, 60 bp, Homo sapiens
cgggacatggcaggtaatgagccggacgaggggagccaagctggagtttacacaggcaaa

SEQ ID NO: 12175 - DNA, 60 bp, Homo sapiens
caactactgggagactttgagattgagtccaaacagctggaagcagagtcttggagtcgg

SEQ ID NO: 12176 - DNA, 60 bp, Homo sapiens
cttttcagggattctctgctggtgctggtgcaaggacttctgttccaaaggctgggaaaa

SEQ ID NO: 12177 - DNA, 60 bp, Homo sapiens
ggacattttatgtgacaactgccaaaaaagtatttttaagaatttaagcgaaataaacag

SEQ ID NO: 12178 - DNA, 60 bp, Homo sapiens
ttctctgggaaatctactcctttgggcgagtgccttatccaagaattcccctgaaggacg

SEQ ID NO: 12179 - DNA, 60 bp, Homo sapiens
tgtatgagattctatctaatctgccagaatgtgtggcctacacttgtgtgaactgtactg

SEQ ID NO: 12180 - DNA, 60 bp, Homo sapiens
ggagtccacaggatcagagtggactttaaggattctgtttcactgaggccatctatccga

SEQ ID NO: 12181 - DNA, 60 bp, Homo sapiens
gccagggcatggttaaagtcaagggaaaagctcctctagttagctgaaactgggacctaa

SEQ ID NO: 12182 - DNA, 60 bp, Homo sapiens
gggaagattttaccaggacctcaaagacagagatgtcacattctcaccagccactattga

SEQ ID NO: 12183 - DNA, 60 bp, Homo sapiens
cataaacaacccctcatcagcctgccaagacaaagaacctcaacctactggcttactcgc

SEQ ID NO: 12184 - DNA, 60 bp, Homo sapiens
agactttcttggcaaaacccattccccaaagctacgcttcccctgctgagatagccccta

SEQ ID NO: 12185 - DNA, 60 bp, Homo sapiens
aagatttccgccaggtttcctcagtcatagacgtggacctactgcctgagacccaccgac

SEQ ID NO: 12186 - DNA, 60 bp, Homo sapiens
aattagtgtgactggaagatgaagagttgtaggaaggaacaagtcaaaatctagcaagac

SEQ ID NO: 12187 - DNA, 60 bp, Homo sapiens
cgcatgtgtcagagaccatcacccagctgaatcttagcggctacagaaagaatctccaga

SEQ ID NO: 12188 - DNA, 60 bp, Homo sapiens
gggccttgcacagaacactgtcggacgagagcatttacaatagccagagggagcactttt

SEQ ID NO: 12189 - DNA, 60 bp, Homo sapiens
ctgaaaataccttcccaaccactggatgcatcagcttctggtgatgtgagctgtgtggat

SEQ ID NO: 12190 - DNA, 60 bp, Homo sapiens
agagtccctggttcactgtgactcctgcatgccagcccagtccatgtgggagattgtgac

SEQ ID NO: 12191 - DNA, 60 bp, Homo sapiens
aaaacagaagtacaaaagcaacagccccagatctaagggcaccgtagctctggaatctgg

SEQ ID NO: 12192 - DNA, 60 bp, Homo sapiens
caggtctgctgtgtccacaccacagatgaccacatctaatcctgcttctactctcagctt

SEQ ID NO: 12193 - DNA, 60 bp, Homo sapiens
tggggccttcagggctttgggacatcttgtcctcaaccctctccctagatcagtctgtga

SEQ ID NO: 12194 - DNA, 60 bp, Homo sapiens
ttccctactgatctgaagccagaggaagtggcccaggaagctgctgaagaaccactgatt

SEQ ID NO: 12195 - DNA, 60 bp, Homo sapiens
aaaagctctgtgcatcctgccactgaggactccgaagaggtagcagtcttctgaaagact

SEQ ID NO: 12196 - DNA, 60 bp, Homo sapiens
aacgactaccaccgcagcgacgagcaggtgagcatctgcctggagtgtaacagcagcaaa

SEQ ID NO: 12197 - DNA, 60 bp, Homo sapiens
aaacacatgaaaccctgagtcacgcagggcaaaaggcaactgcagctttcagcaacgttg

SEQ ID NO: 12198 - DNA, 60 bp, Homo sapiens
gaagccccacaaagccagattgcagttcttgcccctttttgcgtctgacatgagatgtta

SEQ ID NO: 12199 - DNA, 60 bp, Homo sapiens
aatccaagaggaaacgcaagtgtgacaacgaagacgactacagggagatcaagaagtccc

SEQ ID NO: 12200 - DNA, 60 bp, Homo sapiens
ctaccctgatggacgataccgatcctcagactccagtttctggcgcttagtgtaccacat

SEQ ID NO: 12201 - DNA, 60 bp, Homo sapiens
cccactttactcaccttagtggtgaaaggagactagtagcatcttttctacaacgttaaa

SEQ ID NO: 12202 - DNA, 60 bp, Homo sapiens
cagagaacatgccataaacatccttgaacccatgcaggaaagcccatcccatattctgaa

SEQ ID NO: 12203 - DNA, 60 bp, Homo sapiens
taacaatgggaaccccttgtgagcatgctcagtatcattgtggagaaccaagagggcctc

SEQ ID NO: 12204 - DNA, 60 bp, Homo sapiens
accacatccccagagtgggtgatttcaacgagtcaacttactacatggagggaaacctgg

SEQ ID NO: 12205 - DNA, 60 bp, Homo sapiens
tgccctcgtctccctggccacccttggcctgtccacctgtgctgctgcaccaacctcact

SEQ ID NO: 12206 - DNA, 60 bp, Homo sapiens
tgaccctatgggtctaggacacagttcctgggaacatcacattcctctgcccttcctgca

SEQ ID NO: 12207 - DNA, 60 bp, Homo sapiens
atgctcagtcctccaggcgtcggtgctcagcggtgttggaacttcgttgcttgcttgcct

SEQ ID NO: 12208 - DNA, 60 bp, Homo sapiens
tctgggacctcagtgacattgacaaggatgggcacttggatcgagatgagttcgctgtgg

SEQ ID NO: 12209 - DNA, 60 bp, Homo sapiens
cctggactgctacctttcaaagcttggagggaagccgtgaattcagttggttcgttctgt

SEQ ID NO: 12210 - DNA, 60 bp, Homo sapiens
gtgaaggattcgaactgcacttctggagaaaaatatgtcgtaactgcaagtgtggccaag

SEQ ID NO: 12211 - DNA, 60 bp, Homo sapiens
tgttcaagcgtcgaggaacgtttcatcccttctgaatcccaggcctcgctggaccacgga

SEQ ID NO: 12212 - DNA, 60 bp, Homo sapiens
cttcacatccattgtctcttcatgtctattccattcccttcggccaaacagacaggtgga

SEQ ID NO: 12213 - DNA, 60 bp, Homo sapiens
aaacagagagacacgaagctgaccaccacgccatagacaacgagcaacaacgagcaacca

SEQ ID NO: 12214 - DNA, 60 bp, Homo sapiens
aggtccacatgaacaacgtgaccgtaacgctccatgatgccaccatccaggcgtaccttt

SEQ ID NO: 12215 - DNA, 60 bp, Homo sapiens
gtctttgactttcccagcgttgagtcatcaacactttgccaattagctcatggtcctggc

SEQ ID NO: 12216 - DNA, 60 bp, Homo sapiens
gttctcagcaagagaaggagtatgtgtccaatgctgccttcccatgaatctgtctcccag

SEQ ID NO: 12217 - DNA, 60 bp, Homo sapiens
gccgagtgctgtgcctccggcaacattgacaccgcctggtccaacctcacccacccgggg

SEQ ID NO: 12218 - DNA, 60 bp, Homo sapiens
gcactttaacggtagttccggtgtcaacatggacacgaacaaaaccttacccaggtgttt

SEQ ID NO: 12219 - DNA, 60 bp, Homo sapiens
aagaagcgtgagacgccaccattcctggaaaccacagtccacctgctcattctcgtagct

SEQ ID NO: 12220 - DNA, 60 bp, Homo sapiens
ggagctggaagtcgccctaggaacaccagatttcctggttctgttcaagttggcatttct

SEQ ID NO: 12221 - DNA, 60 bp, Homo sapiens
tcaccatgcggatgcgggtcacactgaatgctggagagatgtatgtaatatgctgaggtg

SEQ ID NO: 12222 - DNA, 60 bp, Homo sapiens
ctagcagacacatccagtatctccttctggagcacaggatgaaataagggagctgtatta

SEQ ID NO: 12223 - DNA, 60 bp, Homo sapiens
tgtggagtaggtccctctgttccgacaggtgcgacacttggcgctccatgcttgcgggtg

SEQ ID NO: 12224 - DNA, 60 bp, Homo sapiens
ctcaagatcagattcctgactaacccctctcttagagctacagcgagctgcattaccagc

SEQ ID NO: 12225 - DNA, 60 bp, Homo sapiens
acagccttcacttttctgagttcttgaagcatttcaaagccctgcctctgtgtagccgcc

SEQ ID NO: 12226 - DNA, 60 bp, Homo sapiens
cttagtcaggagaccaaggccaggatggaggaagaagcctacagcaagggattccaagaa

SEQ ID NO: 12227 - DNA, 60 bp, Homo sapiens
tatgatgcagccattgacctgtttacacgttcatgtgctggatactgtgtagctaccttc

SEQ ID NO: 12228 - DNA, 60 bp, Homo sapiens
aaataaatgtgatttgccttctagaacagtagacacaaaacaggctcaggacttagcaag

SEQ ID NO: 12229 - DNA, 60 bp, Homo sapiens
gcactggccctccaagacgcacaggatctgtatgcggcaggcgagaagattcgtgggact

SEQ ID NO: 12230 - DNA, 60 bp, Homo sapiens
ggcaagacgtgacagcaacatctgcttacaagaagacatctgaaaccttatcccaggctg

SEQ ID NO: 12231 - DNA, 60 bp, Homo sapiens
atcttgacttctgttcctataacacccagggaagctggagtggtggcctgtttggattca

SEQ ID NO: 12232 - DNA, 60 bp, Homo sapiens
tttagaggagaacgagcgccctctggaggacgaagctggagtggtggcctgtttggattc

SEQ ID NO: 12233 - DNA, 60 bp, Homo sapiens
ctaccccatcagcaagagaggatcctgcccgaagctggagtggtggcctgtttggattca

SEQ ID NO: 12234 - DNA, 60 bp, Homo sapiens
cagcctccaccaccagaatcaggtctagagcggaagctggagtggtggcctgtttggatt

SEQ ID NO: 12235 - DNA, 60 bp, Homo sapiens
acaggatcagagtggactttaaggaggatgtgaagctggagtggtggcctgtttggattc

SEQ ID NO: 12236 - DNA, 60 bp, Homo sapiens
tgtgtaattgtaaaactttcctaagtgacctttctctctccacaggagggttgaagctgg

SEQ ID NO: 12237 - DNA, 60 bp, Homo sapiens
tttgtttagaggagaacgagcgccctatggaggaagctggagtggtggcctgtttggatt

SEQ ID NO: 12238 - DNA, 60 bp, Homo sapiens
accaaactaccccaccaaacccacaaagaagaagctggagtggtggcctgtttggattca

SEQ ID NO: 12239 - DNA, 60 bp, Homo sapiens
ccatgcctgctcaggacactgcaatggagaccttcaactccccatctttatcgctcccca

SEQ ID NO: 12240 - DNA, 60 bp, Homo sapiens
taaatttcttagtgcttcagagtttgtgtgtatttgtattaataaagcattctttaacag

SEQ ID NO: 12241 - DNA, 60 bp, Homo sapiens
ggctgccaaggatgtgctgaagctggagtctagaccttcaatcaaagcattagatgggat

SEQ ID NO: 12242 - DNA, 60 bp, Homo sapiens
atgttgataaggaaaacgaagaaccaggcatccttgtggctacaaaggatgggctgaagc

SEQ ID NO: 12243 - DNA, 60 bp, Homo sapiens
atccctttggagtcgggaggctccagtgatgttgtccttgtcagctatgtcccatcctcc

SEQ ID NO: 12244 - DNA, 60 bp, Homo sapiens
aggagatcatgcagcatcgcttctttgccggtatcgtgtggcagcacgtgtacgagaaga

SEQ ID NO: 12245 - DNA, 60 bp, Homo sapiens
tcccacagggctcaggctgggctcagaggccactgagatgccagctccttgagagcagtg

SEQ ID NO: 12246 - DNA, 60 bp, Homo sapiens
gcagaagttagtaactgcagctcacctactgcaccaaagttctcgattttaggagcccag

SEQ ID NO: 12247 - DNA, 60 bp, Homo sapiens; identical to SEQ ID NO: 4855

SEQ ID NO: 12248 - DNA, 60 bp, Homo sapiens
agcggcaggactatatcaacctggatgagagtgaggccgcagcgtttgatgacgagtggc

SEQ ID NO: 12249 - DNA, 60 bp, Homo sapiens
ggtcgttctgtgccttccagcatcttgtacagcaaatcctgactcgtgtctttttacccc

SEQ ID NO: 12250 - DNA, 60 bp, Homo sapiens
tgaatcagttttggaatctaagctgtttgccaagctgaagctacaggttgtgaaataatt

SEQ ID NO: 12251 - DNA, 60 bp, Homo sapiens
ttgatgtcatggagtgacagaatggctttgctggcactcagagctcctcacttagctata

SEQ ID NO: 12252 - DNA, 60 bp, Homo sapiens
caagaagccagtgatggtcattgggacctgcacctgtcacaccaactgtcctaagaacaa

SEQ ID NO: 12253 - DNA, 60 bp, Homo sapiens
ttcggtttgctcttgatgcagtcttcacaggtgcattcttccaccgtgtactcgaggcct

SEQ ID NO: 12254 - DNA, 60 bp, Homo sapiens
ccagtgccaaggacccacctctcaatgtcgacaaagccttccatgacctcgttagagtaa

SEQ ID NO: 12255 - DNA, 60 bp, Homo sapiens
cccctactggctctgcgttttgctgagatctgtaggaaaggatgcttcacaaactgaggt

SEQ ID NO: 12256 - DNA, 60 bp, Homo sapiens
aatattctggtggggctggatccctggctggcccttcagggggcttcttccctggcaacc

SEQ ID NO: 12257 - DNA, 60 bp, Homo sapiens
cagtcctaatttgaacaggtcaaagatgtgttcaggcattccaggtaacaggtgtgtatg

SEQ ID NO: 12258 - DNA, 60 bp, Homo sapiens
ggtattagcagagacaaagagttacctcctccatcttactctgccctatttgaaagtctc

SEQ ID NO: 12259 - DNA, 60 bp, Homo sapiens
atcttcctcctgaatctcagctgccatcaagccctgctcagttgagctgcagaagtcttt

SEQ ID NO: 12260 - DNA, 60 bp, Homo sapiens
aataaggaggctcgagtgacatcttcgcgcaccaatcgggagtgagggagcattcgtgcc

SEQ ID NO: 12261 - DNA, 60 bp, Homo sapiens
gggatggaaaccttcaaacacgcaaccttttgagtttgggttcagaaacacccatgcaga

SEQ ID NO: 12262 - DNA, 60 bp, Homo sapiens
ggaccagacctgaacacacagatacctcactcatccctccaattcaagcctctcaactca

SEQ ID NO: 12263 - DNA, 60 bp, Homo sapiens
tccctgtggtagcaccttatcctcaggatggtttggaaatgaagcccctcagtcacgtga

SEQ ID NO: 12264 - DNA, 60 bp, Homo sapiens
cacagtcaaacctggagccaaaaaggacacaaaggactctcgacccaaactgccccagac

SEQ ID NO: 12265 - DNA, 60 bp, Homo sapiens
cacgacaaacagagttcaagacagagaacgagagccgcacagagcaggtgagcgcaccag

SEQ ID NO: 12266 - DNA, 60 bp, Homo sapiens
ttcctgagctccagcgaggtcgattctccaaatgtgctgactgttcagaagccctatggt

SEQ ID NO: 12267 - DNA, 60 bp, Homo sapiens
ggactcatctcttgtccgcttgccaccagacctcttacttgttccctgtttgatgccatt

SEQ ID NO: 12268 - DNA, 60 bp, Homo sapiens
atggccagcaaacttgaggctcctttcactcaggatgacacccttggactggaaaactca

SEQ ID NO: 12269 - DNA, 60 bp, Homo sapiens
aaaacgtgccccaccgcatccctacctggaaactgaccagcctgcactgtggaaaagctg

SEQ ID NO: 12270 - DNA, 60 bp, Homo sapiens
aaacagcatcctccattcagctgctgacagcgtgaccagcgcagtgcagaaggcaagcca

SEQ ID NO: 12271 - DNA, 60 bp, Homo sapiens
catgactgcccctgagctctggtgagaaaagctgaatttacaaggaaagggatgaagtta

SEQ ID NO: 12272 - DNA, 60 bp, Homo sapiens
cacagatcagaccgagaagcagggtgagagattctaacgactggatgctgctagtaacac

SEQ ID NO: 12273 - DNA, 60 bp, Homo sapiens
tgaccccagtggtatcctgtgacatgtaacagccaggagtgttaagcgttcagtgatgtg

SEQ ID NO: 12274 - DNA, 60 bp, Homo sapiens
atgttcattgcacatctgcttccactgtgttcccacgggtgccatgaagtgtgtgaggag

SEQ ID NO: 12275 - DNA, 60 bp, Homo sapiens
tttagaggagaacgagcgccctctggagggaggctggagtggtggcctgtttggattcag

SEQ ID NO: 12276 - DNA, 60 bp, Homo sapiens
gaagtccattgtgttgaagagattctgaaggaaaaaccacctccggtcaataagcaggag

SEQ ID NO: 12277 - DNA, 60 bp, Homo sapiens
cccatcaaatggtggtatagtagatagctatgtgtgtttgtaaggtttgtagcttgcaag

SEQ ID NO: 12278 - DNA, 60 bp, Homo sapiens
gacgttcttacactcccactccatccaagccaaggtctccttaggccttcagacgacctt

SEQ ID NO: 12279 - DNA, 60 bp, Homo sapiens
gctggtgcagaggatgaagtgctacgcctcggaccaggaggtgctggacatgcacggttt

SEQ ID NO: 12280 - DNA, 60 bp, Homo sapiens
tggtgacatgggacacctgcattggaagtgagatctgtgaggagctctggacaccccaca

SEQ ID NO: 12281 - DNA, 60 bp, Homo sapiens
gggacatgtctgcttattgccaacaaaagacagagctacgacatcagtattgtggcccag

SEQ ID NO: 12282 - DNA, 60 bp, Homo sapiens
gcaatgactgtggagttccattcttggcatctactctggaccaaggagcatccctaattc

SEQ ID NO: 12283 - DNA, 60 bp, Homo sapiens
ggtgggcttcactggagaaatggacttactgcaaatgctgtgatgtttcttagaggaact

SEQ ID NO: 12284 - DNA, 60 bp, Homo sapiens
ccttttgcccttcccattcagatttagatcctgctttcatttttggctagtgaagtagat

SEQ ID NO: 12285 - DNA, 60 bp, Homo sapiens
gagctcagctgctccaaagacatccagtatctcaaggactccctggcactggggaaaaca

SEQ ID NO: 12286 - DNA, 60 bp, Homo sapiens
ggacgacacaatctaggaaacactagaatgagaagtgttggccatgagaatcctggctcc

SEQ ID NO: 12287 - DNA, 60 bp, Homo sapiens
atgcaggtgctcaggaagacgcgacatgtcaacatcttgctgtttatgggcttcatgacc

SEQ ID NO: 12288 - DNA, 60 bp, Homo sapiens
aggagtcacagcatacactggaacaggagctgggtcagcctctgcagctgcctcagtttc

SEQ ID NO: 12289 - DNA, 60 bp, Homo sapiens
ttttctgtgccaagaaggacgacgcagttccacagtctgatggagttcgaggaatttata

SEQ ID NO: 12290 - DNA, 60 bp, Homo sapiens
tataagcagagagggatgggttcctgctccaagggaccctttgcctttcttctgcccttt

SEQ ID NO: 12291 - DNA, 60 bp, Homo sapiens
ttgtccgtcttctaactcttccccacgccaggtccgtcaagcctaagtccttgagttccg

SEQ ID NO: 12292 - DNA, 60 bp, Homo sapiens
ggtacctaacagtagctatgcataatcctgtggcacagtacactcccaagccaccaatgc

SEQ ID NO: 12293 - DNA, 60 bp, Homo sapiens
ttggtagtttctacagttgggcagctggttaggtagagggagttgtcaagtctctgctgg

SEQ ID NO: 12294 - DNA, 60 bp, Homo sapiens
ttgcagcaactcgagcatcattctttcaccagctgtccacctcgacctgctctccctgag

SEQ ID NO: 12295 - DNA, 60 bp, Homo sapiens
cctctccccatcttcagatcatcagatgtggtctataatgcgttttccttacgtgtctga

SEQ ID NO: 12296 - DNA, 60 bp, Homo sapiens
ccagctctactgtgtccactcctgaggatggttccagggaaataccgccagaaaacaaga

SEQ ID NO: 12297 - DNA, 60 bp, Homo sapiens
aagaaaaagcagcctccaccaccagaatcaggcatctacaccagtaataaggaccccatc

SEQ ID NO: 12298 - DNA, 60 bp, Homo sapiens
aacagcaagggtccatggcagggctgtcccatcttcagcagagtctgatgtcacacagtg

SEQ ID NO: 12299 - DNA, 60 bp, Homo sapiens
gtgtcctgctgttactccttctttggtagttgaaagttgaattcaagtctttccttctgt

SEQ ID NO: 12300 - DNA, 60 bp, Homo sapiens
cgcgtctgtgaacctttactaggctactacccatatccatactgctaccaaggaggacga

SEQ ID NO: 12301 - DNA, 60 bp, Homo sapiens
gcaggtgctcttgttttacccatgttgggtcagcctgaaactgccaaccagtaggaagca

SEQ ID NO: 12302 - DNA, 60 bp, Homo sapiens
gcagccgaagtcgcagagttagcttaagtgatggcagcgatagtgaaagcagttctgctt

SEQ ID NO: 12303 - DNA, 60 bp, Homo sapiens
tggtactgctcaagagtggccagcttatcaagactgagtgggaaggcacgtggtggaagt

SEQ ID NO: 12304 - DNA, 60 bp, Homo sapiens
ggtttgagggagaaggttgcagagcacttcccacctctctgaatagtgtgtatgtgttgg

SEQ ID NO: 12305 - DNA, 60 bp, Homo sapiens
gggagtttcgggaagaaccagattatcaggactgtgaggaccttgaaatcatcaggaaca

SEQ ID NO: 12306 - DNA, 60 bp, Homo sapiens
tccctctgtcatcctcaggaaccaacaattcgtcggaggcatcatggaaagactgggaca

SEQ ID NO: 12307 - DNA, 60 bp, Homo sapiens
ggaggtggagcatggtgctgatagtaaggatggtgtggaggttgttccattcctgggtaa

SEQ ID NO: 12308 - DNA, 60 bp, Homo sapiens
ttcgaccctagactggatcacgaaggaatctgttgtatagaatgtaggcggagctacacc

SEQ ID NO: 12309 - DNA, 60 bp, Homo sapiens
tgctgacaccacgctggacacgacaggggacgtcacagtggaagatgtgaaggatttcct

SEQ ID NO: 12310 - DNA, 60 bp, Homo sapiens
ctcccctggaagtccatcttcactgacccaccacatccccacagtgggagacccggactt

SEQ ID NO: 12311 - DNA, 60 bp, Homo sapiens
aatgagacagtcatcaatggttcatctagccaacaccgtggccatttgggcttttctttg

SEQ ID NO: 12312 - DNA, 60 bp, Homo sapiens
ctgtggtctacagttatgtggtaactcatgttgtccagccaactcagagtttcgtcagtg

SEQ ID NO: 12313 - DNA, 60 bp, Homo sapiens
tcccccacccattctgctcccctagagacctcttgtacagaagttgcccccaggtggtgg

SEQ ID NO: 12314 - DNA, 60 bp, Homo sapiens
ggccaatgatgaggccaatcagagtgatacaagtgtctccttgtcagaacccaagagcaa

SEQ ID NO: 12315 - DNA, 60 bp, Homo sapiens
cagaagagtgtaccatggaaaacctccagacaaatttctccttggttcagggctcaacta

SEQ ID NO: 12316 - DNA, 60 bp, Homo sapiens
gggacaggaagaaacctctgaagacactaagcctcagaccatggaacggtgacaaaagtt

SEQ ID NO: 12317 - DNA, 60 bp, Homo sapiens
gacaccagaagctcaaaacagaggctttctcaagggactgtttggtggaagcggacaaac

SEQ ID NO: 12318 - DNA, 60 bp, Homo sapiens
cacctaatggtgatcaaggtgtcttgagcatctgtcctttgatgaactcaggcactactg

SEQ ID NO: 12319 - DNA, 60 bp, Homo sapiens
ctttcctcagacatactccatagatattaatggctatattcttgtgtattctgttacatc

SEQ ID NO: 12320 - DNA, 60 bp, Homo sapiens
cctgagagtaccctctcgagggatgatcaagaatggagacagttggaggtgtgctcatta

SEQ ID NO: 12321 - DNA, 60 bp, Homo sapiens
cagcattcaggaacgggttaacttgtttggtttctggagccgattcaacggatctaacag

SEQ ID NO: 12322 - DNA, 60 bp, Homo sapiens
gaggggaagctttgatgcgccccatttggccctgagagatgccacgtgatcgtcatttta

SEQ ID NO: 12323 - DNA, 60 bp, Homo sapiens
gttaaccaagtccgatttaatccccacacctacatgatctgctcttctggtgtagaaaag

SEQ ID NO: 12324 - DNA, 60 bp, Homo sapiens
tttaactgcgggaaatgctctgtctccttggtgggtaaaggcttcctgacccagaacaag

SEQ ID NO: 12325 - DNA, 60 bp, Homo sapiens
gaacttggttcttggaaaaactctaggagaaggcgaattggaaagtggtcaaggcaacgg

SEQ ID NO: 12326 - DNA, 60 bp, Homo sapiens
cagactgctccaaactcacctcactggcttctgtgtcccaagactaggttgtgtacagtt

SEQ ID NO: 12327 - DNA, 60 bp, Homo sapiens
aggaacctgagtccttctcagcctggtcagatcgcctggcccgggaacatgcccagaagt

SEQ ID NO: 12328 - DNA, 60 bp, Homo sapiens
cacccatgacccgataaactcttcaggggacagaagctttttgtctggagctgcccacaa

SEQ ID NO: 12329 - DNA, 60 bp, Homo sapiens
ccgtgccccttgcctcctgtgtttcatcttcgtcggttagggaagaaggtccagaggttt

SEQ ID NO: 12330 - DNA, 60 bp, Homo sapiens
gtatagctttctccagcatggcagcaggaagtaactacagggcctcttttatgcctgaca

SEQ ID NO: 12331 - DNA, 60 bp, Homo sapiens
cctcggacagcaggaattagcttccccaggcattttctgtatgtgagttgtattgtggga

SEQ ID NO: 12332 - DNA, 60 bp, Homo sapiens
ctcccaactggttcgacctttgcagatacccataacctatgttgagccttgcttaccagc

SEQ ID NO: 12333 - DNA, 60 bp, Homo sapiens
ttgtcagttgtgaagaggggccagatgacaccctaaagcaggctgatcgggcaatgggag

SEQ ID NO: 12334 - DNA, 60 bp, Homo sapiens
caacacatctcattaatccttctgcagagggcgtcccttacgtggggtgtgtcttacccc

SEQ ID NO: 12335 - DNA, 60 bp, Homo sapiens
tagatagcagcactgccagtagcatggagctggaagaacttcggcatgagaaagagatgc

SEQ ID NO: 12336 - DNA, 60 bp, Homo sapiens
gcagatcagtaagcaaggtctttgtggggcagttgtcgacctcaccaagacatctgaaca

SEQ ID NO: 12337 - DNA, 60 bp, Homo sapiens
tcctttgacgcccttgatgcgtggctggcagaaatgaagcaagagcttggacctcatgga

SEQ ID NO: 12338 - DNA, 60 bp, Homo sapiens
tcctgctattctcactcctgggattcctgttgccttcctacctcttctattaccgtgccc

SEQ ID NO: 12339 - DNA, 60 bp, Homo sapiens
ttctgggctccaggattgtctccccactccagcatccccaaactggtactccctgaccca

SEQ ID NO: 12340 - DNA, 60 bp, Homo sapiens
cctccgaacttgcttcatctttaagtgttcctcccaaccgcaggcatgtacttgggttca

SEQ ID NO: 12341 - DNA, 60 bp, Homo sapiens
gaaacacataaggtactggttcatgattcaggcgactgtagaaatctttggattggcgtt

SEQ ID NO: 12342 - DNA, 60 bp, Homo sapiens
ggctaatgcagcggtgtggaccgaggaacaacttggaagatctacctgcaacacaacatt

SEQ ID NO: 12343 - DNA, 60 bp, Homo sapiens; identical to SEQ ID NO: 4855

SEQ ID NO: 12344 - DNA, 60 bp, Homo sapiens
ggggtcatttgaccttatagaaccatgccaggtttgggtagagtgtttttaagggccctt

SEQ ID NO: 12345 - DNA, 60 bp, Homo sapiens
gtacttcccatgtgccagaggaacttaagcagccgttacacagaaagtccaaatcgcagg

SEQ ID NO: 12346 - DNA, 60 bp, Homo sapiens
tggagggggtgactgtccagagcctggaactgtgcccacaccagaagccatcagcagcaa

SEQ ID NO: 12347 - DNA, 60 bp, Homo sapiens
gctcatcttcgtggccgagcaggaggagctctacgtccgcgtgcagaacgggttccggaa

SEQ ID NO: 12348 - DNA, 60 bp, Homo sapiens
tgctggaagagatcgggaataatagcgcagaccaatgagcctagggagatgctttcatcg

SEQ ID NO: 12349 - DNA, 60 bp, Homo sapiens
agggttacccctggtggccttgtctggtttacaaccacccctttgatggaacattcatcc

SEQ ID NO: 12350 - DNA, 60 bp, Homo sapiens
gcctccccttcagcagctttgaccactctaaagcccactactatcgctatgatgagcagt

SEQ ID NO: 12351 - DNA, 60 bp, Homo sapiens
tgggtcacaatcccattggatggaaaggacttggctatgaacttgactggaaacacgcag

SEQ ID NO: 12352 - DNA, 60 bp, Homo sapiens
gcaaattaggaaccttgcaacggtatccagggactatgatgagaggccagcacattatct

SEQ ID NO: 12353 - DNA, 60 bp, Homo sapiens
ctgggctgctgaaccaaacctccaaaaccctgaccaaaaatacccggatacctgaacaga

SEQ ID NO: 12354 - DNA, 60 bp, Homo sapiens
catgaccaaccctattgctactgggaaagatcccacttttgacaccatcacctacgagtg

SEQ ID NO: 12355 - DNA, 60 bp, Homo sapiens
agtgaaggaagacgaagtgcgtgacccgaccggctgtggtgttccagtccccactgacca

SEQ ID NO: 12356 - DNA, 60 bp, Homo sapiens
ctcctccgagcactcgctcacggcgtcccttgcctggaaagataccgcggtccctccaga

SEQ ID NO: 12357 - DNA, 60 bp, Homo sapiens
accggcttcttcgcgcacgctggtttctgcttggagcacgcatcgtgtccacctggtgcc

SEQ ID NO: 12358 - DNA, 60 bp, Homo sapiens
tgcacagctccttcaagccagtgaacaacgcggacttcatcatccctgtggagattgatg

SEQ ID NO: 12359 - DNA, 60 bp, Homo sapiens
gcttcctgtgattggggccatcgtggttggtctctgccttatgggtatgggtgtctataa

SEQ ID NO: 12360 - DNA, 60 bp, Homo sapiens
cacaagctggaggcacagttggtggatctgaaatctgaactgacagaaacccaagcagag

SEQ ID NO: 12361 - DNA, 60 bp, Homo sapiens
ggagccagctgacctgcttgaccgaaggatttctgacagactatctttggggatgttttc

SEQ ID NO: 12362 - DNA, 60 bp, Homo sapiens
ggacccctgagcaggagagctgcaccatcccagtgcaggtgagaccctccacccactgcc

SEQ ID NO: 12363 - DNA, 60 bp, Homo sapiens
tgagtgaagagggaagccaggaagggggctggtgtgttcctctgctttctgccaggacag

SEQ ID NO: 12364 - DNA, 60 bp, Homo sapiens
ttccagtgcgctgtcaaaaaggtacgccagggctcaggggctgagtgaagagggaagcca

SEQ ID NO: 12365 - DNA, 60 bp, Homo sapiens
tgctggaaggtaaggagccaggtcccactctttctccaaattcagggccaagagttcccc

SEQ ID NO: 12366 - DNA, 60 bp, Homo sapiens
ttgctcacaggtaaggccccccaccaactgccgtgccccccaatgcattcattcgccaaa

SEQ ID NO: 12367 - DNA, 60 bp, Homo sapiens
ccgctctgcctcaaggtcggtgacggcacccagcatggccaacagggggagctgcagggc

SEQ ID NO: 12368 - DNA, 60 bp, Homo sapiens
tcaggaaatgagggaaggcaggcctcacctgttgtcttttgccccccagattgccagcga

SEQ ID NO: 12369 - DNA, 60 bp, Homo sapiens
cgctgttgtgcacagcacgttcccatcaccattgtacttattgtttttagtgggaggtct

SEQ ID NO: 12370 - DNA, 60 bp, Homo sapiens
ttggggagccagcaaccgctctcctgactatcaccttgtccgccttctaggtgtgaaagt

SEQ ID NO: 12371 - DNA, 60 bp, Homo sapiens
acccttggggggaggttctagccaaagctggcacagaagaagcaatcgtgtattcagaca

SEQ ID NO: 12372 - DNA, 60 bp, Homo sapiens
gcaaatcaccctgtggaaaaccgatggacaggaaggagtgttacacactgcttaccctga

SEQ ID NO: 12373 - DNA, 60 bp, Homo sapiens
agacaccacaagccagatgagggactttaccaatgtgaggcatctttaggagattctggc

SEQ ID NO: 12374 - DNA, 60 bp, Homo sapiens
ctcaagccatgaagtgtcagctggagaacagtggtgggcatggagaggatatgacatgaa

SEQ ID NO: 12375 - DNA, 60 bp, Homo sapiens
gcagaacacatgttttcagagaagctctgctaaggaccttctagactgctcacagggcct

SEQ ID NO: 12376 - DNA, 60 bp, Homo sapiens
cttctggctccagaccgccctccggatcggaccctgcgaatggttttggctatatcttca

SEQ ID NO: 12377 - DNA, 60 bp, Homo sapiens
tctgtgtgtcacagcctcagaagaccagcgagatggctgccaacaagagtaagggccaga

SEQ ID NO: 12378 - DNA, 60 bp, Homo sapiens
gggagacacactcaagatcctgaacatggaggatgaccagaactggtacaaggccgagct

SEQ ID NO: 12379 - DNA, 60 bp, Homo sapiens
gcagaaattgtgaggcagatgaactatgctgctcagcctgacaaagatgacccatgctgt

SEQ ID NO: 12380 - DNA, 60 bp, Homo sapiens
atgaaggaggtcctagaaggcttccgcaagaatgaagaggtgttgaagagatgtgcgcag

SEQ ID NO: 12381 - DNA, 60 bp, Homo sapiens
tatggccaagatcaatcctccatgagtggtagtggtggtggcggcggaggtggcggcggc

SEQ ID NO: 12382 - DNA, 60 bp, Homo sapiens
ccagctgcagtcagagactagaccatatgaagagcttggacagtctgccaacatctcagt

SEQ ID NO: 12383 - DNA, 60 bp, Homo sapiens
aagatcctcaagaagggcacctacgacaaggcctacacggatgagctggtggagctacac

SEQ ID NO: 12384 - DNA, 60 bp, Homo sapiens
gctagcctccagagccgatttatttgagagagaaactctatttggatctccaggacggtt

SEQ ID NO: 12385 - DNA, 60 bp, Homo sapiens
gtggccctggctgcagttctgggcagcatcctcccaagcagagaccttgctgaagctcct

SEQ ID NO: 12386 - DNA, 60 bp, Homo sapiens
gggattttagcagagactttagtctttggggcaagaggagaacaggaatgctgggctgtt

SEQ ID NO: 12387 - DNA, 60 bp, Homo sapiens
ccattgtggtcccttcagagctcctttccaacagcatctctctgtcgaagaaagaagctc

SEQ ID NO: 12388 - DNA, 60 bp, Homo sapiens
aagtacaaggtggaggttctgtacgaggacgagccactgaaggaatactacaccctcatg

SEQ ID NO: 12389 - DNA, 60 bp, Homo sapiens
ggaaatcagtgatgtggtgcagaggtagccactgttagcctggtgggaaaatgcacacat

SEQ ID NO: 12390 - DNA, 60 bp, Homo sapiens
atcaagagcaaaccgaaggtcgactctgaccattgctttccactcccagctatggaggaa

SEQ ID NO: 12391 - DNA, 60 bp, Homo sapiens
atgaacatcacctgcacaggacggggaccagacaactgtatccagtgtgcccactacatt

SEQ ID NO: 12392 - DNA, 60 bp, Homo sapiens
aaagcggatgttggatgctcaagtgcaaacagacccagtatccatcggaccagttggcaa

SEQ ID NO: 12393 - DNA, 60 bp, Homo sapiens
ctggctatgggcaaacgactgattcctcttatggacagaactacagcggttactccagtt

SEQ ID NO: 12394 - DNA, 60 bp, Homo sapiens
caagagaatgctatcatcctgcttgcctgtccatttgtggaacagcatctggtgatatgc

SEQ ID NO: 12395 - DNA, 60 bp, Homo sapiens
tccctgtaaaacaaaaaccaaaagaaaaggatgagcaattcttaggttttggctcagatg

SEQ ID NO: 12396 - DNA, 60 bp, Homo sapiens
aagcttattacccacaactgtgcccgctttgtgcttctaaggtgcacacctagcctaggt

SEQ ID NO: 12397 - DNA, 60 bp, Homo sapiens
aggccgctgcgtagacccaacagcgtccagttcctactaactctgagctgaagccgacgt

SEQ ID NO: 12398 - DNA, 60 bp, Homo sapiens
aaaattgtgcccttgtaccgatgcagctctctttctcccccacctcttgcgagataagag

SEQ ID NO: 12399 - DNA, 60 bp, Homo sapiens
acatccctgaggaactgggcagagcttgaggctggagcccttgaaaggtgaaaagtagtg

SEQ ID NO: 12400 - DNA, 60 bp, Homo sapiens
gaggtcacatccctgctaaagctgaataagaagctggcacggagcgttgggcacatcttt

SEQ ID NO: 12401 - DNA, 60 bp, Homo sapiens
aagcgaaaccctgagtaatcggaagtggttaggagtgagagagctgctggatatgcggag

SEQ ID NO: 12402 - DNA, 60 bp, Homo sapiens
agggtcaacagcggcctcagttctgacccccactttgaggagccggggccaatggtgaga

SEQ ID NO: 12403 - DNA, 60 bp, Homo sapiens
gaagtttctctttggaatctggccagtgatcctgtttgagcctctcaggaagcattgatg

SEQ ID NO: 12404 - DNA, 60 bp, Homo sapiens
tatgacctcttcttcatagatggcagcacacccagtgacaacatcgtgcgaaggttcctg

SEQ ID NO: 12405 - DNA, 60 bp, Homo sapiens
gcagggccttctgccgggaaagctagaaacactaggttcttcctgtacatacgtgtatat

SEQ ID NO: 12406 - DNA, 60 bp, Homo sapiens
agtttggccagccactaagtcccaccagctgaggtccgaggaaagcggggtgactcattt

SEQ ID NO: 12407 - DNA, 60 bp, Homo sapiens
gcagtgaaaacacgggtggacttgaaagagttgggtcaaagtcagaaggagcaaggtttg

SEQ ID NO: 12408 - DNA, 60 bp, Homo sapiens
gctgctcgctcagaaatacaagttctggaacatctgaatacaacagaccccaacagtact

SEQ ID NO: 12409 - DNA, 60 bp, Homo sapiens
tccgacctcaagggcatgctctccacccacctgacgtccatgttcgagtacttggcacca

SEQ ID NO: 12410 - DNA, 60 bp, Homo sapiens
ccaggtggagttcaagaccatgaatgcaaagcttctgatggatcctaagaggcagatctt

SEQ ID NO: 12411 - DNA, 60 bp, Homo sapiens
tgcctgccttcttgccatgtctaacgaagtagaaacaagtgcaaccaatggtcagcccga

SEQ ID NO: 12412 - DNA, 60 bp, Homo sapiens
cgcaacaagtgcgtttgaaggttcagcacagctggaattgtacggtagtgagctcttcaa

SEQ ID NO: 12413 - DNA, 60 bp, Homo sapiens
ggggagatgactacatgatttgcttacacttacatatttaccagcccagtggaccctaga

SEQ ID NO: 12414 - DNA, 60 bp, Homo sapiens
tatcgtcccagacccaagtgagtcacgcttcctgattcctcggcgcaaaggagacgttta

SEQ ID NO: 12415 - DNA, 60 bp, Homo sapiens
ccgcagctcaggaagaatgtgtctgtgaaaactacaagctggccgtaaactgctttgtga

SEQ ID NO: 12416 - DNA, 60 bp, Homo sapiens
ggtcatctctcacacattccaggaccagaagcatttcaccttttcctgcggcatcagatg

SEQ ID NO: 12417 - DNA, 60 bp, Homo sapiens
acagccctgctcaacaaggagaacaaattccgggaccgctcgtttagcgagaacggcgat

SEQ ID NO: 12418 - DNA, 60 bp, Homo sapiens
tctggttagctcggcggctgcagatctcgcggcgacgcctgcgagggacccgggccgcgg

SEQ ID NO: 12419 - DNA, 60 bp, Homo sapiens
agggacctgggaaaggtgggagagatgctgagcccagcgaatcctctccattgaaggatt

SEQ ID NO: 12420 - DNA, 60 bp, Homo sapiens
ctgtttctgagtgcgaacacaaaccaggtgtttctgtctctttctgagtcacgtctgccc

SEQ ID NO: 12421 - DNA, 60 bp, Homo sapiens
ctagtctgactcgaaaagggcgtgactcaagctgacgggactccagtagggactttgaga

SEQ ID NO: 12422 - DNA, 60 bp, Homo sapiens
cagccccatctgtgcattctcctggatgcttagagggatttctttgctgtaagatgtctg

SEQ ID NO: 12423 - DNA, 60 bp, Homo sapiens
gtaagttgaatggcctgccttgaagccactgaagctgggattcctccccattagagtcag

SEQ ID NO: 12424 - DNA, 60 bp, Homo sapiens
gattcactaccagattctactgtatgctcttgacaactatgaccacaatggtccacccac

SEQ ID NO: 12425 - DNA, 60 bp, Homo sapiens
ggctcgcattcgtcagtgactccaaccctcctgcttgctgtacttgggatgaaacgaccc

SEQ ID NO: 12426 - DNA, 60 bp, Homo sapiens
gttcttatctctagctcagacatctactacagcactgtgatgctttatgcaactaactgt

SEQ ID NO: 12427 - DNA, 60 bp, Homo sapiens
cccagtaactgtccgcagctgtctgctagtggttgtcttaacatcgtagtcctagtttgc

SEQ ID NO: 12428 - DNA, 60 bp, Homo sapiens
ccgtcttgttcttgcctggtgtcggtggttagtttctgcgacttgtgttgggactgctga

SEQ ID NO: 12429 - DNA, 60 bp, Homo sapiens
atacccactctctcaccgaagcctaattgaggctcttggaaggagtcaggcaaggattgt

SEQ ID NO: 12430 - DNA, 60 bp, Homo sapiens
ccatacagcagaaaattggaggccgaagctgacaaaattggactactgcttgctgcaaag

SEQ ID NO: 12431 - DNA, 60 bp, Homo sapiens
tcccacacagtgacagaccggaaagtgaagagtcagaactaactttggtctcagcgggag

SEQ ID NO: 12432 - DNA, 60 bp, Homo sapiens
gcggttggcataaccaaattactaacagaatgtcccccaatgatggacactgagtatacc

SEQ ID NO: 12433 - DNA, 60 bp, Homo sapiens
gttttacttgaggatcatatgaattagccaaaagaatggctgactgttgcctttgctctt

SEQ ID NO: 12434 - DNA, 60 bp, Homo sapiens
ggagctggtaagtcgcctacaggagcgaaatgttcaggttttcctaatatctggtggctt

SEQ ID NO: 12435 - DNA, 60 bp, Homo sapiens
aggtggcagacagaagcaccccctgccccggcaagaaactcccaggctcaatcaaggtgt

SEQ ID NO: 12436 - DNA, 60 bp, Homo sapiens
tgtgccacaagaccttcaagacgggcagcatcctcaaggcccacatggtcactcacagca

SEQ ID NO: 12437 - DNA, 60 bp, Homo sapiens
gctgtcagacctggacagtgagactcgcagcatggtggaaaagatgatgtatgaccagcg

SEQ ID NO: 12438 - DNA, 60 bp, Homo sapiens
gtcattgtcaagactgaacaaactgagccttccatcatgaacacctggaaagacgagaac

SEQ ID NO: 12439 - DNA, 60 bp, Homo sapiens; identical to SEQ ID NO: 4855

SEQ ID NO: 12440 - DNA, 60 bp, Homo sapiens
cggacgtggtcgtggcagaagtgacacagccatccttgggtgtaggctatgagctgggcc

SEQ ID NO: 12441 - DNA, 60 bp, Homo sapiens
atctcaattccttctttgccgtcatgtttggcctcagcaactcggccatcagccgcctag

SEQ ID NO: 12442 - DNA, 60 bp, Homo sapiens
gctcaaacagatttcatagccaaagcaaaaggactggtacggtagtctgtggaaaccagg

SEQ ID NO: 12443 - DNA, 60 bp, Homo sapiens
acaacgtctcttcaagcatcctcagaagcctcgactgagctttagacagcagagcagatg

SEQ ID NO: 12444 - DNA, 60 bp, Homo sapiens
gtggatcaaggagacctgttatcctgacatccctgacccttacaagagcagcatcctgtc

SEQ ID NO: 12445 - DNA, 60 bp, Homo sapiens
taatagcctctgcattgagaacagctgcatcgcggcccacgacaagagggggaggtacgg

SEQ ID NO: 12446 - DNA, 60 bp, Homo sapiens
ggacccaaggctggaaaacattttcagacactgtgctttatcctgaaaggatttggtgaa

SEQ ID NO: 12447 - DNA, 60 bp, Homo sapiens
atgggatggattcacaggacagaggtcaaaggtctatcaggagcatgagaagaggtgttg

SEQ ID NO: 12448 - DNA, 60 bp, Homo sapiens
cctgaacctactatgtacggtgctttattgccagtgtgcggtctttgttctcctccgtga

SEQ ID NO: 12449 - DNA, 60 bp, Homo sapiens
accgctgagagcagctgcagtagctgagtagtggcagcagagaggcagacgtgagctgag

SEQ ID NO: 12450 - DNA, 60 bp, Homo sapiens
cctgaaacagaagcagtaagttctagccaggaaatacccacgatgcctcagcccatcgaa

SEQ ID NO: 12451 - DNA, 60 bp, Homo sapiens
ttgcagcagctgaagcagtttgaacgactggaacaggaggtgtcacggcccatagaccac

SEQ ID NO: 12452 - DNA, 60 bp, Homo sapiens
gcagcagttacgaacttcaacagcaaagcatgaaacgctccaacaggaggaagtatggcc

SEQ ID NO: 12453 - DNA, 60 bp, Homo sapiens
cagactttagcaagatcacaggcaaacccatcaagctgactcaggtggaacaccgggctg

SEQ ID NO: 12454 - DNA, 60 bp, Homo sapiens
gtgtacaatggcattttggagaaatcctgtagcatgaaccagctttccagtggcatcccg

SEQ ID NO: 12455 - DNA, 60 bp, Homo sapiens
cagccaccttcctcaggctcactccacctacatccccagtctgccacaccccatcccttt

SEQ ID NO: 12456 - DNA, 60 bp, Homo sapiens
cctccctaatgagtttgcatcgctgatcttcagtaccttcacctgtctcagtctctagag

SEQ ID NO: 12457 - DNA, 60 bp, Homo sapiens
aagacttggcagcttcctgataaagcgtgctgtgctgtgcagtaggaacacatcctattt

SEQ ID NO: 12458 - DNA, 60 bp, Homo sapiens
ttgacacctctatgtatgacaatgaactttgggcaccagcctctgagggcctcaaaccag

SEQ ID NO: 12459 - DNA, 60 bp, Homo sapiens
cttctcggtggctcaggtgtttctgaacaactacgacgcggagaacaaactgaacgacat

SEQ ID NO: 12460 - DNA, 60 bp, Homo sapiens
ttctggactatgcctgtcccgtccactcctgcccgatcctctacaaagcccactactttt

SEQ ID NO: 12461 - DNA, 60 bp, Homo sapiens
gaccactcgtgctcgccatgtgctccaatcataggagaatatgctggagaggttttgaga

SEQ ID NO: 12462 - DNA, 60 bp, Homo sapiens
tggagcttattactggggtgagggacagcttactccatttgaccagattgtttggctaac

SEQ ID NO: 12463 - DNA, 60 bp, Homo sapiens
ctaactacaaccagtttgggtgacagggctggtaaagtcccagtgttagatgagtgacct

SEQ ID NO: 12464 - DNA, 60 bp, Homo sapiens
ggggagtcttaggaactgggagttggtcttcactcagatgcctcatcttgcctttcccag

SEQ ID NO: 12465 - DNA, 60 bp, Homo sapiens
atttcagttcctttctaagctttgtcagtcaaggggctccactgacttcctaggccctgt

SEQ ID NO: 12466 - DNA, 60 bp, Homo sapiens
acagatcgagatcctctgtggcttccagattgtcaacaaccctggcatccactcactggt

SEQ ID NO: 12467 - DNA, 60 bp, Homo sapiens
ggacacagccgagtatgtcgcctatgttgccaaagaccctgtgaatcagagagcctgcca

SEQ ID NO: 12468 - DNA, 60 bp, Homo sapiens
cagagcagatgaggaaaactgtagtctctgagtcctttgctaatcgcaactcttgtgaat

SEQ ID NO: 12469 - DNA, 60 bp, Homo sapiens
tagtcccgcacttacagacggctcgctgggcgacatgatcttcttccattcctacaagaa

SEQ ID NO: 12470 - DNA, 60 bp, Homo sapiens
ttcgaaaacggctacgaccccgtaaacttgctcaacgacatcgtgattctccagctcaac

SEQ ID NO: 12471 - DNA, 60 bp, Homo sapiens
ggagctcatctgcaaaaggcctcttgtaaagactggttttctgccaatgaccaaacagcc

SEQ ID NO: 12472 - DNA, 60 bp, Homo sapiens
tggaaatgtccttggctttacgattctgcttgtagatacttcccctgtttctaacacatt

SEQ ID NO: 12473 - DNA, 60 bp, Homo sapiens
aaacatgggcacttctggtccccaactttcctctcacacccctccaacctcattttgaga

SEQ ID NO: 12474 - DNA, 60 bp, Homo sapiens
acatctacgcagcgaaatcgagcctggccttgagggtccacaccgcgagggaagatgcgt

SEQ ID NO: 12475 - DNA, 60 bp, Homo sapiens
cttctgaaggacacaaatctgcttttctgcccatacactggcccaagggctcacctaact

SEQ ID NO: 12476 - DNA, 60 bp, Homo sapiens
ctggaggaaaacatcccagtccttaaggccaaactgacagaaatgcgtggcatctatgcc

SEQ ID NO: 12477 - DNA, 60 bp, Homo sapiens
acctggccaaactttgttcttttgtttgtgattatccagatgtcccagcgttatttgttg

SEQ ID NO: 12478 - DNA, 60 bp, Homo sapiens
aagaatctactactttccagagctggccaagctcaagtgacacaacaccttcacctcccg

SEQ ID NO: 12479 - DNA, 60 bp, Homo sapiens
agccagacctaaacccacacgcccacaaagtggattgcacacagacaagaactcccgtgc

SEQ ID NO: 12480 - DNA, 60 bp, Homo sapiens
accacaggggaagctatctttgccctcccaactcgtctgcagtgcttagcctaacttttg

SEQ ID NO: 12481 - DNA, 60 bp, Homo sapiens
gtacaacacctccaactcagaagccccctagtccccctatgtcagggaaagggacacttg

SEQ ID NO: 12482 - DNA, 60 bp, Homo sapiens
ggaccctaggttttggctcattggctggatcagtgcatgtaagaattcgacgagatgcca

SEQ ID NO: 12483 - DNA, 60 bp, Homo sapiens
gccagaaaagaggcagtaggttcccaaactacattaagaaagttcccaaactatattaag

SEQ ID NO: 12484 - DNA, 60 bp, Homo sapiens
ccctcaggtaggagtgaaatctctctctcaaactctaggaaagcccgagtcatactctag

SEQ ID NO: 12485 - DNA, 60 bp, Homo sapiens
cagcctgaatcacacagaagaaagccttcaagcatggacctgaagcaatgctgtaaacac

SEQ ID NO: 12486 - DNA, 60 bp, Homo sapiens
tgaaggagagccgagctatctgaataggggctagcacctgttctaaaggaagtggctgct

SEQ ID NO: 12487 - DNA, 60 bp, Homo sapiens
acatctgggaatgaatttgcagcacctggtagaagaaggcaccttggaaggcactgcctt

SEQ ID NO: 12488 - DNA, 60 bp, Homo sapiens
ttggcaagtttggcctggccttagctgttgcaggaggcgtggtgaactctgccttatata

SEQ ID NO: 12489 - DNA, 60 bp, Homo sapiens
gccagggacaaaagagaactaatccagataggaccatgccaaggaagatagaggagaggc

SEQ ID NO: 12490 - DNA, 60 bp, Homo sapiens
gtgttcaaagatgaagacccctcattaaaagccaaggacgttcttaagattggaactgac

SEQ ID NO: 12491 - DNA, 60 bp, Homo sapiens
gcacaagtcctgagtatgggatgccctcagtgacctttggcagtgtccacccctctgatg

SEQ ID NO: 12492 - DNA, 60 bp, Homo sapiens
attgattagagcctaacccaggttaactgcaagaagaggcgggatactttcagctttcca

SEQ ID NO: 12493 - DNA, 60 bp, Homo sapiens
tacttattgctgcctctgcaccaatatgctttccgaagtgctgttgtttctctctcaata

SEQ ID NO: 12494 - DNA, 60 bp, Homo sapiens
ggccacaccatgaccaacaagttcactgttggcaaggaaagcaacatacagacaatgggg

SEQ ID NO: 12495 - DNA, 60 bp, Homo sapiens
ctggaccgctatggattccagatccaccttacgtagccgtgtgagctccggtaaattaca

SEQ ID NO: 12496 - DNA, 60 bp, Homo sapiens
aacaattacacaagattgttcatcacacttgggcatggggcagacacactttttgtgtgc

SEQ ID NO: 12497 - DNA, 60 bp, Homo sapiens
cctgaaagcctgtgaaaacagctgcatcttgtatagtgacctgggcttgccaaaggagct

SEQ ID NO: 12498 - DNA, 60 bp, Homo sapiens
ctgtccagttccttggacttgtgtgtctcctatctaccattaaacccttatgacttaagg

SEQ ID NO: 12499 - DNA, 60 bp, Homo sapiens
agaccctctgtgctccccaccatcctggaccaaccaaaagctgaacggatgccacactgt

SEQ ID NO: 12500 - DNA, 60 bp, Homo sapiens
gtgggcttctcgatctcgatccttaccctggacatggatagttagtgctggattgtagca

SEQ ID NO: 12501 - DNA, 60 bp, Homo sapiens
atggtggagaataaggagagttgtcagaaaggtttccctgcagataaacttttaaagatc

SEQ ID NO: 12502 - DNA, 60 bp, Homo sapiens
gccttcggcttcaacgtgctcttctacgacccttacttgtcggatggcgtggagcgggcg

SEQ ID NO: 12503 - DNA, 60 bp, Homo sapiens
tgggcctgatcccagagtggtgcttactgtgctgactgtgtacttatcttccccaagaga

SEQ ID NO: 12504 - DNA, 60 bp, Homo sapiens
cgcgcccggtcttggaggacggttctgagtctctggaatacctgtcatcaagtaacctga

SEQ ID NO: 12505 - DNA, 60 bp, Homo sapiens
gtggtactgttccagatgccggggaaagaacgatgggcaaagcccttgagaagtccagaa

SEQ ID NO: 12506 - DNA, 60 bp, Homo sapiens
agttggtgcttttctgtctatccctagctgttggtcaccaccagctttctgcatattttc

SEQ ID NO: 12507 - DNA, 60 bp, Homo sapiens
gtggctaagattgtgggctctaggatcagactgccttagttcaacttttggcctcatcac

SEQ ID NO: 12508 - DNA, 60 bp, Homo sapiens
gccctactcaagaacagagcccaagaaatcagagacattgcacgcagcactcttgcgaaa

SEQ ID NO: 12509 - DNA, 60 bp, Homo sapiens
ctctactacttcttcgacatcttctggtggatacagacgaactccctctgtgactgctca

SEQ ID NO: 12510 - DNA, 60 bp, Homo sapiens
aactgagagcactttgaaaacaacacagttttcttgtaccctgggagagaagtttgaaga

SEQ ID NO: 12511 - DNA, 60 bp, Homo sapiens
tttccaccccaatagaaacaacatatagaacggaacattcaggtccaccagagtgggcaa

SEQ ID NO: 12512 - DNA, 60 bp, Homo sapiens
ggtgttgcatgtggactcttaactgtacgtgtagtttctagtggagaaatcaaggctctg

SEQ ID NO: 12513 - DNA, 60 bp, Homo sapiens
gaacagggaaggccagtgtctacactagcataccataataggagttgcctaaaagcaggc

SEQ ID NO: 12514 - DNA, 60 bp, Homo sapiens
tggacacaagacttccacagctacaggttacccaactcccagcaagctagttgtcatcag

SEQ ID NO: 12515 - DNA, 60 bp, Homo sapiens
gcaagatgaggaacttacagaggaaccttgaaagaggcaccatgatatgacagggttcac

SEQ ID NO: 12516 - DNA, 60 bp, Homo sapiens
gcgataagtaccgttgagtttgtgacagctgctgttggtgtcttctcattcctgggcttg

SEQ ID NO: 12517 - DNA, 60 bp, Homo sapiens
ggagttacactcacagtgtttccaagatcctgctgaaagtgaacgagcctcagataaagc

SEQ ID NO: 12518 - DNA, 60 bp, Homo sapiens
agaagctgaatgagcaataatgtggtgctttccaggaagctcaagagagagatgtgagct

SEQ ID NO: 12519 - DNA, 60 bp, Homo sapiens
gtatccagacattcagctcatagctttctgagcttctgtagccaaatatccttcaggaag

SEQ ID NO: 12520 - DNA, 60 bp, Homo sapiens
ttttgggtgactctagggcttctgtcaacagggtcagaactgcctcagtgactctgagca

SEQ ID NO: 12521 - DNA, 60 bp, Homo sapiens
ttttgactcaaaggtgctatttaccaaacactctccctacccattcctgccagctctgcc

SEQ ID NO: 12522 - DNA, 60 bp, Homo sapiens
ccaagccattcacaacaccgtgtttcaagttgttcttggttatgtggaactatgtgcagg

SEQ ID NO: 12523 - DNA, 60 bp, Homo sapiens
cattaggtccagtaattgttgacaggcaggaacgggggaccattgcattgtgcccaagta

SEQ ID NO: 12524 - DNA, 60 bp, Homo sapiens
ttaaataaagtgagaaggcatcagtgcagtggagacttagaggtgagagggagccatggc

SEQ ID NO: 12525 - DNA, 60 bp, Homo sapiens
tcccaccatcctttttgactgttgaccttggttttctcttctaagtttctgtccctctgc

SEQ ID NO: 12526 - DNA, 60 bp, Homo sapiens
aacctcagtcctctccagtacagtaatgcctttgatgtgtttgcagcctatggaggcctc

SEQ ID NO: 12527 - DNA, 60 bp, Homo sapiens
actataaagctttggaagatgcagatgagaaggttcagttggcaaaccagatatatgact

SEQ ID NO: 12528 - DNA, 60 bp, Homo sapiens
tgagtgctcccaagcacctggctactagcccagaggaaagtgggtcacttcacagatctt

SEQ ID NO: 12529 - DNA, 60 bp, Homo sapiens
cctggctggaatgtcataccattgacccatttgaagagttaaagctggatttgactgctc

SEQ ID NO: 12530 - DNA, 60 bp, Homo sapiens
tgacctagaagcagcatcttcccatttcctcagtacccacaaagtgcagcccacattgga

SEQ ID NO: 12531 - DNA, 60 bp, Homo sapiens
cttgaggaagccgactcggagctcccagtttacttcactgcaagccgaagagtcctccca

SEQ ID NO: 12532 - DNA, 60 bp, Homo sapiens
cgtgatcctgcccggcctgaggaatgcaacctgatagaaggtgaagaccaagtagaggtc

SEQ ID NO: 12533 - DNA, 60 bp, Homo sapiens
tatggaggatgtatatgggccagacacatacccaagcgactggtcagaggtgacatgctg

SEQ ID NO: 12534 - DNA, 60 bp, Homo sapiens
cagggaaacccataggcagattctgaacctggtggttgattctacatgtgggaattgtgg

SEQ ID NO: 12535 - DNA, 60 bp, Homo sapiens; identical to SEQ ID NO: 4855

SEQ ID NO: 12536 - DNA, 60 bp, Homo sapiens
cgggacaaattagctgcacatctatcatcaagagattcacaatcaagatctgtatcaaga

SEQ ID NO: 12537 - DNA, 60 bp, Homo sapiens
cgggcaggtccctccctgtttgtacctccattacttcttcagtaagatggggacactgaa

SEQ ID NO: 12538 - DNA, 60 bp, Homo sapiens
ctcaacatgacttcactggttgtccattgcagttaaagcatgactgtcctccaaagctag

SEQ ID NO: 12539 - DNA, 60 bp, Homo sapiens
gtccatcgattgtatatccgtccttttgatggccttttgagttgtttcccatttgcggtt

SEQ ID NO: 12540 - DNA, 60 bp, Homo sapiens
gtaggtatcaggtctttctgtgcagctcagggagaccctaagttaaggggcagattacca

SEQ ID NO: 12541 - DNA, 60 bp, Homo sapiens
cacacgtcgccttgtatgccctggaggtcatggaatctgtggtaaagaactgtggccaga

SEQ ID NO: 12542 - DNA, 60 bp, Homo sapiens
gcaaacctaagtgtgacatctactgtcatgttgtgttggcaacgcatcccaagattgaag

SEQ ID NO: 12543 - DNA, 60 bp, Homo sapiens
catggaagaagatgagttcattggagaaaaaacattccaacgttattgtgcagaattcat

SEQ ID NO: 12544 - DNA, 60 bp, Homo sapiens
ggagaaggccatcacccaggtcagcaagggcacctgcgagcaaggtccttccatagtgac

SEQ ID NO: 12545 - DNA, 60 bp, Homo sapiens
cagcagtttaaggaggaaggctacaaatggggaaagcacaagctctgtggtgtttatgcc

SEQ ID NO: 12546 - DNA, 60 bp, Homo sapiens
aaatggctggagttgagtgggaggtgtttctagcccaacagataggcatggaagctccag

SEQ ID NO: 12547 - DNA, 60 bp, Homo sapiens
tcaccagagagctcgaaatctcagaacccaactctctcatgtcatcaagccagagacatg

SEQ ID NO: 12548 - DNA, 60 bp, Homo sapiens
gggtacacttctcttaagtggtctagtcaaggaacctcaagtcatgcttttgctatcacc

SEQ ID NO: 12549 - DNA, 60 bp, Homo sapiens
cagtgagttggtggaaagagctgttctggcctagtaactgaaggcaactaccaggcagtt

SEQ ID NO: 12550 - DNA, 60 bp, Homo sapiens
ccacaccggttccctgaacccctcttggattaaggaagactgaagactagccccttttct

SEQ ID NO: 12551 - DNA, 60 bp, Homo sapiens
ttctgctggagcttccagggaggatgtgtctccaagagaccagatgtaccgagtttgaaa

SEQ ID NO: 12552 - DNA, 60 bp, Homo sapiens
gatggtgacctctgcttatgagtcatgagtgatctgttcgttgtaggtccctgaggacct

SEQ ID NO: 12553 - DNA, 60 bp, Homo sapiens
tgtactgtactagttatgttccatctgggatcttgtaatctaagatgaatgacctggtgc

SEQ ID NO: 12554 - DNA, 60 bp, Homo sapiens
cagtatagagcagtcaagagattggtccatatggtccagtgagtgagagtcaggctttcc

SEQ ID NO: 12555 - DNA, 60 bp, Homo sapiens
cacagggtaatgggaggaagggttctgaaaggacaacaaatgcatcccagacagaatcca

SEQ ID NO: 12556 - DNA, 60 bp, Homo sapiens
gaaacttggtgattgtcagctgtgcccctgaccacactgccactaagtccttctcaatct

SEQ ID NO: 12557 - DNA, 60 bp, Homo sapiens
gttaagactgctgtttaccaagggtgtgtttaatttccacccatgaagccagcattaccc

SEQ ID NO: 12558 - DNA, 60 bp, Homo sapiens
gcttgctctcccacagaaacctttgtccttgcaactttatcctttgtcccgattgggtcc

SEQ ID NO: 12559 - DNA, 60 bp, Homo sapiens
gatacatgctcctccaactgacagaaggggacatattctctccctgtaagtctaggagga

SEQ ID NO: 12560 - DNA, 60 bp, Homo sapiens
ctgcgaaggagatggttggtcagaagatgaagtacagtattgtgagcaggaactgtgagc

SEQ ID NO: 12561 - DNA, 60 bp, Homo sapiens
gtatgctttgtaagctttctttagaccagtacatcttaaactgtctgtgatgaggaaccg

SEQ ID NO: 12562 - DNA, 60 bp, Homo sapiens
agtctgtgcgtgagactccttcgattgtagctctgtgctgtcggattggaacagtagttc

SEQ ID NO: 12563 - DNA, 60 bp, Homo sapiens
atgtcaaggctgcagtgagccataattgcaccactgcactccagggtgacagcgagaccc

SEQ ID NO: 12564 - DNA, 60 bp, Homo sapiens
ggtaggggctgagttacaaatgggctgagaaaaggaccctcatatagggtgctggaaaac

SEQ ID NO: 12565 - DNA, 60 bp, Homo sapiens
aagtatcagaaactatgctgattactctggaggaggatgccttctacctctcctcatcct

SEQ ID NO: 12566 - DNA, 60 bp, Homo sapiens
atctggctgacatgaagaactggaggtggcagcagtggtagcctgcatctgaggctcatg

SEQ ID NO: 12567 - DNA, 60 bp, Homo sapiens
ttctctgcgagtctctctttatgttcaggtcgcttggtcggttcgtctcccatttgccat

SEQ ID NO: 12568 - DNA, 60 bp, Homo sapiens
aggattccaggagggatcccaggaactgtgggcacccattttctgtgtctcccagcccat

SEQ ID NO: 12569 - DNA, 60 bp, Homo sapiens
tgcaggagagagctaagcttgtctgctggatccctgcagctggagcgcaaaaggagagat

SEQ ID NO: 12570 - DNA, 60 bp, Homo sapiens
acaggctctctctacccctcctaccaccatctggggagcagctagaagcagttcttgaaa

SEQ ID NO: 12571 - DNA, 60 bp, Homo sapiens
ctggctttgatggcatgcattgaaagcccttttccaccccagagttatcaactcgttgga

SEQ ID NO: 12572 - DNA, 60 bp, Homo sapiens
ggagctgctagactgcttggagaggactattcacgtactacagtataggggatggcatag

SEQ ID NO: 12573 - DNA, 60 bp, Homo sapiens
tgtacaaatccacgaattcttctggggtcaggtgccactgaccgggatccagttccagtt

SEQ ID NO: 12574 - DNA, 60 bp, Homo sapiens
aaaacgcagcaacggcggagcacaccaaatcacggcgaggccacaacgagcgactacgaa

SEQ ID NO: 12575 - DNA, 60 bp, Homo sapiens
gtgtgtgactattgaactctattcgtagactgcttgtactaatgtcatttgcatcataaa

SEQ ID NO: 12576 - DNA, 60 bp, Homo sapiens
ttatgagagagcataagccaagggacgttgacctggactgaagttcgcattgaactctac

SEQ ID NO: 12577 - DNA, 60 bp, Homo sapiens
tcgcgctgggggcgcaggaaacaatagaggccgcgcgcacagagcgagctcttgcagcct

SEQ ID NO: 12578 - DNA, 60 bp, Homo sapiens
gtgcgccatggaggattttcagacaggtctatctttgatctaaagcatgtgccacatacc

SEQ ID NO: 12579 - DNA, 60 bp, Homo sapiens
ttagcccaagatgaaacatctaggctggaccttggatttgaggagtgggatgtagctggc

SEQ ID NO: 12580 - DNA, 60 bp, Homo sapiens
ctttggaagtttagctctgagaaccgtagatgatttcagttctaggaaaataaaacccgt

SEQ ID NO: 12581 - DNA, 60 bp, Homo sapiens
ctcactgcccttcttactcatctctactgcaagactcattcctactgttcaaaaggtctg

SEQ ID NO: 12582 - DNA, 60 bp, Homo sapiens
tcaacttgacaacttggaagggccatctcagcttcaagaccctcccatgagactggctga

SEQ ID NO: 12583 - DNA, 60 bp, Homo sapiens
ggagtgctggaatgcagagcctaaggaacgacctacatttgagacactgcgttggaaact

SEQ ID NO: 12584 - DNA, 60 bp, Homo sapiens
cagaaacctaaaggcagtcagcgaagtcggaaaagaggccatacggcttcagaatctgat

SEQ ID NO: 12585 - DNA, 60 bp, Homo sapiens
gatgcaaactttaaggtttcaggatatttgaagtgttgggtgcattgagaccagtagctg

SEQ ID NO: 12586 - DNA, 60 bp, Homo sapiens
ggactgtcttgcataccttctgtctggtttccactgattccttcttagccatggagagca

SEQ ID NO: 12587 - DNA, 60 bp, Homo sapiens
cttccaaacccaggagaggacgtcgacccaagtctgaatctcagggcaatgctaccaaaa

SEQ ID NO: 12588 - DNA, 60 bp, Homo sapiens
tagcctgaggttcccttatgtggccctatagctgttactgaaggaagtagcctacgtcca

SEQ ID NO: 12589 - DNA, 60 bp, Homo sapiens
gagattattccctggcaaatgcaagttctctggcatccacaatacggcactaaagtaaaa

SEQ ID NO: 12590 - DNA, 60 bp, Homo sapiens
tgaccgagatcctgctgctttcgcagccaggagcaccgtccctccccggattagtgcgta

SEQ ID NO: 12591 - DNA, 60 bp, Homo sapiens
agacaacaagaggattacctgctttacaagcaaatgaagcaactgaaaaaccccttggaa

SEQ ID NO: 12592 - DNA, 60 bp, Homo sapiens
tgtaactttccttgtacttaattgggtaaaagtcttttccacaaaccaccatctattttg

SEQ ID NO: 12593 - DNA, 60 bp, Homo sapiens
cgtgccctttggagtagtacagggaatgaagactcgaagaggagatgtcactttcctgga

SEQ ID NO: 12594 - DNA, 60 bp, Homo sapiens
gaacacgtagcgactccgaagatcagccccaatgaacatgtcagtgttgactttacaaga

SEQ ID NO: 12595 - DNA, 60 bp, Homo sapiens
ctctccctctgtgtgtaattggaggagaccacaagctgttgttttgggtgactgaagtat

SEQ ID NO: 12596 - DNA, 60 bp, Homo sapiens
aagcagagaggccgaccttcatcccagccccgcaggaacatcgtgggctgcagaatttct

SEQ ID NO: 12597 - DNA, 60 bp, Homo sapiens
ttccctgggaacagcggcctctgacaccagcacagcaaacccgccgggatcaaagtgtac

SEQ ID NO: 12598 - DNA, 60 bp, Homo sapiens
gctaacattcccgttcttcagcctagagcttcttaggagctagacttccaacactatctg

SEQ ID NO: 12599 - DNA, 60 bp, Homo sapiens
tcctccaccgtcccacactttagggggttggtatctcgtgctcttctccagagattacaa

SEQ ID NO: 12600 - DNA, 60 bp, Homo sapiens
gtcgtcaagtgatgctttcagttgtaacacgtgacttggtgctgtccctgctggtctaag

SEQ ID NO: 12601 - DNA, 60 bp, Homo sapiens
gcctgagtatctccacgcagttcctctcaagcctccagaaggcatccaggttcacccata

SEQ ID NO: 12602 - DNA, 60 bp, Homo sapiens
aacattcacaaacagtcaaacatcaacagaagatccaggggattccactccctttgaaga

SEQ ID NO: 12603 - DNA, 60 bp, Homo sapiens
gcacccgacaatcgatgtgttggtaacctgtagtcgagattcaactgcacggatttggga

SEQ ID NO: 12604 - DNA, 60 bp, Homo sapiens
gagagagaactagacagctccgactagaagctaagcgttctaaacagttacagcaccacc

SEQ ID NO: 12605 - DNA, 60 bp, Homo sapiens
ggctgagagtgaagaagactatgctgaaactatcgctcacattctttccatgtctgcaga

SEQ ID NO: 12606 - DNA, 60 bp, Homo sapiens
gtcccggtgttctggccgattctggtgatgtacttcatcatgctcttctgtatcacgatg

SEQ ID NO: 12607 - DNA, 60 bp, Homo sapiens
gaatttaaaggccactcgttgctgcaagctgcacgagaagctgatgttactcgaatcaaa

SEQ ID NO: 12608 - DNA, 60 bp, Homo sapiens
gcaagtgcatcctttgattctactgttaggttatgggatgtagaccgagggatatgcatc

SEQ ID NO: 12609 - DNA, 60 bp, Homo sapiens
gtaagcctatctaatgctaggtgtgtggacattgtgctaaggtagtttcagtgtgtcaac

SEQ ID NO: 12610 - DNA, 60 bp, Homo sapiens
cgccagatgaactgtggattttgcagcaccacgacgttttaacccaaggacaagctggta

SEQ ID NO: 12611 - DNA, 60 bp, Homo sapiens
aggtagtcgatgtttgtggtctgggcgtctgtagaagggcaacctcgtgctttctgcaga

SEQ ID NO: 12612 - DNA, 60 bp, Homo sapiens
gggaattcatctcgccagattcttgataacatgccattcattgcccttaggtgattgacc

SEQ ID NO: 12613 - DNA, 60 bp, Homo sapiens
agcctataggaggctgggagttagaactgaaaccctcacatgaagcaaagtcaagactgc

SEQ ID NO: 12614 - DNA, 60 bp, Homo sapiens
ttattctgcaggttcatctcagacccacctttcagccttaagcagccacctgagccacca

SEQ ID NO: 12615 - DNA, 60 bp, Homo sapiens
actcgcctcaccatcaagaagtacctggacgtgaagtttgagtacctgtcgtactgcctg

SEQ ID NO: 12616 - DNA, 60 bp, Homo sapiens
tatttcttgcatactttccgaccttcatcatacaacctctcctaacctccctgtagtctt

SEQ ID NO: 12617 - DNA, 60 bp, Homo sapiens
agatattccgaggccgggatgtgacgctcctctacagccagctgcaggtcttcttctcca

SEQ ID NO: 12618 - DNA, 60 bp, Homo sapiens
agaaggaagacgcttggtcactggagcttctagtggggagtttaccctgtggaatggact

SEQ ID NO: 12619 - DNA, 60 bp, Homo sapiens
cctttgcatcacatcttcagtgcagcaggagacgacttactagatctcatacaaggctta

SEQ ID NO: 12620 - DNA, 60 bp, Homo sapiens
agcagtatgaaagcatggaccacatccaagctgagctgtcggctagagtcatggagctgg

SEQ ID NO: 12621 - DNA, 60 bp, Homo sapiens
agtcacggagtggaagaggaggttctggtggtggtagtagttctggttccagttcgagtt

SEQ ID NO: 12622 - DNA, 60 bp, Homo sapiens
atatttggtcatgggggaagaatgtagggttgtggcactggcacagacacaggaaaatcc

SEQ ID NO: 12623 - DNA, 60 bp, Homo sapiens
gaagatccagaaactgctttctgtactcttgcaaacagggaagttttcaatactgatgag

SEQ ID NO: 12624 - DNA, 60 bp, Homo sapiens
aaagatgcaagttatcaaatccctcccgatagtcctttaaggctcatgttaaagtattgg

SEQ ID NO: 12625 - DNA, 60 bp, Homo sapiens
acgaaggacctgccaccatgccatatagggacacacctcagaaacccttccttgacagct

SEQ ID NO: 12626 - DNA, 60 bp, Homo sapiens
gtggtaccctctggaggggtgtggctccttcccatcgctgtcacaggcggttatgaaatt

SEQ ID NO: 12627 - DNA, 60 bp, Homo sapiens
acctgctctcagagtttggacagttcctgcccgaagccaagcggtctctgttcacaggaa

SEQ ID NO: 12628 - DNA, 60 bp, Homo sapiens
ttctgcctcaggcatctccgcgatctcctctcccctccaatcctatccgtgatggacgat

SEQ ID NO: 12629 - DNA, 60 bp, Homo sapiens
ctgcaatgagcatgtggagatagcaagagctctacacactccccaaagagtcctaccctt

SEQ ID NO: 12630 - DNA, 60 bp, Homo sapiens
gaccatggcacaagaactgccttcatccatcaccgggagcaagtgtggaagagatgcatc

SEQ ID NO: 12631 - DNA, 60 bp, Homo sapiens; identical to SEQ ID NO: 4855

SEQ ID NO: 12632 - DNA, 60 bp, Homo sapiens
cgtccctcatctgcgtcctgaagggaatcatccacccgtttctcatcaggctgtgctgga

SEQ ID NO: 12633 - DNA, 60 bp, Homo sapiens
gccatgctgcttgccctcccttgaagtgtctataagctcatcacagcctagagttaagta

SEQ ID NO: 12634 - DNA, 60 bp, Homo sapiens
gacaagctgaagcagtgtctggagaaccagcagctaatcatgcagagagcaacaccatga

SEQ ID NO: 12635 - DNA, 60 bp, Homo sapiens
taaagaagagcacctgaggaatcggcagcaccctcactgctacgttcagtacatgatcgc

SEQ ID NO: 12636 - DNA, 60 bp, Homo sapiens
cgacttaccaaagagcaactgaaacagattcctacacatgactatcagaagggagaccag

SEQ ID NO: 12637 - DNA, 60 bp, Homo sapiens
tcctaggcctggatcggtgagcactgtagcctgcgtcatggctcaaggattcaatgcatt

SEQ ID NO: 12638 - DNA, 60 bp, Homo sapiens
tgtaactctcggaggtgatgtgtttgatcctcatgggacattgagtggaggtgctcgatc

SEQ ID NO: 12639 - DNA, 60 bp, Homo sapiens
aagaccaccaaatatcggaacccctccttgaagctgatggtgaatgtgtgcggacacact

SEQ ID NO: 12640 - DNA, 60 bp, Homo sapiens
attgttgtgaagccagacagtgacctcaaatgttgccttggagtcccctacagcccctca

SEQ ID NO: 12641 - DNA, 60 bp, Homo sapiens
gattctaaactgccttcctcggttcgcagtacacttctggaactgtttggtcaaatagaa

SEQ ID NO: 12642 - DNA, 60 bp, Homo sapiens
cagttatttccaagccaggaaactcgctccgtcacatgaagttagagcaggcctcagtca

SEQ ID NO: 12643 - DNA, 60 bp, Homo sapiens
gttcatgacgtgcagcgatgacttcagagcgcggttttggtaccggagatcgaccactga

SEQ ID NO: 12644 - DNA, 60 bp, Homo sapiens
ttgtgatcactgtaaatggtaatcagttggaattctcctaaatgtcttccagacactagt

SEQ ID NO: 12645 - DNA, 60 bp, Homo sapiens
ccgtggcttcatgattgtctacaacttctcactggtggcactctccctctacattgtcta

SEQ ID NO: 12646 - DNA, 60 bp, Homo sapiens
aatgatgccttggctattcgtgagaaaactttgggcaaagatcatcctgcggtggcggcg

SEQ ID NO: 12647 - DNA, 60 bp, Homo sapiens
gcgtttgcagcaaaagatgcatttgaagcggcttttcctccaagcaagcaacctgaagcc

SEQ ID NO: 12648 - DNA, 60 bp, Homo sapiens
acagtttgtagcggcactacggcctctgggtgccacattccctggacctattttccacct

SEQ ID NO: 12649 - DNA, 60 bp, Homo sapiens
acagcctggtggtctctaaagccaacagtgtcctgtaccctgaaatcagcacagaaacac

SEQ ID NO: 12650 - DNA, 60 bp, Homo sapiens
gcagggtccagacaggccacaagaagtcagctatacagacactaaagtgattggaaatgg

SEQ ID NO: 12651 - DNA, 60 bp, Homo sapiens
aagcatgttcagcattcaggtgatcagcaggactgtctccagcacggagctgacactgtt

SEQ ID NO: 12652 - DNA, 60 bp, Homo sapiens
tgtgggcatccctgggttcttggaagcagctcttatgctactcatagagatgggattgac

SEQ ID NO: 12653 - DNA, 60 bp, Homo sapiens
cgccttatacgcatacacagccaggaaacgtggagcattgtttctcacagagagtctcca

SEQ ID NO: 12654 - DNA, 60 bp, Homo sapiens
gcagaactgaaatggaggtcagagcttcattacagaaggttagtggatcatctgattctg

SEQ ID NO: 12655 - DNA, 60 bp, Homo sapiens
tgagtgcctatcaggaacactaataggaatgccattcaaccagtgtcttctgcccctctc

SEQ ID NO: 12656 - DNA, 60 bp, Homo sapiens
ttgtaaagctgcagggaaagaggttccacttcccagcaaccccatcctaatggcttatgg

SEQ ID NO: 12657 - DNA, 60 bp, Homo sapiens
ctataagggcagcttccctaagtggaccaggaagggactggaagagattgtgcccaatct

SEQ ID NO: 12658 - DNA, 60 bp, Homo sapiens
cccagcctttcttaccaatcaaggactcagaactgaaggcaattatttcttttggtggac

SEQ ID NO: 12659 - DNA, 60 bp, Homo sapiens
atgccacagggagggatctgctgcagaaccttctgaagtgtaaccctgtccagcgtatct

SEQ ID NO: 12660 - DNA, 60 bp, Homo sapiens
attgctatctggaggccttccagctgctgtcttctggacaggctctgcttctccaaggaa

SEQ ID NO: 12661 - DNA, 60 bp, Homo sapiens
agagcaagaagagacatggcatgttctctgggaccctggaatcctaggtacccacatgtg

SEQ ID NO: 12662 - DNA, 60 bp, Homo sapiens
gataatgaagctcagctctttgctgataatgaggtttaacattgagataactggttttta

SEQ ID NO: 12663 - DNA, 60 bp, Homo sapiens
gttcttccagtcagtttttctcttaagtgcctgtttgagtttactgaaacagtttacttt

SEQ ID NO: 12664 - DNA, 60 bp, Homo sapiens
gctgcttgaaaacattccagatatgcttcagagccttgttggacagcaaaatgcccgcca

SEQ ID NO: 12665 - DNA, 60 bp, Homo sapiens
cttggctgatgttgcagcctgcagcaagtgcttccgtctccggaatccttggggagcact

SEQ ID NO: 12666 - DNA, 60 bp, Homo sapiens
ttggctgtgtccagactttcttgtgaggcagcaggaagctgtaagactttaagggccagg

SEQ ID NO: 12667 - DNA, 60 bp, Homo sapiens
ctgcaaacccatttctgaaaatggtacattatagggtgggtatagatgcatagatatggg

SEQ ID NO: 12668 - DNA, 60 bp, Homo sapiens
ggatgtgtcagaaacagaaggtgaacagatcctaaaggtggagtcctctgcacttgaggt

SEQ ID NO: 12669 - DNA, 60 bp, Homo sapiens
actttgagtgtgtaaccactctcgagggccatgaaaatgaggtcaagtcagtggcttggg

SEQ ID NO: 12670 - DNA, 60 bp, Homo sapiens
tccctgcgaacccacaatctctgccagcagaactggttttgttctgaatagtacagattg

SEQ ID NO: 12671 - DNA, 60 bp, Homo sapiens
tctccagccgtgcttggcctcaggctggcagcccggatcctggggcaacccatctggtct

SEQ ID NO: 12672 - DNA, 60 bp, Homo sapiens
tgcgattctggcgtccaccttctccaagtctggcagctattttgctttaaccgatgacag

SEQ ID NO: 12673 - DNA, 60 bp, Homo sapiens
ggtgcaggtacacatgagttagagagctggtgagacagttgggaactctttgtgcttgtg

SEQ ID NO: 12674 - DNA, 60 bp, Homo sapiens
gacgccagtttgaggagcgacagcaggagacggagcatgtttatgagctcttggagaata

SEQ ID NO: 12675 - DNA, 60 bp, Homo sapiens
gtggcagtggatgttattcctcatgttgacaacccaacctttgaagaagacgaaactcct

SEQ ID NO: 12676 - DNA, 60 bp, Homo sapiens
atggagctggatgacctacctaaggagcggctgaaggagctcatcttccaggagacagca

SEQ ID NO: 12677 - DNA, 60 bp, Homo sapiens
cacatccgttacatttcatcaggattggatggaacatcattcagaggtcctttcaggggc

SEQ ID NO: 12678 - DNA, 60 bp, Homo sapiens
ctctcctctggttctcaacctcaacgagttcaaatcagttgtcctttttagctcccgtgg

SEQ ID NO: 12679 - DNA, 60 bp, Homo sapiens
tgaccccaggattatagtggcgaggcagggtgttagccaagcggattgagccaggacaca

SEQ ID NO: 12680 - DNA, 60 bp, Homo sapiens
ttctgagtcttggcaactttgggggttctcctgtgttcacgcggaacgttgtagcaaaac

SEQ ID NO: 12681 - DNA, 60 bp, Homo sapiens
tgagtactagcgtccctgacagcgcggaatctgggtgcagttcctgcagtaccccactct

SEQ ID NO: 12682 - DNA, 60 bp, Homo sapiens
acagagagctcaggtgaagataaggactctgacagcatggaggacactggtcattactcc

SEQ ID NO: 12683 - DNA, 60 bp, Homo sapiens
cagctacatacaacctagtacacttgaagtcagacagacatttcagttgcttacctccag

SEQ ID NO: 12684 - DNA, 60 bp, Homo sapiens
tccagcaactctcctctggcgtgacagccggcatggaggatccacagagtaaagagcctg

SEQ ID NO: 12685 - DNA, 60 bp, Homo sapiens
tgaaggctgactgagaaatcctctgctgaagacccctggttctgttctgcctccaacatg

SEQ ID NO: 12686 - DNA, 60 bp, Homo sapiens
aggaacacccaggtgtatatgagagaccaggtgtctatgagagacatgtgaagccccaag

SEQ ID NO: 12687 - DNA, 60 bp, Homo sapiens
aggtgttcacatcaagcaagcacctctggaccacctaccatcctcctaggtcttgtcctg

SEQ ID NO: 12688 - DNA, 60 bp, Homo sapiens
cctcagatgtgaaactcaagctgtacgaccggagtctggagtcaaacccagagcagctgc

SEQ ID NO: 12689 - DNA, 60 bp, Homo sapiens
attctgaagcaaaagttctggtgcctgggattcctggtcatcatgcagctatcaagcccg

SEQ ID NO: 12690 - DNA, 60 bp, Homo sapiens
ttcctcgctgaccgatgaccctggaactccacggtgcctctctgaatctctgttatggat

SEQ ID NO: 12691 - DNA, 60 bp, Homo sapiens
agctacacagggcgtgatgaccggcactttgtacccatgggcctctacatcgtcaggaca

SEQ ID NO: 12692 - DNA, 60 bp, Homo sapiens
cctcatcttgagggcctagcagaatttcaagagaatgtaaggaagaccaacaatttttca

SEQ ID NO: 12693 - DNA, 60 bp, Homo sapiens
gattgacagcatgagtgactcagaggtacaggccaaggaggagcatttgagacaatactt

SEQ ID NO: 12694 - DNA, 60 bp, Homo sapiens
cgagctattgctgatgtgatgctactcttagctgcaccaccagtataaagcttaactgag

SEQ ID NO: 12695 - DNA, 60 bp, Homo sapiens
ccggagactttagtaggtggagagaatggtgcccttgtggaggttgaatctctgttggat

SEQ ID NO: 12696 - DNA, 60 bp, Homo sapiens
taattgctgtctaatgacggggaaagcacgacgaaaagatgtacaatcctgcatccttgc

SEQ ID NO: 12697 - DNA, 60 bp, Homo sapiens
ggtgtgagcacagaaggttttacctacaaacaagtcgttgacctgatcagatcgtccgga

SEQ ID NO: 12698 - DNA, 60 bp, Homo sapiens
ttctctaggtgccccaagcaatacaagcattactgcatcaaagggagatgccgcttcgtg

SEQ ID NO: 12699 - DNA, 60 bp, Homo sapiens
tgtgatttggccaggctctatgggaggaatgaggttgttagcctgatgcaggcaaacggg

SEQ ID NO: 12700 - DNA, 60 bp, Homo sapiens
caggtattcgaacctatgttagtaccataacagttcctcttcgtaggatttctgagaatg

SEQ ID NO: 12701 - DNA, 60 bp, Homo sapiens
tgttgtttgcaacacttcagcttctctcctcacgaagcacgtctccagagacgcctcttc

SEQ ID NO: 12702 - DNA, 60 bp, Homo sapiens
gtccccaactgcagaggatgacctccccagatagaggagaatcattactccaacaagaat

SEQ ID NO: 12703 - DNA, 60 bp, Homo sapiens
cgtctggtaggaagattgttagtgcctcaagttacacctgtgcagcttgggtctgagttt

SEQ ID NO: 12704 - DNA, 60 bp, Homo sapiens
actaaggaggaggtctggtcctttgaagcgggagacctggagtggatggagtggcatcct

SEQ ID NO: 12705 - DNA, 60 bp, Homo sapiens
tttgagcagtgaaggaaggatgactgcctgttacacagaaacaggaataccatgttaaga

SEQ ID NO: 12706 - DNA, 60 bp, Homo sapiens
cgtggcctgcatgacttccaaccagagcagcaccctctacgtcacagatcctattctgtg

SEQ ID NO: 12707 - DNA, 60 bp, Homo sapiens
gacctagatccacacttcaacgatatcctgggacaacattcacggaaacgctgggaaaac

SEQ ID NO: 12708 - DNA, 60 bp, Homo sapiens
cactctggtacagatctccagaagtattgctggggtcagctcgttactcaactccagttg

SEQ ID NO: 12709 - DNA, 60 bp, Homo sapiens
agcccgcagatgctgcggctcaacgccgacccccacttcttcacgcaggtctttcaagac

SEQ ID NO: 12710 - DNA, 60 bp, Homo sapiens
tgccggggactcagacactcagggaacaaaatggtcagccagagctggggaaacccagaa

SEQ ID NO: 12711 - DNA, 60 bp, Homo sapiens
agatgagcactaggagaaacagcagcttctgcagttgagttgggccacataggattgagg

SEQ ID NO: 12712 - DNA, 60 bp, Homo sapiens
ctggagtttctcttgagggcaataaaagttgtatgatgtttgtatgtgttttgtatttct

SEQ ID NO: 12713 - DNA, 60 bp, Homo sapiens
ctgccgaaagtcaaagtgatgggagaattggtatactggtatgactacgtcttaagtcag

SEQ ID NO: 12714 - DNA, 60 bp, Homo sapiens
aagacaccctctgaagaggacttcgagaccattaagctcatcagcaatggcgcctatggg

SEQ ID NO: 12715 - DNA, 60 bp, Homo sapiens
gggagcctattggttctctattagtcttgtgggttttctgtttgaaaaggagtcatggca

SEQ ID NO: 12716 - DNA, 60 bp, Homo sapiens
tgtggcgcaagagccaacgcaaaaatgatggcggcttacaatggcggtacatctgcagca

SEQ ID NO: 12717 - DNA, 60 bp, Homo sapiens
gcatgccagtctccaaaactcacagagaactgttgctgaagtccaagagaccttggcaga

SEQ ID NO: 12718 - DNA, 60 bp, Homo sapiens
gtagaccagaactgaccattctcagccctacttcagaaaacaacaagaagcttttcaatg

SEQ ID NO: 12719 - DNA, 60 bp, Homo sapiens
ggatgctcatgctgtcagccacacaagtctacaccatcttgactgtccagctctttgcat

SEQ ID NO: 12720 - DNA, 60 bp, Homo sapiens
gccctttctaaggcacaaaatgatgtgatggaaatgaagatgcagtcagagagactttcg

SEQ ID NO: 12721 - DNA, 60 bp, Homo sapiens
cgagctactgctttggagcgagggtttcctgcttttgagttgacctgacttccttcttga

SEQ ID NO: 12722 - DNA, 60 bp, Homo sapiens
agtggattagagcacaagtctggcctcactgagtggacaagagctgatgggcctcatcag

SEQ ID NO: 12723 - DNA, 60 bp, Homo sapiens
agcagacgagcaaccacagtgcaaggacgagacagacacacatgagagccaaagctcatg

SEQ ID NO: 12724 - DNA, 60 bp, Homo sapiens
ctgtatttgcctcacccctgcatggtcggaaatcttcgtttcaggtcagaacagcctggg

SEQ ID NO: 12725 - DNA, 60 bp, Homo sapiens
aatctttctcagcttaggaagtcatttagctgatgtggctccagttttctcactcaaagt

SEQ ID NO: 12726 - DNA, 60 bp, Homo sapiens
gagaagtacctagaacagtgtgaacactcatttcttcctccaacatcacctggggttcct

SEQ ID NO: 12727 - DNA, 60 bp, Homo sapiens; identical to SEQ ID NO: 4855

SEQ ID NO: 12728 - DNA, 60 bp, Homo sapiens
cagtgagtggttccactgcctggataacccttgaggaacacgtcagttactgtcacgatg

SEQ ID NO: 12729 - DNA, 60 bp, Homo sapiens
agaagacctgcctagcagtgagcagatgccaaatgaccaggaagaggagtcctttgcaga

SEQ ID NO: 12730 - DNA, 60 bp, Homo sapiens
gcagccctctaaagtgactagaacgtttcattacactgccttgcaatccaaacagtggca

SEQ ID NO: 12731 - DNA, 60 bp, Homo sapiens
cttatcacacccaatcaaaagtcaagaagccagggataaaagcacctcaggcacataaca

SEQ ID NO: 12732 - DNA, 60 bp, Homo sapiens
ttacacggacatcaaagtgattggcaatggctcatttggggtcgtgtaccaggcacggct

SEQ ID NO: 12733 - DNA, 60 bp, Homo sapiens
ctgtccaaggctctgtcctatgccctgcgccatggggccttgaagctggggcttcccatg

SEQ ID NO: 12734 - DNA, 60 bp, Homo sapiens
tggacgtctgtaagacccttctgaacactcaggagaacgtggccctctcgctggccaaca

SEQ ID NO: 12735 - DNA, 60 bp, Homo sapiens
tcacccatcaagaccactgtctcctggtactggactatctacctgccttgtccctgttct

SEQ ID NO: 12736 - DNA, 60 bp, Homo sapiens
attgcagtgtagcttaggggagcaacccatggctcacaggtcactaagcgtctccaatat

SEQ ID NO: 12737 - DNA, 60 bp, Homo sapiens
cagttagactatctgagtaaatggttctttgtggacctaggcagttcctgactgttccac

SEQ ID NO: 12738 - DNA, 60 bp, Homo sapiens
tcgcagccggaccatcgttcacactctatgatgaggagattcagactccacagtgtatat

SEQ ID NO: 12739 - DNA, 60 bp, Homo sapiens
atgcctttgataaggccatcttggctttgagtagcagtgttcctcgtcacccatttcccc

SEQ ID NO: 12740 - DNA, 60 bp, Homo sapiens
cggcgaaatcgcagtggatggcgtcttgcttgtttcaggcttatgtccagatagcctttt

SEQ ID NO: 12741 - DNA, 60 bp, Homo sapiens
agggctgtcctcgctgctgagaagagccactaactcgtgacctccagcctgccccttgct

SEQ ID NO: 12742 - DNA, 60 bp, Homo sapiens
ggctgaaagtgttaactgttccatacttttagcacaatgtgctgcataaggttacctgtg

SEQ ID NO: 12743 - DNA, 60 bp, Homo sapiens
tataactggggtggcccagagtccagcgacaagggcgaccccttcgctaccctgtctgca

SEQ ID NO: 12744 - DNA, 60 bp, Homo sapiens
atacatcagatgagatcatggaccttctggtgcagtcagtgaccaagagcagtcctcgtg

SEQ ID NO: 12745 - DNA, 60 bp, Homo sapiens
acaacagcaggagtctgcacgcagggaaaacatccttgtaatgcgactagcaaccaagga

SEQ ID NO: 12746 - DNA, 60 bp, Homo sapiens
aaaatccactagtcctaaaccggaagaggatgacaccggccatgggttaacgtggctcct

SEQ ID NO: 12747 - DNA, 60 bp, Homo sapiens
tccagcagctggcctgtgatccctacttgttgcctcacatccgaaagtcagtctctacaa

SEQ ID NO: 12748 - DNA, 60 bp, Homo sapiens
atcgagaagctgctgcatcacacagaacggctgtaccagaacgcagaaagcaacaaccag

SEQ ID NO: 12749 - DNA, 60 bp, Homo sapiens
caggtcggcactttccacttctgtacggtggcaaaacgatgacatgtaaccttgctgttt

SEQ ID NO: 12750 - DNA, 60 bp, Homo sapiens
cgaaaattccagtcggtaaccaacaccatggagtccattcaaggcttgtcgtcttggtgt

SEQ ID NO: 12751 - DNA, 60 bp, Homo sapiens
cagctacatgaccgatggactttctgaagctaaagaccacacctgaatcagggctgtggt

SEQ ID NO: 12752 - DNA, 60 bp, Homo sapiens
cctcatgcaggccctgcttgcaggtagtaataaaaccattcttcctgactgcagttttcc

SEQ ID NO: 12753 - DNA, 60 bp, Homo sapiens
cgcttttaaggacgcttatgatcacattgcgcctacccagagaacccaggtcgtctttct

SEQ ID NO: 12754 - DNA, 60 bp, Homo sapiens
agccaagttaaagctgagagcacaagtgctgcatggaaaggcaatatctctggtggaaaa

SEQ ID NO: 12755 - DNA, 60 bp, Homo sapiens
cccgggtttgcaaatagaggctaccgggtgctgtattcagcaacacctgttttactattt

SEQ ID NO: 12756 - DNA, 60 bp, Homo sapiens
aaaagcgcttcggccacatccagcagcagtagcagccgcaaggaccgggactcgaaggcc

SEQ ID NO: 12757 - DNA, 60 bp, Homo sapiens
ccatctcaccagtggtctgctacacaaagagttaagcatccactcatgtgaagtcaaggg

SEQ ID NO: 12758 - DNA, 60 bp, Homo sapiens
gctcacagacaaccttgtggcactcaaggagatcagactggaacatgaagagggggcacc

SEQ ID NO: 12759 - DNA, 60 bp, Homo sapiens
atctttctacttgtgccactatgggcactaggtctgtaggtccctggtgcttccagtact

SEQ ID NO: 12760 - DNA, 60 bp, Homo sapiens
agggttttgggaccctaggttgcggagtccttaccctaccctggcctctcgagcagttgt

SEQ ID NO: 12761 - DNA, 60 bp, Homo sapiens
tgaaatatctccgaagacatggcgcttcttggcaggctagagacctgggaggctgtacag

SEQ ID NO: 12762 - DNA, 60 bp, Homo sapiens
ggaggtaatgctcgggaagtgtcacaaatttaggtaagcggtggtggtagcaccattgga

SEQ ID NO: 12763 - DNA, 60 bp, Homo sapiens
caattttgtggacatttggcaggagttttgactggggtaggagaaacccatgacattaga

SEQ ID NO: 12764 - DNA, 60 bp, Homo sapiens
cttcatcttcaagcagacatcgaagccgttctgattggccgaggacaggatggggcagga

SEQ ID NO: 12765 - DNA, 60 bp, Homo sapiens
tgaagagcctgaagatcccagcagtaggtccttcttctcagaaataatttcatccatatc

SEQ ID NO: 12766 - DNA, 60 bp, Homo sapiens
ccctgagcctttgccattcactacttaccaaagtttgtttctggaggattttcctgtagc

SEQ ID NO: 12767 - DNA, 60 bp, Homo sapiens
atgagttcattggctgaagtcacccggagacaatgctgagtgttccacccctgagtcgaa

SEQ ID NO: 12768 - DNA, 60 bp, Homo sapiens
atatggagtaaagccagagtcagtggccaggcacgaaggcagagcaggaacagccaggag

SEQ ID NO: 12769 - DNA, 60 bp, Homo sapiens
ttttgatggcctctacgtgctccctgtaggtggccttcagctctttccattgttccttag

SEQ ID NO: 12770 - DNA, 60 bp, Homo sapiens
ccaagatgaatcttcaagaaataccacctttggtctatcagcttctggttctctcctcca

SEQ ID NO: 12771 - DNA, 60 bp, Homo sapiens
cactcctcccatgtacttacaagccgatatagaagcctttgacatcagagaactaacacc

SEQ ID NO: 12772 - DNA, 60 bp, Homo sapiens
aatggtcgtgtccaccaaaacgccggacaggaagctcatctttggcaaagggaactttga

SEQ ID NO: 12773 - DNA, 60 bp, Homo sapiens
tgcctgcctacggacgcttcatccaggaacgcttcgagcgctgccttgacctgtacctgt

SEQ ID NO: 12774 - DNA, 60 bp, Homo sapiens
gcttaagaaattgtacagttccaagtagctcacttagaacacccatttgcatgtactaac

SEQ ID NO: 12775 - DNA, 60 bp, Homo sapiens
cagctctctgcgggaacctggtatgggccatgagaatgtactgtacaaccacatcttcaa

SEQ ID NO: 12776 - DNA, 60 bp, Homo sapiens
ccctggtttccttatgtgttgaatgtggttgagtttgtccattgctagggagagacttcc

SEQ ID NO: 12777 - DNA, 60 bp, Homo sapiens
aaaacagggatgtcactttgaggggcagatgaaagtctagagaactgttccttaatagca

SEQ ID NO: 12778 - DNA, 60 bp, Homo sapiens
agtgtgacaccttttctgggcaaggaacagcccctttaaggagcaaatcacttctgtcac

SEQ ID NO: 12779 - DNA, 60 bp, Homo sapiens
ggttcttgtcctcctaatatcaacagtggattgccttgctgcagaggggaactgcacgtt

SEQ ID NO: 12780 - DNA, 60 bp, Homo sapiens
ataactctaaaataggcatcttcccaggactttccattctcaggaaaagacctagttacg

SEQ ID NO: 12781 - DNA, 60 bp, Homo sapiens
ctttaggaagaatcatcaaagtaactcaggaggtgattgactaccggaggtggatcaaag

SEQ ID NO: 12782 - DNA, 60 bp, Homo sapiens
gtgggagacgtgcagggcaatgtgtactttctgaattgggaatgaagatgtgccactcgg

SEQ ID NO: 12783 - DNA, 60 bp, Homo sapiens
aatctggttctcctcttgtacacccctcaaccctatgcagcctggagtgggcatcaataa

SEQ ID NO: 12784 - DNA, 60 bp, Homo sapiens
acttccctttcaagaagtggttgtaacagcgcatcttcaacccctgacagcactcgctct

SEQ ID NO: 12785 - DNA, 60 bp, Homo sapiens
ggaaaatgtgtgctctttagtgggtagaacaaatggaaatttggtttcagaatggctgac

SEQ ID NO: 12786 - DNA, 60 bp, Homo sapiens
ggaattactgtggagaatgccttttcgctattctctgctgcagtcagatatgatgcagag

SEQ ID NO: 12787 - DNA, 60 bp, Homo sapiens
aataacggtgtgattggactgttggagcccatgaagaagagcatggtgcctgtgcaggtg

SEQ ID NO: 12788 - DNA, 60 bp, Homo sapiens
cccctgtcatggctcagaacctctccatacctctggcttttgcctgtctcctacatttag

SEQ ID NO: 12789 - DNA, 60 bp, Homo sapiens
gatttgacaagaccaagtggattaaatcctcaggccaagacttcccaagattatcaggcc

SEQ ID NO: 12790 - DNA, 60 bp, Homo sapiens
ataaagtgttcaagccaaagcaggatttctaagatggtggagtaaggaggctggcatgcc

SEQ ID NO: 12791 - DNA, 60 bp, Homo sapiens
gcagcggatggctttctttagcttagcccagtttccagggaagcattgttttttccaggc

SEQ ID NO: 12792 - DNA, 60 bp, Homo sapiens
gatgtggctgaagatcagaggctcagttagcaacctgtgttgtagcagtgatgtcagtcc

SEQ ID NO: 12793 - DNA, 60 bp, Homo sapiens
tctcagactcacaagtctgcgccttctgtcacactagcaccctggctgctatgaaactga

SEQ ID NO: 12794 - DNA, 60 bp, Homo sapiens
aaacctcgaaaatctccaggtgagaagagcagaattgaagctggaattagaggagcaggc

SEQ ID NO: 12795 - DNA, 60 bp, Homo sapiens
ggacttctcagacgtcaggagagtgatgtgagggagctgtgtgaccatagaaagtgacgt

SEQ ID NO: 12796 - DNA, 60 bp, Homo sapiens
aagtgggaaataacttgcaacgtctgttagagatggttgctacacatgttgggtctgtag

SEQ ID NO: 12797 - DNA, 60 bp, Homo sapiens
tgggccccccacagttagcggcaaaacagcgtgggtaacccgcctctcgaagtcggcttt

SEQ ID NO: 12798 - DNA, 60 bp, Homo sapiens
tcactctggagcgagccgccgccctctccttccagccagccagcccctcccatgtacatt

SEQ ID NO: 12799 - DNA, 60 bp, Homo sapiens
ccctagctgtacgccagaagcggcggatttacgacattaccaatgttttggaaggtatcg

SEQ ID NO: 12800 - DNA, 60 bp, Homo sapiens
tgcctcttgcaggctgagtccctccatgcaaaagtggggctaaatgaagtgtgttaaggg

SEQ ID NO: 12801 - DNA, 60 bp, Homo sapiens
ctgctgcccaacctcactctgtgcttacagctgctgattctctgctgtcaaactcagggg

SEQ ID NO: 12802 - DNA, 60 bp, Homo sapiens
tcgcgagacctcaaggagcacagcttctgcgcaccgcacgatactgggagtccaggcgcc

SEQ ID NO: 12803 - DNA, 60 bp, Homo sapiens
gcgtaccttgatataccccatcgacctcagcaagcaattagggagaagtacaaggcttca

SEQ ID NO: 12804 - DNA, 60 bp, Homo sapiens
aaatcttccccaatggtactatccagggaaccaggaaagaccacagccgatttggcattc

SEQ ID NO: 12805 - DNA, 60 bp, Homo sapiens
tgtaaaccaagggttatgcttggatgcagaagtggccttagcaactgggcagttcctggc

SEQ ID NO: 12806 - DNA, 60 bp, Homo sapiens
atttggccagtggtggtaatgataacttggtcaatgtgtggcctagtgctcctggagagg

SEQ ID NO: 12807 - DNA, 60 bp, Homo sapiens
aattacatagctcccgaggtgctgagcaagaaagggcacagtttcgaggtggatgtgtgg

SEQ ID NO: 12808 - DNA, 60 bp, Homo sapiens
ttgtggccttctttgagttcggtggggtcatgtgtgtggagagcgtcaaccgggagatgt

SEQ ID NO: 12809 - DNA, 60 bp, Homo sapiens
agacaaccctgacagcatcacgctgcatcccattgctagcaggattggcaactcttcaga

SEQ ID NO: 12810 - DNA, 60 bp, Homo sapiens
ctggacccactccactgtctctaagtaaacacagcactgcccgcttttagcgtcttcact

SEQ ID NO: 12811 - DNA, 60 bp, Homo sapiens
atattgtaccacgactcacacctttgtcaaggcgctgaccatggatggcaagcaggctgc

SEQ ID NO: 12812 - DNA, 60 bp, Homo sapiens
ccggaagcagaagggtgccgagacagaactcgtcagattcttgcctgcagtaagtgacga

SEQ ID NO: 12813 - DNA, 60 bp, Homo sapiens
cgaacttttgtacagaattgtgagttgtgaccatgtaacatgagaggttttgctagggcc

SEQ ID NO: 12814 - DNA, 60 bp, Homo sapiens
ggcttttagtaggaattactcctattccccctgaagtcaggaccagtgcctgtgatctcc

SEQ ID NO: 12815 - DNA, 60 bp, Homo sapiens
acctgggtctggctggtgacacactttatctggcggttcacctgcttgattcctacctga

SEQ ID NO: 12816 - DNA, 60 bp, Homo sapiens
cagcgagaatcttggaggcccatcagaatgtagctcagatgagtctaattgaagccaaga

SEQ ID NO: 12817 - DNA, 60 bp, Homo sapiens
agagaatttcccattcctgaacagttcaagacagcatgggatggatccaagttaatcact

SEQ ID NO: 12818 - DNA, 60 bp, Homo sapiens
ggagcagtatgccagtgtgttcgccatctccctgccgtacaccaacccctccaagtttaa

SEQ ID NO: 12819 - DNA, 60 bp, Homo sapiens
attctcctattcctgacatgtctgggaaagaatcaggggctgacggggcaagcacctccc

SEQ ID NO: 12820 - DNA, 60 bp, Homo sapiens
tgctccaacagtaaatcagtttcttacccaatactttctgcatcagcagcctgcaaactg

SEQ ID NO: 12821 - DNA, 60 bp, Homo sapiens
gcagtgcgagggtcaccttggtgcactttcttcggatgaagagtttaatgcaagagtagg

SEQ ID NO: 12822 - DNA, 60 bp, Homo sapiens
aagaagtctgactgtggagaatggcagtggagtgtgtgtgtgcccaccagtggagactgt

SEQ ID NO: 12823 - DNA, 60 bp, Homo sapiens; identical to SEQ ID NO: 4855

SEQ ID NO: 12824 - DNA, 60 bp, Homo sapiens
ctcacgtggcaccagtggatagtgtgagagaattaggctgtagaacaaatggccttctct

SEQ ID NO: 12825 - DNA, 60 bp, Homo sapiens
attaatgctgaaaataaggcgaagatcaacatggcaggcgcaaagcgcgttcctacggcc

SEQ ID NO: 12826 - DNA, 60 bp, Homo sapiens
tttgctttgctttctgctcagcttctcctgtgtgattgacagctttgctgctgaaggctc

SEQ ID NO: 12827 - DNA, 60 bp, Homo sapiens
caacaagcgcatcaacgccatggcagaggacggcgaccccttcgcaaagctcatcgtgga

SEQ ID NO: 12828 - DNA, 60 bp, Homo sapiens
tgatggagccatagtgagtgggaagctgctgccaagccttgtatgtgccacgtgcatcaa

SEQ ID NO: 12829 - DNA, 60 bp, Homo sapiens
gaaggttgaccagtatctctaccacatgcgcctctctgatgagaccctcttggagatctc

SEQ ID NO: 12830 - DNA, 60 bp, Homo sapiens
aaccgcatacagcacaactcaagtttgcatcagactgggaagcgaacttaagccagcggt

SEQ ID NO: 12831 - DNA, 60 bp, Homo sapiens
ctgccactaaactgcctgtatttctgtatgtccttctatccaaacagacgttcactgcca

SEQ ID NO: 12832 - DNA, 60 bp, Homo sapiens
gcgagctgctttttgaggctgcgcactcgcatggccccacctcgcaggtccacttccggc

SEQ ID NO: 12833 - DNA, 60 bp, Homo sapiens
gtgacccacagatggcgtcaatgtgaacacctctctttgtgctgaatttctgggccattc

SEQ ID NO: 12834 - DNA, 60 bp, Homo sapiens
gctccatctgagctctccagctggcccccaattgctcctctctctctttgctctctttct

SEQ ID NO: 12835 - DNA, 60 bp, Homo sapiens
atatacctcaggctgagatttggggtgggatagcaggtcagttgatcttctgcaggaagg

SEQ ID NO: 12836 - DNA, 60 bp, Homo sapiens
accagggaagtagaggcgactcgccgagctctgattgaccgaatggtgaatctgcaccaa

SEQ ID NO: 12837 - DNA, 60 bp, Homo sapiens
gagtcagaggcagagaaccaacaagctggtgctgccgctttagctccagagatagtcatt

SEQ ID NO: 12838 - DNA, 60 bp, Homo sapiens
acctgatgtacctgaagcagatcctgtatttgctggagaaattcgtggctgtgctagggg

SEQ ID NO: 12839 - DNA, 60 bp, Homo sapiens
catcttttgcacctggcagaccctctgcactcaccccagcgtgttctgtgaacttgagtg

SEQ ID NO: 12840 - DNA, 60 bp, Homo sapiens
caacaacgatgacgacctcagtgagaatgacgaggatgactgacgtcctctcgccttaag

SEQ ID NO: 12841 - DNA, 60 bp, Homo sapiens
gcttgcaatgacatgactccagagcaaatggctacaaatgtgaactgttccagccctgag

SEQ ID NO: 12842 - DNA, 60 bp, Homo sapiens
cctaggagatttccttgtagctgtcaatgagtatcaggaggcaatggaccagtatagtat

SEQ ID NO: 12843 - DNA, 60 bp, Homo sapiens
gggacggtcacagtccttgaaaaggtccctgtatcaaaaggccaactgaagcaatacttc

SEQ ID NO: 12844 - DNA, 60 bp, Homo sapiens
aaagcgcctacgtggagtccagaggagcggaagtagtcagatttgactgagagccgtaaa

SEQ ID NO: 12845 - DNA, 60 bp, Homo sapiens
gctcggagagcagtcctaacggcgcctcgtacgctagtgtcctcccttttcagtccgcgt

SEQ ID NO: 12846 - DNA, 60 bp, Homo sapiens
tcaagactggtccacggagtgtatgaccacaaacagccatcaaggtactgaggacagtac

SEQ ID NO: 12847 - DNA, 60 bp, Homo sapiens
ctggtggtaggctggtgaaaacttgacagctagacttgatgcttgctgaaatgaggcagg

SEQ ID NO: 12848 - DNA, 60 bp, Homo sapiens
gaccgggcagccagaaaaatcatttttcttctctgggaaggtgaacatttgtagcattga

SEQ ID NO: 12849 - DNA, 60 bp, Homo sapiens
aacaacaagatctgtgatattgccattaactgggctggtggtctgcaccatgccaagaag

SEQ ID NO: 12850 - DNA, 60 bp, Homo sapiens
tactcggtatgtgacagtgagagtctgtgggtgaccgacaagtcatcggccatcgacatt

SEQ ID NO: 12851 - DNA, 60 bp, Homo sapiens
ggaccaagaaggagaactgcccgtacagcatcctggagataacatcagtagaaatcggag

SEQ ID NO: 12852 - DNA, 60 bp, Homo sapiens
agcccccactacctcggcgctcaacccgcctcaaaacctgatagagggacctccctgtcc

SEQ ID NO: 12853 - DNA, 60 bp, Homo sapiens
attgcagattgcttcttagtatattgggaatgaattcctgggacaaacggaggagctttc

SEQ ID NO: 12854 - DNA, 60 bp, Homo sapiens
aaacaaagtgcccctttacagtgctggccacatctcacacaaccctgcatcaaagccctg

SEQ ID NO: 12855 - DNA, 60 bp, Homo sapiens
ggaagggaaaggactagacgccaagcctggatgccaaggagcccctggtgtcacatgggg

SEQ ID NO: 12856 - DNA, 60 bp, Homo sapiens
ttggatactctggacttgctggccatctactgccgcaacgaggccgggcaggaggaagtg

SEQ ID NO: 12857 - DNA, 60 bp, Homo sapiens
cggcagcacacaaagttgactatgcacgacacacgctgtatcttgatctgaggccaagat

SEQ ID NO: 12858 - DNA, 60 bp, Homo sapiens
tggcctgcaaccaacttctgcaattcagaggatccatgcttgctctggccatggttagtc

SEQ ID NO: 12859 - DNA, 60 bp, Homo sapiens
tcctgctggagtgatttatactgtgaaatgagttggccagattgtggggtgcagctgggt

SEQ ID NO: 12860 - DNA, 60 bp, Homo sapiens
ttttaaccacgattggcgaagcgccgtcatttcggagcgactcagcgcctgcccgccctc

SEQ ID NO: 12861 - DNA, 60 bp, Homo sapiens
ttcctggagcattacagtggctacagtatctctgagcttcaccccttggtcagacagctg

SEQ ID NO: 12862 - DNA, 60 bp, Homo sapiens
tcagaatccttggatgagcctgtgggaccgttcctcctagcccggtggtttggaaccagt

SEQ ID NO: 12863 - DNA, 60 bp, Homo sapiens
tggcaccagcaaggagtgtgtgttcatcgagaaggttctggagaacaactacacggccct

SEQ ID NO: 12864 - DNA, 60 bp, Homo sapiens
agccataaccatggaggaagtagccccagtgagtgttagtgatgcagctctcctggcccc

SEQ ID NO: 12865 - DNA, 60 bp, Homo sapiens
ttcaggaatcgttgtcaccccttcaactggagcaggacggaaggttgtctgtacttggga

SEQ ID NO: 12866 - DNA, 60 bp, Homo sapiens
gctccactgacagtccctcctctccggagcattttgataccagaagggaaagcttcattc

SEQ ID NO: 12867 - DNA, 60 bp, Homo sapiens
gcccctctttctagccttttctactactctctgcttggtcaaggtttgtgccccactaca

SEQ ID NO: 12868 - DNA, 60 bp, Homo sapiens
ctatattagttcacttgaaagctggttgttgggaactcctgccctatctgttctgccctc

SEQ ID NO: 12869 - DNA, 60 bp, Homo sapiens
ctgattacctcagtactttgctactagataggatagcctcagtggctgttcagcagattg

SEQ ID NO: 12870 - DNA, 60 bp, Homo sapiens
tgcttatagagagtagctccgacctagatgatgattcttcctgtagcatctggcccctca

SEQ ID NO: 12871 - DNA, 60 bp, Homo sapiens
aattggcacgtgtgctgaaggaactgtatcttcctctacggatgcaaagccatgtatatg

SEQ ID NO: 12872 - DNA, 60 bp, Homo sapiens
gtggcgattgccttagagggaacccctaaattggttttggataagtttgagcccttgacc

SEQ ID NO: 12873 - DNA, 60 bp, Homo sapiens
ggacactaacaggaatcaagtgctaccactttctgatgtggatacaacttctgctacaga

SEQ ID NO: 12874 - DNA, 60 bp, Homo sapiens
tacaaccaggcccagtccaaatggtttgaagagatggtgaccaccacattggagctagag

SEQ ID NO: 12875 - DNA, 60 bp, Homo sapiens
gacacctacagttactcggttatcaagttgttcagatcccctatcatgagattgggatgc

SEQ ID NO: 12876 - DNA, 60 bp, Homo sapiens
cctgaaaaggttaccaaaagaatgtatgatagcttctggaggcagttcaagcactctgag

SEQ ID NO: 12877 - DNA, 60 bp, Homo sapiens
ctaatgatgttacagacttacgtatacccttgtatacctgggacagggctgttttatacc

SEQ ID NO: 12878 - DNA, 60 bp, Homo sapiens
cgtgtccgtccacaagttcgtcgccatgtggagaaaaatcctccagaactgccacgacga

SEQ ID NO: 12879 - DNA, 60 bp, Homo sapiens
attaaaccaggcctgaggagcgatgcgacaggcatgatggaggtcgagtcctcctactcg

SEQ ID NO: 12880 - DNA, 60 bp, Homo sapiens
gttctgtggagcagacgcccaagaagcctggcctcagaagacgtcaaacgtaaacagctc

SEQ ID NO: 12881 - DNA, 60 bp, Homo sapiens
agatggagtccacaggatcagagtggactttaagaagcctggaatggtcccccctccgcc

SEQ ID NO: 12882 - DNA, 60 bp, Homo sapiens
cctgggaagaactgatatctgagaacaacttaaacggcgattttagtgaagttgacgctc

SEQ ID NO: 12883 - DNA, 60 bp, Homo sapiens
ccttcagatgtctttaagcagattggaagtatgcaagtgcttccttagcagggacagtgg

SEQ ID NO: 12884 - DNA, 60 bp, Homo sapiens
gacattgagcagcgactacaaggtgtaatcaagactcgaaatagagtgacaggactgccg

SEQ ID NO: 12885 - DNA, 60 bp, Homo sapiens
agtaaagtgttctgccagatcttaggtatagaggaccctaacacagtatatcccaagtgc

SEQ ID NO: 12886 - DNA, 60 bp, Homo sapiens
cctaggaaattgtggaaggacttacaagaaccggtggtcccagatcctgatgttagtatt

SEQ ID NO: 12887 - DNA, 60 bp, Homo sapiens
tttcacctagggtagtccctggtcgcctccgctcttcgcccaaaaggggatgcagctccg

SEQ ID NO: 12888 - DNA, 60 bp, Homo sapiens
cccagacaatagactatcaagacactgtgaatatgcttcactccctgctcagtgcccagg

SEQ ID NO: 12889 - DNA, 60 bp, Homo sapiens
ttgaacttggggtacttaggagcctctttgtagggactgtgcctaggtagcatgtcctaa

SEQ ID NO: 12890 - DNA, 60 bp, Homo sapiens
taaaagagcgcgtaacacagacacaccgttgggaccttgggtggaccacaaccgaaattt

SEQ ID NO: 12891 - DNA, 60 bp, Homo sapiens
agacgagacccaagggcagagcatttaagagtgaagtcatgacctccagggagcctagaa

SEQ ID NO: 12892 - DNA, 60 bp, Homo sapiens
acttagtagccagctttaaaagtgttaaggaatgtgttttgccctctagaaacctttata

SEQ ID NO: 12893 - DNA, 60 bp, Homo sapiens
tcggttcatctttgatgtgggcacacgtttggggctacactatgataccctggcaactgg

SEQ ID NO: 12894 - DNA, 60 bp, Homo sapiens
caagagttggttctacgcttctgtgagaagaactgtgaaaagagcatggttgaacagctg

SEQ ID NO: 12895 - DNA, 60 bp, Homo sapiens
gtgctgttgtttggactgtaacatccatgttgtcaatacgtataccttgtaagtggataa

SEQ ID NO: 12896 - DNA, 60 bp, Homo sapiens
ctgacttggaaccacagatgaggtccatacttctagactggcttttagaggtatgtgaag

SEQ ID NO: 12897 - DNA, 60 bp, Homo sapiens
agacccaacctgagccccagactctgcctctgcacttttaaccttttatcctgtgtctct

SEQ ID NO: 12898 - DNA, 60 bp, Homo sapiens
ccaaggggccggctctcgtcactgggctctgttttcactgttcgtctgctgtctgtgtct

SEQ ID NO: 12899 - DNA, 60 bp, Homo sapiens
agaggggacaaagacgtgcactcaaccttctaccaggccactctcaggctcaccttaaaa

SEQ ID NO: 12900 - DNA, 60 bp, Homo sapiens
tgttagtgacaaacagtctgcggtaactgaatcctcagagggtacagtatccttattgag

SEQ ID NO: 12901 - DNA, 60 bp, Homo sapiens
gtaatgaggatttgtaaaagggcctgaaatgcgaggtgttttgaggttctgagagtaaaa

SEQ ID NO: 12902 - DNA, 60 bp, Homo sapiens
aactaatccagagaaggcccatgagactcttcatcagtctttatccctggcatcttcccc

SEQ ID NO: 12903 - DNA, 60 bp, Homo sapiens
acagcctccggaagcagccctacaacaacctgaagcacaagttcccatggctgtcggagg

SEQ ID NO: 12904 - DNA, 60 bp, Homo sapiens
cggtgtcatcgtccgtcacttataccatgagtgtgccactttcattggaccctgactgta

SEQ ID NO: 12905 - DNA, 60 bp, Homo sapiens
gtacccatggtgcatctttcctggaatatggcacgaaatatcaaagtctcagatccaaag

SEQ ID NO: 12906 - DNA, 60 bp, Homo sapiens
caagagctgagaagacagttccctggcagtcacagagtcaagcgattaacaggcatgaga

SEQ ID NO: 12907 - DNA, 60 bp, Homo sapiens
gagtatgatcgggcagcacatttcctgcatggctgcaatagcaagaaagcctattttctg

SEQ ID NO: 12908 - DNA, 60 bp, Homo sapiens
tcttcagcctatacgcggatccttgttttgagctctcagaatcactcagacaacattttg

SEQ ID NO: 12909 - DNA, 60 bp, Homo sapiens
tggagaaattcgtctttgagatcacccagcctccactgctgtccatcagctcagactcgc

SEQ ID NO: 12910 - DNA, 60 bp, Homo sapiens
agataaactcaacatcgacagcattatccaacggctgctggaagtgagagggtccaagcc

SEQ ID NO: 12911 - DNA, 60 bp, Homo sapiens
accacctccagctaagggaggcatctctgttaccaatgaggacctgcactgtctaaatga

SEQ ID NO: 12912 - DNA, 60 bp, Homo sapiens
cgtcctgtcactccacctcgaacagctaatccgccgaagaaaaggtgaagaaaggaattc

SEQ ID NO: 12913 - DNA, 60 bp, Homo sapiens
aaacttacatgatctgtacttccacgtgactgggttctgaggggagttaaagcctcccgg

SEQ ID NO: 12914 - DNA, 60 bp, Homo sapiens
tcctgggctgttaaacaaagcgaggttaaggttagactcttgggaatcagctagttttca

SEQ ID NO: 12915 - DNA, 60 bp, Homo sapiens
aactccaaacacatcactgggaatggttcaggcaacgccatccaaagtgcagccatcacc

SEQ ID NO: 12916 - DNA, 60 bp, Homo sapiens
tttgtggcttaggttatgatgcgcctccttctgtgcgaccaatgagacgacttcagcatc

SEQ ID NO: 12917 - DNA, 60 bp, Homo sapiens
ctctgcatcactcattggaagtgcttctgaagagagctgctctgtgttcagttgactggt

SEQ ID NO: 12918 - DNA, 60 bp, Homo sapiens
aaaggagaggccatgaaagaacctgtccttctggaaaagtggtccatgtctgtgctggct

SEQ ID NO: 12919 - DNA, 60 bp, Homo sapiens; identical to SEQ ID NO: 4855

SEQ ID NO: 12920 - DNA, 60 bp, Homo sapiens
cgtgtgacccagaggcgagacgcagctttgtcctgggagacgttcatattggaatctatt

SEQ ID NO: 12921 - DNA, 60 bp, Homo sapiens
aaggaggaaaagtaggtttgctttgtttaaaagacctaaggcaaatggggtgaagcccag

SEQ ID NO: 12922 - DNA, 60 bp, Homo sapiens
tttgctaatgcctcagaacctgagcgatgccaaaagatgccttttaacctggatgatccc

SEQ ID NO: 12923 - DNA, 60 bp, Homo sapiens
cgggattgtgagaatcaagtcactctcatgggaagaatttttatatgggaaagcggataa

SEQ ID NO: 12924 - DNA, 60 bp, Homo sapiens
gagtttccaacatcagttgattgagcttcaggctttacaacgtttatccctgtagagatc

SEQ ID NO: 12925 - DNA, 60 bp, Homo sapiens
tgaggcaggatgttgtcaattggctcaacgaggagaagatcgtccagcggctgattgagc

SEQ ID NO: 12926 - DNA, 60 bp, Homo sapiens
catcttcctgttcttggaccgcacctatgtgctgcagaactccacgctgccctccatctg

SEQ ID NO: 12927 - DNA, 60 bp, Homo sapiens
aaggacaagttcatcagcctggtgttgaagcacatcggcacctcagcgcttatggacctg

SEQ ID NO: 12928 - DNA, 60 bp, Homo sapiens
ctcaccttctaagtgagcaacacagaaactttgcacagagtaaccagtatcaagttgttg

SEQ ID NO: 12929 - DNA, 60 bp, Homo sapiens
caaacttttgacgacaataaaagccgtggtcatgttggaatacgtcgaaagagcaacatg

SEQ ID NO: 12930 - DNA, 60 bp, Homo sapiens
cagctcttcagtagagttcgaggtggagttcaggttcttttgcagcagtggatcgaatat

SEQ ID NO: 12931 - DNA, 60 bp, Homo sapiens
aaaattggtgccgagcagggatataacctgcagttaagtgaaaagaaaatccagcctccc

SEQ ID NO: 12932 - DNA, 60 bp, Homo sapiens
cacatatgcaacacctgtggacatgtggagtgttggctgtatctttgcagagatgtttcg

SEQ ID NO: 12933 - DNA, 60 bp, Homo sapiens
aaggagtaattctccagtggaaatggaaaccagcactgaacccatggaccctctgactcc

SEQ ID NO: 12934 - DNA, 60 bp, Homo sapiens
ccagaacagtgcaagtgacgatgccgaagccagcatgatctccaagttaaagcaagcttg

SEQ ID NO: 12935 - DNA, 60 bp, Homo sapiens
cgcctcaagttccccatcgactacccatactctccaccagcctttcggttcctgaccaag

SEQ ID NO: 12936 - DNA, 60 bp, Homo sapiens
actgacctcatctggaagaaccagaactcgtggggcactggcgaagatgtgaaggttata

SEQ ID NO: 12937 - DNA, 60 bp, Homo sapiens
ttataccctagttagtgttttgcctcacctaataggctgggagactgaagactcagcccg

SEQ ID NO: 12938 - DNA, 60 bp, Homo sapiens
tacatccccaggccttgctggggtgcaggggtatatcaacttcccattagcaggagctcc

SEQ ID NO: 12939 - DNA, 60 bp, Homo sapiens
gctctgacctctgcctctacactctgtcaagttgaacctgtgggaagatggtttgaagct

SEQ ID NO: 12940 - DNA, 60 bp, Homo sapiens
gcgaatgacactagaagaacaggaacaaactcaggtagaacaggatcaagtgcttgaggc

SEQ ID NO: 12941 - DNA, 60 bp, Homo sapiens
atgaaccacgaggccttcaaggatgagctaaagaccttccgcctcaagactcgcagctgg

SEQ ID NO: 12942 - DNA, 60 bp, Homo sapiens
aagcgcctactactgcagctggaagcaacaaagaacagcaaagggggatcagggggaaaa

SEQ ID NO: 12943 - DNA, 60 bp, Homo sapiens
catcgtgggtttagaagaaattgtgcacgggagaatagatgggaagaattttaccgcggg

SEQ ID NO: 12944 - DNA, 60 bp, Homo sapiens
ccaaagctcggggaattgattccagctctgttaaactccggggtagttctctcttcatgg

SEQ ID NO: 12945 - DNA, 60 bp, Homo sapiens
aggagccaggagttaatacagctgaagagtcaaggggatctggagaaggctgaacttcag

SEQ ID NO: 12946 - DNA, 60 bp, Homo sapiens
ataggaatactgtctacatgctttctcattcaagaattcgtcatcacgcatcacaggccg

SEQ ID NO: 12947 - DNA, 60 bp, Homo sapiens
ccttcagtggacgactggacatctccccgcaggacaaagggcagctagatctgtatgtta

SEQ ID NO: 12948 - DNA, 60 bp, Homo sapiens
gcgctacgtggatggtggcatttcagacaacctgccactctatgagcttaagaacaccat

SEQ ID NO: 12949 - DNA, 60 bp, Homo sapiens
tggctgttagtaccttctttcccggagtcctggtccacgagttggatttactgctgtcgc

SEQ ID NO: 12950 - DNA, 60 bp, Homo sapiens
cgggtccaaatgtgattcaaacaactgtacggagtggcatattagaattgccctaaactg

SEQ ID NO: 12951 - DNA, 60 bp, Homo sapiens
agccgagtcctgtccttccaggccgttcgcaatggtggatgagttggtgctgctgctgca

SEQ ID NO: 12952 - DNA, 60 bp, Homo sapiens
acttcaccatggagtccctcaagcagatacacttcttgtaccagtactccctccagtttt

SEQ ID NO: 12953 - DNA, 60 bp, Homo sapiens
atcctgccaacgtgaaaacctcatgttcaaagaacacttccctttagccgatgtaactgc

SEQ ID NO: 12954 - DNA, 60 bp, Homo sapiens
gtgacctgcaaaagtacagcagagctggaggctgaggagctcgagaaattgcaacaatac

SEQ ID NO: 12955 - DNA, 60 bp, Homo sapiens
ggcgactatactgggggcgagaaaacgagtaagaacgcagcatgtacagtgtgtactgac

SEQ ID NO: 12956 - DNA, 60 bp, Homo sapiens
ggagaaatcctgtgtttcagtggaatgggcagaaggaggtgccacaaagggcaaagagat

SEQ ID NO: 12957 - DNA, 60 bp, Homo sapiens
ctttggataccgagggaaatgtgctgttggatatattgctgagcttgcaggaaattaggg

SEQ ID NO: 12958 - DNA, 60 bp, Homo sapiens
agcgtctgcccgcaaccgcactacttgctgcccgacactaatgtgttactgcaccagatt

SEQ ID NO: 12959 - DNA, 60 bp, Homo sapiens
tcaaacgagagcctgcagaaggttctacagtcagggctgaagtttgtagcagcacggata

SEQ ID NO: 12960 - DNA, 60 bp, Homo sapiens
attctctcgcttcaaccctattctcttttgagcttccctttttgcggagggccataccgc

SEQ ID NO: 12961 - DNA, 60 bp, Homo sapiens
gccgagctattgaccagtgcagagaagagagcagaaatgcagaaacagattgaagagatg

SEQ ID NO: 12962 - DNA, 60 bp, Homo sapiens
gcatccatatacaccctgtgacagtcagcagtctgctattaagtggcctacttcaaggct

SEQ ID NO: 12963 - DNA, 60 bp, Homo sapiens
agtgccaaccgactaattcatcaaaccaacttaatacttcagaccttcaaaactgtggcc

SEQ ID NO: 12964 - DNA, 60 bp, Homo sapiens
aggagtatacggaggagatagaacgtttaaaacgagatcttgctgcagcccgtgagaaaa

SEQ ID NO: 12965 - DNA, 60 bp, Homo sapiens
tatgcatcatcaggaccacaagactgagttgctgaggtgtcgaagccagagcaaagtgca

SEQ ID NO: 12966 - DNA, 60 bp, Homo sapiens
tatggacattcatttgcggtggagagtgagcacgaccaagcgatggctgcttacttcaca

SEQ ID NO: 12967 - DNA, 60 bp, Homo sapiens
cgagcctctactgtataccaggggctaactcaccaagcacattctaggaattgggccctg

SEQ ID NO: 12968 - DNA, 60 bp, Homo sapiens
ttcttactgtgaacctcgtgggctcctgctcggtgtcctttcttactctgtctctgtttt

SEQ ID NO: 12969 - DNA, 60 bp, Homo sapiens
gatgcgtccttgatggcaatgagaaggcgcattgaaggtttgactccagaggaaatccga

SEQ ID NO: 12970 - DNA, 60 bp, Homo sapiens
ctttaagtacgtaggcaccaagctccctaagcagacggctgactttctgcaggagtacgt

SEQ ID NO: 12971 - DNA, 60 bp, Homo sapiens
ccctggttcccatgtcgttatctctccttactgtcctcatttcgaaggcacactttctcc

SEQ ID NO: 12972 - DNA, 60 bp, Homo sapiens
agtcgtgtttagctaagtgtcgagagcattaagaagaaagtcctggttggaggcgcaagg

SEQ ID NO: 12973 - DNA, 60 bp, Homo sapiens
cggatgggcaggctcgggaaaagttagctttatacgtctacgaatatttactgcacgtag

SEQ ID NO: 12974 - DNA, 60 bp, Homo sapiens
gggctcaggattcaggaaatacaaacagacatggcagagcagtttgctttgggttggcag

SEQ ID NO: 12975 - DNA, 60 bp, Homo sapiens
ggatgcctaactgtctactccctgcaagcctcagagcagccaagtcattggtgttcattt

SEQ ID NO: 12976 - DNA, 60 bp, Homo sapiens
gcccacgatgaagaccctcagtgacgacctagatgaagcagcaaaggaatttcaggagaa

SEQ ID NO: 12977 - DNA, 60 bp, Homo sapiens
cagaaacaaagagcagacatgctggagatggagctgaagatgctgaagtctcagtccagc

SEQ ID NO: 12978 - DNA, 60 bp, Homo sapiens
acagtctaatcaagctccaggagtaggagattgccttcgacagcagttggggtcacgact

SEQ ID NO: 12979 - DNA, 60 bp, Homo sapiens
tccgatagctatgttctgctggagcattctgtgaagaaggcagtacattttgggttaccg

SEQ ID NO: 12980 - DNA, 60 bp, Homo sapiens
gtctcatattcaccttcacggaatacttacagccctagggttgtctgtatcctaatgata

SEQ ID NO: 12981 - DNA, 60 bp, Homo sapiens
ggatgttgtactgatgtcatttgaccacgtccattgtttccatcttttgggctgttcttg

SEQ ID NO: 12982 - DNA, 60 bp, Homo sapiens
tcttccatttacagtgtcactattccctgacggagctgttatgtgccgctctagcgaagg

SEQ ID NO: 12983 - DNA, 60 bp, Homo sapiens
ctcgaagcagtgactatggcctcctttgttcccatttcagggttccacaaactgtcttgc

SEQ ID NO: 12984 - DNA, 60 bp, Homo sapiens
ctgcaggaagagctaaagatccgaagagtgctacacacctaccatgactcccgaatccat

SEQ ID NO: 12985 - DNA, 60 bp, Homo sapiens
gatgacttcatgctttattatgccttattatggctgacgtattactgtggtgaaacaaaa

SEQ ID NO: 12986 - DNA, 60 bp, Homo sapiens
tgctgaggagaggagcgtcaacagcagcaccatggtagctcaacagaagaaccttgaagg

SEQ ID NO: 12987 - DNA, 60 bp, Homo sapiens
gtatgctttctgaagaagtcagggaaagttagagtctgtggcctgaggtgtctgctctgg

SEQ ID NO: 12988 - DNA, 60 bp, Homo sapiens
caccacaagccaccttttgtagtgttctccactaatactggttatcctgtgctacagaga

SEQ ID NO: 12989 - DNA, 60 bp, Homo sapiens
ccaggtgttcggttaaaagccagaagttatgagcttcaggaaagcaatgtacggctgaag

SEQ ID NO: 12990 - DNA, 60 bp, Homo sapiens
tgaagttgcagctttgccacatgcttgtggagcccaatctgtgccgctcagtcctcattg

SEQ ID NO: 12991 - DNA, 60 bp, Homo sapiens
tttcccagctcagataaacctgttcttgacccatgttctctaccaccctgttcctctgcc

SEQ ID NO: 12992 - DNA, 60 bp, Homo sapiens
acagacgttacatcggaacccagatggctgtattcacatgtaggtttgggctgtaatcta

SEQ ID NO: 12993 - DNA, 60 bp, Homo sapiens
atttacaggctaaaaacttagtagcatagagctgtctgccacagccttctgacaaagttt

SEQ ID NO: 12994 - DNA, 60 bp, Homo sapiens
aggacacggagttgcagaggaagctagaccatgagatccggatgagggaaggggcctgta

SEQ ID NO: 12995 - DNA, 60 bp, Homo sapiens
gaagattgccatcaccttcagaatgattccccaagtgtcctggaaatttgcctggtactg

SEQ ID NO: 12996 - DNA, 60 bp, Homo sapiens
tggcagccgcgtgtccacacagttagcggagcgcaggacttctgcagtcctcaggtgacc

SEQ ID NO: 12997 - DNA, 60 bp, Homo sapiens
atgaagactgtaaaacacaaaatcttggtattgtctgggaaaggcggtgttgggaaaagc

SEQ ID NO: 12998 - DNA, 60 bp, Homo sapiens
ctggctaattgtaccagtcgtcagatagaaccagccaacagagaattttgtgcaagacgc

SEQ ID NO: 12999 - DNA, 60 bp, Homo sapiens
tatttcttggtggagcagcacattgtggagtgtgattcttaattcttcattgagtttgtc

SEQ ID NO: 13000 - DNA, 60 bp, Homo sapiens
tgccagggcaacagcccaccccctagtacaactgatgctccctgagacaacctgggagac

SEQ ID NO: 13001 - DNA, 60 bp, Homo sapiens
gtggaagaagcttggagaagaatctggagatgagattgatgttccaaaggatgagcttag

SEQ ID NO: 13002 - DNA, 60 bp, Homo sapiens
agttcacttcatcctagtggaaaaggtgaccacaagattcaaggtggatggaaaacacag

SEQ ID NO: 13003 - DNA, 60 bp, Homo sapiens
ccccacagtcccattcctccactctgtatctatgcaaagcactctctgcagtcctccggg

SEQ ID NO: 13004 - DNA, 60 bp, Homo sapiens
aactgcatcattggtaaaggacgcagctacaagggaacagtatctatcactaagagtggc

SEQ ID NO: 13005 - DNA, 60 bp, Homo sapiens
aatgggacaacttgtccatcgtttcactgtaccaggcatgaggatgtggcctgcatgctg

SEQ ID NO: 13006 - DNA, 60 bp, Homo sapiens
tgaagccaaacacatcctttcatcagaagcccattccctctataaggcgttactacattt

SEQ ID NO: 13007 - DNA, 60 bp, Homo sapiens
tttcatggtgtgaaggaaggagcgtggtgcattggacatgggtctgacacgtggagaact

SEQ ID NO: 13008 - DNA, 60 bp, Homo sapiens
aggttggggagacttggggccagcgcttctggtctggtaaatatgtatgatgtgttgtgc

SEQ ID NO: 13009 - DNA, 60 bp, Homo sapiens
aaagagggacctcccagtgagcactcaggcatgtcccgtaacgccatcatcttcctggtt

SEQ ID NO: 13010 - DNA, 60 bp, Homo sapiens
gcttcgccgccgccatggcaatgagacagacgccgctcacctgctctggccacacgcgac

SEQ ID NO: 13011 - DNA, 60 bp, Homo sapiens
ccggccgccctcgtcttgtgcgccgtgcccacagatgtgaaatgaatgtaatctaataga

SEQ ID NO: 13012 - DNA, 60 bp, Homo sapiens
tttgtggagtatgtgcgctcacttgcctgcctctgtctctactgccacgagtacttcaag

SEQ ID NO: 13013 - DNA, 60 bp, Homo sapiens
ccaagttatcggaccaagttacagtgtttgaaacaagtcagcagaattccatgcctgccc

SEQ ID NO: 13014 - DNA, 60 bp, Homo sapiens
gttagagctgctccaatatgaacacttccgaaaggagctggtgaatgctcagtgtgcgaa

SEQ ID NO: 13015 - DNA, 60 bp, Homo sapiens; identical to SEQ ID NO: 4855

SEQ ID NO: 13016 - DNA, 60 bp, Homo sapiens
cagtccggcaggtactgcaccaactaaagagacttggaattgtgtggcaggatgtcctgc

SEQ ID NO: 13017 - DNA, 60 bp, Homo sapiens
ctgtcttttgaactcatgggaataattgtgagtcagcgtaacatttcaagagtctaaagg

SEQ ID NO: 13018 - DNA, 60 bp, Homo sapiens
tgcgcacagtgtgggagcaatgcgtggccatcatgtctgaggaggatggagatgacgatg

SEQ ID NO: 13019 - DNA, 60 bp, Homo sapiens
ctttcagcaaggaactcaacagacgtatgagccagatagccctcctgaagtgaggaaacc

SEQ ID NO: 13020 - DNA, 60 bp, Homo sapiens
acttctatgtctctggaccacaggatggtggtggcattgcaggttggcaagtgggctgat

SEQ ID NO: 13021 - DNA, 60 bp, Homo sapiens
tgagccagctccttgaggatgtggccacttgacttgtggaaggccatcttgatgccagga

SEQ ID NO: 13022 - DNA, 60 bp, Homo sapiens
ggagcgaatacaggctgatgaagtgattgcaattctggatcaagaacagcaagggaagca

SEQ ID NO: 13023 - DNA, 60 bp, Homo sapiens
caagttgagtagagagtgtagagtgcagaaatgtggcttttgccccactttgcatctcca

SEQ ID NO: 13024 - DNA, 60 bp, Homo sapiens
aggctgcactccccgaaagtgcggcagaggtgtcaccgatgtcgtcatcaccagggagga

SEQ ID NO: 13025 - DNA, 60 bp, Homo sapiens
ctgctgtatgaaggcatcagtctcaccatgaactccaaactcctgaatggttcccagcgg

SEQ ID NO: 13026 - DNA, 60 bp, Homo sapiens
tttattccagttgtagcaaagatttcaaaagattgtgttcccattaagtggtagtaattt

SEQ ID NO: 13027 - DNA, 60 bp, Homo sapiens
tttacaaagctgccaggaaaccggccacttctagtaaaccacgtcgtgcctcactgggtc

SEQ ID NO: 13028 - DNA, 60 bp, Homo sapiens
aatcctagctacaacacgaagacccagatcatccaggacttccttcggaaaggctcagca

SEQ ID NO: 13029 - DNA, 60 bp, Homo sapiens
ctgcagaggtgtcatcacttccaccatcaattgtcttggatgccaaggaaatcacaactc

SEQ ID NO: 13030 - DNA, 60 bp, Homo sapiens
gtttgcttgagttatgtcgaaatacgaacagaaaacaagctgccgcaaagttctacagct

SEQ ID NO: 13031 - DNA, 60 bp, Homo sapiens
ttttaccttgtagggagggtgggcaatggggttacccgaccttatttgagggtatgggct

SEQ ID NO: 13032 - DNA, 60 bp, Homo sapiens
agccgcagtatcgtctcgacagttataggcattcagcaacacaagaggacaagcgcgaga

SEQ ID NO: 13033 - DNA, 60 bp, Homo sapiens
acactttcaagaccaggttcacacagccgctgctgcctgctttcacggtatggtgtggca

SEQ ID NO: 13034 - DNA, 60 bp, Homo sapiens
gctggactgttactgacttggatcccaaagcaaggagatcatttggagctcttgggtcag

SEQ ID NO: 13035 - DNA, 60 bp, Homo sapiens
taaggcagccaagaaactcacccaaagcctgtagcctccccaactactccagactgtcct

SEQ ID NO: 13036 - DNA, 60 bp, Homo sapiens
agaagcccaccacgcttgagctgaaagaacgccagattgcagagagacccgcagaggaga

SEQ ID NO: 13037 - DNA, 60 bp, Homo sapiens
ccctcagacagctttcatccactgctctgcactagaattgcacaaatcttcatggtgagc

SEQ ID NO: 13038 - DNA, 60 bp, Homo sapiens
gttttcacttggtgatcatgtcttttccatgtgtacctgtaatatttttccatcatatct

SEQ ID NO: 13039 - DNA, 60 bp, Homo sapiens
tgaagctgcgcaacatgctcatccgcacgcatatgcacgacctcaaggacgtgacgtgcg

SEQ ID NO: 13040 - DNA, 60 bp, Homo sapiens
atgccacaccactattccagcgaatttatgctacaactggtaacaatgaccagaagcctg

SEQ ID NO: 13041 - DNA, 60 bp, Homo sapiens
taaagaacagctcgctaaccacgaaagaggaatcgatgctcagcttttagttgcacttcc

SEQ ID NO: 13042 - DNA, 60 bp, Homo sapiens
tgcaggtgaccctgatccccactttcgactcggtggccatgcatacgtggtacgcagaga

SEQ ID NO: 13043 - DNA, 60 bp, Homo sapiens
ggcgggaagaaagtcagacccagatccgagacgtgatggtgtggtccaatgagcgggtca

SEQ ID NO: 13044 - DNA, 60 bp, Homo sapiens
tgtccagtctttccgccgcattgtggagtaatgacatgaatggggccatattcttcctgg

SEQ ID NO: 13045 - DNA, 60 bp, Homo sapiens
agctgtaccaggaacaccatgaagaagacttctttctctacattgcctacagtgacgaaa

SEQ ID NO: 13046 - DNA, 60 bp, Homo sapiens
ccggctgcatctagttctgctgtttagcctctttggtttctgtacaactacctcccaacc

SEQ ID NO: 13047 - DNA, 60 bp, Homo sapiens
gacttaacagtacaattggaagtaatacggatgagcaagaattagttctgcagcttttca

SEQ ID NO: 13048 - DNA, 60 bp, Homo sapiens
agctactcctatggcagtggtcttggcgttggaggtggcttcagttccagcagtggcaga

SEQ ID NO: 13049 - DNA, 60 bp, Homo sapiens
gcccagattccaacatctacaagaagcctcccatctataagcagagagagtccgtgggag

SEQ ID NO: 13050 - DNA, 60 bp, Homo sapiens
gatgagagaagctttcagtatgcagacatctatgagcagatgatgcttactgggcttggc

SEQ ID NO: 13051 - DNA, 60 bp, Homo sapiens
tgtcatctccagaattattggggtcacatatgtcccttcccagtccaatgccatctccca

SEQ ID NO: 13052 - DNA, 60 bp, Homo sapiens
agaatggaagctctaacactggagccaagcaggcaggaccacaggatactgttgtgtaca

SEQ ID NO: 13053 - DNA, 60 bp, Homo sapiens
caaaggaggcagcactgacctgctatggcgtcttttcagtctactctacctaaagtgcac

SEQ ID NO: 13054 - DNA, 60 bp, Homo sapiens
gactacgttggcttcaccaattcctactttggcaactaataagcagctcctcgtggatcg

SEQ ID NO: 13055 - DNA, 60 bp, Homo sapiens
agacgtgtgcagagaatgtgctcttcggaggaagaacactgatgagcgagctctgtacca

SEQ ID NO: 13056 - DNA, 60 bp, Homo sapiens
ccttcaccctctgtgtcctggtccttctgagggccactgcagatgactctcctttgaaat

SEQ ID NO: 13057 - DNA, 60 bp, Homo sapiens
agagagtggtgttcacggagcacttctggccttagatgaaaccttcgacttcagtgcact

SEQ ID NO: 13058 - DNA, 60 bp, Homo sapiens
tggaggcccaactgatgcagattcggagtaacatggaacgccagaacaacgaataccata

SEQ ID NO: 13059 - DNA, 60 bp, Homo sapiens
catatattcctgtcgtagaagttgagattgctagggtccagtttccctagtgtggcctgg

SEQ ID NO: 13060 - DNA, 60 bp, Homo sapiens
ttccttttccctgcttccaggaaactccacatctgccttaaaaccaaagagggcttcctc

SEQ ID NO: 13061 - DNA, 60 bp, Homo sapiens
ctccagagtttgtgaaggggtgtaaacatgtcggagtctggggagatgagtgaatttggc

SEQ ID NO: 13062 - DNA, 60 bp, Homo sapiens
ccaggaggaactagaggttgcacgattaagggaagaagtagtgaccaagatcagggccaa

SEQ ID NO: 13063 - DNA, 60 bp, Homo sapiens
gtggcaccctgttggcagacagtgaagacattaccagagagtgtatctgggaattttagg

SEQ ID NO: 13064 - DNA, 60 bp, Homo sapiens
gtgaaccagtcagagactctctctcctattagccttaaataagcaagctgccatgagctc

SEQ ID NO: 13065 - DNA, 60 bp, Homo sapiens
tgatgagtgcacagacgatcacatctgaaaccaccagtaccaccaccactacgcacatca

SEQ ID NO: 13066 - DNA, 60 bp, Homo sapiens
gtggaaataagcctgcagcagatgaaagccaatgatcctagcttgcaagaagtcaacctc

SEQ ID NO: 13067 - DNA, 60 bp, Homo sapiens
caccacactggaaaagtgaaacatctcattcagttggtgatcttcctgtcatgaaagttg

SEQ ID NO: 13068 - DNA, 60 bp, Homo sapiens
gttccacgctatcaaaaatgcaattgacagattgccaaaggattcaagttgtccatcaag

SEQ ID NO: 13069 - DNA, 60 bp, Homo sapiens
tataaaggggcaagagcagctcctttggactattcctgggaggactctgatgcagggcgt

SEQ ID NO: 13070 - DNA, 60 bp, Homo sapiens
gtcattatgagcgtctggcaaatcttcgacgatcccatatattagagctcacctctgtca

SEQ ID NO: 13071 - DNA, 60 bp, Homo sapiens
ttgccagctcgacgtgggacgtgagatgaagctgctgacagagcttaacttcctgcgagt

SEQ ID NO: 13072 - DNA, 60 bp, Homo sapiens
ccttcctgatgcaaattgaccaggagacaaagaagtgcaccttctattccagcactgggg

SEQ ID NO: 13073 - DNA, 60 bp, Homo sapiens
accctcattcagatacatggacagaaattggtaacatgatcaccagtcgttgtgaagggg

SEQ ID NO: 13074 - DNA, 60 bp, Homo sapiens
gccagtgaccagccatggtctggactgtgaagttcactaccatttgtcaagaatcaccct

SEQ ID NO: 13075 - DNA, 60 bp, Homo sapiens
ggtacctgctgccactcatcacagagcccttcttggtagaaatgatgtcagcattcttat

SEQ ID NO: 13076 - DNA, 60 bp, Homo sapiens
ggcaggaatgcaactgcaggcctcaagaatccccttatgtttctgggatgaaaacctgtc

SEQ ID NO: 13077 - DNA, 60 bp, Homo sapiens
tgagcgaatcccaaccataagcacccagctcaaaatcctgtccacagtgaaggccaccat

SEQ ID NO: 13078 - DNA, 60 bp, Homo sapiens
tgtgcgtacccagttcacctggacatgagtgcacactctcacccctgcacatgcataaac

SEQ ID NO: 13079 - DNA, 60 bp, Homo sapiens
ggatagctgggtccattcagagcaccttgagaagtgttgcagggaggtgttaagaagaga

SEQ ID NO: 13080 - DNA, 60 bp, Homo sapiens
gtatgttgggacaaacacgctgttgctaaatggaaacactgacctcacagtgcatcctcc

SEQ ID NO: 13081 - DNA, 60 bp, Homo sapiens
gctggatcagagcacggactttgaagagcggaagctcatccgggctgcacttcgtgagct

SEQ ID NO: 13082 - DNA, 60 bp, Homo sapiens
agcggcgggaggatcaagccgaagcctgtggaggtccaggtggtcacgcatcacatgcag

SEQ ID NO: 13083 - DNA, 60 bp, Homo sapiens
gccgaagcaggagatgctcctcagcctgaagccctcggaggcccctgaactggatgagga

SEQ ID NO: 13084 - DNA, 60 bp, Homo sapiens
ccaggactttgagcatgtctcggtgctgcaggagaaattctcagagtttgccagcgagac

SEQ ID NO: 13085 - DNA, 60 bp, Homo sapiens
cccctgaactatcagcttaaacttccagctctatcaccactctcctgccaacccttgttc

SEQ ID NO: 13086 - DNA, 60 bp, Homo sapiens
gttactaagcttgatatcttccaaactttgcaataaatggctataattgttccggttact

SEQ ID NO: 13087 - DNA, 60 bp, Homo sapiens
tgtcaggctcaatgacagcatcttgcaggccactgagcagcgaaggcgagctgaagaaaa

SEQ ID NO: 13088 - DNA, 60 bp, Homo sapiens
tagaacgtgatgagtcatcatccaagaagagtcacacacctgaacgcttcaccagccagg

SEQ ID NO: 13089 - DNA, 60 bp, Homo sapiens
agaccaactgcagggctatgagcggaagaacatcgacctcacagccatcatatcagacct

SEQ ID NO: 13090 - DNA, 60 bp, Homo sapiens
ctcccctggtgaagacacaaactgtcaccatctcagataatgccaatgctgtgaaaagtg

SEQ ID NO: 13091 - DNA, 60 bp, Homo sapiens
caagattctgcgtatcactcaggaatacagtcacgtggcagtcctcacagttctagttct

SEQ ID NO: 13092 - DNA, 60 bp, Homo sapiens
aagagcctgcagcagagctgggagttgctggccacacacgagaaccatctgaatcaggat

SEQ ID NO: 13093 - DNA, 60 bp, Homo sapiens
ttgaaagaactgcaaattgtccttgccagctcttgggatccttggatacctggggccatt

SEQ ID NO: 13094 - DNA, 60 bp, Homo sapiens
gcgtcgcctttgattaccgaaagcgcaaacatgtcttcaagctgggcttacaggatggaa

SEQ ID NO: 13095 - DNA, 60 bp, Homo sapiens
ttcaaattgcaggaccaagccctaaaggaaagcatcccatttgcagtaattggcagcaac

SEQ ID NO: 13096 - DNA, 60 bp, Homo sapiens
actgacttggcatatgtgctctggctttccattggcttccaaccctgcttggctttggat

SEQ ID NO: 13097 - DNA, 60 bp, Homo sapiens
agaggcacattcgtgcacattctcacagacaccgtctcacacgttggctttggacaacca

SEQ ID NO: 13098 - DNA, 60 bp, Homo sapiens
gaggacatctatgctaatatccctgaccttccaaagtcctacataccttctaggttaagg

SEQ ID NO: 13099 - DNA, 60 bp, Homo sapiens
agaagaaagtaggcgtgttcgccgcaataaaagaagcaaaagcaatgaaggagcagatgg

SEQ ID NO: 13100 - DNA, 60 bp, Homo sapiens
tatagaatagaaataagtgcaggcttggaatcagctacaaatcctaaagatggggtgtgt

SEQ ID NO: 13101 - DNA, 60 bp, Homo sapiens
cctcctcttagaagagtcaaatgttcagccagtatcaacaccagtaacagtgtgtggaga

SEQ ID NO: 13102 - DNA, 60 bp, Homo sapiens
cagaagtgacaggaacaggtcttggaaggaacagaaagaaactgtcttcctatccaaagc

SEQ ID NO: 13103 - DNA, 60 bp, Homo sapiens
ctttgcgttgtgtggtagcattttggggaatagattcctggaagtgcaatttcaagatcc

SEQ ID NO: 13104 - DNA, 60 bp, Homo sapiens
tcgtcagagacactgcctagcccaagcctgtctttcccagcgtcatgtttgtgtcacaaa

SEQ ID NO: 13105 - DNA, 60 bp, Homo sapiens
gcggagatgcaggaagttggtgttggcctatatcccagtatctctttgctcaatcacagc

SEQ ID NO: 13106 - DNA, 60 bp, Homo sapiens
tggcttgtgtgctggatgaggctgccagaacttgttgggcgttcatcgctgttagtacat

SEQ ID NO: 13107 - DNA, 60 bp, Homo sapiens
ttcagttctacaagctacctggggcatctatgacaaggactcagtgcttcggaaagccct

SEQ ID NO: 13108 - DNA, 60 bp, Homo sapiens
gcctgttctacgtagtggctcgtggtttccagtttgaagagagttgtgcccctaaaagtg

SEQ ID NO: 13109 - DNA, 60 bp, Homo sapiens
gtatcgctaccaacggtggaagtccaagctctactccattgtttgtgggaaatcgacacc

SEQ ID NO: 13110 - DNA, 60 bp, Homo sapiens
ctgggactcccatgtgctgccgtctgatgtgctcagatgggctcatcgttggttcgtttt

SEQ ID NO: 13111 - DNA, 60 bp, Homo sapiens; identical to SEQ ID NO: 4855

SEQ ID NO: 13112 - DNA, 60 bp, Homo sapiens
aacttctgcggagactcttcacagaggccctctatgaggaagcagtcagccagtggttca

SEQ ID NO: 13113 - DNA, 60 bp, Homo sapiens
accccactcacccccttagggtcgccacccctcacggcaacttgtgcctggcgtcaataa

SEQ ID NO: 13114 - DNA, 60 bp, Homo sapiens
gcgtgcaccgctgttctgggtattcatttttcatcactgagcattgttgatctatgcctt

SEQ ID NO: 13115 - DNA, 60 bp, Homo sapiens
ctaatggtcacttgatgtgcgctggctgttttatccacctactagcagatgcccggctga

SEQ ID NO: 13116 - DNA, 60 bp, Homo sapiens
cctggctcgtcctagaatcatttctcctccatgatggaagcccagtgattgttcagttaa

SEQ ID NO: 13117 - DNA, 60 bp, Homo sapiens
tagagttgcaggagaagccggacctggctgagagcccaaaggagtcaaggtcgaagtttt

SEQ ID NO: 13118 - DNA, 60 bp, Homo sapiens
ttcttgaatccattgcagattgacttccactcccactccttcactaaaagggctcttacc

SEQ ID NO: 13119 - DNA, 60 bp, Homo sapiens
tattcataatgtcgtgtgcttaaaagtgggctttgaagtgtgtgctgcttactcctttca

SEQ ID NO: 13120 - DNA, 60 bp, Homo sapiens
gcactgcttcatccaagctgctgacctcctcatggccgacttcaaagtgctcagtagtca

SEQ ID NO: 13121 - DNA, 60 bp, Homo sapiens
agctcgccgcctgattctaggctggtcactactccgagcctgtgacgtttgcggcagcca

SEQ ID NO: 13122 - DNA, 60 bp, Homo sapiens
tctagagactgtgtatgagaagttccacccctcgattcagtccttcaccgatgtcatcgg

SEQ ID NO: 13123 - DNA, 60 bp, Homo sapiens
ttgatggaaggagctagttttcctgagcctgtgtgtgcaccaggcactggggctgatgtt

SEQ ID NO: 13124 - DNA, 60 bp, Homo sapiens
aggggatcatttgcttctcggttctcaacgtgatgaggaaatggtgctgtttgctggcac

SEQ ID NO: 13125 - DNA, 60 bp, Homo sapiens
aggcgtgggaaactctggcttaggaaaacatgaacacaggggcaacagaggcaaactgtt

SEQ ID NO: 13126 - DNA, 60 bp, Homo sapiens
aggtgaccttctgggaaatggcttgaagccaagtcagctttgccttccacgctgtctcca

SEQ ID NO: 13127 - DNA, 60 bp, Homo sapiens
gagacttcctgccccacccagtgggtaggccaagtgtgttgcttcagcaaaccggaccag

SEQ ID NO: 13128 - DNA, 60 bp, Homo sapiens
gtcattggccatagttatggaactgcatttgaagtgaccagtggaggaagtctacagccc

SEQ ID NO: 13129 - DNA, 60 bp, Homo sapiens
tggcatctagtccaaacaagactgaagaatgtgctgatggagcagtgctgtttctgcatt

SEQ ID NO: 13130 - DNA, 60 bp, Homo sapiens
cccttccaggtgcttctaatgggtgttgccatagcagacgctgctaatgcatcacagcat

SEQ ID NO: 13131 - DNA, 60 bp, Homo sapiens
ttttcagcaactaaggtgcctcatgttctgagttcagcagatataggaaccaagccgccc

SEQ ID NO: 13132 - DNA, 60 bp, Homo sapiens
agggtggagaaggaggcccttgcttggcgtgggggatggcttaactgtacctgtttggat

SEQ ID NO: 13133 - DNA, 60 bp, Homo sapiens
cccatccgacatgaactagaggccccacccaggtgacgggacgcattcatctgtgtattg

SEQ ID NO: 13134 - DNA, 60 bp, Homo sapiens
gacaaatggaggcctgtcctgacctgtctcaccatgtacatagcttgataaagggccaat

SEQ ID NO: 13135 - DNA, 60 bp, Homo sapiens
gaagaaaagtgcggactgggtatcagactggtccagtagacccgaaaacattccacccaa

SEQ ID NO: 13136 - DNA, 60 bp, Homo sapiens
gggagcaacagcacgtatcagaagccagacttgctcttcggtcatgcactttgggataca

SEQ ID NO: 13137 - DNA, 60 bp, Homo sapiens
gtaatgactggaatgtcagagtgtgggagtggattaatgattccggatctttggctaggc

SEQ ID NO: 13138 - DNA, 60 bp, Homo sapiens
aaggtagcttagcccatccagactggtcctgaagtctgtccctccattggcatgaagtct

SEQ ID NO: 13139 - DNA, 60 bp, Homo sapiens
aaaacgagtcggaccttctagctgcactctgtactgtgtgccgagaaggcatttctagac

SEQ ID NO: 13140 - DNA, 60 bp, Homo sapiens
tggcgtcgtgcccaccatgcactttactatcgctgagggctttgtcaaggccaccacagt

SEQ ID NO: 13141 - DNA, 60 bp, Homo sapiens
cccctatgtttccatattggacccacggacaggtcagaagctagtagaatggcaccagtt

SEQ ID NO: 13142 - DNA, 60 bp, Homo sapiens
cttcatagagggtggggtacttctccataaggcatctcagtcaaatccccatcactgtca

SEQ ID NO: 13143 - DNA, 60 bp, Homo sapiens
gctcttgcctggtaggaacaggcgaagtgtcagccctcaatgttgggtacttagacccaa

SEQ ID NO: 13144 - DNA, 60 bp, Homo sapiens
ccacagatagcatatgataccttcagacatagcttgaagtctgtaccccgaagtcagcca

SEQ ID NO: 13145 - DNA, 60 bp, Homo sapiens
atccctttacctttgaggtcagggacagggcatattactgacaccccactggctattgcc

SEQ ID NO: 13146 - DNA, 60 bp, Homo sapiens
ggacgaggagcttgaggcgctgaggagacagaggctggccgagctgcaggccaaacacgg

SEQ ID NO: 13147 - DNA, 60 bp, Homo sapiens
cactgtgtgtcagaacaactttctaacaaacatttattaatccagcctctgcctttcatt

SEQ ID NO: 13148 - DNA, 60 bp, Homo sapiens
gtgcctcggaaggactttgaagtagtggactcggaccagattagtgtctcagatctctat

SEQ ID NO: 13149 - DNA, 60 bp, Homo sapiens
ggagactaaggaagaagtaaccccagaacaactaaagctgatgagaactcaggacgtcaa

SEQ ID NO: 13150 - DNA, 60 bp, Homo sapiens
tctccaagcggtgactgttatgctttacagagtggggaagagggtctgggttatttgagg

SEQ ID NO: 13151 - DNA, 60 bp, Homo sapiens
gcagaggtgtgcatcaccttcgaccaggccaacctgaccgtcaagctgccagatggatac

SEQ ID NO: 13152 - DNA, 60 bp, Homo sapiens
gaggcctgctcctgtctctctggcaggagtgcctgtaccccaccaagccatgtgaataaa

SEQ ID NO: 13153 - DNA, 60 bp, Homo sapiens
aagatggtgccactggtggctgtggtatcagggccccgtgcccagctctttgcctgcctg

SEQ ID NO: 13154 - DNA, 60 bp, Homo sapiens
ggatgatcccttatcccttggaaaaggggcacctattttatccttacccaatctgtacag

SEQ ID NO: 13155 - DNA, 60 bp, Homo sapiens
tgtaatccgtctccacagacaaggccaggaccggcgtcaaaggtgaagcaggacatgcct

SEQ ID NO: 13156 - DNA, 60 bp, Homo sapiens
ggctgaggctcttacagtggtccctgctggcccttggtgacgggtcgcctcagttccgac

SEQ ID NO: 13157 - DNA, 60 bp, Homo sapiens
aagccaaggaatcgacatatattaggtgcgtgtactgtttctaaaaaccacaaactaaga

SEQ ID NO: 13158 - DNA, 60 bp, Homo sapiens
ggggttactctctaagacattctctgaggtgtgtgaggaagtcactactcctagcctttg

SEQ ID NO: 13159 - DNA, 60 bp, Homo sapiens
gcctaggggacatacaacgttcggtgtttcgtggttaccaacgggaatagtctgggttaa

SEQ ID NO: 13160 - DNA, 60 bp, Homo sapiens
gacccatgagaagacacctcgtggcttgtttgcaggtcctattggctattttaccgcaga

SEQ ID NO: 13161 - DNA, 60 bp, Homo sapiens
tctcaaagtccgtggctgtttccccttcactgactcagctagacccgtaagcccaccctt

SEQ ID NO: 13162 - DNA, 60 bp, Homo sapiens
ctctggacacaggctggaccagatgctgtggatgtcgacccctgcactgactattggata

SEQ ID NO: 13163 - DNA, 60 bp, Homo sapiens
caccagtttccacctggagttcatgcaagggcaaaaggcagtgccatgcaagctgtttaa

SEQ ID NO: 13164 - DNA, 60 bp, Homo sapiens
ctgagaccaactatctaggaaatacacccaccatgccattcagctccttgccaccaacag

SEQ ID NO: 13165 - DNA, 60 bp, Homo sapiens
tctttgccatcctggagtacactgttgtcttaaccaacatggcgttccacatgacggcct

SEQ ID NO: 13166 - DNA, 60 bp, Homo sapiens
ctggttacggtaactaaaagcctgtctgccaaatccagtggaaacaagtgcatagatgtg

SEQ ID NO: 13167 - DNA, 60 bp, Homo sapiens
agacatccagtcttccacactcaactgtgggatgggagggtggcgtggctttaccccatg

SEQ ID NO: 13168 - DNA, 60 bp, Homo sapiens
gggtattaaggacctttgtgaggctaggtacactgtccacacctctttggggaagttacg

SEQ ID NO: 13169 - DNA, 60 bp, Homo sapiens
ctcaatggaaggatcctgccttaagtcaacttatttgtttttgccgggaaagtcgctaca

SEQ ID NO: 13170 - DNA, 60 bp, Homo sapiens
gttgagtcacaagagaagcctgtcttgatatatcatctcagaaactttcctgaatatgtg

SEQ ID NO: 13171 - DNA, 60 bp, Homo sapiens
caattttaggtggcagtcgcaacccatactattcggacagatggcacagaaaccgctgcg

SEQ ID NO: 13172 - DNA, 60 bp, Homo sapiens
tacctcctctataagacaggagtggcgaactggctgacggagctggagatctttgctata

SEQ ID NO: 13173 - DNA, 60 bp, Homo sapiens
caatgtccaagacacagcagaacagaaagttcaactgcttcgtaattggcatcaacttca

SEQ ID NO: 13174 - DNA, 60 bp, Homo sapiens
aaaggaagacttctggcttctcctaaatctccgttctctgggtaaggggagtccaagcct

SEQ ID NO: 13175 - DNA, 60 bp, Homo sapiens
ccacaagtggccgacatggaacatgctgagcagtggctcctctgaatgttcactttatta

SEQ ID NO: 13176 - DNA, 60 bp, Homo sapiens
ttcctgaaggctgccttcttcgtgctgctgccagagagatgagctgcccacctggcagtg

SEQ ID NO: 13177 - DNA, 60 bp, Homo sapiens
ttcaggaaacgaaaccaggagccgcgggtgttggcgcaaaggttactcccagaccctttt

SEQ ID NO: 13178 - DNA, 60 bp, Homo sapiens
acccctggcatctcatatgcgttggtttatctggctcatggcagctggaggaaccattta

SEQ ID NO: 13179 - DNA, 60 bp, Homo sapiens
taaagagagcaactcctgactccgagagagactggatggacccacaagggtgacagccca

SEQ ID NO: 13180 - DNA, 60 bp, Homo sapiens
gctgcaagattacttctttcttcagtgacaaaagtgttgttgctggcagaccgagtagtc

SEQ ID NO: 13181 - DNA, 60 bp, Homo sapiens
ttgtgactacaaatcccagaatgctctggagctaggaaggaacaggacggctttggggag

SEQ ID NO: 13182 - DNA, 60 bp, Homo sapiens
ccagacctatgttctgcttgcgtttttgaaacaggaggtgcacgtaccacccaattatct

SEQ ID NO: 13183 - DNA, 60 bp, Homo sapiens
gagtcctggctgattcttttcctggcagttccccttatgagggttacaactatggctcct

SEQ ID NO: 13184 - DNA, 60 bp, Homo sapiens
gcaagttcctgaccacagggagtaaattggcctctttgatacacttttgcttgcctcccc

SEQ ID NO: 13185 - DNA, 60 bp, Homo sapiens
ggcgtggtcaacatccctgccgcagagtgcttagatgagtacgaagatgatgaagcaggg

SEQ ID NO: 13186 - DNA, 60 bp, Homo sapiens
gaaagcctgagtgttcttagatggggttattctgagatgagggtcttagcctacagttct

SEQ ID NO: 13187 - DNA, 60 bp, Homo sapiens
cctggcatgtcaacagcgttcctagagaagacaggctggaagatagctgtgacttctatt

SEQ ID NO: 13188 - DNA, 60 bp, Homo sapiens
gctttagggactggacttgcagtgtaaacagagacgctgcaaattgcttgtggacggtgt

SEQ ID NO: 13189 - DNA, 60 bp, Homo sapiens
tactatcaagagaagagcctaggagcacagcgagggaatgaaccttacttgcactttatg

SEQ ID NO: 13190 - DNA, 60 bp, Homo sapiens
gataaggcaactgggctggtcttactttgcatcacctctgctttcctccactgccatcat

SEQ ID NO: 13191 - DNA, 60 bp, Homo sapiens
tcaaggattctggagtgaagcagatgttactcgaccttttgtctcccaggctgtgatcac

SEQ ID NO: 13192 - DNA, 60 bp, Homo sapiens
cacagtcatctccttggtgaaatctaatccggttacattgtggctggtttcttgaacaca

SEQ ID NO: 13193 - DNA, 60 bp, Homo sapiens
tcactgggaggacctgtgaaagaaagttggtcactgagtgccttggggactggcaaaaca

SEQ ID NO: 13194 - DNA, 60 bp, Homo sapiens
gtgtgctgactgatctttccagtcttctgactcgaggaagtgggaaccaggagcaagaga

SEQ ID NO: 13195 - DNA, 60 bp, Homo sapiens
atttggcgggaaatcgtgtgagcagtgatggatggcttgccttcatgggtgtatttgaga

SEQ ID NO: 13196 - DNA, 60 bp, Homo sapiens
aaaccttggggtctaggacggaggatggcattgagaggcttgctggttatgaggcagaaa

SEQ ID NO: 13197 - DNA, 60 bp, Homo sapiens
acggaaagtccgtgacagggaccgatgtggacatcgtcttctccaaagtcaaggggaagt

SEQ ID NO: 13198 - DNA, 60 bp, Homo sapiens
attacgtctcagactacagcagagtcacacgcgtaaatgcagaaacgcggacagagagtg

SEQ ID NO: 13199 - DNA, 60 bp, Homo sapiens
gccaaaatggaggtacagtgattctaatggatggaaagtgtttgtgtgcctgcccattca

SEQ ID NO: 13200 - DNA, 60 bp, Homo sapiens
cggaccaagatgttcctttacctgtcagatttgtccaggaaggaccggagaattgtcagc

SEQ ID NO: 13201 - DNA, 60 bp, Homo sapiens
aagttcacagtgacctttgagagtgacaaattcaaggtgaagctgccagatgggcacgag

SEQ ID NO: 13202 - DNA, 60 bp, Homo sapiens
ggatggagacttcaagattaaagtgcgtggcctttgagtgaagccagccagcctgtagcc

SEQ ID NO: 13203 - DNA, 60 bp, Homo sapiens
tgctggacctgtggctgtggcacagacaccaactttgaggtgaagactcgggatgaatcc

SEQ ID NO: 13204 - DNA, 60 bp, Homo sapiens
atccttactgcactgagggagaagcaggctccagagctgagcttatctagtcaggatttg

SEQ ID NO: 13205 - DNA, 60 bp, Homo sapiens
tgcgcaaccttaagaacaagattgagaacaagatcgagagcattggtctcaagcggacgc

SEQ ID NO: 13206 - DNA, 60 bp, Homo sapiens
agatcgatggccttgtccatgttgtcctttctggcttccctgatggtgtcatgtttcagc

SEQ ID NO: 13207 - DNA, 60 bp, Homo sapiens; identical to SEQ ID NO: 4855

SEQ ID NO: 13208 - DNA, 60 bp, Homo sapiens
atcaaagcggaatcgagagtgtctccaggagagtgatgagatcccaagggactttaccac

SEQ ID NO: 13209 - DNA, 60 bp, Homo sapiens
atgaattcctatggctctgcaattgtcaccggttaactgtggcctgtgcccaggaagagc

SEQ ID NO: 13210 - DNA, 60 bp, Homo sapiens
ccatcctggagtaccttcctccagacgacagcaacacacgcaggaacattctctacaaaa

SEQ ID NO: 13211 - DNA, 60 bp, Homo sapiens
ctgtttaggccccaaaacgtgctccagatgccacaaagcatattactgcagcaaggagca

SEQ ID NO: 13212 - DNA, 60 bp, Homo sapiens
gtggacacttactgtcctctaccacagctacgtgccagagttgttttccacagttcttat

SEQ ID NO: 13213 - DNA, 60 bp, Homo sapiens
tgaataatgctcgtgtgcagcatgaaggagaggtctctcagaactcaagggcctgaagct

SEQ ID NO: 13214 - DNA, 60 bp, Homo sapiens
ttgtgaccgttagtctctaagctttaccaggagcagcctgggttcagccagtcagtgact

SEQ ID NO: 13215 - DNA, 60 bp, Homo sapiens
ctatttgcctatagagatgagtctgtcctggtcataactgtgtgctcaaggtgtccaggc

SEQ ID NO: 13216 - DNA, 60 bp, Homo sapiens
cttcaaccgctggttcctgacgggcatgactgtggccggcgtggttctgctgggctcact

SEQ ID NO: 13217 - DNA, 60 bp, Homo sapiens
atccactcgccatttgctgacatgagattgggaggaagaatccagaggtgaagagggaga

SEQ ID NO: 13218 - DNA, 60 bp, Homo sapiens
atggtatttctaggggaggtggtaggctgcatgtgccacttggtcttgttgtgagtatgc

SEQ ID NO: 13219 - DNA, 60 bp, Homo sapiens
ggatgggctgggcgatgcagctggatgcacatctcattctgtcatgaatgtccagtaaaa

SEQ ID NO: 13220 - DNA, 60 bp, Homo sapiens
agctcccgactaacagctccattccggaaacatgtcaggcccaagaagcagcatgagatc

SEQ ID NO: 13221 - DNA, 60 bp, Homo sapiens
gagccctgctcttcttcagccatggccagcaaaacagtgcagcagacttgtccatgctgg

SEQ ID NO: 13222 - DNA, 60 bp, Homo sapiens
gctggacatgtattggagacctaaatcggagtccacaccaagccttcagaagtggaggat

SEQ ID NO: 13223 - DNA, 60 bp, Homo sapiens
tattccccagactactcccttgcagcagtggacctgaagagtttcaagaacaacctggtg

SEQ ID NO: 13224 - DNA, 60 bp, Homo sapiens
accagcctgaaccatttggtacctggtgttaactggagtcctgtttacaaggtggagtcg

SEQ ID NO: 13225 - DNA, 60 bp, Homo sapiens
gtcattactggtgggatctggtcacacaagatagcattaaacgtgacatggcacataaaa

SEQ ID NO: 13226 - DNA, 60 bp, Homo sapiens
ccaccctccaatctgcactttgatttgcttcctaacagctctgttccctcctgctttggt

SEQ ID NO: 13227 - DNA, 60 bp, Homo sapiens
tttgtggcctttaccttgtgcaattttagggagtagcagtgtaaaaggtccaagaccaca

SEQ ID NO: 13228 - DNA, 60 bp, Homo sapiens
ggagaatcaagtgttgggactaatatgggctgggcagatgctatggctaaagtcctcaac

SEQ ID NO: 13229 - DNA, 60 bp, Homo sapiens
caaagagggaccaatgtacaggaccaggtacaagactgcttattacttcaggcctaggga

SEQ ID NO: 13230 - DNA, 60 bp, Homo sapiens
gctgggtgagcacgaattaccgaggccttccctttgatacagtccaggatttgtaaggga

SEQ ID NO: 13231 - DNA, 60 bp, Homo sapiens
ttaaagagacggttttatctgccttaagtcgagagccgaccgtggacatatctccagata

SEQ ID NO: 13232 - DNA, 60 bp, Homo sapiens
ccagaacaaacccagcttttgtccacaaggtgactgtaactcagaatggaaagtgggctt

SEQ ID NO: 13233 - DNA, 60 bp, Homo sapiens
cacgtctcgatgggagcaccaacttcaccagaacatggcaagactacaaagcaggctttg

SEQ ID NO: 13234 - DNA, 60 bp, Homo sapiens
gtatcaggaggaaatgatccagcgctacctttctgatgctgaggagagattcctggcaga

SEQ ID NO: 13235 - DNA, 60 bp, Homo sapiens
cttgctcccaagtccttttggaagctggcagagctatattcctgacagccctgactgcca

SEQ ID NO: 13236 - DNA, 60 bp, Homo sapiens
cggcttggacaatgaaaccctgaccttgctgcattccttttgcttccaccaccactagct

SEQ ID NO: 13237 - DNA, 60 bp, Homo sapiens
tggaggaacctcagaaaagctatgtgaacacaatggaccttgagagagatgaacctctca

SEQ ID NO: 13238 - DNA, 60 bp, Homo sapiens
ggcttctggaagaaatgctaaccaaggaacttttggaactggattcagttgaaactgggg

SEQ ID NO: 13239 - DNA, 60 bp, Homo sapiens
gaggtttcatttcttacacaggtgttttcatcaccatcaattttacactgggggaaaaac

SEQ ID NO: 13240 - DNA, 60 bp, Homo sapiens
ttagatcctgggccttcgtggctcgagagactagaatcgcagatacgaaaaccccgcagc

SEQ ID NO: 13241 - DNA, 60 bp, Homo sapiens
cacaggcatcaccaccgtgtctaagaacaacatcttcatgtccaactcatatccccggga

SEQ ID NO: 13242 - DNA, 60 bp, Homo sapiens
ccagcctgctcgaaactttagtcggcctgatggcttagaggactctgaggatagcaaaga

SEQ ID NO: 13243 - DNA, 60 bp, Homo sapiens
cgtttgttcctaaatctaatcgagctcccaaggaactagtatcttatagaacacacatag

SEQ ID NO: 13244 - DNA, 60 bp, Homo sapiens
gtgactatcctgtgctcttcctagggagctgtgttgtttcccacccaccacccttccctc

SEQ ID NO: 13245 - DNA, 60 bp, Homo sapiens
acatggcggctccccaagacgtccacgtccggatctgtaaccaagagattgtcaaatttg

SEQ ID NO: 13246 - DNA, 60 bp, Homo sapiens
gtaccgtggtatccaccaccaacttcatcaaggcagaatacaagggccgagttactctga

SEQ ID NO: 13247 - DNA, 60 bp, Homo sapiens
ctccgctcagtccgggagcgcacgtgggccgcggcgctccgacctccgctttcccaccgc

SEQ ID NO: 13248 - DNA, 60 bp, Homo sapiens
tgccttgctgctgcaaccctttccccagctgtccactgaaacgtgaagtcctgttttgaa

SEQ ID NO: 13249 - DNA, 60 bp, Homo sapiens
gcaattggtttgtactcactgggctgtgctctcccctgtttacccgatgtatggaaataa

SEQ ID NO: 13250 - DNA, 60 bp, Homo sapiens
tgcgcttatcgcgagggtcacaaacgttgagtggctgctggatgctctgtacgggaaggt

SEQ ID NO: 13251 - DNA, 60 bp, Homo sapiens
acagtacacgaacctggggctcctgaacagcatggaccagcagattcagaacggctcctc

SEQ ID NO: 13252 - DNA, 60 bp, Homo sapiens
ggaaaacgagactgggactatggcttattcagtgatgactggcttgagatgataagagaa

SEQ ID NO: 13253 - DNA, 60 bp, Homo sapiens
cccttcactctacaggggacaggagaccatggattggaccccaaagggattgaactgcat

SEQ ID NO: 13254 - DNA, 60 bp, Homo sapiens
gaagtaggcagaactgaaaataccatcttctcttcaactacacttcccagacctggggac

SEQ ID NO: 13255 - DNA, 60 bp, Homo sapiens
gaaaggaggtcaaagtaaactgggcaaccacaccaagtagccagaaaaaagatacttcca

SEQ ID NO: 13256 - DNA, 60 bp, Homo sapiens
tggattccagcctgcaaaagctgttttgtgaagactaaaaccagtgaggagaggtggagg

SEQ ID NO: 13257 - DNA, 60 bp, Homo sapiens
aaagttggatgactacgcctctgcctttcaaggtcatgatgttggattctgttgcctggg

SEQ ID NO: 13258 - DNA, 60 bp, Homo sapiens
aagaaagtccatccgtagaagtacacactaacagagagagacaacaggcaacgagggagc

SEQ ID NO: 13259 - DNA, 60 bp, Homo sapiens
ttcagtttctttccagtacagtcatcccttgatacctgctgggtattggttccagcactc

SEQ ID NO: 13260 - DNA, 60 bp, Homo sapiens
gcccaagagttgcggcgtatcggagacgagtttaacgcttactatgcaaggagggtattt

SEQ ID NO: 13261 - DNA, 60 bp, Homo sapiens
acaaagttcgggtcatggcagactctatgcaagagaagcaacgtatggcaggacaaatgc

SEQ ID NO: 13262 - DNA, 60 bp, Homo sapiens
actagcggtggactgcgtccggcaagctcagccagccatggttcatgccctggttgactg

SEQ ID NO: 13263 - DNA, 60 bp, Homo sapiens
tgctcacagtcctcatttactggatttgacttcagccaggtgaactggaatgccttgggg

SEQ ID NO: 13264 - DNA, 60 bp, Homo sapiens
gctgctgagcctgatgggacaagtagttttgcgaacggcttaacctacagattgaagagg

SEQ ID NO: 13265 - DNA, 60 bp, Homo sapiens
agggattattcatactctcattgtggataatagagaaatcccagagattgcaagttaatg

SEQ ID NO: 13266 - DNA, 60 bp, Homo sapiens
tatagcataccacaccgggagcgttttattgtcgtcagagaaccaagtggcacactacgc

SEQ ID NO: 13267 - DNA, 60 bp, Homo sapiens
agagtgcttaggcccgaatgccggcccaaatcgttctactcaccgtgtcggaggccgaga

SEQ ID NO: 13268 - DNA, 60 bp, Homo sapiens
gctcaccaaaagaaagccagtaagaagaaggcccctcctgtgactaaagatccctcatca

SEQ ID NO: 13269 - DNA, 60 bp, Homo sapiens
agtgccaggtcagccaatgtgtcagcagttcacccttctactgccaaccatgcctagact

SEQ ID NO: 13270 - DNA, 60 bp, Homo sapiens
tctgatgtgtcctcattaattttcctcatgaaggattacatgggccgaggcaagataagc

SEQ ID NO: 13271 - DNA, 60 bp, Homo sapiens
gtcatttgaggatcattgtgcccctagaggtgccattagcagaatttgccaagatccgag

SEQ ID NO: 13272 - DNA, 60 bp, Homo sapiens
ggcaaacagatcagcagatcttcaggggagcagcaaaacaaaggacgcatagtgtcacca

SEQ ID NO: 13273 - DNA, 60 bp, Homo sapiens
gattaacaaagatggtgcttatggggcaggttccctaacagtcaggattccggttgcagt

SEQ ID NO: 13274 - DNA, 60 bp, Homo sapiens
caaatatggacaggactatagcactcactggaatgacctccttttctgcttgcgctgcac

SEQ ID NO: 13275 - DNA, 60 bp, Homo sapiens
gctctgaaccccagtgacttactcaggtcagtatctaatataagctcggagtttggacgg

SEQ ID NO: 13276 - DNA, 60 bp, Homo sapiens
tttcacctcccaagggttacagagcatttaccacctgcagaacctgaccattgaggacct

SEQ ID NO: 13277 - DNA, 60 bp, Homo sapiens
ccttaacgtgaaggccaccatgtatgagatgtactccgtgtcctacgacatccggtgcac

SEQ ID NO: 13278 - DNA, 60 bp, Homo sapiens
actcagattttggtggcttccgggtaaatgcagagctacaagcacgctctaacatctggg

SEQ ID NO: 13279 - DNA, 60 bp, Homo sapiens
tggacatcctgaaaagagtctgtgcccaaatcaacaagagcctgctgaagataatcaacg

SEQ ID NO: 13280 - DNA, 60 bp, Homo sapiens
agcatgttccagatcccagagtttgagccgagtgagcaggaagactccagctctgcagag

SEQ ID NO: 13281 - DNA, 60 bp, Homo sapiens
tttcccattaagtctgagaggcaagagctaggttaggcaaggaggtggttggccagagat

SEQ ID NO: 13282 - DNA, 60 bp, Homo sapiens
aaagatgccgaggcgctcttcaagtgcttccgaagcctgggttttgacgtgattgtctat

SEQ ID NO: 13283 - DNA, 60 bp, Homo sapiens
ttctctgccagtgacagacaggctcttagcagcttccagattgacgacaagtgctgaaca

SEQ ID NO: 13284 - DNA, 60 bp, Homo sapiens
ggaaagcagaaaccaagctggcagaagcacagatagaagagctccgtcagaaaacacagg

SEQ ID NO: 13285 - DNA, 60 bp, Homo sapiens
ccatgtggagctgggacgtggagtgcgatacgtgcgccatctgcagggtccaggtgatgg

SEQ ID NO: 13286 - DNA, 60 bp, Homo sapiens
actggaacatacaacacccgagcaaggacgcgactctcccgacgcggggaggctactctg

SEQ ID NO: 13287 - DNA, 60 bp, Homo sapiens
gtcacaggagatgtttgttgggattgtggggaaccagttcaagtggaatgggaaaggtag

SEQ ID NO: 13288 - DNA, 60 bp, Homo sapiens
gagccctgcagaccttgacaatttgcctgactcattcctgacctcttgtcattttggcct

SEQ ID NO: 13289 - DNA, 60 bp, Homo sapiens
agattatgtgcaagatcctcaaggacagtgacctgctggaccgacggaaacagtgcttca

SEQ ID NO: 13290 - DNA, 60 bp, Homo sapiens
tcagtttgagtggctggctgacatcatccaagaggtggaggagaacgaccaccaggacct

SEQ ID NO: 13291 - DNA, 60 bp, Homo sapiens
cagaaggtgtgagctgtctctctgccaggagctaaggttcattaggggattggatggttt

SEQ ID NO: 13292 - DNA, 60 bp, Homo sapiens
caccgccaccggcaccctgtccatcgagatcctggaggtgaacgaccatgcacctgtgct

SEQ ID NO: 13293 - DNA, 60 bp, Homo sapiens
gcatgtatgctggcaatggcggactattgggagctgactttgctggagatctggattaca

SEQ ID NO: 13294 - DNA, 60 bp, Homo sapiens
gcgcttagaagaaatgacacagagaatggaagccctggaaaatcgcctgagatacagatg

SEQ ID NO: 13295 - DNA, 60 bp, Homo sapiens
ctgtgtggtgcagccctgttggcagtgggcatctgggtgtcaatcgatggggcatccttt

SEQ ID NO: 13296 - DNA, 60 bp, Homo sapiens
gttcattgaccttcttccccagtgggttagatgtgtatccccacgtactaaaagaccggt

SEQ ID NO: 13297 - DNA, 60 bp, Homo sapiens
aacctgactcatccagctgtccttcaaatagctccgtctccctctacccagaactgattt

SEQ ID NO: 13298 - DNA, 60 bp, Homo sapiens
gaactgaacattctccatgaacaggtggttggattggtatctgtcattgtagggatagat

SEQ ID NO: 13299 - DNA, 60 bp, Homo sapiens
acctcaaggtattcccggatgcaatggaaccaagggagaacgtggatttccaggcagtcc

SEQ ID NO: 13300 - DNA, 60 bp, Homo sapiens
tgtcttaccttcagtggttacttattccagagcttcttgaactgatacgagttgaatggc

SEQ ID NO: 13301 - DNA, 60 bp, Homo sapiens
gaacctggtcgagtggtcagtttcctcggcagcggtaggcgagagcacgcggaggagcgt

SEQ ID NO: 13302 - DNA, 60 bp, Homo sapiens
ggaggaacgcatgtgggctgccatccagagctgggacataaactctcggagaaacatcaa

SEQ ID NO: 13303 - DNA, 60 bp, Homo sapiens; identical to SEQ ID NO: 4855

SEQ ID NO: 13304 - DNA, 60 bp, Homo sapiens
acaggcatgtagaggacttatgatcgctgctgtcagcctgggcttctttggttccatatt

SEQ ID NO: 13305 - DNA, 60 bp, Homo sapiens
gactcgcggacatgtatgggactggccaagagagtttgtactcatagccttggaacctta

SEQ ID NO: 13306 - DNA, 60 bp, Homo sapiens
ctcaagaccttgttttgctgtcttcatcatcttacctgtgcttggcccacagtctggctc

SEQ ID NO: 13307 - DNA, 60 bp, Homo sapiens
aatttcctctttgggatttgccagcgccaagactgtcggaataaaggacgctgactattg

SEQ ID NO: 13308 - DNA, 60 bp, Homo sapiens
atcaaggttcaaagcagctcagaggagcaagcaaggtgccgaatggatgtccccaaacca

SEQ ID NO: 13309 - DNA, 60 bp, Homo sapiens
ggttcaccatctaaacaagaaagtagtgagagtttgccaaaagaagcctttctggtcctc

SEQ ID NO: 13310 - DNA, 60 bp, Homo sapiens
atagtcacaacccaggtgacgatgccctctcagccaacactgccaacctgaccctgtcat

SEQ ID NO: 13311 - DNA, 60 bp, Homo sapiens
catataccaagtaggtgctttgaacccctttctgtaggctcacaccttaatctcaggccc

SEQ ID NO: 13312 - DNA, 60 bp, Homo sapiens
acctacgagtgttctgtctcgctgatgtcagacctggagggcaacaccaagtcacgtgtc

SEQ ID NO: 13313 - DNA, 60 bp, Homo sapiens
atatcagatgggatatctccttccattccccggtccaggggagagtcactagttgtaccc

SEQ ID NO: 13314 - DNA, 60 bp, Homo sapiens
tgtgtagagtgtatgtagccaggagtggtggggaccagaagcctctgtggcctttggtga

SEQ ID NO: 13315 - DNA, 60 bp, Homo sapiens
ggagagatccttccctgatcctttcggacgactacttggagccataagtaacctcagcaa

SEQ ID NO: 13316 - DNA, 60 bp, Homo sapiens
cctgagaggtctctatcagtgtcctgcctgaattctttccttcaagtgaagatgtgactg

SEQ ID NO: 13317 - DNA, 60 bp, Homo sapiens
ttgaatgaagttggagggacattgaatgatggtcagagggcagacgaatgtgtcgtgggg

SEQ ID NO: 13318 - DNA, 60 bp, Homo sapiens
cacgggttcaagtcctttgagatgttctacaaagcagctcgttgtgatgacacagatctg

SEQ ID NO: 13319 - DNA, 60 bp, Homo sapiens
cggatataacccctgactctgtgggcctctcatggacagtccctgagggtgaattcgact

SEQ ID NO: 13320 - DNA, 60 bp, Homo sapiens
atcaggaaggcccagctgaaatcagagaatctgctcgaagaagagaattaggacctgcta

SEQ ID NO: 13321 - DNA, 60 bp, Homo sapiens
ttttcactttgaaagagcttttagcaaggttgtgcttttcattgtgctctgtacgtatat

SEQ ID NO: 13322 - DNA, 60 bp, Homo sapiens
ttaccctgagtctcttgctgggcgggcgcgtttgcgccgccgtcactcgctgtgggttcg

SEQ ID NO: 13323 - DNA, 60 bp, Homo sapiens
gggagcatagaactgtctggtttgcagacctatctcttgtgtctcctgatttatcccgcc

SEQ ID NO: 13324 - DNA, 60 bp, Homo sapiens
aagagacgaggttccctgatctcatgggacttaggttctggtgaagggagacaatcagtg

SEQ ID NO: 13325 - DNA, 60 bp, Homo sapiens
gcccattctcaggtcaaaagcaagatttctactgtcatgtgggatttggatggtcctggg

SEQ ID NO: 13326 - DNA, 60 bp, Homo sapiens
atgcttgtgacagcgatcaagaccaggatggagacggacatcaggactctcgggacaact

SEQ ID NO: 13327 - DNA, 60 bp, Homo sapiens
tccagtgaggcagtgcagtatgctgtgaggggtgacggtggcaaggtggagtgtttcatt

SEQ ID NO: 13328 - DNA, 60 bp, Homo sapiens
cgcatgagtacttgaacatggacaaagtgccaggcttctaccagttcttctacagctccg

SEQ ID NO: 13329 - DNA, 60 bp, Homo sapiens
gggaagatttcagtgacagtatcagaaacatttgacccagaagagaaacattccatggcc

SEQ ID NO: 13330 - DNA, 60 bp, Homo sapiens
ttaaggaatggtactgaggcatttgactcctgggagaagccccctctgcctgtgtatact

SEQ ID NO: 13331 - DNA, 60 bp, Homo sapiens
ggagtcacccatgaagaagctgttgccatccttaaacggacaaaaggcactgtcactttg

SEQ ID NO: 13332 - DNA, 60 bp, Homo sapiens
gcctgtgtgggtgatcattttagcagttctagcaggattgttgctactggctgttttggt

SEQ ID NO: 13333 - DNA, 60 bp, Homo sapiens
atccagtatggccacaggaggaggtccctttgaagatggcatgaatgatcaggatttacc

SEQ ID NO: 13334 - DNA, 60 bp, Homo sapiens
cagaacataaatgcacaaaatctgtacatgtctcccatcagaaagattcattggcatgcc

SEQ ID NO: 13335 - DNA, 60 bp, Homo sapiens
acacgtaagcacattcgggccatttccgtggtttctcatgagctgtgttcacagacctca

SEQ ID NO: 13336 - DNA, 60 bp, Homo sapiens
aaagaaaacgacgcagacccaagtgcacctccatatgattcgctggcaacgtatgcctat

SEQ ID NO: 13337 - DNA, 60 bp, Homo sapiens
gggagcagcaaatggagacagctattttgggacgagtcaatcaactgctggacgagaaat

SEQ ID NO: 13338 - DNA, 60 bp, Homo sapiens
acgaacatatcgactccctgtcgagcttcaaggaggctgtcaagaacctcgagtggattg

SEQ ID NO: 13339 - DNA, 60 bp, Homo sapiens
aacatcatcagcaacctcttcaaggaggactgccaccagaagatcgatgacctcttctcc

SEQ ID NO: 13340 - DNA, 60 bp, Homo sapiens
gtgggaaccacgtctgctaacttggagccccagtgccaagcacagtgcctgcatgtattt

SEQ ID NO: 13341 - DNA, 60 bp, Homo sapiens
agcagcaacctggagaaaattgtcaacccaaagggtgaagaaaagccatctatgtactga

SEQ ID NO: 13342 - DNA, 60 bp, Homo sapiens
ctgctctgaaggaccatcaggtccggactcatggaagtgatgactctaaacagtgcaatg

SEQ ID NO: 13343 - DNA, 60 bp, Homo sapiens
taatttccagcagtgttataagcgaggagggacatctggtggtccacgagcaaattcgag

SEQ ID NO: 13344 - DNA, 60 bp, Homo sapiens
cagtgtctgtacccttggcatcggcatctgtgactctttatccatgacctcagtgtttct

SEQ ID NO: 13345 - DNA, 60 bp, Homo sapiens
tggccactttactactcctaaggctaagatgttgagagctcagaccactgctcagagcag

SEQ ID NO: 13346 - DNA, 60 bp, Homo sapiens
ttacagtggctataacatttcccattcccatcaagtgtgtgaggtggtgtaacatgtggg

SEQ ID NO: 13347 - DNA, 60 bp, Homo sapiens
cagtggctagaggtatggatggagcaaggtcaaatatgagctgatggagctgggagctaa

SEQ ID NO: 13348 - DNA, 60 bp, Homo sapiens
gcatcctgagctgtgtgatacagtagatttcttcttagcagaaacatgcgaggtagattt

SEQ ID NO: 13349 - DNA, 60 bp, Homo sapiens
gcactgctagaccacatttgggtgacaaggtggcttgatgatattggcttaccccagtac

SEQ ID NO: 13350 - DNA, 60 bp, Homo sapiens
attccacctcctggctccaagctaagtcactcaacagaatgacagcgaacctcctggacc

SEQ ID NO: 13351 - DNA, 60 bp, Homo sapiens
tgatggagatttctcctgcgctaagccaagagaaggtttcagcacttcagacagctccca

SEQ ID NO: 13352 - DNA, 60 bp, Homo sapiens
caatcttgaaggtggatcagaatagactcacacagttgcctgaagcagttggggaatgtg

SEQ ID NO: 13353 - DNA, 60 bp, Homo sapiens
attaatgtggatgatgagattacgggagacacacccatggaaagccacctgcccatgcct

SEQ ID NO: 13354 - DNA, 60 bp, Homo sapiens
aatgcaagtcgagagcgatgtggcgttccattctcctgctgcactaaagatcccgcagaa

SEQ ID NO: 13355 - DNA, 60 bp, Homo sapiens
aagatttgcccagaggacaaagcagaccctggccacagtgagatcagttctaccaggtgt

SEQ ID NO: 13356 - DNA, 60 bp, Homo sapiens
cccgcacagaggacgaggtacaatcttatccttccaagcacgactatgtgtaatgctcta

SEQ ID NO: 13357 - DNA, 60 bp, Homo sapiens
atcgtagacctcaacccagagagctttgcaatcagcttgacctgtggggactcagaagac

SEQ ID NO: 13358 - DNA, 60 bp, Homo sapiens
gtgtccccctgggggagttgggccaggtcgtggaatgcagcctggactttggcctggtct

SEQ ID NO: 13359 - DNA, 60 bp, Homo sapiens
ggtggttattacagcatggttcccagccttacagtgtctaagtgcttctcttgtgtcctg

SEQ ID NO: 13360 - DNA, 60 bp, Homo sapiens
ccacaaaaagtgacgctttacctgcgaccaggccaggcagcagcgttcaacgtgaccttc

SEQ ID NO: 13361 - DNA, 60 bp, Homo sapiens
gttcacttctagagctgagaagcagggtcaaagcacaatactgggcaattcagagcatgg

SEQ ID NO: 13362 - DNA, 60 bp, Homo sapiens
gaggaggaacagctgagaggccttggattccgacagactcgaggatacaagagcttagca

SEQ ID NO: 13363 - DNA, 60 bp, Homo sapiens
gctagattctgcaggaaaccccagcagtgtgaacgcatcccaacataggttaagagcaag

SEQ ID NO: 13364 - DNA, 60 bp, Homo sapiens
cggtgtgctttgagaagggaacaaactacacggtgaggttggagctgcctcagtacacct

SEQ ID NO: 13365 - DNA, 60 bp, Homo sapiens
taggaaggctggcagacaccctggaaccctggggagctactggcaaactctcctggattg

SEQ ID NO: 13366 - DNA, 60 bp, Homo sapiens
gtcactctaccaaagccaggagcacagtattctcaggatctcaacaaggaagagcagacc

SEQ ID NO: 13367 - DNA, 60 bp, Homo sapiens
caccgtggaccttcctgccaccagtcactgtccctcaaatgacccaaagaccaatattca

SEQ ID NO: 13368 - DNA, 60 bp, Homo sapiens
atacctagaagtgtggactgctggttcctgcacagactgccggttattcactaggaatat

SEQ ID NO: 13369 - DNA, 60 bp, Homo sapiens
aacctcttcttagccacctcactgtctcaaacatgacctggggcagtgtgtccatctcgt

SEQ ID NO: 13370 - DNA, 60 bp, Homo sapiens
agcctggtggagatggtgtgaggagcgaagagccctctgctctaggatttgggttgaaaa

SEQ ID NO: 13371 - DNA, 60 bp, Homo sapiens
tatgtggagcacaaagggtcagtcctctggcagaacagatgccacggagtatcacaggca

SEQ ID NO: 13372 - DNA, 60 bp, Homo sapiens
gttcacggtgcccatcacggatgtgacggagaacgccctcaaggacctggacgacgtcat

SEQ ID NO: 13373 - DNA, 60 bp, Homo sapiens
ttacttggttgctcaccaggtgacctcctccgatttgacgattacaacagtgacagctcc

SEQ ID NO: 13374 - DNA, 60 bp, Homo sapiens
gaggcctgagagaaactgaggtcaagatttcaggattaatggtcctgtgatgctttgaag

SEQ ID NO: 13375 - DNA, 60 bp, Homo sapiens
cccccattcgggtactcaatctcaggtgtccacaagttctgcccacggtaggggctgccg

SEQ ID NO: 13376 - DNA, 60 bp, Homo sapiens
taggtaatgtgaacaacagcggcctgaagattaacctgtttgatacccccttggagacgc

SEQ ID NO: 13377 - DNA, 60 bp, Homo sapiens
agttaccatgttagggaggagagcacctatctgcccctcacgtctatgcagccgacagaa

SEQ ID NO: 13378 - DNA, 60 bp, Homo sapiens
ttcctgctggtgctgctcaccctggccacgctctgcacacggctgcacagaaacttccga

SEQ ID NO: 13379 - DNA, 60 bp, Homo sapiens
gcgcaaaagcactgaagcaccagtgaccccaaatactgagatagctgatgtatcctcacc

SEQ ID NO: 13380 - DNA, 60 bp, Homo sapiens
gagtattggaagattcaacttcagactggttcggcatttcttggaaaacctggttacagc

SEQ ID NO: 13381 - DNA, 60 bp, Homo sapiens
attacggctcctctctaacctcctttaccctcatctgtctggaggggagctctgtctgtc

SEQ ID NO: 13382 - DNA, 60 bp, Homo sapiens
gattttggagacttaaaaccaggttaatggctaagaatgggtaacatgactcttgttgga

SEQ ID NO: 13383 - DNA, 60 bp, Homo sapiens
atgagtggggctagctgaagcccattggtttccacgatttcaattggctgagaaggcaga

SEQ ID NO: 13384 - DNA, 60 bp, Homo sapiens
ccaaactgaagagccacatgaagacatgttcccagcctctgcatgaagatacctttgggg

SEQ ID NO: 13385 - DNA, 60 bp, Homo sapiens
actgagttgataggagaccagctagcccagctcaacaccgttttccaagcccttcctaca

SEQ ID NO: 13386 - DNA, 60 bp, Homo sapiens
ggaacaggaagaagcgtaaagactatccatgtcatctttgttgagagtcttcgtgactgt

SEQ ID NO: 13387 - DNA, 60 bp, Homo sapiens
gacaacgagacattagaggtgcacccacccccgaccactacatatcaggacgtcatccta

SEQ ID NO: 13388 - DNA, 60 bp, Homo sapiens
atcccaaaatcaagagaaacttccagccactgctgcccaccctcctgcaggggatgttgt

SEQ ID NO: 13389 - DNA, 60 bp, Homo sapiens
gggctctgtcttagtcagctctgtggcctggtacacaattggtgctcattaaacacgtgt

SEQ ID NO: 13390 - DNA, 60 bp, Homo sapiens
aagagtgaggtgcgctgggacagatcagcctggctgcagtagggacagacacgccaaggc

SEQ ID NO: 13391 - DNA, 60 bp, Homo sapiens
ctctgcttcatcttcggccagcacttgcgccagcagcggatgggcacctacggggtgcga

SEQ ID NO: 13392 - DNA, 60 bp, Homo sapiens
tgagggaacagggtcattagctggatccctgagctccttagaatcagcagtctctgatca

SEQ ID NO: 13393 - DNA, 60 bp, Homo sapiens
caggataccactctgtcactgtgtgaccctcagcaagtcactaacccttggcctcatttt

SEQ ID NO: 13394 - DNA, 60 bp, Homo sapiens
tggctcctacaaactggcttacagcaatgatggagaacactggactgtataccaggatga

SEQ ID NO: 13395 - DNA, 60 bp, Homo sapiens
caccatccttgctaatggaccaggctgcatccctgctgtaatcactgctcttgtgtccat

SEQ ID NO: 13396 - DNA, 60 bp, Homo sapiens
aagcatccctccagtaatgtcaagacctgttagctcttcctccatttccactcccttgcc

SEQ ID NO: 13397 - DNA, 60 bp, Homo sapiens
caccgtgagaccaccatcgtgagctttggctactccctgtatgcaggctggattggtgct

SEQ ID NO: 13398 - DNA, 60 bp, Homo sapiens
accaagaccgtcctcatgaatcattgctccgggtcctgcgggacatttgtcatgtactcg

SEQ ID NO: 13399 - DNA, 60 bp, Homo sapiens; identical to SEQ ID NO: 4855

SEQ ID NO: 13400 - DNA, 60 bp, Homo sapiens
caggtccccagactccaccaagcctggtcagcccaaaccaccagaagcccagaataaact

SEQ ID NO: 13401 - DNA, 60 bp, Homo sapiens
ggagacctgaggctgcagaaactggtaggtttcatcaggtggttaaagtcgtcaaagttg

SEQ ID NO: 13402 - DNA, 60 bp, Homo sapiens
tacgatttgttcccctacaacagtgacctgtgcattctgctgtggcctgctgtgtctgca

SEQ ID NO: 13403 - DNA, 60 bp, Homo sapiens
tctcagcgtgtgacactgaggacactgtgggacacctgggaccctggagggacaaggatc

SEQ ID NO: 13404 - DNA, 60 bp, Homo sapiens
ccagttgcatttgtacagatccacgtgtactggcacctcagaagaccaaatcatggactg

SEQ ID NO: 13405 - DNA, 60 bp, Homo sapiens
gccagcaagagggaacaaaactgttcttttgcattttgccgctgagatatggcattgcac

SEQ ID NO: 13406 - DNA, 60 bp, Homo sapiens
ctatcctcccactatcacagaatccaagagcaatgaagccaccacaggacgacaagcttc

SEQ ID NO: 13407 - DNA, 60 bp, Homo sapiens
caatcacttcctacacgaccaccaacttttcctccaaccattccaccagcaaaagaaggt

SEQ ID NO: 13408 - DNA, 60 bp, Homo sapiens
ccagattcggaagcattccaagatgtgcaaggaaagagacatcgagggaagcacaagttc

SEQ ID NO: 13409 - DNA, 60 bp, Homo sapiens
tcagcttgggcaagaccttcgttctgccgtgtctcccgacttgcacattactcctatata

SEQ ID NO: 13410 - DNA, 60 bp, Homo sapiens
cctctggcatggggaaattaagggaacagtgtctgtttgcatgtaagatgagatgagatc

SEQ ID NO: 13411 - DNA, 60 bp, Homo sapiens
ttctgtgtgttcttacctctgtacttcctcgtagctctgctgacaaagcaagcaggcctc

SEQ ID NO: 13412 - DNA, 60 bp, Homo sapiens
gaatctattggccttttacagggtattaatccctttgtcacctaccattgatgccttaag

SEQ ID NO: 13413 - DNA, 60 bp, Homo sapiens
aagaacaagaggtatatcaggtgccaccatcagtgcagagaagcattgggggaaccagtg

SEQ ID NO: 13414 - DNA, 60 bp, Homo sapiens
ggctccttattgcatgaatgtcccctgtggtttcatcaatggtaaaaacggtgccagcgc

SEQ ID NO: 13415 - DNA, 60 bp, Homo sapiens
acagtggcctggatgccaccaccttcagcaagctgcatagccttgaatacctggatctct

SEQ ID NO: 13416 - DNA, 60 bp, Homo sapiens
ctcacctgccttaagctgtggtacaaccacatcgcctacatccccatccagatcggcaac

SEQ ID NO: 13417 - DNA, 60 bp, Homo sapiens
tacctgtttcctcattccttggctgagggagaggctgagaactgggcagacacccctgga

SEQ ID NO: 13418 - DNA, 60 bp, Homo sapiens
ggataaaaggggctaagatggactcatgtttagctaagttctgacttgtatccagcatgc

SEQ ID NO: 13419 - DNA, 60 bp, Homo sapiens
gacttccaagagtttcaaacccagaatttcgaccgcttcgataattaaaccaaggaagca

SEQ ID NO: 13420 - DNA, 60 bp, Homo sapiens
atctcctgcacctcctccttcattgccatctgtgagtttcctgcctgaagaggcacgttc

SEQ ID NO: 13421 - DNA, 60 bp, Homo sapiens
ccaggcttcccaaatgagtacgaagataaccaaatctgctactggcacattagactcaag

SEQ ID NO: 13422 - DNA, 60 bp, Homo sapiens
ccagtgtggaggtggtctacttggggtgagaaccctgtatcgttttgagaaccagacagg

SEQ ID NO: 13423 - DNA, 60 bp, Homo sapiens
cttccagaacatcagctcagagcaccaaacgcagctgtacgaagtctacaaactcgattt

SEQ ID NO: 13424 - DNA, 60 bp, Homo sapiens
gcccaaaatacttgcatccaaggttctagtctctgttgctgtgctggtctttagccccac

SEQ ID NO: 13425 - DNA, 60 bp, Homo sapiens
cttgctcccgtctaatatgaccagaatgagctggaataccacactgaccaaatctggatc

SEQ ID NO: 13426 - DNA, 60 bp, Homo sapiens
gcacctcctacgtcaaacatgaagtgtgtttccttcagtgcatctgggaagatttctacc

SEQ ID NO: 13427 - DNA, 60 bp, Homo sapiens
gacaccgtctttatgtcaagaagcaatagcgacactctgactctcctcattccttttgag

SEQ ID NO: 13428 - DNA, 60 bp, Homo sapiens
agagaggatgagaatgcagcatcaatcgcagacctgccctgcctcagttggaaaaccttt

SEQ ID NO: 13429 - DNA, 60 bp, Homo sapiens
tgcagaatctcagtggcatctgggttcacctccccactctgatgatctccagcctccact

SEQ ID NO: 13430 - DNA, 60 bp, Homo sapiens
tcctagagaccccatccttggtggtccccttggaagaccgtgtggtatctgtgggagaaa

SEQ ID NO: 13431 - DNA, 60 bp, Homo sapiens
cctgcctcgtgtcgtctttatctgcctattactcagcctaaggaaacaagtacactccac

SEQ ID NO: 13432 - DNA, 60 bp, Homo sapiens
gacaatgacgggaacattgagaacacagagaagctgcagtacagtggtgagaggctctat

SEQ ID NO: 13433 - DNA, 60 bp, Homo sapiens
tcaatgatggcatccaggaattagctgagccaacagaccatgtggacagctttggccaga

SEQ ID NO: 13434 - DNA, 60 bp, Homo sapiens
tgtatgcgtgaagtctcagctttgagctggaggctagattccaagatgacagccatgatg

SEQ ID NO: 13435 - DNA, 60 bp, Homo sapiens
acagaccctacctgtgacacagacagcggccagtgcaagtgcagacccaacgtgactggg

SEQ ID NO: 13436 - DNA, 60 bp, Homo sapiens
tgtgctctgtggggatgaggagggcaacgtgtggctctacgacgtcagcaacatcctgaa

SEQ ID NO: 13437 - DNA, 60 bp, Homo sapiens
ctgatctgggttttgcctctgcccttggggaaatgctatcagaaattcgccccattttct

SEQ ID NO: 13438 - DNA, 60 bp, Homo sapiens
acctatgaggacaggacctacagctaccaggacgtcatctacaacaccaccgatgggctt

SEQ ID NO: 13439 - DNA, 60 bp, Homo sapiens
tgaactgcacggacaacgacgtgggcctcaatgcagagctcagctacttcatcacaggtg

SEQ ID NO: 13440 - DNA, 60 bp, Homo sapiens
tgagtcagggtcgtggtcaggacctgctgagcacagtgagcattaggtactctggccaca

SEQ ID NO: 13441 - DNA, 60 bp, Homo sapiens
tatcgctgctgagtgaaccacaggaactactggtgaactatgtgtctgacgtccgagtga

SEQ ID NO: 13442 - DNA, 60 bp, Homo sapiens
ttgtggaattgcaagccataacgtactggggacagacacggctgaagagtgcaaaggtgt

SEQ ID NO: 13443 - DNA, 60 bp, Homo sapiens
acggtgctgagaattcgcggcttggttcctcccaatgccagcaggttccatgtaaacctg

SEQ ID NO: 13444 - DNA, 60 bp, Homo sapiens
gctcaagaactgcaaatgagacaggaagctgttcactgtgaaacagtctcttgcttgtcg

SEQ ID NO: 13445 - DNA, 60 bp, Homo sapiens
ttcacggcatctggattcctaatccttttccgaaatggcaggtgtgagtgcctgtataaa

SEQ ID NO: 13446 - DNA, 60 bp, Homo sapiens
tgtgtgtctgtgacagtcagggaaggatgcctcggagctgaggtggggtgagacagagtg

SEQ ID NO: 13447 - DNA, 60 bp, Homo sapiens
tacattgtcaagtggaggcggagagagactcgagaggcctggaacaacgtcacagtgtgg

SEQ ID NO: 13448 - DNA, 60 bp, Homo sapiens
accaagaaggcgacagcagctttggcaaatacggcagaaacgcctacgtgtagcagctct

SEQ ID NO: 13449 - DNA, 60 bp, Homo sapiens
gctgtgcacaccctgaatggctagcagggcaaagcatcctgaatgtggatctgaaagatt

SEQ ID NO: 13450 - DNA, 60 bp, Homo sapiens
cagcaaacccatccagtgtaccacgtaaaacctggtgggccagtaaatctcctgacaata

SEQ ID NO: 13451 - DNA, 60 bp, Homo sapiens
aatggcaagtggaatgacagggcttgtggagaaaagcgtcttgtggtctgcgagttctga

SEQ ID NO: 13452 - DNA, 60 bp, Homo sapiens
tctggcttcatcatctactccgactgagctccccacgtctccctccacccacgtccctca

SEQ ID NO: 13453 - DNA, 60 bp, Homo sapiens
atcctgtacttcaccaatggccatctgtatccaactggttctaagtcaaagcgggtcagc

SEQ ID NO: 13454 - DNA, 60 bp, Homo sapiens
gaccccatcatctaccaaggcattatggacaaggatgaggagaagcctgggaagtcctca

SEQ ID NO: 13455 - DNA, 60 bp, Homo sapiens
ttggtttaactgccccaggaaaggatgaagaaatggccccagcctcgacagaacctccca

SEQ ID NO: 13456 - DNA, 60 bp, Homo sapiens
tgaggcttgcctccactttgacctggctgcatctttcctcagctcttctgggtaagctga

SEQ ID NO: 13457 - DNA, 60 bp, Homo sapiens
gagcatctcaaagttcagcttcgcctacttcagttttctctctgtgactgaggaagtcag

SEQ ID NO: 13458 - DNA, 60 bp, Homo sapiens
aggccttcaaggtggcctacagccttaatggacacgaattcgatttcatccatgatgtta

SEQ ID NO: 13459 - DNA, 60 bp, Homo sapiens
ttcccaagaggcaagaggcaaggagaagtgtcctactttaaacggccagcctcagtggtc

SEQ ID NO: 13460 - DNA, 60 bp, Homo sapiens
gcaatgtggcaaactgaagctgcacagtgttggtttccttgtattctgaggatgttaaag

SEQ ID NO: 13461 - DNA, 60 bp, Homo sapiens
tgctgttctggggacgtgagcatcacctgagggtctcaggaatgacgcttggacatggtg

SEQ ID NO: 13462 - DNA, 60 bp, Homo sapiens
attgaccccacctcaggcattatcactacggctgcctcactggactatgagttggaacct

SEQ ID NO: 13463 - DNA, 60 bp, Homo sapiens
ggacagtatatccccctgtgtgatgaagatggttactacaagccaacacaatgtcatggc

SEQ ID NO: 13464 - DNA, 60 bp, Homo sapiens
ccaaatacagaggtctgctttgaagcggagaccatttccaggccttattgagaccagacc

SEQ ID NO: 13465 - DNA, 60 bp, Homo sapiens
acgagggcgatgatgccacgttccggtgtgaagtctccccaccagatgccgatgtcacct

SEQ ID NO: 13466 - DNA, 60 bp, Homo sapiens
gggcgacgaagtgctacgaaagtaatggtagttgtaactgacggtgaatcacatgatggt

SEQ ID NO: 13467 - DNA, 60 bp, Homo sapiens
atatcttgctcagattggtgactccgtctcattgacttgcagcaccacaggctgtgagtc

SEQ ID NO: 13468 - DNA, 60 bp, Homo sapiens
tcaacatgtcatggaccactcaagctgggctttttgcaaagattgttatcaatgtgagtg

SEQ ID NO: 13469 - DNA, 60 bp, Homo sapiens
tcattgatgcagaccttcctcccaatacatctcccttcacagcagaactaacacacgggg

SEQ ID NO: 13470 - DNA, 60 bp, Homo sapiens
tcgatgcagagacagaggtcggtgctgaccgctgcacgtcgactgcctaccaggagcaga

SEQ ID NO: 13471 - DNA, 60 bp, Homo sapiens
atagggacccactgtgagataagcgtcaatccgtgttcctccaacccatgcctctatggg

SEQ ID NO: 13472 - DNA, 60 bp, Homo sapiens
tccagggtcatctgtcagcatctctttccctaatcgactctcatctggtggtgcagagat

SEQ ID NO: 13473 - DNA, 60 bp, Homo sapiens
caagccctctgcaaccacgaatcgactgtctctgtagattggccttctggacgttctaca

SEQ ID NO: 13474 - DNA, 60 bp, Homo sapiens
aactggagggtgagaggaagggtgggtctgtaagaccttggtaggggactaattcactgg

SEQ ID NO: 13475 - DNA, 60 bp, Homo sapiens
tggttgaggatggcagtgtacctggccatgtgactctggatgagctgttcgcatacttga

SEQ ID NO: 13476 - DNA, 60 bp, Homo sapiens
tcggggaaaagagcagtgtgtggagatgtacacagatgggcagtggaatgacaggaactg

SEQ ID NO: 13477 - DNA, 60 bp, Homo sapiens
ttacttccgtgtagggactcagcctctcaatcccagtctcatgcttccagcctggataat

SEQ ID NO: 13478 - DNA, 60 bp, Homo sapiens
gtggactacaagcctacaaactctgagaccatggatatatcggttaatggatctgggccc

SEQ ID NO: 13479 - DNA, 60 bp, Homo sapiens
gtcctccaggctatggcaagatgggtgcaacaggaccaatgggccagcaaggcatccctg

SEQ ID NO: 13480 - DNA, 60 bp, Homo sapiens
cacctccttaaaggtagtcaagattgtgttttgaggtttccttcagacagattccaggcg

SEQ ID NO: 13481 - DNA, 60 bp, Homo sapiens
aatatggcctcatggaggtggagtttatgtcgggcacagctgatgaagacttagtggctc

SEQ ID NO: 13482 - DNA, 60 bp, Homo sapiens
ttcatcatagtatacattggcggtatctagccctttctctgtaaaatatccctatgttta

SEQ ID NO: 13483 - DNA, 60 bp, Homo sapiens
caaccacctcaatgatgggaaacacgaactcatggatgccagtgaactggtggcagagat

SEQ ID NO: 13484 - DNA, 60 bp, Homo sapiens
gatgaatgtcgctgagctggaactccagaactgtgagctagagagaatcccacatgctat

SEQ ID NO: 13485 - DNA, 60 bp, Homo sapiens
cagaaatcacttggaaaagagctgtggatggcttcacgttcactgaaggcgataagagcc

SEQ ID NO: 13486 - DNA, 60 bp, Homo sapiens
ctggacctccagggagtcatgtaataggcataaaaggagacaaagggtctatgggccacc

SEQ ID NO: 13487 - DNA, 60 bp, Homo sapiens
atgggaagtttgcgagctctgcaccttgtggaagacctgcgtggattgttagagatgatg

SEQ ID NO: 13488 - DNA, 60 bp, Homo sapiens
ccacgctctcccatcccctaccatcttggttctctgccagaaggcatgactcccaatttt

SEQ ID NO: 13489 - DNA, 60 bp, Homo sapiens
gagcttgagcacctgaccaaaaagatgctgtatgacatggaaaatccacctgctgacgaa

SEQ ID NO: 13490 - DNA, 60 bp, Homo sapiens
agcagccccaccacaagaaggagtgctacctgaacttcgatgacacagtgttctgcgaca

SEQ ID NO: 13491 - DNA, 60 bp, Homo sapiens
tccccggagaacccctgcctcatcaatgagtgtgtccgagtgaaggaggaggtctttata

SEQ ID NO: 13492 - DNA, 60 bp, Homo sapiens
gacaccaactttatggactgcccatgggagtgctccaaatgtcagggtgtttgcccaata

SEQ ID NO: 13493 - DNA, 60 bp, Homo sapiens
cctgaccacaagtacagattcactctgtttggaattgcgaacaagaagcggtatggcccc

SEQ ID NO: 13494 - DNA, 60 bp, Homo sapiens
gtggaaacagtacttggaactgaggaagctggacacagctcctgtagaaacaagtgccct

SEQ ID NO: 13495 - DNA, 60 bp, Homo sapiens; identical to SEQ ID NO: 4855

SEQ ID NO: 13496 - DNA, 60 bp, Homo sapiens
ccctgcattttgaactccttttagttgttggtgatatcctttggtgttcactgcctttgt

SEQ ID NO: 13497 - DNA, 60 bp, Homo sapiens
accccatactcttggctctgtagcatttccaagttcagataaacccctgagtgctcaccc

SEQ ID NO: 13498 - DNA, 60 bp, Homo sapiens
aggacctgcagagtctgcctcaactggcaaggcatgaccaggacacgtggttaccaggca

SEQ ID NO: 13499 - DNA, 60 bp, Homo sapiens
gatttcttcactttaaacctcttttctgagccctgtttctgtaccagtgcccttcaaaac

SEQ ID NO: 13500 - DNA, 60 bp, Homo sapiens
cctctgtgagcgatgacggagcaacagctctccagcacgtgaagctctccagacagctgt

SEQ ID NO: 13501 - DNA, 60 bp, Homo sapiens
atacccaggtgacaccaggagaagtgtctatccagctgcgtccaggagccgaagctaatt

SEQ ID NO: 13502 - DNA, 60 bp, Homo sapiens
tggaccccttgaagaggccctaccacaccctaactgcacctgtctccctggagatgaaaa

SEQ ID NO: 13503 - DNA, 60 bp, Homo sapiens
gctcagccaagcatccttcctgggggccgaggaagtggggccactctgccgttccgagga

SEQ ID NO: 13504 - DNA, 60 bp, Homo sapiens
ggcacaggcatgtggactgttcaggcagaaacttgtctacattaccatctggactgcaag

SEQ ID NO: 13505 - DNA, 60 bp, Homo sapiens
ttgtccttttaggtagagtgcctggtccaggtcattggaggagagtccacatggccacct

SEQ ID NO: 13506 - DNA, 60 bp, Homo sapiens
tgcctcaggtgtgcttttgggactgcatggatatgtgtgtgctcaaacgtgtatcacttt

SEQ ID NO: 13507 - DNA, 60 bp, Homo sapiens
cacaaacagcacagctccatttggcctgaagcctcgatcagtgtttctaagacctcagag

SEQ ID NO: 13508 - DNA, 60 bp, Homo sapiens
tttgaaggggagatcgtggttcacacgaagatgatgatcgaccccaacgctaagacacgt

SEQ ID NO: 13509 - DNA, 60 bp, Homo sapiens
acagaattcgggaccagatgcagaccatctccaactcctaccgcatcctgcttgaaacaa

SEQ ID NO: 13510 - DNA, 60 bp, Homo sapiens
cccgactccaccgagatcaaccaggacaccatcaaccgcatcatcaaggtcatgaaacac

SEQ ID NO: 13511 - DNA, 60 bp, Homo sapiens
gctcggcagagctggatgatgagaacgtctgcattgagtgtaactgcaaccagataggct

SEQ ID NO: 13512 - DNA, 60 bp, Homo sapiens
cagaaatgggcatagtgcttttagatccaacatgtaacagatggatgttactccatgctg

SEQ ID NO: 13513 - DNA, 60 bp, Homo sapiens
tgacaagcgtgccctgtaggagaaaagtctgtgtcctgtgaagtgtgaccgtgtagtgta

SEQ ID NO: 13514 - DNA, 60 bp, Homo sapiens
agaagggctccaggggaccaaagggctacaagggagagaagggcaagcgtggcatcgacg

SEQ ID NO: 13515 - DNA, 60 bp, Homo sapiens
aaggtgttcaaacacaacctactctgcaaaccttggtaaaggaaccagtcagctggccag

SEQ ID NO: 13516 - DNA, 60 bp, Homo sapiens
gccatgccttccaagttcatagagggtctgaggaatgaagaggccacagaaggggacacg

SEQ ID NO: 13517 - DNA, 60 bp, Homo sapiens
ctggagcacaaccacacttacattcaatggcttttccccctgagagaacaaggcttgaac

SEQ ID NO: 13518 - DNA, 60 bp, Homo sapiens
tggttacgatggagacttctacagggctgaccagcctcgctcagcaccttctctcagacc

SEQ ID NO: 13519 - DNA, 60 bp, Homo sapiens
ctggctggcactgaaggacagcaagaggcactctgtcttcacttgaatttcctagaacag

SEQ ID NO: 13520 - DNA, 60 bp, Homo sapiens
gacagtcaagcagaacccacagccttattacacctgtctacaccatgtactgagctaacc

SEQ ID NO: 13521 - DNA, 60 bp, Homo sapiens
gtgaaaagtcatcatcctgccagcagcactcctcccgttcctccagcgtagactacattt

SEQ ID NO: 13522 - DNA, 60 bp, Homo sapiens
aaaagtgtgtagaccttcttcctgctagggctgcactgtcctgggtgttgggcccttctg

SEQ ID NO: 13523 - DNA, 60 bp, Homo sapiens
tataccctaacagctcaagcagtggactgggagacaagcaaacctctggagcctccttct

SEQ ID NO: 13524 - DNA, 60 bp, Homo sapiens
ggaaaaggattagaatacataatggcaaagcacctcaccaaggctgctggaagcctggcc

SEQ ID NO: 13525 - DNA, 60 bp, Homo sapiens
agaaccaatacgcttcttggacacctcatctccaaagcccagcgagatccaactgtcact

SEQ ID NO: 13526 - DNA, 60 bp, Homo sapiens
tgtgtgctggccatatcgctggcctctatggtgaccgaggacttgtgccgagcaccagac

SEQ ID NO: 13527 - DNA, 60 bp, Homo sapiens
tgcgagtgctccgaggcagcgcgcacagtcaagtgcgttaaccgcaatctgaccgaggtg

SEQ ID NO: 13528 - DNA, 60 bp, Homo sapiens
cttcctcttgacagctttgattggaatggggttattagatcattcaccttggtcctacac

SEQ ID NO: 13529 - DNA, 60 bp, Homo sapiens
aagggaagcaaggggtatcaaggcaacaatggagccccaggaagtcctggtgtgaaagga

SEQ ID NO: 13530 - DNA, 60 bp, Homo sapiens
cacctgccatctccaagcatttggacaactagccctgatgcattaggctgcaactctgat

SEQ ID NO: 13531 - DNA, 60 bp, Homo sapiens
tctgaagtctcggaccctcatggcacccggtgccccaaagcaaaggctgcttctcctcca

SEQ ID NO: 13532 - DNA, 60 bp, Homo sapiens
tcgtactttggagcttctgtctgtgctgtggacctcaatgcagatggcttctcagatctg

SEQ ID NO: 13533 - DNA, 60 bp, Homo sapiens
ggcaaactccaactctaggaatcattttgggttcaattaggaatctgacaacaggtcgtg

SEQ ID NO: 13534 - DNA, 60 bp, Homo sapiens
ggcatccgtttgctagaaaatcccagacttggctcccaaagcaccaacagctcatacaca

SEQ ID NO: 13535 - DNA, 60 bp, Homo sapiens
tgagaacagcgtgaagctcaagaacttgactggctacacggcctacatggtcagcgtggc

SEQ ID NO: 13536 - DNA, 60 bp, Homo sapiens
ttccccaggaccattcccctgatccaacagttgctaaacgccacggagctcacgcaggac

SEQ ID NO: 13537 - DNA, 60 bp, Homo sapiens
aggagaatcaatgagtacttctgctgagggatatgcctccgcaactcacacacctgcctg

SEQ ID NO: 13538 - DNA, 60 bp, Homo sapiens
agatgaaggtagaagcacctggctcgggcaaggctagaaagatgctacgttgggccttca

SEQ ID NO: 13539 - DNA, 60 bp, Homo sapiens
ttgagaaaagcaaggccaaccacttcctgatcctctttcgcgactcgagctgccagttcc

SEQ ID NO: 13540 - DNA, 60 bp, Homo sapiens
gctctggccttggatacagagatgccaattgaaagcagaaagttctactctcgtatctgt

SEQ ID NO: 13541 - DNA, 60 bp, Homo sapiens
tgcatcccagtgatactaagtggaggccactgccttctgacatctggctcaaaagcccag

SEQ ID NO: 13542 - DNA, 60 bp, Homo sapiens
ggcctatctaaactggattcacagctctgtcacttaattgctacatgatctagagccagt

SEQ ID NO: 13543 - DNA, 60 bp, Homo sapiens
gactgaatgtgaagtcaagtctgagcacaaaaagataatgcacgatgagattgcctacca

SEQ ID NO: 13544 - DNA, 60 bp, Homo sapiens
cggaagccaatctcactttccttttgcattctgttagaatgttctgtgtctgaattcccc

SEQ ID NO: 13545 - DNA, 60 bp, Homo sapiens
catgttccctccaaactagatgccgagaaacttgttggtagagttaacctgaaagagtgc

SEQ ID NO: 13546 - DNA, 60 bp, Homo sapiens
tgctctttcaagcagaagcctggtttctgggagaacactgcacagcgatttctttcccag

SEQ ID NO: 13547 - DNA, 60 bp, Homo sapiens
actcagtagtggtggaatttgacgatggggatacaggccacatcgccgtctccaacgtca

SEQ ID NO: 13548 - DNA, 60 bp, Homo sapiens
tagagatcctcagtatctcagtgctgtggcatagctccaataggtgtgctgtggtgcact

SEQ ID NO: 13549 - DNA, 60 bp, Homo sapiens
atcaccctcgtttccagtgaattagtgtcatgtcagcatcagctcagggcttcatcgtgg

SEQ ID NO: 13550 - DNA, 60 bp, Homo sapiens
aacgctggggttacaatccaagacacactcaacacattagacggcctcctgcatctgatg

SEQ ID NO: 13551 - DNA, 60 bp, Homo sapiens
agctggagtgcgttctgccgaagcttgtggttgcacgcccatcgtcttaggggctacctt

SEQ ID NO: 13552 - DNA, 60 bp, Homo sapiens
cagaatggcgtgccaggactcgatggccagaagggagaggctggtcgcaacggtgctccg

SEQ ID NO: 13553 - DNA, 60 bp, Homo sapiens
tagaggaggatggtcatcgtgacagcagcagctcaagttagcatttcaagtgatttgggg

SEQ ID NO: 13554 - DNA, 60 bp, Homo sapiens
gttctcacactggcccagagaaaagagcctcagcaagagagttttgccaacaattcccct

SEQ ID NO: 13555 - DNA, 60 bp, Homo sapiens
atcacgaccctgacctcagagcagatccagaagctcttagccagcactcgctatccacct

SEQ ID NO: 13556 - DNA, 60 bp, Homo sapiens
cggaaagggatttactgcacggacttctcccaagttcctaggcattatcttctggaccct

SEQ ID NO: 13557 - DNA, 60 bp, Homo sapiens
gaaggctccaagagggaaatttggtggttacaaacttcttgtgactccaacttcaggtgg

SEQ ID NO: 13558 - DNA, 60 bp, Homo sapiens
atcgtacgggaaggaggcactatggccttgtctgggatctcagattttggcaacatctca

SEQ ID NO: 13559 - DNA, 60 bp, Homo sapiens
ggcactgagagagaaatggaagaaacccccacctctcggaatagcttcccgttcagttaa

SEQ ID NO: 13560 - DNA, 60 bp, Homo sapiens
aatgaagccaacttgagcaatctgaaggccccattggacatcccagtgcctgatccagtc

SEQ ID NO: 13561 - DNA, 60 bp, Homo sapiens
gcgagatctagcatctctgaaatcctggctgtcgaggctttgaagcatgtgttacctggt

SEQ ID NO: 13562 - DNA, 60 bp, Homo sapiens
catgaggaagatgatgttgatgttaggcctgcaagaaaaagcgaggctccatttactcac

SEQ ID NO: 13563 - DNA, 60 bp, Homo sapiens
gccagtttactgatgagtatctcccagaacaacgatctcacctctacgggataactgcag

SEQ ID NO: 13564 - DNA, 60 bp, Homo sapiens
gtagcagcagtggaagtagttccagcagtggaagtagtagcagtcgcagtagttccagta

SEQ ID NO: 13565 - DNA, 60 bp, Homo sapiens
ctgtttgatcactgctctccatcccatgtaccacaactatcttgctgcttaaaaggagac

SEQ ID NO: 13566 - DNA, 60 bp, Homo sapiens
agactatcttccagttgctgctcaacagagttgttggctgagacctgcttgggagtctct

SEQ ID NO: 13567 - DNA, 60 bp, Homo sapiens
ccagccacctctgatgcctgagtcctcccaatttcagactcccattcctgaagaaccagt

SEQ ID NO: 13568 - DNA, 60 bp, Homo sapiens
agatctccacagcagcaaccatcaagacttcacaggccacaaaatcaggaaccccagagc

SEQ ID NO: 13569 - DNA, 60 bp, Homo sapiens
cttgaacttggcctgagaacattttctgggaagaggtaagggtgacaaatggaacatcag

SEQ ID NO: 13570 - DNA, 60 bp, Homo sapiens
gtatactacttgatggaaccaactttgtacatcttggccatgtcactggtcattgtgtga

SEQ ID NO: 13571 - DNA, 60 bp, Homo sapiens
aagtcgttccctctacaaaggacttcctagtgggtgtgaaaggcagcggtggccacagag

SEQ ID NO: 13572 - DNA, 60 bp, Homo sapiens
ctgggccataatgttgcttctcaggctatatgcagtcctttagtcagaagtcaataggcc

SEQ ID NO: 13573 - DNA, 60 bp, Homo sapiens
ctcctgacccttagtactctgcccccacctctctttactgtgggaaaaccatctcagtaa

SEQ ID NO: 13574 - DNA, 60 bp, Homo sapiens
aggttagagccagccacacttgaacctaataccctgcccttgacatctggaaacctctac

SEQ ID NO: 13575 - DNA, 60 bp, Homo sapiens
gcagttgaagcagaatgtataggtgtcagagaagaaacctagtcagccagacgtgctctg

SEQ ID NO: 13576 - DNA, 60 bp, Homo sapiens
ggtacactacccaacggaagtggatggaagtggagcagttccaatgtgctgaccttctat

SEQ ID NO: 13577 - DNA, 60 bp, Homo sapiens
gccggaaaaggcgcatctaacgcgtatctaggctttggtaactgcggacaagttgctttt

SEQ ID NO: 13578 - DNA, 60 bp, Homo sapiens
ttgaaaatccgaagggctgatataccctttatgttcctgactgatgcgcagaacctgggg

SEQ ID NO: 13579 - DNA, 60 bp, Homo sapiens
ctcaccacagataatggttaacgaaccgggtcgacatcacaaaggagggtggagactctt

SEQ ID NO: 13580 - DNA, 60 bp, Homo sapiens
caccttgcccacaatggcccagatggagaaagctctgagcatcggatttgagacctgcag

SEQ ID NO: 13581 - DNA, 60 bp, Homo sapiens
ctcctggaatccatgcccagtgtgaggcttttacttctcaaggacaacctctggaaatgc

SEQ ID NO: 13582 - DNA, 60 bp, Homo sapiens
ttagtgtgtatgtggtgaacaaagctggcggcttgatttaccagttggacagctacgcgc

SEQ ID NO: 13583 - DNA, 60 bp, Homo sapiens
atgtgactggcgtctgacccgccccttgacccaagcctgtgatgacatggtgctgattct

SEQ ID NO: 13584 - DNA, 60 bp, Homo sapiens
tatggcaagacttgtgagtgtgatgatcgccgctgtgaagacctcgatggtgtggtctgt

SEQ ID NO: 13585 - DNA, 60 bp, Homo sapiens
tgctgaagtgagtcgctttgccaagaactttctgccgatcctcttcaacctgtatgggca

SEQ ID NO: 13586 - DNA, 60 bp, Homo sapiens
atttgatcccctaactcactgtctgcggtgctcattgctgctaacagcattgcctgtgct

SEQ ID NO: 13587 - DNA, 60 bp, Homo sapiens
ccgactttgttctcttcggctaccccaagcccgaaaacctcctccgagactgaaagcttt

SEQ ID NO: 13588 - DNA, 60 bp, Homo sapiens
agaagacccagaccatacattccacatactcccaccagcaggtcattcctcacgtctacc

SEQ ID NO: 13589 - DNA, 60 bp, Homo sapiens
gccttttaggaacgtaaagtcctttaagcactcagaagccatacctcatctctctggctg

SEQ ID NO: 13590 - DNA, 60 bp, Homo sapiens
tgaataatagtggatcctatacctgccacgcaataactcactgctgcaactgacacataa

SEQ ID NO: 13591 - DNA, 60 bp, Homo sapiens; identical to SEQ ID NO: 4855

SEQ ID NO: 13592 - DNA, 60 bp, Homo sapiens
cctttgtaacggctcttagcacactcacagatgtttgaggctttcagaagctcttctaaa

SEQ ID NO: 13593 - DNA, 60 bp, Homo sapiens
gggaatatgcccaagctatgccttgtcctcttgtcctgtttgcatttcactgggagcttg

SEQ ID NO: 13594 - DNA, 60 bp, Homo sapiens
ccggaggagactggcagacaggcttttatcctctgagagacttagaggtggggaataatc

SEQ ID NO: 13595 - DNA, 60 bp, Homo sapiens
ccagtaggttctcctatgctgactccaggttgcttcatacaaggagggtggttgaacttc

SEQ ID NO: 13596 - DNA, 60 bp, Homo sapiens
caacaacctaatctcatcctgttttgatgcaagggttctcttctgtgtcttgtaaccatg

SEQ ID NO: 13597 - DNA, 60 bp, Homo sapiens
gcaggaaccctgtgacagtcccaaagttaaggaagaacgaattgatacaccaccagcttg

SEQ ID NO: 13598 - DNA, 60 bp, Homo sapiens
ccacaggcctctagctgtgctgctcaagagactggatcagggtagctacaagtggccggg

SEQ ID NO: 13599 - DNA, 60 bp, Homo sapiens
tgaagtgaccaacgaggccccttttgtgctgaagctcccaacctccacagccaccatagt

SEQ ID NO: 13600 - DNA, 60 bp, Homo sapiens
ggctgcttcttccccagccatgagtcagtttgtgcccatgaataatacacgacctgttat

SEQ ID NO: 13601 - DNA, 60 bp, Homo sapiens
cttctacgtgcagtccaccgcctgcaagaagggcgagtacaacgtgcaggaggccgagag

SEQ ID NO: 13602 - DNA, 60 bp, Homo sapiens
cgtgtaccggtgcacagcgcggaacttggtgggcagtgctgaatatcaggcgcgaataaa

SEQ ID NO: 13603 - DNA, 60 bp, Homo sapiens
acccaggtcaccaccgagccaccaacccagaagcccaagaagattgtaaatgccaagaaa

SEQ ID NO: 13604 - DNA, 60 bp, Homo sapiens
cagggttcagtacaggcgcgaacgctcctgtgtgttgaccacactcccacggttgctttt

SEQ ID NO: 13605 - DNA, 60 bp, Homo sapiens
gccagccttgtggagttggtagtccttgtgtttttcatagcccaagatagccatgtgacc

SEQ ID NO: 13606 - DNA, 60 bp, Homo sapiens
tgccactgaagacactgacatacgtggctctaggtgtcaccttggctgcccttctgctca

SEQ ID NO: 13607 - DNA, 60 bp, Homo sapiens
atactggatcacagcccctcaaaatcttgtgctgtccccaggagaggatgggaccttgat

SEQ ID NO: 13608 - DNA, 60 bp, Homo sapiens
aatccgaaatgcgcagctgaaacatgctggaagatacacatgcactgcccagacaattgt

SEQ ID NO: 13609 - DNA, 60 bp, Homo sapiens
tgcagacctcagctgtgttcgtacaatggcaccttctacggggttggtgcaaccttccca

SEQ ID NO: 13610 - DNA, 60 bp, Homo sapiens
taccgggtccaggcaacgaaaagccaccttaccctcgaaggtgatccgggaatggcgccg

SEQ ID NO: 13611 - DNA, 60 bp, Homo sapiens
tcaagggccttgtggttcactagcagctccaagcccacgtggtgcaggaagaacccagcg

SEQ ID NO: 13612 - DNA, 60 bp, Homo sapiens
aatggccgctccatgctggaacctgtcactcgagttgtccacagcctgtcatgccgcaca

SEQ ID NO: 13613 - DNA, 60 bp, Homo sapiens
tgctggacttgaggcagagcctgcagcagctgtgtggacactacccagccctactcctct

SEQ ID NO: 13614 - DNA, 60 bp, Homo sapiens
ggccgtacaagatctaccaccagccaacacatttgtgggagcaggagacaacatttcaat

SEQ ID NO: 13615 - DNA, 60 bp, Homo sapiens
gttggaatcgaacgcaacaacaagggatttcgaccactgagctgtgagtacaagatggaa

SEQ ID NO: 13616 - DNA, 60 bp, Homo sapiens
gctctgtgcttcacagtgaatcttttccccatgcaggagtgtgctcccctacaaacgtta

SEQ ID NO: 13617 - DNA, 60 bp, Homo sapiens
cctgggatcagctggaagctgcctgtcatctcctgcccaatccccagaaaccctgattca

SEQ ID NO: 13618 - DNA, 60 bp, Homo sapiens
agaggagtgtgctgtgctggcaagtgtaagtcccccagttgctctggtccaggagcccac

SEQ ID NO: 13619 - DNA, 60 bp, Homo sapiens
taacaaactgctgtataacggcagacagaactacaacccgcagacaggcatcttcacctg

SEQ ID NO: 13620 - DNA, 60 bp, Homo sapiens
cgcagccatctggagcaaagagaaggataaacagaaaggacaccctctctagggtcccca

SEQ ID NO: 13621 - DNA, 60 bp, Homo sapiens
tagccattaccatcaactctgaatggactatgaaggccaagactgaggtccaggtagctg

SEQ ID NO: 13622 - DNA, 60 bp, Homo sapiens
gtccatctccagcatgtaactggccttacgatggcaattggcatcattctccttgctctg

SEQ ID NO: 13623 - DNA, 60 bp, Homo sapiens
ggacagaatgtgacagtgacagaaagagttctagcacctgcttccactctgcaatccagt

SEQ ID NO: 13624 - DNA, 60 bp, Homo sapiens
tcagcaagaggaggaacacatctgtggacgagaactatgagtgggactcagaattccctg

SEQ ID NO: 13625 - DNA, 60 bp, Homo sapiens
tcagccctgagtggaggtgtctggctctctgtaactgaggaggagacagccttacttcca

SEQ ID NO: 13626 - DNA, 60 bp, Homo sapiens
ggccacgtatgttgtgtaaatggatgaaacaggcccttgagttgggagcctgcttcactt

SEQ ID NO: 13627 - DNA, 60 bp, Homo sapiens
agaattggtccagtgacctatagcattgatggctgcgtcaggaatctccacatggcagag

SEQ ID NO: 13628 - DNA, 60 bp, Homo sapiens
gaaatgtccatcagcttcttttgaagggggcattttgttgcctggacttgctctcttttc

SEQ ID NO: 13629 - DNA, 60 bp, Homo sapiens
gatgcccttgtggcactggaagaagatcaatgccagagacaggctctaggagaaaccttt

SEQ ID NO: 13630 - DNA, 60 bp, Homo sapiens
cgagtccccagataatgctctgcaatttcgcctctatggcaaggactacaatgtctacac

SEQ ID NO: 13631 - DNA, 60 bp, Homo sapiens
ctgggaccgaaactcctcagctcctcaaatgagctggttactcgtcatctccctccagca

SEQ ID NO: 13632 - DNA, 60 bp, Homo sapiens
gaatgcaacgccattcgccaggctcttcaggatctgctttcagagtacatgaacaacgct

SEQ ID NO: 13633 - DNA, 60 bp, Homo sapiens
ctgtttgacgtttgagtgccggctttctgagtagagttaggaaaaccacgtaacgtagca

SEQ ID NO: 13634 - DNA, 60 bp, Homo sapiens
acacaaacatctctccagagtcagcctccacacagactccacagcagaactcccagggag

SEQ ID NO: 13635 - DNA, 60 bp, Homo sapiens
ttaacaaagggcctgacccttgaaaggcttactgctgcatggctgtctgcatgaaccacg

SEQ ID NO: 13636 - DNA, 60 bp, Homo sapiens
atcttccaaaggcccggatgtcgcttacagagtcaccaaagacgcgcagctcagcgcacc

SEQ ID NO: 13637 - DNA, 60 bp, Homo sapiens
agcttcgccttctatgtgcccctggtggtcctcatctccatctcccttgtgctgcagatc

SEQ ID NO: 13638 - DNA, 60 bp, Homo sapiens
tatctttcctcattacggtctttgggaatttccagacttgaagtatcttttggtggtgac

SEQ ID NO: 13639 - DNA, 60 bp, Homo sapiens
tggcaagcgggaaactggagcgagtgctctaccacctgtggcctgggtgcggtctggagg

SEQ ID NO: 13640 - DNA, 60 bp, Homo sapiens
gggactagaacaccacgctcagtaaatccagtctaaactgggaggtaggggtattcctgt

SEQ ID NO: 13641 - DNA, 60 bp, Homo sapiens
aatgctggaggacaagcctgaagacactgccacattcagtggggacgatttcagctgtgt

SEQ ID NO: 13642 - DNA, 60 bp, Homo sapiens
atgcgccttagcgtacgggtttgtgtgcggacgaatcactaggccttgtccttttgaagg

SEQ ID NO: 13643 - DNA, 60 bp, Homo sapiens
tcaatacaaccagcccaaccatcggtccacacctgggcatttggtgagaatcaaagctga

SEQ ID NO: 13644 - DNA, 60 bp, Homo sapiens
agatgggcttacattcccaaggcagctgatggaggtgtctcaactgttgcgactctacca

SEQ ID NO: 13645 - DNA, 60 bp, Homo sapiens
ccaggtgcagcagcagcagacagcagtacagacagctcaggctgcccagatggtggctcc

SEQ ID NO: 13646 - DNA, 60 bp, Homo sapiens
tgtctgcggaatcaccagtttgatactctctgtaatcagaacagtgggcagtgcctgggt

SEQ ID NO: 13647 - DNA, 60 bp, Homo sapiens
aaggcttctgaggcccagccgagcagcctgcttgtcagcatgccctgtggatcaagtcta

SEQ ID NO: 13648 - DNA, 60 bp, Homo sapiens
cagaaaacagcctggggaactctctgcaccccacagtcaccactatctctgaaccttata

SEQ ID NO: 13649 - DNA, 60 bp, Homo sapiens
ccaaaacaatcccgacaatcccttatccctaccccaaccctttgcggctctgtacacatt

SEQ ID NO: 13650 - DNA, 60 bp, Homo sapiens
ccaccagtgaccactttattccacttcctccattacccagttttggcccacagagtttgg

SEQ ID NO: 13651 - DNA, 60 bp, Homo sapiens
tgcctgttttgtctctaacttggctactggccgcaataattccatagtcaagagcatcac

SEQ ID NO: 13652 - DNA, 60 bp, Homo sapiens
tatgagacccaggtgatcgcctatgggcaaggcagcagcgaaggcctgagacagaatgtg

SEQ ID NO: 13653 - DNA, 60 bp, Homo sapiens
ggggaattgctggtttcaccatttcagatctgtgttgtctaagagtattaacgttttaat

SEQ ID NO: 13654 - DNA, 60 bp, Homo sapiens
gaggctttggcataggctgcaaaccaatttgggctcagagggaatatcagtgatccatac

SEQ ID NO: 13655 - DNA, 60 bp, Homo sapiens
tattccggtttccagagcacgtctccaggcttcgacgtcaccacgctgggacgtatgtgc

SEQ ID NO: 13656 - DNA, 60 bp, Homo sapiens
tgcagatacggagcaagaacagccagaatccaaacagcaagattgtgctgctggacgtgc

SEQ ID NO: 13657 - DNA, 60 bp, Homo sapiens
cttttcatgccttggcgtatcctttggcggattttctgttttcggaagttgctgggttcg

SEQ ID NO: 13658 - DNA, 60 bp, Homo sapiens
atggcgcttttgttgacccgaaggaattgacgtcgtgctgggttttgggcaactcattga

SEQ ID NO: 13659 - DNA, 60 bp, Homo sapiens
ggaattacgctcaacttcagaatctcactaaaagaatagatagtcctcctttaactgaaa

SEQ ID NO: 13660 - DNA, 60 bp, Homo sapiens
cctcagcgtggtctgcctgctgcactgctttggtttcatcagctgtttttcccaacaaat

SEQ ID NO: 13661 - DNA, 60 bp, Homo sapiens
tgagggcttcaacgtggacaagaagtgccagtgtgacgagctctgctcttactaccagag

SEQ ID NO: 13662 - DNA, 60 bp, Homo sapiens
cacttctgtctcacccggaagcgtcctttttttgtgccaggtgtctacctaagagggttg

SEQ ID NO: 13663 - DNA, 60 bp, Homo sapiens
ttctctcacccagagtaaggctcttcctggaagggactgggggttaaaggccactgtgtc

SEQ ID NO: 13664 - DNA, 60 bp, Homo sapiens
cagaaacatccgctatatgagtggtggaacagctactggtgatgccatttccttcactgt

SEQ ID NO: 13665 - DNA, 60 bp, Homo sapiens
cagtgtgcatatgaaccagcttggctgatgaggatcagcttgttagcctgcagattcctt

SEQ ID NO: 13666 - DNA, 60 bp, Homo sapiens
gctggactgtgtggtagttttacagacatgatggtttccggtgaccaggtgtctacaagg

SEQ ID NO: 13667 - DNA, 60 bp, Homo sapiens
tgcccggcagcaggagcgacactaccagttgctgtcggcgctacagagcctggtgaagga

SEQ ID NO: 13668 - DNA, 60 bp, Homo sapiens
ataagacactcttcgtccctgtcaatgaaggctttgtggacaacatgacgctgagtggcc

SEQ ID NO: 13669 - DNA, 60 bp, Homo sapiens
acaatgaggtcatccctggcctcaagtcttgtatgggactcaagattggagacacggtga

SEQ ID NO: 13670 - DNA, 60 bp, Homo sapiens
tatgcgaacagctcatccagagtcacatggccaggtacactgccatcctcaaccagattc

SEQ ID NO: 13671 - DNA, 60 bp, Homo sapiens
ccacgtctaaagcagtttcacagcatggtcccctacaatgttataccaaggctctgatgt

SEQ ID NO: 13672 - DNA, 60 bp, Homo sapiens
taattcactcgtgcatcccgcctgctgcgtttcagagctgactgttcagatgtgtcatgc

SEQ ID NO: 13673 - DNA, 60 bp, Homo sapiens
gcaagtgtttgtggagtttccatggtgatgtttacatccagggacagtttcgtctccctg

SEQ ID NO: 13674 - DNA, 60 bp, Homo sapiens
acagatttgagctatcagaccaacaaaccttccccctgaaaagtgagcagcaacgtaaaa

SEQ ID NO: 13675 - DNA, 60 bp, Homo sapiens
ttgggaacaatggatcccagcttagccccaaagaccaaccaaagagccagccagagtaag

SEQ ID NO: 13676 - DNA, 60 bp, Homo sapiens
gaatacaaaacaaataagccatcagcgctgcccttccttgatattgcacctttggacatc

SEQ ID NO: 13677 - DNA, 60 bp, Homo sapiens
tatggattccagctgctgtccacactcctgctctgcctgagcaacctcatgtttctgcca

SEQ ID NO: 13678 - DNA, 60 bp, Homo sapiens
tgcaggacattaataaagttgcttttttaggctacagtgtctcgatgccataatcagaac

SEQ ID NO: 13679 - DNA, 60 bp, Homo sapiens
ttactctcttcatccgttgtgactctaggcttcaggttgcattggggttcctctgtacag

SEQ ID NO: 13680 - DNA, 60 bp, Homo sapiens
cttttcattacccatgataggacttttgtgatatggctaatctcagtacacatttcaact

SEQ ID NO: 13681 - DNA, 60 bp, Homo sapiens
ctgggacgctgtacagagaccagctcagtcgtcagagaaaccatgaggtggtgtcctgca

SEQ ID NO: 13682 - DNA, 60 bp, Homo sapiens
tccagactgtgactcttcagcacccaaggctgctcaagctcaggaacctcagatagatga

SEQ ID NO: 13683 - DNA, 60 bp, Homo sapiens
cgccttgttcttctcaagagaaagttgtaactctctggtcttcatatgtccctgtgctcc

SEQ ID NO: 13684 - DNA, 60 bp, Homo sapiens
ccccagtgaggccacatatacatggaccaaggatggaaccttgttacagccctcagtaaa

SEQ ID NO: 13685 - DNA, 60 bp, Homo sapiens
gtcatgtataccagaggcttaggaggcgtttgagaggatactcatctttttggaatcctg

SEQ ID NO: 13686 - DNA, 60 bp, Homo sapiens
gcaaataggctatgttgagtacgtaggctgtgggaagatgaagatggtttggaggtgtaa

SEQ ID NO: 13687 - DNA, 60 bp, Homo sapiens; identical to SEQ ID NO: 4855

SEQ ID NO: 13688 - DNA, 60 bp, Homo sapiens
ccagcagggacatacaaatgccaatgcagtgctgtttagccaagtgaaagtgactccaga

SEQ ID NO: 13689 - DNA, 60 bp, Homo sapiens
tataccagtaggactgaatcagggccttcaaagctggactgagttggtcctgttctggca

SEQ ID NO: 13690 - DNA, 60 bp, Homo sapiens
tgggtggagctcgcacaaagcccatcaggtggtgaagaaggcatcaggcgataagattgt

SEQ ID NO: 13691 - DNA, 60 bp, Homo sapiens
gtgtgtctccgggcaagtcactgactctctctgggcctcagtattcccatctgtaaacta

SEQ ID NO: 13692 - DNA, 60 bp, Homo sapiens
cagcatcctgcaacacccactgctggaaatctcttcattgtggccttatcagatgtttga

SEQ ID NO: 13693 - DNA, 60 bp, Homo sapiens
cctggagcagcaaacatagatggagagtttgagggctttcgcagaaatgctgtgattctg

SEQ ID NO: 13694 - DNA, 60 bp, Homo sapiens
aagtgtcgtgtgtgtgagtgcaaccccaactacactggcagtgcatgtgactgttctttg

SEQ ID NO: 13695 - DNA, 60 bp, Homo sapiens
ggaggtgaggagcagagcaggcaatttcaccaccaaatgccaagaaaagggctgacattt

SEQ ID NO: 13696 - DNA, 60 bp, Homo sapiens
tacattttcctggagtacatttgtcacattcagctttgagccactgtaagcatgttacta

SEQ ID NO: 13697 - DNA, 60 bp, Homo sapiens
tgtagttcctatttctgtgggtttgcctggccatggttggagagggaatggtgtttgatg

SEQ ID NO: 13698 - DNA, 60 bp, Homo sapiens
agtggtgtggaatgatgattcctcctccaccctcaccatctataacgccaacatcgacga

SEQ ID NO: 13699 - DNA, 60 bp, Homo sapiens
gcaggtctgacgatctttggcatgatattcagcatggtcctctgctgtgcgatacgaaac

SEQ ID NO: 13700 - DNA, 60 bp, Homo sapiens
aagaggcagccaaactatgtggggacgatcatttctgcaactttgatgtggcagccactg

SEQ ID NO: 13701 - DNA, 60 bp, Homo sapiens
cggggacgcaggtgcagcccacggggatggtgacgtaggcctcggtgtagacggaacggc

SEQ ID NO: 13702 - DNA, 60 bp, Homo sapiens
ggaccgaactttccactgtgagatctgcaatgtcaaggtcaactcggaggtccaactgaa

SEQ ID NO: 13703 - DNA, 60 bp, Homo sapiens
aggagcctcctgaaggtggaagctatgctggttccctggctgagccctacgaggagctgg

SEQ ID NO: 13704 - DNA, 60 bp, Homo sapiens
ttttgttggtgagtagtctcatgccttgagatctgtggtggtcttcaaaatggtggccag

SEQ ID NO: 13705 - DNA, 60 bp, Homo sapiens
gcagagaacttgttgaggaagttgggattggaatgagcctcagcagatgggcaaggtttg

SEQ ID NO: 13706 - DNA, 60 bp, Homo sapiens
tgacccgctggagatgcacatggacatggatggagactaccccatcgacacctacagcga

SEQ ID NO: 13707 - DNA, 60 bp, Homo sapiens
agttatcactttagacctcccaggagctacactgcctgatgtgggcctggaactggaggt

SEQ ID NO: 13708 - DNA, 60 bp, Homo sapiens
accctcacacgggactacaactcactgacccgctcagaacactcacactcgaccacactg

SEQ ID NO: 13709 - DNA, 60 bp, Homo sapiens
ggccttccagagggtggacacattggaaatccagggtgatgtcaccttgtcctatgtcca

SEQ ID NO: 13710 - DNA, 60 bp, Homo sapiens
tgcgtacctatgcaagtgcctagctatgaagtcccaggcgtaaagggggatgttctatgc

SEQ ID NO: 13711 - DNA, 60 bp, Homo sapiens
ttcacccatcactggtgggttgcaggaacagcacccaggactctgaggagggacagagaa

SEQ ID NO: 13712 - DNA, 60 bp, Homo sapiens
cagtgccttgaaccttaggactgggtcttggggaggattagcgcctagatgtctgatttt

SEQ ID NO: 13713 - DNA, 60 bp, Homo sapiens
cccacctcctacctgggggacaaggtttcttcatatggtggttacctcacttaccaagcc

SEQ ID NO: 13714 - DNA, 60 bp, Homo sapiens
caacatctacaaggtggagggcggctgcatcaccaagttggagaccttcatccaggagca

SEQ ID NO: 13715 - DNA, 60 bp, Homo sapiens
tcccatccctagaactgctgcctctccctggatattccagctcaattagtgccacatatg

SEQ ID NO: 13716 - DNA, 60 bp, Homo sapiens
cggagttctcggacctcaactcggccatcacatatcgaattaccaaccactcacacttcc

SEQ ID NO: 13717 - DNA, 60 bp, Homo sapiens
gccccatttgtcacctcgcacacttatagcgtttcctcctcgaaattctaccaagactgg

SEQ ID NO: 13718 - DNA, 60 bp, Homo sapiens
ccttaggtccgaactacaatctggtcattagcgatctgaggatggaagacgcaggagact

SEQ ID NO: 13719 - DNA, 60 bp, Homo sapiens
gcctgccatgccagtaactgtgctgtactgagcactgaaccacattcagggaaatgctta

SEQ ID NO: 13720 - DNA, 60 bp, Homo sapiens
gcaagccttcatccgcctatccctccacaacgattgtcaatcctactattgtgctcttgc

SEQ ID NO: 13721 - DNA, 60 bp, Homo sapiens
ccaagagatcggtcttcaacagaaaagcatgactgggatcctccagacagaaaagtggac

SEQ ID NO: 13722 - DNA, 60 bp, Homo sapiens
ccaatctacagaaggcatggaaggtgcaggtggaaatgggagttctaatgtccacgtatg

SEQ ID NO: 13723 - DNA, 60 bp, Homo sapiens
tgccccagctactaaggtgctaggaattcgtaatcatccccatcctccagagaaacccag

SEQ ID NO: 13724 - DNA, 60 bp, Homo sapiens
ctgctccttctctagtttcccctctcatctgaccttagtttgctgccatcagtctagtgg

SEQ ID NO: 13725 - DNA, 60 bp, Homo sapiens
ggccacagaagagagatgaaacctgtaagaagtctggagtcttttggaacttcagccatt

SEQ ID NO: 13726 - DNA, 60 bp, Homo sapiens
gtcgtagaattccttcgaaaggccttcagacacatgctatgttctgtcttcccaaaccca

SEQ ID NO: 13727 - DNA, 60 bp, Homo sapiens
ttattacctctccagttcctaccgtactccctgcaccgtctcactgtgtgtctcgtgtca

SEQ ID NO: 13728 - DNA, 60 bp, Homo sapiens
cctcatgggcattgtctctgtttcccagtggggtggacagtatatcagatggtcagaaca

SEQ ID NO: 13729 - DNA, 60 bp, Homo sapiens
ccaaactgatccagtataagactactgaatctgctaccaaaacagttaatcagtgagtcg

SEQ ID NO: 13730 - DNA, 60 bp, Homo sapiens
atcaagttggagctggacggtgacagtcatatcctggagctgctacagaatagggagttg

SEQ ID NO: 13731 - DNA, 60 bp, Homo sapiens
tgtacttcctcagggatgggacacaggctggtctgatactccagactggcagcttgtcca

SEQ ID NO: 13732 - DNA, 60 bp, Homo sapiens
gcgaagcagagaacataaggggcggcggagacaggggaggagactggcgaccagcaccct

SEQ ID NO: 13733 - DNA, 60 bp, Homo sapiens
cagacagcttggaattccgcaaacaacagtttttacaccagtagcaagacttcctattgt

SEQ ID NO: 13734 - DNA, 60 bp, Homo sapiens
gacccgatttatgtgggtggattaccaaggtcaagagttgtaaggagaggtgtcaccacc

SEQ ID NO: 13735 - DNA, 60 bp, Homo sapiens
ctcaggatcttgaccttaggactttcgtcaaccccagcttctccctcacctccaacctct

SEQ ID NO: 13736 - DNA, 60 bp, Homo sapiens
cacgtggaacattctggagctggccatcccaaattcaatcagtccatagagacgaacaga

SEQ ID NO: 13737 - DNA, 60 bp, Homo sapiens
tttacaagctcagatgtctctgctctcctgaatcttgggcatgcctttctgtaaccaaaa

SEQ ID NO: 13738 - DNA, 60 bp, Homo sapiens
taagattaatccgctggctctgaaggagtacgtgaagttctccagcaagtacctgagaac

SEQ ID NO: 13739 - DNA, 60 bp, Homo sapiens
tcattcaattgggagagacaagtttcacatgccaaggagaaactgactgctctcacaaaa

SEQ ID NO: 13740 - DNA, 60 bp, Homo sapiens
gcagggactcgtgaaacagcaggatgttgatcagatgttttgggaggttatgcagttgag

SEQ ID NO: 13741 - DNA, 60 bp, Homo sapiens
tgaggaagatgggaaggagtaccactttatctcaacggaggagatgacgaggaacatctc

SEQ ID NO: 13742 - DNA, 60 bp, Homo sapiens
ggtagcagttggtactagaggacccaaagtacaactttgtgacttgaagtctggatcctg

SEQ ID NO: 13743 - DNA, 60 bp, Homo sapiens
tggttttcctctgctcctctgcctgtcctctcccaactcaaggttctagtgggaagggtg

SEQ ID NO: 13744 - DNA, 60 bp, Homo sapiens
gatgtgcaaatacacgtgcccactttcaccttcagagtaaccgttggtgacataacctgc

SEQ ID NO: 13745 - DNA, 60 bp, Homo sapiens
ttctgaatactgctgagccctggtgccttggcagagagacgagaaactccaggctctgag

SEQ ID NO: 13746 - DNA, 60 bp, Homo sapiens
tcaagtacctgtttgaccttctggatgagctagcagagaagcacggcatcgaggacccag

SEQ ID NO: 13747 - DNA, 60 bp, Homo sapiens
aaaaggtggaaggacagcgaccgggatgacttcctggatgactttggctctgagaatgag

SEQ ID NO: 13748 - DNA, 60 bp, Homo sapiens
cctgacttactacatcacaggaacagggccttcgtgggtagaaaccagccatgctgatgt

SEQ ID NO: 13749 - DNA, 60 bp, Homo sapiens
cggagaggagttcaggaacccttctccatacccacaatctgagcacgctaccaaatctca

SEQ ID NO: 13750 - DNA, 60 bp, Homo sapiens
gtttcttggtccgagattgttccacaaaatccaaggaagagccctatgttttggctgtgt

SEQ ID NO: 13751 - DNA, 60 bp, Homo sapiens
aaaagcatgccaaatcttggagctggccatcagcttcagatgtgctaccagatcagcagg

SEQ ID NO: 13752 - DNA, 60 bp, Homo sapiens
gtcttatcagctgcctctctccagaaatgaactgtgatggtggacacagctatgtgagga

SEQ ID NO: 13753 - DNA, 60 bp, Homo sapiens
taatcaacgcagtgaaagatgtagccaaagccctgggagacctcatcagtgcaacgaagg

SEQ ID NO: 13754 - DNA, 60 bp, Homo sapiens
gtgactcggatggtctttcacacggcacatttggacatttccagaactaccatgagatgg

SEQ ID NO: 13755 - DNA, 60 bp, Homo sapiens
gtcagctgtcaaggggagaccacagccttagtatgacatcctgcacaatttgtgaagcat

SEQ ID NO: 13756 - DNA, 60 bp, Homo sapiens
gcagtaatggggtctatgtttgccgtcattagccttgcgtccattgctgtgtactttgcc

SEQ ID NO: 13757 - DNA, 60 bp, Homo sapiens
tgagtctgaccaatggccagacacatgcctgcaacttgtaggtcaaggactgtccaggca

SEQ ID NO: 13758 - DNA, 60 bp, Homo sapiens
ttgagccagctgtgggatgttgctgcaggacagtaagccctcacctgggcaaacatgaag

SEQ ID NO: 13759 - DNA, 60 bp, Homo sapiens
agagatgtgacatggttcttggatttcctctgtagcagcctcctggacttcctgaggact

SEQ ID NO: 13760 - DNA, 60 bp, Homo sapiens
aagagttgtacgcccaggcaacaagggctgagctgcgcttgcgtggctgtttcatgaccg

SEQ ID NO: 13761 - DNA, 60 bp, Homo sapiens
aaatatgacctcaaaggctcaacctacaaacggcgggcttcccagaaagagcgagagaag

SEQ ID NO: 13762 - DNA, 60 bp, Homo sapiens
gccagtgtcagctcatgttccattggctctccacctgccatttttagggagctattcctt

SEQ ID NO: 13763 - DNA, 60 bp, Homo sapiens
gctggagagatgggcataagtcaggaacttgggaggaccaccaccctttcagaggcgtga

SEQ ID NO: 13764 - DNA, 60 bp, Homo sapiens
tagctaccctgtatcgaggcaaggggaggccagtaaagtttgccaagcctgatcctgcag

SEQ ID NO: 13765 - DNA, 60 bp, Homo sapiens
ggcagctattagtgtgggactgtgactgaggtcttaaagactgaaagagttggggttcat

SEQ ID NO: 13766 - DNA, 60 bp, Homo sapiens
gggccgcctgttcctccacgacaaagcacttctcaacatatccctaaactccctccaaaa

SEQ ID NO: 13767 - DNA, 60 bp, Homo sapiens
aactgatgggcatgaccgtccactcaccaactgctcgatcatcaacagtggcaagataga

SEQ ID NO: 13768 - DNA, 60 bp, Homo sapiens
aaagtcaaccaccatccgattcacctgcagcgagagccaagtgaactccaggcccatgtt

SEQ ID NO: 13769 - DNA, 60 bp, Homo sapiens
agaagtgagggtaccagctactgccttgtgtgtcttcgatgcacatgatggggaagtcaa

SEQ ID NO: 13770 - DNA, 60 bp, Homo sapiens
aactccagagttcttttctgactcccattggtgctccttctacaaggcaaggaatcttta

SEQ ID NO: 13771 - DNA, 60 bp, Homo sapiens
taaggtctcagagcagcactgtggctaattgtagctcaaaagatctgcagagctcccagg

SEQ ID NO: 13772 - DNA, 60 bp, Homo sapiens
ttatgtgaggctgaaggagaacctcaacccacaatcaagtggagagtcaatggctcccca

SEQ ID NO: 13773 - DNA, 60 bp, Homo sapiens
aggaattatgccaggaaggtgggaccgggttatggtcgggtttctattgggaatgctctt

SEQ ID NO: 13774 - DNA, 60 bp, Homo sapiens
gcagcagggagtcttgaagtgatcatttcacacccttttgtgagacggctggaaattctt

SEQ ID NO: 13775 - DNA, 60 bp, Homo sapiens
gctgctgcttttgtgctgggactctccggggaaacctggtcggtggatgggaaactgcct

SEQ ID NO: 13776 - DNA, 60 bp, Homo sapiens
cttctccatggccaccttttcagcgatgtatgcagctatctggtcaacctcctggacatt

SEQ ID NO: 13777 - DNA, 60 bp, Homo sapiens
tggagacccattaccaccgttaaccctcaatacagctctgctagtaagggattcgtctcc

SEQ ID NO: 13778 - DNA, 60 bp, Homo sapiens
cactgttctcagaagagtcacagtttggggtgagatctggaaatcaagaaatgggtgtcc

SEQ ID NO: 13779 - DNA, 60 bp, Homo sapiens
tttgagacctcagactgcataagtgatgccaaatgttggatgtccaggctagcaccctcc

SEQ ID NO: 13780 - DNA, 60 bp, Homo sapiens
gtgagctctgtcttcccccacctgcctagcccatcatctatctaaccggtccttgattta

SEQ ID NO: 13781 - DNA, 60 bp, Homo sapiens
accaaaggaacgaagtcgcaaatgaactgtaacctgggcacatgtcagctgcaacgcagt

SEQ ID NO: 13782 - DNA, 60 bp, Homo sapiens
ttccgcccacttctgtcaaggggactcgccgccccaagaacgtaagaaccgacatcaaaa

SEQ ID NO: 13783 - DNA, 60 bp, Homo sapiens; identical to SEQ ID NO: 4855

SEQ ID NO: 13784 - DNA, 60 bp, Homo sapiens
agcggagtttgacttgaacccggagttggctgagcagatcaaggagctgaaggctctgct

SEQ ID NO: 13785 - DNA, 60 bp, Homo sapiens
tccgagtgcagcagatggtgtccatgggcattgggaataaacccttcctggacatcaaag

SEQ ID NO: 13786 - DNA, 60 bp, Homo sapiens
gtcatcagccactgctactacatcttgccagaaggtttccctcgccaacaaacagttgaa

SEQ ID NO: 13787 - DNA, 60 bp, Homo sapiens
tctgtttccctgccagacaccacctttcccgtggacagagtggaacgcttggaattcaca

SEQ ID NO: 13788 - DNA, 60 bp, Homo sapiens
ggtagcccttgagccctgtccctgcggctgtgagagcagcaggaccctgggccagttcca

SEQ ID NO: 13789 - DNA, 60 bp, Homo sapiens
ggtcacataccagctcaggggagaatggagtactgtctcagtttctaaccactctgtgca

SEQ ID NO: 13790 - DNA, 60 bp, Homo sapiens
attgtctgggtatgtgatggtcgctgtctgctggtgtctggctttgacagccaaagtgag

SEQ ID NO: 13791 - DNA, 60 bp, Homo sapiens
atgtcatctttgcctactgacacccttgtccccacaagcagaagcacagaggggtcacta

SEQ ID NO: 13792 - DNA, 60 bp, Homo sapiens
tgctacctgctctaccgcctcgactcacagaatgctcagggcttcgaatggctcttcctc

SEQ ID NO: 13793 - DNA, 60 bp, Homo sapiens
cctggcttattccataccatttcccttgcagatttgcagaaacatggcatctttcactgc

SEQ ID NO: 13794 - DNA, 60 bp, Homo sapiens
caatgcgaacccaaatgcagcagatgcacggcagaatggttcccgtctgagccagtactg

SEQ ID NO: 13795 - DNA, 60 bp, Homo sapiens
agatatggcaagtcgtgtgcagttgtctggacctcaggaggcagagaaatacgttctgca

SEQ ID NO: 13796 - DNA, 60 bp, Homo sapiens
aactgagtttacacacgcttgtgtttgcaacactaggtctggatgggaggtgaggggtgt

SEQ ID NO: 13797 - DNA, 60 bp, Homo sapiens
cccaaatgtgaggggcgagaaacaagacaagctcctcccttgagaattccctgtggattt

SEQ ID NO: 13798 - DNA, 60 bp, Homo sapiens
aacctggtggtctcttctgagcttttggacttggggatgccaaacacgtgctcaccctca

SEQ ID NO: 13799 - DNA, 60 bp, Homo sapiens
gcatcactgtcctggaaatcacagttgggatagcaccatttctggatctcaaagggctgc

SEQ ID NO: 13800 - DNA, 60 bp, Homo sapiens
ccctgaaagatacccaggaatttcacaggaacagttctttgctgcctttatcctccaaag

SEQ ID NO: 13801 - DNA, 60 bp, Homo sapiens
tgcttcaaatggccaattgtgcagagggacaaagccacagccacactcttcaacggttac

SEQ ID NO: 13802 - DNA, 60 bp, Homo sapiens
gcgctgccgtgaagtggtggtcaggacccggaatgacaacagctggggtgacctggagac

SEQ ID NO: 13803 - DNA, 60 bp, Homo sapiens
tctgctgaagaacctgcccttcctggaacacctcgagctgattgggtccaacttctcctc

SEQ ID NO: 13804 - DNA, 60 bp, Homo sapiens
agctgactgttcttggtaactgattacctgccaattgctaccgagaaggttggaggtggg

SEQ ID NO: 13805 - DNA, 60 bp, Homo sapiens
catcagaggtatgaggaatgcagaggacctttggcatgcatctctcccagaggagatctc

SEQ ID NO: 13806 - DNA, 60 bp, Homo sapiens
caagtaggaagccagacgagctgtaaaacatgaacggaagagtggattatttggtcactg

SEQ ID NO: 13807 - DNA, 60 bp, Homo sapiens
gctccttggatacttcagactctggttacagattgtcttgatctcttggatctcctcaga

SEQ ID NO: 13808 - DNA, 60 bp, Homo sapiens
cacaagaggggatgagttgtgtgaataccccaagactcccatgagggagatgccatgagc

SEQ ID NO: 13809 - DNA, 60 bp, Homo sapiens
gattaagttgacacaggaacatatagaggccctattggacaaatttggtggggagcataa

SEQ ID NO: 13810 - DNA, 60 bp, Homo sapiens
gggagtggagctgctggtcccaaccactctggcagtatgaagttgcccagtaaaatcttg

SEQ ID NO: 13811 - DNA, 60 bp, Homo sapiens
atgatgttgtctacctaaaggtggccaagcccagcaatgcctacctgagtgacagctatg

SEQ ID NO: 13812 - DNA, 60 bp, Homo sapiens
ctgtctaacctgtgaccagtctgacccttacagcctctgacttaagctgcctcaaggaat

SEQ ID NO: 13813 - DNA, 60 bp, Homo sapiens
tagcaagcccagaccttccggtctaacgtctcacaccacgacggactccccttcctaata

SEQ ID NO: 13814 - DNA, 60 bp, Homo sapiens
tcgtgttgccattgcctctctcggatcctccaatcctcacgtccttcacctggtctctgg

SEQ ID NO: 13815 - DNA, 60 bp, Homo sapiens
atattcccactgggcagtgacgggggaagcttgggacccgctatccgctctttccgtcct

SEQ ID NO: 13816 - DNA, 60 bp, Homo sapiens
tattccaaacgtctatgctgctttgttcactgcagctcttgttcctttgacgtgcctcgt

SEQ ID NO: 13817 - DNA, 60 bp, Homo sapiens
gaaaccaagctgctggtgctggactttgatgtggacatgaagtgaagagcagaaaagatg

SEQ ID NO: 13818 - DNA, 60 bp, Homo sapiens
acgtggacaagctcgaaatcagagttgacctctggaatgccagtaacctgaagtttggag

SEQ ID NO: 13819 - DNA, 60 bp, Homo sapiens
accaattaggcagtagcagaaggcgggtgccgaagcacggggtctgggtgactaggaaga

SEQ ID NO: 13820 - DNA, 60 bp, Homo sapiens
ggctgtccaggagctaatctgaccgttctattgtgtggatgaccacataagaaggcaatt

SEQ ID NO: 13821 - DNA, 60 bp, Homo sapiens
ggtccctctgtcacttcctgaatcctgcttcctgcttcccagaggccgggatccggagcc

SEQ ID NO: 13822 - DNA, 60 bp, Homo sapiens
gggctttgttctccacagggtcaggtaagagatggccttcttggctgccacaatcagaaa

SEQ ID NO: 13823 - DNA, 60 bp, Homo sapiens
gctgtgaggaaacagccacatgttcgtcatgattgagctgtgaagtcttcttggacctgt

SEQ ID NO: 13824 - DNA, 60 bp, Homo sapiens
ccgggaagtcgatcctgcttatatcaagattgaggaggtcattgggacaggctcttttgg

SEQ ID NO: 13825 - DNA, 60 bp, Homo sapiens
tggcctctccttctgtctttacaagcactttgagcaaatcgcggcccactcctaagccgc

SEQ ID NO: 13826 - DNA, 60 bp, Homo sapiens
attcttggagccagcgtcagaggctatttcagatgagacagtataagccaagggctggtg

SEQ ID NO: 13827 - DNA, 60 bp, Homo sapiens
gcgagatttgaatgtgataagcagtttactaaaatccttcttcagaaaactccctgagcc

SEQ ID NO: 13828 - DNA, 60 bp, Homo sapiens
tatctagctgtctgccatctgagtgtccatctacattctgctgccaccagtcaccaaagg

SEQ ID NO: 13829 - DNA, 60 bp, Homo sapiens
acaggtccccaacagcgatactgctgtttctcgaggtaagagattcagccatccaattgg

SEQ ID NO: 13830 - DNA, 60 bp, Homo sapiens
taggaagcctcacttggccgtaacctcaggaaggttctctttgaccccatctcatttcga

SEQ ID NO: 13831 - DNA, 60 bp, Homo sapiens
gtgacaacttctccgtgaacctgctgaagaggcagaaaggctgtggaaagctgtatttcc

SEQ ID NO: 13832 - DNA, 60 bp, Homo sapiens
cgtaccccgtagatacattgtgcaacgttcttctgttattcccttgaggtggtaacttcg

SEQ ID NO: 13833 - DNA, 60 bp, Homo sapiens
ggaagcagcactaaaagcactctgagtcaagatgagtgggaaaccatctcaacaaacaca

SEQ ID NO: 13834 - DNA, 60 bp, Homo sapiens
tgctggtacataggaatctagcaaattcaggaaccaaggggaaatgttgtgagataacat

SEQ ID NO: 13835 - DNA, 60 bp, Homo sapiens
catggagcctgaagggtgcctagttgacttactgacaaaaggctctagttgggctgaaca

SEQ ID NO: 13836 - DNA, 60 bp, Homo sapiens
gccttgtgaaagacagatgtcagactaatcaggcttatccgatgtgctacatgagatgga

SEQ ID NO: 13837 - DNA, 60 bp, Homo sapiens
tacaatggatttgtgaagagcagattccatgagtaactctgacaggtattttagatcatg

SEQ ID NO: 13838 - DNA, 60 bp, Homo sapiens
gcctgaaaacccaaactatgctctcaaatgtactcttgtgggacacacggaagcagtgtc

SEQ ID NO: 13839 - DNA, 60 bp, Homo sapiens
taataagctacttgaacacagcttcatcaagcgctacgagacgctggaggtggacgtggc

SEQ ID NO: 13840 - DNA, 60 bp, Homo sapiens
agcaggattgtttctgcaacccctgatggccagggaagatgcataagcactaagctgtgt

SEQ ID NO: 13841 - DNA, 60 bp, Homo sapiens
tcttgtgagcagacacttccttagagatggctggtgccttgaagccttcagttatgccca

SEQ ID NO: 13842 - DNA, 60 bp, Homo sapiens
atagcgcaggtgtcttccatttacaccaaggggatattctgagtgtcataattccccggg

SEQ ID NO: 13843 - DNA, 60 bp, Homo sapiens
gtcacctctctcagagcatctggctgtttagcagaactcattctatccccaatcagctcc

SEQ ID NO: 13844 - DNA, 60 bp, Homo sapiens
aattcgtgctgcgcctagaaggggttatcgagaaggtgaactgggaccaagatcccaagc

SEQ ID NO: 13845 - DNA, 60 bp, Homo sapiens
ggaaaccctcctcatgtttgtcatcttctacctctgccattttcctgcaattccgcttcc

SEQ ID NO: 13846 - DNA, 60 bp, Homo sapiens
cctagggtctcttcttgcttgactcaatctacccagagatgccccttagcacacctagag

SEQ ID NO: 13847 - DNA, 60 bp, Homo sapiens
cctggtccaatgctgctgttgtctgaggaatggtttggtgagaacagatgttagaacttg

SEQ ID NO: 13848 - DNA, 60 bp, Homo sapiens
ggttgaccctactgtggattggtgggtttcggggtgaagcaagttcactacagcatcaat

SEQ ID NO: 13849 - DNA, 60 bp, Homo sapiens
ttctctgtggcccaaacttgtgggtcacaaaccctgttgagataaagctggctgttatct

SEQ ID NO: 13850 - DNA, 60 bp, Homo sapiens
gccaaagaggagatcaatgagatgaaggagctgagggaacacaatgagaacatgctccgg

SEQ ID NO: 13851 - DNA, 60 bp, Homo sapiens
ggacttcagtgagttcatcgtgttcgtggctgcaatcacgtctgcctgtcacaagtactt

SEQ ID NO: 13852 - DNA, 60 bp, Homo sapiens
aactgtgaagggttcctgtgattgcgtttagcgccctcccgttctgtccatttgtcttgt

SEQ ID NO: 13853 - DNA, 60 bp, Homo sapiens
gatagcattgaagctgaacttacaagaagagtagacatgatggaactgtgacaaaagcca

SEQ ID NO: 13854 - DNA, 60 bp, Homo sapiens
cggctacgcgatgagaaaacaagcatgagaagacagacagagaagcaatgacggcagcac

SEQ ID NO: 13855 - DNA, 60 bp, Homo sapiens
cttcttccagcgaaccaacagcgaagacatgaaactgcaagcacacatggtggctgagat

SEQ ID NO: 13856 - DNA, 60 bp, Homo sapiens
tccaaattcagccagcaacagtccttcgtacagattctccaggaggtgaatgactttgca

SEQ ID NO: 13857 - DNA, 60 bp, Homo sapiens
gtgctggcctcggaggagtttgagcagatagagagcaggcatagacaagaaagcggcttc

SEQ ID NO: 13858 - DNA, 60 bp, Homo sapiens
ctggtgaagtcatatcattggatgggactagtacacattccaacaaatggatcttggcag

SEQ ID NO: 13859 - DNA, 60 bp, Homo sapiens
aaagcgatgcggataacggcaggaggtaagagcgccatcgttgacacgaaatggggaagg

SEQ ID NO: 13860 - DNA, 60 bp, Homo sapiens
tgaggagagtgtgacatgtggggagaggaccagctgggtgcttgggcattgacagaatga

SEQ ID NO: 13861 - DNA, 60 bp, Homo sapiens
atggtgctgcaggatggccagaccttcaaccagatggaagacctcctggctgactttgag

SEQ ID NO: 13862 - DNA, 60 bp, Homo sapiens
cttataaccaagttggatacctgtgtatagcttcccaccttccatgagtgcagcacacag

SEQ ID NO: 13863 - DNA, 60 bp, Homo sapiens
cccgctgcttataaacctcagccctgaggctccagctcactctaccccatctccttgccg

SEQ ID NO: 13864 - DNA, 60 bp, Homo sapiens
gcttcctcgaaaaggtccctcgctgtggatggcacttatcgttctacagctaacatttgg

SEQ ID NO: 13865 - DNA, 60 bp, Homo sapiens
gggagaatccttggacctagaggacttacagccaaacaacttgaagcagaaaccggatgt

SEQ ID NO: 13866 - DNA, 60 bp, Homo sapiens
gtcatacactgattccactgtaaacaatctgtccagaattccagacaccttcagcaaact

SEQ ID NO: 13867 - DNA, 60 bp, Homo sapiens
cccacctctctaaaagacacaggaggatgacacagaaacaccgtaagtgtctggaaggca

SEQ ID NO: 13868 - DNA, 60 bp, Homo sapiens
cctgggctctggtccactactgccccagaccaccctcaaagctggtcttcagaaatcaat

SEQ ID NO: 13869 - DNA, 60 bp, Homo sapiens
tgccagtgggacccgcaaagctcgggtgctctatgactacgaggcagccgacagcagtga

SEQ ID NO: 13870 - DNA, 60 bp, Homo sapiens
acacatatcctgtgctcaaagaggacactccaaggcagcatgtggacgtcttcttccaga

SEQ ID NO: 13871 - DNA, 60 bp, Homo sapiens
taactctgagattctgtgtgctgccttatggggagtgaatttgctagtgggtacagagag

SEQ ID NO: 13872 - DNA, 60 bp, Homo sapiens
ccgccaagttgttcgaatgacttctgctaacatggacccagctatgatgtttcgacagag

SEQ ID NO: 13873 - DNA, 60 bp, Homo sapiens
gccggcaaagttcacatttctgaggccaccgcaaaatacttagatgaccggtacgaaatg

SEQ ID NO: 13874 - DNA, 60 bp, Homo sapiens
tctttcactgcgccttacagaagaaggtgcacaaggagtacagcaagtgcctgcgtcact

SEQ ID NO: 13875 - DNA, 60 bp, Homo sapiens
aagaaccagcaagcagacacaggaggccaccaatgaccagaacagagggactgagaccca

SEQ ID NO: 13876 - DNA, 60 bp, Homo sapiens
aagagggagcagcaatggcctagagtctcaggaacaagacaggtgcactgaggagatgaa

SEQ ID NO: 13877 - DNA, 60 bp, Homo sapiens
aaggcattgaagctgaatgtgccaactggcagttagaagcgaaagatggcattgggagaa

SEQ ID NO: 13878 - DNA, 60 bp, Homo sapiens
tggggccaaggtctacttcgcctattttaccaacacgtccagttacgagtacacggacgt

SEQ ID NO: 13879 - DNA, 60 bp, Homo sapiens; identical to SEQ ID NO: 4855

SEQ ID NO: 13880 - DNA, 60 bp, Homo sapiens
gtcacagaatacatggagaatggttccttggatagtttcctacgtaaacacgatgcccag

SEQ ID NO: 13881 - DNA, 60 bp, Homo sapiens
aataactcagagcatgtctttgaagatgctgggcgtctaccaccaccttatgtccccacc

SEQ ID NO: 13882 - DNA, 60 bp, Homo sapiens
ataatgaaccatccgagtctcaagaggcaagaaccgggaggactgtctattcccaggagg

SEQ ID NO: 13883 - DNA, 60 bp, Homo sapiens
agaaggagagcctggaaagtgccttgatggggacccaccaggagctggagatgtttggaa

SEQ ID NO: 13884 - DNA, 60 bp, Homo sapiens
agaagaacatccaaggagaaacagagacaggcccaagagatgaagagtgagagggcatgc

SEQ ID NO: 13885 - DNA, 60 bp, Homo sapiens
atctgcaggaatgggtggagcacctacagaagcaaacgaaggtcacgtctgtgggaaacc

SEQ ID NO: 13886 - DNA, 60 bp, Homo sapiens
tgaccttcctcagtcatttctgcaaagccaaggggcagcctcctgtcaaggtagctagag

SEQ ID NO: 13887 - DNA, 60 bp, Homo sapiens
aagattttggacagggtgctgtcaagatacgatgtccgcctgagaccgaattttggaggt

SEQ ID NO: 13888 - DNA, 60 bp, Homo sapiens
tgttctcagattgtgcatgagcagccgagcctgctaaccgcagctccgcacttgtccatc

SEQ ID NO: 13889 - DNA, 60 bp, Homo sapiens
gaatggcagaaaccctggtggtcgaggaggaaatccccgaaaaggtcgaattttgggtat

SEQ ID NO: 13890 - DNA, 60 bp, Homo sapiens
ggcagcagaggcaccgtgttctctcagccctggatacgtcttgtaatctttcacacttta

SEQ ID NO: 13891 - DNA, 60 bp, Homo sapiens
tcagcgcctatcctggtggtcatggtgatcttgctcaacatcggagtcgccattctgttt

SEQ ID NO: 13892 - DNA, 60 bp, Homo sapiens
acgtccaagatcgtgcgcatgtgcgcgggagactcagagttctactcatacgtggaattc

SEQ ID NO: 13893 - DNA, 60 bp, Homo sapiens
agagctcgattgaaaactgtgaagttccatgccaggacggggatgattgagtctaacagg

SEQ ID NO: 13894 - DNA, 60 bp, Homo sapiens
cgggaaggatctgtatcaagccgttctggagagtgcagtcctgttcctatgggttcattt

SEQ ID NO: 13895 - DNA, 60 bp, Homo sapiens
agatgcaaaactataggagtctttagaagaagcaaccagccggactgtcttgaaacgcga

SEQ ID NO: 13896 - DNA, 60 bp, Homo sapiens
ttccaaatccatgggaaccagcacaggagctacagcaaatcatggcacttctgcagtagc

SEQ ID NO: 13897 - DNA, 60 bp, Homo sapiens
tgaaggcattgcgcgtagtccatgcccgtagaggaagtgtgcagatgggattaacgtcca

SEQ ID NO: 13898 - DNA, 60 bp, Homo sapiens
gcagaaaggtggtcagatgaccagtgtagtgcaggaaacagccctgtctcaactaatgga

SEQ ID NO: 13899 - DNA, 60 bp, Homo sapiens
ggctgagcagcacgctggaaactgtgacttggtgatgcccagctgcacacgaaattacac

SEQ ID NO: 13900 - DNA, 60 bp, Homo sapiens
tgtgaagaagtaagagattacgttgaagaacgatctggcgaggatccactggtaaagggc

SEQ ID NO: 13901 - DNA, 60 bp, Homo sapiens
aagcctctacgagtcttctctccgaatagaaccaaaactccccacctgaagctgtgccca

SEQ ID NO: 13902 - DNA, 60 bp, Homo sapiens
tgggctggcattggtcacaccaggcctaagaaggcagaagttgaatcaattgaactaggg

SEQ ID NO: 13903 - DNA, 60 bp, Homo sapiens
ctcctggcgatgaaccctagccccactccagggccacagtaccccagcctcacacatgca

SEQ ID NO: 13904 - DNA, 60 bp, Homo sapiens
cttcttgaccattagtggataggaaaaaaatgctctgattttctgtaaccatttgtcacc

SEQ ID NO: 13905 - DNA, 60 bp, Homo sapiens
acagcactattgcaagccttgggctagcttttccttcacagaacggatctgcagctgttg

SEQ ID NO: 13906 - DNA, 60 bp, Homo sapiens
cgcagcttcatcccctttccaatcttccaacaagtccatctgtactcctagcaggagcat

SEQ ID NO: 13907 - DNA, 60 bp, Homo sapiens
gtgtgcagagggtcgcgcacctagaagcctgtcgctggcacggtctgggcgggaggttct

SEQ ID NO: 13908 - DNA, 60 bp, Homo sapiens
tagaccagccgagctgcaagggcctgtatgacttggagccggagaaagatagggagctgg

SEQ ID NO: 13909 - DNA, 60 bp, Homo sapiens
tcagcgatgcactgctggatgccggcgagcccatgaagcacctggcagaggtgaaggact

SEQ ID NO: 13910 - DNA, 60 bp, Homo sapiens
ggagaactacgtgtgaaggtattcaaggcagggagtatacattgctgtttcctgttgggc

SEQ ID NO: 13911 - DNA, 60 bp, Homo sapiens
gggccgtcttcctgtggttgtatgcactgatgagaaatcaggtgtttctgctccaaacga

SEQ ID NO: 13912 - DNA, 60 bp, Homo sapiens
ggagtgactgaacttagaactgttgggaatgttccagatgtctacacccagattatgctt

SEQ ID NO: 13913 - DNA, 60 bp, Homo sapiens
ccaggctgtagtcagtaaactggcttaacagagaacaagcttttacagacgtccttaagg

SEQ ID NO: 13914 - DNA, 60 bp, Homo sapiens
gcttcagctgtaattctgcttctgagagagacaagtggatggaaaaccttcgcaggacag

SEQ ID NO: 13915 - DNA, 60 bp, Homo sapiens
agcgctttgcacatgcaccctcctgagtttgggattctgccaaatgaccaacttgatcct

SEQ ID NO: 13916 - DNA, 60 bp, Homo sapiens
ggaaacaacagcctagatcactgttgaaggtgttcatggcatagttggagtctctgactg

SEQ ID NO: 13917 - DNA, 60 bp, Homo sapiens
acgagggagcaggtcaccgaggccttcagagagttcactaaaggaaaccataacatcctg

SEQ ID NO: 13918 - DNA, 60 bp, Homo sapiens
ctccgagacctgaaaggagctctggaaagtctgattgaagaggaaactgggcagaagaag

SEQ ID NO: 13919 - DNA, 60 bp, Homo sapiens
gaaagacttggacacagagaagtatttccatttggtgctgcctacggacgagctggcgga

SEQ ID NO: 13920 - DNA, 60 bp, Homo sapiens
cggacaggacggtgaagcacttcagcaccgaggatggcatattccagggtcagagacact

SEQ ID NO: 13921 - DNA, 60 bp, Homo sapiens
ctacgtgggcaacgtgcagctctgctcgcggctgaaggaacacatcgacagctttgagga

SEQ ID NO: 13922 - DNA, 60 bp, Homo sapiens
ggagcacggaagcacacacaagctctttatgaattctgctctccatcagaaacactgcct

SEQ ID NO: 13923 - DNA, 60 bp, Homo sapiens
cccctattttaagacgtgaatgtctcagcgaggtgtaaagttgttcgccgcgtggaatgt

SEQ ID NO: 13924 - DNA, 60 bp, Homo sapiens
ttcaagaggtcatgaagtttgccaaggaacggcaaccagatgaagctgtgggaaaggtgg

SEQ ID NO: 13925 - DNA, 60 bp, Homo sapiens
aggcctgggtgatacatggtggaagagaagattccagagacttatgccaggatcccacca

SEQ ID NO: 13926 - DNA, 60 bp, Homo sapiens
cttagccactcttacccatgctctttccctggaatccctggagacctgtccaagatgatt

SEQ ID NO: 13927 - DNA, 60 bp, Homo sapiens
gaactgcagacattcctctcacagctagaactgaaacaaaccctcttgctaggggtggtc

SEQ ID NO: 13928 - DNA, 60 bp, Homo sapiens
gcactgccacgagatgatggtacatctaggaaaactagacacaatagtactgatctgccc

SEQ ID NO: 13929 - DNA, 60 bp, Homo sapiens
agtgaaatctgccgtggccaatttcatgggcggcatcatggctggcagctcaggctccga

SEQ ID NO: 13930 - DNA, 60 bp, Homo sapiens
ccagtcatgggtgctagcctagtctccacacaccagcaagtagaacccaagtgtattgta

SEQ ID NO: 13931 - DNA, 60 bp, Homo sapiens
acaacatacttgtcccatgagcaggtgcctgagacacagacccctttgcattcacagaga

SEQ ID NO: 13932 - DNA, 60 bp, Homo sapiens
ctccagtttcacgggcacattttacctcagccaccgagaaggctacggcaccatgtacat

SEQ ID NO: 13933 - DNA, 60 bp, Homo sapiens
cagccaacagccacctcagccacagcaaccatattctcagaaggctctgctataggaccc

SEQ ID NO: 13934 - DNA, 60 bp, Homo sapiens
gcttgtgcagaagattggagaaggcttgtattagtcccaagccacagaagccatgggata

SEQ ID NO: 13935 - DNA, 60 bp, Homo sapiens
gaaaactttctgtgtgaatggaggggagtgcttcatggtgaaagacctttcaaacccctc

SEQ ID NO: 13936 - DNA, 60 bp, Homo sapiens
gcttgtgcgtgtcaaaagaaggaacagctcgttctgcttcctgctgagtcggtgaattct

SEQ ID NO: 13937 - DNA, 60 bp, Homo sapiens
cagaagctgactgtacattcctgttctgttgtgaagagaacattcccagaccctggcacc

SEQ ID NO: 13938 - DNA, 60 bp, Homo sapiens
aatctgtgttccaaaagtggacatagcatgtacaggcagttttctgtcctgtgcacaaaa

SEQ ID NO: 13939 - DNA, 60 bp, Homo sapiens
tcgtgcacatgggtctgctcaagagtgaagacaaggtcaaggccattgccaacctgtacg

SEQ ID NO: 13940 - DNA, 60 bp, Homo sapiens
acgtctcactcgctgtcacattgcatcgactgaagttcctggggtttgcaaggagaaact

SEQ ID NO: 13941 - DNA, 60 bp, Homo sapiens
ctcacccaacagatctttccagaggtccatggtggaagacgataaccctgtgaaatactt

SEQ ID NO: 13942 - DNA, 60 bp, Homo sapiens
gggtgtcgagaagccccattctctcctatcagctaacccattatggcaacaaagggccct

SEQ ID NO: 13943 - DNA, 60 bp, Homo sapiens
catcgtggggcatgtggcaaaacacacagctgagtttgcagctcaccttgtgaagatgaa

SEQ ID NO: 13944 - DNA, 60 bp, Homo sapiens
gtaacacttggctcttggtacctgtgggttagcatcaagttctccccagggtagaattca

SEQ ID NO: 13945 - DNA, 60 bp, Homo sapiens
ggaagagtctaccgaccttgttggcaagtctgatacctgttggtccacatcatcttttca

SEQ ID NO: 13946 - DNA, 60 bp, Homo sapiens
tctgctgtgcagagagaggcaggaaggatccctgaagagtcttggagaaaaggttctgtg

SEQ ID NO: 13947 - DNA, 60 bp, Homo sapiens
aatcagtcaccagttttggaaccagtaggccgctctactcttgctcagcggagaggtatt

SEQ ID NO: 13948 - DNA, 60 bp, Homo sapiens
cagcctgtggaataatagcaggtgaagacttcatagaaggcgacagattgatagggaggc

SEQ ID NO: 13949 - DNA, 60 bp, Homo sapiens
gagctcggtaccctccttgtaatccaagcagtcgtccgctgccatatcgttccgcctggg

SEQ ID NO: 13950 - DNA, 60 bp, Homo sapiens
gtcattctccaactcttactttgtaccacggaatcacttggccttaaagctagccagctc

SEQ ID NO: 13951 - DNA, 60 bp, Homo sapiens
cggtgcaggtaggtcattaacaccacttcttttcatctgtaccacaccctggtgaaacct

SEQ ID NO: 13952 - DNA, 60 bp, Homo sapiens
ctaaggtttgttcaggttgctgcaagctcagctgaatctgtgagcctgaggtctgtttca

SEQ ID NO: 13953 - DNA, 60 bp, Homo sapiens
atacccacaagagaggtatgtcactcatcttacttcccaggacatccaccctgagaataa

SEQ ID NO: 13954 - DNA, 60 bp, Homo sapiens
cagcagcacgtcgccatccgtcaccagaattagtcctcacagcctaggaccagttttgta

SEQ ID NO: 13955 - DNA, 60 bp, Homo sapiens
ataggaaaactgccatttacatccattgtgtgcattatttgccctcatctccccaaacag

SEQ ID NO: 13956 - DNA, 60 bp, Homo sapiens
gctggagggtgaagaggtgaacacttgagtggttagagctgtagatagacattgtgggga

SEQ ID NO: 13957 - DNA, 60 bp, Homo sapiens
aatatgcaggaaccaattgctcttcatgagatggacactagcaatggggtgttgctgcct

SEQ ID NO: 13958 - DNA, 60 bp, Homo sapiens
gacgagtacaaaattggacagctgtacatgatcagcaaacacagccatgaacagagtgac

SEQ ID NO: 13959 - DNA, 60 bp, Homo sapiens
ccttttcttaggatcttgggagggaatggatgcccctctctgcatgatcttgttgaggca

SEQ ID NO: 13960 - DNA, 60 bp, Homo sapiens
ggataatgggagacagtggtagagaggtttttcttgggaaagagacagagtgctgagggg

SEQ ID NO: 13961 - DNA, 60 bp, Homo sapiens
tcggcaacagactcttccatggaggagatctttcagcacctgatggcctatcaccaggag

SEQ ID NO: 13962 - DNA, 60 bp, Homo sapiens
tgcacacctggagaaaggccacagtggcaaggcaaaatctacttctgcctcgaaagagct

SEQ ID NO: 13963 - DNA, 60 bp, Homo sapiens
cggcagagcacagatttgcctactggctgggaagaagcatatacttttgaaggtgcaaga

SEQ ID NO: 13964 - DNA, 60 bp, Homo sapiens
ccgcatcccatactaaaagctatggaagagagagcaattcaacgagctgaatgtaggcgg

SEQ ID NO: 13965 - DNA, 60 bp, Homo sapiens
ttgctctggtgagtgacaagctgtaccagcggaaagagcctgtcatcagttctgtgcaca

SEQ ID NO: 13966 - DNA, 60 bp, Homo sapiens
gaaggcagcatgaaagtcctggaaaagaggctgaaggacatggggttccagtacagctgt

SEQ ID NO: 13967 - DNA, 60 bp, Homo sapiens
taaatcgcattctgtctctttaaggagtgtttggccgcgacgagttggaaagcccggatg

SEQ ID NO: 13968 - DNA, 60 bp, Homo sapiens
ctccatcgctgaaagagattccagtgggacatggtgccgtttttctgtttgccttcttgc

SEQ ID NO: 13969 - DNA, 60 bp, Homo sapiens
tcagtctctgacctgcactatagcctgggaaagtgccttgacttctctaggcctcagttt

SEQ ID NO: 13970 - DNA, 60 bp, Homo sapiens
catacgggtccatgctccacttctctccaaggtgtccatggccattcaactcaacaatca

SEQ ID NO: 13971 - DNA, 60 bp, Homo sapiens
attctaagagaagtgcatgtgaagaatggttgccactgttattagattgacaagatgtta

SEQ ID NO: 13972 - DNA, 60 bp, Homo sapiens
gactgacacctatggctggaagatgacttgttttgctccatgtctcctcattcctacacc

SEQ ID NO: 13973 - DNA, 60 bp, Homo sapiens
gagctcagatccagcaccatgttcctcctgacccatcctgtctatcttctcagttgagtt

SEQ ID NO: 13974 - DNA, 60 bp, Homo sapiens
ggcgtgacagataagagtggcatttctatggatgactttacgcccccaggatctggggcg

SEQ ID NO: 13975 - DNA, 60 bp, Homo sapiens; identical to SEQ ID NO: 4855

SEQ ID NO: 13976 - DNA, 60 bp, Homo sapiens
aactcaccgtattcttcatttcccctcgtgaatcctccaggcctttctctacaacctgga

SEQ ID NO: 13977 - DNA, 60 bp, Homo sapiens
ccatctcctccgacttcgctgtcaaaatccgtgagctgtctgactacctgcttcaagatt

SEQ ID NO: 13978 - DNA, 60 bp, Homo sapiens
atagagcagatggatgtgacaatgagtggggaagcatcggcaccacttccaatacgacag

SEQ ID NO: 13979 - DNA, 60 bp, Homo sapiens
tcctggggatctgcctctctgtggtctccatcctgactcttgaacttacccacaataaga

SEQ ID NO: 13980 - DNA, 60 bp, Homo sapiens
ttttatgctgcatcaggtggagagcaaggctcaacggtggttgcattagttccctcggaa

SEQ ID NO: 13981 - DNA, 60 bp, Homo sapiens
agcaagtagaaagaggataccggatgtcagctccccagcactgtccagaggatatttcca

SEQ ID NO: 13982 - DNA, 60 bp, Homo sapiens
gcccctgcaaagggtattgatggacttcctgccagtgacagagcatgtctattgcaaaca

SEQ ID NO: 13983 - DNA, 60 bp, Homo sapiens
agtggtcttagagaagctgagcaaggacactcactgggtacctgttagttgggtcaggta

SEQ ID NO: 13984 - DNA, 60 bp, Homo sapiens
catctctcaattacgggacagtccctctttggaagcaggctcctgtgctttcctgtgtta

SEQ ID NO: 13985 - DNA, 60 bp, Homo sapiens
cagtccctcacatcttcatccctttcaagccctgatatcttcgactccccaagtcccgaa

SEQ ID NO: 13986 - DNA, 60 bp, Homo sapiens
tgcgggacttgctgattcaagagctgttggcctgcttgctggatcagacaaacctctgca

SEQ ID NO: 13987 - DNA, 60 bp, Homo sapiens
cggagagataggcgatgcagactcgcgattcaatgatcgatatgctcataaaagtgctca

SEQ ID NO: 13988 - DNA, 60 bp, Homo sapiens
gaagagaagagtggtaccatatgttgcaggaagtcaaactggactttttgtggctactaa

SEQ ID NO: 13989 - DNA, 60 bp, Homo sapiens
ggcaggacatataccatcaccagtgattccccaagagagttctgttgagatcgataatga

SEQ ID NO: 13990 - DNA, 60 bp, Homo sapiens
attgagcacagcaaggctgttgagatcctgaagacagctcgtgaaatcagcatgcgtgtg

SEQ ID NO: 13991 - DNA, 60 bp, Homo sapiens
gggcttgcagctgttgctgtctctgctggccttcatctgtgaagaagttgtatcacaatg

SEQ ID NO: 13992 - DNA, 60 bp, Homo sapiens
tatgcagtgcacctaatctggcttcatgcaattgttacttcagctactgattcaaagcca

SEQ ID NO: 13993 - DNA, 60 bp, Homo sapiens
catgtggcagatcccacaggagtttgtcaagcttcaagttagccaagaagagttcctctg

SEQ ID NO: 13994 - DNA, 60 bp, Homo sapiens
catgaagtcaccagtctcaagcccatgtggtaggcggtgatggaacaactgtcaaatcag

SEQ ID NO: 13995 - DNA, 60 bp, Homo sapiens
tcggtgtgaatggaaggaaacgctgcctctgcttgcgtgactctgctccccgattctcca

SEQ ID NO: 13996 - DNA, 60 bp, Homo sapiens
cgcacagtacttgcttgacaaagaccttatcatagatgaagatacgctatatgagctgtc

SEQ ID NO: 13997 - DNA, 60 bp, Homo sapiens
aagcagctatccatcctaaaggtagaccagaatcggctgtgcgaggtgactgaggccatc

SEQ ID NO: 13998 - DNA, 60 bp, Homo sapiens
gcctgaaggcctgaactatgcctgtctcactcacagtggatatggagatgggtctgatta

SEQ ID NO: 13999 - DNA, 60 bp, Homo sapiens
tgtgactctgggcgacaagaagaactataaccagccatcggaggtgactgacagatatga

SEQ ID NO: 14000 - DNA, 60 bp, Homo sapiens
aggtttaagaacacagaagccattgggaacgaagtgacccgtctcgttcggttggacccg

SEQ ID NO: 14001 - DNA, 60 bp, Homo sapiens
agatgttctttggcatcatcatctgtgcactggccacgctggctgctaagggcgacttgg

SEQ ID NO: 14002 - DNA, 60 bp, Homo sapiens
ccagtagagacttgcataaagatcctaaacagatgcattgttgcttttctgtgctgtctc

SEQ ID NO: 14003 - DNA, 60 bp, Homo sapiens
gggtctcattgctcagggagtgaaatgtgcagattgtggtttgaatgttcataagcagtg

SEQ ID NO: 14004 - DNA, 60 bp, Homo sapiens
ttcctggtaacccctttgaggaacccacctgtatcaacccctttgagatggacagtgaca

SEQ ID NO: 14005 - DNA, 60 bp, Homo sapiens
gccagaaatgttggtcaagtttgcccttagatgtctacaactagctggcataggttgcca

SEQ ID NO: 14006 - DNA, 60 bp, Homo sapiens
tactaccactgcaagtgactgctgtccgctgcggaatctgttcttggtggaagcacaggt

SEQ ID NO: 14007 - DNA, 60 bp, Homo sapiens
tggggtagtgaagctattgagaagaaagcattgctgtttcacgccagtgcatggggcatc

SEQ ID NO: 14008 - DNA, 60 bp, Homo sapiens
caccttggaccctcagaggctcagcactggtcccatggctggtaccctggaggaaagcga

SEQ ID NO: 14009 - DNA, 60 bp, Homo sapiens
gctgcaggcttcattaggctcctgctgtcctccatgatgtgactagcacaaggtgtatat

SEQ ID NO: 14010 - DNA, 60 bp, Homo sapiens
catgaaccccattgtctatgccttccgcatccagaagttccgcgtcaccttccttaagat

SEQ ID NO: 14011 - DNA, 60 bp, Homo sapiens
caggattcagcagcatggacagtcactcttgcactattccttctccaagccagaaaccac

SEQ ID NO: 14012 - DNA, 60 bp, Homo sapiens
ggctttgtgcttggggctatttgtgtgtatgctgatgatcaaaacctgtgccaggctgaa

SEQ ID NO: 14013 - DNA, 60 bp, Homo sapiens
cctggcagcagaagtgggtgcaggaaggtggcagtgaccagcgccctggaccatgcagtt

SEQ ID NO: 14014 - DNA, 60 bp, Homo sapiens
ggagggaaagtggagctgagcttgtcacagacggatgcaagtgtgaactcagaacatttc

SEQ ID NO: 14015 - DNA, 60 bp, Homo sapiens
gcaagagaacaatgtttcttcagtggcaaatgtagccctgcatcctccagtgttacctgg

SEQ ID NO: 14016 - DNA, 60 bp, Homo sapiens
aaatgcgggcaaaactgttccgatttgcctctgagaacgatctcccagaatggaaggagc

SEQ ID NO: 14017 - DNA, 60 bp, Homo sapiens
ttatgaaagaagtcattccttttttgaaggaggatccaaagtgggaattccctcggaaga

SEQ ID NO: 14018 - DNA, 60 bp, Homo sapiens
actttctaggttggaatcgggaggtagtaatcctacaaccagtgattcttacggtgaccg

SEQ ID NO: 14019 - DNA, 60 bp, Homo sapiens
agggacgtgtctgtgctcctgcgtgtgaccagggttgactaaactctgccaggatgtctt

SEQ ID NO: 14020 - DNA, 60 bp, Homo sapiens
catccgcatgtatgatctcaactccaataaccctaaccccatcatcagctacgacggcgt

SEQ ID NO: 14021 - DNA, 60 bp, Homo sapiens
gtcagaggaccagcatctaactacttggaccagatggaagaatatgacaaagtggaagag

SEQ ID NO: 14022 - DNA, 60 bp, Homo sapiens
gaagactgtatagtcactgcttgtcaggagggatttatttgcacatggggaaggcctggt

SEQ ID NO: 14023 - DNA, 60 bp, Homo sapiens
gaggtgggccacacccaggaagggaaagcgggcagccccgttttggggacgtgaacgttt

SEQ ID NO: 14024 - DNA, 60 bp, Homo sapiens
accccacttcagcctcccccactcttgccgcctccatatcatcaagctctggtggcgcct

SEQ ID NO: 14025 - DNA, 60 bp, Homo sapiens
gcggtggattcacagatagcatctgatggctccatacctgtggatttccttttgcccact

SEQ ID NO: 14026 - DNA, 60 bp, Homo sapiens
tctgccctgactcacaagacctttcaaccagtcctagagcctgtagctgcttcaagctta

SEQ ID NO: 14027 - DNA, 60 bp, Homo sapiens
atcggattcatcctggtgatagaccggcgacgggacaaatggacctccgtgaaggcgtcc

SEQ ID NO: 14028 - DNA, 60 bp, Homo sapiens
ctgcctcctttgaccttgttcaatcactatgaagcagagtgaaagctgtggtagagtggt

SEQ ID NO: 14029 - DNA, 60 bp, Homo sapiens
agcagtcaaacatgctgaccgctcaagagattctacatcagtttggtttcactcagaccg

SEQ ID NO: 14030 - DNA, 60 bp, Homo sapiens
taacgacgttcggtccagtaacaaaccatcaacagcagtcgacgagctgacctcacagat

SEQ ID NO: 14031 - DNA, 60 bp, Homo sapiens
ggagatgggtgattccttcaattcaaaagctctctttggaatgaacaatgtgggcgtttg

SEQ ID NO: 14032 - DNA, 60 bp, Homo sapiens
cgtgtgtgcatgtgactgtgctgggttggaatgtgaacaataaagaggaatgtccaagtg

SEQ ID NO: 14033 - DNA, 60 bp, Homo sapiens
tcaacttcaacgtgtcaggcctcttctcagctgttaccctccaggacacagtcagtgaca

SEQ ID NO: 14034 - DNA, 60 bp, Homo sapiens
ggagacccctgttaagtcaagaagaaagtacagaggatgtcagaatctgatgagaacagc

SEQ ID NO: 14035 - DNA, 60 bp, Homo sapiens
caagggtgagaacctggccattggctttgacatctacaaggtggaggagaaccgccagta

SEQ ID NO: 14036 - DNA, 60 bp, Homo sapiens
atagacacaaatgcagtgggaagaagaccaggggacaagaggcaagttggagtgatgcag

SEQ ID NO: 14037 - DNA, 60 bp, Homo sapiens
gtcggaggaacaccatgctgacatgtatagaagtgacttacccaatcctgacacgctgtc

SEQ ID NO: 14038 - DNA, 60 bp, Homo sapiens
ctgtgacttgcagcctatctttgatgacatgctccactttctaaatcctgaggagctgcg

SEQ ID NO: 14039 - DNA, 60 bp, Homo sapiens
ctcagaaagacctaacatctcaaggatgcactgggaaccatgcctgggctttcaccttga

SEQ ID NO: 14040 - DNA, 60 bp, Homo sapiens
tcatgaacaacatcctgccccgcgtggtcaagatgcacctcaagttcgacctcaagggct

SEQ ID NO: 14041 - DNA, 60 bp, Homo sapiens
gacagtctatgtaacagctggaaagtttataggcacccacctttgggacaacccagtgat

SEQ ID NO: 14042 - DNA, 60 bp, Homo sapiens
gattactgtcaaaccagcatggttaattgtgagcatcctctgcagcatgccccttaagat

SEQ ID NO: 14043 - DNA, 60 bp, Homo sapiens
acagtcccaagggctatgcagatggactccattggcacagggaggtttgacctcttccct

SEQ ID NO: 14044 - DNA, 60 bp, Homo sapiens
tcagccgattagcccgccttactatgctaggaaggagaacacatccctcacttggtcctt

SEQ ID NO: 14045 - DNA, 60 bp, Homo sapiens
ttgctatggggacctggaacgtgaacggaggaaagcagttccggagcaacgtgctcagga

SEQ ID NO: 14046 - DNA, 60 bp, Homo sapiens
ggcgttcttccttgcaagttgaaacattattgtgctaggattgctctctagacaagccag

SEQ ID NO: 14047 - DNA, 60 bp, Homo sapiens
tcacctgtgtacggctccagtgccaaaacttccagtgtctccaaccctcaggacagtgtt

SEQ ID NO: 14048 - DNA, 60 bp, Homo sapiens
gcccgactctggctaaagtcttggaggctactgccttgaagatgacctctagggaccagc

SEQ ID NO: 14049 - DNA, 60 bp, Homo sapiens
aatgtgacaccaccatcctgaagccagcttgcacctccagtttgcacagggatttgttct

SEQ ID NO: 14050 - DNA, 60 bp, Homo sapiens
ccagcagctcggccgcatcgactccctgagcgagcagatttccttcctggaggagcagct

SEQ ID NO: 14051 - DNA, 60 bp, Homo sapiens
tgttcttcagagactagatgtttggctttctggtgggaatgacctgtgtgtgtggaaccg

SEQ ID NO: 14052 - DNA, 60 bp, Homo sapiens
atgactgctccctgcgtctctggagcctggacaacaaaacgtgcgtgcaggagatcacgg

SEQ ID NO: 14053 - DNA, 60 bp, Homo sapiens
ggatgggtgagggagcttctctaaagaggaaagtgagtggattaacccctgcttctcttc

SEQ ID NO: 14054 - DNA, 60 bp, Homo sapiens
tgagagcagggatctacctggcttctcagttctttggttggaaggagcaggaaatcagct

SEQ ID NO: 14055 - DNA, 60 bp, Homo sapiens
atgtctcttgtcagctgtctttcagaagacctggtggggcaagtccgtgggcatcatgtt

SEQ ID NO: 14056 - DNA, 60 bp, Homo sapiens
acactcctacagcagctggatgatcaccagtgacccaatgagctgttctctgcctcgggt

SEQ ID NO: 14057 - DNA, 60 bp, Homo sapiens
caagaaaaccaaaggcagcggagatttggctgaacaagccagaagagaaggctttgacga

SEQ ID NO: 14058 - DNA, 60 bp, Homo sapiens
gagaatcctttcctgtttgcattggaagccgtggttatctctgttggctccatgggattg

SEQ ID NO: 14059 - DNA, 60 bp, Homo sapiens
gggcccctgtgctctctgaacaagttgaaagtccaaataaaacttacctgttccaggtgt

SEQ ID NO: 14060 - DNA, 60 bp, Homo sapiens
tctcagatagggttcatcgacttcattgtggagcccacattctctgtgctgactgacgtg

SEQ ID NO: 14061 - DNA, 60 bp, Homo sapiens
atccttttagagcccgaagagtcaaaaccctcaatgttccctcctgctctcctgccccat

SEQ ID NO: 14062 - DNA, 60 bp, Homo sapiens
tggaacttctcccaccaagcacttggggtcctctccacggagttctgactggttctttaa

SEQ ID NO: 14063 - DNA, 60 bp, Homo sapiens
tgcacccagaagcggaaagaagagaaggccatgatcgccaagatgaaccgccagagaacc

SEQ ID NO: 14064 - DNA, 60 bp, Homo sapiens
ggcctcctaaaccaagcagaattttgggaagagataacagccagggagatattgcccatg

SEQ ID NO: 14065 - DNA, 60 bp, Homo sapiens
tcccagctgacagtcctctccacctagtggctgtccagtgcccattcctcaccttttccc

SEQ ID NO: 14066 - DNA, 60 bp, Homo sapiens
ccacgccttatccccacttgcagccctgtcttcctacctatcccacctccatcccagaca

SEQ ID NO: 14067 - DNA, 60 bp, Homo sapiens
ctgctgccagctttgagtacactatcctggaccccagctcccagctcttgcgtccatgga

SEQ ID NO: 14068 - DNA, 60 bp, Homo sapiens
gcttcacagcctctatggctacatggttcttctggccgatggtatgacacctaagttaga

SEQ ID NO: 14069 - DNA, 60 bp, Homo sapiens
tggggagaagggtgccctgcagcgctccaagacgctgatgaacctcttcttcaagggagg

SEQ ID NO: 14070 - DNA, 60 bp, Homo sapiens
cacaaccagagtagaaaacgtgctggaacaaaattgcgaaggcttttgcctcccagtaaa

SEQ ID NO: 14071 - DNA, 60 bp, Homo sapiens; identical to SEQ ID NO: 4855

SEQ ID NO: 14072 - DNA, 60 bp, Homo sapiens
gcttgtgaggccaccaacagagcaggcaaatgtgctactcagtttccagatgacatcaga

SEQ ID NO: 14073 - DNA, 60 bp, Homo sapiens
tgctggatacagctggacctgaattcctgatgcccatgtgatgttgttgccccagatggg

SEQ ID NO: 14074 - DNA, 60 bp, Homo sapiens
tgtttctctctttaatctcacgtagcctttttcaggttagtacgtgttcttctgtcaggg

SEQ ID NO: 14075 - DNA, 60 bp, Homo sapiens
gcagatctagcgggagctcaaagggatgtgggcgaaatcttgagtcttctgagaaaactg

SEQ ID NO: 14076 - DNA, 60 bp, Homo sapiens
tctcataaacgtgttcgttcccaccagcagggactgggagagggagctatgctgttaaaa

SEQ ID NO: 14077 - DNA, 60 bp, Homo sapiens
tgctgccacctgaggcagtgctcgtgccatctgacaatttcaccatcactttccaccact

SEQ ID NO: 14078 - DNA, 60 bp, Homo sapiens
agtttgaggaggtgaatgagactacgctgaaaatcgcggctttgaccaacccagtgtacc

SEQ ID NO: 14079 - DNA, 60 bp, Homo sapiens
ccatggccctgccacatcccgtgtaacataagtggtgcccaccatgtttgcacttttaat

SEQ ID NO: 14080 - DNA, 60 bp, Homo sapiens
acagtggtattccagactcagatcactcacactcatgatgctgaaggactcacagcagac

SEQ ID NO: 14081 - DNA, 60 bp, Homo sapiens
acgcggaagccaccttctcccagcgctgaaacttgatggctccgaacaccctcgaagcgc

SEQ ID NO: 14082 - DNA, 60 bp, Homo sapiens
ccccgcaagacagatgaaccttggatttggtgacgagtccccagagccagaggccagtgg

SEQ ID NO: 14083 - DNA, 60 bp, Homo sapiens
tgtgacaactgctacgaagccaggaacgtccagttagctgttaccgaggcacaagtggac

SEQ ID NO: 14084 - DNA, 60 bp, Homo sapiens
gttctagctggcactttagttggtcatacagatgcagtttggggtcttgcttatagtggc

SEQ ID NO: 14085 - DNA, 60 bp, Homo sapiens
caggtacacagtggggtctctcggaagccaccgtgtggttctttcacaggcacgtttatt

SEQ ID NO: 14086 - DNA, 60 bp, Homo sapiens
gagctctttaggcaacacattctcattcctgtcattatcagttgaacctccatgccacac

SEQ ID NO: 14087 - DNA, 60 bp, Homo sapiens
agctacccatgctgtctacggcaagctgctcctcttcgagtatcgtcaccgcaagatgaa

SEQ ID NO: 14088 - DNA, 60 bp, Homo sapiens
atcagcctctcgagtgctgagattacacacgtgagcaactgtgcaaggcctggtgtttct

SEQ ID NO: 14089 - DNA, 60 bp, Homo sapiens
ttccagccacttctagggacactggggaaccttgttaaacgttgacatcagtgctctcca

SEQ ID NO: 14090 - DNA, 60 bp, Homo sapiens
acgggctgtccagcctgactccagtgtcccccacggcctccatgccgcctgccttccccc

SEQ ID NO: 14091 - DNA, 60 bp, Homo sapiens
gaaagctgcttcacatgggtgcccgcactctgcaggggatccccagatgattggagaggt

SEQ ID NO: 14092 - DNA, 60 bp, Homo sapiens
ctcttgcacacacggttttggcagctgacttggttctgaagccatgtagccacccaactt

SEQ ID NO: 14093 - DNA, 60 bp, Homo sapiens
ccctctctcactggctgggaaaccctagaccatgtcagataggacaacactgctgggttt

SEQ ID NO: 14094 - DNA, 60 bp, Homo sapiens
acatctggactcagtgctgcagcaactccagactgaggtctaccgaggggctcaaacact

SEQ ID NO: 14095 - DNA, 60 bp, Homo sapiens
gtgagacggaagccagctacatcatgaggaagcttgtttcagctgtaagccacatgcatg

SEQ ID NO: 14096 - DNA, 60 bp, Homo sapiens
gaatttgctgtggcacttgacgaaactcttggagactttgcgttcccagacgaatttgtc

SEQ ID NO: 14097 - DNA, 60 bp, Homo sapiens
aagggcacctcagaaacagacaccatctgcacctgtgaagaaggctggcactgtacgagt

SEQ ID NO: 14098 - DNA, 60 bp, Homo sapiens
gggtttgactcattgaagatgtgtagagcctctgaaagcactttagggattgtagatggc

SEQ ID NO: 14099 - DNA, 60 bp, Homo sapiens
ggcctgctctgttccggggcagggccacatctttgtccgtgtgccgaggaggggactggt

SEQ ID NO: 14100 - DNA, 60 bp, Homo sapiens
gcttccctcggaaagacctttgagtggcaccattcacctaagttagcttttctggtcgct

SEQ ID NO: 14101 - DNA, 60 bp, Homo sapiens
ggtttgtcacggtgcctctccaccaccgaatggccagtgccatcaagtgtcaataccatt

SEQ ID NO: 14102 - DNA, 60 bp, Homo sapiens
tgaaggctgaagcagtgaagaaggaccgcagaaagaagctgacccagtccaagtttgtcg

SEQ ID NO: 14103 - DNA, 60 bp, Homo sapiens
gtccaggatacaagtaacacaggtttaggagaagacattatacatcagttgtcaaaatct

SEQ ID NO: 14104 - DNA, 60 bp, Homo sapiens
tatctccagatgaaatggccactgcttgatgtccaggcagggagcctccagagtagacaa

SEQ ID NO: 14105 - DNA, 60 bp, Homo sapiens
gtgtccatggggagcactggattgctctcccattatgagcgtccttcatctgggcagacc

SEQ ID NO: 14106 - DNA, 60 bp, Homo sapiens
tgtatctaagaatgttctagggcactctgggaacctataaaggcaggtatttcgggccct

SEQ ID NO: 14107 - DNA, 60 bp, Homo sapiens
attctgtctgtgatcaaagccgggttcctggtgactgccagaggaggcagcgggattgta

SEQ ID NO: 14108 - DNA, 60 bp, Homo sapiens
tgattcttgtagtatcaacagtgacccagaagccaagtgttttgctgtgcgttctctggg

SEQ ID NO: 14109 - DNA, 60 bp, Homo sapiens
tacctgagcaactgtgtgcaaatcatagaccgtggctataaccataacgagaccgcccta

SEQ ID NO: 14110 - DNA, 60 bp, Homo sapiens
atgaggcctgtctccacttcttcaaatgactccttctctgagcaagacctggacaaggag

SEQ ID NO: 14111 - DNA, 60 bp, Homo sapiens
gcggcaccaagtccctttgccagaagcagctcctcatcctgctgtccaaggtgcgactgt

SEQ ID NO: 14112 - DNA, 60 bp, Homo sapiens
aaggtcagaatggcaactcctggaacagcacaacaagtggcaaaggacacagctagcaac

SEQ ID NO: 14113 - DNA, 60 bp, Homo sapiens
gaaatggccttcctccccattcctgccaatccaggtccttatcatccttcaggttgtctt

SEQ ID NO: 14114 - DNA, 60 bp, Homo sapiens
ggcgttcaaggaaaagttctggaacaccaaccatgaatggaggcaaagttgtgaatcaag

SEQ ID NO: 14115 - DNA, 60 bp, Homo sapiens
ggttttccttgaggagattccagattataaactgaaccatgcactctgtttgcgaagagg

SEQ ID NO: 14116 - DNA, 60 bp, Homo sapiens
ctcccattgcaggtgaaacaaaggtctggcagtatattactttgatgcgtcggatattcc

SEQ ID NO: 14117 - DNA, 60 bp, Homo sapiens
gcggcaggcggtggaactacaaagggatcggtgcctatatcacaataccaaacttgataa

SEQ ID NO: 14118 - DNA, 60 bp, Homo sapiens
gaagcagaaaaggtcttggtgcctctgcagtacttgatgtattggggtcaaatctctaca

SEQ ID NO: 14119 - DNA, 60 bp, Homo sapiens
caccacctggatctttggggttctccatgttgtgcacgcatcagtggttacagcttacct

SEQ ID NO: 14120 - DNA, 60 bp, Homo sapiens
gatgactttaccatctgctacttcaagtgtgagcaggaccgagaaccactgcgcaccata

SEQ ID NO: 14121 - DNA, 60 bp, Homo sapiens
ctcaggaggccacacttgttgcactggtgagcagcctgctagtggtgtttaccctggcct

SEQ ID NO: 14122 - DNA, 60 bp, Homo sapiens
tatcgaaccgtctctgagtggctcgagtccatacgcatgaaacgctacatcctgcacttc

SEQ ID NO: 14123 - DNA, 60 bp, Homo sapiens
aggcctaccatgaccccatgttaaagttgtccatcatgtcagaagaggaactcacacata

SEQ ID NO: 14124 - DNA, 60 bp, Homo sapiens
gctttggatttagaagcgtcatgaaagcacgagtgacagctcctaacctctccttgtttt

SEQ ID NO: 14125 - DNA, 60 bp, Homo sapiens
caggcatctcaggctaccagaaagaattggtcacctagactttcagtcaggcatcctcgt

SEQ ID NO: 14126 - DNA, 60 bp, Homo sapiens
atgaccactggagcacatgggttaatggagttaggggaatggcctacaactctgcatggc

SEQ ID NO: 14127 - DNA, 60 bp, Homo sapiens
agagagtattcctgctgaaacgcgcataggaagcttttgtccctgctgttaatgcgggca

SEQ ID NO: 14128 - DNA, 60 bp, Homo sapiens
aacgttgcagaggagttaagtgtgaggcactcccggagcaaagtctatgaaggatcttct

SEQ ID NO: 14129 - DNA, 60 bp, Homo sapiens
tccccaatgcctggccttaaagccgagctcagttaccatagggacaggtccacctctact

SEQ ID NO: 14130 - DNA, 60 bp, Homo sapiens
gcatcttctgaacctccttgcgtgaataaggtgtctgactggaagctggagatacttcag

SEQ ID NO: 14131 - DNA, 60 bp, Homo sapiens
atactcagaggtcaggacccagtgaggaacccacaagagcatcaggctcagctagaagat

SEQ ID NO: 14132 - DNA, 60 bp, Homo sapiens
gagtgttgctataaacattcaggtcttttggtaagcatatacctggctttctgttggcta

SEQ ID NO: 14133 - DNA, 60 bp, Homo sapiens
aatagaaccctgagcactggaggaagagcgcctgtgctgtggtcttatcctatgtggaat

SEQ ID NO: 14134 - DNA, 60 bp, Homo sapiens
cccagcaagcaagcccacttgaaacttcagaaacagaccatcagcagccagtactttctg

SEQ ID NO: 14135 - DNA, 60 bp, Homo sapiens
catctcagaatcaccggaagtgactcgactctccagaggtcgtggtagacccaggctgct

SEQ ID NO: 14136 - DNA, 60 bp, Homo sapiens
tggggtacaagttccatcctgagcactttgtgtgtgctttctgcctgacacagttgtcga

SEQ ID NO: 14137 - DNA, 60 bp, Homo sapiens
gaatactgtgacgtgaataatgacaaatccatctccgtacaagaactgatgggctgcctg

SEQ ID NO: 14138 - DNA, 60 bp, Homo sapiens
tcctggatcagtgagagtgtggaggccgacgtgcgcctccgcctggccaatgtgtcggag

SEQ ID NO: 14139 - DNA, 60 bp, Homo sapiens
tactggagggtgttttcacgaatgttgttactggcacaaggcctaagggatgggcacgga

SEQ ID NO: 14140 - DNA, 60 bp, Homo sapiens
gcctgcagcctcctctaggggttgcaccccagcgctcccacctagatgggtctgatccgc

SEQ ID NO: 14141 - DNA, 60 bp, Homo sapiens
taaacaccgtttcaaccaacctctccctggagccaacctgtaaaaagtgggttgattgct

SEQ ID NO: 14142 - DNA, 60 bp, Homo sapiens
ctccaggcatcgaaaacaagagcagaagcaccttcagccacagccttataaaagggaagg

SEQ ID NO: 14143 - DNA, 60 bp, Homo sapiens
tgggaaggggtttccagggactcagccccactgttgatgcaggtttgcaaggaaagaaat

SEQ ID NO: 14144 - DNA, 60 bp, Homo sapiens
ccagttcctccaccacctcctatagccaagattaatggggaagtttctagcatttcatca

SEQ ID NO: 14145 - DNA, 60 bp, Homo sapiens
cctgaagtgattcagaacatgaccgaattcaagcgtggtctgccactgtttccccttgtg

SEQ ID NO: 14146 - DNA, 60 bp, Homo sapiens
aatgttagtgattgatcctgacaagcggatctctgtagacgaagctctgcgtcacccata

SEQ ID NO: 14147 - DNA, 60 bp, Homo sapiens
tgttcctcaccatccctttcgccttcttcctgcccgagctgatatttgggttcttggtct

SEQ ID NO: 14148 - DNA, 60 bp, Homo sapiens
aaaaccttcagctctcagaggagattgggaccaggaaaacctgggaggatgggcagactt

SEQ ID NO: 14149 - DNA, 60 bp, Homo sapiens
tactcagcttttggctctgtgggcgagtggcttcgggccatcaaaatgggaagatacgaa

SEQ ID NO: 14150 - DNA, 60 bp, Homo sapiens
tccgacctgctctgtgcctgtgaccttgctgaagagaaaagccccagtcacgcaatattt

SEQ ID NO: 14151 - DNA, 60 bp, Homo sapiens
tggtcacagagagacacgggctcaaggaacccaagagagtggaagaactgcaaaacaaga

SEQ ID NO: 14152 - DNA, 60 bp, Homo sapiens
gggtcctctcatacatggcttctgtttctgccgagagatctgttttccaattatgaagcc

SEQ ID NO: 14153 - DNA, 60 bp, Homo sapiens
cagtgcctgcaaggcctgaattagagagacttccattggctaagtagttaagagccgtcc

SEQ ID NO: 14154 - DNA, 60 bp, Homo sapiens
tgtcctcagggctctaccaagacataatgcactggggtaccacatggtccatttcatgtg

SEQ ID NO: 14155 - DNA, 60 bp, Homo sapiens
cggtgagcacctagaagtgagaacactgtattcctacaatgtacacttggatatttctcc

SEQ ID NO: 14156 - DNA, 60 bp, Homo sapiens
aaagatgtgccctcatggctcaagagcctccgtttgcacaagtatgcagccctcttctca

SEQ ID NO: 14157 - DNA, 60 bp, Homo sapiens
tcctcgtgctggaagaattcaagacggagaagaggctgtgcaagatgttctacgccgtca

SEQ ID NO: 14158 - DNA, 60 bp, Homo sapiens
gaaaccaattcacagggaaactagagactacggctgtggtggtaacctgcagatatacac

SEQ ID NO: 14159 - DNA, 60 bp, Homo sapiens
cgacccggtttgttttcggtccgtttccaaacactaaggaatcgaaactcggcggccttg

SEQ ID NO: 14160 - DNA, 60 bp, Homo sapiens
tccttgcagattgtggttcttctatcaatggagtggcggtgggtgctgctgacaactcca

SEQ ID NO: 14161 - DNA, 60 bp, Homo sapiens
gaaccttgttgcagtgtataaggtggaagcctaaagaaatctcaccgaaacttactgctg

SEQ ID NO: 14162 - DNA, 60 bp, Homo sapiens
tcaagggcagcaagaacgaagcaggatgttgtcactcccgtctgaataaagctccatgag

SEQ ID NO: 14163 - DNA, 60 bp, Homo sapiens
ggttgtccttctattcaggccactcttcgttttccatgtactgcatgctgtttgtggcac

SEQ ID NO: 14164 - DNA, 60 bp, Homo sapiens
tctgtccctctccctgaatccagagcgctgcagtcacagtagaggcaattgctgtcattc

SEQ ID NO: 14165 - DNA, 60 bp, Homo sapiens
tgactcgctctttcgcaaaacgtctgggaggagtccctggggccacaaaactgcctcctt

SEQ ID NO: 14166 - DNA, 60 bp, Homo sapiens
ggccctgtaagagcctggtgaaatgggagagtgagaataaaatggtctgtgagcagaagc

SEQ ID NO: 14167 - DNA, 60 bp, Homo sapiens; identical to SEQ ID NO: 4855

SEQ ID NO: 14168 - DNA, 60 bp, Homo sapiens
aaccaggtctcccccgtgaagatctgtgacttcggcctgggcaatcggttgcatggtacc

SEQ ID NO: 14169 - DNA, 60 bp, Homo sapiens
ggtgatgagatgggcactgtccgagtagccagcaccatgactgatggagccaatactatg

SEQ ID NO: 14170 - DNA, 60 bp, Homo sapiens
aagatagcggatttcggcctctccaggaacatctactcagcagactactacaaagctaat

SEQ ID NO: 14171 - DNA, 60 bp, Homo sapiens
atgacactctgtttcaaggtgcccaagaattcccatccctccatggttcaaataatagag

SEQ ID NO: 14172 - DNA, 60 bp, Homo sapiens
gggccttatggtcaagaaatgtatgcgtttcgatctgaggaaagattcaaatccccaccc

SEQ ID NO: 14173 - DNA, 60 bp, Homo sapiens
aattaggacaagctctatttttcatccctgggccctgacaagtttttccacaggaatatg

SEQ ID NO: 14174 - DNA, 60 bp, Homo sapiens
gtagctgagttggaacactgtggatattctgagatcagatgtagtatgtttggagactgt

SEQ ID NO: 14175 - DNA, 60 bp, Homo sapiens
tttcacgtattccgtctgcacaggcaaccaaggccagtagaaagctatggctgcaaaacc

SEQ ID NO: 14176 - DNA, 60 bp, Homo sapiens
gatgaagaacatctccttctgcggctgccatccccgcaacagctgctatttcggcttcat

SEQ ID NO: 14177 - DNA, 60 bp, Homo sapiens
tgaattgaagagtgagtaggtgaaggtggtgctggtgggttcactttccaaggccagact

SEQ ID NO: 14178 - DNA, 60 bp, Homo sapiens
ttacactgtagtctgtacaacctgtggttccacgtgcatgttcggcacctgtctgtgcct

SEQ ID NO: 14179 - DNA, 60 bp, Homo sapiens
atccttttgagaaactgaattttgcaaagggccaaatttccccaaactgaacgggctcag

SEQ ID NO: 14180 - DNA, 60 bp, Homo sapiens
tactacccgatgcagctggacctggagtatgtgaggagtggctgggacaactacgagttt

SEQ ID NO: 14181 - DNA, 60 bp, Homo sapiens
agtcggtggtggtggagtttctgctcacccatgtggacgtcctgttcagcgacaccttca

SEQ ID NO: 14182 - DNA, 60 bp, Homo sapiens
tgaccccacctttgagaacttcacaggtggcgtcaagaagcaggtcaacaagctcatcca

SEQ ID NO: 14183 - DNA, 60 bp, Homo sapiens
aattccgttttatctggcagtcagtctggtgaactgctcgtttgggacctccttggagca

SEQ ID NO: 14184 - DNA, 60 bp, Homo sapiens
ccaatggccagatgaatgaacaagacatacgatatcgggacactcttggtcatggcaacg

SEQ ID NO: 14185 - DNA, 60 bp, Homo sapiens
aggcatgtccaagttcgtgtgcatctaccacgtccgtgagcagattctcatgaagaggtt

SEQ ID NO: 14186 - DNA, 60 bp, Homo sapiens
taccaccgatgcagagcctgactcctcacccactccaagagactgcagccctcaaaatgg

SEQ ID NO: 14187 - DNA, 60 bp, Homo sapiens
agtgacactcatgctgatggatcaggggtcctctcgacgtcatttgggagatgcattcaa

SEQ ID NO: 14188 - DNA, 60 bp, Homo sapiens
acccacttcacacacaggcaactgaggcagacagcagctcaggcacacttcttcttggtc

SEQ ID NO: 14189 - DNA, 60 bp, Homo sapiens
agagattaccagacttctgctagagggaatcagcagtacacatgcccatcaccttcgctg

SEQ ID NO: 14190 - DNA, 60 bp, Homo sapiens
gctgtcctggtgggaaatgaaacctgcagcagttcaggatgactaatgaaagcaattagc

SEQ ID NO: 14191 - DNA, 60 bp, Homo sapiens
ctgcctgtttttacactgccattacctttcatgttatccatgatgttgaacatgggaggc

SEQ ID NO: 14192 - DNA, 60 bp, Homo sapiens
tgttgttgccaccctgtgtgacttttgaagctgtaaaatgagcttccagggcttgggtgg

SEQ ID NO: 14193 - DNA, 60 bp, Homo sapiens
ccttgtgggcctgagaacttcaccacgatcttcacccggatgggaaagtgctacacattt

SEQ ID NO: 14194 - DNA, 60 bp, Homo sapiens
tccacgaggctacgacccaaatcgataccgactgcattttgagagagacagcagggagga

SEQ ID NO: 14195 - DNA, 60 bp, Homo sapiens
tacaacatggggctgttcatccttcgtcttgctgaagatggtcctgccatcaaagatggc

SEQ ID NO: 14196 - DNA, 60 bp, Homo sapiens
ccgttcagggtccagaagaaacagtcactcaagactgcttgcaactgattgcagacagtg

SEQ ID NO: 14197 - DNA, 60 bp, Homo sapiens
agtcagacttgtaccaagggacctacattgccctgagcaaatacggacgggtaaagcggg

SEQ ID NO: 14198 - DNA, 60 bp, Homo sapiens
atctccaggtatcttctctgccaagcagatgtcaagagtgggaatggtcaggctggggta

SEQ ID NO: 14199 - DNA, 60 bp, Homo sapiens
ctacttgcaaatgcaccccgatggagctctcgatggaaccaaggatgacagcactaattc

SEQ ID NO: 14200 - DNA, 60 bp, Homo sapiens
ctgccagcagttgatgagaaacaaagagcaagagattctgaagggtcgagacaaggagca

SEQ ID NO: 14201 - DNA, 60 bp, Homo sapiens
ctactccttgttctctgaatgttcggctgtgatccagccaatttactgcaacacaacaag

SEQ ID NO: 14202 - DNA, 60 bp, Homo sapiens
gtcagctttgaggaattcgtagtcctggtgtccagggtgctgaaaacagcccacatagat

SEQ ID NO: 14203 - DNA, 60 bp, Homo sapiens
aacggcattcagaactctaccacgagctcaaccagaagttccacactttcgaccgctacc

SEQ ID NO: 14204 - DNA, 60 bp, Homo sapiens
aaacaggagtcgattttccgtcttttggattgcagctccactgactgacagtaaagctgc

SEQ ID NO: 14205 - DNA, 60 bp, Homo sapiens
gaagactcagattaattcctttctggagctttgagatctaaaacttctgttgcttttgcc

SEQ ID NO: 14206 - DNA, 60 bp, Homo sapiens
tcctgcctaccccacgtactcagggttctgaagatgtggtacaggctttcatcagtgaga

SEQ ID NO: 14207 - DNA, 60 bp, Homo sapiens
aattggctctgctgtcaggagactggtgaaaacactctcggctgcaagccatgtactgca

SEQ ID NO: 14208 - DNA, 60 bp, Homo sapiens
agcgaaggtttccatgtcagaggccgatggagaactgaagattgccacctacgcacaaag

SEQ ID NO: 14209 - DNA, 60 bp, Homo sapiens
ctgacttctcagaaattgccaactaggcaggcacaaatcttgggtcttggggactaaccc

SEQ ID NO: 14210 - DNA, 60 bp, Homo sapiens
ctctgaagcgcatttggggttctttgtagcttctaatgtgaggtttgagtccagtgcgcc

SEQ ID NO: 14211 - DNA, 60 bp, Homo sapiens
tgagacagaagcccatgatgacccaaactggcactgctgcccaggtttctctgagtcatc

SEQ ID NO: 14212 - DNA, 60 bp, Homo sapiens
ggggaagaaccaggatgcagggctggctcagggtctgcgcaagatgtttggctgattaaa

SEQ ID NO: 14213 - DNA, 60 bp, Homo sapiens
attacagcaaggacaagggcgctatctgcaccaagctggtgagaccaaagcggaaacacg

SEQ ID NO: 14214 - DNA, 60 bp, Homo sapiens
ggccgttggaggagcagttcatccctaaagggtttgaagccaaaagccgaagtagcaaaa

SEQ ID NO: 14215 - DNA, 60 bp, Homo sapiens
gtctctgacatacaggcacactgacctgatttccgaaggctgacaatcgtttgtggaatg

SEQ ID NO: 14216 - DNA, 60 bp, Homo sapiens
tatgcagagggtacacctagcacctattccagacccttcccctggttattcctccctgaa

SEQ ID NO: 14217 - DNA, 60 bp, Homo sapiens
gtcccttacgtgagtcctggcatgggaatgaatgtcagtgtgactgatctctcgtgattg

SEQ ID NO: 14218 - DNA, 60 bp, Homo sapiens
ttgttccgttgctgttggtggctgtgctgattgtctgttgttgcatcggctcaggttgtg

SEQ ID NO: 14219 - DNA, 60 bp, Homo sapiens
cttccaggttcaccctaaccctgtactaacctgcttggtggacttggaaaagacttggct

SEQ ID NO: 14220 - DNA, 60 bp, Homo sapiens
gcttgtattcagtagagttttcttgcccacctattttgtgctgggttctaccttaaccca

SEQ ID NO: 14221 - DNA, 60 bp, Homo sapiens
gtgagcgtggtgactgcagaggttagtgctgtgaaaagctgggctaaatattctttctgt

SEQ ID NO: 14222 - DNA, 60 bp, Homo sapiens
cttttataccttcactccttaaatgacgtagattctcccaagaagcaacagaaaaaccag

SEQ ID NO: 14223 - DNA, 60 bp, Homo sapiens
ggaagtcagttcagggcattttagggctgtcttgctatactgaattgtagctaacaatcc

SEQ ID NO: 14224 - DNA, 60 bp, Homo sapiens
ggggcgaacattgcttctcaggaacagatgctgtgtgtgtatcttcagtgctcaagtcac

SEQ ID NO: 14225 - DNA, 60 bp, Homo sapiens
cccgatgaacttttgtttgctgacgactcctcagaaggctcagaagtcctgatgtgagga

SEQ ID NO: 14226 - DNA, 60 bp, Homo sapiens
tgactagccagccctctactcctccaaccttttccaagatatgcaatggcctttgtgcct

SEQ ID NO: 14227 - DNA, 60 bp, Homo sapiens
ctgaacgggctcctagatcgccctgactgggaggaagctgtgaagatgcctgtgggcatc

SEQ ID NO: 14228 - DNA, 60 bp, Homo sapiens
gcctggcagtatcttgggatagccagcactgggaataaagatggccatgaacagtcgaaa

SEQ ID NO: 14229 - DNA, 60 bp, Homo sapiens
aacccttagactcacgaacaaatccacctgagatcagcagagccaccctagatcagctga

SEQ ID NO: 14230 - DNA, 60 bp, Homo sapiens
ccctggggtaaaagcagtgaaagtggcagatattgagaaagcctccataatgtacccaag

SEQ ID NO: 14231 - DNA, 60 bp, Homo sapiens
taagagaagatctcctaagcctccaggaaccaggctctaagacctacagcaagtgaccag

SEQ ID NO: 14232 - DNA, 60 bp, Homo sapiens
cttggcccctatgaagcagtaacacctcttacaaaggcagcagatatcagcttagacaat

SEQ ID NO: 14233 - DNA, 60 bp, Homo sapiens
tttaaacacgccgaacctcaccatatggagccagacattgggacgcacgcatgtgattgt

SEQ ID NO: 14234 - DNA, 60 bp, Homo sapiens
atagacctccttggaaggatgctggtgctggacagtgaccagagggtcagtgcagctgag

SEQ ID NO: 14235 - DNA, 60 bp, Homo sapiens
aagaagctggagaagaggcgggcactggagcactgattcggacacaccagggaccagcgg

SEQ ID NO: 14236 - DNA, 60 bp, Homo sapiens
gcggcggaaaagagcactggcagcatcctggacgacatcggcagcatgttcgacgacctg

SEQ ID NO: 14237 - DNA, 60 bp, Homo sapiens
atcaggaaatgctatcaagcggttacaagttgcccagctctatcccattgccatcttcat

SEQ ID NO: 14238 - DNA, 60 bp, Homo sapiens
ctcaagaagatgcacctccatggcaaaggatctcaagatcccagtaccaaggtccacata

SEQ ID NO: 14239 - DNA, 60 bp, Homo sapiens
tagtgaagatgaatcctgtgtgccactgctgcggaaagagtccatccagctaagggacct

SEQ ID NO: 14240 - DNA, 60 bp, Homo sapiens
acagcaacagggacaacgaggtggacttccaagagtactgtgtcttcctgtcctgcatcg

SEQ ID NO: 14241 - DNA, 60 bp, Homo sapiens
agaagaaagcaacactaatgattcaaacagcttcctgaattttaattttgtgttgtctca

SEQ ID NO: 14242 - DNA, 60 bp, Homo sapiens
tccagctcatatgctgacagctcttcacagtcctggactcctgccaccagcatccacact

SEQ ID NO: 14243 - DNA, 60 bp, Homo sapiens
tcttccacaggttactggggagaagactcagaaggtgacacaggcacaataaagcggagg

SEQ ID NO: 14244 - DNA, 60 bp, Homo sapiens
aacgcgctgaatggagtccagccacctgagctgtcgcgaactctcgctttgatttcatcc

SEQ ID NO: 14245 - DNA, 60 bp, Homo sapiens
aaacaagggaaccacaccgaggcagccttgctgaagaaactacagcacgctgcagaactg

SEQ ID NO: 14246 - DNA, 60 bp, Homo sapiens
atggtggcacagctccacggtacgatgatcaagatggagaatttccagaagctgcacgaa

SEQ ID NO: 14247 - DNA, 60 bp, Homo sapiens
tgaaaggcaagccctccagagagcgttatgtgacccacaaccgagcacattggtgacaga

SEQ ID NO: 14248 - DNA, 60 bp, Homo sapiens
gggcagataccttctgaacgggaagagacagccagcacagtgtttatgccactggtttta

SEQ ID NO: 14249 - DNA, 60 bp, Homo sapiens
ctgaatgtagccttttcaacagagaaggctcccacttgagagcagcctctacctgacccc

SEQ ID NO: 14250 - DNA, 60 bp, Homo sapiens
atccagaaacagggcttgatttgccacagttggtgtaccacgtggaaaatgagggtgctg

SEQ ID NO: 14251 - DNA, 60 bp, Homo sapiens
tggacttccactactcgctggccacgcaggtgccaactttcgagatcacgtcccccaact

SEQ ID NO: 14252 - DNA, 60 bp, Homo sapiens
gttgactggatcagcagacaagactgttaaactgtggaaggctggaagatgtgagaggac

SEQ ID NO: 14253 - DNA, 60 bp, Homo sapiens
acaagcagcaagtccaacacaatcacagcaacagactctcctgcagaccttcccaggaag

SEQ ID NO: 14254 - DNA, 60 bp, Homo sapiens
attgtcaacctgctcaaggacgacctgcaccccagctttccagaggtgtcgttcttccac

SEQ ID NO: 14255 - DNA, 60 bp, Homo sapiens
aaagacaacggacaactaaacccatggcacaaaggagtgcacactgctctcgaccatctg

SEQ ID NO: 14256 - DNA, 60 bp, Homo sapiens
ctggttctgagccagtagctgccatctggaaattcctcttttagcctctccttagaggtg

SEQ ID NO: 14257 - DNA, 60 bp, Homo sapiens
acatctcatcatcctgagtagaagcccctctcaagtggaggcagcagactcggcacacat

SEQ ID NO: 14258 - DNA, 60 bp, Homo sapiens
atccccatccctctactttccccagaggaccacaccttcctccctggagtttggcttaag

SEQ ID NO: 14259 - DNA, 60 bp, Homo sapiens
actgttggagcccgaagctcttgtgaactgtcttggctgtgagcaactgcgacaaaacat

SEQ ID NO: 14260 - DNA, 60 bp, Homo sapiens
ataaagcatctacgtcagcaggccatactgtgttggggcaaaggtgtcccgtgtagcact

SEQ ID NO: 14261 - DNA, 60 bp, Homo sapiens
ctcttgacacctcagagtgactgtaagctaccagtaagacaagtgggaagaggcacgttc

SEQ ID NO: 14262 - DNA, 60 bp, Homo sapiens
ctgcagagagatgctccacacgtggaaccggatttctcttcccagaaacttcaacatctg

SEQ ID NO: 14263 - DNA, 60 bp, Homo sapiens; identical to SEQ ID NO: 4855

SEQ ID NO: 14264 - DNA, 60 bp, Homo sapiens
ggcctaatgcacgcactaaagcactcaaagacgtaccactttcccaaaactgtcactcag

SEQ ID NO: 14265 - DNA, 60 bp, Homo sapiens
tttaagcctatcaaacatgggagccctgagttctgcgggatcctaggagaaagggtggat

SEQ ID NO: 14266 - DNA, 60 bp, Homo sapiens
caaccttcattctctcatgtctgtggtatcagcattacaaagtgctcccatcttcaggct

SEQ ID NO: 14267 - DNA, 60 bp, Homo sapiens
gggaaagtgtttcttgggtttggaatgttcagaggaagcagtattgtacagaacacggta

SEQ ID NO: 14268 - DNA, 60 bp, Homo sapiens
aagtagacctcaaggtggacccttctcagccttcgaatgtcagtcacaaactgtggacag

SEQ ID NO: 14269 - DNA, 60 bp, Homo sapiens
ctctggttgtaaaacacacttcctgctgcgaaagacccacatgctacaagacgggcaaaa

SEQ ID NO: 14270 - DNA, 60 bp, Homo sapiens
atgaagttgggaagggtaacaaccactgcgtcccctgcaaggcagggcacttccagaata

SEQ ID NO: 14271 - DNA, 60 bp, Homo sapiens
gacgcatccctcaccacgtccggatttccttctttggatggaatgtaacgcgatctctat

SEQ ID NO: 14272 - DNA, 60 bp, Homo sapiens
ttcttagggctctcgggaagcacaaggggctgtattgcaaaggccgcttatggtctgttt

SEQ ID NO: 14273 - DNA, 60 bp, Homo sapiens
tggggcctaaaggtgctgcaggagctttcacagtggacagtaaggtccatccatgacctt

SEQ ID NO: 14274 - DNA, 60 bp, Homo sapiens
gacaagcccttcttacagagttggaaaaccgaaagcagagacagcagtggtatgcccaac

SEQ ID NO: 14275 - DNA, 60 bp, Homo sapiens
ttgggaaacactgaaaggcttccactgaagactgagggttatggttacctgtaaattcca

SEQ ID NO: 14276 - DNA, 60 bp, Homo sapiens
cgagaaatcagggtagaaggactgtgagataccatgatggggatgatgacagaagtttag

SEQ ID NO: 14277 - DNA, 60 bp, Homo sapiens
gaagtggctcttgcagctagagttgactcagaagccgaaattcctagaaatcaggtttct

SEQ ID NO: 14278 - DNA, 60 bp, Homo sapiens
aggtgtggtcagaggtgacttgttcccacctccagggaggacgcttcgtcttcggccagc

SEQ ID NO: 14279 - DNA, 60 bp, Homo sapiens
atcctgggtagaagctggatcagcaagaatgtcactccttatattggtgtccattttctt

SEQ ID NO: 14280 - DNA, 60 bp, Homo sapiens
tcctctgtcgcgtattctgatggtgcctgctggtttgacgtggagctatcctgtgaaata

SEQ ID NO: 14281 - DNA, 60 bp, Homo sapiens
agccagatctgaaggacatttgggagagggatgcccaggaacgcctcatctcagcagcct

SEQ ID NO: 14282 - DNA, 60 bp, Homo sapiens
ggaccctataaagccccagtctctcagtattgcctcaaatgctgctcatggaagatccaa

SEQ ID NO: 14283 - DNA, 60 bp, Homo sapiens
ttgcaatcagatctacagctcctggataattgcttgattctcgccagagactgtcaatgt

SEQ ID NO: 14284 - DNA, 60 bp, Homo sapiens
tgaagaagccccaagacagccagctggaggagggcaaacccggctacttggattgcctga

SEQ ID NO: 14285 - DNA, 60 bp, Homo sapiens
gcattgggtgctgacttaccctttcatgtacttccaaagaaaggtaatcaaaccgaatct

SEQ ID NO: 14286 - DNA, 60 bp, Homo sapiens
gggtagaagtggtggacctgtgcaaaggaggttttagaactctgcagtatttgttggggc

SEQ ID NO: 14287 - DNA, 60 bp, Homo sapiens
ctcttttgtccgtacctatcagaatgttttcttgacacttccatgttggctcttctcagc

SEQ ID NO: 14288 - DNA, 60 bp, Homo sapiens
tattcgagagcaggaccgtttctactgaagagaagtttacaagaacgctctgtctggggc

SEQ ID NO: 14289 - DNA, 60 bp, Homo sapiens
aaggaccgtacagccatgtcggtgacactggagcagtgcctgatcctgcaacacgagcat

SEQ ID NO: 14290 - DNA, 60 bp, Homo sapiens
agagcctgggaacctctcagagaaggtctctcacttggagtccatgctcaggaagctgca

SEQ ID NO: 14291 - DNA, 60 bp, Homo sapiens
cagtcggtgtacgtcatatccgaggagaaggatgagtgcgtcatagcaactgaggtgtaa

SEQ ID NO: 14292 - DNA, 60 bp, Homo sapiens
aggactccctgccaacaggaactggaccaggtcctggagcggatctccaccatgcgcctt

SEQ ID NO: 14293 - DNA, 60 bp, Homo sapiens
ggagcatcagatcttcccagaatgtggccatgatcttcttccgagtccatgaaccaggaa

SEQ ID NO: 14294 - DNA, 60 bp, Homo sapiens
ccctcggtactctggataacgaagcttgtgcagagtggtaaccatgcttacacactaaac

SEQ ID NO: 14295 - DNA, 60 bp, Homo sapiens
cagacaagtgcccatgcacccacacctatgctcatgcacatgttcccacactctcttata

SEQ ID NO: 14296 - DNA, 60 bp, Homo sapiens
ttacaccagaacctggacattggccagaagaagcttaagtgggcagacactgtttgccca

SEQ ID NO: 14297 - DNA, 60 bp, Homo sapiens
gcagttcacttcagggatcaggtcatctctgctcctcctagtttcaccatgttctggcaa

SEQ ID NO: 14298 - DNA, 60 bp, Homo sapiens
gcagccggggcccgaagacacggggaaggcttgcggtgtggactatgaagtcaaagcctt

SEQ ID NO: 14299 - DNA, 60 bp, Homo sapiens
tagctctgaggacatagtcatcgaggagtttacgcggaaaggcgaggaggagagccagaa

SEQ ID NO: 14300 - DNA, 60 bp, Homo sapiens
atttcagccagatgccatagaccctcagaacttgacctggaagtccagacactgaacgca

SEQ ID NO: 14301 - DNA, 60 bp, Homo sapiens
gtccagattaagggagataatagctttcccaccctactttgtgcaggtcatacctcccca

SEQ ID NO: 14302 - DNA, 60 bp, Homo sapiens
tggacaaggggcagctacgtatccatcgtgatggcatctacatggtacacatccaggtga

SEQ ID NO: 14303 - DNA, 60 bp, Homo sapiens
gaaaagcacacaggctttagagtcaaagtatctcaaacctgaatccacactgtgccctcc

SEQ ID NO: 14304 - DNA, 60 bp, Homo sapiens
ctgattacagggtacagttcttcacagctgaaatggttagcctgagatgctggaagcttc

SEQ ID NO: 14305 - DNA, 60 bp, Homo sapiens
aggtcgggatcagcccctcctgagtggccagcctttccccctgtgaaagcaaaatagctt

SEQ ID NO: 14306 - DNA, 60 bp, Homo sapiens
tagccacttgggagaatgagaacaagatccactgcacgcaaactcttcttgaaggggacg

SEQ ID NO: 14307 - DNA, 60 bp, Homo sapiens
atgtgtgattcctagttgtagccaccggatgtgctgaggcctaaatgttagcaggtggga

SEQ ID NO: 14308 - DNA, 60 bp, Homo sapiens
tctttctaagtacgatgttcaagtgagagcagcagtgagctccatgtgcagagaggcagg

SEQ ID NO: 14309 - DNA, 60 bp, Homo sapiens
gatggccgcatacctgaaagatggttaccgaatagcccagccaatcaactgtcctgatga

SEQ ID NO: 14310 - DNA, 60 bp, Homo sapiens
ctgttgcaggcaggcagcctccatgcagcaccattcaggtctgccctggagagcagccca

SEQ ID NO: 14311 - DNA, 60 bp, Homo sapiens
ccacagacttctgaggacagaaagtgccctcactcaagcttctcttgtaaccacagagaa

SEQ ID NO: 14312 - DNA, 60 bp, Homo sapiens
cgccgggtatgtagcatgggcatacgttccaaggaccgtgccaacggtgggtcccccaaa

SEQ ID NO: 14313 - DNA, 60 bp, Homo sapiens
atggaggagtgggacgtgccacagatgaagaaagaggtggagagccttaagtaccagctg

SEQ ID NO: 14314 - DNA, 60 bp, Homo sapiens
catctttgcagattactctgcctccaaatgcagggcctttcagagatgcattgtgattgt

SEQ ID NO: 14315 - DNA, 60 bp, Homo sapiens
attcgctgctggtgaattgattcgacctgactgccgttggaccgtaggccctggactgca

SEQ ID NO: 14316 - DNA, 60 bp, Homo sapiens
gcagacaacataacacctgtgacttacttgaattgggataagccattccagaagtagctt

SEQ ID NO: 14317 - DNA, 60 bp, Homo sapiens
actgggggaggggtagctgctatctttgagacagaaagatgcaggacagcatttcatatg

SEQ ID NO: 14318 - DNA, 60 bp, Homo sapiens
aggattttactgcggggatgactccatccggtacccctaccgtccagataccatcaccca

SEQ ID NO: 14319 - DNA, 60 bp, Homo sapiens
aacataacagacggttccaaacatcagcataaagatcactcatcccataccacccacagg

SEQ ID NO: 14320 - DNA, 60 bp, Homo sapiens
ctggctttagatcccgacattcactcctgtgcaaattacttaggtatgacttaggctaat

SEQ ID NO: 14321 - DNA, 60 bp, Homo sapiens
ccgaagcccttgagcttctggaagcccagagcaaatttaccaagaaagagcttcagatcc

SEQ ID NO: 14322 - DNA, 60 bp, Homo sapiens
gaagttagtgacccagagctataatcatccatcaagtcttccacaataattcccaactca

SEQ ID NO: 14323 - DNA, 60 bp, Homo sapiens
tcccgccagccttgttttcaggtggtctggaggcagctccacgtcacacagtggctgtca

SEQ ID NO: 14324 - DNA, 60 bp, Homo sapiens
ttactccctgttacaagaggaagatatgtgggctggtctgtggcagaagcggtgcaagta

SEQ ID NO: 14325 - DNA, 60 bp, Homo sapiens
atggcatccttgggacctgaatctatcacccaggaatctcaaactccctttggccctgaa

SEQ ID NO: 14326 - DNA, 60 bp, Homo sapiens
gcagctgaagtggagagggtgtcatctagcgcaattgaaggatcatctgaaggggcaaat

SEQ ID NO: 14327 - DNA, 60 bp, Homo sapiens
aagagaaggccattgagaaggtggatgacctgctggagagttacatgggtatcagggaca

SEQ ID NO: 14328 - DNA, 60 bp, Homo sapiens
accttttctcctacaaagggaagcagcctggaagaaacagtccagtacttgacccatgcc

SEQ ID NO: 14329 - DNA, 60 bp, Homo sapiens
ccctggagaagaagctctttgcctgggacaacttgaacatggtcacttatgacatcaagc

SEQ ID NO: 14330 - DNA, 60 bp, Homo sapiens
ccgcacggaacagatgatcagcattcagaagaagatggagttcaagatcaagtcggtgcc

SEQ ID NO: 14331 - DNA, 60 bp, Homo sapiens
taggcaagtccctgtctctgaatctcagccaccaccacatacaatgcaagtcggaagatg

SEQ ID NO: 14332 - DNA, 60 bp, Homo sapiens
ccttacagtttcactcatgaagcaccttgatctttggtgtcctggacttcatcctgggtg

SEQ ID NO: 14333 - DNA, 60 bp, Homo sapiens
gcccacacagctatgtgtttgagcagcgaagagtctttgagctgaatgagccagagtgat

SEQ ID NO: 14334 - DNA, 60 bp, Homo sapiens
gaaccgacagctgttgctggtatccgtatgtcacttactcatttgtaatcaagcgcctgc

SEQ ID NO: 14335 - DNA, 60 bp, Homo sapiens
aaaactgcaaaaccaatctgtatcatgtaccaaactgacttaaaataaatctacatgttt

SEQ ID NO: 14336 - DNA, 60 bp, Homo sapiens
tagtacaggtctggaacagccgaaaattctgtgatcagttcttggggcaggttactctgg

SEQ ID NO: 14337 - DNA, 60 bp, Homo sapiens
actttcacccttggagagcatcacactgtgtgaggttcagtgattgttgaccctccccag

SEQ ID NO: 14338 - DNA, 60 bp, Homo sapiens
ttttatgagactctttactcaggtgcatggttacagccacagggaggcatggagtgccat

SEQ ID NO: 14339 - DNA, 60 bp, Homo sapiens
gatatctacctgggtgccaacatcgcctctggtgaggaagtcgccatcaagctggagtgt

SEQ ID NO: 14340 - DNA, 60 bp, Homo sapiens
gcatgatctatgttttggtgagctcttagaacaacacacagaagaattggtccagttaag

SEQ ID NO: 14341 - DNA, 60 bp, Homo sapiens
ttttgccaggaacagtaccctcaactcagccgctgtcaccgtctcctcttagagctcact

SEQ ID NO: 14342 - DNA, 60 bp, Homo sapiens
gctgatggaccaggaagccctgaatccataaaggcataccttaaacaagctccaccttcc

SEQ ID NO: 14343 - DNA, 60 bp, Homo sapiens
acggtcctggaaatctcacatggtgggcactgcagcgttggaacgtgagcctcggatttc

SEQ ID NO: 14344 - DNA, 60 bp, Homo sapiens
aagatcgtcatgggaagaagcgcacgctgaaggggtccattgagctctcccgaatcaaat

SEQ ID NO: 14345 - DNA, 60 bp, Homo sapiens
ggggaggttcatgctacgttacggtggttctacaatagctgctggtgttgtcactgagat

SEQ ID NO: 14346 - DNA, 60 bp, Homo sapiens
gctggtgacatttcttgccaattctaacactgtctagggaagagttcctagtctattgtg

SEQ ID NO: 14347 - DNA, 60 bp, Homo sapiens
taaagggaactgtactactcgcagtgataggtttgcagagtgtgtgcttggctgtggcag

SEQ ID NO: 14348 - DNA, 60 bp, Homo sapiens
ctggtgaactgtggcacggttgctcaacacatcacctcggacaaattcaggaagcatttc

SEQ ID NO: 14349 - DNA, 60 bp, Homo sapiens
gaattccactcaagataacaattatggctgtgttcctctgcttgaagacagtgaaacaag

SEQ ID NO: 14350 - DNA, 60 bp, Homo sapiens
aggatgagttcagggtgggatgacggaccgcttctgggaccagtggtatctctggtatct

SEQ ID NO: 14351 - DNA, 60 bp, Homo sapiens
tataccagctccacaaaatctgtcacagcagggcttttcaacactgggagttaatccagg

SEQ ID NO: 14352 - DNA, 60 bp, Homo sapiens
tttaccgagttgggaactgtgatggcatcgggaccagtcctgggcgccctgagaccactc

SEQ ID NO: 14353 - DNA, 60 bp, Homo sapiens
caacatcttctccaacatcccacctgatgggttcaagcagatccgacagggaatgatcac

SEQ ID NO: 14354 - DNA, 60 bp, Homo sapiens
gctttgatgctgtggtattcgatgttcttaaggttacaccagaagaatatgcgggtcaga

SEQ ID NO: 14355 - DNA, 60 bp, Homo sapiens
agttcgtgccaatcctgacatctcgaggtttcctcactagacaactctctttcgcaggct

SEQ ID NO: 14356 - DNA, 60 bp, Homo sapiens
gggagcctcaccctggggacatgcctgttgataacatgcatctcagtgtaggttctattt

SEQ ID NO: 14357 - DNA, 60 bp, Homo sapiens
cgtgtaattggtttgatgatgactgcctgtgacctttgttctgtgacaaaactgtggccc

SEQ ID NO: 14358 - DNA, 60 bp, Homo sapiens
agagggacagagaagaggatcccagggtgacagtaaacagcaaaatgggtaggtggctaa

SEQ ID NO: 14359 - DNA, 60 bp, Homo sapiens; identical to SEQ ID NO: 4855

SEQ ID NO: 14360 - DNA, 60 bp, Homo sapiens
acagcattgcctgtggtcaccagctgattgagcactgctgcaggctctccaagggcctca

SEQ ID NO: 14361 - DNA, 60 bp, Homo sapiens
tcaactgttgtcggtgaacggtgtgagcgttgagggtgagcagcatgagaaggcggtgga

SEQ ID NO: 14362 - DNA, 60 bp, Homo sapiens
ctgtcagtcagaactgcaagatgtgaatgaagctcttaacggcttggagtgtctttctgg

SEQ ID NO: 14363 - DNA, 60 bp, Homo sapiens
ttttgagtatgagtgcagtcgtgtccatcctccatggcacagccctcctgctgccaggac

SEQ ID NO: 14364 - DNA, 60 bp, Homo sapiens
ccaatcacaggtgacttggcatgaaattgcaaggcctcagatacatgggtatgacctgaa

SEQ ID NO: 14365 - DNA, 60 bp, Homo sapiens
gacctttagggccttgtcctgctctcagtcataaagcagacctgtttacggatatgtttg

SEQ ID NO: 14366 - DNA, 60 bp, Homo sapiens
atctcatttcttcttggagtggggagatgcgggaagctgacccagtggtcctctaggcag

SEQ ID NO: 14367 - DNA, 60 bp, Homo sapiens
tcccgcctcatgtttgaataccagacattactggaggagccacagtatggagagaacatg

SEQ ID NO: 14368 - DNA, 60 bp, Homo sapiens
tctctcctaaagacaccaccttcctgccagctgtttgcccttaggccagtacacagaatt

SEQ ID NO: 14369 - DNA, 60 bp, Homo sapiens
tgggtgtcacagacactgattggcgtgaactggccatggaagcgctagaaggtttagatt

SEQ ID NO: 14370 - DNA, 60 bp, Homo sapiens
cccatattccacaaaaatgtcttccactacttgatggcgtttttgcgagaactgctgaaa

SEQ ID NO: 14371 - DNA, 60 bp, Homo sapiens
cagtaaagtgtaggtggacaatcttcctgtgatatgtagtgacattggtcatgtagctag

SEQ ID NO: 14372 - DNA, 60 bp, Homo sapiens
catctgtatgcggaacctcaaaagagtccctggtgtgaagcaagatcgctagaacacacc

SEQ ID NO: 14373 - DNA, 60 bp, Homo sapiens
gctgagagagtacatcaggtgggaagaagctgcaaggaatttgctgggtctcatagaagc

SEQ ID NO: 14374 - DNA, 60 bp, Homo sapiens
ttctgaatgctcccgaactactgactttgaagaggtagcctcctgcctgccattaagcag

SEQ ID NO: 14375 - DNA, 60 bp, Homo sapiens
ggggtcttggggagagtggtgactccattgacccagcttttcattaaaggataacacact

SEQ ID NO: 14376 - DNA, 60 bp, Homo sapiens
atgagatgtccctacaagttgctgaggatggtgctggccttggtgtgcatgagctccgag

SEQ ID NO: 14377 - DNA, 60 bp, Homo sapiens
gccattctccaaagctgctgatgtctatgcatttgggactgtttggtatgagctgcaagc

SEQ ID NO: 14378 - DNA, 60 bp, Homo sapiens
tccgcttggagcccaaggatgggaaaggtgtgtttgcagtggatggggaattgatggtta

SEQ ID NO: 14379 - DNA, 60 bp, Homo sapiens
agcccaagtcggagaactcatccactcagagctccccagagatgcccacgaccaagaaca

SEQ ID NO: 14380 - DNA, 60 bp, Homo sapiens
tgacctctgatggcatgctgtggaagaagcttatcgagagaatggtcaggacagattctc

SEQ ID NO: 14381 - DNA, 60 bp, Homo sapiens
gaacaggaaatcagagatggtggttctctcaaaatgattcactttggtctggtgtaaaca

SEQ ID NO: 14382 - DNA, 60 bp, Homo sapiens
taggctgggagacgacgaaggaacaggcgtttctgacgagcgggacgcagttctcggacg

SEQ ID NO: 14383 - DNA, 60 bp, Homo sapiens
gggtaggatgaagagaaggcacacagagattctggatctcctgctgccttttctggagtt

SEQ ID NO: 14384 - DNA, 60 bp, Homo sapiens
ctgcacttgagcatgaatgggtagtagccaaactcacaaattggagtgatgaacctgctt

SEQ ID NO: 14385 - DNA, 60 bp, Homo sapiens
ctacagaaatctgggcctgagacattgtctacaattgggttctagatacatcaggaaccc

SEQ ID NO: 14386 - DNA, 60 bp, Homo sapiens
cacgagctggggacagttctgcctctgtgactgctgctttgcatgaaaactcatttgatg

SEQ ID NO: 14387 - DNA, 60 bp, Homo sapiens
tgaagcctgcagtacgtgtgccgtgaggctcatagttgatgagggactttccctgctcca

SEQ ID NO: 14388 - DNA, 60 bp, Homo sapiens
cgactgtttagctaggtttgagagccactaccctagatgagctgtcctgctccagtaaca

SEQ ID NO: 14389 - DNA, 60 bp, Homo sapiens
ccagaactggctgatttcagggatacccaggacgcgtgaaacacagaagaaacgtgatcc

SEQ ID NO: 14390 - DNA, 60 bp, Homo sapiens
gggatgaacccatccttccagtggctcgctccctgtagctctgcctccctctccatatct

SEQ ID NO: 14391 - DNA, 60 bp, Homo sapiens
tgaagaggaggtttgccacagggatgtacctggtgagctgctgaacccgcaaatgctgct

SEQ ID NO: 14392 - DNA, 60 bp, Homo sapiens
agccaccaccaggctgagcagtgaggagagaaagtttctgcctggccctgcatctggttc

SEQ ID NO: 14393 - DNA, 60 bp, Homo sapiens
cgtctcgtgagtccgacccagacatccaaactaaaaggaagtcatccagtctattcacag

SEQ ID NO: 14394 - DNA, 60 bp, Homo sapiens
tcacatttgagaccctgtgtttgaagcatttacaggcaatgtacagcaacagaggtacct

SEQ ID NO: 14395 - DNA, 60 bp, Homo sapiens
ttcatctcattgctcagcgcggacctagacctggaatcgcccaagtccctctactcgcga

SEQ ID NO: 14396 - DNA, 60 bp, Homo sapiens
gccagttctgccacagaaagggatgaatggctagaagcgatttccagggcaatagaagag

SEQ ID NO: 14397 - DNA, 60 bp, Homo sapiens
atgcagggaatgccagtccgaaacactgggagtccaaagtctgcagtgaagacccgccaa

SEQ ID NO: 14398 - DNA, 60 bp, Homo sapiens
ggggcgggactctcacggtgacatgtttacagctgggtgtgactcagtaaagtggatttt

SEQ ID NO: 14399 - DNA, 60 bp, Homo sapiens
atctcctggcagtttgacccttgctgcaagtaccaagtggagtacgacgcctataaactg

SEQ ID NO: 14400 - DNA, 60 bp, Homo sapiens
cagacaccatgacccacctggaagcccagaacaagatcaagtctgccagctacaacttga

SEQ ID NO: 14401 - DNA, 60 bp, Homo sapiens
tgagctggagacggcgatggagaccctcatcaacgtgttccacgcccactcgggcaaaga

SEQ ID NO: 14402 - DNA, 60 bp, Homo sapiens
tcctgaccatgctgtgcatggcctacaacgacttctttctagaggacaacaagtgaccag

SEQ ID NO: 14403 - DNA, 60 bp, Homo sapiens
aagtgaaaagcttcggtggatctcagccttggccatgccaagagaggagttggaccttct

SEQ ID NO: 14404 - DNA, 60 bp, Homo sapiens
gccagaatgtgtctctgaagaggctcgctcactcattcaacagctcttgcagttcaatcc

SEQ ID NO: 14405 - DNA, 60 bp, Homo sapiens
gcagaggaagtggaaggcatcagtccctatgtatttgcagttcacctgcacttaaggcac

SEQ ID NO: 14406 - DNA, 60 bp, Homo sapiens
acccgggagcatctgggcagtgagtaaagagggtgatttacttgatgggtacgtttggtc

SEQ ID NO: 14407 - DNA, 60 bp, Homo sapiens
ccatatcctagatggaaaccctcatgctaaactgtctgattatgcatggttctaaatggt

SEQ ID NO: 14408 - DNA, 60 bp, Homo sapiens
aatgtggccagcagccgtgacgggatggacaacgagacaggcacggagtccatggtcagt

SEQ ID NO: 14409 - DNA, 60 bp, Homo sapiens
gaggttgtccaaactggacggacttgcattctggatgtcaacccacaagcactgaaagta

SEQ ID NO: 14410 - DNA, 60 bp, Homo sapiens
tgtcccctcacaggaggatgaggcagccaaagcggaagagcaagtggctgaggagaccaa

SEQ ID NO: 14411 - DNA, 60 bp, Homo sapiens
ttgctcaggacctctgcccctagttagcaagactgcagcagttgctgttgcttattctga

SEQ ID NO: 14412 - DNA, 60 bp, Homo sapiens
cgactgtctggccctgaatttgcatggcttgagaaggcacaccgtaagactaagtaggaa

SEQ ID NO: 14413 - DNA, 60 bp, Homo sapiens
tctcttcccaagcctgtgactccaagggagatactcttgccagtccaaactctgaaactg

SEQ ID NO: 14414 - DNA, 60 bp, Homo sapiens
gtgctcgtgcctatagcaacagcatcgtccgcagtagccgcactactcttgaccgcatgg

SEQ ID NO: 14415 - DNA, 60 bp, Homo sapiens
cacccctaatgggacccctagagtgctgctgtaggtgaggtttcaggaatgtcttttgaa

SEQ ID NO: 14416 - DNA, 60 bp, Homo sapiens
gaaaacaatggtgactacatggacatgaagcaggctgatactacacagtatgtccccatg

SEQ ID NO: 14417 - DNA, 60 bp, Homo sapiens
tccactccttacctcacgccatcgaggaggtcccgcatgtagaagacccgggtattaaca

SEQ ID NO: 14418 - DNA, 60 bp, Homo sapiens
ttaattcttagttcttttctttgatctgtgtgcctgtgcttactgtagtaccacactgtt

SEQ ID NO: 14419 - DNA, 60 bp, Homo sapiens
cagtcaatacttgaactcccatcacgggcactttcaatcccgaatgctgggtcttgggtt

SEQ ID NO: 14420 - DNA, 60 bp, Homo sapiens
ggttggatggtacaaaaagcatcaaaaagcaagtaaaaattggttcaccctattgtctgc

SEQ ID NO: 14421 - DNA, 60 bp, Homo sapiens
gctgaagcagaggaacacgctgaaggatggtatcatcatgatccagacgctgctgatcat

SEQ ID NO: 14422 - DNA, 60 bp, Homo sapiens
ttccccagggtgaagcctcaaaggagtaaagtctagcaggatagaaggaggtttctgagg

SEQ ID NO: 14423 - DNA, 60 bp, Homo sapiens
ggaaataccaatcccggactcccagtcccctcctacattctgtccccagtgaaatagtgt

SEQ ID NO: 14424 - DNA, 60 bp, Homo sapiens
tgtggcgtcaataaaggagatcacagaaaagaaccgacactgcctcctggacattgctcc

SEQ ID NO: 14425 - DNA, 60 bp, Homo sapiens
gactgggttccctgtgaacacagcactgacttacagtagatcagaactctgttcccagca

SEQ ID NO: 14426 - DNA, 60 bp, Homo sapiens
cagcagggtgatgacctgatcatttgttgatgggatggtggcttacctcttattcacagc

SEQ ID NO: 14427 - DNA, 60 bp, Homo sapiens
gaaccttcattcaccaccattcgataacccttcttccgagcctctcctctggtcgcgcgg

SEQ ID NO: 14428 - DNA, 60 bp, Homo sapiens
tccactcgctgcaggaagactggaagctggagattcagcacatgtttgatgaccttcgga

SEQ ID NO: 14429 - DNA, 60 bp, Homo sapiens
ttattgcctcagcttctgacatggcagcagaacaaggacagattctcgtgatagccaccg

SEQ ID NO: 14430 - DNA, 60 bp, Homo sapiens
gaatatgtctgtgctggagaatcatcactggcgatctacaattggcatgcttcgagaatc

SEQ ID NO: 14431 - DNA, 60 bp, Homo sapiens
atcagactcaccatccaggtgcagctccagaggctacaaaaggcttcatgggacttgaat

SEQ ID NO: 14432 - DNA, 60 bp, Homo sapiens
ttcagccgcagactgttgatcccacacaagagtgtttcatcccacaggctaaactaagcc

SEQ ID NO: 14433 - DNA, 60 bp, Homo sapiens
tctcttctctgttgttgggtccgcatcgtattcccggaatcagacggtgccccatagatg

SEQ ID NO: 14434 - DNA, 60 bp, Homo sapiens
agcggaatgagggtgtctacacagccatcgcagtgcaggagatacagggaaacccggcct

SEQ ID NO: 14435 - DNA, 60 bp, Homo sapiens
cagagtctgacaagatactccagcaccgaaattgtggagggaacaagggacccactgttt

SEQ ID NO: 14436 - DNA, 60 bp, Homo sapiens
cggcctcactaggcttctggttgatgcctgtgaactgaactctgacaacagacttctgaa

SEQ ID NO: 14437 - DNA, 60 bp, Homo sapiens
cccctggttctggaggaaccgcaagccggagaggatttggtccctcaactatcacccagg

SEQ ID NO: 14438 - DNA, 60 bp, Homo sapiens
cctcctgccttatgctcacctgtggacaccgaggatgccctcacattggtgctttctcct

SEQ ID NO: 14439 - DNA, 60 bp, Homo sapiens
ttgagtcccgtttaacagcagatccagaagaccttgagagtaggcgtcctctaaccacgg

SEQ ID NO: 14440 - DNA, 60 bp, Homo sapiens
gcagtgctgaggatgagaactaacaatcctagaaccaagcttcagagcctagccacctcc

SEQ ID NO: 14441 - DNA, 60 bp, Homo sapiens
gaggtgccaggtgcctcggaggatgcggagaagaaccagaaaatcatgcagtggatcatt

SEQ ID NO: 14442 - DNA, 60 bp, Homo sapiens
ccaagtgactgtgaaaccgtcagttcggaaggctggttagaacatgtgggagcaacatga

SEQ ID NO: 14443 - DNA, 60 bp, Homo sapiens
ctgagcaggatcgtgcaggcaacgactttgcttaccatggataagtatgcacctgatgac

SEQ ID NO: 14444 - DNA, 60 bp, Homo sapiens
gatcgtcttgagcaggagttgttatgtgcaagtaacaggttgcaagaattggaggcagag

SEQ ID NO: 14445 - DNA, 60 bp, Homo sapiens
tgcgctttgtcatcatccacaaacgctgcgtctactacttcaagagtagcacctctgcct

SEQ ID NO: 14446 - DNA, 60 bp, Homo sapiens
agccagcttcctgtgcagaaggtctggtcggcaaactccctaagtacccgctacaattct

SEQ ID NO: 14447 - DNA, 60 bp, Homo sapiens
tgaaggtgtcctccatgcttcagcggaccccagaccagggcaagaagtatctgcgagatg

SEQ ID NO: 14448 - DNA, 60 bp, Homo sapiens
aggtgaagaggcagggcccctgacggaggctttgctggctgtggtgatggggattgagtt

SEQ ID NO: 14449 - DNA, 60 bp, Homo sapiens
tgctgcttccgatgtgccacctgcagtagtggatcatgtggagtgaaaggcaaatcttac

SEQ ID NO: 14450 - DNA, 60 bp, Homo sapiens
tacctacggaaactgtcagatcattcagtaagagaggactcagagcatggtgaaaagcca

SEQ ID NO: 14451 - DNA, 60 bp, Homo sapiens
aagctgctcgattcccaggatctcggctgccttttcctctatcttgagccctataaatgc

SEQ ID NO: 14452 - DNA, 60 bp, Homo sapiens
ggcacttcatctgaagaatgttggtgaaggcaagtctctgaaagcagaactatccagtgt

SEQ ID NO: 14453 - DNA, 60 bp, Homo sapiens
cacgtgagaatggattttgccagacgtgataatcagttcgactctcccaaaagaggtcgg

SEQ ID NO: 14454 - DNA, 60 bp, Homo sapiens
gtacataaaggagaccactaccactggggtagaaattcctgcctcgttcaatgcggcaag

SEQ ID NO: 14455 - DNA, 60 bp, Homo sapiens; identical to SEQ ID NO: 4855

SEQ ID NO: 14456 - DNA, 60 bp, Homo sapiens
ttattactgcccagcattccttccaacgggaagtagatgggcgactgctttgttcacaca

SEQ ID NO: 14457 - DNA, 60 bp, Homo sapiens
agatacatgcagaaaatgggcatgactgaagatgacaagaggaactgctgcctgctggag

SEQ ID NO: 14458 - DNA, 60 bp, Homo sapiens
gaaaagcacttcgtcagaaccttctgtgggagccattgagagaaaagcatggtccagtgc

SEQ ID NO: 14459 - DNA, 60 bp, Homo sapiens
gggagaggacttactcagagaccccaacaggtgatactgcacaaagcctggttcttcaat

SEQ ID NO: 14460 - DNA, 60 bp, Homo sapiens
atgatggctctcattgacatcactgtgcggcacatcgcagacctgtcaccaggagacaag

SEQ ID NO: 14461 - DNA, 60 bp, Homo sapiens
gcaggcaatgtaacgctgccatccacaagaaatgcatcgacaagatcatcggcagatgca

SEQ ID NO: 14462 - DNA, 60 bp, Homo sapiens
gacagagtgcaagacgatgacttgcaaaatgtcgcagctggaacgcaacatagagaccat

SEQ ID NO: 14463 - DNA, 60 bp, Homo sapiens
cactgctcttcagaatacactctagacccaaaggtgtgctaatcacttcacagtgaccac

SEQ ID NO: 14464 - DNA, 60 bp, Homo sapiens
tgaccgaacctgacatcaacaacaggctggagtcgttgtgcctcagtatgaccgaacacg

SEQ ID NO: 14465 - DNA, 60 bp, Homo sapiens
ttcctacaacatcggcaccatgttcctccgggagacaagcctctgagacctgctacagat

SEQ ID NO: 14466 - DNA, 60 bp, Homo sapiens
ggatccagagaacttcctgtgtgagatggaggagatcccattcaaccctgtccggtcctg

SEQ ID NO: 14467 - DNA, 60 bp, Homo sapiens
tcttcctcagtctgtgcctgtgattccagtcaccctgtagttactgacagaaattgactg

SEQ ID NO: 14468 - DNA, 60 bp, Homo sapiens
aaacataacggcggtagagaggaagtcaccaaggttgccactcagaagcaccgacagtca

SEQ ID NO: 14469 - DNA, 60 bp, Homo sapiens
gcgcatccttaatcacgtgacttggaaaatgatcacggagtttgggcatcctgcagccat

SEQ ID NO: 14470 - DNA, 60 bp, Homo sapiens
aaagctgtgaatggcctaggggctgagtcccacaccagctgtgaattctcctgcagacag

SEQ ID NO: 14471 - DNA, 60 bp, Homo sapiens
gatgcttttcatggcttagtgagggaaattcgcaagaaggagtccatgccatccttgatg

SEQ ID NO: 14472 - DNA, 60 bp, Homo sapiens
gtctcttctcctgttgggtatcaaaaggttcagaacgtagtctctactcttcccctgcct

SEQ ID NO: 14473 - DNA, 60 bp, Homo sapiens
gcatcccatgctaagcagggtcatggtctgaactactcagattggatttccaaaccatcc

SEQ ID NO: 14474 - DNA, 60 bp, Homo sapiens
tgtggcctgtaaacagcaagcagttgacgggaagactagctctgttgctactaagcagct

SEQ ID NO: 14475 - DNA, 60 bp, Homo sapiens
ttgtgctggggacaggtcctcagtgtcctcaggggcctgcccagtgcacttgctggaaga

SEQ ID NO: 14476 - DNA, 60 bp, Homo sapiens
acacaccagggtctcagccttttggggtgaacgaggatgaggcatctgatctattcgcta

SEQ ID NO: 14477 - DNA, 60 bp, Homo sapiens
tcttcatgaggttggtatttccttttgtggagtgcctcatcacaggacggtgactctggg

SEQ ID NO: 14478 - DNA, 60 bp, Homo sapiens
cctctgcagtatccagttgagaagaagtcctcagctagaagtacacaaggtactacaggg

SEQ ID NO: 14479 - DNA, 60 bp, Homo sapiens
tgcacatccctgcccatccccagaaagactgttcctgtcaggatttgtttccctctgctg

SEQ ID NO: 14480 - DNA, 60 bp, Homo sapiens
accagcactatgagagttttggggaattcacctggcgatgtgaggatgagttaggtccca

SEQ ID NO: 14481 - DNA, 60 bp, Homo sapiens
atggcacccttgggccccaaaggcctgatacacctgtactctgagctggagctctcagct

SEQ ID NO: 14482 - DNA, 60 bp, Homo sapiens
gctcttgtcatgcagtgctttcaactcaacttgctgatgccatgatgttccccattaccc

SEQ ID NO: 14483 - DNA, 60 bp, Homo sapiens
cctcacttcttagaatcctcctgcaagagggcaactccagccagtgttcagcgactgaac

SEQ ID NO: 14484 - DNA, 60 bp, Homo sapiens
ggttgatcctttggaagctactgtttcatgcagtggttcccatcacatcaagtgctgcat

SEQ ID NO: 14485 - DNA, 60 bp, Homo sapiens
aaatggatacagttcaatggacgctgtggctcaggtgaccttggaggatttgagacggct

SEQ ID NO: 14486 - DNA, 60 bp, Homo sapiens
gttcagcaccagcaacctgcagccaatcagtgatatcttctgtggaaaatggggatacat

SEQ ID NO: 14487 - DNA, 60 bp, Homo sapiens
cctgtgtgaaggcgacctcattgttgagatcaaccagcagaatgtacagaacctgagcca

SEQ ID NO: 14488 - DNA, 60 bp, Homo sapiens
atctggggatggagaatgccagcccaaagctggagccaatggtgagggctgagagggctg

SEQ ID NO: 14489 - DNA, 60 bp, Homo sapiens
acaccagtgttccagttcacttaccacatctgtgacagtgtgtttagattggaataaatg

SEQ ID NO: 14490 - DNA, 60 bp, Homo sapiens
tcaatatcttccaccaatactcagttcggaaggggcattttgacaccctctctaagggtg

SEQ ID NO: 14491 - DNA, 60 bp, Homo sapiens
atagtccgagcttcatcgtatctccacttaattcctcctctgcgcttgctctgcgaagtc

SEQ ID NO: 14492 - DNA, 60 bp, Homo sapiens
tttgctggaagagcaagcagagtttacaggcattggagacagcgtgatgcacgtggagca

SEQ ID NO: 14493 - DNA, 60 bp, Homo sapiens
atagacttcctgccttggagggttatccttgttctcacctatcccttcccgagctgaagc

SEQ ID NO: 14494 - DNA, 60 bp, Homo sapiens
tgctgccttgttgtgcccctcatagcagaatccgggaataagctggacctggttattagt

SEQ ID NO: 14495 - DNA, 60 bp, Homo sapiens
acaactgtcggagcttctacgaggaggcagcggctctagtatcaacccaggaataggaaa

SEQ ID NO: 14496 - DNA, 60 bp, Homo sapiens
gagaggatgaagatccccaccgacctccaacatcggaagaactgttgacagcttatggat

SEQ ID NO: 14497 - DNA, 60 bp, Homo sapiens
ggaagaaagaccacatctccagggcgtttgcagtgcagtttgacagtccagagtgggaga

SEQ ID NO: 14498 - DNA, 60 bp, Homo sapiens
aggaaaactctgagacagtggtcacaggctccctagatgacctggtgaaggtctggaaat

SEQ ID NO: 14499 - DNA, 60 bp, Homo sapiens
taatcgctgccccatgaagctgagccgccgtgatctacctgcacacttgcagcatgactg

SEQ ID NO: 14500 - DNA, 60 bp, Homo sapiens
actctgctggtgcgtctacccttggaatgggaagaggatccctgggtctccagagatcag

SEQ ID NO: 14501 - DNA, 60 bp, Homo sapiens
ctttctatgcaatgttcaggataaatgcatactgctggccaatcagtgtcatctcctggg

SEQ ID NO: 14502 - DNA, 60 bp, Homo sapiens
cagctttcataagggggagcctcaggacctatcaggtcaagaagccaccaacaatgagta

SEQ ID NO: 14503 - DNA, 60 bp, Homo sapiens
aattacacagactgccatatccccaacaacatgcgatactgcaacagcagcgtgccagac

SEQ ID NO: 14504 - DNA, 60 bp, Homo sapiens
gctagtggatctacttgtggatgatagcggtaaagagtccttgattggttatagaccaac

SEQ ID NO: 14505 - DNA, 60 bp, Homo sapiens
aactgctctctgagttttgcacacgaagttgccctcatctgctggagatcgataaggaag

SEQ ID NO: 14506 - DNA, 60 bp, Homo sapiens
gcaactttccagttgtagagtaagcaagcaccttaagtagtgtgttaatgattgaaactg

SEQ ID NO: 14507 - DNA, 60 bp, Homo sapiens
gcagctgagacatcctgaaatggtgaccacagagagctaatagctaccagctacctacag

SEQ ID NO: 14508 - DNA, 60 bp, Homo sapiens
tcatcaaggtcctgtggaacatcttgaagcccctcatcagtcacaagtttgggaagaaag

SEQ ID NO: 14509 - DNA, 60 bp, Homo sapiens
tccagcagccatgagaatctggagcctgagacagaaaccgagtcagtagtgtcactgagg

SEQ ID NO: 14510 - DNA, 60 bp, Homo sapiens
gtttgtgtcgttccttaagcagaactaagctcagtatgtgaccttacccgctaggtggtt

SEQ ID NO: 14511 - DNA, 60 bp, Homo sapiens
cgtgggatcaagagagaccttctacaggatctccaagacggatggcgtttgtgaatggaa

SEQ ID NO: 14512 - DNA, 60 bp, Homo sapiens
gcaactacaggagatatgatgcctcataattcggagccagaagtggggctttgggtgaga

SEQ ID NO: 14513 - DNA, 60 bp, Homo sapiens
gccttatcccttggcacgtaaacagactactagacttattgtaggttcgtttgagctttg

SEQ ID NO: 14514 - DNA, 60 bp, Homo sapiens
tggagaccctacctgatccccagacctctgtccctgttcccctccactcctcccctcact

SEQ ID NO: 14515 - DNA, 60 bp, Homo sapiens
tggagcctctagtccaccctctccagtggtcactcttgagtcacatctgtcacttaatta

SEQ ID NO: 14516 - DNA, 60 bp, Homo sapiens
gaacaggacatagcacgaatctgttaccagtaggaggaggatgagccacagaaattgcat

SEQ ID NO: 14517 - DNA, 60 bp, Homo sapiens
aaatggaactctgaaaattaagcatctgaagaccgatgatcaggatatctacaaggtatc

SEQ ID NO: 14518 - DNA, 60 bp, Homo sapiens
gaagaatgagatactgatgtccacagttcattggcagaatctaaccccttctgttatctt

SEQ ID NO: 14519 - DNA, 60 bp, Homo sapiens
gattctttctgtctgccttctttccgcctttgtcactttacctaccatttttggtcgggc

SEQ ID NO: 14520 - DNA, 60 bp, Homo sapiens
gccctgctgaccctaaagaccttcctagaagtcaagagctagccttgagactgtgctata

SEQ ID NO: 14521 - DNA, 60 bp, Homo sapiens
catcctccgagagtacggcttccgctttgtgaggcgaggccccatctttgtgaaggggaa

SEQ ID NO: 14522 - DNA, 60 bp, Homo sapiens
gtcaagatgaagtgtcctgatggaggagacaatgcagatagcagtaacacagctcttaat

SEQ ID NO: 14523 - DNA, 60 bp, Homo sapiens
tgatagtcagttcgaatgcccggacttctccacgtgctgtgttatggtcgatggctcctg

SEQ ID NO: 14524 - DNA, 60 bp, Homo sapiens
ttttggaggcagctgaggaaggatgctggggaaagccctcttctgcagctttgtggaagg

SEQ ID NO: 14525 - DNA, 60 bp, Homo sapiens
tttcgtcacaggagtctttgtaatgcttgtacagttgatgtcgatgctcactgcttctgc

SEQ ID NO: 14526 - DNA, 60 bp, Homo sapiens
atgcatcccatacgaaatgcttatgtgatcgtctctctaccttcgccattttggctcagc

SEQ ID NO: 14527 - DNA, 60 bp, Homo sapiens
gaatctttgtgcacttgcacctctttttcacatgggccacagtttcagtacttcagcctc

SEQ ID NO: 14528 - DNA, 60 bp, Homo sapiens
ctccgtcaagctggttgtccactaaaccccatacctggaattggagtcgtgttgtcattg

SEQ ID NO: 14529 - DNA, 60 bp, Homo sapiens
aatacaaccatcctcagggattcttcagccatcgctgatctcccgcgcagaccgttgttt

SEQ ID NO: 14530 - DNA, 60 bp, Homo sapiens
tatttcatgcactggaaactgagcatttatcgtagagtaccgccaagctttcactccagt

SEQ ID NO: 14531 - DNA, 60 bp, Homo sapiens
ccctgctttagacatagtgctttctttcaacctccatacttctgtacagttacctccatc

SEQ ID NO: 14532 - DNA, 60 bp, Homo sapiens
atgcctctccctcctgcacgcaatggtggcctatgatcccgatgagagaatcgccgccca

SEQ ID NO: 14533 - DNA, 60 bp, Homo sapiens
ctctgtgtctctatttgcacttgagtctctcacctcagctcctgtaaaagagtggcaagt

SEQ ID NO: 14534 - DNA, 60 bp, Homo sapiens
tccattctcctgagctcatcagggtacagcttactacatgcattcatcacatcatcaaac

SEQ ID NO: 14535 - DNA, 60 bp, Homo sapiens
gccccactttcaagaatcagacagcaggaagccatagatgctggctgggttccaggttat

SEQ ID NO: 14536 - DNA, 60 bp, Homo sapiens
attgtcacggaacacgtgcagctactgcaggtgatcaagaagacggagacagacatgagt

SEQ ID NO: 14537 - DNA, 60 bp, Homo sapiens
ctcctggtcccagacagtctaagaggcacagataaacgcagaaatggacctgaattttcc

SEQ ID NO: 14538 - DNA, 60 bp, Homo sapiens
gcccatccccagatgcctgagcctttgtccaaagtgaggtcactcgagaattcatggaca

SEQ ID NO: 14539 - DNA, 60 bp, Homo sapiens
ccgcttcaagaccaactatgctgtggagcgcaaaattgagcctttctacaagggcggaaa

SEQ ID NO: 14540 - DNA, 60 bp, Homo sapiens
gaacgacttggatacagacagctttctgggtggactcaagtggtgcagtgaccaatcaga

SEQ ID NO: 14541 - DNA, 60 bp, Homo sapiens
tttcagcattggaggtggaatcgaccaggacccttcccagaatcccttctctgaagacaa

SEQ ID NO: 14542 - DNA, 60 bp, Homo sapiens
ggcatctgtcgaccctggacaaactgttctttggatggaaagtctgtgcttgtgaatggg

SEQ ID NO: 14543 - DNA, 60 bp, Homo sapiens
aatgtcctcacacctaccaaaacaggcgacctttcagcagagagatggatttggggctac

SEQ ID NO: 14544 - DNA, 60 bp, Homo sapiens
acttctatcaacccctgctctgctgagaaccatcaagcgcagggaagccacgtgacccct

SEQ ID NO: 14545 - DNA, 60 bp, Homo sapiens
atgcttgaccaagtgtctaaaataggcaagtagtaccttttgttctttcattgcaatttg

SEQ ID NO: 14546 - DNA, 60 bp, Homo sapiens
caatatcaggtaaaccaagttgctttcctcactccctgtcatgagacttcagtgttaatg

SEQ ID NO: 14547 - DNA, 60 bp, Homo sapiens
agtgaagaacctaaatgggtccagtcctgtcaaccctgccttggcaggaatcactgggat

SEQ ID NO: 14548 - DNA, 60 bp, Homo sapiens
gttgtccaagctgtgcctcgacacatcctcatccccagcatgggacacctcaagatgaat

SEQ ID NO: 14549 - DNA, 60 bp, Homo sapiens
accagcataacctcccagctcatggtggaatggtttgtatggaagcccaaccaccctgag

SEQ ID NO: 14550 - DNA, 60 bp, Homo sapiens
agaactgaatcagtcggaggaacctgaggcaggcgagagtagtactggagggccttgagg

SEQ ID NO: 14551 - DNA, 60 bp, Homo sapiens; identical to SEQ ID NO: 4855

SEQ ID NO: 14552 - DNA, 60 bp, Homo sapiens
cctcagtgaggccttttgctggattggtctgaggaacaattctggctggaggtgggaaga

SEQ ID NO: 14553 - DNA, 60 bp, Homo sapiens
cccattgtagcagggagctagcgtattagccttgtgggcaacatgatgcatgggaaatga

SEQ ID NO: 14554 - DNA, 60 bp, Homo sapiens
ctgggctctggccaaccctcagaaaccctcacaataaaccagaccagaaggatgtcccat

SEQ ID NO: 14555 - DNA, 60 bp, Homo sapiens
cattgaatgctggagccttggaagcgaatctgatggtcctaggaggttcgggaagaccat

SEQ ID NO: 14556 - DNA, 60 bp, Homo sapiens
acttcaagcataaaccttagcgagtgcggctggaggaccacggacattggactcactgtg

SEQ ID NO: 14557 - DNA, 60 bp, Homo sapiens
ccatcaacagtgacagccagggtcggtgtggcacgcgtttcctcaccacctacgaccggc

SEQ ID NO: 14558 - DNA, 60 bp, Homo sapiens
ctgccctcctcatgaatagtgtgcagactcacagataataaagctcagagcagctcccgg

SEQ ID NO: 14559 - DNA, 60 bp, Homo sapiens
tgcaggtttctatgctgtttcttagcacagaatccagcctagccttagccgcagtctagg

SEQ ID NO: 14560 - DNA, 60 bp, Homo sapiens
ctcaaggtactgagcattgcccaagcacactcgcctgccttttcctgcgaacaggttcgc

SEQ ID NO: 14561 - DNA, 60 bp, Homo sapiens
aagctggaaggtgaaccgttacttcgctgtggacttcaagcaccgacacccgtctctggc

SEQ ID NO: 14562 - DNA, 60 bp, Homo sapiens
acagactataggcacaactacaagaactgggctgtcactcagccagataattggcacggg

SEQ ID NO: 14563 - DNA, 60 bp, Homo sapiens
aactctgaacctgctgactctacggagatggatgataaggcagcagtaggcgtctccaag

SEQ ID NO: 14564 - DNA, 60 bp, Homo sapiens
taagagccacaggtctttatgttgagtcgctagcaagaacaagaaaagttttaaagaaag

SEQ ID NO: 14565 - DNA, 60 bp, Homo sapiens
cacaatgactgtctaaagcatgccttatttagcctctcctgtaagggtgatctagccagg

SEQ ID NO: 14566 - DNA, 60 bp, Homo sapiens
ctttgactcagatgccgaagatgaactttgcgaatgtatttattggtgccaatcccctgg

SEQ ID NO: 14567 - DNA, 60 bp, Homo sapiens
gcagccaggaactgagtatgacaatgttgtactaaagaaaggcccaaagtgacagaggca

SEQ ID NO: 14568 - DNA, 60 bp, Homo sapiens
aaattggcgatgtcacccgtgtacggtacgcagcccagagcagaccctcaataaacgtca

SEQ ID NO: 14569 - DNA, 60 bp, Homo sapiens
gaaactggactgttcctgggaaaagggtgaagccacctctagaagggactttggcctccc

SEQ ID NO: 14570 - DNA, 60 bp, Homo sapiens
atccccaaactggcaggctgtgtattccttcgctgtccagcttcgaccaggattcagagg

SEQ ID NO: 14571 - DNA, 60 bp, Homo sapiens
gtctcctctctgagactgctaagtaggggcagtgatggttgccaggacgaattgagataa

SEQ ID NO: 14572 - DNA, 60 bp, Homo sapiens
ctgggaatatctggaaccgtgaatggtattctcactttgactttgatctccttgatcctg

SEQ ID NO: 14573 - DNA, 60 bp, Homo sapiens
cggatttgatgcaccatgaatgaggagaaatggcctcccgtcttgtgaacttcaatgggg

SEQ ID NO: 14574 - DNA, 60 bp, Homo sapiens
gaaacatagctcttacatttgtcaccttatgatgatgatggtaatgaaacttcttgtcta

SEQ ID NO: 14575 - DNA, 60 bp, Homo sapiens
acatctccctccactgccacctggtccacctgctctacttcttctatgatgtcattgact

SEQ ID NO: 14576 - DNA, 60 bp, Homo sapiens
cctgactctgaaatctgaagacctcgagcagatgatgccaacctctggagcaatgttgct

SEQ ID NO: 14577 - DNA, 60 bp, Homo sapiens
aggatgctgtgaaattcccaacaaacattgatgctgacagtcatgcagtctgggagtggg

SEQ ID NO: 14578 - DNA, 60 bp, Homo sapiens
tgcgtctccgactacatgagcatctctacttgcgagtggaagatgaatggtcccaccaat

SEQ ID NO: 14579 - DNA, 60 bp, Homo sapiens
cacctacaggagagatggccacaccaggaacctgtttgtgtatcatgaaagtgggaagga

SEQ ID NO: 14580 - DNA, 60 bp, Homo sapiens
ctgtcaacaccatgaatcttccaaagcgcaaagaagttatttgccgaggatctgatgacg

SEQ ID NO: 14581 - DNA, 60 bp, Homo sapiens
gtaagtgagtggtcttttctgtaagctaatccacaacctgttaccacttcctgaatcagt

SEQ ID NO: 14582 - DNA, 60 bp, Homo sapiens
ggggaagacagactttaggatcacgtgtgtgactaatacagaaaggaaacatggcgtcgg

SEQ ID NO: 14583 - DNA, 60 bp, Homo sapiens
agttgacccggagcgaggagttgaccctgagtgaggaagcgacctggagtgaagaggcga

SEQ ID NO: 14584 - DNA, 60 bp, Homo sapiens
ctgtgaagagaaccatatcaagactctttggacactcacacggacactcaaaagctgggc

SEQ ID NO: 14585 - DNA, 60 bp, Homo sapiens
gcattaactgagctccaagggtgtgtgggcagagagcttgctatgtgaactcactcctta

SEQ ID NO: 14586 - DNA, 60 bp, Homo sapiens
agaatcatagcttggactctgtgtctgtggactgggcaccatccctgctgagcacctgtc

SEQ ID NO: 14587 - DNA, 60 bp, Homo sapiens
agcctttgtgaaccaacacctgtgcggctcacacctggtggaagctctctacctagtgtg

SEQ ID NO: 14588 - DNA, 60 bp, Homo sapiens
ccatttctggcttctagtctggtgttctgagtacttgatttcaggtcaataacggtcccc

SEQ ID NO: 14589 - DNA, 60 bp, Homo sapiens
ctagatgttacagcaaagccccaactaatctttagaagcatattggaactgataactcca

SEQ ID NO: 14590 - DNA, 60 bp, Homo sapiens
taacacactgtactgatgtcacaactttgcaagctctgccttgggttcagcccatctggg

SEQ ID NO: 14591 - DNA, 60 bp, Homo sapiens
ccctctggctgcctatctgaagttcctgcatcagggtctacattgccacagtcaactatt

SEQ ID NO: 14592 - DNA, 60 bp, Homo sapiens
aaaatcctcctgtgcttccctttggccctctgtgctcttgtctggttttccccagaaact

SEQ ID NO: 14593 - DNA, 60 bp, Homo sapiens
gggaaatgggcctagtagatgcagaattcaaagatgtcggttgggagaaactagctctga

SEQ ID NO: 14594 - DNA, 60 bp, Homo sapiens
gggatgtgaggttctgctgaggaaatgggtatgaatgtgccttgaacacaaagctctgtc

SEQ ID NO: 14595 - DNA, 60 bp, Homo sapiens
cttaactggcataggaaatggtatccagaatggaattttgctacatggggtctgggtggg

SEQ ID NO: 14596 - DNA, 60 bp, Homo sapiens
tttatctgcgacagttttcagggtctctgaagccagaggacgctgaggtcttcaagagtc

SEQ ID NO: 14597 - DNA, 60 bp, Homo sapiens
gaagaagttcaccgcaagaggattccctcgccactgctatctacccaacaacgagaaagg

SEQ ID NO: 14598 - DNA, 60 bp, Homo sapiens
agctattttgggaagatgttccgaaccccaagaattgttcctgggcacaaggacttaatt

SEQ ID NO: 14599 - DNA, 60 bp, Homo sapiens
agtattgagccagcatttactccaggacccaacatagaactccagaaagactctgactgc

SEQ ID NO: 14600 - DNA, 60 bp, Homo sapiens
tgatggagaagaagcacctcagcagttttcagaggatggagactttgtcatcaacaacgt

SEQ ID NO: 14601 - DNA, 60 bp, Homo sapiens
aagacgcccacttccaatgcccgcacaatagcagcaacaacgccaacgtcacctggtggc

SEQ ID NO: 14602 - DNA, 60 bp, Homo sapiens
agctgagcatcaggaccttgcctcgaattgtcttccagtattacggtgcctcttctctgc

SEQ ID NO: 14603 - DNA, 60 bp, Homo sapiens
atcgtggatgagtgctgcttccggagctgtgatctaaggaggctggagatgtattgcgca

SEQ ID NO: 14604 - DNA, 60 bp, Homo sapiens
ccatgcagaagaaagactggaagggatgtaaacagacttgtcaacattgtagatcatccc

SEQ ID NO: 14605 - DNA, 60 bp, Homo sapiens
ccagcttctaccaaaaccagtgaagtgtaagaaacccagactgaacttaccgtgagcgac

SEQ ID NO: 14606 - DNA, 60 bp, Homo sapiens
ccccatctgcctcatccccttcctcatcactcttgtagtatggaggagtaaagacagtga

SEQ ID NO: 14607 - DNA, 60 bp, Homo sapiens
ctgatgcagagcctgaaaaccatgtggttgtgtcctattgtccacccatcattgaggaag

SEQ ID NO: 14608 - DNA, 60 bp, Homo sapiens
cagcccatctgaagatactcagcaagaaaatggcagcatgttctctctcattacctggaa

SEQ ID NO: 14609 - DNA, 60 bp, Homo sapiens
actggtgtgaatgacaaggtcaaatgcttctgttgtggcctgatgctggataactggaaa

SEQ ID NO: 14610 - DNA, 60 bp, Homo sapiens
cggggagatctgatcaaattgttctgtatcatcactgtcgagggagcagcactggatcca

SEQ ID NO: 14611 - DNA, 60 bp, Homo sapiens
cctctcccagataggaaaagggcctctaacaaggagaaattagtgtgcggcaaaaggcag

SEQ ID NO: 14612 - DNA, 60 bp, Homo sapiens
gatgagctctgaaaattgtttcgtagcagagaacagctctttgcatccggagagtggaca

SEQ ID NO: 14613 - DNA, 60 bp, Homo sapiens
cagaaaacggagttcaaggtggactccgacgaccagtggggagagtactcctgcgtcttc

SEQ ID NO: 14614 - DNA, 60 bp, Homo sapiens
tttgctgtgtgttctggggcaacctactaatcctctctgcaagtcggtctccttatcccc

SEQ ID NO: 14615 - DNA, 60 bp, Homo sapiens
ccagctttgagagaggagtgtgtgtgcacgtattcatctgtgtgtacatgtctgcatgtg

SEQ ID NO: 14616 - DNA, 60 bp, Homo sapiens
tcgtgtgctgcatctcctccttggcgcctcattgctgtaattttgggaatcctatgcttg

SEQ ID NO: 14617 - DNA, 60 bp, Homo sapiens
tcatctacactgtcttcaacgccgagttccgcaacgtcttccgcaaggccctgcgtgcct

SEQ ID NO: 14618 - DNA, 60 bp, Homo sapiens
cctgacttcagggaaggtgaaacagggcttgtccctccaactgcaggaaaacccttaata

SEQ ID NO: 14619 - DNA, 60 bp, Homo sapiens
aatgtgcatacttctgtgagaacaagctcaggagcccagtgaaccttccaccagagctca

SEQ ID NO: 14620 - DNA, 60 bp, Homo sapiens
aggtgtgaccacaaataggagggaagacgaggaggaagatgaaggcaactgaatcccaag

SEQ ID NO: 14621 - DNA, 60 bp, Homo sapiens
cctcaactcaagggtggtcagctcaatgctacacagagcacggacttttggattctttgc

SEQ ID NO: 14622 - DNA, 60 bp, Homo sapiens
gctggcatgaccaaggtggaccaactaccttaatgcaaagaggtggacaggataacacag

SEQ ID NO: 14623 - DNA, 60 bp, Homo sapiens
atgctggatgatgatggggacaccaccatgagcctgcattctcaagcctctgccacaact

SEQ ID NO: 14624 - DNA, 60 bp, Homo sapiens
accagcctgagaacctgtgcttggacgggtgcaaaagtgaggcagacaagttcacagtga

SEQ ID NO: 14625 - DNA, 60 bp, Homo sapiens
ctatatcggtgctccaaaacagtctggaaacacgcctgtgatccaggattatccactgat

SEQ ID NO: 14626 - DNA, 60 bp, Homo sapiens
cagattcacccaggaggtcacagaatgacagcaagggaaatgacgaccaagagaagaagc

SEQ ID NO: 14627 - DNA, 60 bp, Homo sapiens
acccttggaataacagtctagctgattgttccaccaaagaatccagcctgctgcttattc

SEQ ID NO: 14628 - DNA, 60 bp, Homo sapiens
ggcttggctgccctgtctggaacatggactttcttgcatgaatcagatgtgtgttctcag

SEQ ID NO: 14629 - DNA, 60 bp, Homo sapiens
aggccacatcatcgagaacccacaatacttcagtgatgcctgtgttcaccacatcaagcg

SEQ ID NO: 14630 - DNA, 60 bp, Homo sapiens
ggagagctgaaggaggaggcgtgttccatattccactcattcaaaggacagcttggtgtt

SEQ ID NO: 14631 - DNA, 60 bp, Homo sapiens
aaacttcttcaatgacttcagtgaccacctggctgaggaggccctatgggaactgtctct

SEQ ID NO: 14632 - DNA, 60 bp, Homo sapiens
tcttaccatcatgaatgtttccctgcaagattcaggcacctatgcctgcagagccaggaa

SEQ ID NO: 14633 - DNA, 60 bp, Homo sapiens
aagactggggtcaagtcagagggctctacctgagaaggacggcaaggctgaggtggctaa

SEQ ID NO: 14634 - DNA, 60 bp, Homo sapiens
cgactagcactggccatgtgactagcttgccctcatcaggatccaatcaggaagcaaata

SEQ ID NO: 14635 - DNA, 60 bp, Homo sapiens
tgcaggtcctagaagaagtgctgggtgaccctgagctgacaggagagaagttccgccagt

SEQ ID NO: 14636 - DNA, 60 bp, Homo sapiens
gcctctactccagtaaacctgattgggtttgttcactctctgaatgattattagccagac

SEQ ID NO: 14637 - DNA, 60 bp, Homo sapiens
agataaagtttacaacatccagatccgttatcagaaggaaagtcaagtttacttgttggg

SEQ ID NO: 14638 - DNA, 60 bp, Homo sapiens
ttcagctgtaaaggacctggccagaatgtggctgtgaccagggcacaccctgactcccaa

SEQ ID NO: 14639 - DNA, 60 bp, Homo sapiens
aagacgccttctttgccagatgacctcagtgacagtaccagcttggggaccagtgtcatc

SEQ ID NO: 14640 - DNA, 60 bp, Homo sapiens
gggagcttgaggattcataacgtacaaaaggaagatgcaggacagtatcgatgtgtggca

SEQ ID NO: 14641 - DNA, 60 bp, Homo sapiens
aatacactgcgagagttggtagaacctctccatgccaaatcggatccacttctgttggca

SEQ ID NO: 14642 - DNA, 60 bp, Homo sapiens
gaagaagacacttttggggtatccatagcagttggacttgctgcttttgcctgtgtcctg

SEQ ID NO: 14643 - DNA, 60 bp, Homo sapiens
tcatgttctcttttgaggccagcgccgctgcctcttgggccctggaaccttcctttccag

SEQ ID NO: 14644 - DNA, 60 bp, Homo sapiens
ctgatgatagccagtgaggttcttaaagtttgcagtattctcccctgattggaatggttg

SEQ ID NO: 14645 - DNA, 60 bp, Homo sapiens
tctctaaaggaagcgcagctcatttccaaacagaagcaagaggtggaaccctccacgtag

SEQ ID NO: 14646 - DNA, 60 bp, Homo sapiens
cttggagcttgcaggtccctttctactgtggtgttggagcaggacaataaagtccactag

SEQ ID NO: 14647 - DNA, 60 bp, Homo sapiens; identical to SEQ ID NO: 4855

SEQ ID NO: 14648 - DNA, 60 bp, Homo sapiens
ccgtgttgaacacttgactacctttgtcctggatcggaaagatgctatgatcactgttga

SEQ ID NO: 14649 - DNA, 60 bp, Homo sapiens
attttacctctttcccaaacctggagcatttatgcctaggcttgtcaagaatctgttcag

SEQ ID NO: 14650 - DNA, 60 bp, Homo sapiens
aacggactcctcagactctccccaatagcggaagtcgatcttctgaaggatggccaatct

SEQ ID NO: 14651 - DNA, 60 bp, Homo sapiens
tgtgtcacctagagccccagatgccaagatgctggaggaactgcaagccgagacttggta

SEQ ID NO: 14652 - DNA, 60 bp, Homo sapiens
tggtgtgtcttggtgcctggacttgagtctcaccctacagatgagaggtggctgaggcac

SEQ ID NO: 14653 - DNA, 60 bp, Homo sapiens
cctgagtacacagatgtgccctgatttctggcccattggccatagtactgtgcctaatca

SEQ ID NO: 14654 - DNA, 60 bp, Homo sapiens
ccaagggctggaagggggttgtgaaaccgaaataaactgccaagcctggtctgtccacca

SEQ ID NO: 14655 - DNA, 60 bp, Homo sapiens
gactcacagatggatgacatggacatggacttagacaaggaatttctccaggacttgaag

SEQ ID NO: 14656 - DNA, 60 bp, Homo sapiens
tccagtgcatccatgaactctggggttcttctggttcggccatcacggctctcctccagt

SEQ ID NO: 14657 - DNA, 60 bp, Homo sapiens
gcccgagatgttctggacaaccttttcgagaaaactcattgtgactgcaatgtagactgg

SEQ ID NO: 14658 - DNA, 60 bp, Homo sapiens
ggaagacctggatttagaatatgccaagacagatataaattgtggcacagacttgatgtt

SEQ ID NO: 14659 - DNA, 60 bp, Homo sapiens
aagtcgatgctggtgcttctcaccttcttggccttcgcctcgtgctgcattgctgcttac

SEQ ID NO: 14660 - DNA, 60 bp, Homo sapiens
taaactccaaggtaactggacttctaaagcacctttctgtttgcctgatatctactttag

SEQ ID NO: 14661 - DNA, 60 bp, Homo sapiens
aattacgtgtccgacggctacaagaccgcactgacagaggagcgcaggcgcttctgcttc

SEQ ID NO: 14662 - DNA, 60 bp, Homo sapiens
ttttaagccatagacctggggtcagggcaggaaggaacttcactctgctgcttccgagaa

SEQ ID NO: 14663 - DNA, 60 bp, Homo sapiens
cttaagcaaatcatgcttctctgtttcacgtagttgggttgacaagtttctgcctttaag

SEQ ID NO: 14664 - DNA, 60 bp, Homo sapiens
gccgaccaagattgactagtttgttggacttaaacgacgatttgctgctgtgaacccagc

SEQ ID NO: 14665 - DNA, 60 bp, Homo sapiens
tgtgatcctgccattaaggctatgtgcagtctgccctcctgctccagtggccttgatttt

SEQ ID NO: 14666 - DNA, 60 bp, Homo sapiens
ctgcagagactaatgttggacagacactgttgcaaaggtagggactggaggaacacagag

SEQ ID NO: 14667 - DNA, 60 bp, Homo sapiens
gtacatgaagaatgtagccctctccaaatcaaggatcttttggacctggctaatggagtg

SEQ ID NO: 14668 - DNA, 60 bp, Homo sapiens
cccctaaagagtcaagcatctaagcccaggacatgagtgtctgtccagactcagtggatc

SEQ ID NO: 14669 - DNA, 60 bp, Homo sapiens
ggacatggaagatccctcatgtgagatgtgtctctccaaagacaagacgctccaggatct

SEQ ID NO: 14670 - DNA, 60 bp, Homo sapiens
tccctgtgccactacttgacccagtacaccagtgactggggaagttccctgcggatggca

SEQ ID NO: 14671 - DNA, 60 bp, Homo sapiens
ataagcatccacagtacaagccttgaacatcgtcctgcttcccagtgggttcagacctca

SEQ ID NO: 14672 - DNA, 60 bp, Homo sapiens
acctgtgttattagtgactttggactgtccatgaggctgactggaaatagactggtgcgc

SEQ ID NO: 14673 - DNA, 60 bp, Homo sapiens
ttcaatgacaagcagcagattatctacggcaagatccctggcatggtggtggatcgctgt

SEQ ID NO: 14674 - DNA, 60 bp, Homo sapiens
gagggatgacagcagcgatggctctttggaagatgacgattatcacgctacaacggaaac

SEQ ID NO: 14675 - DNA, 60 bp, Homo sapiens
aatagaaggctggtgagtgacaaagtagggcaggcatgttgcagacccatcgcctttgat

SEQ ID NO: 14676 - DNA, 60 bp, Homo sapiens
gatgaaggacagagcaactctgccaccagtacaggctcattcatggacattgcttctaca

SEQ ID NO: 14677 - DNA, 60 bp, Homo sapiens
agccaagaagaaaggggcagctgccgccacctcctccaagacaccttcctgaggacgctg

SEQ ID NO: 14678 - DNA, 60 bp, Homo sapiens
tgctttgagtcctacaagtggactgacatctgggcctttggcctggtgctgtgggagatt

SEQ ID NO: 14679 - DNA, 60 bp, Homo sapiens
atgatagtttgtcctgtgtccttagtgatgtgtgtgtgtctccatgcacatgcacgccgg

SEQ ID NO: 14680 - DNA, 60 bp, Homo sapiens
acttgttagccaaagactgccactgcatatgagcagtcctggtccttccactgtgcacct

SEQ ID NO: 14681 - DNA, 60 bp, Homo sapiens
aggccccaggtggtcagcctgcccaacatgagggtgcagaagtgcagctgtgcctcggat

SEQ ID NO: 14682 - DNA, 60 bp, Homo sapiens
gactgacccagctaagaatcgtgggctgagcagagttaaaccatgggacaaacccataac

SEQ ID NO: 14683 - DNA, 60 bp, Homo sapiens
agttctttctgagcctgctggacatgaagagcagatgaccaccatgctctgtgtcagcca

SEQ ID NO: 14684 - DNA, 60 bp, Homo sapiens
tggtggggaaaggtcgctttgctgaggtctataaggccaagctgaagcagaacacttcag

SEQ ID NO: 14685 - DNA, 60 bp, Homo sapiens
ataggctctgcccagatgccatcacatccctgatactgtgtatgctttgaagcaccttcc

SEQ ID NO: 14686 - DNA, 60 bp, Homo sapiens
gtcagttgttctacctcactgagagggaacagaaggatattgcttccttttgcagcagtg

SEQ ID NO: 14687 - DNA, 60 bp, Homo sapiens
ctgggtgcgtctccagtcatctgtaagagcttgctccagattctgatgcatacggctata

SEQ ID NO: 14688 - DNA, 60 bp, Homo sapiens
ggccagctaccctcactccccaggaagtccttctgagccagagagtccctatcaacactc

SEQ ID NO: 14689 - DNA, 60 bp, Homo sapiens
cagcagaactatctcctactactctttcccctgttaatcatagcttggatttacagccag

SEQ ID NO: 14690 - DNA, 60 bp, Homo sapiens
gagtacaagccactggatctgtccgattccacattgtcttacactgaaacggaggctacc

SEQ ID NO: 14691 - DNA, 60 bp, Homo sapiens
ggatttggtccgtcataacccaaggtaccatcctaggctgacacctaactcttctttcat

SEQ ID NO: 14692 - DNA, 60 bp, Homo sapiens
aatcctcagcacagcctcttagctcagttccgtaacttaggacaaaatgagcctcacatg

SEQ ID NO: 14693 - DNA, 60 bp, Homo sapiens
cacctgtgatctgttctttcggtagccactgactttgagttacaggaaggtctccgaaga

SEQ ID NO: 14694 - DNA, 60 bp, Homo sapiens
gaaggtgatgtttgggtcaggtgccttagtgaccacgcggtctttgtacagagttactac

SEQ ID NO: 14695 - DNA, 60 bp, Homo sapiens
ctgaggacactaatggtgatagtggaggacagtgtgttggattggcagatgcaggtctag

SEQ ID NO: 14696 - DNA, 60 bp, Homo sapiens
tctcctgggcaagcggtctcggggacattgctgtatggccaggtctgaatcagctgtgga

SEQ ID NO: 14697 - DNA, 60 bp, Homo sapiens
tgtaaccttctctgtggctccaaccccaagactcccaggcacatgggatggatgtccagt

SEQ ID NO: 14698 - DNA, 60 bp, Homo sapiens
gagctggccacatacactgtgcgcaccttcgcactccacaagagtggctccagtgagaag

SEQ ID NO: 14699 - DNA, 60 bp, Homo sapiens
gatgcctgagggtcagctcctctagacattgactgcaagagaatctctgcaacctcctat

SEQ ID NO: 14700 - DNA, 60 bp, Homo sapiens
cacggaagatgacggcatctacacgtgcatcgctgtcaatgacatgggttcagcctcatc

SEQ ID NO: 14701 - DNA, 60 bp, Homo sapiens
atttactcactccctggccacagccaccgttaccttctcaatcccaacttcggatataat

SEQ ID NO: 14702 - DNA, 60 bp, Homo sapiens
ccttgccaccggcttcctagagcagcgtagacagctggtaaactgaagagcacaactata

SEQ ID NO: 14703 - DNA, 60 bp, Homo sapiens
tacacagtacggaagttctgcatccagcaggtgggcgacatgaccaacagaaagccacag

SEQ ID NO: 14704 - DNA, 60 bp, Homo sapiens
ccccagaagaattcctctgaagggaacaagcatcacaagagtacacctctactcattcac

SEQ ID NO: 14705 - DNA, 60 bp, Homo sapiens
tctggtgcagccacctgcctgtcccatacgccccgcccaccatggagtccagagggaagt

SEQ ID NO: 14706 - DNA, 60 bp, Homo sapiens
acccacaaggttaccccgagtctgtgatccagcacctgggctacctcttcctcaagatga

SEQ ID NO: 14707 - DNA, 60 bp, Homo sapiens
gtcttgttcacatgctccacgtagctgtaacttcacatcatcagcttgcagtttgtaatt

SEQ ID NO: 14708 - DNA, 60 bp, Homo sapiens
gctctgtgcctgtatgagagcagactttcagcagagactgtccagtgagtcattgaagac

SEQ ID NO: 14709 - DNA, 60 bp, Homo sapiens
cagcatggccagataagaggatatcaggtgcattatgtgaggatggaaaatggtgagccc

SEQ ID NO: 14710 - DNA, 60 bp, Homo sapiens
gcaggctgaccctggggaaggcgagcagcaatgtggagaggcgtccagcccagagcaggt

SEQ ID NO: 14711 - DNA, 60 bp, Homo sapiens
cagggcaggaggtggcagcggcagcagctgtgtttctgcaccatttccgaggacgacgca

SEQ ID NO: 14712 - DNA, 60 bp, Homo sapiens
cctagccaaggggatttcgtgtaaatgtgaacactgacgaactgaaaagctaacaccgac

SEQ ID NO: 14713 - DNA, 60 bp, Homo sapiens
agctgctctgccactggctcgccatgagttcggcctgctacaaccccttcatctacgcct

SEQ ID NO: 14714 - DNA, 60 bp, Homo sapiens
ttccccaatggagaggccatctgcacgggctcggatgacgcttcctgccgcttgtttgac

SEQ ID NO: 14715 - DNA, 60 bp, Homo sapiens
tccggaaccagatccgggatgcccgaaaagcatgtggggactcaacactgacccagatca

SEQ ID NO: 14716 - DNA, 60 bp, Homo sapiens
ggcatgtactcacatttgcagggcaacctgactgtttgcgactgctgcgaatcgtttctt

SEQ ID NO: 14717 - DNA, 60 bp, Homo sapiens
gccgccaaacagttgggttttatcatggcagccttcatcctctgctggatcccttatttc

SEQ ID NO: 14718 - DNA, 60 bp, Homo sapiens
tcagtgaaagcttcaggaggcatttcaacagccaactctgctgtgggaggaagtcctatc

SEQ ID NO: 14719 - DNA, 60 bp, Homo sapiens
tggctgttgtggctttctatggacattcacatgaaacctgttacaaacagtcctctagag

SEQ ID NO: 14720 - DNA, 60 bp, Homo sapiens
agaaaacgcttttactctggggagaacccactgatggctcattagatctgtcccttcccc

SEQ ID NO: 14721 - DNA, 60 bp, Homo sapiens
tagaagcgctcatctggcttttcgcttgcttctgcagcaactcccacgactgttgtacaa

SEQ ID NO: 14722 - DNA, 60 bp, Homo sapiens
caagaagacagcatgtgtgttacctgctccagaaagaccttctcaagagaaccactccag

SEQ ID NO: 14723 - DNA, 60 bp, Homo sapiens
cagacatcagttgagcactgcaagacacacacggagaagcagaaagaatgcaacttcttc

SEQ ID NO: 14724 - DNA, 60 bp, Homo sapiens
atgctgaagctcttcttgaatgggagctggacaggtaatggtgggaatagggcaagatgc

SEQ ID NO: 14725 - DNA, 60 bp, Homo sapiens
cgagtcactagagcccaactcaggcgcgaaaccagccaattctgctgcagagaatggttt

SEQ ID NO: 14726 - DNA, 60 bp, Homo sapiens
gccatccttaggcctcctgttctgagactaatgcgttcagtcctctgttgtcggatttca

SEQ ID NO: 14727 - DNA, 60 bp, Homo sapiens
gtcatccatgcacaactctcacctcccaacagccctctctagtgaacagatgtcaagaac

SEQ ID NO: 14728 - DNA, 60 bp, Homo sapiens
gagacctcacagagaaaggcctggaaggtgatttcccgtgtgactcatggataggataca

SEQ ID NO: 14729 - DNA, 60 bp, Homo sapiens
ccttctacctgccctttggagtgactgtccttgtctatgccagaatctatgtggtgctga

SEQ ID NO: 14730 - DNA, 60 bp, Homo sapiens
gaagtttggtaaacattgggattgtccctgcatctgaacatctttcccagtgctatcagt

SEQ ID NO: 14731 - DNA, 60 bp, Homo sapiens
tcatctacacggtcttcaaccaggatttccggccatccttcaagcacatcctcttccgac

SEQ ID NO: 14732 - DNA, 60 bp, Homo sapiens
acaggacctctgaagaagcagaagacctccgagccttgcgatttctatctgtgatttcaa

SEQ ID NO: 14733 - DNA, 60 bp, Homo sapiens
ccactgcaggagatgccacctgagttaatgaagccggaccttttcacatacccctgtgaa

SEQ ID NO: 14734 - DNA, 60 bp, Homo sapiens
tacgtaatctggcaccttcggcaccaggtggtgcaggggcacttctaagtgggctctttt

SEQ ID NO: 14735 - DNA, 60 bp, Homo sapiens
ggaactcgaactctcgcctttcagtaccatacgccgtgaaatgtccacttttgcttctgt

SEQ ID NO: 14736 - DNA, 60 bp, Homo sapiens
tgtgggtgatgacgtaggacatgtgcttggtacaaaaagggcctgagacattccacctag

SEQ ID NO: 14737 - DNA, 60 bp, Homo sapiens
tgtattgccatgatgtcaccctggccatgtgtactgacttgaggagatcttgcaacatgg

SEQ ID NO: 14738 - DNA, 60 bp, Homo sapiens
agcatagcactcatcgcatgaggacagagaccaaagcagccaagaccctgtgcatcatca

SEQ ID NO: 14739 - DNA, 60 bp, Homo sapiens
ccaactctctgcttaaccccgtcatttacgcatacttcaacaaggactttcaaaacgcgt

SEQ ID NO: 14740 - DNA, 60 bp, Homo sapiens
ggtggatgaaatgtcagtggaagaagcagatgagaaactcttgagatcttggtcctgtgt

SEQ ID NO: 14741 - DNA, 60 bp, Homo sapiens
cttggacttgaggattttgagtatctcggacctttcagctgtgaacatggactcttcccc

SEQ ID NO: 14742 - DNA, 60 bp, Homo sapiens
cagccctatcggtcatattggactatgacactgacgtctctctggagaagatccaaccca

SEQ ID NO: 14743 - DNA, 60 bp, Homo sapiens; identical to SEQ ID NO: 4855

SEQ ID NO: 14744 - DNA, 60 bp, Homo sapiens
aggagcagcccgacacaacaagggacccctcaggaatgaagcagcctttcagggccagag

SEQ ID NO: 14745 - DNA, 60 bp, Homo sapiens
ggcacggcttggtcgtcaggtagacagcatgtgggcagaacaaaagcaaatggaattgga

SEQ ID NO: 14746 - DNA, 60 bp, Homo sapiens
cccatcttcacctatggcgaactccagaggatgcaggaaaaggaacggaataaagggcaa

SEQ ID NO: 14747 - DNA, 60 bp, Homo sapiens
atcaacagaaccttgtggtccagcaggaaatccgaattgcccatatgctcttgggcctca

SEQ ID NO: 14748 - DNA, 60 bp, Homo sapiens
atcaaagagttgattgtgggtctgagcatctacaccgtgtcctcggaagtggccgacttt

SEQ ID NO: 14749 - DNA, 60 bp, Homo sapiens
acagagagaagactttcagagctcacaggagcagggagcaggagcactctaagggaattc

SEQ ID NO: 14750 - DNA, 60 bp, Homo sapiens
tagtgcaggaatatgacagcacttcagccaagcagattccagtcccctccgtttaaagtc

SEQ ID NO: 14751 - DNA, 60 bp, Homo sapiens
tcttttccctaacttgtggggacaccaccagttgtcaagctactaggcagtagggtctga

SEQ ID NO: 14752 - DNA, 60 bp, Homo sapiens
aattgatagcagtttgaatggtgtacgccccaagttgggacgccggcatagtatggaaaa

SEQ ID NO: 14753 - DNA, 60 bp, Homo sapiens
gctctgcaactgcaagcagaagccaacagagaaacctgctaactacagtgtggccctaaa

SEQ ID NO: 14754 - DNA, 60 bp, Homo sapiens
tgcatccattgttgtgtctgtgccctccaaagagccttcagaatgctcctgagtggtgta

SEQ ID NO: 14755 - DNA, 60 bp, Homo sapiens
tgctacctgcccatcagcgtcctcaatgtccttaagagggtgttcgggatgttccgccaa

SEQ ID NO: 14756 - DNA, 60 bp, Homo sapiens
cctagtcaccagaattcaggactgtctcctccaggaccaaagtggccaggtaataggaga

SEQ ID NO: 14757 - DNA, 60 bp, Homo sapiens
ctgctgtaacccatgctgttgtgtgtcacagtcctcagaactggagccctgaagacttaa

SEQ ID NO: 14758 - DNA, 60 bp, Homo sapiens
agaaaggcagaatgagtgcttcagaatgtgatttcctactaacctgttccttggataggc

SEQ ID NO: 14759 - DNA, 60 bp, Homo sapiens
ccagagctagcctgagcccggttctggggcgaaaatgcctgcccttcacatcgaagattt

SEQ ID NO: 14760 - DNA, 60 bp, Homo sapiens
gaggggttaggatttggacaggggtttagaacattcctctaagctatctagtctgtggag

SEQ ID NO: 14761 - DNA, 60 bp, Homo sapiens
gtacatacggaagtctccaaagggtccctgaggctaagtggcaggtccaatcccatttaa

SEQ ID NO: 14762 - DNA, 60 bp, Homo sapiens
tctaccacaacttcctcctggaccgtgagaagtcgctcttcttctaccagaaggccagga

SEQ ID NO: 14763 - DNA, 60 bp, Homo sapiens
tctacagcctcctgtctgtgtttagccagcgcttttactgcggttcctccttctacgcca

SEQ ID NO: 14764 - DNA, 60 bp, Homo sapiens
cagttaaggagaacgacccctgcttctgacactgaaacttccctttctgcttgtgttaag

SEQ ID NO: 14765 - DNA, 60 bp, Homo sapiens
atgaacgaggacaagcgccattcacagggcacattcaccagtgactacagcaagtatctg

SEQ ID NO: 14766 - DNA, 60 bp, Homo sapiens
ggactgctggcaacggctattccttcctgtccctttaccgtctcacgcaggataagaagt

SEQ ID NO: 14767 - DNA, 60 bp, Homo sapiens
atgctaaccctcggggtcattgccatcgaccgctactatgctgtcctgtaccccatggtg

SEQ ID NO: 14768 - DNA, 60 bp, Homo sapiens
aaaacctaagccacatgactggatgagccgtcacttggccttcattcgggtagtgatggt

SEQ ID NO: 14769 - DNA, 60 bp, Homo sapiens
tgcaaggggtggactgtgggatgcatgccctggcaacattgaagttcgatcatggtaaaa

SEQ ID NO: 14770 - DNA, 60 bp, Homo sapiens
caccaactgacaggagagaagtaagaagcttatcagcgtatcattgacacttcctgcagg

SEQ ID NO: 14771 - DNA, 60 bp, Homo sapiens
atgctgtcgtgggtgcctcgctcagggaccagaaccacaagcaaaccgtgaaaatgctgg

SEQ ID NO: 14772 - DNA, 60 bp, Homo sapiens
gggattaaccctgccatgtaccagagtccaatgaggctccgaagttcaaccattcagtct

SEQ ID NO: 14773 - DNA, 60 bp, Homo sapiens
gtgcccctcatcactgtgtccaaagcaaagattctgctggttctgtttcaccccatcaac

SEQ ID NO: 14774 - DNA, 60 bp, Homo sapiens
actgagatggccctgatgcacaaagttccgtccgaaggagcttacgacatcatcctccca

SEQ ID NO: 14775 - DNA, 60 bp, Homo sapiens
tgctatttccgcacgctactgtttgagatggtctgcctggcctcagtgctcaacgtcact

SEQ ID NO: 14776 - DNA, 60 bp, Homo sapiens
gggacgacttcttcaacatgctcatcaagtaccagtcctccaggatcgatgaccagcgct

SEQ ID NO: 14777 - DNA, 60 bp, Homo sapiens
acccttgggtgtacatcctactgcgccaggccgtgctgcgccaactgcttcgcctcttgc

SEQ ID NO: 14778 - DNA, 60 bp, Homo sapiens
cccctgtggactctaatgatgctctcagactacgctgacctttctccaaatgaactgcag

SEQ ID NO: 14779 - DNA, 60 bp, Homo sapiens
gtcacttgtgtaagttggcactaccttgtgcctctcagattgctgaagtgctgctggtaa

SEQ ID NO: 14780 - DNA, 60 bp, Homo sapiens
gttgcctgtcttgctgtctagggatggacttggttcctcttgtcaaggtttgggaatgtc

SEQ ID NO: 14781 - DNA, 60 bp, Homo sapiens
agccctggctgatactgatgcctcaggaggcttaaccaaagagtccccagatacaaatgg

SEQ ID NO: 14782 - DNA, 60 bp, Homo sapiens
ttccgttttcacactggtggccattgctgtggaaaggttccgctgcatcgtgcacccttt

SEQ ID NO: 14783 - DNA, 60 bp, Homo sapiens
cacaatgcccattagccatctttggcagtgtttctgatcaaaggttccccatgcctgctc

SEQ ID NO: 14784 - DNA, 60 bp, Homo sapiens
tgctctgtctctcgtggtcaccctgagggcactctgcatcctctgtcattttaacctcag

SEQ ID NO: 14785 - DNA, 60 bp, Homo sapiens
acttgctggggtacagttgcttccttttgaacctccaacagggaaggctctgtccagaaa

SEQ ID NO: 14786 - DNA, 60 bp, Homo sapiens
ggcttcagtggttcaattcctttgtcaatcctcttttgtatccattgtgtcacaagcgct

SEQ ID NO: 14787 - DNA, 60 bp, Homo sapiens
gcccacgtgaagagtttggtagaaatagccttgtcaagagaactagcaagcccctgacat

SEQ ID NO: 14788 - DNA, 60 bp, Homo sapiens
cacagtgacaaggggagtagctattgggaacagggaactgtcctacactgctattgttgc

SEQ ID NO: 14789 - DNA, 60 bp, Homo sapiens
atggcggccttactgatgccacgcaggaacaaagggatgaggactcgactgggatgcctg

SEQ ID NO: 14790 - DNA, 60 bp, Homo sapiens
ccaatgtgtcacagtcagaaacaaactcatgtcttcgtctgttgtctgtacattctccgt

SEQ ID NO: 14791 - DNA, 60 bp, Homo sapiens
caagccccactctccctagcaccgaagatgtcatcaggaagactgaacagatcaccaaaa

SEQ ID NO: 14792 - DNA, 60 bp, Homo sapiens
agccaagaagagctcacaggagtccagagtagccgaggctctggtattaacctggaagcc

SEQ ID NO: 14793 - DNA, 60 bp, Homo sapiens
tgtgtacctgtgtgggtgaaggggatagggcgaggctgtgcctgtgccccaggtcccagc

SEQ ID NO: 14794 - DNA, 60 bp, Homo sapiens
ccgtgtgtgatgaaaacgcctccttttctgaccttcaaagtcccctgtagagaccatgca

SEQ ID NO: 14795 - DNA, 60 bp, Homo sapiens
acttctcagaagatgtgctggggtggagagagtcgttcgacctgctgctgagcagtaaaa

SEQ ID NO: 14796 - DNA, 60 bp, Homo sapiens
ggagtctaaggccctagcgatttgggcatctgccacattggttcatattcagaaagtgtt

SEQ ID NO: 14797 - DNA, 60 bp, Homo sapiens
gatttacatccagccacagtcccctagagagattaacattgacagttcgacaagagagac

SEQ ID NO: 14798 - DNA, 60 bp, Homo sapiens
ctgacatctgtgcgtaactctgccacgtgtcacagtgaggatagcgacctggaaatagat

SEQ ID NO: 14799 - DNA, 60 bp, Homo sapiens
ccccaaaaagccgggactggcagctttaagaagcaaaggaatttcctctcaggaccgtgc

SEQ ID NO: 14800 - DNA, 60 bp, Homo sapiens
gacagagggttcgaggaagagttggaacagtcggctacatggcacctgaagttgtcaata

SEQ ID NO: 14801 - DNA, 60 bp, Homo sapiens
gagacaagccggaacatgctagagcctacaataacctgctttgatgaggcccagaagaag

SEQ ID NO: 14802 - DNA, 60 bp, Homo sapiens
tctcagtttgggccaaaagggatggaggctttacggccacttcccgttcggaataactga

SEQ ID NO: 14803 - DNA, 60 bp, Homo sapiens
cgtcacatgtctcaagggtccagcgttcgaggaagcactgttgtagatgacagagctttt

SEQ ID NO: 14804 - DNA, 60 bp, Homo sapiens
tacacacaagaaacatagagaacggacgaatgctacgaaggacagaaacgagacgacggg

SEQ ID NO: 14805 - DNA, 60 bp, Homo sapiens
cccagctccaagaccagttttaaccaccacataaactcaaaccatgtcagctcgaactcc

SEQ ID NO: 14806 - DNA, 60 bp, Homo sapiens
tccccacccatagggctggctcacatccagtcactcccaacagcgtccagcacacaaata

SEQ ID NO: 14807 - DNA, 60 bp, Homo sapiens
tccatgccctgatggaaaaggattctctgcctcgctttgtgcgctctgagttttatcagg

SEQ ID NO: 14808 - DNA, 60 bp, Homo sapiens
agaaaagcgcaccttgtttcggctggatcttgttccgattaaccggtcagtgggactcaa

SEQ ID NO: 14809 - DNA, 60 bp, Homo sapiens
cctcatgtcctactgtgaggaacatgccaggagtgaccctttgctgataggaataccaac

SEQ ID NO: 14810 - DNA, 60 bp, Homo sapiens
gggctttgggaaagcatggcaccctcagaccacacagtagccaagttctggagcaaataa

SEQ ID NO: 14811 - DNA, 60 bp, Homo sapiens
tggggaacagaacctccgcatcgtgtagttttgtgacataaggagacctcctacttgagc

SEQ ID NO: 14812 - DNA, 60 bp, Homo sapiens
atggaaagcactgtgctctgaagtggatcagtctcaagtgtctggtaacagcagcagtgc

SEQ ID NO: 14813 - DNA, 60 bp, Homo sapiens
ggactcaaggatttctgtttgcctgtgagattgagtgctggaatgagagagtgaaattgt

SEQ ID NO: 14814 - DNA, 60 bp, Homo sapiens
atggatgtccctgccctgtagccaccagccccttgctgctctccctttaatgccatatgg

SEQ ID NO: 14815 - DNA, 60 bp, Homo sapiens
ttcctagccttcgtcagcagcaaatctgagagccaccggaagagccttgggagcacggag

SEQ ID NO: 14816 - DNA, 60 bp, Homo sapiens
gaattcagcctgggtgttcaggaaacatcactcagaactattgattcaaagttgggtagt

SEQ ID NO: 14817 - DNA, 60 bp, Homo sapiens
gactggtccctggctgaagggaattaacagatagtatcaagcgcagaaggaatgtgccag

SEQ ID NO: 14818 - DNA, 60 bp, Homo sapiens
ctgagttccctggagaactacagtttagcattcctcaggctactggtgaaaacacaaccg

SEQ ID NO: 14819 - DNA, 60 bp, Homo sapiens
gccagtgtccccacgtatgtcggcacgtcccatgtgcatggaaatgtcctccaacaataa

SEQ ID NO: 14820 - DNA, 60 bp, Homo sapiens
caaatgcctgactcagtgaccagtgcctgtgagcatggggccaggaaagtctggtaataa

SEQ ID NO: 14821 - DNA, 60 bp, Homo sapiens
atgggaatggtagctacttgggtcagcagagtagagtcaaagagctgttcctggtgtgag

SEQ ID NO: 14822 - DNA, 60 bp, Homo sapiens
ttaatcaagagagacaaaattgctgaggagctcagggctggattggcaggtgtgggctcc

SEQ ID NO: 14823 - DNA, 60 bp, Homo sapiens
cagaaagctgcatcaagagcacggtcaagattgccaaggtaaccatgtctgtgtccacag

SEQ ID NO: 14824 - DNA, 60 bp, Homo sapiens
gtacagccagggtgttctttgtggacagctctaacgacgtggccgatagggttaaatgga

SEQ ID NO: 14825 - DNA, 60 bp, Homo sapiens
catgctcagcttggttttggacaagcctgtccattgggcaggacctagctgttgtaaaga

SEQ ID NO: 14826 - DNA, 60 bp, Homo sapiens
atcccctccacagtcctcagcaggagtgacacaggcagccagtacatagaggatagtatt

SEQ ID NO: 14827 - DNA, 60 bp, Homo sapiens
atttcacacatcccttcttttgaatggcctctttgtgaccagccagacctcaggtcttca

SEQ ID NO: 14828 - DNA, 60 bp, Homo sapiens
accatacaccgaggtctcagggacgctctggcaagtccagatgcactatgagatgctctt

SEQ ID NO: 14829 - DNA, 60 bp, Homo sapiens
gggcttcaaccttgagacagcttcggtttctaacttggagccggactttcggagttgggg

SEQ ID NO: 14830 - DNA, 60 bp, Homo sapiens
tgcagagcccagctccacccatcattggtgtgcagcaccaggcagatgctctctagcctg

SEQ ID NO: 14831 - DNA, 60 bp, Homo sapiens
gaatgggttgttctcttgggaagtcagggtatcagatgggatggacatccaggtcttctc

SEQ ID NO: 14832 - DNA, 60 bp, Homo sapiens
cattaagctgtagactgtaaactcctcgtgagtaggaaccctgtctcagtgcattttgtt

SEQ ID NO: 14833 - DNA, 60 bp, Homo sapiens
ccaccgtgctcttcttggtcatctgcagcttcatcgtcttggagaacctgatggttttga

SEQ ID NO: 14834 - DNA, 60 bp, Homo sapiens
gatgctacaaaacaccttgtcaacctcttcctgtcttaccaaacagtgggagggaattcc

SEQ ID NO: 14835 - DNA, 60 bp, Homo sapiens
cctacccacacctctgccagaagatcccctcaggactgcaacaggcttgtgcaacaataa

SEQ ID NO: 14836 - DNA, 60 bp, Homo sapiens
cctattttgtagggctgctgactcctagtccttgaagcctagacacatgacccaggaaat

SEQ ID NO: 14837 - DNA, 60 bp, Homo sapiens
atgtctacctctgacttctgtggtccctctgtgtctgctctcatccattcctcttactgg

SEQ ID NO: 14838 - DNA, 60 bp, Homo sapiens
ctgacaccatcgctgaccttcctgaccctactgtagtcactaccagtaccaatgattacc

SEQ ID NO: 14839 - DNA, 60 bp, Homo sapiens; identical to SEQ ID NO: 4855

SEQ ID NO: 14840 - DNA, 60 bp, Homo sapiens
gttcattccagcaacaactttggtgccattctctcatctaccaacgtgggatccaataca

SEQ ID NO: 14841 - DNA, 60 bp, Homo sapiens
tgaggactttgcgaatatcagagacctcagactcttcacagggtcaggactcagagagtg

SEQ ID NO: 14842 - DNA, 60 bp, Homo sapiens
ccatccatcaaccctacctgtaatcagtgatgccaggagtgtgctactggaagcaatacg

SEQ ID NO: 14843 - DNA, 60 bp, Homo sapiens
ggctcatcgtgtgtataccacatttgtgccccactgacctgaaggttccatgtaactgta

SEQ ID NO: 14844 - DNA, 60 bp, Homo sapiens
ttgaaactcataccccattgccctttgccctccagtctccccttcagaaacatctctgct

SEQ ID NO: 14845 - DNA, 60 bp, Homo sapiens
tggtggccttgcagtatggttttgccaatggagaagtgaaggctgagctgcggaaatact

SEQ ID NO: 14846 - DNA, 60 bp, Homo sapiens
aggcaggcaactttagcacatgatgaaaacagacttccacctcagtggcctgtgggcacg

SEQ ID NO: 14847 - DNA, 60 bp, Homo sapiens
cgatagcaggtgaactcgaagcccacaatcctcgtctgaatcatccgaggcaaagagaaa

SEQ ID NO: 14848 - DNA, 60 bp, Homo sapiens
aagtagatcagagtgggaagacctcagccttgggtggcttgtctctgcttcttgccaggt

SEQ ID NO: 14849 - DNA, 60 bp, Homo sapiens
gcacaatgggcaattctgacttctcccatctagtggaaatgagcgaaatcatggttgtag

SEQ ID NO: 14850 - DNA, 60 bp, Homo sapiens
ggtccctctgggatgtccgtaggacccgggcattcaggacggtagccgagcgagcccgag

SEQ ID NO: 14851 - DNA, 60 bp, Homo sapiens
aaaaccggccaaaaggatgaagttcaagactgtctgctacctgctggtgcagctcatgca

SEQ ID NO: 14852 - DNA, 60 bp, Homo sapiens
gtgacagatggtcctgcagtgtgaaactgaaggacagtgttaaagctgggctctagtata

SEQ ID NO: 14853 - DNA, 60 bp, Homo sapiens
gtggtgccaaatccctgtttgccatcgtttttactgtaccgatgttaactgtagtaatcc

SEQ ID NO: 14854 - DNA, 60 bp, Homo sapiens
ggtggcagctacaagaagattggctactatgacagcaccaaggatgatctttcctggtcc

SEQ ID NO: 14855 - DNA, 60 bp, Homo sapiens
aggactttcttgcactagttcctatgactgagtctccaaactggtttcctagtagtcccc

SEQ ID NO: 14856 - DNA, 60 bp, Homo sapiens
tgggccgcctgcaccaacttctcgcgcactcgaaagggaatcctcctgtttgctgagatt

SEQ ID NO: 14857 - DNA, 60 bp, Homo sapiens
tggaagaaaactcaaccaatgaggagtaacggaaggacgagtgtcaccacagcagcagct

SEQ ID NO: 14858 - DNA, 60 bp, Homo sapiens
tctaggtccgctaatatgtgcccagctctaggtccgctaatgtgctacgcgataactgaa

SEQ ID NO: 14859 - DNA, 60 bp, Homo sapiens
caagtatgagcacaataaggctcatgcacaattagttcgagaagttgatgtggagaaggt

SEQ ID NO: 14860 - DNA, 60 bp, Homo sapiens
gtcatcatgggccagtgctactacaacgagaccatcggcttcttctataacaacagtggc

SEQ ID NO: 14861 - DNA, 60 bp, Homo sapiens
gttatcaggggatgtacatctctccctccgtacacttcgcgcaccttctcaccttttgtc

SEQ ID NO: 14862 - DNA, 60 bp, Homo sapiens
tgtcagaatcatcgcaatgtagggatggcctgctctatctgtggatgtatctgggtggtg

SEQ ID NO: 14863 - DNA, 60 bp, Homo sapiens
ggttccagttgcttgaattgcaaggctaagaagtactgcccttttgtgtgttagcagtca

SEQ ID NO: 14864 - DNA, 60 bp, Homo sapiens
gatagacttgttagggcttcaaggccctcagagatgatcagtccaactgaacgaccttac

SEQ ID NO: 14865 - DNA, 60 bp, Homo sapiens
caaccctcatcttgatccccatcccttctgaaagtaggaagttggagctcttgcaatgga

SEQ ID NO: 14866 - DNA, 60 bp, Homo sapiens
cgtcgtccttcactatgtgatagaaagctgagtctccctaaggcatgtgtgaaacatact

SEQ ID NO: 14867 - DNA, 60 bp, Homo sapiens
cacaggaagaaacaccatggcaagaggaacagtaacagggcacatcaggggaaacacgaa

SEQ ID NO: 14868 - DNA, 60 bp, Homo sapiens
accaggtggtcatcaagacacagacagaataccagctgtcctccccagaccagcagaatt

SEQ ID NO: 14869 - DNA, 60 bp, Homo sapiens
cccactgtcaccttctagaccacatgatagggctagacagctcagttcaccatgattctc

SEQ ID NO: 14870 - DNA, 60 bp, Homo sapiens
tcctggtgagcatggtggtcctcttcatcttcgccattctctgcatcttcatccggaacc

SEQ ID NO: 14871 - DNA, 60 bp, Homo sapiens
acgagaatggcttcatggaagacctggacaagacgtgggttcggtatcaggaatgtgact

SEQ ID NO: 14872 - DNA, 60 bp, Homo sapiens
agttttgtggcttcaagtgtgggtggacagtcctaatggggatctccagctccttcctgt

SEQ ID NO: 14873 - DNA, 60 bp, Homo sapiens
gaaagcagtttttctcctaagacttttggtttctcgcattgcctctcagactaagcacta

SEQ ID NO: 14874 - DNA, 60 bp, Homo sapiens
ggccgccattttggattcttatggacaatgacccagtggttcctaatcctctaggaggtc

SEQ ID NO: 14875 - DNA, 60 bp, Homo sapiens
tcatgactcttttcttcagcggactcatcctggccatcctcctacccttccaatatgtgc

SEQ ID NO: 14876 - DNA, 60 bp, Homo sapiens
tgacacacactcactgatgcataaactgtcacctgaagagtacgtattagctgccatcag

SEQ ID NO: 14877 - DNA, 60 bp, Homo sapiens
acatcctttgttacgcctagcttccccactgacgcagatgtgcagtttgtcatccagatg

SEQ ID NO: 14878 - DNA, 60 bp, Homo sapiens
tgccaagatagccaaagacaagacgcaggagaaaatcgagacctcaagtaatcattccca

SEQ ID NO: 14879 - DNA, 60 bp, Homo sapiens
cactcactgtctcctatttctacgatgccacccgcaatgtgtaccgcatcatcagcatcg

SEQ ID NO: 14880 - DNA, 60 bp, Homo sapiens
gagaccatgcccagcagagtcgtgtgcatgatcgaatggccagagcatccgaacaagatt

SEQ ID NO: 14881 - DNA, 60 bp, Homo sapiens
ggttcagtatgttgttgcatgattccacctcccaggtgacatttctgacccagaagccac

SEQ ID NO: 14882 - DNA, 60 bp, Homo sapiens
taggtactccacttccggactcctggactgcattaggaagacctctttccctgtcccaat

SEQ ID NO: 14883 - DNA, 60 bp, Homo sapiens
gaagaaataggagccaatgatgatctgaattactggtccgactggtacgacagcgaccag

SEQ ID NO: 14884 - DNA, 60 bp, Homo sapiens
acgacctccctctccacgagagtcaacaggtgtcacactaaggagactttgttcatggct

SEQ ID NO: 14885 - DNA, 60 bp, Homo sapiens
tctggtccctggcgtatggtgtggtggtggcagtggcagttttgggaaatctcatcgtca

SEQ ID NO: 14886 - DNA, 60 bp, Homo sapiens
tgctactgccgcttcttcaatgccttctgctactgccgcaagctgggtactgccatgaat

SEQ ID NO: 14887 - DNA, 60 bp, Homo sapiens
tttctgaaggctgtggaagaggttggagtgggcgcatcttagcttgccccatccccattt

SEQ ID NO: 14888 - DNA, 60 bp, Homo sapiens
gatgctagacgaaaacccacattacctgttaggcctcagcatggcttatgtgcacgtgta

SEQ ID NO: 14889 - DNA, 60 bp, Homo sapiens
aggcgacgagacacccgacgtggaccccgagctgttgaggtacttgctgggacggattct

SEQ ID NO: 14890 - DNA, 60 bp, Homo sapiens
ccgaggtgctccaatattacctcaaggattacagcctgaacaacagctacagttgtggaa

SEQ ID NO: 14891 - DNA, 60 bp, Homo sapiens
agggaaggtgctgaatgggaccctgttgatggccccatctggatgtaaatcctgagctca

SEQ ID NO: 14892 - DNA, 60 bp, Homo sapiens
cccagagacactgatttcagacctcttgatgagagaaagcacagaaaatgttcccagaac

SEQ ID NO: 14893 - DNA, 60 bp, Homo sapiens
caatctcagtctgtaaagcagttacttccaagtggaaacggaaggtcttatgggcttggg

SEQ ID NO: 14894 - DNA, 60 bp, Homo sapiens
aggatgcccagacctctgggtcactgttgcactacctgctccaggcaatggagagacctg

SEQ ID NO: 14895 - DNA, 60 bp, Homo sapiens
cttctaggggcaggtgaaaggaataggaaattgaacctggggttttgacttgccactgcc

SEQ ID NO: 14896 - DNA, 60 bp, Homo sapiens
cctgtagcagcagatggtacagtgagtgttcagagacgtgggtacaaaccctgtgatgta

SEQ ID NO: 14897 - DNA, 60 bp, Homo sapiens
atggataatcttcggccaatttatgcagagtcagccattcctgttctctttgccttgatg

SEQ ID NO: 14898 - DNA, 60 bp, Homo sapiens
caggtggcggtaaaagcgcccccatcaagtcacataacatcctgcctccgagagcgcggt

SEQ ID NO: 14899 - DNA, 60 bp, Homo sapiens
atgtgccctgggcaagagggtgcctacaggcggatatgaaaccggtgggctggcacctgg

SEQ ID NO: 14900 - DNA, 60 bp, Homo sapiens
ttgcgtacttactcctccatattctttcaacccacatgagtctcctcgagaagtgaggag

SEQ ID NO: 14901 - DNA, 60 bp, Homo sapiens
aggctggattgtacgggccccaccttcgctgtgttcttgctgcaaagtctggtcaataaa

SEQ ID NO: 14902 - DNA, 60 bp, Homo sapiens
aaaacgttgatcactttagcaggttgcagcttggagcgtggaggtcctgcctagattcca

SEQ ID NO: 14903 - DNA, 60 bp, Homo sapiens
cggacagtgtgtgtagcagagaggggtggtgtggacagacctagatctgctccaccctct

SEQ ID NO: 14904 - DNA, 60 bp, Homo sapiens
ccctgtggagtccaaattcatcagtgagaactacctggttcgctggtccagttcaggatt

SEQ ID NO: 14905 - DNA, 60 bp, Homo sapiens
cagcgattccattgtgataagcgcacaaacagcactgtctgtcggtaatcggtactactt

SEQ ID NO: 14906 - DNA, 60 bp, Homo sapiens
gacatgattgtgcctatccttgagaagatgcaggacaagtaggactggaaggtccttgcc

SEQ ID NO: 14907 - DNA, 60 bp, Homo sapiens
ttatgggtacggcaaccacatgtcccagatcgtctccaattcgaaaacaaccgtcctgct

SEQ ID NO: 14908 - DNA, 60 bp, Homo sapiens
actggttgtcacctatgagacccttacgtgattgttagttaagtttttattcaaagcagc

SEQ ID NO: 14909 - DNA, 60 bp, Homo sapiens
ccatctgatggaagagcgtctaatccgacagcaacaggaaatggaagaagatcagcgctg

SEQ ID NO: 14910 - DNA, 60 bp, Homo sapiens
acgtgagaatatcctggagacggggccacttccacgggcagtccttctacagcacaaggc

SEQ ID NO: 14911 - DNA, 60 bp, Homo sapiens
gaacagttagttgccctgtttggaacgaacatggatattgttgaacccactgcatgaagc

SEQ ID NO: 14912 - DNA, 60 bp, Homo sapiens
cactctgatcatgcagttacttagggacaatctcactctgtggacatcggaaaaccaggg

SEQ ID NO: 14913 - DNA, 60 bp, Homo sapiens
cacagcatttcatgtcatgtcacagtgtacaagctaccctctaattcagaaagaagagca

SEQ ID NO: 14914 - DNA, 60 bp, Homo sapiens
cacacacggaccatctttagcagtttcctcagtgatggaatatcatgaatgtgagtcatt

SEQ ID NO: 14915 - DNA, 60 bp, Homo sapiens
gatcgccatcagtgtcatcgagttcaaaccctgagcccttcattcacctctgtgagtgaa

SEQ ID NO: 14916 - DNA, 60 bp, Homo sapiens
gatgtccgttccaaatgggagtatgacgaaagccatgtgatcactgcccttcgagtgaag

SEQ ID NO: 14917 - DNA, 60 bp, Homo sapiens
ggaaagaagggctgggaatctccgaagcttaatctgcctttcttcgttctcctgtctcac

SEQ ID NO: 14918 - DNA, 60 bp, Homo sapiens
ctaggggtcacaaattgaaatggctcctgtatcacatacggaggtcttgtgtatctgtgg

SEQ ID NO: 14919 - DNA, 60 bp, Homo sapiens
cactcagttgttcctactcagactgttgcactctaaacctagggaggttgaagaatgaga

SEQ ID NO: 14920 - DNA, 60 bp, Homo sapiens
ggggagattttactcctttcttcaacaactattcactggacaagttctctgctcccatga

SEQ ID NO: 14921 - DNA, 60 bp, Homo sapiens
atacagacccacagagtgccatccctgagagaccagaccgctccccaatactctcctaaa

SEQ ID NO: 14922 - DNA, 60 bp, Homo sapiens
ttgctcagagctaggcccccaaattgccttcagccctaacatagtgtctgctgctgcctc

SEQ ID NO: 14923 - DNA, 60 bp, Homo sapiens
agtgaggagaatgggaagctgtgactctgggcattatcgacacgttcacccatcttatca

SEQ ID NO: 14924 - DNA, 60 bp, Homo sapiens
ctcaaccgacttgtcccttaaatgtgtcttggatcccgcagtgatgacgtgagccagcca

SEQ ID NO: 14925 - DNA, 60 bp, Homo sapiens
gtgttgctgaaatcatcaggaatcatcaacatagtcctttggttcttattgacagtcaga

SEQ ID NO: 14926 - DNA, 60 bp, Homo sapiens
gagcgaccagcaggatgaagaagcaggagaaggcaactgaagatccttcaggtcccctgg

SEQ ID NO: 14927 - DNA, 60 bp, Homo sapiens
acccctagtggtcctaaatctcagcgagcagtaccccacaatggagctgcagggaattgt

SEQ ID NO: 14928 - DNA, 60 bp, Homo sapiens
ccggccatcagcacagcctatgaccattgcaacaacctctcaccatctgaagagcattaa

SEQ ID NO: 14929 - DNA, 60 bp, Homo sapiens
catacgggtcagtagggataagaattgtctctgggctgaggaattcttctgttctctggt

SEQ ID NO: 14930 - DNA, 60 bp, Homo sapiens
gattgaagacagattggttctgtggccttggaactttcccagacttaatggggaaacatc

SEQ ID NO: 14931 - DNA, 60 bp, Homo sapiens
tgctgcctctgatcgtaggaattgaggagtgtcccgccttgtggctgagaactggacagt

SEQ ID NO: 14932 - DNA, 60 bp, Homo sapiens
ctatcatggggcatgccatggggctggtcctttccctaccggttcactgcttgaccttcg

SEQ ID NO: 14933 - DNA, 60 bp, Homo sapiens
ccactgaagcaggttagcgttgaaggtggtatggaaaagcctgcatgcctgttcaattct

SEQ ID NO: 14934 - DNA, 60 bp, Homo sapiens
tattaaaccatgtatatctgtggaatactcaatgtgtacacctttgactacagctgcaga

SEQ ID NO: 14935 - DNA, 60 bp, Homo sapiens; identical to SEQ ID NO: 4855

SEQ ID NO: 14936 - DNA, 60 bp, Homo sapiens
cctacctgtagagatcctcgtcatggaaaggtgccaaactgttttgaatggaaggacaag

SEQ ID NO: 14937 - DNA, 60 bp, Homo sapiens
attcttgagcaacacttctccaccaacgccagtgaccatgccttgctgagcgaggtgata

SEQ ID NO: 14938 - DNA, 60 bp, Homo sapiens
gagcaagagcttcatgacatccactctactcgctccaaagagcggctcaatgcatacaca

SEQ ID NO: 14939 - DNA, 60 bp, Homo sapiens
ccatggtctttgctaggcctcttgctgaaagccaaggcagctcttctggagtttctctaa

SEQ ID NO: 14940 - DNA, 60 bp, Homo sapiens
agtccgccaaaggcccaaaggtgatggtcatcgagatggagctacgaaaggatgagcaga

SEQ ID NO: 14941 - DNA, 60 bp, Homo sapiens
cctgatgttctgcctgattgctttgagcaccgatttctggtttgaggctgtgggtcccac

SEQ ID NO: 14942 - DNA, 60 bp, Homo sapiens
tggtgggcatagttactgctgtggtcctaggtctcactctgctcatcagcatgattctgg

SEQ ID NO: 14943 - DNA, 60 bp, Homo sapiens
gtagaaaccccaaatgtccaaaagcccttttctggtgggtgacccagtgcatccaacaga

SEQ ID NO: 14944 - DNA, 60 bp, Homo sapiens
cccgttggatcagaccctcctgtgggcagggttcttagtggatgagttactgggaagaat

SEQ ID NO: 14945 - DNA, 60 bp, Homo sapiens
cgccttagaatcagttgtcgcaggtgggagagtttctagggaaaaagcagaagctgatgc

SEQ ID NO: 14946 - DNA, 60 bp, Homo sapiens
atttagtcctattcgatcctctgcttttagtcctcttggaggctgtactccagctgaatg

SEQ ID NO: 14947 - DNA, 60 bp, Homo sapiens
ggaaagtcggacagtattcagtggctcagtcagtattccatctatcaccaaatcccgccc

SEQ ID NO: 14948 - DNA, 60 bp, Homo sapiens
ctaaaagagtgtgtgtgtattcacgcagttactcgcttccatttttatgacctttcaact

SEQ ID NO: 14949 - DNA, 60 bp, Homo sapiens
ttatggactgtctgtgcaattacgtccaccaaagacccgtgttgggggtactgaaggaga

SEQ ID NO: 14950 - DNA, 60 bp, Homo sapiens
ctaataagcttaacctaagtgtcacgaagacgagatgtcacagaggtccactcagtgaca

SEQ ID NO: 14951 - DNA, 60 bp, Homo sapiens
ccatgttcttagtctccagggatggatggccttgtatatggacccctgagaatgagcaat

SEQ ID NO: 14952 - DNA, 60 bp, Homo sapiens
agggggagctgatcaagcactataagatccgctgcctggatgaagggggctactacatct

SEQ ID NO: 14953 - DNA, 60 bp, Homo sapiens
tgggcaggccaaccaggagattgctgcgatgattgacactgagtttgccaagcagacctc

SEQ ID NO: 14954 - DNA, 60 bp, Homo sapiens
cccgctgtcaatgttccccatccacaccctgcttgctcctgtgtaacagctcagatgatg

SEQ ID NO: 14955 - DNA, 60 bp, Homo sapiens
cagggtcaggtcataaacctaacagcatgcttcgagactgtggtaatcaggctgtagaag

SEQ ID NO: 14956 - DNA, 60 bp, Homo sapiens
tggctcctgactttgatcgttggctggatgaatctgatgcggaaatggagctcagagcta

SEQ ID NO: 14957 - DNA, 60 bp, Homo sapiens
ggaaacctctgcagctcattctgccactgcaaagctggtgtagccatgctggtgagaaaa

SEQ ID NO: 14958 - DNA, 60 bp, Homo sapiens
cactcatactgggttccacaatccactgttagaatacctatggttagggcttctgaacta

SEQ ID NO: 14959 - DNA, 60 bp, Homo sapiens
atagagcctctcagggcaaggaagtggagcaacagtcagcctgcagatttggcacatatg

SEQ ID NO: 14960 - DNA, 60 bp, Homo sapiens
cagagaagggagccagggggagctgactccagccaacagccagtcccggatgagcaccaa

SEQ ID NO: 14961 - DNA, 60 bp, Homo sapiens
ccggaactctggcgtcaactacttgatccttgatgatgatgacagggaaagaccttggga

SEQ ID NO: 14962 - DNA, 60 bp, Homo sapiens
tactgcctccatcctgagctgccgtcctttgaagggagaacctggggtagggttcgagga

SEQ ID NO: 14963 - DNA, 60 bp, Homo sapiens
ttgatttcactggagcctgctgggaacgtgacctctgacccctgatgctttcgtgatcac

SEQ ID NO: 14964 - DNA, 60 bp, Homo sapiens
gacgagtggtctgatgttcaagacattattgactccacgccagagctggacatgtgtcca

SEQ ID NO: 14965 - DNA, 60 bp, Homo sapiens
ctgcgggaggacctgaacaagaagcagacccagaaggacttggagtgtgcactgctgctt

SEQ ID NO: 14966 - DNA, 60 bp, Homo sapiens
gaactacctgcacctgcacaagattatccacagggatctcaagtcacccaacatgctaat

SEQ ID NO: 14967 - DNA, 60 bp, Homo sapiens
acacagccacaatcacaactcaggtgtcagttctgagaccttcccatgcctgtcgccact

SEQ ID NO: 14968 - DNA, 60 bp, Homo sapiens
tgcagatctccagcacaagcctctgctagttgatctcacggtagaagaaggtcaaagatt

SEQ ID NO: 14969 - DNA, 60 bp, Homo sapiens
gcctgtgccagcagtgagacagagagtgaagcgggagacatcatggaccagcaatttgaa

SEQ ID NO: 14970 - DNA, 60 bp, Homo sapiens
atgagaagttcgacaaggtcctcactgccctgtcccacaagctggaacctgctgtccgct

SEQ ID NO: 14971 - DNA, 60 bp, Homo sapiens
gactgtctctgaagacatatatggaagaacctgatcacattggtagtctccaaggagcag

SEQ ID NO: 14972 - DNA, 60 bp, Homo sapiens
gcctggctcagggttggggaaaacactctttagtcagtagagttaaaccacctgatttat

SEQ ID NO: 14973 - DNA, 60 bp, Homo sapiens
atagcggccgagggctcggaagggtgctcggattctcgtagctgtgccgggacttaacca

SEQ ID NO: 14974 - DNA, 60 bp, Homo sapiens
cagacatggcttccttattgctggaagaggaggcctgggagttgacattcagcactcttc

SEQ ID NO: 14975 - DNA, 60 bp, Homo sapiens
agttcacccgcatcctcaaacatggcgccaaggataaacacgactaggccatccccagcc

SEQ ID NO: 14976 - DNA, 60 bp, Homo sapiens
gggcaccacctaccagaagacggatgcagctgtggaaatgaagcggattaaccgagagca

SEQ ID NO: 14977 - DNA, 60 bp, Homo sapiens
aatccactaccaggccgatgtgcgactagaggccactgaggagatctacctgaccccagt

SEQ ID NO: 14978 - DNA, 60 bp, Homo sapiens
cttccacttcagttacacctcactcaccatcctctcctgttggttctgtgctgcttcaag

SEQ ID NO: 14979 - DNA, 60 bp, Homo sapiens
gccctcccaagttagcaggttaattcggtattgacagcttgcggaatgtcgtttgtagtc

SEQ ID NO: 14980 - DNA, 60 bp, Homo sapiens
cagactcaggagtacttcatcatccagtaccaggagagcctgaggatccaagctcagttt

SEQ ID NO: 14981 - DNA, 60 bp, Homo sapiens
gccagctacctcggtaattccaattcaggttaacttccctacggaacagcacagatgtcc

SEQ ID NO: 14982 - DNA, 60 bp, Homo sapiens
gagcagattgatgggagcgctttgtcctgcttttccacacaccagaacaattccttgctg

SEQ ID NO: 14983 - DNA, 60 bp, Homo sapiens
ccttcttcccatgtctccaagtgtgtatgcggtgttgagagaaaacctgagtcccacaac

SEQ ID NO: 14984 - DNA, 60 bp, Homo sapiens
tgtgcatagccaagaccttctcctaccttcgggaatctggctggtattggggttccatta

SEQ ID NO: 14985 - DNA, 60 bp, Homo sapiens
cagaacagagaacacgagaccaatggtgtggcaaagagtgatcagaaacaagaacagctg

SEQ ID NO: 14986 - DNA, 60 bp, Homo sapiens
acattgatgcgttatggggttctaacaacgtggtgtggggaacgtctcattatacggcgg

SEQ ID NO: 14987 - DNA, 60 bp, Homo sapiens
tcttcagcatctctgtcggaagaccgtcaacggccacctggactcctatgagaaagtcac

SEQ ID NO: 14988 - DNA, 60 bp, Homo sapiens
cgtcacaaacaggagcagcacggacacggcatccatctttggcatcataccagacattat

SEQ ID NO: 14989 - DNA, 60 bp, Homo sapiens
acagacagtccgggagtgcagtcatcacgtttgtggagattggagtggctgacaagattt

SEQ ID NO: 14990 - DNA, 60 bp, Homo sapiens
ggagagattgaccagcagtatagccgcttcctgcaagagtcgaatgttctctatcagcac

SEQ ID NO: 14991 - DNA, 60 bp, Homo sapiens
gtggtggcccttatagccacagtcagaatccgtgagttattgcaaggcatgtacaaagaa

SEQ ID NO: 14992 - DNA, 60 bp, Homo sapiens
gatacacactggagaggtagttacaggtgtcataggacagcggatgcctcgatactgtct

SEQ ID NO: 14993 - DNA, 60 bp, Homo sapiens
tacagcaagtggcacaagatggagcagaagttccgcatcgtctacgcgcagaagggctac

SEQ ID NO: 14994 - DNA, 60 bp, Homo sapiens
ctcccacaaccttgcccagagtcctttccactaaggaggtgaagagaacagagaaagaga

SEQ ID NO: 14995 - DNA, 60 bp, Homo sapiens
tcaggtgccagacctggactaaactgcaccaaggaaacacccagcagggtctcctgtgag

SEQ ID NO: 14996 - DNA, 60 bp, Homo sapiens
gctgttattcgtccaaagaatactgccagtctcaattctcgggaatacagagctaagtca

SEQ ID NO: 14997 - DNA, 60 bp, Homo sapiens
tgcctgccctggagggaggctcttcagtgcggtagctatttgtttacatgcagatttttg

SEQ ID NO: 14998 - DNA, 60 bp, Homo sapiens
cagtgtgctctccccaacatcctaggcacagctttcataacccagtttcttaggtgtaag

SEQ ID NO: 14999 - DNA, 60 bp, Homo sapiens
ggagggagcagcctcacacaagcagaaacactcctgtggatggtattgtagcatgtattg

SEQ ID NO: 15000 - DNA, 60 bp, Homo sapiens
tacatgtgcctcgagacaggtgccatctcatttgttcagctctttgaccctggctttgag

SEQ ID NO: 15001 - DNA, 60 bp, Homo sapiens
agaagacaggattcagggcagtgctccgaagctgtgtgctcacctggttggctcatcaaa

SEQ ID NO: 15002 - DNA, 60 bp, Homo sapiens
gtgatgtggattgctggtgtccagcatgacccataaacaggtcagaagaatgatggaatg

SEQ ID NO: 15003 - DNA, 60 bp, Homo sapiens
gactagagcagcgaactgcgacgatcacttagagaaacaggccgttaggaatccattctc

SEQ ID NO: 15004 - DNA, 60 bp, Homo sapiens
gagaacgtgccatctgtaaagcactcagaaggcagccatccctagatgttggtttcatgt

SEQ ID NO: 15005 - DNA, 60 bp, Homo sapiens
cctctcatgaacctgaacctgagccagaatctgaaacaaagactgaagagctgaaaccac

SEQ ID NO: 15006 - DNA, 60 bp, Homo sapiens
gaaccatcagagagccttgaggaaaaccagcggaacctccttcagatgactgaaaagttc

SEQ ID NO: 15007 - DNA, 60 bp, Homo sapiens
acctcacctggtcagccatgtccaatgaacctgatcgttcctgcaatcccaacctgatga

SEQ ID NO: 15008 - DNA, 60 bp, Homo sapiens
cacccaggatccaaacctaaagcctacaatagaccatgagtggaaactccacccaggacc

SEQ ID NO: 15009 - DNA, 60 bp, Homo sapiens
tcagagacattagtacgtgtccaaattcgccaagcactcctcctagcacaccctctccaa

SEQ ID NO: 15010 - DNA, 60 bp, Homo sapiens
actagggaaacgagatcctcacagtctcataggcaggagtcaaagccaatcaagagccac

SEQ ID NO: 15011 - DNA, 60 bp, Homo sapiens
aaagcaatcatgtcttagctcaaatggagcagggtgactgttcttagcccagaaactaag

SEQ ID NO: 15012 - DNA, 60 bp, Homo sapiens
ggtacaaggcagagcttaatggaaaagacggcttcattcccaagaactacatagaaatga

SEQ ID NO: 15013 - DNA, 60 bp, Homo sapiens
gagatctggtgatccagtcttccatattcgactagaggagagacatcaacggcgaagctc

SEQ ID NO: 15014 - DNA, 60 bp, Homo sapiens
agtttccacacagaagcagctagatggacagatggctccctctcacctcccgctaaggag

SEQ ID NO: 15015 - DNA, 60 bp, Homo sapiens
aggtgcagtcaaaacttcggccctgaagtgacccgcaaacaaacggtccagctgctaaaa

SEQ ID NO: 15016 - DNA, 60 bp, Homo sapiens
tttctcattgacttccttcctgttctaactgccagtactcagaagtcagagttgagagac

SEQ ID NO: 15017 - DNA, 60 bp, Homo sapiens
caagcaactggtcaacctaaagaagactctgaggagcttggcttgcctgatgtgaatcca

SEQ ID NO: 15018 - DNA, 60 bp, Homo sapiens
agtgttagtatccaatgacaagagagcactatactgggagtcacaaacctgctctgccac

SEQ ID NO: 15019 - DNA, 60 bp, Homo sapiens
tgcagaagcgctacggctcccagaacggctgcatcaactgctgcaaggtgctatgagggc

SEQ ID NO: 15020 - DNA, 60 bp, Homo sapiens
gaccatcacccagctcaccaagcacatccagagcctcaagcggaaaattcggaaatttga

SEQ ID NO: 15021 - DNA, 60 bp, Homo sapiens
cctctcatttacctcgcagtgtgttctaatccaagggccagttggtgttcctcagtagct

SEQ ID NO: 15022 - DNA, 60 bp, Homo sapiens
gatagaaccgtgtggctctggcaagtcaagactgactcacatctgcaggatagacctgaa

SEQ ID NO: 15023 - DNA, 60 bp, Homo sapiens
agagagagtgtgacagaggatctgcctgtgaaccacctgggattagtcaagtcccaaggt

SEQ ID NO: 15024 - DNA, 60 bp, Homo sapiens
ctgaaaccaaagacaccaaatctaggtgatcactgaagcaacgcaaccgcttccaccacc

SEQ ID NO: 15025 - DNA, 60 bp, Homo sapiens
ggcacttcagatgagaatggagaggtagggagccaggtgcagcaggatccctcaaatcaa

SEQ ID NO: 15026 - DNA, 60 bp, Homo sapiens
gcaccttcccccaaacttatctccacttttctatgcattctatcattgatttgacacact

SEQ ID NO: 15027 - DNA, 60 bp, Homo sapiens
tgccagtaggtgtaccttgtgttcactcgaactaagaacaatggttaaggcagaataatg

SEQ ID NO: 15028 - DNA, 60 bp, Homo sapiens
cctggctgttctgaaggaccaggtgtttgtcctgaaggaaggtgttgattacagagtgaa

SEQ ID NO: 15029 - DNA, 60 bp, Homo sapiens
ttccgaaagaaggcagagattgagatggactactcccgcaacctggagaagctggcagaa

SEQ ID NO: 15030 - DNA, 60 bp, Homo sapiens
ggcatggcagcacttatgctctgtgacagtattgtgtgtcatagttgagcagtagctggt

SEQ ID NO: 15031 - DNA, 60 bp, Homo sapiens; identical to SEQ ID NO: 4855

SEQ ID NO: 15032 - DNA, 60 bp, Homo sapiens
gaaaaccgatttcagtgcacgatgctttctggaccaattcgaagatgacgctgatggatt

SEQ ID NO: 15033 - DNA, 60 bp, Homo sapiens
tgccgcctcttcctcagcaccatccccgtgctctggaccctcctgggttcctagtcccag

SEQ ID NO: 15034 - DNA, 60 bp, Homo sapiens
aagaagagactgtccaagcaagttaggcttgcaggaagatatgacccagctgagaagccc

SEQ ID NO: 15035 - DNA, 60 bp, Homo sapiens
aagctccttccttgaccagcgctttcaggacgccgatgagaagttcatggaagtcatgta

SEQ ID NO: 15036 - DNA, 60 bp, Homo sapiens
tgactcctgctggtacctgccctctatttattagccaactgtttccctgctgaatgcctc

SEQ ID NO: 15037 - DNA, 60 bp, Homo sapiens
tcatactctcactccttatgcgcactctcaacagggcatgtagtctgcactcaagcatgc

SEQ ID NO: 15038 - DNA, 60 bp, Homo sapiens
ctgaccatgcaggtgcacgtcgcggaaatactggtttaactactagtgtgttactgcctc

SEQ ID NO: 15039 - DNA, 60 bp, Homo sapiens
aggaaatcggcctctatttgaagatatgactgattctgactgtagagataatgcaccccg

SEQ ID NO: 15040 - DNA, 60 bp, Homo sapiens
gggctgcagagcgtctatgagaaagtactgcacagagactatgacaggacagtcactctg

SEQ ID NO: 15041 - DNA, 60 bp, Homo sapiens
atgatccatttcaaggacttgctgctgcacgaaccctacgtggacctcgtgaacttgctg

SEQ ID NO: 15042 - DNA, 60 bp, Homo sapiens
aagtagttacttgagtagctgaagctgcaaatgaggaaatcactgtacttctgggccgca

SEQ ID NO: 15043 - DNA, 60 bp, Homo sapiens
acctccagatctacctggtttctccctcgggaaccaagtctcaacttttggcaaagaggt

SEQ ID NO: 15044 - DNA, 60 bp, Homo sapiens
tgctcacgaagttggacataactttggatccccacatgattctggaacagagtgcacacc

SEQ ID NO: 15045 - DNA, 60 bp, Homo sapiens
gagggagagcagtgtgaaatcagcaaatgcccacaaccctgtcgaaatggaggtaaatgc

SEQ ID NO: 15046 - DNA, 60 bp, Homo sapiens
caacacggaaatgattctcatagactaatacagcagtctacactttgacaagttgtgctc

SEQ ID NO: 15047 - DNA, 60 bp, Homo sapiens
cgtatgccagctcacctttttatgatctgccatttcaaagactcatgtttctgctatgac

SEQ ID NO: 15048 - DNA, 60 bp, Homo sapiens
aatgtggtactctgaccagaaccacggcttatccggcctgtccacgaaccacttatacac

SEQ ID NO: 15049 - DNA, 60 bp, Homo sapiens
tcttttgtgttccggatctccccctccatggctcccttagccgaagtcgggggctttctg

SEQ ID NO: 15050 - DNA, 60 bp, Homo sapiens
cctccttatcctacagtacaatcagcagtctagttcttttcatttggaatgaatacagca

SEQ ID NO: 15051 - DNA, 60 bp, Homo sapiens
gttgagctagcacattatgatgtcctgttgtcctacccaaataagactcatcccaactac

SEQ ID NO: 15052 - DNA, 60 bp, Homo sapiens
aaccaggagaacgccatcatccaggagatcgtcaagtacgaccgcgagatggtgcagcag

SEQ ID NO: 15053 - DNA, 60 bp, Homo sapiens
aagaatggactctatctttatctgcaagaggaactaaggccttctatcagactgcctggc

SEQ ID NO: 15054 - DNA, 60 bp, Homo sapiens
caaaatcggatgggaaatctgttaagaagagatctgtgagtgaaatacagcttatgcata

SEQ ID NO: 15055 - DNA, 60 bp, Homo sapiens
gttcaaggttacccatctcaagtagcctagcaatatttgcaacatcccaatggccctgtc

SEQ ID NO: 15056 - DNA, 60 bp, Homo sapiens
tgggagcatgggcttaggatgtgaatgccagggagcaataaaggtatccgtggtatcggc

SEQ ID NO: 15057 - DNA, 60 bp, Homo sapiens
ggaagatgctgtggattacatcttgtgtgtgtcagagaaactgcagagaacctggagata

SEQ ID NO: 15058 - DNA, 60 bp, Homo sapiens
ttgtgttgcactgatggctgttccatgactgatttgagtgctctttgctaagacaagagc

SEQ ID NO: 15059 - DNA, 60 bp, Homo sapiens
atctacaggcctttgattacctcctgggatgggtgctcactatctaccccagaccaatgc

SEQ ID NO: 15060 - DNA, 60 bp, Homo sapiens
ggaatcctatatgcagccagagatgtgacagccaccgtggacagcctgccactcatcaca

SEQ ID NO: 15061 - DNA, 60 bp, Homo sapiens
ccaagatttacggcgacgattcttccttcaccatctgatcgcagaaatccacacagctga

SEQ ID NO: 15062 - DNA, 60 bp, Homo sapiens
ggagctattgacccaaccagtggggttgctgttttgcaagaaattgcccggagttttgga

SEQ ID NO: 15063 - DNA, 60 bp, Homo sapiens
tagaaggagctcagcacctcttccagcccttaaagctgcagaaaaggtgtcacacggctg

SEQ ID NO: 15064 - DNA, 60 bp, Homo sapiens
cggcatcatctcttactgcgctgctcctcatagctgtcctcctgggccccatctatgtcc

SEQ ID NO: 15065 - DNA, 60 bp, Homo sapiens
gagcagatctataggaagattgaacctgaatattgccattatgcttgacatggtttccaa

SEQ ID NO: 15066 - DNA, 60 bp, Homo sapiens
gggtgcattctagtgtagttactagtcttttgacatggatgattctgaggaggaagctgt

SEQ ID NO: 15067 - DNA, 60 bp, Homo sapiens
gctgcctcctttaaactgcagcgtcagaatcgtgttgacagcaaagaaacagagtgctaa

SEQ ID NO: 15068 - DNA, 60 bp, Homo sapiens
cccctggacttcttagttgtttctctagcgctgagctatctcctaactttggacctatta

SEQ ID NO: 15069 - DNA, 60 bp, Homo sapiens
ttgggaagaatgggagtcatatggaagtgacttgaacccaactctcagcctggagtcagg

SEQ ID NO: 15070 - DNA, 60 bp, Homo sapiens
aaggaggggaagaagagccgcgaccgagagaggccgccgagcgtccccgccctcagagag

SEQ ID NO: 15071 - DNA, 60 bp, Homo sapiens
aagtagtaaccaaagagaaaatccaggaagccaaagatgtctacaaagaacatttccaag

SEQ ID NO: 15072 - DNA, 60 bp, Homo sapiens
aattgtgactcagctgaattttcatccgaggacgcttggaccccgctcttggctctgcag

SEQ ID NO: 15073 - DNA, 60 bp, Homo sapiens
gaaaatcccattaagtggagttgctgtacgtaccgttcctatcccgcgcctcacttgatt

SEQ ID NO: 15074 - DNA, 60 bp, Homo sapiens
tgtcctacacttccacaaggtgcaacctcaggaaccaaaggtcaccgacactgagtactc

SEQ ID NO: 15075 - DNA, 60 bp, Homo sapiens
gaagtggcagttctttactcgtcccctttcatcggtgcctggtactctggcaaatgatga

SEQ ID NO: 15076 - DNA, 60 bp, Homo sapiens
gcacagatgactgctaccatagattcctgcctttcaaacgcagggcaagacattcattgg

SEQ ID NO: 15077 - DNA, 60 bp, Homo sapiens
aggttcagtgttacccctcatcaaccagcccagcagcatcttcgggattcccaatggcat

SEQ ID NO: 15078 - DNA, 60 bp, Homo sapiens
tctttgtttccaagagaattcctgagaaccgagtggtcagctaccagctgtccagcagga

SEQ ID NO: 15079 - DNA, 60 bp, Homo sapiens
ttttcagtcaatttggccgggatggactaatgaggctctaacactgctcaggagacccct

SEQ ID NO: 15080 - DNA, 60 bp, Homo sapiens
gctgaggtgtcttaagccttttgctcacaaaacctggcacaatggctaattcccagagtg

SEQ ID NO: 15081 - DNA, 60 bp, Homo sapiens
ggtccggatgctcaatgaccagttgatgctcttggaacggacctttctgaaccctagagc

SEQ ID NO: 15082 - DNA, 60 bp, Homo sapiens
cctgagctgcaagtgtggcaagtgtaacactgactacagcgactgtacacacgaggctgt

SEQ ID NO: 15083 - DNA, 60 bp, Homo sapiens
ggtcctgtctctgctgtgctcacggagctgcgttgcacttgtttacgcgttacgctgaga

SEQ ID NO: 15084 - DNA, 60 bp, Homo sapiens
ttggccacctcaatcaccagccaagatggttgctttgtccaccagaggtcaagttcacct

SEQ ID NO: 15085 - DNA, 60 bp, Homo sapiens
caaaattatgccctgctgatccagactggattgcttttatacatagcaacgatatttgga

SEQ ID NO: 15086 - DNA, 60 bp, Homo sapiens
tgcctcaggtggtgtgcaactaccgcgatgtgcgcttcgagtccatccggctccctggct

SEQ ID NO: 15087 - DNA, 60 bp, Homo sapiens
ggccatgtggaatgtcttctggtgctactggaccacaatgctacaatcaactgtagaccc

SEQ ID NO: 15088 - DNA, 60 bp, Homo sapiens
aatgtgaagatcaacgtgctggaagactttgagggagagaaccctcaggtgcccaagctt

SEQ ID NO: 15089 - DNA, 60 bp, Homo sapiens
ctgcactactcctctgcagtgccttggggaatttcctctattgatgtacagtctgtcatg

SEQ ID NO: 15090 - DNA, 60 bp, Homo sapiens
ggaaaggacaagtcagggaccacttgctgaagcacgaagagcccttgtggcaatgttaac

SEQ ID NO: 15091 - DNA, 60 bp, Homo sapiens
tcttcagggagtgagatttcccctgtgagtgaaatgccttctagtagtgaaccgtcctcg

SEQ ID NO: 15092 - DNA, 60 bp, Homo sapiens
atcctctttgtcctcagctcctcctgctttcttgggtcccaccagtgtcacttttctgcc

SEQ ID NO: 15093 - DNA, 60 bp, Homo sapiens
cgggaagtcctcgactccaccacctcatctctgtgattgtgaattgcagttcagttcttg

SEQ ID NO: 15094 - DNA, 60 bp, Homo sapiens
aaccagctctctctatagcgacgaggagtccatcctctcccgcttcgatgaggaggactt

SEQ ID NO: 15095 - DNA, 60 bp, Homo sapiens
tgagttcctgaaacttggaggggcatgttaaagggatgactgtgcattccagggcactga

SEQ ID NO: 15096 - DNA, 60 bp, Homo sapiens
ttttggtcaaaggtggaattgggggcccaaagaggggcggataaatcgaaaagcagtacg

SEQ ID NO: 15097 - DNA, 60 bp, Homo sapiens
ttacagctccccaagtggtttccacatgctctgagaagaggagccctcatcttgaagggc

SEQ ID NO: 15098 - DNA, 60 bp, Homo sapiens
caagagggccgaaactcttcaccttgatgtatgttctgatacaagttgttcagcttcttg

SEQ ID NO: 15099 - DNA, 60 bp, Homo sapiens
gatattttcgcccacctaaagggaagccctgacaacaactatcaccaaaagacgaggcgg

SEQ ID NO: 15100 - DNA, 60 bp, Homo sapiens
tatattcacatatgcaaacctcctgcctgactcgctagtccctgcaaatatgcaaacccc

SEQ ID NO: 15101 - DNA, 60 bp, Homo sapiens
gaacatcttcgactttgtgactgttctgggcagcatcaccgatatcctcgtgactgagtt

SEQ ID NO: 15102 - DNA, 60 bp, Homo sapiens
agagacctttcctctgacggaccactaagctggggacaggaaccaagtcctttgcgtgtg

SEQ ID NO: 15103 - DNA, 60 bp, Homo sapiens
ttactgtgcaattccagtcgttcttaagccatcaccagtgggtgtactcagagcagaggg

SEQ ID NO: 15104 - DNA, 60 bp, Homo sapiens
aacctttcctgtgaagggtgcctctcaccgtcgtgtctctccttacttcatctccaggaa

SEQ ID NO: 15105 - DNA, 60 bp, Homo sapiens
ggggcttcccctcaccacacctgtggctgttcccacatccccttgaatatcccaggaaaa

SEQ ID NO: 15106 - DNA, 60 bp, Homo sapiens
ccattgattcacaggttttacaggaagcacgtcctccattagtatccgcagacgatgaga

SEQ ID NO: 15107 - DNA, 60 bp, Homo sapiens
gggactctgagccttgctttagagaatttacagtggacaaataggtgtcatcaaaccagt

SEQ ID NO: 15108 - DNA, 60 bp, Homo sapiens
agaggcactgatggatgctcagaaggaggacttcaacagcaaacacatggccaaccagcg

SEQ ID NO: 15109 - DNA, 60 bp, Homo sapiens
taccctaaccaagttccttggccatgcagaaagcatccctcacccatcctagaggccagg

SEQ ID NO: 15110 - DNA, 60 bp, Homo sapiens
tttgtccccactgtttgcaatggccgtgaggtggtggactcgacaacgtcatcgctttga

SEQ ID NO: 15111 - DNA, 60 bp, Homo sapiens
cctggctccagttggaacactttcctgagatgcacttacttctcagcttctgcgatcaga

SEQ ID NO: 15112 - DNA, 60 bp, Homo sapiens
gtccaggagggtgtaagttctgaatggttccttgctgactttgggtgacacatgtaccac

SEQ ID NO: 15113 - DNA, 60 bp, Homo sapiens
cgcaacgctgccatctgcttttcaaaagctccatataacaaggcacacaagaacctggac

SEQ ID NO: 15114 - DNA, 60 bp, Homo sapiens
ggaggcgttgtgaatgtgtcccatgcataacacactactggatagtgagtcgtgcgctaa

SEQ ID NO: 15115 - DNA, 60 bp, Homo sapiens
aggctcctgatgatgggtaaattggcacatgcttcactcaatgattccacaagccctggg

SEQ ID NO: 15116 - DNA, 60 bp, Homo sapiens
ctcaggactactgttggattgcaaacagcatctctgacccagtcttcggactcattctgt

SEQ ID NO: 15117 - DNA, 60 bp, Homo sapiens
gccacgatgagaatgtgagtacttgtgacacaatgccaaaccactctgaaaccatcagtc

SEQ ID NO: 15118 - DNA, 60 bp, Homo sapiens
gagctgaggaggaggctgcatcactcccagatgaaggttttgttgcattcacagcaaatg

SEQ ID NO: 15119 - DNA, 60 bp, Homo sapiens
aaagaggtccttctgtagtgccatggtagaagaattgaggatgtccctgaagtgccagcg

SEQ ID NO: 15120 - DNA, 60 bp, Homo sapiens
tctggagccccttcagtgaccaagatacagagatcaggacgcctttgcgccgccccaggt

SEQ ID NO: 15121 - DNA, 60 bp, Homo sapiens
gatattttcctgatgcaagtatgtggtttatcacatgtagctcttttgcatgctaaatga

SEQ ID NO: 15122 - DNA, 60 bp, Homo sapiens
gcaagtaaaccaaaacaggatgatgctggaagaattgcagcgagaaatcgcctagctgcc

SEQ ID NO: 15123 - DNA, 60 bp, Homo sapiens
tatcacagaaggggcggttgtcaccatggatattagaggcctatcttacagccaggcaga

SEQ ID NO: 15124 - DNA, 60 bp, Homo sapiens
ctgatgggaataaactgcaggtggagaattcctccttacctcaagcagatgagattcagg

SEQ ID NO: 15125 - DNA, 60 bp, Homo sapiens
catctggattgtctatggagccttcgtacagcaaggtggcgaatcttccgtgaactccat

SEQ ID NO: 15126 - DNA, 60 bp, Homo sapiens
aaggatttggaactgggcactcagtgctagtccagtggtgtgggatggtccagacttgat

SEQ ID NO: 15127 - DNA, 60 bp, Homo sapiens; identical to SEQ ID NO: 4855

SEQ ID NO: 15128 - DNA, 60 bp, Homo sapiens
ccgccattgccgccatcgtcgtggggcttctggggcagctagggctggccgcgctgcctg

SEQ ID NO: 15129 - DNA, 60 bp, Homo sapiens
tttgcctccacgtctaggaaggcctgtgagaggagcagtcaggacttccggacaacttag

SEQ ID NO: 15130 - DNA, 60 bp, Homo sapiens
cgtcgatggagacctcgtagtccaggagcgacttgtccatgatgaaggcgttgagcttgg

SEQ ID NO: 15131 - DNA, 60 bp, Homo sapiens
ccttccctgacactgtctgctgccccaatcaccgtcacaataaaagaaactgtggtctct

SEQ ID NO: 15132 - DNA, 60 bp, Homo sapiens
aggtgtcggtgtgccaggagatgctgcaggagctgcgccacgccgtttcttgccgcaaga

SEQ ID NO: 15133 - DNA, 60 bp, Homo sapiens
ggggccgatgtctgcaacccagaccacttcgtggaatgggctcttgaccaaatccctttt

SEQ ID NO: 15134 - DNA, 60 bp, Homo sapiens
caccaactcgggccgctcctccaggacttcctacgtgtcctccctgacctcccagtctca

SEQ ID NO: 15135 - DNA, 60 bp, Homo sapiens
accgcaggcacgactgtttacggagcattcgatccaatccaggaaattgcggacatatgt

SEQ ID NO: 15136 - DNA, 60 bp, Homo sapiens
aggcaactcatcaccgaactagtcatcagcaagatgaaccagctgctgtccaggactcct

SEQ ID NO: 15137 - DNA, 60 bp, Homo sapiens
cttgacaacaaggattcctgctgaagtctgaaccttactgtgtaaccctcagtttccact

SEQ ID NO: 15138 - DNA, 60 bp, Homo sapiens
cactgaaactcacactgagccagaaggtcttctcaccgcagacacgcactgttgatttgt

SEQ ID NO: 15139 - DNA, 60 bp, Homo sapiens
ccctccgatgcatgctcttctctcacatggagaaaaccaagacagaattgggaagccagt

SEQ ID NO: 15140 - DNA, 60 bp, Homo sapiens
aagatgcttcggatgtgaagtgtgctaatggagatccacccattttcaccaagcccgaca

SEQ ID NO: 15141 - DNA, 60 bp, Homo sapiens
aaccacgtgaaaatcaagcttgctgacagtgccctggaacgcaagaggatttctgctgct

SEQ ID NO: 15142 - DNA, 60 bp, Homo sapiens
tgcccagcgaatccggatctcctgtgtatgtgaaccaagtcaaagtgcgagtctccgacg

SEQ ID NO: 15143 - DNA, 60 bp, Homo sapiens
catcgcaccgttcccacggctgaaataccctctggaagagtttgtgaaagagaaccaaca

SEQ ID NO: 15144 - DNA, 60 bp, Homo sapiens
ctgcagctgctccaaagtggatgtcaactacgcgtttctccatgcaacagacctgctgcc

SEQ ID NO: 15145 - DNA, 60 bp, Homo sapiens
gaatccaaatgagactcagaacaatagcacaagctggcctgtcttcaaaagcactgaaca

SEQ ID NO: 15146 - DNA, 60 bp, Homo sapiens
acactgcaagcctcctaccagctactcagaccacctggagaactggctaaacatgcatca

SEQ ID NO: 15147 - DNA, 60 bp, Homo sapiens
ggaggagttgctcgcatcaaaccagctgtcattaagtacctcataagccatagcttcagg

SEQ ID NO: 15148 - DNA, 60 bp, Homo sapiens
gcgggaataccactctgtcggggtgcaagtggaagatgagaagcgacacggacgttttaa

SEQ ID NO: 15149 - DNA, 60 bp, Homo sapiens
ggccacagtgacctgcgcaatgtttatatgctttgacctactaactttctcctaactaaa

SEQ ID NO: 15150 - DNA, 60 bp, Homo sapiens
gtacccaacctggtaattatcctcaagttgtgtgctattcgtaagttctgtgcagtttgg

SEQ ID NO: 15151 - DNA, 60 bp, Homo sapiens
cgtggaatacaggagttcttggacaaagtctctcagcagggaatggatgttgcacttcag

SEQ ID NO: 15152 - DNA, 60 bp, Homo sapiens
ttatggactctcagacactcagaagcaactgaggtgtccgtctgccaggagatggtgacc

SEQ ID NO: 15153 - DNA, 60 bp, Homo sapiens
acccaaactccagatccggagtcatagttacctgagggcagtgagtgaagtctccatcaa

SEQ ID NO: 15154 - DNA, 60 bp, Homo sapiens
agtgcgggcactgggcttttcttctgatgttcattatggtgctgggaagctctgtctttg

SEQ ID NO: 15155 - DNA, 60 bp, Homo sapiens
ccagtgacagacccaacggtgaggcaaagaccgagctctgtgaaaacgtagacccaaaca

SEQ ID NO: 15156 - DNA, 60 bp, Homo sapiens
cgctggagctcctacatggtgcactggaagaaccagttcgaccactacagcaagcaggat

SEQ ID NO: 15157 - DNA, 60 bp, Homo sapiens
gaaagaacacctgatgtgacacagaactcagagccaagggctgaaccaactcagaatgca

SEQ ID NO: 15158 - DNA, 60 bp, Homo sapiens
ggacatagacatgttttccatgtgtgagcatcacttggttccatttgttggaaaggtcca

SEQ ID NO: 15159 - DNA, 60 bp, Homo sapiens
accaccccatccgcatctcaacaaatctcagtccctgactaacagcctcagcacatccga

SEQ ID NO: 15160 - DNA, 60 bp, Homo sapiens
acatgggcctggacagcatgtcctctacctgtgacttctcattttcctgtttacactggg

SEQ ID NO: 15161 - DNA, 60 bp, Homo sapiens
cacattaagtcaacaccaaacgtggttgccacatttcatcagacagacacctccctctgg

SEQ ID NO: 15162 - DNA, 60 bp, Homo sapiens
atattccaggcctacctggcattccaggacctccgaaatgatgctccagtcccttacaag

SEQ ID NO: 15163 - DNA, 60 bp, Homo sapiens
gctgccaggcccatttatgtccctcatgtctctagattttctcgtcacccagcctcaaaa

SEQ ID NO: 15164 - DNA, 60 bp, Homo sapiens
agacagggggatgacagctcggacgaagaggacaaggagcgggtcgcgctggtggtgcac

SEQ ID NO: 15165 - DNA, 60 bp, Homo sapiens
atctgcagccagatgttcgaaggccagatcctggacgtgaagggaggccggggctacgac

SEQ ID NO: 15166 - DNA, 60 bp, Homo sapiens
aagtacgccaagatggaggcggagcgcgaggccgtgcgccagggcatccgagacaagtac

SEQ ID NO: 15167 - DNA, 60 bp, Homo sapiens
ctaccagcgctacaaggctggcgtggacgacttcatccagaattacgttgaccccactcc

SEQ ID NO: 15168 - DNA, 60 bp, Homo sapiens
aggccagccaggagcgctgcatgcaaattctgccgtgggctaaggcacgctaaccagagc

SEQ ID NO: 15169 - DNA, 60 bp, Homo sapiens
atgaaggaccgcacccaggtgctgcgcacgcgaaggaacagtgacgataaggaggaggtg

SEQ ID NO: 15170 - DNA, 60 bp, Homo sapiens
atgggaatgtcctgaatgacttctaaggctctttctggcttgaactgtcagagccaagcc

SEQ ID NO: 15171 - DNA, 60 bp, Homo sapiens
tactgccccaaatagagggcaaagcactagacagaagggtgagatccaaggggaatttgg

SEQ ID NO: 15172 - DNA, 60 bp, Homo sapiens
ggcctggattttaaatggcctagaatttgtggtagttgccaaagaggttctcctaggtgg

SEQ ID NO: 15173 - DNA, 60 bp, Homo sapiens
atctacgtcatctataagttcctcagcacgcagggctctctttgggagagactggcctat

SEQ ID NO: 15174 - DNA, 60 bp, Homo sapiens
tacttcccgcagatcagcagcgtcaaggaccgcaagaaagccgtcctgtccgacatcggt

SEQ ID NO: 15175 - DNA, 60 bp, Homo sapiens
ttgtctgaaggcaacagtgaaacaggccaagggcattctgggcaaagatgtcagtgggtt

SEQ ID NO: 15176 - DNA, 60 bp, Homo sapiens
gtgtccgagagcagcaaggtcgtcgtggtggagagtgtcatgtgacaactcagctcacat

SEQ ID NO: 15177 - DNA, 60 bp, Homo sapiens
gctcgggcaaaacaagagatgcccattactgtgagggacccttgaagtctggactcttaa

SEQ ID NO: 15178 - DNA, 60 bp, Homo sapiens
agcaacaactgcaattctcattgcaagatcatcgcctccctggtttatagtagacagacc

SEQ ID NO: 15179 - DNA, 60 bp, Homo sapiens
ccctctcccaaatagtaatgctttagagggaggcagtcatatctctgtgtgcagataata

SEQ ID NO: 15180 - DNA, 60 bp, Homo sapiens
gcccctggcagggacttctgggttatgggagaaaccagagatgggaatgaggaaaatatg

SEQ ID NO: 15181 - DNA, 60 bp, Homo sapiens
cgagtcgtctcacacagagctggcaaaggacaatccagcaacttctctgctacatactct

SEQ ID NO: 15182 - DNA, 60 bp, Homo sapiens
gctggaggatctggtgcacttctccgtgtctgagttgcctagtcgcggctacggcgtcat

SEQ ID NO: 15183 - DNA, 60 bp, Homo sapiens
cgtgtgattgactttgatgagaacactgctctggatgatgcagaagaggagtcctttagg

SEQ ID NO: 15184 - DNA, 60 bp, Homo sapiens
ggatcttgactcttgtctcctttgtccttttgttcagacagagttgtacctgcagcagac

SEQ ID NO: 15185 - DNA, 60 bp, Homo sapiens
agaatatggaaaggattggggaggaggtgagacagctgatggaaaagctgagggaaaagc

SEQ ID NO: 15186 - DNA, 60 bp, Homo sapiens
cctgagcctatctggctgggatggtggaattaagcacaaggtcacattctctgtgatcac

SEQ ID NO: 15187 - DNA, 60 bp, Homo sapiens
cctaacgtcatttagcttgttgtctgatgcctccagtaggacacctccgatggagctttg

SEQ ID NO: 15188 - DNA, 60 bp, Homo sapiens
tgtggtcaccaagggcttccggacgctggatgttgacctggacgaagtgtactgccttaa

SEQ ID NO: 15189 - DNA, 60 bp, Homo sapiens
tggcccaagaggatgaattcttgcagctggcaagagaccggctggctacctgtctggcca

SEQ ID NO: 15190 - DNA, 60 bp, Homo sapiens
attaaattcccagacagagaggagaacgcagttcacagtacagagccagttgtccaggag

SEQ ID NO: 15191 - DNA, 60 bp, Homo sapiens
aggatgaaaaacttattcgtctaatggaagagatcatgagtgagaaggagaataaaacca

SEQ ID NO: 15192 - DNA, 60 bp, Homo sapiens
tattgcagccagctgtcagccaagctcagtaaccttccaacgctcatttccatgaggcta

SEQ ID NO: 15193 - DNA, 60 bp, Homo sapiens
gcgcattgtactcttatagtattacaggtatccccagtgcctaactctgctgtctgctat

SEQ ID NO: 15194 - DNA, 60 bp, Homo sapiens
aggcgtctcctcatccctaagacactgtgacagtccagcaccttcaggaggtggaaaata

SEQ ID NO: 15195 - DNA, 60 bp, Homo sapiens
atgaatgtaccaaataaaccacagctggactgttaacctcaccttagaagcttcattcta

SEQ ID NO: 15196 - DNA, 60 bp, Homo sapiens
agccaacagatggctgagctgtcggaggtgctggtgctcaggctggaaaactatgaacgg

SEQ ID NO: 15197 - DNA, 60 bp, Homo sapiens
tggattgctgtgctcactgctgtaaaaggtgacctagtgtactgggcagctggtggcggt

SEQ ID NO: 15198 - DNA, 60 bp, Homo sapiens
tgggcagggtttcaatcagagctcacgacttcagattcaccagctgatccatacgggtga

SEQ ID NO: 15199 - DNA, 60 bp, Homo sapiens
tgttgcctgcaatgaactcgctgaagcatgctcagccctggaactggtgctaccagagtt

SEQ ID NO: 15200 - DNA, 60 bp, Homo sapiens
gcctagctttctaaagccacgctgtgtccctcaattacagagggtaggaatgggtatacc

SEQ ID NO: 15201 - DNA, 60 bp, Homo sapiens
tctccatccacgaggtctggtctgacggcaaagaggacatgctgagacagaaggtctatg

SEQ ID NO: 15202 - DNA, 60 bp, Homo sapiens
taactagctttaagtttaaagatggaagctaagcaatggaaatgctatacgtttttgaca

SEQ ID NO: 15203 - DNA, 60 bp, Homo sapiens
taccccatcagccccgtcgtcttcaggaccagttggcctcctggtcagacccactgagga

SEQ ID NO: 15204 - DNA, 60 bp, Homo sapiens
tggtgtatgtgattgagaaggactacaccacagctccctcacaggatatgtgtgttctcg

SEQ ID NO: 15205 - DNA, 60 bp, Homo sapiens
cctcttacaacaagagtcctcaatccaacagcccagtgcttctgtctcgactgcactttg

SEQ ID NO: 15206 - DNA, 60 bp, Homo sapiens
ctataacccagtgatgctgaggtcatgtgctggaatgctgtatttggaccacacatttca

SEQ ID NO: 15207 - DNA, 60 bp, Homo sapiens
agttctctcatcggaggcccatgccctccactccactgcctttggaagggtctctctcca

SEQ ID NO: 15208 - DNA, 60 bp, Homo sapiens
gggaaacactgcattgggtcaaagtgctgcctttaatcgaccattagagggagttctcta

SEQ ID NO: 15209 - DNA, 60 bp, Homo sapiens
tcagctttcaaatctgttgctgcttttccttaatccgtggtgttcatgtgaaaatatgtg

SEQ ID NO: 15210 - DNA, 60 bp, Homo sapiens
actgctcagattctttcagcacttcagggcttgaagactcttgcacagagaccagctcga

SEQ ID NO: 15211 - DNA, 60 bp, Homo sapiens
ccatagtaaccttagaccttagagaggtagctttggagtgaaactttggctgcaataggc

SEQ ID NO: 15212 - DNA, 60 bp, Homo sapiens
agaagccggagcagaagtcctggtagttacaagcaaagggagacaaggaaacgggcacag

SEQ ID NO: 15213 - DNA, 60 bp, Homo sapiens
ctggtccctctcatgctaacagaagaactggagtaccttctactgcctcagtgggcaaat

SEQ ID NO: 15214 - DNA, 60 bp, Homo sapiens
accatgacccagaaggacgtagaagacatgttctctcggtttgggcggatcatcaactcg

SEQ ID NO: 15215 - DNA, 60 bp, Homo sapiens
tttggctggagaggatccccctgcttaccaggcccgcttgttacagaagctgacagaaga

SEQ ID NO: 15216 - DNA, 60 bp, Homo sapiens
cttccattcccagtcgtcctacatcagcagcgacaatgattcggagctcgaggatgctga

SEQ ID NO: 15217 - DNA, 60 bp, Homo sapiens
tgactttgccctggcctatagaccgagcttcccagaggacagagagccacagatacccta

SEQ ID NO: 15218 - DNA, 60 bp, Homo sapiens
ggccaatcagtcagaagctgcccttgaacaagtggcatcttacgcagaccaacagagtat

SEQ ID NO: 15219 - DNA, 60 bp, Homo sapiens
tcagagtattccagaggagcttgtatcaatggctgagaggtttgaggcacatcaacggaa

SEQ ID NO: 15220 - DNA, 60 bp, Homo sapiens
tggccagggctctcattctggacctgtgttgtaattgtgtacagaggatggcgttggcct

SEQ ID NO: 15221 - DNA, 60 bp, Homo sapiens
cctaataatggcatgggtagggaacagatacacctggttagaaggtctagggttctgtat

SEQ ID NO: 15222 - DNA, 60 bp, Homo sapiens
gtcctcctcagatacccaaacaagctggatactgtgacctggacatggcaaggatataca

SEQ ID NO: 15223 - DNA, 60 bp, Homo sapiens; identical to SEQ ID NO: 4855

SEQ ID NO: 15224 - DNA, 60 bp, Homo sapiens
ggatagcacagctctagatggctaggtttggcatgtctactcgtgagataatgtctgtga

SEQ ID NO: 15225 - DNA, 60 bp, Homo sapiens
tttaatggaccagtctcgcttccacgagctccagttgcagctggaacaactgaccatcct

SEQ ID NO: 15226 - DNA, 60 bp, Homo sapiens
cagatttgcagtctgaaggattccctgtaatagagaccagcaccctgactgaggaaggtg

SEQ ID NO: 15227 - DNA, 60 bp, Homo sapiens
ggcaagcactcagaacgaagcaatcatgctgaagctgcacagtgtctagtccactcagca

SEQ ID NO: 15228 - DNA, 60 bp, Homo sapiens
cgtgccgcatcgccgcagatccagcgcccagagagacaccagagaacccaccatggcccc

SEQ ID NO: 15229 - DNA, 60 bp, Homo sapiens
gaaagctgattcaggagattgtggacaagtcaggagttgtgagggtgaggattgaggctg

SEQ ID NO: 15230 - DNA, 60 bp, Homo sapiens
tgcgtcgtttcgatatcacaccctctgtgtgccgccttacttcctgcttcgagaatgtat

SEQ ID NO: 15231 - DNA, 60 bp, Homo sapiens
cttcacagtcactcggctcagtgcataccaggtgacaaacctcgtgccaggaaccaaatt

SEQ ID NO: 15232 - DNA, 60 bp, Homo sapiens
aagaccaaatactgaagttaagtgcattgttttcaggaatcaaaagataaaggggccggg

SEQ ID NO: 15233 - DNA, 60 bp, Homo sapiens
agaggcaggctctgtttggttggagcgagcatgtgggtctgcagtaccctgtggcgggtg

SEQ ID NO: 15234 - DNA, 60 bp, Homo sapiens
acggagaagatcaaactggagctgcgttcataggctggcactctcaatcctacatcaggt

SEQ ID NO: 15235 - DNA, 60 bp, Homo sapiens
ctgcagtgtccagcccagtgttgaacagattgtagcgttctgtctcattacgagcaaata

SEQ ID NO: 15236 - DNA, 60 bp, Homo sapiens
accctgaggatccattccaagaactttcacgaggacacccttagcagtaccaaggccaag

SEQ ID NO: 15237 - DNA, 60 bp, Homo sapiens
taagggtgcggagacctaagggcggcgactacgacggcgttgatatcggtggtaacgacg

SEQ ID NO: 15238 - DNA, 60 bp, Homo sapiens
caccagatggttgtagcttcatcattgcagactccttcctacatcatgcgtatcgttttc

SEQ ID NO: 15239 - DNA, 60 bp, Homo sapiens
ctttgagcacccaggtacccaagccaataaggaaagttaattccttgcatatgactgtta

SEQ ID NO: 15240 - DNA, 60 bp, Homo sapiens
ctgctgtctcatagatgggatttgtactcttggggcaacttaaagtgtctctctcgctgc

SEQ ID NO: 15241 - DNA, 60 bp, Homo sapiens
tatggggtggtctgcacccatctgggactcttttccctaaatcctgcaccaaatgagtca

SEQ ID NO: 15242 - DNA, 60 bp, Homo sapiens
tgaacgcttgtgtctcagggtggaccactctgtgtctgtctccaagcagagaccagtaaa

SEQ ID NO: 15243 - DNA, 60 bp, Homo sapiens
cccgcctatccttcaaggacaagtccacgtatatcgagtcctcgaccaaagtgtatgatg

SEQ ID NO: 15244 - DNA, 60 bp, Homo sapiens
cacccataggctgttaaccgatgctccgaaacttattcgcaaagtacatagagaaagaaa

SEQ ID NO: 15245 - DNA, 60 bp, Homo sapiens
tgccagctcaagccacggagtatgccttcgccttcatccaggtgccccaagatgatgatg

SEQ ID NO: 15246 - DNA, 60 bp, Homo sapiens
gtgtcaccaattccaccaagacagtgctgagattggaaaagggcactcatttggattgcc

SEQ ID NO: 15247 - DNA, 60 bp, Homo sapiens
gcacacttatcacatagcacaaaggacgtgccatggtgctttccccaaaagttgtgttgc

SEQ ID NO: 15248 - DNA, 60 bp, Homo sapiens
aggacctcctagaaggccgatacttctccggagccctaccagacgatgaggatgtagtgg

SEQ ID NO: 15249 - DNA, 60 bp, Homo sapiens
ggatccacacacaaggttgtgtcagcaaggcggaatcgaagagcgtgaagaaatgcgggg

SEQ ID NO: 15250 - DNA, 60 bp, Homo sapiens
cgatctggtaggggagaaatggcgaatgtcatacacatgagatggtatatccttgcgatg

SEQ ID NO: 15251 - DNA, 60 bp, Homo sapiens
tcgtcttgatagacgtgccaccttccgccaatggggacgaagggaagctccagcgtgtgg

SEQ ID NO: 15252 - DNA, 60 bp, Homo sapiens
gctggccttctccaaggtcttgcgacagacaaagaagaacccctctaatcccaaggataa

SEQ ID NO: 15253 - DNA, 60 bp, Homo sapiens
catcccatttgatcaggtcaacgatgactattgcgactgcaaagatggctctgacgagcc

SEQ ID NO: 15254 - DNA, 60 bp, Homo sapiens
gaagagagtaaaggatatggctgctcctggaacatcaagtgttcctgctccaactgcagg

SEQ ID NO: 15255 - DNA, 60 bp, Homo sapiens
atgatggtcacacgttcctggacagtgtggagtgttacgacccagatacagacacctgga

SEQ ID NO: 15256 - DNA, 60 bp, Homo sapiens
cagtgaactaagtccctataataaaagctgaagctgttctgcctaaaaaaaaattcaaaa

SEQ ID NO: 15257 - DNA, 60 bp, Homo sapiens
ctctggactcaccaggcactgaccactttgtcatcattgcccaactgaaggaagaagtgg

SEQ ID NO: 15258 - DNA, 60 bp, Homo sapiens
tctgagcgccagacatgaaccgcaagaaactgcagaagctgacggacaccttaaccaaaa

SEQ ID NO: 15259 - DNA, 60 bp, Homo sapiens
tttcttctgctctttcgccgggaaaacccactggacagcagcgtggagtttatgcagatt

SEQ ID NO: 15260 - DNA, 60 bp, Homo sapiens
caacccctacacggagttccctgagttcagccgccgcctcatcaaggacctggagagcat

SEQ ID NO: 15261 - DNA, 60 bp, Homo sapiens
cgagcacatagcggacaacagcaaagatttggagagtcacatgatccaccactgtaagac

SEQ ID NO: 15262 - DNA, 60 bp, Homo sapiens
gggaacatgtgactctcagcattggaaggacagagctaggatgatggctttccggtggca

SEQ ID NO: 15263 - DNA, 60 bp, Homo sapiens
gaagggccagacagcttatcaacgaaaaggatcagctcacctcttttgttctaccacctg

SEQ ID NO: 15264 - DNA, 60 bp, Homo sapiens
aaaaggcgtggaagaaaatgttggagatacctaaaagaatcaagaggtggaaaactgctg

SEQ ID NO: 15265 - DNA, 60 bp, Homo sapiens
caatagattccagcaagtagaaagccgctggggttacagtgggacgagtgatcgaatcag

SEQ ID NO: 15266 - DNA, 60 bp, Homo sapiens
tctgctgagacaggagtcagagctgatgtacaagtccaaggcccagcgtctggaggagca

SEQ ID NO: 15267 - DNA, 60 bp, Homo sapiens
gcttcatggagaggtgattgtagaaaaggatgattaaatgatctctgcaaacaaggtgct

SEQ ID NO: 15268 - DNA, 60 bp, Homo sapiens
agagccggtctttaggctgtgttgttcgcccaggtttctgcatcttgcactttgacattc

SEQ ID NO: 15269 - DNA, 60 bp, Homo sapiens
tgcatggcacacagagataccctatgcctcaaaacctgatgtggcagaaggaccgcatca

SEQ ID NO: 15270 - DNA, 60 bp, Homo sapiens
gcgggagttaccctttattctgtgatattttgagctgttctgcgtctcgcaggcccttct

SEQ ID NO: 15271 - DNA, 60 bp, Homo sapiens
gacccctcactccaaaatcctactggctgtagcagagaatacctttgaaccaagattctg

SEQ ID NO: 15272 - DNA, 60 bp, Homo sapiens
cagagcaaaaccccggtggatgacctgatgagcctgctgtaaaacatgaatgactgctac

SEQ ID NO: 15273 - DNA, 60 bp, Homo sapiens
tctggatgaggctgatgtcatgatagccactcagggccaccaagatcagagcatccgcat

SEQ ID NO: 15274 - DNA, 60 bp, Homo sapiens
aatttgtgctgctgttagtgcaactgctgtgtatgttgagccactgttgtcatgccagcc

SEQ ID NO: 15275 - DNA, 60 bp, Homo sapiens
cagtcctcaaacatggttatttctgtcagtgacttaacattcggttttatcagccagcag

SEQ ID NO: 15276 - DNA, 60 bp, Homo sapiens
tccgcaacaaccatgacacagtaaagaagttctacacctgcgggtactgcacagaggaca

SEQ ID NO: 15277 - DNA, 60 bp, Homo sapiens
attggagtcttaggcatctctggtacagtggggtgcacgtctcaggtggaggaagattta

SEQ ID NO: 15278 - DNA, 60 bp, Homo sapiens
agaggagaacaggccttttctctgccactcagacgcaggaagtggagaacctggtgagag

SEQ ID NO: 15279 - DNA, 60 bp, Homo sapiens
caaccctcagcctcttcaatgccaaaggtatccctattggttgagaaccacatggtaatt

SEQ ID NO: 15280 - DNA, 60 bp, Homo sapiens
cgttttgcacaatggatggtcgtggaagcccagttcacattcatccttcctcagcacttc

SEQ ID NO: 15281 - DNA, 60 bp, Homo sapiens
ggcccctgaaatctttccggtcaagcctttatcccagcactcagttgttttggatgtctg

SEQ ID NO: 15282 - DNA, 60 bp, Homo sapiens
gtgctgtctgtgtctagcttcttttacccaacatgaggttgcatgggcttggttcattca

SEQ ID NO: 15283 - DNA, 60 bp, Homo sapiens
cccctgcagtcagcgtcagtgctcatctacgttaataaagtggtcctatttatggcggca

SEQ ID NO: 15284 - DNA, 60 bp, Homo sapiens
atcctgaaagactccatcagcagctatgaagcccagatcaccgccctgaagcaggagcga

SEQ ID NO: 15285 - DNA, 60 bp, Homo sapiens
gggatcagtgggctagatgggaaagaaagctcagcaggaactggtaactttgggtctcat

SEQ ID NO: 15286 - DNA, 60 bp, Homo sapiens
gcggatggttgagatctatctgctgaatctggccatctccaaccttctgtttctggtgac

SEQ ID NO: 15287 - DNA, 60 bp, Homo sapiens
gtacctaaaagtcagaaaccacattttctcctcagaagtagggaccgctttcttacctgt

SEQ ID NO: 15288 - DNA, 60 bp, Homo sapiens
tgctgaggtgttcccgctgaaggtatttggctaccagccagatcccctgaactaccaaat

SEQ ID NO: 15289 - DNA, 60 bp, Homo sapiens
cctgtgctgatcgtggggcatcatatcctgtatgggaaaatcatccacctggagaaacct

SEQ ID NO: 15290 - DNA, 60 bp, Homo sapiens
ccttctgcctcagatcttctgtctcattcgatacagcaaagtttacgacactgggactga

SEQ ID NO: 15291 - DNA, 60 bp, Homo sapiens
gggaggtcctgacagcttggggtttgagaccctggaaaactgcaggaaggctcataaaga

SEQ ID NO: 15292 - DNA, 60 bp, Homo sapiens
gcaggcatttccaacttcatcagtgcagaatcctgccacaatccctcctggtcctaaatg

SEQ ID NO: 15293 - DNA, 60 bp, Homo sapiens
cacagtggagaagaccctgcatcagggaatgtggaaatgactttgctgaattctcaagcc

SEQ ID NO: 15294 - DNA, 60 bp, Homo sapiens
cagccggagtctgaactgtcctgggggaccaagcaggagcttaagatgggcaagacctgg

SEQ ID NO: 15295 - DNA, 60 bp, Homo sapiens
aaccgacctgagcatccctcaaatggcacagctgcttaacatccactccaacccagagat

SEQ ID NO: 15296 - DNA, 60 bp, Homo sapiens
ctggcctaacgggtctgtctccaaaccctctttcctaagagctgagcaaaccaaccataa

SEQ ID NO: 15297 - DNA, 60 bp, Homo sapiens
acaagggactgaaaaccaactgttgtgaccagtgtggggcttacatctacaccaagaccg

SEQ ID NO: 15298 - DNA, 60 bp, Homo sapiens
tggagcgcgacacactgggcatccgtgaggtgcggctgttcaatgccgttgtccgctggt

SEQ ID NO: 15299 - DNA, 60 bp, Homo sapiens
ttccaactgacgatgcggaatcgctcgtggttcttgtcgaagatggacgccaggaacttc

SEQ ID NO: 15300 - DNA, 60 bp, Homo sapiens
tcgccctctgactaatatgaatgacaccatggttagccacatgtcctctggagtgcccac

SEQ ID NO: 15301 - DNA, 60 bp, Homo sapiens
aatgatgtctcggtgagcctgtacagaagctggaggcagcataaaggactcaaggaccac

SEQ ID NO: 15302 - DNA, 60 bp, Homo sapiens
gccagagtggttgaagtcactgaaaatgggataggagttgaactcaccgatctctccact

SEQ ID NO: 15303 - DNA, 60 bp, Homo sapiens
agggacgagggacaggggtttcaccagccagcaacctgggccttgtactgtctgtgtttt

SEQ ID NO: 15304 - DNA, 60 bp, Homo sapiens
aattcgagaggtccacgaacggaatgatgggagagatcctttcccactcctaatgaaccg

SEQ ID NO: 15305 - DNA, 60 bp, Homo sapiens
ggagcttttcagtgtttggagacatttctcaatcccctgctgtggtaggaactccagtgg

SEQ ID NO: 15306 - DNA, 60 bp, Homo sapiens
gggtgctcagaataaggcaggcattgaggaagagtcttggtttctctctacagtgccaac

SEQ ID NO: 15307 - DNA, 60 bp, Homo sapiens
cgaccctgaagaacccatttactttgggagaagatttaagccttatgtaaagcagggcta

SEQ ID NO: 15308 - DNA, 60 bp, Homo sapiens
ggacttttcccattagagcaccttagggaatttcacatccctagaggctgccaaaatagc

SEQ ID NO: 15309 - DNA, 60 bp, Homo sapiens
gatattcctccgagtagccaccccgcagaaggcgtgcgattcttccagcagatatgaaga

SEQ ID NO: 15310 - DNA, 60 bp, Homo sapiens
cgtttccctcgtcatgcatttccacatatccacaaacacagaacgactttagacaagcac

SEQ ID NO: 15311 - DNA, 60 bp, Homo sapiens
gggtgtcagagaccaatgtcccatacctccagagtggaaaccggagatcaagaggggcaa

SEQ ID NO: 15312 - DNA, 60 bp, Homo sapiens
cttcctcagcctacaaatagctcattagatgacattcacgcatgctgggtataggcaagg

SEQ ID NO: 15313 - DNA, 60 bp, Homo sapiens
gtccaacacatccaatgaagagtttaagctgttactgctcaagaaaggcagtcgctcaga

SEQ ID NO: 15314 - DNA, 60 bp, Homo sapiens
catgaggacagcaatggttgtatcaactatgaagcgtttgtgaggcatatcctgtcgggg

SEQ ID NO: 15315 - DNA, 60 bp, Homo sapiens
tgtgggaaaagtcagggcgaagacgccaggttcagcatgggaaaatgggactgtggaaat

SEQ ID NO: 15316 - DNA, 60 bp, Homo sapiens
ttctccgatgcaggttttgtggcctagtctttcgaggacccttgtctgttcaggaagact

SEQ ID NO: 15317 - DNA, 60 bp, Homo sapiens
cctttgggaatttaggctggagagacgtccatagccttaggtatatcatttataccagac

SEQ ID NO: 15318 - DNA, 60 bp, Homo sapiens
ccacctgatctggcaacttctcccaccaaaagccctttcaagataccaccggtaactttc

SEQ ID NO: 15319 - DNA, 60 bp, Homo sapiens; identical to SEQ ID NO: 4855

SEQ ID NO: 15320 - DNA, 60 bp, Homo sapiens
aactcttggattgagcaggcagcagctgccctgctctgttggtggttggggacagctcgc

SEQ ID NO: 15321 - DNA, 60 bp, Homo sapiens
caggatcaagaagcagttgaggctagaggagcttatcaaaggcaggagctaccagcgagg

SEQ ID NO: 15322 - DNA, 60 bp, Homo sapiens
cacttgacttcaccaaatcccttcctggagactaaacctggtgctcaggagcgaaggact

SEQ ID NO: 15323 - DNA, 60 bp, Homo sapiens
tacggtgaagcagctacagaagggatccttgggaacttcatcttgagtgtgaaatggata

SEQ ID NO: 15324 - DNA, 60 bp, Homo sapiens
cctatccagttctatggaatgaatggagaatctttcagaaagaccatcattgggtagggc

SEQ ID NO: 15325 - DNA, 60 bp, Homo sapiens
tgtgaatccgctggtgacgccgcagaagggaagcaccctggacaacagcctgcacaagga

SEQ ID NO: 15326 - DNA, 60 bp, Homo sapiens
cggaatctgagcgtaaagacgagctgagtgattggtcattggcaggagaagatgatcgag

SEQ ID NO: 15327 - DNA, 60 bp, Homo sapiens
tctgtgttgacttagatcaagacacgtcacgcatcctttctggggtagtacctgtggagc

SEQ ID NO: 15328 - DNA, 60 bp, Homo sapiens
gaaatgaagatgaactgtgtcacagatgcagtggattactgactgcccttgtaatagtcc

SEQ ID NO: 15329 - DNA, 60 bp, Homo sapiens
aatactcatcatgctggcaatgacggcactgactgtgcgacgctcggagctgtccttgtc

SEQ ID NO: 15330 - DNA, 60 bp, Homo sapiens
actgggacatcgtcaggaagtgcatctgtgctgcctatttccaccaagcagccaagctca

SEQ ID NO: 15331 - DNA, 60 bp, Homo sapiens
ttttacccggcacattccccttgcctaaatacaagggctggagtctgcacgggacctatt

SEQ ID NO: 15332 - DNA, 60 bp, Homo sapiens
gcctgactctaggtttgcatcattgcagccggtttccaatcagattgagcgctgtaactc

SEQ ID NO: 15333 - DNA, 60 bp, Homo sapiens
ctgtcctgtagtaattggggacaatgtgatcatccttggagagagatgtgagcaccaagg

SEQ ID NO: 15334 - DNA, 60 bp, Homo sapiens
aacatgcattttgcatatggctcagagcagagccggatctcccaaggaagcacaaatagt

SEQ ID NO: 15335 - DNA, 60 bp, Homo sapiens
aaactgaacagagatgcactctccagtgactccccagcaaacacaaggtgcagcagggtc

SEQ ID NO: 15336 - DNA, 60 bp, Homo sapiens
ccacaaatgcagaaatctgccatcaaggatgctgaggaagatgatgacacaggtggtatc

SEQ ID NO: 15337 - DNA, 60 bp, Homo sapiens
atcatcttcctggagtaacatcaccagtgaccagcagacagtgagcttctatcccaggcc

SEQ ID NO: 15338 - DNA, 60 bp, Homo sapiens
tggtggactcttggcagaagccgacacacagttgggccataacaaagagccctggtacgg

SEQ ID NO: 15339 - DNA, 60 bp, Homo sapiens
gttgcagttttaaataggatgtcaggggaggtcacagtgaaaagtgacattttggccggg

SEQ ID NO: 15340 - DNA, 60 bp, Homo sapiens
tgggcttgcagtaagaattgccagccactcattgtgcgggtctgcgtggagctttaatca

SEQ ID NO: 15341 - DNA, 60 bp, Homo sapiens
cctgtgatcttttgaaactgcattcctgagttctatccttacttccttaaagcagcatgc

SEQ ID NO: 15342 - DNA, 60 bp, Homo sapiens
cacttgtgaaaactctcagtccagaaatgcagagctttgtgagataccacccacttctga

SEQ ID NO: 15343 - DNA, 60 bp, Homo sapiens
ggcaattgacgagatgtccaagaaggtttctgagcttaatcagctttgcacaatggaaga

SEQ ID NO: 15344 - DNA, 60 bp, Homo sapiens
cccctgtgttaggatgcttcattcctgctaattgaggatgagcactttccgaatgcctat

SEQ ID NO: 15345 - DNA, 60 bp, Homo sapiens
gtccatattgtggccagaaatttgccagcagtggtacactcagagttcatatccggagcc

SEQ ID NO: 15346 - DNA, 60 bp, Homo sapiens
gcaaccatattggcaatctgaaactggcaaacacaaaggattgttttcactaggcttacc

SEQ ID NO: 15347 - DNA, 60 bp, Homo sapiens
gcaggggcatttaaaaatgtaggacctatcgtccagactcacagagtggggctccagaat

SEQ ID NO: 15348 - DNA, 60 bp, Homo sapiens
gacgtacaagcactcaaggagctgatattacataacccggttacccttaagttacaggag

SEQ ID NO: 15349 - DNA, 60 bp, Homo sapiens
gggagaaagtgctgtgcttcgagcctgaccccaccaaggcgcgagtgctgtacgatgcca

SEQ ID NO: 15350 - DNA, 60 bp, Homo sapiens
aatgcgggtgactcctttacatggcacaacggcaagcagttcaccaccctggacagagat

SEQ ID NO: 15351 - DNA, 60 bp, Homo sapiens
tttgacaaagatggtgatggagaaataaaccaagaggagttcattgctattatgactggt

SEQ ID NO: 15352 - DNA, 60 bp, Homo sapiens
ctgtgcgtcttccaaactaaagcctgcaagcgccacaattctaagtgccgccttccattt

SEQ ID NO: 15353 - DNA, 60 bp, Homo sapiens
atgccctcgagtgtgtttgtacacaaacccttaggatggtgagttgaagcatcaccctcg

SEQ ID NO: 15354 - DNA, 60 bp, Homo sapiens
agattggtggaatggagatttcagtgagcctacatgcagatgacatggtgacacccgtgc

SEQ ID NO: 15355 - DNA, 60 bp, Homo sapiens
ctgtgacctcagcttcagagtgtcagggcctcacttgtatagaatgtaatgttctcctca

SEQ ID NO: 15356 - DNA, 60 bp, Homo sapiens
gtgggtgggttctgtgctgtgtactttcctgaacagtgtgtctctcctttaggtgaagag

SEQ ID NO: 15357 - DNA, 60 bp, Homo sapiens
ccgaggacaacctggagatcgttctgcacagatgggagaacaacagctgtgttgagaaga

SEQ ID NO: 15358 - DNA, 60 bp, Homo sapiens
catcttgcttctgctcagaatctgctcattcttagaaggcctacattaacatggatgcag

SEQ ID NO: 15359 - DNA, 60 bp, Homo sapiens
ggttgctctagattgagagaagagacaaacacctcccaggagacagttcaagaaagcttc

SEQ ID NO: 15360 - DNA, 60 bp, Homo sapiens
caaataagccttcgatgacatttactaacctttactaaagtatcaatgatgacttggttg

SEQ ID NO: 15361 - DNA, 60 bp, Homo sapiens
tactatgttcacgatcagacacgcactgcattcggcagagctccagtgagcaaggcacga

SEQ ID NO: 15362 - DNA, 60 bp, Homo sapiens
atgggtctgagacagaagacacagggagaagccttcccagcaagaaagaacgatctggga

SEQ ID NO: 15363 - DNA, 60 bp, Homo sapiens
ggattggtcatggaaatagaatgcaccaccatgagcatcatcacctacaagctcctaaca

SEQ ID NO: 15364 - DNA, 60 bp, Homo sapiens
ttaggtggactaaggaggaatcagagtcttccagtcataatgggtagctttgctgcccca

SEQ ID NO: 15365 - DNA, 60 bp, Homo sapiens
ggaaacgtgtttgcatcagttgataccagaaagggcaagagcactttgaacacagctggg

SEQ ID NO: 15366 - DNA, 60 bp, Homo sapiens
atcacggagaccttcaagagccgaatatccaagctggagatgctacagcaagtcacccaa

SEQ ID NO: 15367 - DNA, 60 bp, Homo sapiens
ccatttctggggcctcatcactgtggaagacggggatagtaagagataagtgggtgggag

SEQ ID NO: 15368 - DNA, 60 bp, Homo sapiens
aagatctcttgttcttccccagtgatgacttttcagcagccacagtttcctgggatatcc

SEQ ID NO: 15369 - DNA, 60 bp, Homo sapiens
atggcttggtaacctgtttgccatggagcactagatggtccttttcactcctcaaaatgc

SEQ ID NO: 15370 - DNA, 60 bp, Homo sapiens
tgaaatactcagaagtaaagtgtgtgggcaatcagaagcatagccttgaaggacctgaca

SEQ ID NO: 15371 - DNA, 60 bp, Homo sapiens
tagttcagaagtggcttgtatgacctgttcaggggtcacatgaggtctcgccagtttcct

SEQ ID NO: 15372 - DNA, 60 bp, Homo sapiens
tcttcatcttcgtgctccagctcttccgcctgaagcagggagagaggtttgtcctaacct

SEQ ID NO: 15373 - DNA, 60 bp, Homo sapiens
aattatgaagcctttgtcaagcacatcatgtcagggtgaagcagagtcttccaggtgcct

SEQ ID NO: 15374 - DNA, 60 bp, Homo sapiens
ggactaagctgaaggtgtacttcaccagcaagagtcaactctagaattcaggatgttcct

SEQ ID NO: 15375 - DNA, 60 bp, Homo sapiens
gtttggacatacctcatgtagatgtggttgtcaactttgacattcctacccattccaagg

SEQ ID NO: 15376 - DNA, 60 bp, Homo sapiens
gtgttaatggtacttctttgtctgctctgcatcgtggttttagtggctaccgagctgtgg

SEQ ID NO: 15377 - DNA, 60 bp, Homo sapiens
gaagcactgctagtggggattatctccacattccttcatgttcacccatttggagcaagc

SEQ ID NO: 15378 - DNA, 60 bp, Homo sapiens
tgaccctggaggtgggcaaggtgatccagcaaggtcggcagagcaaggggcttacgcaga

SEQ ID NO: 15379 - DNA, 60 bp, Homo sapiens
ggacatatacctcctgactgaatactaactggagacctttcatttgctcatggggctgct

SEQ ID NO: 15380 - DNA, 60 bp, Homo sapiens
ccttccattgcagacaaattggatctgtgtaccgactccctcctctaagaaaaggtgagg

SEQ ID NO: 15381 - DNA, 60 bp, Homo sapiens
acccatatgacagaggatctgcttttgcaattgggtcagatggtctttgttgtcaaagca

SEQ ID NO: 15382 - DNA, 60 bp, Homo sapiens
agtagatttgcctagcctgtccacttagctgaataccagtttgaaggaaaacagggtggc

SEQ ID NO: 15383 - DNA, 60 bp, Homo sapiens
cggacactgggccccgcaggcgaaagcacgttccagccaccaggaggccacctattgttt

SEQ ID NO: 15384 - DNA, 60 bp, Homo sapiens
ttacggagccgatggctgacgtatttcatggcagtcaagtccaatggcagcgtcttcgtc

SEQ ID NO: 15385 - DNA, 60 bp, Homo sapiens
ccccgctgtcatttcagtctcttcattttgtcatacggcctaaggctttaaagagcaata

SEQ ID NO: 15386 - DNA, 60 bp, Homo sapiens
cgcagtttgcactttcaagacagcttctctaaggctggcatgttatctccttgctttgct

SEQ ID NO: 15387 - DNA, 60 bp, Homo sapiens
cagcaatctaagtccagaagaagagcagggactgtggaaacagagccataaatcctctgc

SEQ ID NO: 15388 - DNA, 60 bp, Homo sapiens
gagacatgtaggaaacacctttcagacccaggctctgaagattcccagaagccacaagga

SEQ ID NO: 15389 - DNA, 60 bp, Homo sapiens
cccagagtgtttctgtgtgaaaccctctcatttacactgtggcatcaaaatccacaaaag

SEQ ID NO: 15390 - DNA, 60 bp, Homo sapiens
cctacttagcctacctagatttctcatgacgagttaatgcatgtccgtggttgggtgcac

SEQ ID NO: 15391 - DNA, 60 bp, Homo sapiens
gtcagaagcacagatatcctggtttgctcctgaggatcatggatacggtactgaagtttc

SEQ ID NO: 15392 - DNA, 60 bp, Homo sapiens
atggacctggcggggaacatcgactacaagtcactgtgctacatcatcacccatggagac

SEQ ID NO: 15393 - DNA, 60 bp, Homo sapiens
cagctggttctcaggtatcttgttccatgtaaccacgttatgctgagccagaagccggct

SEQ ID NO: 15394 - DNA, 60 bp, Homo sapiens
ccaggtgggtgtggcctgtgttttcccttctgttctttctgcctgtactggatctgttat

SEQ ID NO: 15395 - DNA, 60 bp, Homo sapiens
ctccgtggagaaactcttcagatggtcattgtgtacctactctctcttcaaaggaagttg

SEQ ID NO: 15396 - DNA, 60 bp, Homo sapiens
tctcaggaagtgggtcaagccctgggaaccctcatccatgagagctcgatcccgtatgaa

SEQ ID NO: 15397 - DNA, 60 bp, Homo sapiens
tcacttagtacctgtttgaccaaggtgttaaggggatagtacctcccaattcaagcagag

SEQ ID NO: 15398 - DNA, 60 bp, Homo sapiens
ctgcagggtgtatgtgggtatttgtcggcaactcggagacttggaaagagctcgtttgtt

SEQ ID NO: 15399 - DNA, 60 bp, Homo sapiens
gcgacgactacgagataaacatctcaaagagattcaggacctgcagagtcgccagaagca

SEQ ID NO: 15400 - DNA, 60 bp, Homo sapiens
gacagacatgggagggaggacagggaaggccaggcttgctctgggacttttatgctccca

SEQ ID NO: 15401 - DNA, 60 bp, Homo sapiens
aggagcagcagcttggggagagggatttccctgcagacctcaagccatcatgcggtgggt

SEQ ID NO: 15402 - DNA, 60 bp, Homo sapiens
ggggagcttaagtgagccttgactttgcagctggttgagaacaggttggaggagggttta

SEQ ID NO: 15403 - DNA, 60 bp, Homo sapiens
gcaaagaagagaactaggaacctgtggtgagggaactggggacaggaatgggtttgaatg

SEQ ID NO: 15404 - DNA, 60 bp, Homo sapiens
cttttcccttcaagtgtgaaggaaggtgtgatgaatgctgtggagaggcatctggaacag

SEQ ID NO: 15405 - DNA, 60 bp, Homo sapiens
tctgccagctttgcaccagcgtggcggtgtttactggcgccttgatctatgccattcacg

SEQ ID NO: 15406 - DNA, 60 bp, Homo sapiens
gtcaaaggtttgcactgagctggacaatcacttggggatcaacgacaaggaccttgctga

SEQ ID NO: 15407 - DNA, 60 bp, Homo sapiens
tgtgccaacaacgggacctgcgtgagcctggacgatggcctctatgaatgctcctgtgcc

SEQ ID NO: 15408 - DNA, 60 bp, Homo sapiens
tatgaacctggggagattatgtgctttcccaagcgttccaccaccctctcagttttgtcc

SEQ ID NO: 15409 - DNA, 60 bp, Homo sapiens
tcctgtcagggaccagatgtgtcctgcctcatccctagctccaatcccttccccacgtga

SEQ ID NO: 15410 - DNA, 60 bp, Homo sapiens
gccaggacctgccaatgattccagacgaccttttgttttcctaccgacgtttcctcgttt

SEQ ID NO: 15411 - DNA, 60 bp, Homo sapiens
tgcagaaggctctgaccgcctgtgaacatgaccgccaagtactccaggaacggctggatg

SEQ ID NO: 15412 - DNA, 60 bp, Homo sapiens
tgtcctttacgcccgacttcctgcagaacgtctccatgcagaagctgtgtgtctacctga

SEQ ID NO: 15413 - DNA, 60 bp, Homo sapiens
gaaaccaatgccgtagatgaaccctacaaaatccatggcctggaagatgaagtccagcca

SEQ ID NO: 15414 - DNA, 60 bp, Homo sapiens
gccaccaactctggcttagttaagtgagagtgtgaactgtgtggcaagagagcctcacac

SEQ ID NO: 15415 - DNA, 60 bp, Homo sapiens; identical to SEQ ID NO: 4855

SEQ ID NO: 15416 - DNA, 60 bp, Homo sapiens
gccagatgaccagtatcacccaaaatgacatcatcagtaccctgcaatccctcaatatgg

SEQ ID NO: 15417 - DNA, 60 bp, Homo sapiens
agcccaccagctcagatggttgatcttaccataccctcatagtaccaagaatggactgcc

SEQ ID NO: 15418 - DNA, 60 bp, Homo sapiens
tgaagttcatgatcagaaagcagatgtgtcagcttggaaggacctgtttgttcccaggcc

SEQ ID NO: 15419 - DNA, 60 bp, Homo sapiens
ccgtgactccggataagcggaaagggctggtgtacattcagcagacggacgactcgctta

SEQ ID NO: 15420 - DNA, 60 bp, Homo sapiens
ccccaatgaacatctgcactaggcccaagccttggagtaatttacctgaagagtgacacc

SEQ ID NO: 15421 - DNA, 60 bp, Homo sapiens
gtggctactcctgacgaacaaaacagggatttggacatgttcatcaatgcctccaagaat

SEQ ID NO: 15422 - DNA, 60 bp, Homo sapiens
ttgggttggagtatcactgactgtggcctctctgacttcaagtgcttggtgtaattcaca

SEQ ID NO: 15423 - DNA, 60 bp, Homo sapiens
aaaggttaggtaacacacatagggctgttacggactgagaagtgtccctgcaaaattcac

SEQ ID NO: 15424 - DNA, 60 bp, Homo sapiens
aaagttacggggcttcgttgaatgctccttcccctaggcagctggtaatagaggggtaaa

SEQ ID NO: 15425 - DNA, 60 bp, Homo sapiens
cttctttcccatgcatttccaagccttccacccagctgtggccccaccacaagggcctgg

SEQ ID NO: 15426 - DNA, 60 bp, Homo sapiens
ttcgacccagcacggggcatggagtacaccctggacctgctgttggaatgtgtgacacag

SEQ ID NO: 15427 - DNA, 60 bp, Homo sapiens
taacttgacttgtgcgctccataacgacggcatctacatcatgagcagagacgtcaccct

SEQ ID NO: 15428 - DNA, 60 bp, Homo sapiens
ggatcctttggagttgtttctacccattccagcacgttggatgaggaagtcagtgagagg

SEQ ID NO: 15429 - DNA, 60 bp, Homo sapiens
tcgaaatcgtggcatctcacttctgagaacgaaatctcgcttcagtcactctgccgaagg

SEQ ID NO: 15430 - DNA, 60 bp, Homo sapiens
ggggcagagaagtccaacccctccaagcgacaccgggaccgcctcaacgccgagttggac

SEQ ID NO: 15431 - DNA, 60 bp, Homo sapiens
gttgcctttacctagcattccctggtgaagtgttgcaggttgtgaactctgtagacatct

SEQ ID NO: 15432 - DNA, 60 bp, Homo sapiens
gtttcgatcctacctatgtcttctccaatactgagaccccctctacctcccaataacagc

SEQ ID NO: 15433 - DNA, 60 bp, Homo sapiens
ggactactacagcggcgtgagtgcctccatgaacacggatgaggagttcgtggccatgat

SEQ ID NO: 15434 - DNA, 60 bp, Homo sapiens
ctggccagtttttcatgcatgcagcttgacgattgagcacagtcaggcctttgtattaaa

SEQ ID NO: 15435 - DNA, 60 bp, Homo sapiens
gttcaagggtgtgagaacatgtgcccatctatgaacctcttctcccatggaacgaggatg

SEQ ID NO: 15436 - DNA, 60 bp, Homo sapiens
tgggctccctgacatcccttccaggcaacctgaaagcactgaaatagcttatggccctgt

SEQ ID NO: 15437 - DNA, 60 bp, Homo sapiens
ctctagatggatgtgaactccttaactcatcaagtaaggtggtactcaagccatgctgcc

SEQ ID NO: 15438 - DNA, 60 bp, Homo sapiens
cattctctgaaaaccttgatcctgaggattcatgcttaacaagtctagcatcatcatcac

SEQ ID NO: 15439 - DNA, 60 bp, Homo sapiens
atcaagcaaccttttcttgcggcccaattttagctcccttggcccatcgccctaataggg

SEQ ID NO: 15440 - DNA, 60 bp, Homo sapiens
tggcactttaccattagacaataccgagagttagtcccgagaagcatcctagccatgcat

SEQ ID NO: 15441 - DNA, 60 bp, Homo sapiens
atcgacaacatccgtctctgcttccatggcctctcgtcggcagtgaagctcaagttgcta

SEQ ID NO: 15442 - DNA, 60 bp, Homo sapiens
atctgtcaacccacttgactgtgtgggtgcattgagaacacaaagtttcctagacacaca

SEQ ID NO: 15443 - DNA, 60 bp, Homo sapiens
acttaggctgcgtgggacaagggctgtgttgtcacagcaggaataggttttcctctgttg

SEQ ID NO: 15444 - DNA, 60 bp, Homo sapiens
cgtggggactccaggccgtatcctagccctggctcgaaataagagcctcaacctcaaaca

SEQ ID NO: 15445 - DNA, 60 bp, Homo sapiens
cttcaaggaaaacaactctatgctgtgtccatggctccagcaccagaacagatagtgaca

SEQ ID NO: 15446 - DNA, 60 bp, Homo sapiens
agagttgtacaaatgatgacagcaaagtgaagaccttgtacagaatgtgttaaatttctt

SEQ ID NO: 15447 - DNA, 60 bp, Homo sapiens
agctgtatccctaaacaacctgatctatgttgccggtggactgaccaaggcaatatactg

SEQ ID NO: 15448 - DNA, 60 bp, Homo sapiens
tactttgaccgcaactatgggcttcgcacattcctgttctgcacgccgttcacgccggat

SEQ ID NO: 15449 - DNA, 60 bp, Homo sapiens
cctctgcttgaggagaaagtctagttcattgctactgccaagagctagttcttgtgttca

SEQ ID NO: 15450 - DNA, 60 bp, Homo sapiens
gacctgattttggaggattaggagaagaagctgaatttgttgaagttgagcctgaagcta

SEQ ID NO: 15451 - DNA, 60 bp, Homo sapiens
ttcgggagcagctggaaggagtgaaccgcagcattgaggaggttgaggccgacatgaaga

SEQ ID NO: 15452 - DNA, 60 bp, Homo sapiens
cccagaatctgtctcaggaagggtaaggttctcagacactgccgacatcagcattgtctc

SEQ ID NO: 15453 - DNA, 60 bp, Homo sapiens
gctttggacccaaggaaaactgcatggagacgcatttcggttgagaatggaaaccacaac

SEQ ID NO: 15454 - DNA, 60 bp, Homo sapiens
ccacaagagaacgacctcctgggtgtaagaccgtgtttgtcggaggattaccagaaaatg

SEQ ID NO: 15455 - DNA, 60 bp, Homo sapiens
ccacctagcgtaatacagtgtcatatgcatgcttgccctgctgatgtgtcatggcatcag

SEQ ID NO: 15456 - DNA, 60 bp, Homo sapiens
acgttcaaaagctatgatgaggctggaacagggctgctaagcgtcgcagatttcaggacg

SEQ ID NO: 15457 - DNA, 60 bp, Homo sapiens
agacctcagccaggtcttctggagatgacatttgaggactgatggccaaagagcatgggg

SEQ ID NO: 15458 - DNA, 60 bp, Homo sapiens
tcctatatccatcgctctggacgcacaggtagagctggacggacagggatttgtatatgt

SEQ ID NO: 15459 - DNA, 60 bp, Homo sapiens
ccaaagaagcattcggttagcacaagtgatagaaaccaggaggagagacagtgcattaag

SEQ ID NO: 15460 - DNA, 60 bp, Homo sapiens
gtattttattatcttgtccaggacctgaagtgtttggtcttcagtcttattggattacac

SEQ ID NO: 15461 - DNA, 60 bp, Homo sapiens
ccaagtttgccctttcctaagctgttttaatcaatctgcttcaatggaggagctcacaca

SEQ ID NO: 15462 - DNA, 60 bp, Homo sapiens
gtcggtgatgtccttcgagctctgggcacaaatcccaccaatgcagaggtcaggaaagtt

SEQ ID NO: 15463 - DNA, 60 bp, Homo sapiens
gccagcattggagaagaagctgctgagcatggctttctgtagtctttagcaagacacaag

SEQ ID NO: 15464 - DNA, 60 bp, Homo sapiens
acacggcatctcgtcctactttccagtccaggcagctgtgattcctgccctcctggagag

SEQ ID NO: 15465 - DNA, 60 bp, Homo sapiens
gcctccatctggaaatgggaggatgaagaggctagaatcatctttcctagtgatcctgac

SEQ ID NO: 15466 - DNA, 60 bp, Homo sapiens
cttcttatgaagacttttactaatatggctttttccaggcttcccaaactgtatttcagg

SEQ ID NO: 15467 - DNA, 60 bp, Homo sapiens
gggtttcgactggtccagctctgacatcccttcctggaaacagcatgaataaaacactca

SEQ ID NO: 15468 - DNA, 60 bp, Homo sapiens
agggaagattgttgatcgaatcgacaatgatggggatggctttgtcactactgaggagct

SEQ ID NO: 15469 - DNA, 60 bp, Homo sapiens
atgaggctttcctgggacgggaagtggccaaggaattcgaccaactcaccccagaggaaa

SEQ ID NO: 15470 - DNA, 60 bp, Homo sapiens
caccaggggaatgggtacaagggggcttttggaaaccctcacatgaaactttctgtgaag

SEQ ID NO: 15471 - DNA, 60 bp, Homo sapiens
gacaaacacaggaataccccgagataatgtgagcagtatctccaaagtccaggctgagtc

SEQ ID NO: 15472 - DNA, 60 bp, Homo sapiens
gattgcctttgcactcagtgtaagtttctgtcagcagtagtttcacccatttgcatggaa

SEQ ID NO: 15473 - DNA, 60 bp, Homo sapiens
atacagtgtcactgcagcagttcatctacgagaagctcaaggcacagcaggagatgctag

SEQ ID NO: 15474 - DNA, 60 bp, Homo sapiens
atccgggatttatgcgggggcggggaaaaggcatgaatggcactggtcatgatgtccggg

SEQ ID NO: 15475 - DNA, 60 bp, Homo sapiens
ggttaggtcagccaatgtcagctgcttctcttggggccctctcagagtctatctccccaa

SEQ ID NO: 15476 - DNA, 60 bp, Homo sapiens
gctcactcatccgtccaggaggtgggtctcatggtttcattttgctttgggcttacttag

SEQ ID NO: 15477 - DNA, 60 bp, Homo sapiens
tcatgagccaactcaagaagaagagggcagccactacattagatgagaagattgagaaag

SEQ ID NO: 15478 - DNA, 60 bp, Homo sapiens
ttgtgacttccaagaacgagtgtctctggaccgacatgctctccaatttcggttaccctg

SEQ ID NO: 15479 - DNA, 60 bp, Homo sapiens
tttagaaaccccagagacacccgtgtagatgggtacatcacggcttctctcccacgttaa

SEQ ID NO: 15480 - DNA, 60 bp, Homo sapiens
gaccaatggcgtcttcaatccagcgaaagaattgattgctaaactagagaagcatcgagc

SEQ ID NO: 15481 - DNA, 60 bp, Homo sapiens
ctcatgtggagactggctataaactgaaaagtgtattccaaattgcagaacacatcacac

SEQ ID NO: 15482 - DNA, 60 bp, Homo sapiens
ctcacccaagttggccacttacgctaatcctggaagtatgatcacttttgaacctgcccc

SEQ ID NO: 15483 - DNA, 60 bp, Homo sapiens
atgttccgaaagctgcccttccaagcagtcacagctcaacttgcaggagtgaagtgcaac

SEQ ID NO: 15484 - DNA, 60 bp, Homo sapiens
cttggcaccccctgatgccagcatcctcatcagcaatgtgtgcagcatcggggaccatgt

SEQ ID NO: 15485 - DNA, 60 bp, Homo sapiens
caggcccctgtaaagatagctgtcattttcaagcagctgagagttctcattgattcagtt

SEQ ID NO: 15486 - DNA, 60 bp, Homo sapiens
ggcctcctctttagcaggaattcacaacagtttggatgccctaaacttctgtagctcagg

SEQ ID NO: 15487 - DNA, 60 bp, Homo sapiens
agagaaacgcacagcaactcgcatggaggaatcggcgaaatggctccgaccgcggcgcta

SEQ ID NO: 15488 - DNA, 60 bp, Homo sapiens
ccctgtagctctgaatgctatttgtgtaactgaaaggttgcactctagggtgaaccaagc

SEQ ID NO: 15489 - DNA, 60 bp, Homo sapiens
cggcatgagagtggtgaacactttaggtcactattagggtatgatcctcagatcctgcaa

SEQ ID NO: 15490 - DNA, 60 bp, Homo sapiens
agaccctcagctgctggtatcaaccttatgattggcagtacacggtatggagatggtcca

SEQ ID NO: 15491 - DNA, 60 bp, Homo sapiens
taggctcagtagatgaaggcgtttctgagggcttgcctacacttcaaagcacgtctagca

SEQ ID NO: 15492 - DNA, 60 bp, Homo sapiens
gcatcgccactaccttcatcaacaaagcgtgtgatgagtcagtgctgatggacctcaaag

SEQ ID NO: 15493 - DNA, 60 bp, Homo sapiens
gagctatgttgtacctccggcttattcagctgttaactaccactgtaatgaagttgatcc

SEQ ID NO: 15494 - DNA, 60 bp, Homo sapiens
tctcgcgtatcagaccacaagcaccatcccagtgatgttctggcaggatttgctcaagga

SEQ ID NO: 15495 - DNA, 60 bp, Homo sapiens
aacaactggtaggtcaagaagtaccacctgctgaagagtcaccagaggtgcaaacagagg

SEQ ID NO: 15496 - DNA, 60 bp, Homo sapiens
ctggatggcagagaaatatactatctcaccagtatttgctctcgactcaagaaggttaac

SEQ ID NO: 15497 - DNA, 60 bp, Homo sapiens
ttggtggggtgggtttaggtaattgtttagtctgaggcagctggagatggggttgatacc

SEQ ID NO: 15498 - DNA, 60 bp, Homo sapiens
ccctgaacaggcaccacttactaagagaggatgaatgaaaagcacacctaccctttggcg

SEQ ID NO: 15499 - DNA, 60 bp, Homo sapiens
ctctggtagaaaataatgataacatagatgaaactgaaggctcggaagaggatgataaag

SEQ ID NO: 15500 - DNA, 60 bp, Homo sapiens
gggtggcagtgctgctttaggcccttctggctttggaccttctggaggaagtggcaccaa

SEQ ID NO: 15501 - DNA, 60 bp, Homo sapiens
taggaaacttggttagagcagcacacgtcggagaacaggaggctcacaaaagaacgattt

SEQ ID NO: 15502 - DNA, 60 bp, Homo sapiens
tgttgcagaaactccaactgggtggtccagaaggtgacctggagcagactgacacttatt

SEQ ID NO: 15503 - DNA, 60 bp, Homo sapiens
ttcattgaccagctgattgaggacaagaaggtcctgagtgaaaagtgcgaggctgtggtg

SEQ ID NO: 15504 - DNA, 60 bp, Homo sapiens
agtggacatcagagtcaaaagcactggcaaagggtacccctgcaaacaactgtggtgggg

SEQ ID NO: 15505 - DNA, 60 bp, Homo sapiens
gggagtgggtggggaccttacgtgattcggaacgaggcctaatccagttctcctggtttt

SEQ ID NO: 15506 - DNA, 60 bp, Homo sapiens
ccttcgcaataactgctggaggaattggggatgccaaggagtaggtggtgaattgatgca

SEQ ID NO: 15507 - DNA, 60 bp, Homo sapiens
caccgcagtgccctgttggggagcaaaggagaaatctgtggaccgaagcatacaaatggt

SEQ ID NO: 15508 - DNA, 60 bp, Homo sapiens
aaaggacgctagtcagacaacgctcctcgacttagatgccttggcaagacatttggctga

SEQ ID NO: 15509 - DNA, 60 bp, Homo sapiens
tgttgtaatcagtggagctctggccttcattactgcctcctatgcctgcatcatcctggt

SEQ ID NO: 15510 - DNA, 60 bp, Homo sapiens
actggttctggtcttgagtgcatttaacatcctgacgcctgccttaaccatccttgcttc

SEQ ID NO: 15511 - DNA, 60 bp, Homo sapiens; identical to SEQ ID NO: 4855

SEQ ID NO: 15512 - DNA, 60 bp, Homo sapiens
attacacaacaacttgagggagccttaccatcggtagtcaacgggtctgctttcccctcg

SEQ ID NO: 15513 - DNA, 60 bp, Homo sapiens
ccactccattgtccaactggctctgatacttccactgcccttctgtgaccccaatatcat

SEQ ID NO: 15514 - DNA, 60 bp, Homo sapiens
cgaagaaccttgtggaatccctttgcttaggcccaacctggtcgatagctcgagaaagaa

SEQ ID NO: 15515 - DNA, 60 bp, Homo sapiens
ggggtctatacctatggcttccgaaactctgtgatacagacagctctgacgtttcagctg

SEQ ID NO: 15516 - DNA, 60 bp, Homo sapiens
tgccgacagcctggacttcgatgagaccttcctggccacatccttcctgcagcacccctg

SEQ ID NO: 15517 - DNA, 60 bp, Homo sapiens
tgcagtaggcgatctattggctctcacgccccttgtctgtatcctcgtatcttatggact

SEQ ID NO: 15518 - DNA, 60 bp, Homo sapiens
cagaggaagctacttaggacatcatcttggccatgatcttctgggactcaccatctccag

SEQ ID NO: 15519 - DNA, 60 bp, Homo sapiens
atcacagatgccttctctaagacagctcctgtgtacagcatcgttctttgctgaggcctc

SEQ ID NO: 15520 - DNA, 60 bp, Homo sapiens
ccatgatgttgttcttgggaatgaatccacttatgggacgccgcagacatgctaccctaa

SEQ ID NO: 15521 - DNA, 60 bp, Homo sapiens
ccaggtgaatctcgtcataagtgatctcaggctctcacaggatccggagggaaatgtgtt

SEQ ID NO: 15522 - DNA, 60 bp, Homo sapiens
ctaaaagccccgttaagagcaggaccgcagtggacggctttcagagcgagagccctgaga

SEQ ID NO: 15523 - DNA, 60 bp, Homo sapiens
acaatcaaacaacacacacggagagacgacggcgcacgatcaaggataaacgacccagga

SEQ ID NO: 15524 - DNA, 60 bp, Homo sapiens
gctcgtgctgttcagtgcagctggaagtgtcttttgctgcggtcttgattttgggtactt

SEQ ID NO: 15525 - DNA, 60 bp, Homo sapiens
gtaaattacagtcatatttggcagaaagaccagccctacaaagttcctttaaactcacag

SEQ ID NO: 15526 - DNA, 60 bp, Homo sapiens
gcgtgcatgatgggtgtgaccttctgtgccaataaccttgtcaaccactacatgtgtgac

SEQ ID NO: 15527 - DNA, 60 bp, Homo sapiens
atgggttccctgctcgagaccttgactgttttgaggctgtccttctgcaccaaaatggaa

SEQ ID NO: 15528 - DNA, 60 bp, Homo sapiens
gtggggagtgaagtttactcaactgagatcaagaagacagaggtgctgatggagaacttc

SEQ ID NO: 15529 - DNA, 60 bp, Homo sapiens
tggagtgattccaactcaactcaaaggacacccagagctgccatctggtatctgccagtt

SEQ ID NO: 15530 - DNA, 60 bp, Homo sapiens
cgcacagaaggccaatgcccacggcttcatcatggaactccaggacggctacagcacaga

SEQ ID NO: 15531 - DNA, 60 bp, Homo sapiens
caggggcccgggatgtgattcaggacactttccatcctaggaataaagggtagtgcaatc

SEQ ID NO: 15532 - DNA, 60 bp, Homo sapiens
gctggtacaataccaactccccttctagttcccaaaggcgatgtccagacacagacttta

SEQ ID NO: 15533 - DNA, 60 bp, Homo sapiens
tggctccccagggatccatgtgagagaccggagtatgatcctcagtgcgaggacaaataa

SEQ ID NO: 15534 - DNA, 60 bp, Homo sapiens
ggaacagagctggattccttgtgcctcatatgccccaatgctggtctcagtaaaacactg

SEQ ID NO: 15535 - DNA, 60 bp, Homo sapiens
tattatgtattagatatcgctataagtggacatgcgtacttacttgtaaccctttaccct

SEQ ID NO: 15536 - DNA, 60 bp, Homo sapiens
cccctggatctgagcaatggaaatttcaggaattaagtcaaccacgttctcataccagcc

SEQ ID NO: 15537 - DNA, 60 bp, Homo sapiens
gcctcctctgaagggaactcttctgatgattctgaagatgagcgagttaagcgtcttgca

SEQ ID NO: 15538 - DNA, 60 bp, Homo sapiens
caggagagcgagatggaagaactaccgagtgtgtagacggccagctaccccctatctact

SEQ ID NO: 15539 - DNA, 60 bp, Homo sapiens
tgccctgagcaccaatcacgagaccatcgacctgcttgtccagatcctccggaattgttt

SEQ ID NO: 15540 - DNA, 60 bp, Homo sapiens
ggcagatactgattgtactgtctgatgttgtgaaatagccaatctccaccagtcctgtat

SEQ ID NO: 15541 - DNA, 60 bp, Homo sapiens
tgcacttactgcatggtcagaccacgtcactacatttctatgcaaggggacagcaaggca

SEQ ID NO: 15542 - DNA, 60 bp, Homo sapiens
gggctggtgtggttgcaaatgatgccggtgaccgagttactccagctgttgttgcttact

SEQ ID NO: 15543 - DNA, 60 bp, Homo sapiens
gccaagcaaaacagagaaatcatagttatgcactgtaccaaattagctcccaaaagaaag

SEQ ID NO: 15544 - DNA, 60 bp, Homo sapiens
cctgcatacatgctctccctctcattgaaaggtttcttagtctagctctgctcatgaatg

SEQ ID NO: 15545 - DNA, 60 bp, Homo sapiens
tcttctagtcaagatgagtgataagccagacttgtcggaagtggagaagtttgacaggtc

SEQ ID NO: 15546 - DNA, 60 bp, Homo sapiens
acaactcggtggtggccactgcgcagaccagacttcgctcgtactcgtgcgcctcgcttc

SEQ ID NO: 15547 - DNA, 60 bp, Homo sapiens
gtgcatggagatttgtttgagatgagaaaccttaagtttgcacacctgttctgtagaagc

SEQ ID NO: 15548 - DNA, 60 bp, Homo sapiens
ggtagaggttacaaccctagactaacggtaattgtggtgaagaaaagagtgaacaccaga

SEQ ID NO: 15549 - DNA, 60 bp, Homo sapiens
cccctttccactggctttttggagaaaacagctggtccaggcttttctgtcatgcttgtt

SEQ ID NO: 15550 - DNA, 60 bp, Homo sapiens
aacagctgaaaatggccttgttgcctgtgtagagcaagttacggtggtactgccactctg

SEQ ID NO: 15551 - DNA, 60 bp, Homo sapiens
gggaccaaatgaaacttgacagtatcctgaggagaccttatgttacctgccaaccatttt

SEQ ID NO: 15552 - DNA, 60 bp, Homo sapiens
tcgggtgccatatgaggaaatcagaatgatgatattggaagtagatgaaacacggttggc

SEQ ID NO: 15553 - DNA, 60 bp, Homo sapiens
caaaaatgcggacatgtcggaagagatgcaacaggactcggtggagtgcgctactcaggc

SEQ ID NO: 15554 - DNA, 60 bp, Homo sapiens
acaactttggccatgaaggtcttggactcttattggatgagctggaaaagcttctggaca

SEQ ID NO: 15555 - DNA, 60 bp, Homo sapiens
gacctgcttgctagagaactgtgaacatgtggctctggatagagtgactgctgctccata

SEQ ID NO: 15556 - DNA, 60 bp, Homo sapiens
ggtcgtagccttttaggtggaagaagtgagggtgcagcgtgtcagacacaacattcatgt

SEQ ID NO: 15557 - DNA, 60 bp, Homo sapiens
tcttggcaccttgacttgcaccctctgaggttccaactcagtcattctttgtccagcaga

SEQ ID NO: 15558 - DNA, 60 bp, Homo sapiens
cagatgctgttgttgttacttccctccaagaggctggaaaagggctcagagctgctgagc

SEQ ID NO: 15559 - DNA, 60 bp, Homo sapiens
gcaaagtcctgcctttcgggaagacttggaatgccttattcaagaacagatgaagaaagg

SEQ ID NO: 15560 - DNA, 60 bp, Homo sapiens
gctcgaaggaaagacttggcgctttggacagttcaacgtcagtatggtgtcagcgttaca

SEQ ID NO: 15561 - DNA, 60 bp, Homo sapiens
agccatcattgtgggtagcatcatcaccaagtgctccatccctgtgttgcactccagtgc

SEQ ID NO: 15562 - DNA, 60 bp, Homo sapiens
cttccagcaatatccacaaattctccaactgtgacacttcactctcaccttacatgtccc

SEQ ID NO: 15563 - DNA, 60 bp, Homo sapiens
gctcttgaagaaatgcgtaagaagatgcaccaaaaataaaatctcctgtaaagacttcag

SEQ ID NO: 15564 - DNA, 60 bp, Homo sapiens
gagcacttggtttcacagaatggccttaccacagtaagcaccacctactctcaaatgagc

SEQ ID NO: 15565 - DNA, 60 bp, Homo sapiens
gctcatcgtgggacacaaaatccttctcaagatcaggggaatagcccatctggaaaggga

SEQ ID NO: 15566 - DNA, 60 bp, Homo sapiens
aagttttctgccatcccgtgacggaccagagcctgatagtggaacttctcgagctgcagg

SEQ ID NO: 15567 - DNA, 60 bp, Homo sapiens
ctatgctgggaatctgtcaagcaaaagatgcccagaaagagaacttgcagctcaatccac

SEQ ID NO: 15568 - DNA, 60 bp, Homo sapiens
gtaacgcaacaactgcgaaatgctgaactgatagacccatcattccaatggtatgggcct

SEQ ID NO: 15569 - DNA, 60 bp, Homo sapiens
catggacatttcatgtcaggattgcaagcattagctatcacagcaaaggattcctagcct

SEQ ID NO: 15570 - DNA, 60 bp, Homo sapiens
ctctgcgccatggagtgtccagcaggtaccatatatcagagctgtatgacaccctgccca

SEQ ID NO: 15571 - DNA, 60 bp, Homo sapiens
catgccacttgaagatttctctgagatcatgagtttgtttacacttgtctcaagcctatc

SEQ ID NO: 15572 - DNA, 60 bp, Homo sapiens
ccctgtttgcatgaagtcagttatgctatgaccttctggcacaataaaggcttcactttc

SEQ ID NO: 15573 - DNA, 60 bp, Homo sapiens
ctgtctgtcttgtcacatgtctgccttcctgagacctgcaatatgaaggggatctgcaat

SEQ ID NO: 15574 - DNA, 60 bp, Homo sapiens
tttatgctgtgccaggcactgagcaaacggaagcagttggtggtctttcttccaaaccag

SEQ ID NO: 15575 - DNA, 60 bp, Homo sapiens
ctttcagtcaggcaacaatgaagagccttatgtcagtatcaccaagaagaggcaaatgcc

SEQ ID NO: 15576 - DNA, 60 bp, Homo sapiens
gcaggtgtggtggcaactctaggcttcatctactacctgtacgagaaaaggactgtgtca

SEQ ID NO: 15577 - DNA, 60 bp, Homo sapiens
agagggatggacaagctgtgctggagaatgtgtcagagggtggcaaggaacttcctggct

SEQ ID NO: 15578 - DNA, 60 bp, Homo sapiens
ctcgtggggagttccaggacttgcttcatgcttgagaatgcagatgtggtgcttctcatt

SEQ ID NO: 15579 - DNA, 60 bp, Homo sapiens
cccggagagttaccactccttcatgtggaacaacttcttcaagcacattgacatccaccc

SEQ ID NO: 15580 - DNA, 60 bp, Homo sapiens
gcgatgagcaacctgaaagtgagagtgaacctaaagggtagtctggacaacagagatgcc

SEQ ID NO: 15581 - DNA, 60 bp, Homo sapiens
gcactgaggccacagatgtgagtaagcgagacacaacacttgtcctcttggaggttacat

SEQ ID NO: 15582 - DNA, 60 bp, Homo sapiens
ttgtgcaaaagggtctggctgtcccttgctgttttcatctctgccaagcctattgtgcct

SEQ ID NO: 15583 - DNA, 60 bp, Homo sapiens
taaatactgcaaatcaggcttttgtttcctttttcagatatcttggacaaatcacatatt

SEQ ID NO: 15584 - DNA, 60 bp, Homo sapiens
caagggaacctcctagcactgtgaaagtcagaatcgcctcagcatttccatgacgcacat

SEQ ID NO: 15585 - DNA, 60 bp, Homo sapiens
aagccagtccttttggagggacaggtctgctccagaagagggcataaagacactgctcaa

SEQ ID NO: 15586 - DNA, 60 bp, Homo sapiens
ttccagtggtgctgtacggtcaagtgtgaccagtgtaggcatgtggtgagcaagtattac

SEQ ID NO: 15587 - DNA, 60 bp, Homo sapiens
ggctgtgtgaaacatggttgtaatatgcgactgcgaacactgaactctacgccactccac

SEQ ID NO: 15588 - DNA, 60 bp, Homo sapiens
acccctctggagccagcacagtgctcctccatatcaccagtcatacacagcctcattatt

SEQ ID NO: 15589 - DNA, 60 bp, Homo sapiens
ccgtctgacaaggtggtcaacaacattcctcaaaatgggagatcttctcagccctgaggt

SEQ ID NO: 15590 - DNA, 60 bp, Homo sapiens
tgccatctcctctgccatgaagatacaccattgagacttgactgggcaacaccagcgtcc

SEQ ID NO: 15591 - DNA, 60 bp, Homo sapiens
atcctgaggaagtcaccttccacctctacctgatcccaagtgactgctccattcggaagg

SEQ ID NO: 15592 - DNA, 60 bp, Homo sapiens
cagatggaacagttcacctaaaatgacactgagttgggcaaaacccaggacatctcctgg

SEQ ID NO: 15593 - DNA, 60 bp, Homo sapiens
atgtttgagccagcatgtcgcggaggaagcaagcgaagcctcaacatttccaatccgacc

SEQ ID NO: 15594 - DNA, 60 bp, Homo sapiens
aaagacaggatgaccttggacaaggccaaactgtcctccaagactccttaatgaggggca

SEQ ID NO: 15595 - DNA, 60 bp, Homo sapiens
gctggcccgtagcctgagtcctctcttattctgctatgctgacaaagagcagccaaacct

SEQ ID NO: 15596 - DNA, 60 bp, Homo sapiens
caccaaaccctctccatgtctttacctcccagtcgctctaagaatctgcttgaagtctcg

SEQ ID NO: 15597 - DNA, 60 bp, Homo sapiens
cctttggccgataatcaggatttccctataagtcacttggacattggtcacttgtaggaa

SEQ ID NO: 15598 - DNA, 60 bp, Homo sapiens
gctaatccttctgcttggccttgtcattgtctttggtcctaccatgttcctagaatggtc

SEQ ID NO: 15599 - DNA, 60 bp, Homo sapiens
ttccctggcagaactcctctcagctcctaaagcacaactgtgtgcagatgtgataagtcc

SEQ ID NO: 15600 - DNA, 60 bp, Homo sapiens
acctcggagctccacgagcaggtgacgctgagctacggtatgtttgaaaacaagcggaac

SEQ ID NO: 15601 - DNA, 60 bp, Homo sapiens
gaggacttcagctctgctgttgggctggtgtgtggacagaaggaatggaaagccaaatta

SEQ ID NO: 15602 - DNA, 60 bp, Homo sapiens
acactcagactcaatggactctgcctcaaatcccaccaaccttgtcagcacctcccaaag

SEQ ID NO: 15603 - DNA, 60 bp, Homo sapiens
agaactgcacgggaaacccatagaagttgagcactcggtcccaaaaaggcaaaggattcg

SEQ ID NO: 15604 - DNA, 60 bp, Homo sapiens
ggcatctgtcttgtccctattcctgcagcctgtgctgagggtagcagtgtatgagctacc

SEQ ID NO: 15605 - DNA, 60 bp, Homo sapiens
tgccaagtcccaggactcctggaggaccgccttgtctacctcacaagaaactaggaaatt

SEQ ID NO: 15606 - DNA, 60 bp, Homo sapiens
ggtgtacagtgacaagctgtggatctttgctggctatgacggcaacgccaggttgaatga

SEQ ID NO: 15607 - DNA, 60 bp, Homo sapiens; identical to SEQ ID NO: 4855

SEQ ID NO: 15608 - DNA, 60 bp, Homo sapiens
gggcctcgaagggattcctggagcagcaaccactgcagcgactagggacacttgtaaata

SEQ ID NO: 15609 - DNA, 60 bp, Homo sapiens
aaggaggccctggtacccatccagaaggccacggacagcttccacacagaactccatccc

SEQ ID NO: 15610 - DNA, 60 bp, Homo sapiens
cccagagtctcctaatactggttcccactggatgagacaggagatttcattcgggaaatt

SEQ ID NO: 15611 - DNA, 60 bp, Homo sapiens
atcaccagttccatccctgacacagagcgcctagacgacttccacttgtccatccacagt

SEQ ID NO: 15612 - DNA, 60 bp, Homo sapiens
gaccaagacttttgtctgatcaagtggttttacagctaccacccttaggggtaattggta

SEQ ID NO: 15613 - DNA, 60 bp, Homo sapiens
aaggtcaagctggaggctgagatcgtttttgaactctgaactttttattggcctcctgct

SEQ ID NO: 15614 - DNA, 60 bp, Homo sapiens
gtgtgaagatgcttaatggtgttttgaggcatccctccaacctctgtgactactttatcc

SEQ ID NO: 15615 - DNA, 60 bp, Homo sapiens
aaaatagagctgctttggtgatggatctcatagacctaactcctcgccagaaggagcggg

SEQ ID NO: 15616 - DNA, 60 bp, Homo sapiens
ttcttacttaaacttggtcttctttcaagttgtttgtatgaagatgctgtacccacttga

SEQ ID NO: 15617 - DNA, 60 bp, Homo sapiens
gcaagtacgtgtacttcaccatcgtcaccaccgaccacaaggagatcgacttccgctgcg

SEQ ID NO: 15618 - DNA, 60 bp, Homo sapiens
gatctcgccttgtttcttacaagcaaaccagggtcccttcttggcacgtaacatgtacgt

SEQ ID NO: 15619 - DNA, 60 bp, Homo sapiens
aatcatcggacatttctatgccagtcagatggctcaacggaagatccgagacatcctggc

SEQ ID NO: 15620 - DNA, 60 bp, Homo sapiens
gactgacaaagtcatcctccgtctaccagagcgtgcacttgtgatcctaaaataagcttc

SEQ ID NO: 15621 - DNA, 60 bp, Homo sapiens
ggggtgtgtcatccccggtagaaacaaggacctcatctgaaccagttgcaaaagaaagca

SEQ ID NO: 15622 - DNA, 60 bp, Homo sapiens
gagggagctctggagtgctaacttgaacaccaagggtgctactcatccctatggtatcat

SEQ ID NO: 15623 - DNA, 60 bp, Homo sapiens
cggtactagctaactccaagagatcgttagcagcatcagtccacaaacacttagtggccc

SEQ ID NO: 15624 - DNA, 60 bp, Homo sapiens
ctatcaaggagttctatcaaggcatccatgtcagtggtgctatgctggttacaacttgag

SEQ ID NO: 15625 - DNA, 60 bp, Homo sapiens
aagtttggttcagcttccttagaactgtggctgtactttttgaggagtacctcatagtac

SEQ ID NO: 15626 - DNA, 60 bp, Homo sapiens
ttttgggggcctaacccacgcagtgaccccagagggcagggctaggcgagagcctggggt

SEQ ID NO: 15627 - DNA, 60 bp, Homo sapiens
ggcagcaagagcgcgaatagaactccacgaaacagacttcaatgggcagaagctaaagct

SEQ ID NO: 15628 - DNA, 60 bp, Homo sapiens
gcagaatcactgtggtcagtctcctgtcccagcttcagttcatgaatactcctgttcctc

SEQ ID NO: 15629 - DNA, 60 bp, Homo sapiens
ccgtggcaagatggtatcagagagaaacccatcaattgctcaaatactcagaaagtactg

SEQ ID NO: 15630 - DNA, 60 bp, Homo sapiens
acttgctccccgacaggtggggcacagacctctgttcctgagcagagaagcagaaaagga

SEQ ID NO: 15631 - DNA, 60 bp, Homo sapiens
cagacgccaactcctggtggtcattagctttgaacccggtgcagagacccgagatgttta

SEQ ID NO: 15632 - DNA, 60 bp, Homo sapiens
aaggggtgaagtgtgtggctgggcggattcagcgaagtctcatgggaagcaggacctaga

SEQ ID NO: 15633 - DNA, 60 bp, Homo sapiens
gccacagtgccgtatctgctgcagacatgattgtttcttgttctagaggttttcttgttt

SEQ ID NO: 15634 - DNA, 60 bp, Homo sapiens
gcttgggatcggtgagactgatacagacttgacctttcagggccacagagaccagcctcc

SEQ ID NO: 15635 - DNA, 60 bp, Homo sapiens
gcacagagactttcctctggagacccttctacaagtccatctttgtcccagactacacca

SEQ ID NO: 15636 - DNA, 60 bp, Homo sapiens
taaacatctcttccaaggggatggagagtgggtccctcaacaaagtccctgtccagtcac

SEQ ID NO: 15637 - DNA, 60 bp, Homo sapiens
tcggccaccaactacatcacccggaacaaagcccggaagaagctccagctgagcttggct

SEQ ID NO: 15638 - DNA, 60 bp, Homo sapiens
tcaagaccccacacggtttaagtctatccattgtcttctgtacccagacacggactggtg

SEQ ID NO: 15639 - DNA, 60 bp, Homo sapiens
tggaagctctcacagacctctggctgacccactccctgaaggcactaaacctcatcaact

SEQ ID NO: 15640 - DNA, 60 bp, Homo sapiens
cccaatgcatcaggtgggtaactcctcccacacaaatagtctgcctaccctcaggaatat

SEQ ID NO: 15641 - DNA, 60 bp, Homo sapiens
atccccgaagctccatgctgaggccatcaagcgggatcctaacctgttcccctttgagaa

SEQ ID NO: 15642 - DNA, 60 bp, Homo sapiens
ggcttctactcaagtgaactaagaagaagtcagcaagcaaactgagagaggtgaaatcca

SEQ ID NO: 15643 - DNA, 60 bp, Homo sapiens
tggagcctttctatgctgtcctggaaagccccagcttctctctgatgggcatcctgctgc

SEQ ID NO: 15644 - DNA, 60 bp, Homo sapiens
gaacatgatgtggcccatgcacaccccactgctgctgctgactgccttgatggtggccgt

SEQ ID NO: 15645 - DNA, 60 bp, Homo sapiens
cccagacctcgctggtggtacagaatgtttcagtcatcctgtgtggaatcatcctgatga

SEQ ID NO: 15646 - DNA, 60 bp, Homo sapiens
aaaagccagtctaaaggcctctggatactgggctccccagaactgctggccacaggatgg

SEQ ID NO: 15647 - DNA, 60 bp, Homo sapiens
ccttctaggtgctgttccggtggattctgaaatgcagtagagggcttttgttggcagaac

SEQ ID NO: 15648 - DNA, 60 bp, Homo sapiens
acagcaatgttaaattgccatatgaagagaaacactagtgatgtgcgtggtctccttgcc

SEQ ID NO: 15649 - DNA, 60 bp, Homo sapiens
actttggttccagcatcctgtccagcaaagaagcaatcagccaaaatgatacctggaggc

SEQ ID NO: 15650 - DNA, 60 bp, Homo sapiens
cggtcatcagactgtgcctcaggattgtgttgtgctagacacttctggtccaagatctgt

SEQ ID NO: 15651 - DNA, 60 bp, Homo sapiens
gtgactttccaagagtttaggttgtgctggaggagaggtttccttcagattgctgattgc

SEQ ID NO: 15652 - DNA, 60 bp, Homo sapiens
aattgctgcgatgcgacataagttgtaagggtggacattcaacggtgacagacctgcagg

SEQ ID NO: 15653 - DNA, 60 bp, Homo sapiens
aaaagcagagacttcactcgcttagaccttcctactggtgatggccagccatcccttgaa

SEQ ID NO: 15654 - DNA, 60 bp, Homo sapiens
cagtagtttcagcccacgaccaactcaccagttctctccaccacagatttacccttccaa

SEQ ID NO: 15655 - DNA, 60 bp, Homo sapiens
accttgatatggtgcagtgtgtcctcccaagctcctctcatgctgcctgttctcatgggt

SEQ ID NO: 15656 - DNA, 60 bp, Homo sapiens
tgaactagggcacgtcctcagcatgccccacgacgactccaagccctgcacacggctctt

SEQ ID NO: 15657 - DNA, 60 bp, Homo sapiens
aagccctcgtgaggactcggacctattcggactgattcggcttcccacttcggggaactt

SEQ ID NO: 15658 - DNA, 60 bp, Homo sapiens
acagttgtgctctttcgagatctacgaagttccctgggagaacagaaggtccctggtgaa

SEQ ID NO: 15659 - DNA, 60 bp, Homo sapiens
ttatccggttaagagtctgtgctggttgccacccaagagagaacagttgtccaggatgct

SEQ ID NO: 15660 - DNA, 60 bp, Homo sapiens
tcaggatgctctgacaacatcgcctacggtgtggccttctcacagtcgtttgtggatgtg

SEQ ID NO: 15661 - DNA, 60 bp, Homo sapiens
aatagctgacaaatgacactgattggaaggggaactcaaatgtagctgtttaccctcagt

SEQ ID NO: 15662 - DNA, 60 bp, Homo sapiens
cgacccgagctctttcgtctgcctgccagtttcctgcgtccccggagaggatcctgctga

SEQ ID NO: 15663 - DNA, 60 bp, Homo sapiens
ggatgtgagaatatcatctgtttatggacacatgaaacctcctaatgacctggaattgtt

SEQ ID NO: 15664 - DNA, 60 bp, Homo sapiens
ttcccaccttccaagtgaagctcttcggcatggatcccatggccgactatatgctgctca

SEQ ID NO: 15665 - DNA, 60 bp, Homo sapiens
gcgcgctgtatgaggaggccttcaccgttttccacaagtttgatatgaatgcctcagcaa

SEQ ID NO: 15666 - DNA, 60 bp, Homo sapiens
tgaagaaatgataagaggagtagatgagcttgaaaggcttagggaagagataagaagagt

SEQ ID NO: 15667 - DNA, 60 bp, Homo sapiens
tgccctaccagaggaggtaccgggagcgccgtgacagcgatacataccggtgtgaagagc

SEQ ID NO: 15668 - DNA, 60 bp, Homo sapiens
cggagggtgtatgaccggcgatactgtggcagctacagacgcaacgattatagccgggat

SEQ ID NO: 15669 - DNA, 60 bp, Homo sapiens
gccatcagtccctgttattgagggattatcccttagccaacattcctatctgtgggtggg

SEQ ID NO: 15670 - DNA, 60 bp, Homo sapiens
cacaccaccagaatgtgtctgtccccagcaataatgttcacgcgccttattccagtgaca

SEQ ID NO: 15671 - DNA, 60 bp, Homo sapiens
cctgacgggccttctcagcccgttttgaggacagacagtcccccgaggtaggctacatcc

SEQ ID NO: 15672 - DNA, 60 bp, Homo sapiens
cgtcgctccaattacttccgacttcctccctgtgaaaatgtggatttgcagagacccaat

SEQ ID NO: 15673 - DNA, 60 bp, Homo sapiens
acagtggccttccttgctggtgggcagtgtatcctgatggcagggtacaagtaccattaa

SEQ ID NO: 15674 - DNA, 60 bp, Homo sapiens
ggccctctctgcaccggacagtcggaaaagcgtctttaagagactcactggttttactta

SEQ ID NO: 15675 - DNA, 60 bp, Homo sapiens
ccaagaggccctcattctcatcaaaggctccttccggattctcaagctgattgtcaggag

SEQ ID NO: 15676 - DNA, 60 bp, Homo sapiens
catccactggtactcgcagctgctctaccaaataggcacctggctcctggacagcgaggc

SEQ ID NO: 15677 - DNA, 60 bp, Homo sapiens
actagcgtctgcagcctaagcaggtgctggctcagggttcatcgttctgccttgtccact

SEQ ID NO: 15678 - DNA, 60 bp, Homo sapiens
cagagggaactaagcaaatccaatagagatgtttctggggaaggttttgcagcccactcc

SEQ ID NO: 15679 - DNA, 60 bp, Homo sapiens
cctgatgaccgagcgttgtaaggagcgggtgaacgctttggccattgccgtgatgaacat

SEQ ID NO: 15680 - DNA, 60 bp, Homo sapiens
ccttcagtccaccacagcaaatgtgtgtagatttcatgctcgacacttaccactcaccta

SEQ ID NO: 15681 - DNA, 60 bp, Homo sapiens
ctgggttcatttgtgatgacataagtcagcaaactgcgggaatactgtctcttctatgta

SEQ ID NO: 15682 - DNA, 60 bp, Homo sapiens
tttgaggagatgaatgtggatctgcaggaggagctgccgtccctgtggaacagccgcgta

SEQ ID NO: 15683 - DNA, 60 bp, Homo sapiens
ggaccaagcagagctcacagctggacaggtgttgtatatagagtggaatctcttggatgc

SEQ ID NO: 15684 - DNA, 60 bp, Homo sapiens
cagacagtccctttatggggctcagcaagaggcgagcgtggtgcaatatcccgactgtaa

SEQ ID NO: 15685 - DNA, 60 bp, Homo sapiens
ccagcagggaaatctggcctgagcacaaggatgctttagggagagatcacttcagtgtgt

SEQ ID NO: 15686 - DNA, 60 bp, Homo sapiens
cactgtctatccagctagcgggagcagcatcgactgggcgtatgacaacggcatcaaatt

SEQ ID NO: 15687 - DNA, 60 bp, Homo sapiens
ggtctctaacataccttgtcatagaggaaaagcacagattatacctggatgattcaggag

SEQ ID NO: 15688 - DNA, 60 bp, Homo sapiens
gtgtatcaaacctatccccggatgtgtgagaataatgtgttcataaagcatggatctcgt

SEQ ID NO: 15689 - DNA, 60 bp, Homo sapiens
ttcacaccttttggtgctacccctccccagagttaagcactggatgtctcctgatcccag

SEQ ID NO: 15690 - DNA, 60 bp, Homo sapiens
cagaagagagtatggtttgcagatggtatattgcccaatggtgaagttgcagatacaaca

SEQ ID NO: 15691 - DNA, 60 bp, Homo sapiens
gtttggcctctatagctccttctaccctgtcttcatctacttcctgtttggcacttcccg

SEQ ID NO: 15692 - DNA, 60 bp, Homo sapiens
aactgagagccacggtgatgttgtcataacctcagagtggagaggcagaaaccatgtgca

SEQ ID NO: 15693 - DNA, 60 bp, Homo sapiens
ggcctgtgtgtaagtcaaagtcactcccgcaaacctgaatctcgagctacctattggttc

SEQ ID NO: 15694 - DNA, 60 bp, Homo sapiens
aagagcctctgccatccacttgagggtattgagagccagtgggcttttgtgtagcctttt

SEQ ID NO: 15695 - DNA, 60 bp, Homo sapiens
tttggtgtcggagtcggaggtatccctggagtcgcaggtgtccctggtgtcggaggtgtt

SEQ ID NO: 15696 - DNA, 60 bp, Homo sapiens
gcagctgatgttggaagagaaagcacgtgtctcagactgcatgtaccatttgcatggctc

SEQ ID NO: 15697 - DNA, 60 bp, Homo sapiens
tgcgggccgaatccgagccgagcggagaggaatccggcagtagagagcggactccagccg

SEQ ID NO: 15698 - DNA, 60 bp, Homo sapiens
tcctcgcacctaccccagcaactcaaattcaccacctcggactcctgcgaccgcatcaaa

SEQ ID NO: 15699 - DNA, 60 bp, Homo sapiens
gagatatccctttggaagaccttgcttggaagagcctggacactaacaattctacaccaa

SEQ ID NO: 15700 - DNA, 60 bp, Homo sapiens
gatcagagaagaggctactgggggagaattcagtgcccccttcgccctctagggagcaga

SEQ ID NO: 15701 - DNA, 60 bp, Homo sapiens
aattcctcgcccaccagaacgcatgttctactgaccctcctgtaatggtgataattgggg

SEQ ID NO: 15702 - DNA, 60 bp, Homo sapiens
ttttctgcaccaggctgacggatgcggggatccctccagaagtcatcatgggcatattct

SEQ ID NO: 15703 - DNA, 60 bp, Homo sapiens; identical to SEQ ID NO: 4855

SEQ ID NO: 15704 - DNA, 60 bp, Homo sapiens
ttcaagggttggcatgcagatactgtgcacccaaattccctggagtcacatcccagcacg

SEQ ID NO: 15705 - DNA, 60 bp, Homo sapiens
cagaacaacgacatctccgagctccgcaaggatgacttcaagggtctccagcacctctac

SEQ ID NO: 15706 - DNA, 60 bp, Homo sapiens
gcctctggctctcatggggtccaagttttgtgtattcttcaacctcattgacaagaactg

SEQ ID NO: 15707 - DNA, 60 bp, Homo sapiens
accaagagtagcgcttagcccttacccaggaaatatccttcatggccacagaaatggagg

SEQ ID NO: 15708 - DNA, 60 bp, Homo sapiens
cttctgtggcaacagttctgttgagatattactcgcctgccatacaactcacccatttta

SEQ ID NO: 15709 - DNA, 60 bp, Homo sapiens
tcatggcctgtggtgccaggactgcaccctgaccaccaactccagccattgcaccccaaa

SEQ ID NO: 15710 - DNA, 60 bp, Homo sapiens
actttgtctcctactccatcagcagaagggtaccaggatgttcgggatcggatgatccat

SEQ ID NO: 15711 - DNA, 60 bp, Homo sapiens
gatgtacccggcgcctcagtaccaagggcacttccagctcttccgcgggctccagggacc

SEQ ID NO: 15712 - DNA, 60 bp, Homo sapiens
gcatgatggaaggactctcacttgggcacaagtcacctccaaatgaggacaacagatacc

SEQ ID NO: 15713 - DNA, 60 bp, Homo sapiens
catttcacaacagtgactagttgaatcccttgtaacgtagtagttgtctgctctttgtcc

SEQ ID NO: 15714 - DNA, 60 bp, Homo sapiens
aagctcactgtgtaattagcatttagaagctgaagatccccaactgctccagcctctgcc

SEQ ID NO: 15715 - DNA, 60 bp, Homo sapiens
aatccacaactctgaagagaaactaccaagactcctcctgccccaaacctcgccagagaa

SEQ ID NO: 15716 - DNA, 60 bp, Homo sapiens
tctcatctgttctaccatgccacgaaggtgtatggtgtctcagtactaccaccaccagtg

SEQ ID NO: 15717 - DNA, 60 bp, Homo sapiens
aatactgtggtgtagacggcctggcctgtaccccaacggtctgggagcacctgtctgttg

SEQ ID NO: 15718 - DNA, 60 bp, Homo sapiens
gtggatgcacagtctcactccacatgacctgctctcaatgctggagggaaacaggcaggc

SEQ ID NO: 15719 - DNA, 60 bp, Homo sapiens
ctctggtggatgcaatgatgtttctgaaactgctatgtacaacctaccctgtgtataaca

SEQ ID NO: 15720 - DNA, 60 bp, Homo sapiens
ccctgcctcttgatcaaaggctcctggccagcattacaccctcaccttcaggccaatcca

SEQ ID NO: 15721 - DNA, 60 bp, Homo sapiens
ctccacagccatcgctgccctcaaactttggaatgaagatttccgatatggctactctta

SEQ ID NO: 15722 - DNA, 60 bp, Homo sapiens
tcagtggatcttcggatacgaagaacccagcattcggtgctgtctcggaagtttgtggaa

SEQ ID NO: 15723 - DNA, 60 bp, Homo sapiens
tccaccaaacacggcactacctctgtagcttctctcccagcttgcatgatcccaggctct

SEQ ID NO: 15724 - DNA, 60 bp, Homo sapiens
acacggacgctggacacaccaagggtcgaggcacacggctccaacggacaagaagattac

SEQ ID NO: 15725 - DNA, 60 bp, Homo sapiens
cttctcaggacccatactgtggatggcatagctccaggggctgtgtggatatcaggggat

SEQ ID NO: 15726 - DNA, 60 bp, Homo sapiens
attctactgcaacgtggccaatgccttcctcgtagctcctcagatctactggttctgtct

SEQ ID NO: 15727 - DNA, 60 bp, Homo sapiens
gtggtggaacgttgtcactggggaatcctcacagaccttctacacaaatggaaccaatct

SEQ ID NO: 15728 - DNA, 60 bp, Homo sapiens
ggatctctactgatccagcatgtgatgacctcggacacttcaggcatctgcaacctccgt

SEQ ID NO: 15729 - DNA, 60 bp, Homo sapiens
taagaacaggtttgcagctaccctctctgaccttttccccatatcttgtgctgtccaggg

SEQ ID NO: 15730 - DNA, 60 bp, Homo sapiens
attgtagccacctgtgcaccatgaccatgctggcagagtctttcctgttccccatatgct

SEQ ID NO: 15731 - DNA, 60 bp, Homo sapiens
agcctgcctcgctcactgtcactaccaaagacaaggacgggcggttggtgcgcacaggca

SEQ ID NO: 15732 - DNA, 60 bp, Homo sapiens
taactcatcacttctcccaagcactcgatcccagcttcacccactggtgttgctttgctt

SEQ ID NO: 15733 - DNA, 60 bp, Homo sapiens
caacaactgaaaaggcactctaaattgtggctggcttccctttctgtctgctattgtatg

SEQ ID NO: 15734 - DNA, 60 bp, Homo sapiens
gctaatgcaagctgcaatgccaaatggtactgttcagcgattcctctttaccccattggc

SEQ ID NO: 15735 - DNA, 60 bp, Homo sapiens
cactgatctgctcttgcttttacccggaacctcgcaacatcaacatctatacttacgatg

SEQ ID NO: 15736 - DNA, 60 bp, Homo sapiens
gagctgcataatgtccctctcttggctattgaccatgtggttcacgtacaaaactctgta

SEQ ID NO: 15737 - DNA, 60 bp, Homo sapiens
cgctcgcttgcctagctttacgaatattgctttgttttctgtttatgcatagccttgatt

SEQ ID NO: 15738 - DNA, 60 bp, Homo sapiens
caccatagattccggagaacttgatattggccgaagagcaattcaagagattcctcccgg

SEQ ID NO: 15739 - DNA, 60 bp, Homo sapiens
caatccttacgcaaaatcttacaccctggtataacagacagcatgactggacagcggttg

SEQ ID NO: 15740 - DNA, 60 bp, Homo sapiens
gatacgtgacaatcccagggaccgctgcactgacttcatttccttagacaagacacagtg

SEQ ID NO: 15741 - DNA, 60 bp, Homo sapiens
tgaggtttggctgttgctcctgttatcccaagctctaagcccttcccatggtccccagac

SEQ ID NO: 15742 - DNA, 60 bp, Homo sapiens
tagggcctagatgaggggcaggcagtcaggcagaaatgggcaagttcagggtcagattct

SEQ ID NO: 15743 - DNA, 60 bp, Homo sapiens
aaggtctccttttgtgctcctgaccgcaacctggacaaggctttctcctatatctgtcgt

SEQ ID NO: 15744 - DNA, 60 bp, Homo sapiens
aagacaaaaggtcctgtgctcacctgggacccttctggacgttgccctgtgtacctcttc

SEQ ID NO: 15745 - DNA, 60 bp, Homo sapiens
aagttcgggtcctctgaccccagaagtgtctgtgatgaccctcccaaccttggctatcta

SEQ ID NO: 15746 - DNA, 60 bp, Homo sapiens
atgggacgaaagcctttctctttcaagatactcccagaagcataaaagcatccactgcta

SEQ ID NO: 15747 - DNA, 60 bp, Homo sapiens
gcttccatgtagccctcatccagggaagttttgcgatcctttaggaagacactgtcctct

SEQ ID NO: 15748 - DNA, 60 bp, Homo sapiens
ggggcacagaagatgatggcaaggcagactgggcagtgttttgtagacacagaacaaaga

SEQ ID NO: 15749 - DNA, 60 bp, Homo sapiens
actggctgcagggacctggaggtctgcaccagttccagtgaccactcagaacccacctgg

SEQ ID NO: 15750 - DNA, 60 bp, Homo sapiens
ttagattccgtagttcgtgggtatcagtttcggtagaggtgcagcatcgtgacacttttg

SEQ ID NO: 15751 - DNA, 60 bp, Homo sapiens
cctgttcatgtccaacgccatgcggctgaaggcggtgctggagcagggaccatcctctca

SEQ ID NO: 15752 - DNA, 60 bp, Homo sapiens
gtaagggcacaaacttcacttagggcatcgcagatgtttgcagaatggttggcctaatga

SEQ ID NO: 15753 - DNA, 60 bp, Homo sapiens
tgaaatcatcctaaccctgggacaggcattcgaagtcgcttaccagctagcactacaagc

SEQ ID NO: 15754 - DNA, 60 bp, Homo sapiens
tgacttaagatcccacacctcacaaacctacagcccagaaaccagaagcccctatagagg

SEQ ID NO: 15755 - DNA, 60 bp, Homo sapiens
ccctcctggtgataacccattttacagggatgaagaaagaccaatgctgctttaaggctt

SEQ ID NO: 15756 - DNA, 60 bp, Homo sapiens
atttcctcctagatgcccttttggcctttgtgagggagcgaggaacaggctcgaaggctc

SEQ ID NO: 15757 - DNA, 60 bp, Homo sapiens
agccaagctgaatcccacactccaggtctgtgctcaagagaccagatggtgtatttccaa

SEQ ID NO: 15758 - DNA, 60 bp, Homo sapiens
tattttgccacgttctggactgtcttctccctgcacaagccagggtgtgtctcggtagct

SEQ ID NO: 15759 - DNA, 60 bp, Homo sapiens
tagtgacaccagtggttcgtcagctcctgtgcattctcctctaagaactcacctccgtta

SEQ ID NO: 15760 - DNA, 60 bp, Homo sapiens
aaaagcccaaatgctgctgtggttcaaccaggcaagatcatccggtgaaagaaccagtcc

SEQ ID NO: 15761 - DNA, 60 bp, Homo sapiens
gtcatccactacttggctataagctccagaagtgacaagacacttcacatcttaaatatg

SEQ ID NO: 15762 - DNA, 60 bp, Homo sapiens
ctgctggcgttggacaggttttaacttcggcttcgacctacttgtaacttacaccaatcg

SEQ ID NO: 15763 - DNA, 60 bp, Homo sapiens
ggcagcagtgctgaagctgagaggctcatgacagcagttggacagatactggaggagaac

SEQ ID NO: 15764 - DNA, 60 bp, Homo sapiens
atgctcttcacagctactgttaccgacttcctagccattgatgctgtcatctaccgcagc

SEQ ID NO: 15765 - DNA, 60 bp, Homo sapiens
tttaccaacttctcagagtccttctagccccctcttcacttctgaaagatgggatttacc

SEQ ID NO: 15766 - DNA, 60 bp, Homo sapiens
tcagaattcagggaagagactgtcgcctgccttcctccgttgttgcgtgagaacccgtgt

SEQ ID NO: 15767 - DNA, 60 bp, Homo sapiens
gcaagatgccaaccttttgaagtagtgagcagccaagatatggctagagagatcatcata

SEQ ID NO: 15768 - DNA, 60 bp, Homo sapiens
agatggctggctgtcatagctctatagatgtggctaaatctctgctggcatgggtagcag

SEQ ID NO: 15769 - DNA, 60 bp, Homo sapiens
ggggtgtaaaagagagtcacaggtaccccaaggagtagatgccagggtcctaagttgaaa

SEQ ID NO: 15770 - DNA, 60 bp, Homo sapiens
agtgagaaggcacccctccgtgtggagcacgtggagatagtgccaggtggctcagtgcca

SEQ ID NO: 15771 - DNA, 60 bp, Homo sapiens
aggatgtcaacgagtgtggccagaagcccaggctttgccgccacggaggcacctgccaca

SEQ ID NO: 15772 - DNA, 60 bp, Homo sapiens
ctgtggagtcacacgtttatgtagtagaagatggagcaacagttttctgtattgtgcaac

SEQ ID NO: 15773 - DNA, 60 bp, Homo sapiens
aagaactgcaatgccatccgccacttcgagaacaccttcgtggtggagacgctcatctgc

SEQ ID NO: 15774 - DNA, 60 bp, Homo sapiens
tcctagcagagtcagcacatgaacaagatctaagtcatttcttgatgtgagcactggagc

SEQ ID NO: 15775 - DNA, 60 bp, Homo sapiens
atccctgaggagcacagacaggcaattccagaaagtgaagctgaagaccaggaacgggaa

SEQ ID NO: 15776 - DNA, 60 bp, Homo sapiens
ccttttggtaatgctgtttctgcttaagttggcaagacactccaagtttggcatgaaagg

SEQ ID NO: 15777 - DNA, 60 bp, Homo sapiens
taggaacttgtgcaacagagcagtccagatgtctacgagcatacctggggctgattggga

SEQ ID NO: 15778 - DNA, 60 bp, Homo sapiens
tttcacatgttttgactctggcttgcagcaccattcggagtaaggatgacagcaggccca

SEQ ID NO: 15779 - DNA, 60 bp, Homo sapiens
gtgctctgtgtcaaggtgaagcacatacggcagacctcttagagtccttaagacggaagt

SEQ ID NO: 15780 - DNA, 60 bp, Homo sapiens
agttccagttcctcccaaatcggtgacttctctaatgatgaataaagacggcttcctggg

SEQ ID NO: 15781 - DNA, 60 bp, Homo sapiens
tgccactataaggctcccaccgtggtcttgcacatgactaagacggacccctctttggag

SEQ ID NO: 15782 - DNA, 60 bp, Homo sapiens
ttgaactgtctgttgagtccgtgctgtatgtgggtgccatcttggaacaaggggacacct

SEQ ID NO: 15783 - DNA, 60 bp, Homo sapiens
gcagtccagaataagtgctgtttgagatgtgatgctggtaccactggaatcgatctgtac

SEQ ID NO: 15784 - DNA, 60 bp, Homo sapiens
tttcaagagtttcatccaagcgggagtttgagtttcaagggcagagcagccactgtgacc

SEQ ID NO: 15785 - DNA, 60 bp, Homo sapiens
ttatcagaacatgaggataacttccttgcccctgctctgtagccacctccttggcaccgg

SEQ ID NO: 15786 - DNA, 60 bp, Homo sapiens
cctgttcttagagcaagacaatcaccatctgaattccagaagccctgttcatggttgggg

SEQ ID NO: 15787 - DNA, 60 bp, Homo sapiens
ctggtcccaagcagtttactgtacttcactagatttggtacctgctctcccctggacttc

SEQ ID NO: 15788 - DNA, 60 bp, Homo sapiens
gcggctcattctatttctgtagatggtagataggatacgaagacaggggtttgtggcgcg

SEQ ID NO: 15789 - DNA, 60 bp, Homo sapiens
agtgagacaagctgaagattaggcacacagatcccctggaaacccacctctctggaaggt

SEQ ID NO: 15790 - DNA, 60 bp, Homo sapiens
cttcgagaaaccaagacctctgaatacttcagcctttcccaccatcctttagactacagg

SEQ ID NO: 15791 - DNA, 60 bp, Homo sapiens
gactgacccagccaaccagtttgaatggctagaaagtacattgaacaactctcagcagaa

SEQ ID NO: 15792 - DNA, 60 bp, Homo sapiens
tgtctgtctcctgccccatgatgaccctcaggaattgcaaaggctctgctgtcacaagga

SEQ ID NO: 15793 - DNA, 60 bp, Homo sapiens
gaggcaaagtggtatatgaagccggagtgttcagtgtcacggcaggagatgggaagttta

SEQ ID NO: 15794 - DNA, 60 bp, Homo sapiens
cactgagaacctgctgagcaaggacggcttttaccaacattagcacaaaggtttcctcag

SEQ ID NO: 15795 - DNA, 60 bp, Homo sapiens
gacagtcactgctgtggctgcgggaaagcctctctcttgcccaaaccacgatgggaatgt

SEQ ID NO: 15796 - DNA, 60 bp, Homo sapiens
tgaagagcaactgggacctgagtcaatgcgcaaaatgcagcttgtgtgcaaaagcagtgg

SEQ ID NO: 15797 - DNA, 60 bp, Homo sapiens
tccaagggaaacaaaagcaaaggcaagaagagcaagtccccaaagcccgtgaagccagtg

SEQ ID NO: 15798 - DNA, 60 bp, Homo sapiens
ctgcagtgactgaagaagcagtccactcccatgtaaccatgaaagagagccagagagctt

SEQ ID NO: 15799 - DNA, 60 bp, Homo sapiens; identical to SEQ ID NO: 4855

SEQ ID NO: 15800 - DNA, 60 bp, Homo sapiens
attaactctccaaaggtctcccctgctccctacctaggttggggcttcatggtttctgct

SEQ ID NO: 15801 - DNA, 60 bp, Homo sapiens
ttggtctaaaattgaacatcctagattcacactcccaagtcacttaaggtgatttgatgg

SEQ ID NO: 15802 - DNA, 60 bp, Homo sapiens
tcgccaaagcgcatgtgtgtgcatgtgtgaacgtgtgtgtcctttgcatggttgggcgtg

SEQ ID NO: 15803 - DNA, 60 bp, Homo sapiens
tgtgattcgtatcaacgggcgtgatgttgtcctggcaacgttttctacaccttataacag

SEQ ID NO: 15804 - DNA, 60 bp, Homo sapiens
tcaagactcttgggtagatggtgaccattgcaggaactgcacttgcaaaagtggtgccgt

SEQ ID NO: 15805 - DNA, 60 bp, Homo sapiens
cgtagtttggcagaaaccacttacggctgatgatgcgcaaccctgctgactgtttcagtt

SEQ ID NO: 15806 - DNA, 60 bp, Homo sapiens
ttcttgtttcatccctgcttctggacttggggtaccctcccaattgccacatcctatctg

SEQ ID NO: 15807 - DNA, 60 bp, Homo sapiens
cgccaagccatattctgttggatgagcttcagtgcctaccagacagcctttatctgcctt

SEQ ID NO: 15808 - DNA, 60 bp, Homo sapiens
agtgagtttcgctttcttaagcgttttatgcccaacttgcctttccctcatgccactggg

SEQ ID NO: 15809 - DNA, 60 bp, Homo sapiens
aagaagcgaagacaccaacagggccagggagacgattctagtcataagaaggaacggaag

SEQ ID NO: 15810 - DNA, 60 bp, Homo sapiens
atcatctcaatgcgtctcagactacacttgaagcagctccgaagtagagcgtcagcgctg

SEQ ID NO: 15811 - DNA, 60 bp, Homo sapiens
gcattgtcttgttctgtcccttccacttctaactccactggctccatgattctctgagtg

SEQ ID NO: 15812 - DNA, 60 bp, Homo sapiens
ggtttgcttgctctacgttacaggtggggcatgtcctcatcctttcctgccataaaagct

SEQ ID NO: 15813 - DNA, 60 bp, Homo sapiens
ctacacaccaagccagaggtagctgcccaggaaagaatggtcgatgatggcaacggaaaa

SEQ ID NO: 15814 - DNA, 60 bp, Homo sapiens
gtagggaacagcaggagattattctcaccaaagttatgtcaagccccattggtcccagag

SEQ ID NO: 15815 - DNA, 60 bp, Homo sapiens
tgcaataggcttacgccttcgctcctctagtgaggggaatgagcctgatgacactattac

SEQ ID NO: 15816 - DNA, 60 bp, Homo sapiens
tggaaggaaggctgtactttgatggtttgaaggaactcagcagtatgatgatctggttcc

SEQ ID NO: 15817 - DNA, 60 bp, Homo sapiens
ctctggagccaatgccaactgaagaggatgaggcagatgacacatcagctagcatcatct

SEQ ID NO: 15818 - DNA, 60 bp, Homo sapiens
tcaagtttgcccggaaaccgttctgtgtgattgacatcatggtgctcatcgcctccattg

SEQ ID NO: 15819 - DNA, 60 bp, Homo sapiens
ctggaaagaaagcagttaaagcagttctgtgggtctcagcagatggactcagagttgtgg

SEQ ID NO: 15820 - DNA, 60 bp, Homo sapiens
aaaagtactgcaagaaggactatgccgtccagatccacatcctgaaggcggacaaggcgg

SEQ ID NO: 15821 - DNA, 60 bp, Homo sapiens
gacttctctgttgaatgggaggactagacggtttgcagatattcagctccagcatggagc

SEQ ID NO: 15822 - DNA, 60 bp, Homo sapiens
tgcccacattgtcctgtggcacaacccgagtgggactctccaacgcccaagagccttcct

SEQ ID NO: 15823 - DNA, 60 bp, Homo sapiens
gggagtctatggtcaaactctcaagtaagctgagtgccgtgagcttgcggggaattggca

SEQ ID NO: 15824 - DNA, 60 bp, Homo sapiens
tgcatgaccataatcaccgcctacgtcatcaccatcgtttgcatcatcatcttgatcata

SEQ ID NO: 15825 - DNA, 60 bp, Homo sapiens
cacaagaagaaagtatcgggacattattggatgctatcatttgtagaatgtcaacaaaag

SEQ ID NO: 15826 - DNA, 60 bp, Homo sapiens
tacaacttttcaacaacgcggtcgatacatacgtcggggtgtgttaaaaccaccacgcgc

SEQ ID NO: 15827 - DNA, 60 bp, Homo sapiens
ccggaccctaccagaactacacagtcatctttgttggctctgaagctggcatggtactta

SEQ ID NO: 15828 - DNA, 60 bp, Homo sapiens
ccttgcactactgccatagccaatcaatctcccaaagccaagtttacctgctgttctcac

SEQ ID NO: 15829 - DNA, 60 bp, Homo sapiens
gaggtggcaaggttgagtcatggcaagaagaagtaatggacaaaatgcagtcgttccatg

SEQ ID NO: 15830 - DNA, 60 bp, Homo sapiens
ctgaaacgcaccatgcctgcttccatcttttgctctgtaaagttgtgaattgctcatgcc

SEQ ID NO: 15831 - DNA, 60 bp, Homo sapiens
gggatgggggactcaggaggacctgtgaagcatgtagttatctagatctgggtaatttca

SEQ ID NO: 15832 - DNA, 60 bp, Homo sapiens
gggaaaaccttctgcctcattttgtgatgtgtcacaggttaatgtggtgttactgtagga

SEQ ID NO: 15833 - DNA, 60 bp, Homo sapiens
ccttgaccctgactacaaggtatccaaagaccccttccaggtgtgcccatcagctggatc

SEQ ID NO: 15834 - DNA, 60 bp, Homo sapiens
gaagtctttgtgtcatgttgtgtgatggatagaaagtaccactgagaggctgttctttga

SEQ ID NO: 15835 - DNA, 60 bp, Homo sapiens
gctatccatctcatttctggtatagttcatgtagcattgtaatcggttgttctttgaacg

SEQ ID NO: 15836 - DNA, 60 bp, Homo sapiens
gctacaatttccacattgcattgctgctgttttcacaacctctctgcactaggcggcttc

SEQ ID NO: 15837 - DNA, 60 bp, Homo sapiens
tgcatgcacgaggtgcacacgttcgtgtccacgtgccaggccatcgacgctaccgtcgct

SEQ ID NO: 15838 - DNA, 60 bp, Homo sapiens
gagggcgagaaagcagcacgacttgaaacttcctacatgttctctaactgtatctgggta

SEQ ID NO: 15839 - DNA, 60 bp, Homo sapiens
gacgtgcccaatgtttcttgtgacatagcagcttccaggagaggtgtgcttgttgaacac

SEQ ID NO: 15840 - DNA, 60 bp, Homo sapiens
gaacgagcaacgtacaccctggaaaagaagtttgggatccacctgaaggagatcgacaag

SEQ ID NO: 15841 - DNA, 60 bp, Homo sapiens
tacattatccaggtggcagccaaggacaatgagattgggacatggagtgactggagcgta

SEQ ID NO: 15842 - DNA, 60 bp, Homo sapiens
attccaagaaggagatagtggatcggaaatacagcatctgtaagagcggctgcttctacc

SEQ ID NO: 15843 - DNA, 60 bp, Homo sapiens
gcgctgttcctgccactgtcctgaagatgtgaatgggtggtacgatttcaacactggtta

SEQ ID NO: 15844 - DNA, 60 bp, Homo sapiens
atatgctaacatgccactcctggaaactccactctgaagctgccgctttggacaccaaca

SEQ ID NO: 15845 - DNA, 60 bp, Homo sapiens
acaggtaccgctattaccagaatgtgtgcacgcaaagctactccttcgtgtggtgggact

SEQ ID NO: 15846 - DNA, 60 bp, Homo sapiens
gcaatagatggagaacactctggaaaagctactcacgctagaataggtcagatatgcaag

SEQ ID NO: 15847 - DNA, 60 bp, Homo sapiens
ggagccatgctctaccactcctgggtctctgaaatcactgaaatcggggctttctgagct

SEQ ID NO: 15848 - DNA, 60 bp, Homo sapiens
aatgccttctactgccagtgtctgcctggacacacaggccagtggtgtgaggtggagata

SEQ ID NO: 15849 - DNA, 60 bp, Homo sapiens
cgccggcgctgctgacacctcggatgaggggcactgacggcgcagtgagcgagatggtgc

SEQ ID NO: 15850 - DNA, 60 bp, Homo sapiens
cagctttaacagagtgaaccatgtgtattgtacaggcgcggttgtcattgcagaaaccgc

SEQ ID NO: 15851 - DNA, 60 bp, Homo sapiens
aaaaggaatggacgtgggatgagagcaagatgctggtgatgcaggaccccatctacagga

SEQ ID NO: 15852 - DNA, 60 bp, Homo sapiens
ttgtaggagcaagaaactacctcttcaggttacagcttgaggatctgtctcttatccagg

SEQ ID NO: 15853 - DNA, 60 bp, Homo sapiens
gtgtgtatccagttctcattttcaggttgcagaaagggcattgtacttctggaataacga

SEQ ID NO: 15854 - DNA, 60 bp, Homo sapiens
ccgcccttgtcagtatcagccacgtccagtcctcagcagaccagcagtggaacaaacaat

SEQ ID NO: 15855 - DNA, 60 bp, Homo sapiens
tctggtcaggggaaacaaaatcttgacccagctgaacatgtcttcctgagtcagtgcctg

SEQ ID NO: 15856 - DNA, 60 bp, Homo sapiens
gatagctcatgctcatccacaggaagtctacaatgaatatgtacccagagggtgcaagaa

SEQ ID NO: 15857 - DNA, 60 bp, Homo sapiens
atatccctgttgatacgtttacctgctgctcctgaagaagtcgtcatgcctcccgttcca

SEQ ID NO: 15858 - DNA, 60 bp, Homo sapiens
gccccattatccaatttggcaagttgccgaaatagccaaaagtcccagacctttcaaacc

SEQ ID NO: 15859 - DNA, 60 bp, Homo sapiens
cagcagtggagtaagtatttagaagtgtgaattcaccgtgaaataggtgagataaattaa

SEQ ID NO: 15860 - DNA, 60 bp, Homo sapiens
ggaagaaggcactcacctacactgagcgaagaagtcctatcagcgtggaagagaagttta

SEQ ID NO: 15861 - DNA, 60 bp, Homo sapiens
atccacacttcaaattgagcccacaatcttgaatttctgaacggatcagagtttcatagt

SEQ ID NO: 15862 - DNA, 60 bp, Homo sapiens
ggaaacttgagttcggctctaggttccatgtccccaactacatcttcccagattttggcc

SEQ ID NO: 15863 - DNA, 60 bp, Homo sapiens
gctaaaactgttggtggctaggggagcagacacaaactacttgaacatgacaagatgggg

SEQ ID NO: 15864 - DNA, 60 bp, Homo sapiens
attctcaaggcgcaaggctgggcgcaacggcagggttgcggggttacgggattgcggggt

SEQ ID NO: 15865 - DNA, 60 bp, Homo sapiens
ggagaacaccattcctgatttcccacaaactgcactacatcagtataactgcatttctag

SEQ ID NO: 15866 - DNA, 60 bp, Homo sapiens
atggtggtggatgcggccaactccaatgggcctttccagcccgtggtccttctccatatt

SEQ ID NO: 15867 - DNA, 60 bp, Homo sapiens
gctatcattcattctgtagccaatggcttacagtttctgtctggtcatctggaacttgaa

SEQ ID NO: 15868 - DNA, 60 bp, Homo sapiens
aacctcatcctcccagtggttcctcttgagtttgatttgacaagatgccttcccacccag

SEQ ID NO: 15869 - DNA, 60 bp, Homo sapiens
tatcccagagtgccagagaaccgttgcttttccgagttgctcttcttccaggctccgttg

SEQ ID NO: 15870 - DNA, 60 bp, Homo sapiens
tatagattccttggtatttctggtggggtaaggggcaggccagggctgttcacgcccatg

SEQ ID NO: 15871 - DNA, 60 bp, Homo sapiens
agtttgcagatactcgccaaggcagagcgcaaagtgctagccactggaaatgcatgactt

SEQ ID NO: 15872 - DNA, 60 bp, Homo sapiens
tgccagcccttccagctacaagcaagacttcactaactccaaactgctcatgatgcctag

SEQ ID NO: 15873 - DNA, 60 bp, Homo sapiens
acactatgacgtcctcttcattggcacagacgttggcacggtgctgaaggtgatctcggt

SEQ ID NO: 15874 - DNA, 60 bp, Homo sapiens
aagtcaaggcccttcatgaccttgctgggcacagaaaacaccctcgtggagtacactaat

SEQ ID NO: 15875 - DNA, 60 bp, Homo sapiens
tatgtctctgatggctgtgctgacggagaggagtcagattgtctgacagagtatgaggag

SEQ ID NO: 15876 - DNA, 60 bp, Homo sapiens
tgtgaactgcctgctgtcctgtgaactgcctgctgccctgtgaggtgtgggagccctgat

SEQ ID NO: 15877 - DNA, 60 bp, Homo sapiens
gtccctttggagcccttaacagactctctggaagaaaactcctaaagagatgcccaccca

SEQ ID NO: 15878 - DNA, 60 bp, Homo sapiens
tctgctggtgcaggctgcagcgtgagatccgcctgactcagaaggccgactacgccactg

SEQ ID NO: 15879 - DNA, 60 bp, Homo sapiens
attgcagttgcttggttgaaagtgcctgtgctggaactggcctgtactcactcatgggag

SEQ ID NO: 15880 - DNA, 60 bp, Homo sapiens
gagtttctgtgcttctgcaccccttgacaacagtgtatgagcaaactttctgatcttggc

SEQ ID NO: 15881 - DNA, 60 bp, Homo sapiens
tgcaaacctgcccgtggcagctaccgcatcagcctaaagaagttctgcaagaaggactat

SEQ ID NO: 15882 - DNA, 60 bp, Homo sapiens
gagacagtatcactgctgtggaagccagagcatttgtgcgcaagttcaaagtctcctaca

SEQ ID NO: 15883 - DNA, 60 bp, Homo sapiens
tgggagacagaaggttttgtgccctgctgtatcataaagcacacacttagcgctctggag

SEQ ID NO: 15884 - DNA, 60 bp, Homo sapiens
gtgggctccaagctagatttccgacagcattattctgagagctggctaccattacccttc

SEQ ID NO: 15885 - DNA, 60 bp, Homo sapiens
ccccaagacgcccagcaaggccaagaagaacaaagacaaggagtattatgtctgagcccc

SEQ ID NO: 15886 - DNA, 60 bp, Homo sapiens
cagccgctttcaccgctcattatgtagtctggctacagccctcaaaaacagcttatactc

SEQ ID NO: 15887 - DNA, 60 bp, Homo sapiens
tgaggggcatcatcattcagggtgggaagcaccgagagaacaaggtgttcatgaggaagt

SEQ ID NO: 15888 - DNA, 60 bp, Homo sapiens
ttccagaaacgccgctggactgcgaggtctccctgtggtcgtcctggggactgtgcggag

SEQ ID NO: 15889 - DNA, 60 bp, Homo sapiens
aaccttgatgctgaggagtaacttgatcggctgtgtgagtaatgacacctttgccggcct

SEQ ID NO: 15890 - DNA, 60 bp, Homo sapiens
ccaaggtattgatgacaaatggggtgatttgcttcattgagatcttgctcccaggtaacc

SEQ ID NO: 15891 - DNA, 60 bp, Homo sapiens
tagtcgtcttgtttggatcaactcctagaggctggtttagaacaggcccatgagggagct

SEQ ID NO: 15892 - DNA, 60 bp, Homo sapiens
gtacagcgtgtctgaaaccgtgcactttgctaccacccagtggacaagtatgggctttga

SEQ ID NO: 15893 - DNA, 60 bp, Homo sapiens
cccagctgtcgacccagatgggatgttcggatcggtttgtaattaaacctgggaatggcc

SEQ ID NO: 15894 - DNA, 60 bp, Homo sapiens
tccatcagaggacacctgtactggagagcaacacaggatggtctctgccatgaactggag

SEQ ID NO: 15895 - DNA, 60 bp, Homo sapiens; identical to SEQ ID NO: 4855

SEQ ID NO: 15896 - DNA, 60 bp, Homo sapiens
acaggttctaacattcccatggaccagccctgctgtcgtggtctctatgactttgagcca

SEQ ID NO: 15897 - DNA, 60 bp, Homo sapiens
gagcagcgaagtggacgtctcggatctcggctcgcgaaactacagtgcccgcacagactt

SEQ ID NO: 15898 - DNA, 60 bp, Homo sapiens
cttaatatggttgtactacagtatacttggttgatttaggttgcacattcactgaattca

SEQ ID NO: 15899 - DNA, 60 bp, Homo sapiens
cagtgctctgaggggacagacaaggcttgggtgtatatgccaaccagatctcattgaagt

SEQ ID NO: 15900 - DNA, 60 bp, Homo sapiens
caagaatggactagacagaccagtgttctcacccactgtttccatgatcactctcacaac

SEQ ID NO: 15901 - DNA, 60 bp, Homo sapiens
acaataagcctcctcaggcagatgcaggcccagataaagagctgacccttcctgtggata

SEQ ID NO: 15902 - DNA, 60 bp, Homo sapiens
aagggttgcattggagaactcccaaatctggctgtgcatacaactcacctaggaagctcg

SEQ ID NO: 15903 - DNA, 60 bp, Homo sapiens
gttaaactagttcccgatggcaaatatggggcccagaatgacaaaggggagtggaacggg

SEQ ID NO: 15904 - DNA, 60 bp, Homo sapiens
tcctctgaggaggagttggaggcagagtgcttcccagtgaagccccacaacaagtccttt

SEQ ID NO: 15905 - DNA, 60 bp, Homo sapiens
cctagtgggagaaccccctcctagtccacctgaaaacaccaaattcaaccatcatctgtc

SEQ ID NO: 15906 - DNA, 60 bp, Homo sapiens
agcccagtgccagccagaggttgtgcaggcaaggagaccaaagattgatgagaagacccc

SEQ ID NO: 15907 - DNA, 60 bp, Homo sapiens
cccacctgttactgctgggagtcaagtcagctaggaaggaagcaggacattttctcaaac

SEQ ID NO: 15908 - DNA, 60 bp, Homo sapiens
gagggctcagaagctttcggaaattcacaaggatcaacctggtcaccctgtcaatcgaac

SEQ ID NO: 15909 - DNA, 60 bp, Homo sapiens
ggggctgaaagctaataccatctactttgcttccgtaagagcttacaacactgctgggac

SEQ ID NO: 15910 - DNA, 60 bp, Homo sapiens
ttcagacatctgtgaaaatgggcgacctcgaagtaactcttggcaaggtaacctgggagg

SEQ ID NO: 15911 - DNA, 60 bp, Homo sapiens
ctcagaccttacacataggaagctcacacctggctccgccaaatccagacaagcagtttc

SEQ ID NO: 15912 - DNA, 60 bp, Homo sapiens
ggagcacataggtagatgccaagttatgcagctgttctggttcctcctggtaggcttaca

SEQ ID NO: 15913 - DNA, 60 bp, Homo sapiens
ccattcatcagcgaataactactgagcaactctagtgtgccagcacaggccagacatact

SEQ ID NO: 15914 - DNA, 60 bp, Homo sapiens
gacgtggcaggagggctcactcaaagcctcctgcctatacgggcagctccccaagttcca

SEQ ID NO: 15915 - DNA, 60 bp, Homo sapiens
tagacagtcaaggagtggcttactacatgtgggagcttttggtatgtgacatgcgggctg

SEQ ID NO: 15916 - DNA, 60 bp, Homo sapiens
cctagcaagactttacaagataggatcaaattctaatggaattgagccggtttcttatcc

SEQ ID NO: 15917 - DNA, 60 bp, Homo sapiens
atgttacatgtgatgatatgagctcccaccttatatgggggaacatcttgggaatttgag

SEQ ID NO: 15918 - DNA, 60 bp, Homo sapiens
gactttccaagtatgttgtctttccaatggtgccttgcttggtgctctcctggtggtgac

SEQ ID NO: 15919 - DNA, 60 bp, Homo sapiens
atctgctgagaaatgctggcgatgaagttaccatcaccgttgagtatctcagggaagcgc

SEQ ID NO: 15920 - DNA, 60 bp, Homo sapiens
gaagctcatagggttgtgaggcaaacttccagccgtcagggtctcagctaagcagaaggt

SEQ ID NO: 15921 - DNA, 60 bp, Homo sapiens
gattttggtgagggttggctgtggctgtcgttttgcacctcccagatttcaaagaattac

SEQ ID NO: 15922 - DNA, 60 bp, Homo sapiens
gttttgtagtcttcctgtccccttcagtccctccagtgtgtatattaccattctccaatg

SEQ ID NO: 15923 - DNA, 60 bp, Homo sapiens
gggcccctcaaggccaagctcacccctcaagtgctctcacactcgggacctaattcaagt

SEQ ID NO: 15924 - DNA, 60 bp, Homo sapiens
agaggctagctttgaaccccatccttctgtgacacccactggatatcatgctcccatgga

SEQ ID NO: 15925 - DNA, 60 bp, Homo sapiens
tgagctgatgtcaatgctatggactgcacaaaagtctcaatgttccattcagtctgcagc

SEQ ID NO: 15926 - DNA, 60 bp, Homo sapiens
acacgggaccacagccgcgctgccgagggccaagcacaaaggttccagtgagcgcatgtc

SEQ ID NO: 15927 - DNA, 60 bp, Homo sapiens
taaacgtcgttagggcctcagttctagacgagtcatacctgattcacctgcactgcttcc

SEQ ID NO: 15928 - DNA, 60 bp, Homo sapiens
ctgagggacaggccactgtaattcagcagctggaacagactattgaggatctgagaacca

SEQ ID NO: 15929 - DNA, 60 bp, Homo sapiens
tgcgctggatggacaccgccttgcactgttggattctgggtatgacatactcgcagcagt

SEQ ID NO: 15930 - DNA, 60 bp, Homo sapiens
gcctctcctcagggtctattccttgcgtggattatgtggccgtagcatgttacagttcaa

SEQ ID NO: 15931 - DNA, 60 bp, Homo sapiens
actgcactttcaccctggagaggcacagcttggcctccacagagctcacctgcaagatct

SEQ ID NO: 15932 - DNA, 60 bp, Homo sapiens
aatggagatgatcctgcaacagtctgggaagtggagacgggcaagcagagagcgacgaat

SEQ ID NO: 15933 - DNA, 60 bp, Homo sapiens
aatcctcccagtgggatttcattccctagcgtggtggatcacccaatgccagaagaaaga

SEQ ID NO: 15934 - DNA, 60 bp, Homo sapiens
ttttctaaccccagggagaactcgccagagactgagagcagagaccacttatcctcattg

SEQ ID NO: 15935 - DNA, 60 bp, Homo sapiens
agattggagagggctctgtgctgacatggctctggactctaaagaccaaacttcactctg

SEQ ID NO: 15936 - DNA, 60 bp, Homo sapiens
aggtcgtgagcctccacctgtgcatgcgtgtcaatgcctgcctcttctgcccacatatgt

SEQ ID NO: 15937 - DNA, 60 bp, Homo sapiens
tttggagaaagtggagtgtggcgcttggttgtcgttatttcttcggactgcttcgcggtg

SEQ ID NO: 15938 - DNA, 60 bp, Homo sapiens
catatattctctgaaactaggatgcatgcaattgtgttggaagtgtccttggtgccttgt

SEQ ID NO: 15939 - DNA, 60 bp, Homo sapiens
gtgaatgaaagtcttgtgactagtgctgaagcttattaatgctaagggcaggcccaaatt

SEQ ID NO: 15940 - DNA, 60 bp, Homo sapiens
cgaaggctggctactgataaaagcacaacacggaaccagaatggatgagcacggttttat

SEQ ID NO: 15941 - DNA, 60 bp, Homo sapiens
atttctggatgtgagccactttaccccagacgaggtgactgtgaggactgtggataacct

SEQ ID NO: 15942 - DNA, 60 bp, Homo sapiens
atggatcatactccccttgtttctttgggtgagaagggatcgcagtttggaaactccggc

SEQ ID NO: 15943 - DNA, 60 bp, Homo sapiens
tcacagcactgatgaggacagctgcagaggtggcagtgtgtggacacaggaagtttgggc

SEQ ID NO: 15944 - DNA, 60 bp, Homo sapiens
gtgaattagggttggcattcctagcagaagaacccacttcctgcttagttgagatagttg

SEQ ID NO: 15945 - DNA, 60 bp, Homo sapiens
cctcaccgtgaaggtgcaggacgactttgtggagatccacggaaagcacaacgagcgcca

SEQ ID NO: 15946 - DNA, 60 bp, Homo sapiens
tcgctgggatgcctggagtgggagtaatgcctaccacattgagcgtctcatgtccttccg

SEQ ID NO: 15947 - DNA, 60 bp, Homo sapiens
ccaaacagtctcccacaggctgcggctgtacgagagggaagaccacaaaggcctcatgat

SEQ ID NO: 15948 - DNA, 60 bp, Homo sapiens
gccttttgtgcataccattacaatatggtggggtaagacattctacagtagcctgtgctg

SEQ ID NO: 15949 - DNA, 60 bp, Homo sapiens
atttctagagtaaatgagggagtccagtccccagtgaactctccttttgtgcttatcatg

SEQ ID NO: 15950 - DNA, 60 bp, Homo sapiens
caattaggtacttctgcagggacaataggaactgtcgccctctgtaactgccatattcat

SEQ ID NO: 15951 - DNA, 60 bp, Homo sapiens
gtgtgacactgtttgagggggacaacttccaaggctgcaagtttgacctcgttgatgact

SEQ ID NO: 15952 - DNA, 60 bp, Homo sapiens
ttctccggggaacagtacgtgctggagaagggcgtgtatcgtaactgcgaggactggggc

SEQ ID NO: 15953 - DNA, 60 bp, Homo sapiens
ggaagcccgtcaccatgtcgtgcgagtcgtctatggttctcgggtactgggatattcgtg

SEQ ID NO: 15954 - DNA, 60 bp, Homo sapiens
tgttggttggaagtgacgaccttgaagatcggccggttggaagtgacgaccttgaagatc

SEQ ID NO: 15955 - DNA, 60 bp, Homo sapiens
ggatggagaagcagtatttatctcaaagagaagtggacctagaggcttatttcactagga

SEQ ID NO: 15956 - DNA, 60 bp, Homo sapiens
attgggctgaccgtgtctctctagttgaaccctgggaacaatttccaaaactgtccaggg

SEQ ID NO: 15957 - DNA, 60 bp, Homo sapiens
tgcccgtgaagcctgacatgcacatcaaggaggagccggatgggccagcactgaagcgct

SEQ ID NO: 15958 - DNA, 60 bp, Homo sapiens
agccactcagttcttcctccacctccacccagtgatcccaataaacgaattctgtctccc

SEQ ID NO: 15959 - DNA, 60 bp, Homo sapiens
ttcagactaaggggctgaccactctggagaccttcatggacacgttgccggatgtgaaga

SEQ ID NO: 15960 - DNA, 60 bp, Homo sapiens
aggtgatacagatgtacaaggaaagcccagagatcctgagtccaccagctccacagggag

SEQ ID NO: 15961 - DNA, 60 bp, Homo sapiens
aagacttcttgctgttattctccaactcatccgtgggcttctggggacagccatttggct

SEQ ID NO: 15962 - DNA, 60 bp, Homo sapiens
cccaggaacaataaaatgtcttctccacatctcctcaggcatcatcattctccaatctcc

SEQ ID NO: 15963 - DNA, 60 bp, Homo sapiens
gagacccaggagacaaacagcccttccttggggaaacttgggaatcattctggcttaaac

SEQ ID NO: 15964 - DNA, 60 bp, Homo sapiens
aggagaggcagattccctcagtgtcttcctcttaaacctcaatcatcgagacattagggg

SEQ ID NO: 15965 - DNA, 60 bp, Homo sapiens
aggttgtaccaaggtccctgagccaggatgtaccaaggtccctgagccaggttgtaccaa

SEQ ID NO: 15966 - DNA, 60 bp, Homo sapiens
aagagagaggattcagacgctctgggagccagttcctagtcctcaactccagccacctgc

SEQ ID NO: 15967 - DNA, 60 bp, Homo sapiens
ggcccctgatttctgcatggtgtagaactttctccaatagtcacattggcaaagggagaa

SEQ ID NO: 15968 - DNA, 60 bp, Homo sapiens
caaggaaaacgaaccctgaaatccaaagcaccctccggaaacggctgtatctgcagtaga

SEQ ID NO: 15969 - DNA, 60 bp, Homo sapiens
acctgcttgttgggaggacccggtttctccgagcttcatctacctgtggactgaccaagc

SEQ ID NO: 15970 - DNA, 60 bp, Homo sapiens
tactgtgtgcagctctcacagattcaggcccagatatccgctctggaagaacagttgcaa

SEQ ID NO: 15971 - DNA, 60 bp, Homo sapiens
gtaaggctgaacgtctcactgactgagctagtcttcttgttgctcgggtgcatttgagga

SEQ ID NO: 15972 - DNA, 60 bp, Homo sapiens
tgtccctcattttccttcaaaagcgggctgtgtttctcttctaccttccagctcctccca

SEQ ID NO: 15973 - DNA, 60 bp, Homo sapiens
ggcgtgaacaagcagaacagacgctaaaacaggcagcttcaacagatagtctcagggtct

SEQ ID NO: 15974 - DNA, 60 bp, Homo sapiens
gatgttcatgttgctgagctgtaagcaggagcaccctgtcttctctggtctttgacttga

SEQ ID NO: 15975 - DNA, 60 bp, Homo sapiens
ctcacagggaaggatgttcttgtagtgattcttgggcttgttctccacactctgcccctc

SEQ ID NO: 15976 - DNA, 60 bp, Homo sapiens
ggtgtctgcgtcgtcaccaaatcgtagcgtttgttaccagaggttgtgcactgtttacag

SEQ ID NO: 15977 - DNA, 60 bp, Homo sapiens
ataggttgctaaaaaatgggaatgtgagaaataccttgcttcagtccaaagtgggcttgc

SEQ ID NO: 15978 - DNA, 60 bp, Homo sapiens
cgcattgtcacagctaccaaagtgtggtttgcagatgatctgggcttgtttctggcagag

SEQ ID NO: 15979 - DNA, 60 bp, Homo sapiens
gttgcccactttgagtatcagatccgcgtgacctgtgatgactactactatggctttggc

SEQ ID NO: 15980 - DNA, 60 bp, Homo sapiens
ggacatctacgacaaagtgtcgggcgacatgcagaagcaaggctgcgactgtgagtgtct

SEQ ID NO: 15981 - DNA, 60 bp, Homo sapiens
cagagactgttaatggccccttaccctgggtgaagcacttacccttggaacagaactcta

SEQ ID NO: 15982 - DNA, 60 bp, Homo sapiens
ggaagaatgtgcggaggatttacgaatgcttgatgcctcgggagagaaaatgaatggctc

SEQ ID NO: 15983 - DNA, 60 bp, Homo sapiens
agccactggctggacagggaagaagaccccaggagccaagcccaccccttctttgtgtag

SEQ ID NO: 15984 - DNA, 60 bp, Homo sapiens
tgaacgctgtcgttctgtctgtttcctccatgcttgtgaactgcacaacttgagcctgac

SEQ ID NO: 15985 - DNA, 60 bp, Homo sapiens
ccagaggagaacacagaagcctgctgaagtgaatatctggtctcagggattgctcctatg

SEQ ID NO: 15986 - DNA, 60 bp, Homo sapiens
ggagcttctctacaggtacaagcagaatcgatctggtcggcttaccataaagagtctctg

SEQ ID NO: 15987 - DNA, 60 bp, Homo sapiens
gagaggtttctggtattcacagaaagctagatatgccttaaaacatactctgccgatcta

SEQ ID NO: 15988 - DNA, 60 bp, Homo sapiens
cgtcacggagcaacccatggttctggagaaaacagcgagtcttatgctaaaggaagctgt

SEQ ID NO: 15989 - DNA, 60 bp, Homo sapiens
cctcgaacagaaagtgcttacaaagctgccttctcggatactgaaaggtcgagttttctg

SEQ ID NO: 15990 - DNA, 60 bp, Homo sapiens
tgggagcaaatctgaacggcggcgagcggctagtatcctacccctacgatatggcccgca

SEQ ID NO: 15991 - DNA, 60 bp, Homo sapiens; identical to SEQ ID NO: 4855

SEQ ID NO: 15992 - DNA, 60 bp, Homo sapiens
cgcaaactcaagactatcccaaatattccgatgcacattcagcaactctaccttcagttc

SEQ ID NO: 15993 - DNA, 60 bp, Homo sapiens
acctgggatattctcaacctggcagatgcgttactagagcaggccatgattggaccatcc

SEQ ID NO: 15994 - DNA, 60 bp, Homo sapiens
ttctttaaggagatagacgggttgaaagacatcaatgaaacagaaggggcgttcttgaag

SEQ ID NO: 15995 - DNA, 60 bp, Homo sapiens
caccgattcttggacgactatgtggcaacaagataccagatccccttgtggctactggaa

SEQ ID NO: 15996 - DNA, 60 bp, Homo sapiens
ctcagggaaacttgcgtactcagcacagcagtggagagtgttcctgttgaatcttgcaca

SEQ ID NO: 15997 - DNA, 60 bp, Homo sapiens
agttacatccacgaagtccaagaaaatgcagctgctggcaccgtggttgggagagtgcat

SEQ ID NO: 15998 - DNA, 60 bp, Homo sapiens
ggaccagtgaaaactctgcttttcgtttcctctttaacctcagcagcatccctgagaacg

SEQ ID NO: 15999 - DNA, 60 bp, Homo sapiens
ggacgctttgtctgaatcctcttcaagtgtgaagacagaccttccacaaacagccgagtc

SEQ ID NO: 16000 - DNA, 60 bp, Homo sapiens
gttggccttaatgagctttacaacgggcaaatactggaaaccatcggaggcaaacagctc

SEQ ID NO: 16001 - DNA, 60 bp, Homo sapiens
ctgaagatgcttgtggatgtgaagctacactggcattccaggacaaggtcagctcgtatc

SEQ ID NO: 16002 - DNA, 60 bp, Homo sapiens
agtggaagatgtaacccagaagattgcctctatcctgtgtctcatgcccatcagcgcaca

SEQ ID NO: 16003 - DNA, 60 bp, Homo sapiens
cctcttgaaatccgtcctctccatggacttcccacatccctctctgctctaggtttgatt

SEQ ID NO: 16004 - DNA, 60 bp, Homo sapiens
caccccagacatccagacatctggaactttgggtgccaagagtccagcttaatgcaggca

SEQ ID NO: 16005 - DNA, 60 bp, Homo sapiens
cggaggatgtgaaatcgagctccaacagactgtggatgaagtttgtgtccgatggctcta

SEQ ID NO: 16006 - DNA, 60 bp, Homo sapiens
gggcagggaaaacacagatgtgttgcaaaggtaggttgaagggacctctctcttaccagt

SEQ ID NO: 16007 - DNA, 60 bp, Homo sapiens
ctgcagaacgagattccttcagttatggacctcatcttcgctacctccgtctggatggaa

SEQ ID NO: 16008 - DNA, 60 bp, Homo sapiens
ccctgcatggttcaaggatgcttatctgtggtgaagttggagagcagcattgtgaggcat

SEQ ID NO: 16009 - DNA, 60 bp, Homo sapiens
caggattccctggtcaaaagggagagcaaggttttgaaggcagcaaaggagaaactggtg

SEQ ID NO: 16010 - DNA, 60 bp, Homo sapiens
aaaatcaacggaacccagatttgccccaacgacctagtggcgttccatgacttctcctcg

SEQ ID NO: 16011 - DNA, 60 bp, Homo sapiens
atgacgcacctgctggagaacctcagaggcagcatctgtccagaggagggcatcagcgca

SEQ ID NO: 16012 - DNA, 60 bp, Homo sapiens
agggatgcggcaagacacacagccggagcgaaacgctacaaatatctgagaaggcttttc

SEQ ID NO: 16013 - DNA, 60 bp, Homo sapiens
gacagctgaccaggtgaagagaggatagagtgaagaactgagtgagccaagaatcctggt

SEQ ID NO: 16014 - DNA, 60 bp, Homo sapiens
gatgttatctcatgacgtgttgtcagtacaaaatgtgtcgcctccaattctgttaaacct

SEQ ID NO: 16015 - DNA, 60 bp, Homo sapiens
gtgggtcagatcggcaacacggggcccaagggaaaacgtggagagaagggtgatccagga

SEQ ID NO: 16016 - DNA, 60 bp, Homo sapiens
tttatgatcggtcacttgggatcatgagaagggtattgcctcctggaaacagaaggtacc

SEQ ID NO: 16017 - DNA, 60 bp, Homo sapiens
ggccttggaggagtacctggtttgtcatggtattccatgctacactctggatggtgacaa

SEQ ID NO: 16018 - DNA, 60 bp, Homo sapiens
gtgattgtgaaggctgtgaccgtatatatgcaacccggtcgaatctcctccgacacattt

SEQ ID NO: 16019 - DNA, 60 bp, Homo sapiens
agagcagcaccctcatcgggcgctactgtggctatgagaagcctgatgacatcaagagca

SEQ ID NO: 16020 - DNA, 60 bp, Homo sapiens
ggagccgtatttctcacttagttctgcctgtgcaacctgaaaatgccctgaaaaggggca

SEQ ID NO: 16021 - DNA, 60 bp, Homo sapiens
gcccttatcagccagttccagaacaaccactatacccacaaccataccaaccacaatacc

SEQ ID NO: 16022 - DNA, 60 bp, Homo sapiens
gccagtcaccacaaacatcccaggtgagttcttacctgccttcaaatgtgtccgaactta

SEQ ID NO: 16023 - DNA, 60 bp, Homo sapiens
gcctgctaatagctgctagggtaggaaagcgtggttccaagaaagatccaccctcaaatg

SEQ ID NO: 16024 - DNA, 60 bp, Homo sapiens
gtggcatctcattggtggtgacagaagctatgtgagccagaagttttcagctcttttgaa

SEQ ID NO: 16025 - DNA, 60 bp, Homo sapiens
tactctctggtgccaacctccaaattctcgtctgtcacttcagacccccactagttgaca

SEQ ID NO: 16026 - DNA, 60 bp, Homo sapiens
gagaacggggaacctcgtggggacaattaccgagcctatgaagatgagtacagctacttt

SEQ ID NO: 16027 - DNA, 60 bp, Homo sapiens
aggtactgatggaaaccgagggaaaggcattttgaacagtctagagaacattggaagtag

SEQ ID NO: 16028 - DNA, 60 bp, Homo sapiens
cagagatgcacagtcttcataaccaccttcagtctccttggtctacttcctttgtgcctg

SEQ ID NO: 16029 - DNA, 60 bp, Homo sapiens
ccagatgacccagatatggttgatgtcttcatggatcacttggatatagaccacaacaag

SEQ ID NO: 16030 - DNA, 60 bp, Homo sapiens
actatggcatcaaacagcctcttcagcacagtgacaccatgtcagcaaaacttcttttgg

SEQ ID NO: 16031 - DNA, 60 bp, Homo sapiens
tcgagcggccgcccgggcaggtactggatgtcaggtctgcgaaacttcttagattttgac

SEQ ID NO: 16032 - DNA, 60 bp, Homo sapiens
gggttccttggccttctcagtcagctaactttcctgagttctcctttgacttcactaggg

SEQ ID NO: 16033 - DNA, 60 bp, Homo sapiens
ccagggcctctctggggcagccatgaagtccctcgtcctgctcctttgtcttgctcagct

SEQ ID NO: 16034 - DNA, 60 bp, Homo sapiens
ttgttctccacagaatgggtctgctccttcccctggcactctgcatcctagtcctgtgct

SEQ ID NO: 16035 - DNA, 60 bp, Homo sapiens
gtggtgctaccccagtacaggatgaacgggattcagggtcagacggtgaggatgatgtaa

SEQ ID NO: 16036 - DNA, 60 bp, Homo sapiens
cgtgctgctacacaagaaccctgagactgacctgcaggacgaaaccatgaagagcctgat

SEQ ID NO: 16037 - DNA, 60 bp, Homo sapiens
cctaaccagaatgatggtgttgacgctgatggaagccacagcagttccccaactgttttg

SEQ ID NO: 16038 - DNA, 60 bp, Homo sapiens
tgatctgactctggaagcttggccatcaacagacaagaccaagcgggaggaagtggatta

SEQ ID NO: 16039 - DNA, 60 bp, Homo sapiens
tgggagagatccctgcagaatccaccaaccagaacgtggtttgcctgaggctgtaactga

SEQ ID NO: 16040 - DNA, 60 bp, Homo sapiens
gaacgagggaggacttcatagcagaagaattggagttggaaggttgcatagggtttcctc

SEQ ID NO: 16041 - DNA, 60 bp, Homo sapiens
aaaggcatgaggggtcgtcttcggaatctgtgccacccggcactaccatttcgagggtga

SEQ ID NO: 16042 - DNA, 60 bp, Homo sapiens
aactgtcctcttgcttcagaagccccttttgagtgtggtctctggtgcaagttcctgtga

SEQ ID NO: 16043 - DNA, 60 bp, Homo sapiens
cttctgattgggacagccgtgggaaggacagttatgaaacgagtcagctggatgaccaga

SEQ ID NO: 16044 - DNA, 60 bp, Homo sapiens
aagaagtcctcaccagtgaacggagacctctctgaactaaggataccatggccacgtcag

SEQ ID NO: 16045 - DNA, 60 bp, Homo sapiens
aaatcaaggtaacttgctcccttctgcctacaggccttggtcttggcttgtcctcaccca

SEQ ID NO: 16046 - DNA, 60 bp, Homo sapiens
aacttactgcgaggagcacggcgagaagatctacttcttctgcgagaacgatgccgagtt

SEQ ID NO: 16047 - DNA, 60 bp, Homo sapiens
tgtgagaaacctttgtgagacagagaacagggaattaaatgtgtcatacatatccacttg

SEQ ID NO: 16048 - DNA, 60 bp, Homo sapiens
aacgaaatcttgaaaagcacagtgagcagcaacgacaagaaaaccaaaggccggacgggc

SEQ ID NO: 16049 - DNA, 60 bp, Homo sapiens
gcatagaaaagtcggcctaagcggggcatgtacttgggcaccatatttttaccgggacca

SEQ ID NO: 16050 - DNA, 60 bp, Homo sapiens
cgcgttgcaggtcactgtagcgggacttcttttggttttctttctctttggggcacctct

SEQ ID NO: 16051 - DNA, 60 bp, Homo sapiens
tgctctgtccaccaagattcctgacaccaaaggctgcttgcagtgtcgtgtggtgcggaa

SEQ ID NO: 16052 - DNA, 60 bp, Homo sapiens
aaaattgctcctttgatggaggttagggactgtcaccctcagcactgtgaacataccggg

SEQ ID NO: 16053 - DNA, 60 bp, Homo sapiens
gaacattaggccccagcaacacgtcattgtgtaaggaaaaataaaagtgctgccgtaacc

SEQ ID NO: 16054 - DNA, 60 bp, Homo sapiens
cccctgaagtgccaagagagctgagaggagcagttgtgactctacccaggaacaaactgt

SEQ ID NO: 16055 - DNA, 60 bp, Homo sapiens
ccccttctgattctttgaaaagcagagactattacacggatttcctaattacactggctg

SEQ ID NO: 16056 - DNA, 60 bp, Homo sapiens
ccttgaacgaagggtgaagaaacgaggcagagtgacttagtagcaagtgacagcacacag

SEQ ID NO: 16057 - DNA, 60 bp, Homo sapiens
agaggaggaggtagtgacccctctgaacctttctgggcaatggagtcttctctcagctca

SEQ ID NO: 16058 - DNA, 60 bp, Homo sapiens
ctaaagagagacatcaagaatggattcagcagaatcatttcacgttttgaacagcagcag

SEQ ID NO: 16059 - DNA, 60 bp, Homo sapiens
tgtacgagcgtaggacgatgcttctcttctgtcagcctgcaactgagccaggattgaata

SEQ ID NO: 16060 - DNA, 60 bp, Homo sapiens
tttaacggcttcactggacagttttccttagaaggtagttttgtgtgactgtgactaaac

SEQ ID NO: 16061 - DNA, 60 bp, Homo sapiens
attgcgatagacgctgcctgtttcagctggagacagtcgccgtgactcagatgaacaagt

SEQ ID NO: 16062 - DNA, 60 bp, Homo sapiens
ggctccatgtctgaagtgcaggagctctgcaaacagctgcacgccaagatcgatgcggct

SEQ ID NO: 16063 - DNA, 60 bp, Homo sapiens
acgccgctgaggagcgcgcgggcaccctgcagcgcgagctggaccacgagaggaagctga

SEQ ID NO: 16064 - DNA, 60 bp, Homo sapiens
tccggaacattttcaagcagatagcaggagatgacatggagatctgtgcagatgagctca

SEQ ID NO: 16065 - DNA, 60 bp, Homo sapiens
ccacgcccgtgtggacaaggtggatgaagagagatacgacatagaggcaaaagtcaccaa

SEQ ID NO: 16066 - DNA, 60 bp, Homo sapiens
tccagaagtatgatgactcctttgacgacgttgaccgcacactggatgaatggaagcgtg

SEQ ID NO: 16067 - DNA, 60 bp, Homo sapiens
ttgccagcaccgattcacagcctcgaactccaggggcttctagttccaggcttatctatc

SEQ ID NO: 16068 - DNA, 60 bp, Homo sapiens
ctttgccacaacggacgacttctatgacgacccgtgtttcgactccccggacctgcgctt

SEQ ID NO: 16069 - DNA, 60 bp, Homo sapiens
gggatggtgatagagagtgctcaggaatgaaacttcttggtatacatgaacaagcagcag

SEQ ID NO: 16070 - DNA, 60 bp, Homo sapiens
gaatccgtgaaggaggcccaggagaaactggagcaggccgagaagaaggccactgatgct

SEQ ID NO: 16071 - DNA, 60 bp, Homo sapiens
tcagcctcgagtagccttcgatgcctttcttccatcgtggacagtatttcctcggaggaa

SEQ ID NO: 16072 - DNA, 60 bp, Homo sapiens
ggcttcctgcgtgtgtaaaagtcgaggtattgctggcattcagggtgacatgatggtact

SEQ ID NO: 16073 - DNA, 60 bp, Homo sapiens
ggctacccaacttctatcaaatgtcaactccagaaatacgcagatcacccctgacacaac

SEQ ID NO: 16074 - DNA, 60 bp, Homo sapiens
aaatgcctccacaacaccagggagattaaggacctgaagctgaaggtgatggacctccgt

SEQ ID NO: 16075 - DNA, 60 bp, Homo sapiens
taccgcttatgcctgaggaaccctttgcactggtatagaaagccgcgattccttcacagt

SEQ ID NO: 16076 - DNA, 60 bp, Homo sapiens
gtgctccagtccccagctcactcagccacacacaccatgtgtgaagaggagaccaccgcg

SEQ ID NO: 16077 - DNA, 60 bp, Homo sapiens
atgtcaggatctctcagcctctgtgttaccgagggcatttctaacagtcttcttactacg

SEQ ID NO: 16078 - DNA, 60 bp, Homo sapiens
cgccaaaggagtagcaggagaaacgagtggctaagaaagtggggtggatatcacacaaag

SEQ ID NO: 16079 - DNA, 60 bp, Homo sapiens
caggactgtgattgtgctagatgtacctgcccaagtctgctggtcacatttggcagcaaa

SEQ ID NO: 16080 - DNA, 60 bp, Homo sapiens
ctcccttctctgtccacaccacgagtggcacatcccacctgctgattccagctcctggcc

SEQ ID NO: 16081 - DNA, 60 bp, Homo sapiens
tttgaggttccatctgtcttgcttgctccaagtcatctaatggctcttctgacgcttgga

SEQ ID NO: 16082 - DNA, 60 bp, Homo sapiens
gagaggacacagaaggtgccaacactgtcgctacagtaaggacctgaagtgactttgaga

SEQ ID NO: 16083 - DNA, 60 bp, Homo sapiens
gaagagcacacagatctcgaggcccagatcgtcaaggatatccactgcaaggagattgac

SEQ ID NO: 16084 - DNA, 60 bp, Homo sapiens
aagctctgcatgtgtgctgatgggacgctcttcaaggtgcaagtaaccagccagaacatg

SEQ ID NO: 16085 - DNA, 60 bp, Homo sapiens
atagaaacacctaatgtcagggcagaccccttcaaagaactaaggttggagtccccaacc

SEQ ID NO: 16086 - DNA, 60 bp, Homo sapiens
tggagagacaagtaaactctcagagtaactgtcccctctgactaccatttctaaggatgc

SEQ ID NO: 16087 - DNA, 60 bp, Homo sapiens; identical to SEQ ID NO: 4855

SEQ ID NO: 16088 - DNA, 60 bp, Homo sapiens
tgtggatggtcagatagcccttgtctcccgccgccaatctctggcccctagcagcacgga

SEQ ID NO: 16089 - DNA, 60 bp, Homo sapiens
acaacacaggaactgtggatttatcagcgagagtggcagcgctttggtgtccgcatgtta

SEQ ID NO: 16090 - DNA, 60 bp, Homo sapiens
tttcagcgtagtggcagacacgcccgagctccagagaatcaagaagacccaggaccagat

SEQ ID NO: 16091 - DNA, 60 bp, Homo sapiens
aatgtcaccttcactcacagtctgagttcttgtccgcctgtcacgccctcaccaccctcc

SEQ ID NO: 16092 - DNA, 60 bp, Homo sapiens
tcatgtccacattgtctttgatggtaaccgtgtgttccaagcacagatgaagctctgggg

SEQ ID NO: 16093 - DNA, 60 bp, Homo sapiens
tgagacctgaagtcttatgggctgggggaacagtggtcatacgcgctcagggatgattat

SEQ ID NO: 16094 - DNA, 60 bp, Homo sapiens
gcgttcgccaatgagaaaagcaaagcaacagaaagacgacgaccagcaagaaaaggacag

SEQ ID NO: 16095 - DNA, 60 bp, Homo sapiens
gtatgacgctccactgtggatatctaatgccctgttgagagtagccttgctcagtactaa

SEQ ID NO: 16096 - DNA, 60 bp, Homo sapiens
cttctgggtttccaccaattggcaagaagggatcagcctgtcctagagatcactcctctg

SEQ ID NO: 16097 - DNA, 60 bp, Homo sapiens
tggagagtccctttgtcttcccaattaaacaccctagccaagaaccctgaagtcctccct

SEQ ID NO: 16098 - DNA, 60 bp, Homo sapiens
gccacagatgacattactgaactatactcaactctggaatgtttggaaaatatcttcact

SEQ ID NO: 16099 - DNA, 60 bp, Homo sapiens
tgacctggacaagctgtgcacgtctcctgttctggtctcttcccgatgcagtggctggct

SEQ ID NO: 16100 - DNA, 60 bp, Homo sapiens
cgccctgtacttggataggctggctaactcgtaggaagagagcactgtatggtatccttt

SEQ ID NO: 16101 - DNA, 60 bp, Homo sapiens
cctactgccacaagccctgctatggaatcctcttcggacccaagggagtgaacaccggtg

SEQ ID NO: 16102 - DNA, 60 bp, Homo sapiens
aatagcagttggggaagacggcttcaaacagtgggacgtgctggagtctctggacatgga

SEQ ID NO: 16103 - DNA, 60 bp, Homo sapiens
ggaggtgaggcacgagctgaaggaggacatcaaggccttaaacgccaaaatgaccaatat

SEQ ID NO: 16104 - DNA, 60 bp, Homo sapiens
tgtacctgcacgatgggcactcatgtcaggatgtggacggctactgctacaatggcatct

SEQ ID NO: 16105 - DNA, 60 bp, Homo sapiens
gggaatgtgagtaagcttgctgccaaaggtaactaggaaagcattcatctgctgcctcct

SEQ ID NO: 16106 - DNA, 60 bp, Homo sapiens
cacctttgcacctagcctgtgctaatggacatacagatgttgtacttttcctaattgagc

SEQ ID NO: 16107 - DNA, 60 bp, Homo sapiens
gcactgatttatatagctgttctcagggagaaacaagatttgcctgattcaccttttctg

SEQ ID NO: 16108 - DNA, 60 bp, Homo sapiens
tttgcattcgactctccccaaagtgtgccgaacaggttggaagcaaaggctccggtttaa

SEQ ID NO: 16109 - DNA, 60 bp, Homo sapiens
cagtgcaatttaaagtgaccttagtgatgcagagttcctgagtggtgtttgtagaatgag

SEQ ID NO: 16110 - DNA, 60 bp, Homo sapiens
tgccacaagaataacgggcggttggaaatctggaacagagtatcctgagaatctgcccac

SEQ ID NO: 16111 - DNA, 60 bp, Homo sapiens
aatcagactgaggaactgggacatcagggcccttcagaaggcactggggattggagcagt

SEQ ID NO: 16112 - DNA, 60 bp, Homo sapiens
cttaagaggccttcatctgccatcactcgtgtctctcagtgaaaggctgcttaaacagaa

SEQ ID NO: 16113 - DNA, 60 bp, Homo sapiens
ttttgatgaccgcagaagaccctgggagaggcaaagggatagggatgacagagattttga

SEQ ID NO: 16114 - DNA, 60 bp, Homo sapiens
aaagacttgactgcgaccaaggcaagccttccgacagtgtcctcaagaccaagagatcct

SEQ ID NO: 16115 - DNA, 60 bp, Homo sapiens
gtgtgggggacacgcagatgagtgaattggaatgtccagcagagttaccctcccaattat

SEQ ID NO: 16116 - DNA, 60 bp, Homo sapiens
ttttcaacagcctccaaaaccacagtctcctgcccttgacaatgctgtgatggctcaggt

SEQ ID NO: 16117 - DNA, 60 bp, Homo sapiens
ttatttggggatgtaaagctgaaggtcagccttgcacctaaacccaacctggaatgttaa

SEQ ID NO: 16118 - DNA, 60 bp, Homo sapiens
ggcagatgtgaggtggtgatcatggaagacgcccctgactattatgcagtggaagacatt

SEQ ID NO: 16119 - DNA, 60 bp, Homo sapiens
attccaccactgacaacgctcatgaacacagggtccacacacacagccccaccagtgacg

SEQ ID NO: 16120 - DNA, 60 bp, Homo sapiens
ggcattgctttgccttatcatctcatctggagtttttaaatgccatttgtttcagttgtc

SEQ ID NO: 16121 - DNA, 60 bp, Homo sapiens
ttttatatcatctcagtgctgtggaatggcttcctgctttggtgccttactcaatctctg

SEQ ID NO: 16122 - DNA, 60 bp, Homo sapiens
caaaaggctagaggcatgggccaggtaaaaattgggcctagagtgaagactgtgctgtcg

SEQ ID NO: 16123 - DNA, 60 bp, Homo sapiens
aagttggaggatctgaacatacagagcccacatttccacaccagaactggaactacgtag

SEQ ID NO: 16124 - DNA, 60 bp, Homo sapiens
gtggagaggttaatctaggttgggaaactgagtaaaagtccagagcaggaatgagcctgc

SEQ ID NO: 16125 - DNA, 60 bp, Homo sapiens
tttacaagtacacacaacactctgacaagttccctcctaacgacgttcccagggacgtat

SEQ ID NO: 16126 - DNA, 60 bp, Homo sapiens
cgcagacaccacaacagcagccttaacttcttcaactggttctctgaccacaacttcgca

SEQ ID NO: 16127 - DNA, 60 bp, Homo sapiens
agttaggcagcagcagccgcggagcagtagccgccgtgggagggagccatgaagcattac

SEQ ID NO: 16128 - DNA, 60 bp, Homo sapiens
aaggctcacaaatgggcctggacgagtgtcagtttcagttccgcaatggccgctggaact

SEQ ID NO: 16129 - DNA, 60 bp, Homo sapiens
ccaaagaagtttcttctgcctagttcgaaaactgtatcttcgggcaccaaagagcattgt

SEQ ID NO: 16130 - DNA, 60 bp, Homo sapiens
aatccggcccaggatgtagagctggcagtgcctgacggcgcgtctgacgcggagttgggt

SEQ ID NO: 16131 - DNA, 60 bp, Homo sapiens
tggttggaataaaaacagggttgaatgagttccagaaagcagggttctcaacctcgtgga

SEQ ID NO: 16132 - DNA, 60 bp, Homo sapiens
gtatcagttcccctgtattctgtgcttcatcgaatttgcaagactgacctcttttaagca

SEQ ID NO: 16133 - DNA, 60 bp, Homo sapiens
gccacttgcgagcgctgcaagggcggctttgcgcccgctgagaagatcgtgaacagtaat

SEQ ID NO: 16134 - DNA, 60 bp, Homo sapiens
ttcgtcatgagctccgtgcagaagctggtgacggatgaggacgtgttccccacaaaatac

SEQ ID NO: 16135 - DNA, 60 bp, Homo sapiens
gaaactatgctcaagtcacagtttgtccctaaccacatcctaccaccacatcctgctggg

SEQ ID NO: 16136 - DNA, 60 bp, Homo sapiens
agattctgaccaatgaagagagtcgagcccgctatgaccactggcgaaggagccagatgt

SEQ ID NO: 16137 - DNA, 60 bp, Homo sapiens
gaacttggttctgtccttttctgaagcccttgaccactatagactcaaacatcaccttgt

SEQ ID NO: 16138 - DNA, 60 bp, Homo sapiens
ggattctgtaagccaaaagattctcctttgcctgagactgggtttctgtcacttgagact

SEQ ID NO: 16139 - DNA, 60 bp, Homo sapiens
ttttacgtgaatgggctgacacttgggggccagaaatgttcggtgatccgggactcactg

SEQ ID NO: 16140 - DNA, 60 bp, Homo sapiens
cggcgcgatgaccacgctacgggcctttacctgcgacgacctgttccgcttcaacaacat

SEQ ID NO: 16141 - DNA, 60 bp, Homo sapiens
gttgctgatttgtccatttctttccctgcactttgttacatctgggatacagtctaactc

SEQ ID NO: 16142 - DNA, 60 bp, Homo sapiens
tttgtatctgtcccccacagtggaagggtcctctctgctcagctgatgttaacgaatgtg

SEQ ID NO: 16143 - DNA, 60 bp, Homo sapiens
ttaaatctggtgggtacctggatcttccacacgagtgggattctggccttcagagaccag

SEQ ID NO: 16144 - DNA, 60 bp, Homo sapiens
aggccaggtgctaatcacacacctcgctgttctgttctcggtatacagtgttggcaggca

SEQ ID NO: 16145 - DNA, 60 bp, Homo sapiens
ttttgatagcctgattgtcaaccttctgggcatctccctgactgtcctcttcaccctcct

SEQ ID NO: 16146 - DNA, 60 bp, Homo sapiens
attctggggagacattgccaaggaattttactggaagactccatgccctggcccattcct

SEQ ID NO: 16147 - DNA, 60 bp, Homo sapiens
cacctgctaggagtctgtttactactgaaccaattttccagagcagtcgcggactcatgg

SEQ ID NO: 16148 - DNA, 60 bp, Homo sapiens
gacgaccctacgtggcactgtttgagaaatgttgcctaattggttgtaccaaaaggtctc

SEQ ID NO: 16149 - DNA, 60 bp, Homo sapiens
ttggcaagctctatcaccaaggagccaaacatcctacaagacacagtgaccatactaatt

SEQ ID NO: 16150 - DNA, 60 bp, Homo sapiens
gctgctcctgcctgattcaactgtagcctgtaatgggtaaaagccacatttaggaggtgg

SEQ ID NO: 16151 - DNA, 60 bp, Homo sapiens
tgctctatgacagcgacgccaagacagacacgctgcagatcgaggactttctggaggaga

SEQ ID NO: 16152 - DNA, 60 bp, Homo sapiens
ccagtgtctacttcttgggaagaagcagtaaacagttgggaaatgcagtcactacctgag

SEQ ID NO: 16153 - DNA, 60 bp, Homo sapiens
aggatgggtaacttgggtcttcagatggaagctgaaaacaggatgatgctgtcctccagc

SEQ ID NO: 16154 - DNA, 60 bp, Homo sapiens
gaatgcaaaccagggtactatgtggcagaaagtgcagagggtaaagtcaggaacaagctc

SEQ ID NO: 16155 - DNA, 60 bp, Homo sapiens
acaggagagttcaggtccaggatggccagcctgttccggtcctatctgccagcaatctgg

SEQ ID NO: 16156 - DNA, 60 bp, Homo sapiens
ttgaagccctaaaccaggaattatttgtgttctaacaggaggatgaacttgctgaaaata

SEQ ID NO: 16157 - DNA, 60 bp, Homo sapiens
ccccagtttccagaagactattcttggatggggaccagctaacactggctgattgtagct

SEQ ID NO: 16158 - DNA, 60 bp, Homo sapiens
cacttcctgaggtcaggtcttggtaggtgcctgcatctgtctgccttctggctgacaatc

SEQ ID NO: 16159 - DNA, 60 bp, Homo sapiens
cagagatattgcccgtgtgtttgcagataagatggtttctatgaagaggtaggaaagctg

SEQ ID NO: 16160 - DNA, 60 bp, Homo sapiens
ccttagtgaagatgtgtttcaacatgctgttgtcctttacctgcataatcacagctatgc

SEQ ID NO: 16161 - DNA, 60 bp, Homo sapiens
gcttctcatcttgtgaaatggccaggatcctctcctttgaaacctgctctgtaggagcta

SEQ ID NO: 16162 - DNA, 60 bp, Homo sapiens
cagcttgcagctgtctgaaaccaacaggaccctctacctatttggtgtcacaaactatac

SEQ ID NO: 16163 - DNA, 60 bp, Homo sapiens
tagacaattacttaacatcccccctcccagaagaagtggatgaaaccagtgctgaagatg

SEQ ID NO: 16164 - DNA, 60 bp, Homo sapiens
agaagttgacattgatgctgtaccacccttaccaaaggaatcagcctatctttacgcacg

SEQ ID NO: 16165 - DNA, 60 bp, Homo sapiens
gtgaaatacaggaccgatatggtggcatccgcagttacccagtcaccctgaatgtcctct

SEQ ID NO: 16166 - DNA, 60 bp, Homo sapiens
catcataacccatgaaggataaaagccccaaatggtggtaactgataatagcactaatgc

SEQ ID NO: 16167 - DNA, 60 bp, Homo sapiens
tgaagtcattgacctgagcaactatgaggagctcacagattatggggaccaactccccga

SEQ ID NO: 16168 - DNA, 60 bp, Homo sapiens
ttcatcaacctcctgtcctttgacttccatgggtcttgggaaaagccccttatcactggc

SEQ ID NO: 16169 - DNA, 60 bp, Homo sapiens
tcctcaccctgctctgattcactgtgtcaaaggctgtgagcccttcatgggagacaatta

SEQ ID NO: 16170 - DNA, 60 bp, Homo sapiens
tcccttcagtcacctcttactattcaggagagaacctcgacttgtcctgcttcgcaaact

SEQ ID NO: 16171 - DNA, 60 bp, Homo sapiens
gatctccatcatctgtacctcactgataacaacttggaccacatccctctgccactccca

SEQ ID NO: 16172 - DNA, 60 bp, Homo sapiens
cagaaaaggacagtagctcgatgatgcagactctgttgacagtgacccagaatgtggagg

SEQ ID NO: 16173 - DNA, 60 bp, Homo sapiens
agaggcttggagagagcagacgccttctggattcaagaagacgaggctcacctgttactc

SEQ ID NO: 16174 - DNA, 60 bp, Homo sapiens
aaatagggagacaaggagacagaccctgcagtcctactacagtctggagtggggtcctaa

SEQ ID NO: 16175 - DNA, 60 bp, Homo sapiens
atttagcagactggaaccaccacgcaagcctctgtagggggtggatggagacacttctaa

SEQ ID NO: 16176 - DNA, 60 bp, Homo sapiens
tgctctgctgctcgtgtcccccacgcgagaagaagtacacggccaccaaggtcgtctact

SEQ ID NO: 16177 - DNA, 60 bp, Homo sapiens
gaacctatatacatgcactcgacaatggtctttttaccctgggagctccacacaaagaag

SEQ ID NO: 16178 - DNA, 60 bp, Homo sapiens
gcatcagcatcagcccttcctcccagagccctcattccaattccaagctaagaaggtatt

SEQ ID NO: 16179 - DNA, 60 bp, Homo sapiens
gcagcatatcctgacatggagtctgatatacgttcatgggaattgtttctttctaatgtt

SEQ ID NO: 16180 - DNA, 60 bp, Homo sapiens
tacatccaaagttatcgaaaagttcccggctccagtgcacatctgtgtgagctgggagtc

SEQ ID NO: 16181 - DNA, 60 bp, Homo sapiens
tggtataactgggtccctcaacagtaacctgggctaaaataggtcttatgtggttcaact

SEQ ID NO: 16182 - DNA, 60 bp, Homo sapiens
gtgtctgaactgcagctcaagctgaactccagcggctcctcagaagattcctttgttgaa

SEQ ID NO: 16183 - DNA, 60 bp, Homo sapiens; identical to SEQ ID NO: 4855

SEQ ID NO: 16184 - DNA, 60 bp, Homo sapiens
aaatgccaagtggacgagacagaggagccagatgtacacctaccccagccctacgctgtg

SEQ ID NO: 16185 - DNA, 60 bp, Homo sapiens
tggccgatcagaccatttctatcgtccgctgacctctggccacaggaagccaggtccacc

SEQ ID NO: 16186 - DNA, 60 bp, Homo sapiens
ataatctgcggcaagtgcggtacagttacctccaacaggacctgcctgacaaccccgaga

SEQ ID NO: 16187 - DNA, 60 bp, Homo sapiens
cacagaagatttgcagaaaatgagcgatgctgcaggtgatattgttgacatacgagaaga

SEQ ID NO: 16188 - DNA, 60 bp, Homo sapiens
ctgattggccctggaacctccatcccactcttgttatgactccacagtgtccagactaat

SEQ ID NO: 16189 - DNA, 60 bp, Homo sapiens
ccatttgctgttatctgggaaacaagattctaacaggaaaccagcctaagacacttcagg

SEQ ID NO: 16190 - DNA, 60 bp, Homo sapiens
ccatatccccaggattgcaaccccagatgtcctatgagatgttttggtcccatgtgcaca

SEQ ID NO: 16191 - DNA, 60 bp, Homo sapiens
gctggctgtgaacatgagttactcaaggaaaagtgcaaggctacttgcctatgtgagaac

SEQ ID NO: 16192 - DNA, 60 bp, Homo sapiens
ggttctttgacccaggatagtcttgcttcttgaggtagatcacaggggtctgtgtacctc

SEQ ID NO: 16193 - DNA, 60 bp, Homo sapiens
tggcagctgtcggctggaaggaactggttctgctcacacttgctggcttgcgcatcagga

SEQ ID NO: 16194 - DNA, 60 bp, Homo sapiens
gcacatggccttgggtgacaaattcctctttgatgaatgtaccctgtggggatgtttcat

SEQ ID NO: 16195 - DNA, 60 bp, Homo sapiens
gttcccaagatgcagtcctagcgtagcgaacgttcctggagtggggtgaaggatatcaat

SEQ ID NO: 16196 - DNA, 60 bp, Homo sapiens
acgtcacgcctgatggcacctgggaccataatcctgagatcccttgaccgggataaaagt

SEQ ID NO: 16197 - DNA, 60 bp, Homo sapiens
cttgggcaaaaggaattgtcagccctaccccaacccttcaactaccagaatctgggccac

SEQ ID NO: 16198 - DNA, 60 bp, Homo sapiens
gaggaagtcttatcttctgcagtgagtatggcccaatgctttctgtggctaaacagatgt

SEQ ID NO: 16199 - DNA, 60 bp, Homo sapiens
atcatctcccacaccctggatctcactctcctcttagtaacagagacactcctgaggttg

SEQ ID NO: 16200 - DNA, 60 bp, Homo sapiens
aagggacagaagaaagacagcctaggagcagagcctcccagatggctgagttggatctaa

SEQ ID NO: 16201 - DNA, 60 bp, Homo sapiens
tgtgttaaccgacagcgagaccaagtcaaacgttactactctgttgtatatccaggctgg

SEQ ID NO: 16202 - DNA, 60 bp, Homo sapiens
ggtaaataccctccactcaaggaggtagaactcagtcctctcccttgtgagtcttcacta

SEQ ID NO: 16203 - DNA, 60 bp, Homo sapiens
gtttgataagcttcgcgagttcttgagagtggaggagcaggccattctggatgccatggc

SEQ ID NO: 16204 - DNA, 60 bp, Homo sapiens
gcgctcacaaattccatgctcagtgcattagaccatggttgatgcaacaggggacatgtc

SEQ ID NO: 16205 - DNA, 60 bp, Homo sapiens
aacttgaaagacctcatggtgctgaatgatgtgtaccgcgtgatggcagtggatgcactg

SEQ ID NO: 16206 - DNA, 60 bp, Homo sapiens
aaccagctgaaaacctctacattgcccttgacctcacttgggaggaagacagatgccaag

SEQ ID NO: 16207 - DNA, 60 bp, Homo sapiens
gcatgggcatcctatgatcagacaggaaaggaggtggctgatagatggtacagtgaaatc

SEQ ID NO: 16208 - DNA, 60 bp, Homo sapiens
gcccaaaacagttgccaaactttgccattgtgctcctgcatttgtgtttgagctgctata

SEQ ID NO: 16209 - DNA, 60 bp, Homo sapiens
ggtggagacagtggaaaagaaccgaggacaggaaaggattgggtaggtgaaggggtcagg

SEQ ID NO: 16210 - DNA, 60 bp, Homo sapiens
tgacaatggcttcagcagcacgcttgacaatgatgtgggaggaggtcacatgccctatct

SEQ ID NO: 16211 - DNA, 60 bp, Homo sapiens
agctgcatctcctacgcctgctagtcctgcatcgaacagagctgttaccccttctagtga

SEQ ID NO: 16212 - DNA, 60 bp, Homo sapiens
cagaagcccagattagggtggctgtccatccctggatagctatttgcacgaatcatggac

SEQ ID NO: 16213 - DNA, 60 bp, Homo sapiens
atgccctgactcctgtgattgaatccagcctccatcaagtggaaagcatgcacggagcag

SEQ ID NO: 16214 - DNA, 60 bp, Homo sapiens
tcctgatggactgtacccaggatctcacatttgcttaagcagctcccacaattgggttct

SEQ ID NO: 16215 - DNA, 60 bp, Homo sapiens
ttgttgcctcattctggggacatcattgctactgtctttgccccacttgaggttttccgg

SEQ ID NO: 16216 - DNA, 60 bp, Homo sapiens
cttcggggaccaccaattttgtctggaaccaccctcccggcgtatcctactccctgtgcc

SEQ ID NO: 16217 - DNA, 60 bp, Homo sapiens
aagtggctctgtcagagtgctatacagtagcttctgtggctgagatgcctcagaactacc

SEQ ID NO: 16218 - DNA, 60 bp, Homo sapiens
gccctctcctgagtccagatgatgctcataccaatggcttcagtgatggcggtgactgaa

SEQ ID NO: 16219 - DNA, 60 bp, Homo sapiens
tctggaccctgaggaagccagaagctctccctacaaagctgagaagtatgttccgagccc

SEQ ID NO: 16220 - DNA, 60 bp, Homo sapiens
gggaagtgtccttctacagtgtaagcgatgggtcccacctgcacacctactcccaggcca

SEQ ID NO: 16221 - DNA, 60 bp, Homo sapiens
aaaccaaacagggtgtggcagaagcagcaggaaagacaaaagagggtgttctctatgtag

SEQ ID NO: 16222 - DNA, 60 bp, Homo sapiens
ggtgtttaagccaagtgatgtcatgcttgttcacttccgaaatgttgacttcaactatgc

SEQ ID NO: 16223 - DNA, 60 bp, Homo sapiens
atgtacagcactgaaaggaatgaagcaccagcaggaggtggacagagtctctcatggatg

SEQ ID NO: 16224 - DNA, 60 bp, Homo sapiens
tgaggtaaccattgaggggtttgatggcaactggtacctgcagcggatggacgtgaagct

SEQ ID NO: 16225 - DNA, 60 bp, Homo sapiens
atgaacaaagccgggccctttccataggaactgcccttggagatagcagagtgtggctgc

SEQ ID NO: 16226 - DNA, 60 bp, Homo sapiens
gcctggaggagctgacggacgaggagatggcggcgctaggcaaggaagagctagtgcggc

SEQ ID NO: 16227 - DNA, 60 bp, Homo sapiens
ggctggggaagcaaggaaataagtcatctgtatgctgactggggataatggcatcaaatg

SEQ ID NO: 16228 - DNA, 60 bp, Homo sapiens
gagagtattgtgtagtgctctctgcaatggaacatgtgatttcagggttgccgcagtgtc

SEQ ID NO: 16229 - DNA, 60 bp, Homo sapiens
tgttcctggactgtacatctccctggtgacctggcagcgcccagatgcacctgcgaacca

SEQ ID NO: 16230 - DNA, 60 bp, Homo sapiens
ataccttagggaattgcttggacctggtgacaagggctcctgttcaatagtggtgttggg

SEQ ID NO: 16231 - DNA, 60 bp, Homo sapiens
cggcaacgattatcagccagtacaagctatttccaaccagatttgctagaggaaggcgaa

SEQ ID NO: 16232 - DNA, 60 bp, Homo sapiens
ggtgtacatggacaatgttacagtgtaagaaactccatatccatatgttcccattcgcat

SEQ ID NO: 16233 - DNA, 60 bp, Homo sapiens
gccccatggaggttctagggtcctgagaatacaggcattgagacgggctgaggaggaact

SEQ ID NO: 16234 - DNA, 60 bp, Homo sapiens
tatgtatgcagcagtggaacatgggcctgtgctttgcagtgactccaacatcctgtgcct

SEQ ID NO: 16235 - DNA, 60 bp, Homo sapiens
aggaagtggagtagcctaatgaaaaggggttctagttgagctctgtagataaatgccttg

SEQ ID NO: 16236 - DNA, 60 bp, Homo sapiens
cacattcccaactctaactcagcacacactgccagtcttccccaatatctgtctcctctc

SEQ ID NO: 16237 - DNA, 60 bp, Homo sapiens
gaagtccgtggtcataaccttgtctctggctgcatccaattgttgctttgaccctctcct

SEQ ID NO: 16238 - DNA, 60 bp, Homo sapiens
gagtgggaatctcaaagcagttgagtaggcagaaaaaagaacctcttcattaaggattaa

SEQ ID NO: 16239 - DNA, 60 bp, Homo sapiens
gtgcaaagtcccgttcaaatattgactcagtaatgagctctacaagccagcctttgtggc

SEQ ID NO: 16240 - DNA, 60 bp, Homo sapiens
ttatctcggcttcgtttctggagggccaggaacaaacaggcttcaaagccaagggcttgg

SEQ ID NO: 16241 - DNA, 60 bp, Homo sapiens
cctatatcagccagtattctgaaattcctatccagatgatgatgcacatgcaacccaagg

SEQ ID NO: 16242 - DNA, 60 bp, Homo sapiens
gcagtacatcgtgacctggtatggactctctgcagctacatcctacctgtggtttaagaa

SEQ ID NO: 16243 - DNA, 60 bp, Homo sapiens
accatgtccagccctctccagtgtatccacagccccgacctttgatgagaactcagctgt

SEQ ID NO: 16244 - DNA, 60 bp, Homo sapiens
tgttatgcaggcttaacgtgtctgagagccataaatgacctaacgtttcccgttagtctc

SEQ ID NO: 16245 - DNA, 60 bp, Homo sapiens
aggtggtgttcccactgatgaagagcaggcgactgggttggagagggagatcatgctggc

SEQ ID NO: 16246 - DNA, 60 bp, Homo sapiens
cacaaatcatgcagtatgttcctttcccaccgttttccgacatctccaatcccactgctc

SEQ ID NO: 16247 - DNA, 60 bp, Homo sapiens
taatcctgggttgccttgctctgttcttactccttcagcggaagaatttgcgtagacccc

SEQ ID NO: 16248 - DNA, 60 bp, Homo sapiens
gagttctaacgcacagaatcctgacttccatgtagctccagtcattgtgatcagacatcc

SEQ ID NO: 16249 - DNA, 60 bp, Homo sapiens
ccatgtggaagggaatatgtggtgttactggtgacaaactaacaagaccatcctgtccac

SEQ ID NO: 16250 - DNA, 60 bp, Homo sapiens
ttgaaccagaacaaaaccgagtcaacagggaagcagaggagaaccgggagccattcagaa

SEQ ID NO: 16251 - DNA, 60 bp, Homo sapiens
aaagcaagagtcggatcagtgcgtcatggaggtctcagaccgaagaaactgtggctaccc

SEQ ID NO: 16252 - DNA, 60 bp, Homo sapiens
aggtagcaggacactccattggatggcccctgatgaggaagacttcagaattgggaacta

SEQ ID NO: 16253 - DNA, 60 bp, Homo sapiens
ctgtgcctcggctcacaacacagattgactgctctgactttgactactcaaaattggcct

SEQ ID NO: 16254 - DNA, 60 bp, Homo sapiens
gcgcttctgctgaaagttcatatctggagcctgatgtcttaacgaataaaggtcccatgc

SEQ ID NO: 16255 - DNA, 60 bp, Homo sapiens
cttgagtgtcaaggctggacagctactgccagatgccaaagataggagaaagtgccagcc

SEQ ID NO: 16256 - DNA, 60 bp, Homo sapiens
caggacaagggcctgggatttggttcgtttgctcttctgggaagagaagttcaggggtcc

SEQ ID NO: 16257 - DNA, 60 bp, Homo sapiens
tctcacagcgtggtttgcatccctggcaccacgtgtctgaaggctgagaagacccacatg

SEQ ID NO: 16258 - DNA, 60 bp, Homo sapiens
ctcagcaactgagcaaatatgtgcctgtgagtttgccagtagagctgtgaagaaacagct

SEQ ID NO: 16259 - DNA, 60 bp, Homo sapiens
gcaggtaccccaggaatcattggctctgtgtggtatgctgttgatgtgtatgtggaacgt

SEQ ID NO: 16260 - DNA, 60 bp, Homo sapiens
tgcagaaagggccacccatgatactccactcccagcagctcaacctaccctggtccagtc

SEQ ID NO: 16261 - DNA, 60 bp, Homo sapiens
cggtgctgcggaagaactgaaggttgcgatgccttactctgacgggagcatctgtatttt

SEQ ID NO: 16262 - DNA, 60 bp, Homo sapiens
acacctcgcccttcagcccaccaccctggcaggcttccatccccgtccatgctcaagatg

SEQ ID NO: 16263 - DNA, 60 bp, Homo sapiens
catccacaagattgaggagggccatctggctgtgtactacaggggaggagctttactaac

SEQ ID NO: 16264 - DNA, 60 bp, Homo sapiens
catcgagtttggggagatcatcatcgactttgtgtggatcaccatcatcaagctggtggc

SEQ ID NO: 16265 - DNA, 60 bp, Homo sapiens
atgcaagtcttgatgaggaacttgatcgagtcaagatgagttagtggagctgggcttggc

SEQ ID NO: 16266 - DNA, 60 bp, Homo sapiens
gcctcttggaggaggaggtgttcatctgcaccacagagagttgaggccctaacaaatttc

SEQ ID NO: 16267 - DNA, 60 bp, Homo sapiens
gaacttggttcagatgtccctttcactgtatgtcctctgacccctttggcaaggttgcca

SEQ ID NO: 16268 - DNA, 60 bp, Homo sapiens
gcgccgcaatcaggagctgaagcaacaggttgatagtttgctttctgagagccaactgaa

SEQ ID NO: 16269 - DNA, 60 bp, Homo sapiens
cagcctacacaagtgaaatggcagctgatggtagctagttgtttcagaagaagtggtaac

SEQ ID NO: 16270 - DNA, 60 bp, Homo sapiens
aacccgcgcatgatcgtggatgtcaccccatacatgaacccttcgcctttcaccgtctcg

SEQ ID NO: 16271 - DNA, 60 bp, Homo sapiens
gcggcattaagaggaagtcctggctgcagacacctgcttctgattccacaaggggctttt

SEQ ID NO: 16272 - DNA, 60 bp, Homo sapiens
acatcttatgctaactgtagataaagtggtttgatggtgacttcctcgcctctcccaccc

SEQ ID NO: 16273 - DNA, 60 bp, Homo sapiens
ctccactgcctacgcagggattcacataaaatcgacaattatctcaagctcctgaagtgc

SEQ ID NO: 16274 - DNA, 60 bp, Homo sapiens
cctgaggatccctttgtgaaacactgcaagcgtttcttcgaattctgcatccccagacct

SEQ ID NO: 16275 - DNA, 60 bp, Homo sapiens
ggggggtgatcactctacacccccaagtgtatatgggtctgacagagcctatactatctg

SEQ ID NO: 16276 - DNA, 60 bp, Homo sapiens
atcttgtgtatgggcagatatgacctgacagccccctccagtgccacagggtacgcacac

SEQ ID NO: 16277 - DNA, 60 bp, Homo sapiens
cagagtaaccttccataacaaaggagcatatcccctcagtattgagccgattggggtgag

SEQ ID NO: 16278 - DNA, 60 bp, Homo sapiens
gagaggcctgagggatccgtctccactctgacgatccagcgcacagagcaggaggactcg

SEQ ID NO: 16279 - DNA, 60 bp, Homo sapiens; identical to SEQ ID NO: 4855

SEQ ID NO: 16280 - DNA, 60 bp, Homo sapiens
cagggcaccttgaactctggcttagcaagcatctaggctgcctcttcactttcttttagc

SEQ ID NO: 16281 - DNA, 60 bp, Homo sapiens
aagggaactgtgcgcccagccaatgacttcaaccctgacgcagatgccaaagcgctgcgg

SEQ ID NO: 16282 - DNA, 60 bp, Homo sapiens
cagtctgatacctgatgacacttccctatattactgtgtcaaaagacttctcgctggtgc

SEQ ID NO: 16283 - DNA, 60 bp, Homo sapiens
cagtagttgtgtctggaatcctagaattggcactttctgcctccttgctctaaatgtcac

SEQ ID NO: 16284 - DNA, 60 bp, Homo sapiens
ccagctcccaatttcaatcccataatggatgcccaaatgctaggaggagcactccaagga

SEQ ID NO: 16285 - DNA, 60 bp, Homo sapiens
caacagacacagagtgtgacctcaccgacgagattgtgaaggatgtgaagcagacgtact

SEQ ID NO: 16286 - DNA, 60 bp, Homo sapiens
aaagcagcatttaagacctcctatggcaaggatttaatcaaagatctcaaatcagagtta

SEQ ID NO: 16287 - DNA, 60 bp, Homo sapiens
aagtaaggaggtaagattgccacgtgcctgctggtactgtgatgcatttcaagtggcagt

SEQ ID NO: 16288 - DNA, 60 bp, Homo sapiens
cgctctttcactgctagtaagatcagattgcgtttctttcagttactcttcaatcgccag

SEQ ID NO: 16289 - DNA, 60 bp, Homo sapiens
ctcgtcggtgctcttgatgtctggggccaggggacaacggtcatcgtgtcttcgagcctc

SEQ ID NO: 16290 - DNA, 60 bp, Homo sapiens
tcgtgcaggaccagtcgcaatatttggagtcggagattagcatggtaccaggtgaggcgt

SEQ ID NO: 16291 - DNA, 60 bp, Homo sapiens
caccatctcacgaaatgacttagaggataagttgttcctggaaatgagcggcctgaaagc

SEQ ID NO: 16292 - DNA, 60 bp, Homo sapiens
tccgcagacacggctacttactattgtgcgcgagtgggtgaatggacttgggacatggat

SEQ ID NO: 16293 - DNA, 60 bp, Homo sapiens
caatccttacaacgggaacaaagagttttcagcgaagttccgggacagagtcacctttac

SEQ ID NO: 16294 - DNA, 60 bp, Homo sapiens
gacttagaagataagttgtttctggaaatgagcggcctaaaagccgaagacacaggcgtg

SEQ ID NO: 16295 - DNA, 60 bp, Homo sapiens
ttattgtcaacagggtaacagcttcccgaagttcggccctgggaccgttgtggatatcaa

SEQ ID NO: 16296 - DNA, 60 bp, Homo sapiens
cagaagcccagttattacaatcttttgagtggtcaataccgcagagttgccggtgcattt

SEQ ID NO: 16297 - DNA, 60 bp, Homo sapiens
attccttccatcttccttgcagaaaccacgagaacaaagccagttccctgtcagtgacag

SEQ ID NO: 16298 - DNA, 60 bp, Homo sapiens
atcctgccctacggagccgacagctatttacaaaccgaaaccaggagaagtgaagtggct

SEQ ID NO: 16299 - DNA, 60 bp, Homo sapiens
gcctagcttcggtgatcaagaacacaccgctgtactttgctgacaaacttcatcaagccc

SEQ ID NO: 16300 - DNA, 60 bp, Homo sapiens
ccatgcgcaatcatgataactgttgtgagtagtgcttttcattcttctcacttgcctttg

SEQ ID NO: 16301 - DNA, 60 bp, Homo sapiens
aaagccgaagacacagccgtatatttctgtgctagacggtactagacacagccctgacta

SEQ ID NO: 16302 - DNA, 60 bp, Homo sapiens
gcatgaaagcattcttccctgaaaagttaggcctctcagagtcaccacttcctctgttgt

SEQ ID NO: 16303 - DNA, 60 bp, Homo sapiens
gagcaactactccttgctgttgtgaaatctattcgaagtatacctgcctaccttgcagag

SEQ ID NO: 16304 - DNA, 60 bp, Homo sapiens
taggttttgtccatagcatcagttgatccttactaagtttttcatgggagacttccttca

SEQ ID NO: 16305 - DNA, 60 bp, Homo sapiens
ctactatatccagcaagacactaagggtgctgtacctgtgtggtggagatggctgaagtc

SEQ ID NO: 16306 - DNA, 60 bp, Homo sapiens
acctggagacggtgattttgggcctattgaagacacctgctcagtatgacgcttctgagc

SEQ ID NO: 16307 - DNA, 60 bp, Homo sapiens
tgagcatctcatggtggccctagtgactccaccagcagtctttgatgcaaagcagctaaa

SEQ ID NO: 16308 - DNA, 60 bp, Homo sapiens
ctcgttgcgaacaaggaaaatggtcatccccacctgtttgcttggaaccatgtactgtta

SEQ ID NO: 16309 - DNA, 60 bp, Homo sapiens
gcggcgcaccgaaaaataccaacagcaccgacaatcgcacacgcaactacaacacaaaag

SEQ ID NO: 16310 - DNA, 60 bp, Homo sapiens
ctacagtgagcagggagtggaatggaaaccatacaggctgaaatcctccatggtggacaa

SEQ ID NO: 16311 - DNA, 60 bp, Homo sapiens
gttgccagatggatgagggagtttatcgcaaaccatcctgactacaagcaagacagtgtc

SEQ ID NO: 16312 - DNA, 60 bp, Homo sapiens
aggactgtcttcatgcgcttgaacatcatcagccctgacctgtctggttgcacaagcaaa

SEQ ID NO: 16313 - DNA, 60 bp, Homo sapiens
cgtgctggagagcttcaaggtcagcttcctgagcgctctcgaggagtacactaagaagct

SEQ ID NO: 16314 - DNA, 60 bp, Homo sapiens
cgtgccggttttcagctattagcaactgtgctacacttgcacctggtactgcacattttg

SEQ ID NO: 16315 - DNA, 60 bp, Homo sapiens
agggcctgcacaaggagggtgctgttgagaccagaaaagaggccaccggtatctgtgtgg

SEQ ID NO: 16316 - DNA, 60 bp, Homo sapiens
acctcagtctctcagatcttccacagcccagacctggccataagggacacctttgtgaat

SEQ ID NO: 16317 - DNA, 60 bp, Homo sapiens
gatgtctccagagtgaagatgccgaggatgaacttgcattgaacattccagatgtgtgag

SEQ ID NO: 16318 - DNA, 60 bp, Homo sapiens
tgagggacatatcagtgacctcgacgttgcctttagactacagttgtgttagcctcttgc

SEQ ID NO: 16319 - DNA, 60 bp, Homo sapiens
tgctgagccgcagagaagtgacggttcctacacaggacaggggttccttctgggcattac

SEQ ID NO: 16320 - DNA, 60 bp, Homo sapiens
gagaacggagaagaagttgtagcagagggaaatgagacaggaagatgctctggggacaca

SEQ ID NO: 16321 - DNA, 60 bp, Homo sapiens
ttgattcagttgttattgcagtgtctgcttcatccgtggaacttgaggctcagatgcccc

SEQ ID NO: 16322 - DNA, 60 bp, Homo sapiens
actggtttccttgggtcttctcaggaccgtagtgcctaccagacgattgactcagcagag

SEQ ID NO: 16323 - DNA, 60 bp, Homo sapiens
tgatggaagcatcaccaaggagaactataaccaggagtggtggagcctcaggctgaagta

SEQ ID NO: 16324 - DNA, 60 bp, Homo sapiens
gggcctggatatctacgaaggatatggacagactgaaacggtgctaatctgtggaaattt

SEQ ID NO: 16325 - DNA, 60 bp, Homo sapiens
taaagaaggatttggacatctgtctcctactggcacaacagaattttggctgggaaatga

SEQ ID NO: 16326 - DNA, 60 bp, Homo sapiens
ggctgttcggaagaattggttgtaaggtgctctctttcatccggctcacttctgttggtg

SEQ ID NO: 16327 - DNA, 60 bp, Homo sapiens
aaggggctgactgtcattggagcggtgggcactgttaagaagcagccatcacatgatctg

SEQ ID NO: 16328 - DNA, 60 bp, Homo sapiens
catcttttggccagaatctggaaaccatacaagaaacgtgagactcctgattgcttctgg

SEQ ID NO: 16329 - DNA, 60 bp, Homo sapiens
ctcctcataggaagtcatttggtgttggaggtgggtttctcacctggggctctacgagat

SEQ ID NO: 16330 - DNA, 60 bp, Homo sapiens
gggttgtggaaagacatcaatctgcctgcaaagattcagactggcccttctgctctgatg

SEQ ID NO: 16331 - DNA, 60 bp, Homo sapiens
ccaaggagagggcacatcagcagaagaaacacagcggttttgaagatgaactctcagagg

SEQ ID NO: 16332 - DNA, 60 bp, Homo sapiens
atctgatgtctcagctcaaatggaatattgtcgcaccccatgcactgtcagttgcaatat

SEQ ID NO: 16333 - DNA, 60 bp, Homo sapiens
tttgtctaggtccgagtcctcccatgtcgtatcttctggctctccatgcagccttccttc

SEQ ID NO: 16334 - DNA, 60 bp, Homo sapiens
ctcgctctgaaacactacgtggagagtgcttcctcccaaagtggatgcttgcgtatttct

SEQ ID NO: 16335 - DNA, 60 bp, Homo sapiens
cagcttctctgcccactcatttctagtccagccgcatttcagcagtgccttctggggtgt

SEQ ID NO: 16336 - DNA, 60 bp, Homo sapiens
atttacaagcctcaagatggctctgtgtagggcctgagcttgctgcccaacgggaggatg

SEQ ID NO: 16337 - DNA, 60 bp, Homo sapiens
gatacccagccacaggagcagacgtggccttcagtgtcaaccacttgcttggggacccaa

SEQ ID NO: 16338 - DNA, 60 bp, Homo sapiens
gggtgctgagttcttcacctccttttagactgagatctgccaagttttccggcattgctc

SEQ ID NO: 16339 - DNA, 60 bp, Homo sapiens
tgctgagtagcgcagagctacccagtgagaggccttgtctaactgcctttccttctaaag

SEQ ID NO: 16340 - DNA, 60 bp, Homo sapiens
tgggaggccttccatgcactgcagatccttggcttcctcatactccttataggcactgcc

SEQ ID NO: 16341 - DNA, 60 bp, Homo sapiens
gatcatcctgctcctagagattccagacatcttcagggttggtgcctctcgctattttgg

SEQ ID NO: 16342 - DNA, 60 bp, Homo sapiens
ttccgtcaacctgggcatcctgacagcggacctctacagcctttttgttggactctttct

SEQ ID NO: 16343 - DNA, 60 bp, Homo sapiens
ggctgaacctgctttactatacacgtggcttccagcacacaggcatctacagtgtcatga

SEQ ID NO: 16344 - DNA, 60 bp, Homo sapiens
tcacctggacaaagtggaccctgtagatggcgtggtgcttgtggaccctgactacctgaa

SEQ ID NO: 16345 - DNA, 60 bp, Homo sapiens
acggggctttaaacgtcatcgcgggcgcgacgcctgagggacagtctggggtttggctgt

SEQ ID NO: 16346 - DNA, 60 bp, Homo sapiens
caggacgagaacatctttacctttatgcccggcttcgaggtgtaccagcagaagaaatcg

SEQ ID NO: 16347 - DNA, 60 bp, Homo sapiens
tcaaagtggacagccaagagcacaagatcatcctctatgaaaaccccaacttcaccggga

SEQ ID NO: 16348 - DNA, 60 bp, Homo sapiens
attcgtgtgccctcgagacaagcccgtatgtgtcaacacctatggaagctacaggtgccg

SEQ ID NO: 16349 - DNA, 60 bp, Homo sapiens
gagtcggcgccttcctcaagaatgcctgggacaaggagccagtgctggtcgtgtccttcg

SEQ ID NO: 16350 - DNA, 60 bp, Homo sapiens
agctacaaggtgatcttgtacgaactagagaacttccaaggcaaacgctgcgagctctcg

SEQ ID NO: 16351 - DNA, 60 bp, Homo sapiens
tacacggaatgcacagatggctatgagtgggacccagacagccagcactgccgggatgtc

SEQ ID NO: 16352 - DNA, 60 bp, Homo sapiens
ttgtccatgggaggcattcagccacctggaattgcatgagctcgctcagtttgggattat

SEQ ID NO: 16353 - DNA, 60 bp, Homo sapiens
ctggatacccaactttggaaattctgactggtctcagagtctacttgatagaaggactgt

SEQ ID NO: 16354 - DNA, 60 bp, Homo sapiens
attccttccaggagcagtaggtgggaggtttgacccagagaagccaatccttgcattcca

SEQ ID NO: 16355 - DNA, 60 bp, Homo sapiens
gtgctgagaaccacggtgaaagtgctgctctaggcccacaagtgtaactatgctgttaac

SEQ ID NO: 16356 - DNA, 60 bp, Homo sapiens
acccaacagacttgtctcgaggaggggacagctatatcgggaaactgcggtccaacttga

SEQ ID NO: 16357 - DNA, 60 bp, Homo sapiens
ccttgaaggaagagacagactctgctacattcaacctcgtgacttcatgatcctgggcct

SEQ ID NO: 16358 - DNA, 60 bp, Homo sapiens
tggtgcaagcaggctttatgactccggcagaacacaagcagttggagaaactgagcctac

SEQ ID NO: 16359 - DNA, 60 bp, Homo sapiens
gtttgactatttctgtatgtctccatctattgatgagggtcttactcttttttggaattc

SEQ ID NO: 16360 - DNA, 60 bp, Homo sapiens
aaactgcccattcacccatgaagaggaagcctcaagatcccttggaattgcatcccaagg

SEQ ID NO: 16361 - DNA, 60 bp, Homo sapiens
aagctctacctgctcaagacggagaataccaagctgcgtaggaccaacaaattccggacc

SEQ ID NO: 16362 - DNA, 60 bp, Homo sapiens
ggtggccttgggacctgtgtgaagagcatagactgtagtttggtggaaagagcaaagact

SEQ ID NO: 16363 - DNA, 60 bp, Homo sapiens
ctgtgacctacagcctgacttctgcttgaatgatggaaagtgtgacattatgcctgggca

SEQ ID NO: 16364 - DNA, 60 bp, Homo sapiens
cagattcccaccccctcaatgttcctctcacacgaaacccccatcagtccctttggttaa

SEQ ID NO: 16365 - DNA, 60 bp, Homo sapiens
aacgaaaacggagcaagacagccaattacctcatctccatcgaccctaccaatctgtccc

SEQ ID NO: 16366 - DNA, 60 bp, Homo sapiens
cctgtaacctgtgtgaacccagcacccatgtgaactggtccgtgcacagtcagcacaaaa

SEQ ID NO: 16367 - DNA, 60 bp, Homo sapiens
ggtcatgtgctcagacaacgactgatgaaaacgcccatgcggtttgcatcgactgatagt

SEQ ID NO: 16368 - DNA, 60 bp, Homo sapiens
tccaggcccaaacaggctgaagctcctaaacttggccattcccaggaggcttggagaccc

SEQ ID NO: 16369 - DNA, 60 bp, Homo sapiens
gaacaggagtcgctactgagtcgttaccaacgtggggacaaacaagggttgcttttgttg

SEQ ID NO: 16370 - DNA, 60 bp, Homo sapiens
gacaccagaaacgccgaaaacagtcgacgttacgtcagaaacaccaaaggcaacaccagt

SEQ ID NO: 16371 - DNA, 60 bp, Homo sapiens
gacggacacctgggcgagaccgtgcactccaagaatacccatgaatgtaaatcacgctag

SEQ ID NO: 16372 - DNA, 60 bp, Homo sapiens
cgcctcggtcctctgtagcgggcgacctaggccgcgggacccggacggaggtagaggcca

SEQ ID NO: 16373 - DNA, 60 bp, Homo sapiens
tcaggatctatgagcgagaggactacaggggccagatggtggagatcactgaggactgct

SEQ ID NO: 16374 - DNA, 60 bp, Homo sapiens
taaagacagattgaactctgtaccagcacaatcctgcctcactggccttaccctcctcct

SEQ ID NO: 16375 - DNA, 60 bp, Homo sapiens; identical to SEQ ID NO: 4855

SEQ ID NO: 16376 - DNA, 60 bp, Homo sapiens
gcatcgtgggccatgtcgcacactctaagaagattgctaacgtccccaacacagaggagg

SEQ ID NO: 16377 - DNA, 60 bp, Homo sapiens
ttgaaaagctgggttgagtgaggctatcagcacagccttccttggggactctgaaggtgt

SEQ ID NO: 16378 - DNA, 60 bp, Homo sapiens
tggtctcagtggtgggaaacgtcctagtcaggaagaggacacacagagtattggtcctaa

SEQ ID NO: 16379 - DNA, 60 bp, Homo sapiens
aaggagttctcacggtttcacaaagaaatcacacctatgctgagtggtcttcagaataac

SEQ ID NO: 16380 - DNA, 60 bp, Homo sapiens
aaggcggctttggctgatgttttgaggcgtcttgcaatctctgaagatcatgtggcctca

SEQ ID NO: 16381 - DNA, 60 bp, Homo sapiens
tcccatgtttctggtggactaaattgtgtatctgggagttctcactttctagccaggcct

SEQ ID NO: 16382 - DNA, 60 bp, Homo sapiens
cccatcccttgttcacacgccctgattcacggtgagacattttgccaccttcttgtgtat

SEQ ID NO: 16383 - DNA, 60 bp, Homo sapiens
ggatgagtgtgatggtgaacagcagtgattctactctttctcttgggccattcattcacc

SEQ ID NO: 16384 - DNA, 60 bp, Homo sapiens
tttctcaccgtgttctgagccttgtaccagagcagggagtggttgtgggaaagaagtcat

SEQ ID NO: 16385 - DNA, 60 bp, Homo sapiens
gatgtgtttgcccagtctcaaatgccatgtgccgagaactgccccagtcaatagtctaca

SEQ ID NO: 16386 - DNA, 60 bp, Homo sapiens
gctctcaaggtggcagaacagaactatggaaaatctggttgagctgcacaacaaggcccc

SEQ ID NO: 16387 - DNA, 60 bp, Homo sapiens
tccaacaaaccctaggcccttgagaagctgatacttctccttttgctcacagctgccttg

SEQ ID NO: 16388 - DNA, 60 bp, Homo sapiens
ggccaaactagaatcctctgaggaaagcaaaaacctagaaagcccagagaagcaccttca

SEQ ID NO: 16389 - DNA, 60 bp, Homo sapiens
agccagagtgcttttaaagcagaaggctaagaccgcagaagcaacccctccaagaaaaga

SEQ ID NO: 16390 - DNA, 60 bp, Homo sapiens
tattcgagccgagctgggccagccaggcaaccttctaggtaacgaccacatctacacgtt

SEQ ID NO: 16391 - DNA, 60 bp, Homo sapiens
gcccttcaagctggaatggaaattggctggttgaaacctgtgataggttctcaatatcca

SEQ ID NO: 16392 - DNA, 60 bp, Homo sapiens
cctatgaggcataattataacaagctcccatctgcctacgacaaacaggcctaaaatcgc

SEQ ID NO: 16393 - DNA, 60 bp, Homo sapiens
ttggggacgacatccctggaatggaaggcctgggaacagacatcacagtcatctgccctt

SEQ ID NO: 16394 - DNA, 60 bp, Homo sapiens
ccaagatcaagcatttgcgtttggatggcaatcgcatctcagaaaccagtcttccaccgg

SEQ ID NO: 16395 - DNA, 60 bp, Homo sapiens
gatgagtgtgtgactggcatccacaactgctccatcaacgagacctgcttcaacatccag

SEQ ID NO: 16396 - DNA, 60 bp, Homo sapiens
caggtagacagatggacacaggccgtttctcatccagtttaggaaaacacacatgctcag

SEQ ID NO: 16397 - DNA, 60 bp, Homo sapiens
gtggtcctgcctcttttctaagcatatggctaagactgtatgtgctgaattcctgggcct

SEQ ID NO: 16398 - DNA, 60 bp, Homo sapiens
tcctgagcacgtagaggccttgcaggaccagtcccaagtgatgctgagccagcacagcaa

SEQ ID NO: 16399 - DNA, 60 bp, Homo sapiens
gcagggagatgcaggtctctctaaacgcatgaatgtatgtagtgtgtaggcactgtagtg

SEQ ID NO: 16400 - DNA, 60 bp, Homo sapiens
actggggacacagggtgcacagatgaacccaatgaggcccttgaggcccaagacactagg

SEQ ID NO: 16401 - DNA, 60 bp, Homo sapiens
tcatggagtctttggggagccaactacatggattgttttgagtccaatgaaaccatgggg

SEQ ID NO: 16402 - DNA, 60 bp, Homo sapiens
cgagtaccctcgctggaacacatggtcgagcagctaccgcagtgatcggctcatgtcctt

SEQ ID NO: 16403 - DNA, 60 bp, Homo sapiens
gggaagagtcaggtgtcagggcaggaattctattttcgggagatgtctattgccgagtag

SEQ ID NO: 16404 - DNA, 60 bp, Homo sapiens
gttgatgccccgagtgattaccagagggagacctggaacctgagcaatcatgagaagatg

SEQ ID NO: 16405 - DNA, 60 bp, Homo sapiens
ccccagaagattagcatcccatactagactcatactcaactcaactaggctcatactcaa

SEQ ID NO: 16406 - DNA, 60 bp, Homo sapiens
atttgagcctcactcatcctgttgtggccaagcgaatcagtttctacaagagcggagacc

SEQ ID NO: 16407 - DNA, 60 bp, Homo sapiens
atttgcactcccctcagctagacgcacagactcagcaataaacctttgcatcaggcaaaa

SEQ ID NO: 16408 - DNA, 60 bp, Homo sapiens
acgtgtgagaacacactcggctcctaccgctgttcctgcgcctccgggttcctgctagca

SEQ ID NO: 16409 - DNA, 60 bp, Homo sapiens
tcagtctcgtagtgttatgtctgaccagtgtgctggacagtggttcctgaaggcctgtgg

SEQ ID NO: 16410 - DNA, 60 bp, Homo sapiens
tgaactgtggcaggtccagaaccagtcagagacttgcccctaagagggatgtactgtaaa

SEQ ID NO: 16411 - DNA, 60 bp, Homo sapiens
cagatgttgatgagtgtgcagaaaacataaacctctgtgagaacggacagtgccttaatg

SEQ ID NO: 16412 - DNA, 60 bp, Homo sapiens
cgtgtggattggtttccacccggaacaggctctgtgatggctgaatggaaagaaacgtaa

SEQ ID NO: 16413 - DNA, 60 bp, Homo sapiens
tgtttgcccaccagctgctagccctaggaaggccaggagcccagtagccatgtggccagt

SEQ ID NO: 16414 - DNA, 60 bp, Homo sapiens
ctcgggacaccgtgcttatggtctgaacttgttttccctgccagttagggtgtctccttc

SEQ ID NO: 16415 - DNA, 60 bp, Homo sapiens
gtatccagcacagatttgcttttctttgctagcacaatgtgtgttgctgtcagaatattc

SEQ ID NO: 16416 - DNA, 60 bp, Homo sapiens
aattgagccaaaacttcagcccaaagtcagtgcttattaggcaacagatacttcccagag

SEQ ID NO: 16417 - DNA, 60 bp, Homo sapiens
ccccttgcatccttgccatcaaccacaatggcctcaactttctcagcacagagactcatg

SEQ ID NO: 16418 - DNA, 60 bp, Homo sapiens
aaggtggctgaagacctttctggcagggcatttgcaaggacccaaatccattcaacaagg

SEQ ID NO: 16419 - DNA, 60 bp, Homo sapiens
ctgaagtagtcgctgtagactatggatgtagaacaagggtttggagcccttcggacatgg

SEQ ID NO: 16420 - DNA, 60 bp, Homo sapiens
caggatcatcctccaagcagtcctgttcattcatgtctgcctcaaattgctggtgaatac

SEQ ID NO: 16421 - DNA, 60 bp, Homo sapiens
accagtctgtcctcactgccatcgccactaccatcctgtcaccagtgggacctctttaaa

SEQ ID NO: 16422 - DNA, 60 bp, Homo sapiens
accttacagaagagcaagggcttaggggttggaggtggcagataaaagaggattttcaac

SEQ ID NO: 16423 - DNA, 60 bp, Homo sapiens
ggcctggcttgtcttctgaacgtttggttcaaatgtgttttggtcctggaggctcaaatt

SEQ ID NO: 16424 - DNA, 60 bp, Homo sapiens
gactcccctgaaagatacagaaaggtttgggattgtgcagcgcttgtttgcctcagctga

SEQ ID NO: 16425 - DNA, 60 bp, Homo sapiens
gctattgagagaaggttggcaggaagaaatcatgggtgagggtatgtgggagtgataatc

SEQ ID NO: 16426 - DNA, 60 bp, Homo sapiens
tgtcatcatcttgctgtctgccttctccggacctggtgtcaggggtggtcctatgcccaa

SEQ ID NO: 16427 - DNA, 60 bp, Homo sapiens
agtcgcaaccacgggtagctcgtgtaggtaacggcaggtccaggcctccgcatgagcgga

SEQ ID NO: 16428 - DNA, 60 bp, Homo sapiens
tccaagggcgagtctgtgtgcctggaccgatgtgtctctaagtacctggacatccatgag

SEQ ID NO: 16429 - DNA, 60 bp, Homo sapiens
aagaaattggtgcagcgcaagggactctcggaggaggacattttcacgcccctgcagacg

SEQ ID NO: 16430 - DNA, 60 bp, Homo sapiens
gtctgcatttgtggaccagtgccatttacagaacaaggagtaaggttgctgcatgatctc

SEQ ID NO: 16431 - DNA, 60 bp, Homo sapiens
tgaagctcgtgggcagagaccccaagaacaacctggaagccttggaggactttgagaaag

SEQ ID NO: 16432 - DNA, 60 bp, Homo sapiens
ggagcctaaaggcctgactcgctgtctctgctgggaagttggctgtattggccgagagac

SEQ ID NO: 16433 - DNA, 60 bp, Homo sapiens
ttttctgcgaactgacgtacatcctccagctggcctgctctgataccttcctgaacagca

SEQ ID NO: 16434 - DNA, 60 bp, Homo sapiens
ctttgtcagtgccatgtccacagtatctgccatactccctggcatagtacggtaaggcaa

SEQ ID NO: 16435 - DNA, 60 bp, Homo sapiens
gcccttagtttgcatctcttacatcttcatcctttccactattctgagaatcacctcagc

SEQ ID NO: 16436 - DNA, 60 bp, Homo sapiens
ctccactatcccatccgtataagcaaaagagtgtgtgtgatgatgataacaggatcttgg

SEQ ID NO: 16437 - DNA, 60 bp, Homo sapiens
cactgtagccatgtctgatagaaagtgtgtggagcttgtcacaggatcatggataggtgg

SEQ ID NO: 16438 - DNA, 60 bp, Homo sapiens
gtatctgtgcaatgaccttgatatccaggtgcaatcacaatcttttctgatagacttgaa

SEQ ID NO: 16439 - DNA, 60 bp, Homo sapiens
catttgtcaccccctacgctacccagtcatcatgaatccccatctctgtgtcttcttagt

SEQ ID NO: 16440 - DNA, 60 bp, Homo sapiens
cgtttccttgaatggcacaaagtgtgcgcaaaaggtcacagaagctgtgcaccttgtgat

SEQ ID NO: 16441 - DNA, 60 bp, Homo sapiens
ctctgattttaggggtgtatataataggcctggtttgtgcatcagttcatacaggctgta

SEQ ID NO: 16442 - DNA, 60 bp, Homo sapiens
ctttggaggggacctcagttcagacatgtcctcttatcccagaaaaggtgcagtggcctc

SEQ ID NO: 16443 - DNA, 60 bp, Homo sapiens
ctccttctgtggctgtctcacacagatgtatttcgttttcatgttcgtggacatggacaa

SEQ ID NO: 16444 - DNA, 60 bp, Homo sapiens
gtgtttcccttcatttgtattgcatgttcctatggccggattctccttgctgtctaccac

SEQ ID NO: 16445 - DNA, 60 bp, Homo sapiens
cactgtcttctatgcagctgggtccagacatatgagagggacaaaccagtgagtgtctcc

SEQ ID NO: 16446 - DNA, 60 bp, Homo sapiens
ccttgcagtgctaaaactagcttgtgtgagttccctgctcgtggacatggttatgctggt

SEQ ID NO: 16447 - DNA, 60 bp, Homo sapiens
tcctggaccttggggtctcttgatgggatcatagtgcttgcagctgtcctgtcattttct

SEQ ID NO: 16448 - DNA, 60 bp, Homo sapiens
atcacccagatgtgcctttttgtactttttggagggttagacagcttactcctggctgtg

SEQ ID NO: 16449 - DNA, 60 bp, Homo sapiens
cactcagattcccgagttaggacctctactccatccagtgcaggagttctgctacattct

SEQ ID NO: 16450 - DNA, 60 bp, Homo sapiens
cacttccactataacaacagtgtggtcaggagagagtggcacaacctgatctctgaagag

SEQ ID NO: 16451 - DNA, 60 bp, Homo sapiens
ccacctgccttacctttctgagttgcctttagagagatgcgtttttctaggactctgtgc

SEQ ID NO: 16452 - DNA, 60 bp, Homo sapiens
atggtcttgtccaacttgaacaacaacatggacgtcgagtccaggacgatggctaccatg

SEQ ID NO: 16453 - DNA, 60 bp, Homo sapiens
tgcaaagcagcttgccactctctttgtgaacctgtgtgtcactgcagagacccatgaggt

SEQ ID NO: 16454 - DNA, 60 bp, Homo sapiens
atgctcagctctatgagacttcactgctggagaacaagagaaatcaggtgctgcttgacc

SEQ ID NO: 16455 - DNA, 60 bp, Homo sapiens
ctctccatgccagcctctgtggtccttgcccaaacccatcagcgcaatacttgaaccttc

SEQ ID NO: 16456 - DNA, 60 bp, Homo sapiens
acgatgcttcagagagttctgtatcccaacctcttccaacattgagcaacaaaactccac

SEQ ID NO: 16457 - DNA, 60 bp, Homo sapiens
gctcccatcaattatcctcaaatgacaaccctgaattccacatcgtctactacgaccccg

SEQ ID NO: 16458 - DNA, 60 bp, Homo sapiens
aggggaaggcatacaggcctcatccaccaggcaatagacaggagagaggtgagaactatt

SEQ ID NO: 16459 - DNA, 60 bp, Homo sapiens
atggccttgaagagtgcgaaggagtacagttcactccacgagtggttcaccatgccattg

SEQ ID NO: 16460 - DNA, 60 bp, Homo sapiens
ctgctttccactgaagatgaggatggagcggcagagcactagcagagtccgaaatacagt

SEQ ID NO: 16461 - DNA, 60 bp, Homo sapiens
ctacaaagctcttttgagcatttagactctcgactggccaaggtttggggaagaacgaac

SEQ ID NO: 16462 - DNA, 60 bp, Homo sapiens
ggaatcttgtgaggtgtgtgctgagcatggcagacaccagataggtgagtccttaaccaa

SEQ ID NO: 16463 - DNA, 60 bp, Homo sapiens
tgacttccccaatatcttgcttgaacttacaggtgattaacttggatgagttttgggaag

SEQ ID NO: 16464 - DNA, 60 bp, Homo sapiens
ctgtgattgcgtcgagttgtaccccacaaacttctggattggctaaagatgcttgggaag

SEQ ID NO: 16465 - DNA, 60 bp, Homo sapiens
tctaagttgcacatgttatccagcgtggacttgaatggccaagatcgtaggatagtacta

SEQ ID NO: 16466 - DNA, 60 bp, Homo sapiens
ctctggatgagtccgagagagatggaggctctgaggaccaagtggaagacccagcactaa

SEQ ID NO: 16467 - DNA, 60 bp, Homo sapiens
accccaccattcattctgtctgtctgttccctggacactgcctaaaagggtctcaagaca

SEQ ID NO: 16468 - DNA, 60 bp, Homo sapiens
acagattgccctagtacccacccacctatcagggttatgcaatggaacatcctcgcccaa

SEQ ID NO: 16469 - DNA, 60 bp, Homo sapiens
cttgtctttacttttgttgaccagaatagttggtaactctgccagagcctgtacttacct

SEQ ID NO: 16470 - DNA, 60 bp, Homo sapiens
cacaggtaacagaggacagtagtctgtaaacatataaatcggtcataactatcgtggtct

SEQ ID NO: 16471 - DNA, 60 bp, Homo sapiens; identical to SEQ ID NO: 4855

SEQ ID NO: 16472 - DNA, 60 bp, Homo sapiens
gatgaagtgtaacaggccttcagtaaaggttgaagacaaggacttcccctctacctgctc

SEQ ID NO: 16473 - DNA, 60 bp, Homo sapiens
gaccaacagctatggggtctttcagctcacacatgacagagtttccacgaaaacgcaaag

SEQ ID NO: 16474 - DNA, 60 bp, Homo sapiens
gtttccagagagtggagagagcagggctaaataaagaggagataaggtggcttctcacgg

SEQ ID NO: 16475 - DNA, 60 bp, Homo sapiens
accaagctacagattcacactttctggcctaaaccctaatgggatgaggcttttcacccc

SEQ ID NO: 16476 - DNA, 60 bp, Homo sapiens
caaactccttgcctctaaagtcagatcatgaagggataggtgttcatctaaggttacagt

SEQ ID NO: 16477 - DNA, 60 bp, Homo sapiens
ctgttcctttggctttctcttggaggtgggtcgcagcaccagatggggagctttatgaca

SEQ ID NO: 16478 - DNA, 60 bp, Homo sapiens
ggaggggacagtgcttcccaagttccagctgcaagtccaacttaaccaactttccttcaa

SEQ ID NO: 16479 - DNA, 60 bp, Homo sapiens
ttaccgtcgtttacgacagtgtcaggatcgcgggcttgctttccggtagcgtgggctgac

SEQ ID NO: 16480 - DNA, 60 bp, Homo sapiens
tggtgatctggcatgggatgggagacagctgttgcaatcccttaagcatgggtgctatta

SEQ ID NO: 16481 - DNA, 60 bp, Homo sapiens
gcagtccagcttctttggtttctatgatgcaaatgagaccgtcctggagatggaggagca

SEQ ID NO: 16482 - DNA, 60 bp, Homo sapiens
gggcagacttctactgggagatttgcagtaccacacttttggtctttaagcctgacctgt

SEQ ID NO: 16483 - DNA, 60 bp, Homo sapiens
cacatgccatacggctggttgacggaaatccgtgctgtgtatcctgctttcgacaagaat

SEQ ID NO: 16484 - DNA, 60 bp, Homo sapiens
ggagactctaacctgaagatctataccaaacgtcgtctgcttaccacgtaacacagctgc

SEQ ID NO: 16485 - DNA, 60 bp, Homo sapiens
gggcaaatgaaagtaaaaggctctaatacaacctataaggactgcaaagtatggccaggg

SEQ ID NO: 16486 - DNA, 60 bp, Homo sapiens
gcccaatgcctgtgccaccttcaacttcctgtgtcatgaaggccgagtaactggagctgc

SEQ ID NO: 16487 - DNA, 60 bp, Homo sapiens
cagggaatgctgcaggaaacgattgccaactatacgaatggcttcgaggagataaactga

SEQ ID NO: 16488 - DNA, 60 bp, Homo sapiens
ggaactcttcaaggtctcttttcatccttcatctgattccagagcactgctccagtgggg

SEQ ID NO: 16489 - DNA, 60 bp, Homo sapiens
gaccaacaggctgttctgcactgaaaaggttcttcatccctttccagttaaggaccgtgg

SEQ ID NO: 16490 - DNA, 60 bp, Homo sapiens
caaaaggtgtgggctttggggtcttctggaaatagttttgaccagacatctttgaagtgc

SEQ ID NO: 16491 - DNA, 60 bp, Homo sapiens
aggggacgaactagcacagagagccggaagtccttgaccactcaaatcagcaactttgat

SEQ ID NO: 16492 - DNA, 60 bp, Homo sapiens
gcagttgagtacagacttgccataccaagctgcatcatcagattcttcagcagcaccaaa

SEQ ID NO: 16493 - DNA, 60 bp, Homo sapiens
aaaatgccgtggcaaagagctcagaaatccaatttggataccaaaggtttctcatgttaa

SEQ ID NO: 16494 - DNA, 60 bp, Homo sapiens
atttgctcgcagtatcctagaatctttgtgctctcgctgcagttccctttgggttccatg

SEQ ID NO: 16495 - DNA, 60 bp, Homo sapiens
ggcacatcaccaggctccacatcacgggaagtgagatggatttcttgggtaacaactcat

SEQ ID NO: 16496 - DNA, 60 bp, Homo sapiens
tcagatggttgcatcctgccaggcatccagtgggactgggaatatggacacttgaacatt

SEQ ID NO: 16497 - DNA, 60 bp, Homo sapiens
tgtttctagatcagtgcatggatggctccattgctctacgggccattgtgtctgagatcc

SEQ ID NO: 16498 - DNA, 60 bp, Homo sapiens
tcccgcaaattctggaaggttcttagtctcgactagggcagtagccccaggactcctagt

SEQ ID NO: 16499 - DNA, 60 bp, Homo sapiens
ttaatgcagagacaaggccagtatgacccacctccaggagccagcaacattttgggactt

SEQ ID NO: 16500 - DNA, 60 bp, Homo sapiens
ccctcatcgtggtctgtgccatgtcccgtctctatggtggttgaggagaaaggcggggaa

SEQ ID NO: 16501 - DNA, 60 bp, Homo sapiens
tgtggacgaggttgagaaagtggtgaagtgcggctgtacgaggtgtgtgtcctaaacaca

SEQ ID NO: 16502 - DNA, 60 bp, Homo sapiens
gaaaggatggcctaggacataggtctcaaagactcttggatcagaatcaggagattaggg

SEQ ID NO: 16503 - DNA, 60 bp, Homo sapiens
cagtctcattaacagatgcaaaccaactcctctcatgacgcagagaatctaagctcaaac

SEQ ID NO: 16504 - DNA, 60 bp, Homo sapiens
agaaggctgctaagatcagcgaggaggctctgccaacaggaaggaaagttctgagcaaaa

SEQ ID NO: 16505 - DNA, 60 bp, Homo sapiens
gatgaaagtcatccctcactgttagtaaggaagcagtatacatcaatgggaacagggccc

SEQ ID NO: 16506 - DNA, 60 bp, Homo sapiens
ggactgttccttggcagcttgttccttggtttcagaactaccttgttccctgtagccaac

SEQ ID NO: 16507 - DNA, 60 bp, Homo sapiens
aggcctcctggttggacgagccgttaattttaaggaagagtttgtaatcctcctgcctct

SEQ ID NO: 16508 - DNA, 60 bp, Homo sapiens
cgagcccactttcctggagaacctgctacggtacggactcttcctgggagccatcttcca

SEQ ID NO: 16509 - DNA, 60 bp, Homo sapiens
gcagtctgactgtgtacacttggttcagctaatgtctgagagtcctgcactgggttactt

SEQ ID NO: 16510 - DNA, 60 bp, Homo sapiens
cattataggggcacagagaatggcatggaagagacagtctacagagagctttaagaggcc

SEQ ID NO: 16511 - DNA, 60 bp, Homo sapiens
aaaaaaaatagttagccgagtatgggggtgtgcttggtatggcttgagcccaggagtgag

SEQ ID NO: 16512 - DNA, 60 bp, Homo sapiens
ggctttggtctcacaatatgttgagattacaggtgcgaaccactgtgcctggccaaatta

SEQ ID NO: 16513 - DNA, 60 bp, Homo sapiens
tactaatacagaccttgtgaggattaagagcaggcatgggatgcaggtgagcacttactc

SEQ ID NO: 16514 - DNA, 60 bp, Homo sapiens
ggtcgcaaggtatgtatgacattttgacacagaatattttcctcatttgaagggggatta

SEQ ID NO: 16515 - DNA, 60 bp, Homo sapiens
gtgattaaaagaaattggacagttcctatttctacccaccttgctgcttccttgatgatg

SEQ ID NO: 16516 - DNA, 60 bp, Homo sapiens
ggctttacgggtgtaaacactgatggtatatcagtatctgagaccccaaactctccaaat

SEQ ID NO: 16517 - DNA, 60 bp, Homo sapiens
agtgccacctcctggagccctcccacctgggatacccccagccatgcccccaccacctat

SEQ ID NO: 16518 - DNA, 60 bp, Homo sapiens
gagacagcgagaacttccataggacaggaaattagaacgtgtaaagtgctgaaagaccac

SEQ ID NO: 16519 - DNA, 60 bp, Homo sapiens
gagctataaaggcccataacatactaaaacaggcagtttcaggtatgtaaggaaaggaac

SEQ ID NO: 16520 - DNA, 60 bp, Homo sapiens
tttccttggcttagtaaaagcctgtagttacacgtccctaggcaaacccaccatacaaaa

SEQ ID NO: 16521 - DNA, 60 bp, Homo sapiens
acagcagcctttgcagctgttgaaggcagcaagacttgcatggcaatcagaagacacaga

SEQ ID NO: 16522 - DNA, 60 bp, Homo sapiens
tttgacatcaagcagtaaggattataaaacctagttggcttcagctattgataagaatca

SEQ ID NO: 16523 - DNA, 60 bp, Homo sapiens
aagcttttgcagcaattgtgtgttctggagacaagcacatggtgggtggtgatcttacaa

SEQ ID NO: 16524 - DNA, 60 bp, Homo sapiens
tataattacacgtgggttcatatctctgtagaatatggacttcagtgtggaatttctggg

SEQ ID NO: 16525 - DNA, 60 bp, Homo sapiens
ctttggaggattataccttgctcatcttggcacaaaagaaggcgaaaggaagtaacatgg

SEQ ID NO: 16526 - DNA, 60 bp, Homo sapiens
ccctcagccacgaacctgtgggaaatgaccttgcttttgagtgcaaaggccaattttatg

SEQ ID NO: 16527 - DNA, 60 bp, Homo sapiens
gagatagtggagcggagaatagggaggggcagcttaatggatcctattttgtagtttcaa

SEQ ID NO: 16528 - DNA, 60 bp, Homo sapiens
taatgatgagaacagcaaccagagtttccattcggaaggttccctgcaaaagggcacaga

SEQ ID NO: 16529 - DNA, 60 bp, Homo sapiens
ctgccagctgttttaccagggatccagagacatagaggaagtagggggtggtatgagatt

SEQ ID NO: 16530 - DNA, 60 bp, Homo sapiens
aaaggaaaactctgaaagaaaccagaggtggggcagaaaacaccttacctacagagacac

SEQ ID NO: 16531 - DNA, 60 bp, Homo sapiens
aagggtatgaatcccagccaggacaagtgagttgaggcttgtgccacaaaaggtttgtcc

SEQ ID NO: 16532 - DNA, 60 bp, Homo sapiens
caccctacactgacagactcccttaagcaacaccagatgctctactggtacttgaagtac

SEQ ID NO: 16533 - DNA, 60 bp, Homo sapiens
acacagtaagccctgctcccttccctgctctaatacactacctgtacaaaggttttttcc

SEQ ID NO: 16534 - DNA, 60 bp, Homo sapiens
atctactaacaaggggaaagatctcccagtggaggtgtttcagcggatgctgcggtctta

SEQ ID NO: 16535 - DNA, 60 bp, Homo sapiens
cggtggtcttacgttggaagaagctcccaactgaactttgtgatacaaccttgagtaggg

SEQ ID NO: 16536 - DNA, 60 bp, Homo sapiens
taaaagccagtggaagaactgagtagctcagcttcccaaattacagatcctcggtgatgg

SEQ ID NO: 16537 - DNA, 60 bp, Homo sapiens
gcgttgtttgaaagtaccaccagtgaatctgtcttctgtctctgtccctttccccgtgac

SEQ ID NO: 16538 - DNA, 60 bp, Homo sapiens
atattaccacctggtccccttcgagacagacatttgggactgaacctctctatcaggcct

SEQ ID NO: 16539 - DNA, 60 bp, Homo sapiens
tccctgacccatgatctggcaagttaggcacagtcagacatggacagttgatccatgagg

SEQ ID NO: 16540 - DNA, 60 bp, Homo sapiens
cttgtgtgtcttgcacccatctcctgcattatttaggcaatcctaacagaaggccgctag

SEQ ID NO: 16541 - DNA, 60 bp, Homo sapiens
tccccaagaccctccacagatgtgtgtccagaccctctgggcatctcagattcctacagt

SEQ ID NO: 16542 - DNA, 60 bp, Homo sapiens
ctatattgtggacctcatcattctgggaaaaggtggttcacgagaaagcacagtcatgtg

SEQ ID NO: 16543 - DNA, 60 bp, Homo sapiens
cgtgggtccctacggacagtcccagccaagctgcttcgaccgtgtcaaaatgggcttcgt

SEQ ID NO: 16544 - DNA, 60 bp, Homo sapiens
aactctactattagagggacgactgccttcaagcatccctgcaactgccacagcaggtgg

SEQ ID NO: 16545 - DNA, 60 bp, Homo sapiens
acgcatcattcggacaggccgtacaggtcactggttgaaccatgggaaggaacactgctt

SEQ ID NO: 16546 - DNA, 60 bp, Homo sapiens
cctccccacaatgccagaccgcagagaggctcatcctgtagggcacccaaaactcaaggc

SEQ ID NO: 16547 - DNA, 60 bp, Homo sapiens
aagtgattgggaaaacgtccttctctgttggttgtactgccttctgatgctgctaaagcc

SEQ ID NO: 16548 - DNA, 60 bp, Homo sapiens
gtcttctgaaacacggaagtgagagaacatgttgtacagagaagcatgcatccctctgcc

SEQ ID NO: 16549 - DNA, 60 bp, Homo sapiens
ctgcatcacattctgtccttcccaacagggaatcccaccacatttcccaattagcgctct

SEQ ID NO: 16550 - DNA, 60 bp, Homo sapiens
cgtgtcttcacgcatctcttgaattggaaattgtgccctggagactgtatacaagactgg

SEQ ID NO: 16551 - DNA, 60 bp, Homo sapiens
cccatgcagacaccaggacctccactggttaggtttaaactcaggacatgttatttagcc

SEQ ID NO: 16552 - DNA, 60 bp, Homo sapiens
cacaggcatgaatgcaggagacttaaagccctaaatgatcatggagaacagtcagtaaag

SEQ ID NO: 16553 - DNA, 60 bp, Homo sapiens
gtcctagaagttgtaaaagaatgactgctacatgacctgctgcctacggagaactacatc

SEQ ID NO: 16554 - DNA, 60 bp, Homo sapiens
gtgtcttcatgtattctcacgtggtcttaatgatcagaacgtgctctttcattctctgcc

SEQ ID NO: 16555 - DNA, 60 bp, Homo sapiens
gctttcaccaaggaagtgcgatctgagcagccacaatccagccaaaagaggatcgtagat

SEQ ID NO: 16556 - DNA, 60 bp, Homo sapiens
tgtcactgtgcttagggctgcaacatccctggagcagcttccaacactacttcagggtgg

SEQ ID NO: 16557 - DNA, 60 bp, Homo sapiens
aggggccgtttgttcgactcgctagtcttctgcggctctatgcggtactaaagagcagaa

SEQ ID NO: 16558 - DNA, 60 bp, Homo sapiens
cacagagtctgaaaagcgggtctccgtctaccagaaggtgacctccacacagcccctctc

SEQ ID NO: 16559 - DNA, 60 bp, Homo sapiens
cctctcttattgtttagtattgtggtttgatgattttctgtagtataaaagtttgattat

SEQ ID NO: 16560 - DNA, 60 bp, Homo sapiens
acatcataggaaattacaaattataataattgggagccccaatgttgggtgcagagatac

SEQ ID NO: 16561 - DNA, 60 bp, Homo sapiens
aagaggagcacagaggcacaaagcatgcatcatcagaatgtgtgggcagagcatgacatg

SEQ ID NO: 16562 - DNA, 60 bp, Homo sapiens
cttggacaacagacctgcagccacctgttccaatctggcttctatcagcaatcaaggtaa

SEQ ID NO: 16563 - DNA, 60 bp, Homo sapiens
gagtaaggaccagtgggcaccatgcagaacaagcaaatagaagctcagcctttgagtagc

SEQ ID NO: 16564 - DNA, 60 bp, Homo sapiens
ctggaaaattcagttatgagaagacccacttgactgctaatttgatgacgaatctgcaag

SEQ ID NO: 16565 - DNA, 60 bp, Homo sapiens
caacagaagcctaactctaagcatcatgcaatacatgcctataataaaactgcaaacata

SEQ ID NO: 16566 - DNA, 60 bp, Homo sapiens
catgcaggagaagatggccaaaaggcttgagtggtgatgtgtgtacaagctgagaatgcc

SEQ ID NO: 16567 - DNA, 60 bp, Homo sapiens; identical to SEQ ID NO: 4855

SEQ ID NO: 16568 - DNA, 60 bp, Homo sapiens
ctgaggccagtgctgtaccaagtagaagacggttcctaaggacagagtttgtctgttttc

SEQ ID NO: 16569 - DNA, 60 bp, Homo sapiens
gtggccctgtgggcctgtagggcaacccatgccaactgcggaaaagtaaccagcaccata

SEQ ID NO: 16570 - DNA, 60 bp, Homo sapiens
ctggcaatagtcaagattggcagtctggtgtattagtcaaaggttttcagcctacaaaag

SEQ ID NO: 16571 - DNA, 60 bp, Homo sapiens
aggatatataaaggcacagagagctttaagggaatctgtttctagtcttcggagatcttg

SEQ ID NO: 16572 - DNA, 60 bp, Homo sapiens
ttatgctggcagctcctctgttgcttctctggagtggtgtggacactggccacctactga

SEQ ID NO: 16573 - DNA, 60 bp, Homo sapiens
agactgcaggacactgtggagttccctgggagaactcagtgggataagtacacatttcca

SEQ ID NO: 16574 - DNA, 60 bp, Homo sapiens
ctgtgagataccagcacagagtattttctctgagttctctcagggttaaagctcagtgag

SEQ ID NO: 16575 - DNA, 60 bp, Homo sapiens
ctaacaagacaggcacccctagtgaagcaaattaggttcctgattacaccgctgtggagc

SEQ ID NO: 16576 - DNA, 60 bp, Homo sapiens
cctcttatacctttctcttctacttgttatcacacagtcctgcctcaagatgggtttggg

SEQ ID NO: 16577 - DNA, 60 bp, Homo sapiens
cccactggatggtctcagcatccttgttaaaaagcatttgactatgtgtggggtagtttg

SEQ ID NO: 16578 - DNA, 60 bp, Homo sapiens
tgctacttggcgttcaactctgacaatgagactgcccagatttggattgaaggggtcgtg

SEQ ID NO: 16579 - DNA, 60 bp, Homo sapiens
actggaggagacacggtgggctacaccgagacaagcgctaacgtgaagacgatgggataa

SEQ ID NO: 16580 - DNA, 60 bp, Homo sapiens
tgtctgttcacctcatccttgccactccgccttatacctcaccatcggagaacttaccat

SEQ ID NO: 16581 - DNA, 60 bp, Homo sapiens
cagtggaagacctgagccctgaccacccagttgttttggagaatcatgtagtgacagatg

SEQ ID NO: 16582 - DNA, 60 bp, Homo sapiens
ggccattttcctgccgcttatgtggaggagttaccttcaaatgctggcaacacagctaca

SEQ ID NO: 16583 - DNA, 60 bp, Homo sapiens
aagaccaccctgacgctccataaaactcagcctctgaaccaccccagacaagactacccc

SEQ ID NO: 16584 - DNA, 60 bp, Homo sapiens
agcagatcagtcaaatgtgaaagttcatggcaacaggttttttgtttgtttggttttggt

SEQ ID NO: 16585 - DNA, 60 bp, Homo sapiens
tccctgaattttctgaacacccttcaattaatctaaggtaactctgcctctaagtttttg

SEQ ID NO: 16586 - DNA, 60 bp, Homo sapiens
ttaagtgatgactgtgccaccctaggcacccttggcgtcattcctgaatctgtcatttta

SEQ ID NO: 16587 - DNA, 60 bp, Homo sapiens
ttggagtccccttgtattaccagaatactgtgaattggctttcaatattggcctaaatat

SEQ ID NO: 16588 - DNA, 60 bp, Homo sapiens
gttaaagttgagcatttccactcaaaggtacaaaaatttatgtgtccagatcagctgcag

SEQ ID NO: 16589 - DNA, 60 bp, Homo sapiens
atgcagttaagcaggtagacaggtgagagaagagcccatgtgatatcgggggaaattcac

SEQ ID NO: 16590 - DNA, 60 bp, Homo sapiens
gagatctcagtatgttcgccagtctgggctcaaactcatgcctggtgacacagtgagact

SEQ ID NO: 16591 - DNA, 60 bp, Homo sapiens
attgaaacaaaaagaaacatcaaatttatgatgagatcagatgcagtgtcaccacaccct

SEQ ID NO: 16592 - DNA, 60 bp, Homo sapiens
ccttgcctctagaagagtacaatgataaaggggaagatagaaacacacacatatgcgttg

SEQ ID NO: 16593 - DNA, 60 bp, Homo sapiens
ccttgaattcagagacaggtataaagactgcttggtgattttgaaaggactgagatcatt

SEQ ID NO: 16594 - DNA, 60 bp, Homo sapiens
acaccatcaggataaggatagtgatatggaaaggctgtgggaaaaacttctgaaggacca

SEQ ID NO: 16595 - DNA, 60 bp, Homo sapiens
ctccccgttaattgtatgctgaacaaaccttccattccaggaacaaatcccacttggtcg

SEQ ID NO: 16596 - DNA, 60 bp, Homo sapiens
ttgttgccgtcccttcgcctccttcaccgccgcagaccccttcaagttctagtcatgcgt

SEQ ID NO: 16597 - DNA, 60 bp, Homo sapiens
gagagactggggaggtcgagctgtgcgcgtggacacagcgcgcagagcgcgcggtctttt

SEQ ID NO: 16598 - DNA, 60 bp, Homo sapiens
ttgtgtaacgctcacaacctccctcagtggagtcatcgctggcttatcacctggtttcat

SEQ ID NO: 16599 - DNA, 60 bp, Homo sapiens
agtaccagctttgggacctgttgcctgtttgattgtggaaaacacttcacctctcagggg

SEQ ID NO: 16600 - DNA, 60 bp, Homo sapiens
cagtacacaatgaaacagccaagcatcttaagttcccaatctcaaagtctttgggcctgc

SEQ ID NO: 16601 - DNA, 60 bp, Homo sapiens
ccagctacacggggcaaccaaccatcttgctgttgaagaaaacagttccaaaaggctaaa

SEQ ID NO: 16602 - DNA, 60 bp, Homo sapiens
cgctttctggtaacttctgtaggccctggctcaaggacttagcatttcgtctcatgtaca

SEQ ID NO: 16603 - DNA, 60 bp, Homo sapiens
ctgggagtctgctttaattggatgagtaagttctggtaagatttcttcatcttcagtatc

SEQ ID NO: 16604 - DNA, 60 bp, Homo sapiens
taagtttaccaatgtgaaaagcagatcttgggtataagtgtatgcctgatttgagctttt

SEQ ID NO: 16605 - DNA, 60 bp, Homo sapiens
ataagttgagttaggagtctgttctggacctcccacagcaccctgattctcctgtcttgg

SEQ ID NO: 16606 - DNA, 60 bp, Homo sapiens
gttgaatccaggctctctccttgccagctgtgactttggcctcgttacttgccctctcaa

SEQ ID NO: 16607 - DNA, 60 bp, Homo sapiens
ttgcccctacaaacaaacagcagtacttgccagaaccattcttgggattcaggagctcgg

SEQ ID NO: 16608 - DNA, 60 bp, Homo sapiens
gtgtggtcttacccctctggaccctgtagttgtagcattgtgaaaatggagcttttggca

SEQ ID NO: 16609 - DNA, 60 bp, Homo sapiens
gggagcagctggtaaaacagaagtgtatttccagagtgtcagccacagtctcacaaagct

SEQ ID NO: 16610 - DNA, 60 bp, Homo sapiens
gtaagagaacgtagaggttatggctctcacagagcataaacgctggaggtaggtgcacgt

SEQ ID NO: 16611 - DNA, 60 bp, Homo sapiens
ccagggcagatcttcttaggctctggttgtggtgagctcgtctcttacattgtgcttact

SEQ ID NO: 16612 - DNA, 60 bp, Homo sapiens
ttacctacctacctacctacctacttacctatctgtctgtctgtctacggtgtttataag

SEQ ID NO: 16613 - DNA, 60 bp, Homo sapiens
gtcagccatgattgcttgtatttggcaggggtcaaaggcaggcagggactgtgaaatgtt

SEQ ID NO: 16614 - DNA, 60 bp, Homo sapiens
tgcagtttcaggactagacgagcgtggggtagtggcaataaaggggcttgtatgagaagt

SEQ ID NO: 16615 - DNA, 60 bp, Homo sapiens
agcggtcagagtcgcctacaggagttgagccgcccgcgccagaaggttttggcgaagctc

SEQ ID NO: 16616 - DNA, 60 bp, Homo sapiens
tctgaaatggcctcttccccaaaagtgacagtaacaccctagctccaggctcaaccacat

SEQ ID NO: 16617 - DNA, 60 bp, Homo sapiens
aaatcctgttattcaggagcctttttgagagttaactttcatgcttctgctttaaatcca

SEQ ID NO: 16618 - DNA, 60 bp, Homo sapiens
ctcaggccttacctcgtgcacatacctaggtgtggagtcttgtacattgccatcgtcaat

SEQ ID NO: 16619 - DNA, 60 bp, Homo sapiens
acctgatggaggtgacatcactggctgcagctgaagcagttcttgctgacctttctactt

SEQ ID NO: 16620 - DNA, 60 bp, Homo sapiens
cggctcctgctgcaataagaggctgttctggaagctctggggttcgggtctttgtccctg

SEQ ID NO: 16621 - DNA, 60 bp, Homo sapiens
catgttttgcctagtgatggtcctgcttttgtatggcaaagtcacatatagcaagtattc

SEQ ID NO: 16622 - DNA, 60 bp, Homo sapiens
actctagaggatccccctggggcccttactctagcgggtactcactctgtcgtgcgagaa

SEQ ID NO: 16623 - DNA, 60 bp, Homo sapiens
atacagcagggagaactttgggaaactcttgaaattattgaagtaagagacatggacgtc

SEQ ID NO: 16624 - DNA, 60 bp, Homo sapiens
gcaagttcttgcccaatcatgcatcctgctagaaaaggaaatgaagcaacgttcccagcc

SEQ ID NO: 16625 - DNA, 60 bp, Homo sapiens
gaaaactcttttcttgagtgtggatgagaatgggcacgctcacacttctggtgaatgtgc

SEQ ID NO: 16626 - DNA, 60 bp, Homo sapiens
acaaatcatatgcgactcccaaggaggtaggtctaccaggcggaacagtacacacctggt

SEQ ID NO: 16627 - DNA, 60 bp, Homo sapiens
acgcgtgcttgagaaggttcaatggcgtggcagggactagcggccgagttcctgcaggtg

SEQ ID NO: 16628 - DNA, 60 bp, Homo sapiens
ctcttatgtcgagtgagagctgacctgcaccgaagtttgtcccatttgttgcccttgaat

SEQ ID NO: 16629 - DNA, 60 bp, Homo sapiens
tatttggcactttgcagccttgagaggtgcagaagagacaccgaggggttcaccaccaga

SEQ ID NO: 16630 - DNA, 60 bp, Homo sapiens
gcgaagactggggagggggtacaactcttgctaatggaatgctatactgcacaaggtcaa

SEQ ID NO: 16631 - DNA, 60 bp, Homo sapiens
acctagtgatagccccagtggagatactgtccatacaaggtcttcccagaggctggatac

SEQ ID NO: 16632 - DNA, 60 bp, Homo sapiens
ggataactgactgaaggagtctcatttgtaaccaagatggaattcacagtatgttgttac

SEQ ID NO: 16633 - DNA, 60 bp, Homo sapiens
ggaaagtatatccttttgtaatataagatgtattagaagcaaagaagggaaatgggcttc

SEQ ID NO: 16634 - DNA, 60 bp, Homo sapiens
ctatcccctcctcagctagcagcacctgaaagggaaacagagataaggtgaaccaacggt

SEQ ID NO: 16635 - DNA, 60 bp, Homo sapiens
catagttgggtttcatgttgttcagatgtcttactaaaccaggtatctaaatgagtgttt

SEQ ID NO: 16636 - DNA, 60 bp, Homo sapiens
gagcctataccccttacttagcatgcacaaagtgtattcacgtgcagcagcaacacaatg

SEQ ID NO: 16637 - DNA, 60 bp, Homo sapiens
ggtaccctgggttgggacaggtggtaggaacatgtggacaaatctgttacagcctgctcc

SEQ ID NO: 16638 - DNA, 60 bp, Homo sapiens
tcctctgaggatggggcttgttggtgtgaaatgaggtgagcatgttgagttggggagcag

SEQ ID NO: 16639 - DNA, 60 bp, Homo sapiens
atatagccaacagagcagcagctacgggcagcagaagcccactgcggaagagggcagccc

SEQ ID NO: 16640 - DNA, 60 bp, Homo sapiens
aattatccaggtgttgtggcttatgtctattgtcctagccactctgctcactgcaacctc

SEQ ID NO: 16641 - DNA, 60 bp, Homo sapiens
cctcaacactagtttggcaataggatattgaactgagagtgaaagcattgtgtaccatca

SEQ ID NO: 16642 - DNA, 60 bp, Homo sapiens
aagttaggttgaggggttgttaacccttccgtggtctgctttcattccgtgtgcttcctg

SEQ ID NO: 16643 - DNA, 60 bp, Homo sapiens
ttccataagtggtgttttcctacgaatcagcacatggtgaaaaatgaggggctatgtata

SEQ ID NO: 16644 - DNA, 60 bp, Homo sapiens
atgaaatgaggcttgagctgcagagatctgctaactcaaacccggctatggcaccccgag

SEQ ID NO: 16645 - DNA, 60 bp, Homo sapiens
ggtccaccacttcttaacttcagaaccgcaggaagccgcgtcagtcatggggttcatttt

SEQ ID NO: 16646 - DNA, 60 bp, Homo sapiens
cccctccactcctggcaagcatgcagtcacgtgctcgtgtgaattttccaaaatcatgag

SEQ ID NO: 16647 - DNA, 60 bp, Homo sapiens
agagacctaaggtgagagacttgacacatggaaggagtaacattagggtctacctctacc

SEQ ID NO: 16648 - DNA, 60 bp, Homo sapiens
agtaatggggtatcacatgccaaatctggacctgaccattttagcctgatagtcgacggg

SEQ ID NO: 16649 - DNA, 60 bp, Homo sapiens
agaacgtgtctcactaggaactaggacactcatcggcccgagaccaactcctggataaaa

SEQ ID NO: 16650 - DNA, 60 bp, Homo sapiens
tttcagcagccaatgggtctgcaccttcgtcctcgtcagcattttgtctaatcgcggcct

SEQ ID NO: 16651 - DNA, 60 bp, Homo sapiens
tttctagtacttgggtagactttcctttggttggggagcggggtgcttaccatataactt

SEQ ID NO: 16652 - DNA, 60 bp, Homo sapiens
ggcatgggccgttggaagcttcatgtcctttcttctaacttgtcttctccagcggaagtg

SEQ ID NO: 16653 - DNA, 60 bp, Homo sapiens
gtgaatgtaaccgcatgactttgaggcaagtccagaccaagaacaaagaaccactggtct

SEQ ID NO: 16654 - DNA, 60 bp, Homo sapiens
tttaacgatggttccttggacagcattctggtgttcagcaaccaatatggaatatttgtc

SEQ ID NO: 16655 - DNA, 60 bp, Homo sapiens
aacaaaacctgaaagatgactgggatttagccaggggaatggggttgggactgaggcatg

SEQ ID NO: 16656 - DNA, 60 bp, Homo sapiens
tgccctcccttgtttccgctgcatccagacttcctcaggcggtggctggaggctgcgcat

SEQ ID NO: 16657 - DNA, 60 bp, Homo sapiens
ggggtggagaacaggtcatcatgtgcagattcttcctagctgaagtgtgttttctctggg

SEQ ID NO: 16658 - DNA, 60 bp, Homo sapiens
aatccagttagggggtgaagtggaaaatccagggcaagtttcgtggaggaagtgatgcct

SEQ ID NO: 16659 - DNA, 60 bp, Homo sapiens
actcacaattctacctgtaatttcagagagttaatggaacccttgatgcctaaagacctc

SEQ ID NO: 16660 - DNA, 60 bp, Homo sapiens
cccatcaatcaacaagcaaataaagaaaacgtggcatatatatactgtggaatgctactc

SEQ ID NO: 16661 - DNA, 60 bp, Homo sapiens
accctgcatgtgggaagggagcaggagggcctggctgggtgaggggaggccttcctggga

SEQ ID NO: 16662 - DNA, 60 bp, Homo sapiens
gtggagaggaacaactctgagtcttaacccaattttttgagccttgccttggcaaggcta

SEQ ID NO: 16663 - DNA, 60 bp, Homo sapiens; identical to SEQ ID NO: 4855

SEQ ID NO: 16664 - DNA, 60 bp, Homo sapiens
aagttgagttcggttcacgcgggaccctcttccctgtggcaagctgctgaaggagacctg

SEQ ID NO: 16665 - DNA, 60 bp, Homo sapiens
gaggttaaaacagactaggatcagagagcatctcagcctctcaggaccttagtttcctcc

SEQ ID NO: 16666 - DNA, 60 bp, Homo sapiens
ggctccagctgtttgtttctcttgctggggtttgtgatacccgtagctgtggttttctgt

SEQ ID NO: 16667 - DNA, 60 bp, Homo sapiens
cactcccatccactcataagcttggtacaaaaacttctctggcagttacttttgaagctt

SEQ ID NO: 16668 - DNA, 60 bp, Homo sapiens
tatctctcccagcagaggtagaaacagagggcctgaggcttgcatggcttaacccgaaaa

SEQ ID NO: 16669 - DNA, 60 bp, Homo sapiens
acattttgtggcagtggaaccagcattgccaactggcatacacaggctcggaagtaagat

SEQ ID NO: 16670 - DNA, 60 bp, Homo sapiens
taactcttctcaaactattccagaaacttgaaggcggggggtgtgggagtggaatttgtc

SEQ ID NO: 16671 - DNA, 60 bp, Homo sapiens
aagattttcctacctgcttatacttggtaaccgagggaattactaagacttcttgctcat

SEQ ID NO: 16672 - DNA, 60 bp, Homo sapiens
gacaattctgattagaatattaatacaaacgtgaaatgcagcttttaccaacaaatgggc

SEQ ID NO: 16673 - DNA, 60 bp, Homo sapiens
gggaccgctataaggccagtcggactgcgacatagcccatcccctcgaccgctcgcgtcg

SEQ ID NO: 16674 - DNA, 60 bp, Homo sapiens
gcagatggaatagagggctatgacatcttggttgcttgttccagttcctgcccagtgatg

SEQ ID NO: 16675 - DNA, 60 bp, Homo sapiens
gctggttgccttgttttcttgctgttctgattgacccatacctagactactccactccca

SEQ ID NO: 16676 - DNA, 60 bp, Homo sapiens
ttaatctgagggtactgcttaacaaatctcaaagtttccataaactagccatctcactgc

SEQ ID NO: 16677 - DNA, 60 bp, Homo sapiens
aaaactgtagtaagagtttccataagaagaacttccataagaagcccaagaattagttcc

SEQ ID NO: 16678 - DNA, 60 bp, Homo sapiens
tttcatagacatctacatgaagtctctgctttagaatcttaaaactgtagcttcagaggc

SEQ ID NO: 16679 - DNA, 60 bp, Homo sapiens
gctttccacacctgacctcttcagttcatcagtggggttcaccagcatcacccccatttt

SEQ ID NO: 16680 - DNA, 60 bp, Homo sapiens
agttttgggctcaggtgaactctaaacttagtcatagaatagggtgttagacatgagcag

SEQ ID NO: 16681 - DNA, 60 bp, Homo sapiens
gaatcagaccagatgtgacctgttgcatcttgtttctcccgcttagcatagtggtggaag

SEQ ID NO: 16682 - DNA, 60 bp, Homo sapiens
aatgtcatagcgacttttgggatagtttgctatcgacaaagggagacaaagtcaaggggt

SEQ ID NO: 16683 - DNA, 60 bp, Homo sapiens
gaactcagaactcagctcctagccaagtagagtgaggcctatggcttcatcatcaaaatg

SEQ ID NO: 16684 - DNA, 60 bp, Homo sapiens
atgtggcagctctgggtgctgctgtttgggaattatccccatgaagtcccgaagtcctgc

SEQ ID NO: 16685 - DNA, 60 bp, Homo sapiens
taacattcctttgaacactcagctttctgaaatggtgtcccaccgcaagacctggagaag

SEQ ID NO: 16686 - DNA, 60 bp, Homo sapiens
tcagagcattgctatgcctgaggtgtgtctcagaagcagccattggcacagtggcttggg

SEQ ID NO: 16687 - DNA, 60 bp, Homo sapiens
gaccttctgggcaatgccaagcccaggtacttctacacatctgcctaacttgggaatgaa

SEQ ID NO: 16688 - DNA, 60 bp, Homo sapiens
gacactctgagccccttgtgacctgcttcactgtgtcctggctgtctctgctgcccatgg

SEQ ID NO: 16689 - DNA, 60 bp, Homo sapiens
ctatgctatccacaagattgccaaaatggagcacggtgaagcagacaagaaggcagctcg

SEQ ID NO: 16690 - DNA, 60 bp, Homo sapiens
tgtgagtgtgtggaatccttctcacgaggcctcatctctctgactttcgtcgggaaatgt

SEQ ID NO: 16691 - DNA, 60 bp, Homo sapiens
tctacatgcgcctctcacctgacttcagtgacgatctaccaagggactctcctctttatt

SEQ ID NO: 16692 - DNA, 60 bp, Homo sapiens
agtctctgccagcatccctcgggcacccatcccaaactacatcactcaacaggcctctgc

SEQ ID NO: 16693 - DNA, 60 bp, Homo sapiens
gaatggaataatccatgtacaggaaggcgagatcatcgcctcctgtacgaatggatatcc

SEQ ID NO: 16694 - DNA, 60 bp, Homo sapiens
gaaaatagcgcctccactatggagcacacacggcaggtagctagagagctgtagaatcac

SEQ ID NO: 16695 - DNA, 60 bp, Homo sapiens
tccggagtcaagaactgaggaaaaccttcaaagagatcatctgttgctatcccctgggag

SEQ ID NO: 16696 - DNA, 60 bp, Homo sapiens
agagatgcggaagacctttaaggagattatttgctgccgtggtttcaggatcgcctgcag

SEQ ID NO: 16697 - DNA, 60 bp, Homo sapiens
tgcacctgttcttttcacctatatccatcctgcgttagagagcttcatggaccaggaccg

SEQ ID NO: 16698 - DNA, 60 bp, Homo sapiens
cctctcttcaatcctgtgatctataccatgaggaacaaggaggtgcatcaggcacttcgg

SEQ ID NO: 16699 - DNA, 60 bp, Homo sapiens
tggcctgtgggagcaagacatcatctgtcatcatgggtgtgatgctggtgtgtgtcacag

SEQ ID NO: 16700 - DNA, 60 bp, Homo sapiens
agaactgaaggttgccatgaagaggaccttcctcagcacactctattcctcaggcacctg

SEQ ID NO: 16701 - DNA, 60 bp, Homo sapiens
gctgatgggaatcctgccctaagcaaacggtggtgagacatggctgcttttagtgcattt

SEQ ID NO: 16702 - DNA, 60 bp, Homo sapiens
agctcctcaggaaagccaattgccttagggtgggtcacaattcgacggtcatttgtgtga

SEQ ID NO: 16703 - DNA, 60 bp, Homo sapiens
tgagtcaaggtctcaggagagacagaaggctgtactaaagggagcacattgttgagaagg

SEQ ID NO: 16704 - DNA, 60 bp, Homo sapiens
atcgctggtaaagtagctcagtggtgtggggaaacgttcccctggatcatactccagaat

SEQ ID NO: 16705 - DNA, 60 bp, Homo sapiens
tgcctactatatgacccagtgtttctactttgaagtgatacagccaacagaagtacatgc

SEQ ID NO: 16706 - DNA, 60 bp, Homo sapiens
atgcagagagccaatcactccacagtgacccaattcatcctcgtcggcttctctgtcttc

SEQ ID NO: 16707 - DNA, 60 bp, Homo sapiens
ttcttctgtgagatccagcctgtcctgcagctggtatgtggagacacctcgcttaatgaa

SEQ ID NO: 16708 - DNA, 60 bp, Homo sapiens
aaatgttcactatgtcatttagtgtccaactttacggataggttgactatctaaataggc

SEQ ID NO: 16709 - DNA, 60 bp, Homo sapiens
ggcacacaggaaagaactggctcaagtttagtccccaagttccttatagtaggaatagga

SEQ ID NO: 16710 - DNA, 60 bp, Homo sapiens
aagtggcctgaacagaatgctggaacccaggctggactcggacacactaaggttttgatt

SEQ ID NO: 16711 - DNA, 60 bp, Homo sapiens
gcagacatcttgttatcctgctttgttccagatttttgctgagaagtagttactgtgcac

SEQ ID NO: 16712 - DNA, 60 bp, Homo sapiens
agttctaggctgggagtgtccaagtcatcaccttcaccgtaaagctgcatagaccaagga

SEQ ID NO: 16713 - DNA, 60 bp, Homo sapiens
gctcaatcaccttgtaatggttatgttggttaattccagtctctcatgtgtaagcaacaa

SEQ ID NO: 16714 - DNA, 60 bp, Homo sapiens
tggccaattcctcagacctgctaaaagagcttctggaaacaggggacaaccgagagcgta

SEQ ID NO: 16715 - DNA, 60 bp, Homo sapiens
cagaggctagagtgtctcaaatggagtaagtgaggagagagttgtaggagatgaaaccag

SEQ ID NO: 16716 - DNA, 60 bp, Homo sapiens
gcccaacgattggaaatggttaagtaaattttggtgtattgctagtgctatcacagaatg

SEQ ID NO: 16717 - DNA, 60 bp, Homo sapiens
acatgcttgttgatgttgtgacatatcgcccctttgaggccacgttgtgctcggctaagt

SEQ ID NO: 16718 - DNA, 60 bp, Homo sapiens
tagaaccatttgaaagcacagacatgaagacacttgacccctaaatattttagcacgtgc

SEQ ID NO: 16719 - DNA, 60 bp, Homo sapiens
tggctgagaagcaagccacagatgtcaaacccaaagctgccaaggagaagacggtgaaaa

SEQ ID NO: 16720 - DNA, 60 bp, Homo sapiens
catgtgtgctttcatggaaagagagctggtccatttagctccccgtctgcagggagttat

SEQ ID NO: 16721 - DNA, 60 bp, Homo sapiens
gctggtggctggcattcaactctccagcagccagggagtccattttcttgtttctctgct

SEQ ID NO: 16722 - DNA, 60 bp, Homo sapiens
ctaaaatcagttttcactgaacagctctcatctcatctcagagccacagcagctctgtaa

SEQ ID NO: 16723 - DNA, 60 bp, Homo sapiens
ccaacagagcagcagctacgggcagcagagacccatggatgaaggaccagatcttgatct

SEQ ID NO: 16724 - DNA, 60 bp, Homo sapiens
tgcctgggctacacgctggtgagggaattcagcaaagacctgtgaagctacagactgaca

SEQ ID NO: 16725 - DNA, 60 bp, Homo sapiens
attcactgcctaaaacactttgggtggtattgatggagttggtggattttcctccaagtg

SEQ ID NO: 16726 - DNA, 60 bp, Homo sapiens
tgggaagctatatgtgtgtcatgccctcccagctgcacctgaacaatgagcatagcaaac

SEQ ID NO: 16727 - DNA, 60 bp, Homo sapiens
taagataggagaaaaccgctctgtggctagaggcaagatatgctggcagcaatactgctc

SEQ ID NO: 16728 - DNA, 60 bp, Homo sapiens
ttgaaatggataattctcggtaccagcccttcgcccttcagcatgcactgatggggccac

SEQ ID NO: 16729 - DNA, 60 bp, Homo sapiens
tccgcgtctactgcgagtcaggccgtgatggcggacgcctgggaagagattaggcggttg

SEQ ID NO: 16730 - DNA, 60 bp, Homo sapiens
tctgccactcttaacactaagtgagagttggggagaaactgaagccgtgtttttggcccc

SEQ ID NO: 16731 - DNA, 60 bp, Homo sapiens
ctaaactgagaagttttgagtcactgtttgggaatttcactccctcgctaatattgtatg

SEQ ID NO: 16732 - DNA, 60 bp, Homo sapiens
tatggattggtacgccttctgttcacctcatttcagcttcgctgagagttggtagatttt

SEQ ID NO: 16733 - DNA, 60 bp, Homo sapiens
ggccttggaatcttaatctggggatcatttaatgccttaactggctgggcaagctcaagg

SEQ ID NO: 16734 - DNA, 60 bp, Homo sapiens
agtccccactcagagcctgcatgtcccagcagcccagagaccatttaagatctctcctgt

SEQ ID NO: 16735 - DNA, 60 bp, Homo sapiens
actccacgtccttgtctcaattgtgccatcaactttcagagctatcatgagccaacctca

SEQ ID NO: 16736 - DNA, 60 bp, Homo sapiens
cccgtgactgctgcctcatcgataccccatttagctccagaaagcaaagaaaactcgagt

SEQ ID NO: 16737 - DNA, 60 bp, Homo sapiens
ttgcccttgagaagctattccccaaacaatgccaagtccttgggattgtgaccccaggaa

SEQ ID NO: 16738 - DNA, 60 bp, Homo sapiens
agaagaaggatggcaagaagcgtaaacgcagccgcaaggagagctactccgtatacgttt

SEQ ID NO: 16739 - DNA, 60 bp, Homo sapiens
tcccatgacacagccaattgtgaggcatgcactttgggcatatgtggacagggcttaaaa

SEQ ID NO: 16740 - DNA, 60 bp, Homo sapiens
gtgatgtgccacatttcctactaaacacaacattaaatccagctattcacgctacactca

SEQ ID NO: 16741 - DNA, 60 bp, Homo sapiens
cagcagatccaaggtttgctgctataacaggaaaatgctgacccctctttagaagctgtt

SEQ ID NO: 16742 - DNA, 60 bp, Homo sapiens
cagtgggcatagcagtccccaagaatgacccagcactgaagctgagccaaagaacttggg

SEQ ID NO: 16743 - DNA, 60 bp, Homo sapiens
gcaggtaataggcagttaagctctttcataccctaattggggaagaatttgtctttggtg

SEQ ID NO: 16744 - DNA, 60 bp, Homo sapiens
cctccatcaatatatctggaggcctatgaggaataaagcagaggacagtggtacctgcaa

SEQ ID NO: 16745 - DNA, 60 bp, Homo sapiens
ccacagtaatctagcattttgcataaaacctcatcaatctctgccaatcactgagcccaa

SEQ ID NO: 16746 - DNA, 60 bp, Homo sapiens
ctgccttttactggtgtacatgtcttttgttgagcacggtaccatgtgccaagcacaatg

SEQ ID NO: 16747 - DNA, 60 bp, Homo sapiens
cagcacttcatctcacgggttaattaaaccaacctgtagtggcaaagtttagtggtagtg

SEQ ID NO: 16748 - DNA, 60 bp, Homo sapiens
acagcatttgggatacccagtgtggcactcattccagtgagttttagtgacacccccacc

SEQ ID NO: 16749 - DNA, 60 bp, Homo sapiens
actgctagccaagaaggttactatccctggtgctgaaactgctctgtgtagtccttgtgg

SEQ ID NO: 16750 - DNA, 60 bp, Homo sapiens
cttccgctgccatcttcggatcctgtgttccgcccggggctccaccagggcagggatggt

SEQ ID NO: 16751 - DNA, 60 bp, Homo sapiens
gcttctattccacaggttgtcttcagtaagaatcaacgtccgaagatggaactcagttcc

SEQ ID NO: 16752 - DNA, 60 bp, Homo sapiens
atttgcatggctctgcctgtctgcagtggttgagtcctcatcacctggtatgtgtatgag

SEQ ID NO: 16753 - DNA, 60 bp, Homo sapiens
ttttgtgggggacatgttgttgtactatggatatataggggtgactgaaaacatggcccc

SEQ ID NO: 16754 - DNA, 60 bp, Homo sapiens
tccatttcagcaccagcattccttattgaccctattcatccatccatccatccgtccatc

SEQ ID NO: 16755 - DNA, 60 bp, Homo sapiens
gtaacacagcaggacctcacctcatctcttaaaactcccacacaatacggggagacttta

SEQ ID NO: 16756 - DNA, 60 bp, Homo sapiens
tgtgctgcacatgatactggcagccctagagttcatagatggacttttgggacccagcag

SEQ ID NO: 16757 - DNA, 60 bp, Homo sapiens
acggtgacctgtgttctgagtgcctgcttggaaaagacctccctgtcatctgccatacta

SEQ ID NO: 16758 - DNA, 60 bp, Homo sapiens
ggtgcaaagcacatggtatttgaattccaaagaccttgaccctcagcattagcaagtcac

SEQ ID NO: 16759 - DNA, 60 bp, Homo sapiens; identical to SEQ ID NO: 4855

SEQ ID NO: 16760 - DNA, 60 bp, Homo sapiens
atgttctttctccagctctcaggtgacagctgctttcacattctctagccctcagaccag

SEQ ID NO: 16761 - DNA, 60 bp, Homo sapiens
ccccaacttcggcgactgttatgagcacatgcacccactccttaaaaacccttattagta

SEQ ID NO: 16762 - DNA, 60 bp, Homo sapiens
ccccagattgtaaactctgtaagaagctgcttgtatctgtatcccttgttgaaactctga

SEQ ID NO: 16763 - DNA, 60 bp, Homo sapiens
gagtttgggatagagatacaactgaagtctctaatacagctcctactcgtttctgtcgac

SEQ ID NO: 16764 - DNA, 60 bp, Homo sapiens
ctccataatctaatctccagaatgcactaaaccaggagaagatccacctggaatggaaga

SEQ ID NO: 16765 - DNA, 60 bp, Homo sapiens
ttcttgtggatcagagctgggattatgtccatagctaacctggagtttgccaacttttgc

SEQ ID NO: 16766 - DNA, 60 bp, Homo sapiens
tctacaaaaggagtaaaagacagtaatacaaaaaattggcacataaaggaacaaaaatgc

SEQ ID NO: 16767 - DNA, 60 bp, Homo sapiens
ttgatctctgtctgagctctgaagggtccgaagtgattttagctacatcaagtgatgaaa

SEQ ID NO: 16768 - DNA, 60 bp, Homo sapiens
actcacctccatcttcggttcttcagttttctgagaagagttgggatatgtgggaagggg

SEQ ID NO: 16769 - DNA, 60 bp, Homo sapiens
gcttggcagcaaacctaacaaaccttcactacccagtagctctcaaaacctgggccaaac

SEQ ID NO: 16770 - DNA, 60 bp, Homo sapiens
tgccctacatctctacgtggactgcaaactgggtgaccaacatgcaggccttccagcact

SEQ ID NO: 16771 - DNA, 60 bp, Homo sapiens
ctatgtggtgaaaatgcacaggagcttggtagactgcggggaaagagagagctcctttcg

SEQ ID NO: 16772 - DNA, 60 bp, Homo sapiens
gtggccagtgaatgtatagtatgggagggagtaatccagtatgggggacaaggttgccat

SEQ ID NO: 16773 - DNA, 60 bp, Homo sapiens
taaggctgttttgtctatagtagccaccttcatcaaggtgggctaggtcttctagatgac

SEQ ID NO: 16774 - DNA, 60 bp, Homo sapiens
cgaatggactttgagagagtgttgcatgtagaaggaacagcatgtgctgatgcctcgagg

SEQ ID NO: 16775 - DNA, 60 bp, Homo sapiens
ttctggcttgaaaccacccctctcccatcccaaccaagttaagcagcttctttcctgctt

SEQ ID NO: 16776 - DNA, 60 bp, Homo sapiens
gtttagttggactctgttatgaaaagataggttatgggtgggcgacaggttgatacagtc

SEQ ID NO: 16777 - DNA, 60 bp, Homo sapiens
actagtgttgcacaggtgtaattggtcatcctatgccttcaccagaataacttgggagtg

SEQ ID NO: 16778 - DNA, 60 bp, Homo sapiens
agtgttaatttttcatttccaccatggatatcatgatcatggttcatcctacccgtagga

SEQ ID NO: 16779 - DNA, 60 bp, Homo sapiens
cagaaaagttaccaaacagtggtaaccataacaagtaccaacaatgaactatggggaggg

SEQ ID NO: 16780 - DNA, 60 bp, Homo sapiens
tgagacatgagcctccaactgtgtggttgggctcggtagcacatcgtgggacttgggtgt

SEQ ID NO: 16781 - DNA, 60 bp, Homo sapiens
agttacttcatcgtctccatcctctacctcaagtatgagccaggagcagtcgaactgtcc

SEQ ID NO: 16782 - DNA, 60 bp, Homo sapiens
gttcttctctggttggtcctgctgggactgtttgtggaactggaatttggcctggcatat

SEQ ID NO: 16783 - DNA, 60 bp, Homo sapiens
ttcctctctaagctcacccagctcaaactgacaggagaatcttcttcgactgccaagagc

SEQ ID NO: 16784 - DNA, 60 bp, Homo sapiens
gtggcattactgcatctgctagttagtgagaaagcaccctcagcttttactgctcccctc

SEQ ID NO: 16785 - DNA, 60 bp, Homo sapiens
tagccactgtgtgacacggtgagaagactcaaggatgatctctgggtttctccaggaaag

SEQ ID NO: 16786 - DNA, 60 bp, Homo sapiens
tttctgggccctctgtgtgagcaggccaggtgtgagcttgttttagaagcagcgtgttgc

SEQ ID NO: 16787 - DNA, 60 bp, Homo sapiens
tatgactttgaaccagcgctcaagacggaggacctgctggcaacgttttctgagttccaa

SEQ ID NO: 16788 - DNA, 60 bp, Homo sapiens
acacacagtgatatcccaactccctctgcataactgcccatcaaccttggctcacctgta

SEQ ID NO: 16789 - DNA, 60 bp, Homo sapiens
tgccgctggtgtctcctgcacctgcgccagctcctgcaagtgcaaagagtgcaaatgcac

SEQ ID NO: 16790 - DNA, 60 bp, Homo sapiens
cctgggccaaggtcaatgacagtgtctccattgtcttccctccattaagagaagacttta

SEQ ID NO: 16791 - DNA, 60 bp, Homo sapiens
aattgggatggtggcttgtaccccaaagtgccattgcaacccttgtccttcctgaggaaa

SEQ ID NO: 16792 - DNA, 60 bp, Homo sapiens
atcccttcctgaagcccctttctaagtatccaggtcgtcatccagtgtcagcaacacctg

SEQ ID NO: 16793 - DNA, 60 bp, Homo sapiens
gagatcttggattgctgcaaggtggtaacagattctctgctttgcttcaggtgttagtgg

SEQ ID NO: 16794 - DNA, 60 bp, Homo sapiens
ggcctcctcatcagaaacatccaatcaatcacagaatccatcgttaacagaaccacctcc

SEQ ID NO: 16795 - DNA, 60 bp, Homo sapiens
aaaactaacgtgcagcaatttccagtgaacctgtacttggacatcaggtagtgagtctat

SEQ ID NO: 16796 - DNA, 60 bp, Homo sapiens
gatcgcggcaatggattggatctattgaggtgcagctggtactaaaccaattgatcggta

SEQ ID NO: 16797 - DNA, 60 bp, Homo sapiens
gtttggggaggagaatggagtgtcagtgatttcagcaaaaagttggggtaccagttcata

SEQ ID NO: 16798 - DNA, 60 bp, Homo sapiens
tggcctttgtagttgccgagtggtaaagtgtactgaatatgaataaagctggtaaattgg

SEQ ID NO: 16799 - DNA, 60 bp, Homo sapiens
ctttactatggcaactctacagcaagattatgctccgttatctagaaaagctcaggagca

SEQ ID NO: 16800 - DNA, 60 bp, Homo sapiens
atgagctggttctttccatcctcttgtggtacccgtagtgcccagcatccagacctttgt

SEQ ID NO: 16801 - DNA, 60 bp, Homo sapiens
tctgtgcttcttcccagacacgggagctgtagaggagacctctgcagcagatgctagggg

SEQ ID NO: 16802 - DNA, 60 bp, Homo sapiens
gtgtgccctgagacccaggacagaagccacggtcctaagagccggttttatcctcgtcat

SEQ ID NO: 16803 - DNA, 60 bp, Homo sapiens
gtgctcttgctgaggacccacaagaacttcgagatggattccaacatcctgctagacttg

SEQ ID NO: 16804 - DNA, 60 bp, Homo sapiens
ggcttcattattgtgccagtctcaagttgaaaagaggctacatgattgtacattcaagtc

SEQ ID NO: 16805 - DNA, 60 bp, Homo sapiens
gcaactagcaactcatcttcggaagacacagccaggagaatgaagtagaagtgaaaggtt

SEQ ID NO: 16806 - DNA, 60 bp, Homo sapiens
gtctgggactgggaacttatgaatgatatcgttcataaactttcctatttatgtatggag

SEQ ID NO: 16807 - DNA, 60 bp, Homo sapiens
atggcagaaatgagtggagtgcaccaaggtgggaacctcctaatgggtgtgggaactgaa

SEQ ID NO: 16808 - DNA, 60 bp, Homo sapiens
ccagacaatgtatgtaaaacaggcccatgtggaaaaaaacaagtatcttcatccttgctc

SEQ ID NO: 16809 - DNA, 60 bp, Homo sapiens
gactaagtctaagggtgctgtgggttttctctttctctctggaattgtttgctttgggga

SEQ ID NO: 16810 - DNA, 60 bp, Homo sapiens
tagataccgtatggatcaccgatgaaaacgaaagggagacaggccgaaattgacggagcc

SEQ ID NO: 16811 - DNA, 60 bp, Homo sapiens
aagcaagctcgtgttccttacctatccttttggtgtccattggattgtgccccgaagtgg

SEQ ID NO: 16812 - DNA, 60 bp, Homo sapiens
cacaggtgagcgacagttctgagtgagtccaagtgccgacctcacacaatgaaaggcgaa

SEQ ID NO: 16813 - DNA, 60 bp, Homo sapiens
ctctgaaacatcttccttgtcacaggtggagatggagtgggtgaaacaatatgcaatctc

SEQ ID NO: 16814 - DNA, 60 bp, Homo sapiens
gacagtggaagtgcctcagtttacttgggagcttggcctctccagcttgccttcctactg

SEQ ID NO: 16815 - DNA, 60 bp, Homo sapiens
caggacgtgtacaggctatgcaatacctttggtcaccatcctgatctgcaaccggaaagt

SEQ ID NO: 16816 - DNA, 60 bp, Homo sapiens
cattcctgagagctctcctcaccaagcagcagcttctccgctccttctaggatctccgcc

SEQ ID NO: 16817 - DNA, 60 bp, Homo sapiens
tgctggattttgagcctaggtcctactgtctgccagtactcatgtgagttgtatgtgccc

SEQ ID NO: 16818 - DNA, 60 bp, Homo sapiens
tgtactccacgaatatgaggaagtatgagtagaggggaactggtacagaacagaagttat

SEQ ID NO: 16819 - DNA, 60 bp, Homo sapiens
cagtgtttctggggtaagtttcacagtttctaggccctggaatagcaggcagtgtaagcc

SEQ ID NO: 16820 - DNA, 60 bp, Homo sapiens
ctgcagagccagcactgtgatacctcatagtaggtgctcagtgaatgtctgtgaagtgaa

SEQ ID NO: 16821 - DNA, 60 bp, Homo sapiens
aagcagcagcttcagtaagcaccggagagccattgcctcctttccacggggaccagctgg

SEQ ID NO: 16822 - DNA, 60 bp, Homo sapiens
ccaggggaatcattaggtaggaactggataggaacacaaagtagtggagagtggcttagc

SEQ ID NO: 16823 - DNA, 60 bp, Homo sapiens
ccaagtggcacaaatgcagaaactccctctggtgatgatttcagcctctccttggcagat

SEQ ID NO: 16824 - DNA, 60 bp, Homo sapiens
ttgtttgtgctgaaaatcaatgatttgcagctctcaagattccagtgggcagtctgggtg

SEQ ID NO: 16825 - DNA, 60 bp, Homo sapiens
aattgactgtgaggggcttcagggaacctcctggggtgctgaaaacattctgtgcttgca

SEQ ID NO: 16826 - DNA, 60 bp, Homo sapiens
attcttaaatcgttccttgaacctttaccctattctgtgcactgtgccgatttccaggga

SEQ ID NO: 16827 - DNA, 60 bp, Homo sapiens
gggtaaaggagaagtggtggtaaagacgaaaagagtagggaacaggtggttgaaggaatc

SEQ ID NO: 16828 - DNA, 60 bp, Homo sapiens
gacagccaccattcctcctgctaactgatctaaatccatccccttgggaaacgcccctga

SEQ ID NO: 16829 - DNA, 60 bp, Homo sapiens
gactttctggaacaatttcctttcaggaatacatattcactgcttagaggtgaccttgcc

SEQ ID NO: 16830 - DNA, 60 bp, Homo sapiens
gaatatgtaccatttccttcaaagtcatcctagcctatgctgtatcaaaagtattgtata

SEQ ID NO: 16831 - DNA, 60 bp, Homo sapiens
ttggccccagcgcagacggaacccgcgctctctgatcagaggcgaagctcggaggtccta

SEQ ID NO: 16832 - DNA, 60 bp, Homo sapiens
ggcccttgtgttcctgcttttcaacagtgcatcctgcagcacacatggacagagagaaaa

SEQ ID NO: 16833 - DNA, 60 bp, Homo sapiens
gtgcttaatccgctggtgaccggttacttgggaaggggtcctggcctgaagacagtgtgt

SEQ ID NO: 16834 - DNA, 60 bp, Homo sapiens
tggccaaggagatgatggcccagaagcgcaaggggaagatggtgaagctgtacgtgctgg

SEQ ID NO: 16835 - DNA, 60 bp, Homo sapiens
ctggaaagatgaagctcagtaataacacaaccctggaaaaccatccagagattgtggcaa

SEQ ID NO: 16836 - DNA, 60 bp, Homo sapiens
aaaactccattaattacctgacctcaggtgatccacccaccttggcctacctgtagggac

SEQ ID NO: 16837 - DNA, 60 bp, Homo sapiens
cagctcacccatggaactagaaattcacaaacctgaagctgaaccacaggacaagaaatt

SEQ ID NO: 16838 - DNA, 60 bp, Homo sapiens
aaagtttctcaaggatacaaaccaatggtttatctgtgaactcgggcccagaatagaaac

SEQ ID NO: 16839 - DNA, 60 bp, Homo sapiens
ttacaaaggtgcaaaaaagcatcttgcttttgcaagaaatagtaacatcattcaatatgc

SEQ ID NO: 16840 - DNA, 60 bp, Homo sapiens
gcgagctagagaaatcaccaccgtttagaccaagctgtaaggccctactacagacagtgt

SEQ ID NO: 16841 - DNA, 60 bp, Homo sapiens
ttgacttaactgcttccctgaagtaccgtgaggttcctgatgtgcgggcggtagacggta

SEQ ID NO: 16842 - DNA, 60 bp, Homo sapiens
gtcccaaacatcaggctgttcacaaaaataacccacagtatcaactttagaaaacaaatc

SEQ ID NO: 16843 - DNA, 60 bp, Homo sapiens
ccatggcctactctaaagccgcatttgaaagggaaagtgatgtccctctgaaaactgagg

SEQ ID NO: 16844 - DNA, 60 bp, Homo sapiens
tgctccagagctgagaatacaactctggtcaaaaagagcttctgccttccagttggcaga

SEQ ID NO: 16845 - DNA, 60 bp, Homo sapiens
gccatcttgccctggttcctagtcaagcattttttaagagaggattttcatatagtaaaa

SEQ ID NO: 16846 - DNA, 60 bp, Homo sapiens
ggtgagtctgtcttacccgatctttcttggatggtgtcagcaacctaaaaaggctataat

SEQ ID NO: 16847 - DNA, 60 bp, Homo sapiens
gtttagcacttagcaacacaagtttactaatggaccgcaaagcacagtggcctaaagagt

SEQ ID NO: 16848 - DNA, 60 bp, Homo sapiens
catggtttgaattccttgacagggttggtcttgggaatttgcctctaccatttgagcgga

SEQ ID NO: 16849 - DNA, 60 bp, Homo sapiens
tggggtgagaaaaagctaaggcccaggctggaaatgccaggaagtggacctcaggcatag

SEQ ID NO: 16850 - DNA, 60 bp, Homo sapiens
aagttaccatgtctgcaagtagggcgaacaggaatgaagtcgcacctacccataaacaac

SEQ ID NO: 16851 - DNA, 60 bp, Homo sapiens
tcagtaagtgtttccaagctagcagctctggctcagcaattccagtttgtacatgtcccc

SEQ ID NO: 16852 - DNA, 60 bp, Homo sapiens
tttctcaggttgagatgatcaccgtgaatccggcttcctctgagcattcgatggccttag

SEQ ID NO: 16853 - DNA, 60 bp, Homo sapiens
aggatgagtggaaaatagcctcctcttgcccaaacatgaagggtgcttgaggtctcagca

SEQ ID NO: 16854 - DNA, 60 bp, Homo sapiens
ggaacatatgatctatagagcagaaaagagcatgcagtagaaatcacctctgaggagtcc

SEQ ID NO: 16855 - DNA, 60 bp, Homo sapiens; identical to SEQ ID NO: 4855

SEQ ID NO: 16856 - DNA, 60 bp, Homo sapiens
atgaactaggtaggaaggctacccggggcatttcatcacaggagctagggcaggggcttt

SEQ ID NO: 16857 - DNA, 60 bp, Homo sapiens
actggacagttctagaagggctatagaccaaatcaggtaactcaccagaccagccttgga

SEQ ID NO: 16858 - DNA, 60 bp, Homo sapiens
tagagagatcactgtgtctgcaggatggagtatgtcctggaatgaagaggtcagaagcgg

SEQ ID NO: 16859 - DNA, 60 bp, Homo sapiens
aagggaatgttttggcacctgatataatctgccaggctatgtgacagtaggaaggaatgg

SEQ ID NO: 16860 - DNA, 60 bp, Homo sapiens
ccccagatgaagatggggatcacagtgacaaagaagatgaacagcctcaagtggtggttt

SEQ ID NO: 16861 - DNA, 60 bp, Homo sapiens
cctacattgatcacagtgacctttaatcaccttcagctccctggtctcctagagccacgg

SEQ ID NO: 16862 - DNA, 60 bp, Homo sapiens
ctgtaattcctgccaaaagcatcacaagttgtacatcatcaaggctccctttgcactccc

SEQ ID NO: 16863 - DNA, 60 bp, Homo sapiens
aactaatgcctgagcacaaacctgttgaagatgcagttcttcttgggtagcctaaatagg

SEQ ID NO: 16864 - DNA, 60 bp, Homo sapiens
gctttagagcgacatcttgatgttaaatctcttagtgtggagcaaatctttggtcaagtt

SEQ ID NO: 16865 - DNA, 60 bp, Homo sapiens
tggccagtggtgcccactcccagaatggtggctggttcggtgttgcaacccacaccccaa

SEQ ID NO: 16866 - DNA, 60 bp, Homo sapiens
ccgagtaaatggataacccctctagaccgcctggtagcctttcctactagagtagcaggt

SEQ ID NO: 16867 - DNA, 60 bp, Homo sapiens
cacaaaagagtagcattccattttcttgaagtgcacatgatatatgaacaatacaaatgc

SEQ ID NO: 16868 - DNA, 60 bp, Homo sapiens
gcttactataactcttattctaatgtcatagacactgaaagagagaagttaaactgtgct

SEQ ID NO: 16869 - DNA, 60 bp, Homo sapiens
ccgtgttttgagatggattggaggcattttttgtccacacacttgctttggggattttta

SEQ ID NO: 16870 - DNA, 60 bp, Homo sapiens
gatctatggtgtcattatagtgagtttctattacctacttctgtgtctttttggttgacc

SEQ ID NO: 16871 - DNA, 60 bp, Homo sapiens
catgcctccctgctcctagtaatgtatgttttgtgctgaactggcagctatcccaatgtg

SEQ ID NO: 16872 - DNA, 60 bp, Homo sapiens
cgctggaaccggagtccctggacttcagcggagctggccagagacttcggagagacgtct

SEQ ID NO: 16873 - DNA, 60 bp, Homo sapiens
ggttaccttttctgccacatgaagtagctggctggtgaaatgatgtcatactacgatgtg

SEQ ID NO: 16874 - DNA, 60 bp, Homo sapiens
gacgggcggtggccgcactgggaccccggaatcccgcgcgctgcccacgattcgcttctg

SEQ ID NO: 16875 - DNA, 60 bp, Homo sapiens
actttcgagccatgtaaggcatgcagatggggtaggagcgttcccgcgacacgttgccag

SEQ ID NO: 16876 - DNA, 60 bp, Homo sapiens
ccaaatgggtattgccttatggttcagcaacccacatccccaggacagccaaaggatttg

SEQ ID NO: 16877 - DNA, 60 bp, Homo sapiens
gaggagagctactaacttgggttcctggtacaccctctacatgcagtggtgaagcttatc

SEQ ID NO: 16878 - DNA, 60 bp, Homo sapiens
tgcagctctgcagtcgggccgttccttcgccgccgccaggggtagcggtgtagctgcgca

SEQ ID NO: 16879 - DNA, 60 bp, Homo sapiens
taggtggttgccgtgacccatagagaacaaggaaagatgggctggtggattggcccacct

SEQ ID NO: 16880 - DNA, 60 bp, Homo sapiens
aatatccaccaagctgtagatcttcccaagatatttttcaggtaacgaagcatgtaaact

SEQ ID NO: 16881 - DNA, 60 bp, Homo sapiens
tgtacctgctcagcatccccttcatcgtggccacctacgtcaccaaggagtggcacttcg

SEQ ID NO: 16882 - DNA, 60 bp, Homo sapiens
cgatgacttggcaagaagaaagatgggaaactgaataaagcagttgatcagcatcattgg

SEQ ID NO: 16883 - DNA, 60 bp, Homo sapiens
aaggacccagatctctttcagcgaggccttcaacttatggcagatcaacctccatgagct

SEQ ID NO: 16884 - DNA, 60 bp, Homo sapiens
agaatgaggcttccccaggagagactacaaggattgcagcatcctcactttatccctgga

SEQ ID NO: 16885 - DNA, 60 bp, Homo sapiens
atgtacgcctttgtgcggttcctggaggacaacgtctgctacgcgctgcccgtgtcgtgc

SEQ ID NO: 16886 - DNA, 60 bp, Homo sapiens
acctaaagccttagttttaactggacaggtaagtaccttgcccagtcacagatgtaatac

SEQ ID NO: 16887 - DNA, 60 bp, Homo sapiens
tttcctctcttagctctgttgcccactttccttgggccataccttccctgcagatctcca

SEQ ID NO: 16888 - DNA, 60 bp, Homo sapiens
tgcgggactctctcggctctgcatagttgcacttggcttcacccgtgtgactttcgtaac

SEQ ID NO: 16889 - DNA, 60 bp, Homo sapiens
ggtctgaaaaccctgagtgggaaaacagaactaattccacctggatgaccttctggaaac

SEQ ID NO: 16890 - DNA, 60 bp, Homo sapiens
acagacccacaagtgcttgtaatccatgtccacggactgcagctcatgcagccagctcat

SEQ ID NO: 16891 - DNA, 60 bp, Homo sapiens
ctgcgggtacgtcactatccagtctactttttccattgacgtggctgagtcatatgtagt

SEQ ID NO: 16892 - DNA, 60 bp, Homo sapiens
ctgcagcctgtggtcagccatcaggagacctctgtaggggccctggggtccctgtgcaga

SEQ ID NO: 16893 - DNA, 60 bp, Homo sapiens
ttcttctgtcttagagttctcccctgctgcttgagatgccagagctgtgttgttgcacac

SEQ ID NO: 16894 - DNA, 60 bp, Homo sapiens
ggagagactactctttagcctgtacggtgtgtagagggcttgggagttggaatgtcttag

SEQ ID NO: 16895 - DNA, 60 bp, Homo sapiens
ttctgcaccgcagcacaggcaagttccactacaagaaggagggcacctactccattggca

SEQ ID NO: 16896 - DNA, 60 bp, Homo sapiens
tcatcatgcagagtgaaatgagggaaagacaaatggccatgcagattgcgtggtctcggg

SEQ ID NO: 16897 - DNA, 60 bp, Homo sapiens
atctagtgacctagtattgcctggtgatgaaatctgtccctgccgttaggttcacttgtg

SEQ ID NO: 16898 - DNA, 60 bp, Homo sapiens
ctggggcagagactgaaatactgccacctacctttggcatttaatgttcctctcctggca

SEQ ID NO: 16899 - DNA, 60 bp, Homo sapiens
atgtggaaggagtagacctgtgtccctgttgagccacccctgggagcgagcatggcaatc

SEQ ID NO: 16900 - DNA, 60 bp, Homo sapiens
caaaatctcttctacttggagactctcaacaccaagcagaagctgtaccacaagaagatc

SEQ ID NO: 16901 - DNA, 60 bp, Homo sapiens
ctaggagagaagctgtcctgtggcgggaggcgagacatgttgcagtaacgctgccttgcc

SEQ ID NO: 16902 - DNA, 60 bp, Homo sapiens
catgaatcagtatttactacttctgcatgggggcatttctggtaaagactggaaaacctg

SEQ ID NO: 16903 - DNA, 60 bp, Homo sapiens
ggtaggagctgagcaacactgctggatgaataaacacatgtaatgcagggtgaacagaac

SEQ ID NO: 16904 - DNA, 60 bp, Homo sapiens
ccagtttgggactcttaggaatagtgctgctgtgaacatttggcgatgtgtcccttgatg

SEQ ID NO: 16905 - DNA, 60 bp, Homo sapiens
ttccagcttttatcagccaggggaactcttgtacactgttgatggaaacgcatactggtg

SEQ ID NO: 16906 - DNA, 60 bp, Homo sapiens
cctgattctgtgtgttgaaaatcagattcttcaagtttagttctttctcctgccatggaa

SEQ ID NO: 16907 - DNA, 60 bp, Homo sapiens
ggccttctggcatgtttgtaaaaagctaataaaactctaaaaatatgttgtcaggctggg

SEQ ID NO: 16908 - DNA, 60 bp, Homo sapiens
taggactggattctaagggtggtttttacctctaatatccaaatactgctgcctcaagag

SEQ ID NO: 16909 - DNA, 60 bp, Homo sapiens
ctgccttgtctttttcaggtaatagcctgcagctggtgttttgagaagccctactgctga

SEQ ID NO: 16910 - DNA, 60 bp, Homo sapiens
atgtacttggcctgagactgacctctccctaggtccaaatgccctagtcacatggcagac

SEQ ID NO: 16911 - DNA, 60 bp, Homo sapiens
ttaagggtgagaaggaatgaccaacagggaaagtaatcctctcattagctcagagcaatg

SEQ ID NO: 16912 - DNA, 60 bp, Homo sapiens
aaagcgaggactgcaaactcccctgcaatccgtgctccacgcctccctcctgcgtgactg

SEQ ID NO: 16913 - DNA, 60 bp, Homo sapiens
cccgcctggcttcgagttggaacccggacacttgcccctcactggtgtggatggaaatct

SEQ ID NO: 16914 - DNA, 60 bp, Homo sapiens
aatatcctgagcctgagtggtaaggtgctgccatcctgtgaccttgctcgacgctatggc

SEQ ID NO: 16915 - DNA, 60 bp, Homo sapiens
tgagcaacttctcttgcaaccttgtgtgataggattctggaaggtctgtccttggtgggc

SEQ ID NO: 16916 - DNA, 60 bp, Homo sapiens
ttacttcctttacaatgggtaccacctgccctgggtgttgaaatgtgggattgacccctg

SEQ ID NO: 16917 - DNA, 60 bp, Homo sapiens
agaaattcccagtccttatccaccggcttcatctggacgctgtgttcgctgatctggaaa

SEQ ID NO: 16918 - DNA, 60 bp, Homo sapiens
gtttagaggagaaacatctactatcagaatgtacttaaagagaccaatcttcacacctct

SEQ ID NO: 16919 - DNA, 60 bp, Homo sapiens
gggcacatatctctcatcttttggttctaacgtgaagccaaatgaggacaggcgcatgat

SEQ ID NO: 16920 - DNA, 60 bp, Homo sapiens
gggcagatcacgaagtcaaaaaatcctttaccacctgtacaaaaccctgtccaaagtaag

SEQ ID NO: 16921 - DNA, 60 bp, Homo sapiens
ccagaagttgcccaaggttttcaagctgaacacaggagaaatgactctggatctctgagg

SEQ ID NO: 16922 - DNA, 60 bp, Homo sapiens
aaactcttcaaactccacttgttcagtctgaaatgcagctccctgtccaagtgccttgga

SEQ ID NO: 16923 - DNA, 60 bp, Homo sapiens
tccagagcagtgatggaggaaataccagcccaggaagcagcagggtcaccaagggtccag

SEQ ID NO: 16924 - DNA, 60 bp, Homo sapiens
ctgtgcctgccgggacctccagcctgcagaatgcgtccagaaataaattctgtgtctgtg

SEQ ID NO: 16925 - DNA, 60 bp, Homo sapiens
aaaattggaggtgggatgaggggagcggtgggcttcctagggtagcatgcacaagatcag

SEQ ID NO: 16926 - DNA, 60 bp, Homo sapiens
cacccagctactcaacaaatttgagagaccacagtatgccgaaattcttgcagattgtcc

SEQ ID NO: 16927 - DNA, 60 bp, Homo sapiens
ggaacaagaggctgaagaaaaggctcctagaatgtccaagctgaaaagtattcagggatc

SEQ ID NO: 16928 - DNA, 60 bp, Homo sapiens
gagtatatggatttccttcatatttcctagttatttccttaaggtaggttcccaggtatg

SEQ ID NO: 16929 - DNA, 60 bp, Homo sapiens
taggaaaacagaagaatgaatgacccccaagtgttggctcctgtggtaagctcaacaaaa

SEQ ID NO: 16930 - DNA, 60 bp, Homo sapiens
agactctggtgccttgtggtgcccttctgaaattcaaacagtaatgcaaaagtgtctgca

SEQ ID NO: 16931 - DNA, 60 bp, Homo sapiens
ccgctttgagaacttctattccatgccacagcaaccctcgcagcaaccccaggactttgg

SEQ ID NO: 16932 - DNA, 60 bp, Homo sapiens
tagataagacaacagcctaccttcaagtgatagtacaccaccgcacaaacagaatatgac

SEQ ID NO: 16933 - DNA, 60 bp, Homo sapiens
gtagttccgcgggctccctgcccagcaaccggtagtggtacctgagaacaaaggaggaga

SEQ ID NO: 16934 - DNA, 60 bp, Homo sapiens
ctccctgtgtgcaatgatctgtgtgcataacctgcctatgtatagatgtcctgggctcag

SEQ ID NO: 16935 - DNA, 60 bp, Homo sapiens
gatcaaacccaaagggaaaagtgttgctagagaaaattggggaaaggtgaaaaaggaaaa

SEQ ID NO: 16936 - DNA, 60 bp, Homo sapiens
cacccttgccatgcccacagcaagatgtatctcgcccaccacaggccttgcgtgccccct

SEQ ID NO: 16937 - DNA, 60 bp, Homo sapiens
tggagatgcggcagaaccagactgaaccaaggcacccagcaacactggagggaaacaagt

SEQ ID NO: 16938 - DNA, 60 bp, Homo sapiens
ggagagggcttgcttcccggtttgcagatggacatcttattattatctcctcacatccaa

SEQ ID NO: 16939 - DNA, 60 bp, Homo sapiens
gctgcatgagatagtatagatgatcgatcgagtagatagatcgagtcgagtcgagtgact

SEQ ID NO: 16940 - DNA, 60 bp, Homo sapiens
gtatctcacctcaggcaaagcaacattgatagattgatgcatgtagtgtctggaggttgc

SEQ ID NO: 16941 - DNA, 60 bp, Homo sapiens
ccccagtctaccttggagaccaaggaatccaaatctttcaattgtcgcattgagtatgaa

SEQ ID NO: 16942 - DNA, 60 bp, Homo sapiens
ccccattcaaccctcaaactgtccaattcctggcctaattcaccttcactctgctgtagc

SEQ ID NO: 16943 - DNA, 60 bp, Homo sapiens
aatttcccaagtctgatagcatgaatgcttatttgtgctgtgaaaagcagagcagcctga

SEQ ID NO: 16944 - DNA, 60 bp, Homo sapiens
aacccaccgtgattcatcttctgaagctgggagtgaaactgggtcagctgtaacctgttc

SEQ ID NO: 16945 - DNA, 60 bp, Homo sapiens
gtgtatgatggaatctgaagccactgaaaatcctacttgaaaagccatgtctaactcacc

SEQ ID NO: 16946 - DNA, 60 bp, Homo sapiens
aaaatataccaagctcattcttgcagcagggcctttgcattggctatttgatccatctag

SEQ ID NO: 16947 - DNA, 60 bp, Homo sapiens
gttgcaagggactgttctgtgtactacaggatacttggcagcatccttggcctatccatt

SEQ ID NO: 16948 - DNA, 60 bp, Homo sapiens
ggtgggggtcctgtggcagctcttgatgaatcaggggggccaactccctcttcctatgga

SEQ ID NO: 16949 - DNA, 60 bp, Homo sapiens
gacatactatgtgaagctactatttggagttggacacgagtgcatgtgaccttgtgccac

SEQ ID NO: 16950 - DNA, 60 bp, Homo sapiens
tgtcaggtccttttgcccagatctttagaccagacaactttgtatttgtaagtttgggcc

SEQ ID NO: 16951 - DNA, 60 bp, Homo sapiens; identical to SEQ ID NO: 4855

SEQ ID NO: 16952 - DNA, 60 bp, Homo sapiens
catatggagaagaattacattttgggaatctttacttaacagagtatcattcaagactgt

SEQ ID NO: 16953 - DNA, 60 bp, Homo sapiens
gaccctatttccctagattctattttctgaacttgggaacacaatgcctacttcaagggt

SEQ ID NO: 16954 - DNA, 60 bp, Homo sapiens
aactggtagctcggtcgtttcgcacactaggtggcatacaggcagcagcaggtgttcata

SEQ ID NO: 16955 - DNA, 60 bp, Homo sapiens
acttcttcccatgtgtgcacagaactatgttgtgcttctggactccacactccccagatc

SEQ ID NO: 16956 - DNA, 60 bp, Homo sapiens
gctgaacgtgccgcgctccaagcggctcttccgggacctggtgagcctgcaggtgccgga

SEQ ID NO: 16957 - DNA, 60 bp, Homo sapiens
cagtggtagcttttggaaagaatgtgtttcataccgatgtgcaggcctcactggaagagc

SEQ ID NO: 16958 - DNA, 60 bp, Homo sapiens
tttgagtctttctccaagttgcgccggacaaccaagaccaaaggacacagttacccacct

SEQ ID NO: 16959 - DNA, 60 bp, Homo sapiens
cgatccggtacgtgggcctccgggttgtcccctctggggggggagatcctccctccggag

SEQ ID NO: 16960 - DNA, 60 bp, Homo sapiens
ggccacctattaataaagcaaacagtcttggtgttcagacactgctgccgtttagttcag

SEQ ID NO: 16961 - DNA, 60 bp, Homo sapiens
gacaacaagaacaacaaaagttaatgataatatagaagcataaatttcctgtgaatgttc

SEQ ID NO: 16962 - DNA, 60 bp, Homo sapiens
cgggtgagacgaaactctgtagtcaaatttgttcagcagcttcagaagttgaatgaattg

SEQ ID NO: 16963 - DNA, 60 bp, Homo sapiens
gcttgtgaaacttcagaggtaccctgaaagtcatttcctaaagctagtgcatgtgaatct

SEQ ID NO: 16964 - DNA, 60 bp, Homo sapiens
tatacagcggctcgtgggcttggcttggctcaacatagcaggtgcacttgtgcccagaga

SEQ ID NO: 16965 - DNA, 60 bp, Homo sapiens
gtctttgtgttgccatctgggaactggatttggaattgttcttccatgagactgcagagc

SEQ ID NO: 16966 - DNA, 60 bp, Homo sapiens
tagtagaaccaggatgccaccgaagaagtaggaggaggatttcggcgaggaggacgaaga

SEQ ID NO: 16967 - DNA, 60 bp, Homo sapiens
aacagacacggagaagtggtaaccgtttcctaacagcagcaagaatgccccttccgtttg

SEQ ID NO: 16968 - DNA, 60 bp, Homo sapiens
ctccatttaggagtagctattggtgactcaactacagcctgcctggatatggatgatgcc

SEQ ID NO: 16969 - DNA, 60 bp, Homo sapiens
cttgtgccaggaactgtgaggggtttctgtagtgtagtgattacatgttcgcttcacatg

SEQ ID NO: 16970 - DNA, 60 bp, Homo sapiens
agtgtggtagtaacgacactcacaggtatttctatgtctgctatttgcacgaatggagta

SEQ ID NO: 16971 - DNA, 60 bp, Homo sapiens
tttggcctgtctagtataataaatatgtttttgtcagaatttgacccatttatgatgtaa

SEQ ID NO: 16972 - DNA, 60 bp, Homo sapiens
tcgcctactgggccagcactgctgtcttcctgtccacttccaacgaagcggtctataaga

SEQ ID NO: 16973 - DNA, 60 bp, Homo sapiens
aggagatgaaggccacatacatcaacctcaagccagccagaaagtaccgcttccattgag

SEQ ID NO: 16974 - DNA, 60 bp, Homo sapiens
ggggacaaattgtctgacacgcgggagctacagggagctcgtattctcttgtgttcgtgt

SEQ ID NO: 16975 - DNA, 60 bp, Homo sapiens
taaatatcggtggtgattgttgccaaaatgaccttcaggaccggcctgtttcccgtctgg

SEQ ID NO: 16976 - DNA, 60 bp, Homo sapiens
gaccggaagctaaaacctctcatctacgtatacagctttccaggattgaccagaaggacc

SEQ ID NO: 16977 - DNA, 60 bp, Homo sapiens
gttcaaagctttccacagtgtccacagactcagtttcagggacagcctggactactttcc

SEQ ID NO: 16978 - DNA, 60 bp, Homo sapiens
gtacagccaggctttcagacatctgttcattcaagagagatatgcgctaagccaaggacc

SEQ ID NO: 16979 - DNA, 60 bp, Homo sapiens
tagcatattgtagatgcactttgcagcagttggaaaagaaagtgttgtgtgatttgattg

SEQ ID NO: 16980 - DNA, 60 bp, Homo sapiens
caaaagttcgatctcgatatagtttcatacaggctcttgtcagacgtatccgtggcctct

SEQ ID NO: 16981 - DNA, 60 bp, Homo sapiens
agatgggatgtcactcgctgtctggaggcacgtgggtggtgtgcgggccctcactggcca

SEQ ID NO: 16982 - DNA, 60 bp, Homo sapiens
ccttgtcgatgacttggaaacgtccattctgggtaaggtcagcactccctgagagatgtt

SEQ ID NO: 16983 - DNA, 60 bp, Homo sapiens
gcctggattttgcaggtagagagattattaaagatcacaagaaaaattcacaagtacaag

SEQ ID NO: 16984 - DNA, 60 bp, Homo sapiens
aagaccaagaatcatccgctgcctcatgactcacaacaaaggggtcagctttagcctggc

SEQ ID NO: 16985 - DNA, 60 bp, Homo sapiens
ctggtgataatagcatcagtgtaaaattatcttgggaggctggatggtatagatggtctt

SEQ ID NO: 16986 - DNA, 60 bp, Homo sapiens
agaacattaacccagattgctaatagcttcatgttacggcattcttccacacagtccaga

SEQ ID NO: 16987 - DNA, 60 bp, Homo sapiens
ctcttgataaaccttcacagctttcgtatttggcttctgcttctgcaactaccctttagc

SEQ ID NO: 16988 - DNA, 60 bp, Homo sapiens
agggatcttcccatacttcctgcttccctgatctgaaccaagattggaaagaggcaggca

SEQ ID NO: 16989 - DNA, 60 bp, Homo sapiens
ttgtaccctgcttaacccatcctcttgttttctggctcaacgctctttcatgtggtggcc

SEQ ID NO: 16990 - DNA, 60 bp, Homo sapiens
gtgggactgagaagcaagatatcaatgtagcagaattgcacttgtgcctcacgaacatac

SEQ ID NO: 16991 - DNA, 60 bp, Homo sapiens
caaagtcatcaactcaaagtgagtaatatgtaggaggtgattattgtttgaggagagagg

SEQ ID NO: 16992 - DNA, 60 bp, Homo sapiens
gccttctgcaggcctactacagtcaggaaagcaaagttctgtatcttctcctcacctcca

SEQ ID NO: 16993 - DNA, 60 bp, Homo sapiens
agtttctcccatctgcctcagaacttagagaagtagtaacatgcaatctttttgaagtgc

SEQ ID NO: 16994 - DNA, 60 bp, Homo sapiens
gatcaagtcactgcatgttgagaagtataggtataacttgtgaccatatcacagctcctt

SEQ ID NO: 16995 - DNA, 60 bp, Homo sapiens
tgatgactgtcggctggctgcttctggcgggcctccagtccgcgcgcgggaccaacgtca

SEQ ID NO: 16996 - DNA, 60 bp, Homo sapiens
agtgcatcccaggccagcaggagctttgtgagctgcaggcatggcgatggtgcgcctgtt

SEQ ID NO: 16997 - DNA, 60 bp, Homo sapiens
accagggctgacctcaaggccgtatcagagggccaagcagagttcttttggatacctgct

SEQ ID NO: 16998 - DNA, 60 bp, Homo sapiens
cagccacaaatccagcaacaagctgaggattcacctcataaaacaggcttggtgtcttgg

SEQ ID NO: 16999 - DNA, 60 bp, Homo sapiens
tggtaataggtctactgtgggaacagttatccctaaccacagctcaaaatcgctatcatc

SEQ ID NO: 17000 - DNA, 60 bp, Homo sapiens
gcctaatccacatcacttctgagaggcaaggctgagcatatggtgacatcagctctgtgt

SEQ ID NO: 17001 - DNA, 60 bp, Homo sapiens
tatcaagacctaacccaggtgtggacacagcagatccattctccaatgacctgtgagcag

SEQ ID NO: 17002 - DNA, 60 bp, Homo sapiens
gaagctatggcacagctgaaagactgagtctcttgattagacctgataagaccactcata

SEQ ID NO: 17003 - DNA, 60 bp, Homo sapiens
cagggttggtgctagaaccagtgacacgactgagtttctgcaacaagccaagggtatcaa

SEQ ID NO: 17004 - DNA, 60 bp, Homo sapiens
tgtcaaggaacccaggagtgaagatcggattagtcagatgctgtgagaggaggtggaaaa

SEQ ID NO: 17005 - DNA, 60 bp, Homo sapiens
gagtgccaggtgtcagatacctcagttccaaggtcctttcttttgtgaagcttttcttgg

SEQ ID NO: 17006 - DNA, 60 bp, Homo sapiens
tgggaggagtctgcagagcctttgcccgccagcgccttcgctctttggctccctgagtta

SEQ ID NO: 17007 - DNA, 60 bp, Homo sapiens
tggccccgtctcccttggcttttacgtcccatatccacccccattcatgtacaacatgtg

SEQ ID NO: 17008 - DNA, 60 bp, Homo sapiens
taatagaggcttttctgcgttaagggagaaggaatgaccaattgaacttacacattcccc

SEQ ID NO: 17009 - DNA, 60 bp, Homo sapiens
cttcatactaactcctgatcatcttacagcagacataacaacagagtgttagagactgga

SEQ ID NO: 17010 - DNA, 60 bp, Homo sapiens
gagagaattcagccgaagatatgagagtaatgagagacattttccagtcattggatcgtg

SEQ ID NO: 17011 - DNA, 60 bp, Homo sapiens
ggcccaaagggagcaccaaactaaacgcaacacagcggccacgcgtaaacaaggcggcac

SEQ ID NO: 17012 - DNA, 60 bp, Homo sapiens
aaaatctccctctagggcagagtatcgagaagggtcccatcacctgggttatcagtggag

SEQ ID NO: 17013 - DNA, 60 bp, Homo sapiens
gcaacccagacgtgcaacaaagtgcgatgcgctgtgcctgggcgtcggcagaacaccatt

SEQ ID NO: 17014 - DNA, 60 bp, Homo sapiens
tggtttctaaaataaagccaaacaagccagcacatgccgaggcttggaccctgatagaaa

SEQ ID NO: 17015 - DNA, 60 bp, Homo sapiens
ctgataaagagctggagaactccatgtactttggaatctcctccaagatagccagagttt

SEQ ID NO: 17016 - DNA, 60 bp, Homo sapiens
ctatgagacaatttgaaggaaaggcacaattatcatgaggttatataaagctaatgtgtt

SEQ ID NO: 17017 - DNA, 60 bp, Homo sapiens
tgcagctactggggcattcctgtctcatctccctgctgtattttgtactcccggctctct

SEQ ID NO: 17018 - DNA, 60 bp, Homo sapiens
tctttgcttgtttccctagtaaaggtgaggcaattttcgggtaagggatttccccctcac

SEQ ID NO: 17019 - DNA, 60 bp, Homo sapiens
tccactcagcactatccaggcaggaggaccaaaagggactcagtgtggtctacttactct

SEQ ID NO: 17020 - DNA, 60 bp, Homo sapiens
tcctgctagagttcccggtactttattaccaaggttgccatcggaaccaggaatgacatt

SEQ ID NO: 17021 - DNA, 60 bp, Homo sapiens
gccaagggatcagcacacatctctcacaatatcgagattatgacagagcatgaggttctg

SEQ ID NO: 17022 - DNA, 60 bp, Homo sapiens
atgaataagctctggctggtgttcaccatgaataagcccaggttcctctgtaagcgcctg

SEQ ID NO: 17023 - DNA, 60 bp, Homo sapiens
cccgccaataaaacatatagctggaggcaaactgggaggtcacgtgagtcatgaacttac

SEQ ID NO: 17024 - DNA, 60 bp, Homo sapiens
gaattgcgcaacacctttagggagattctctgtggctgcaacggcatgaacttgggatag

SEQ ID NO: 17025 - DNA, 60 bp, Homo sapiens
attaggacacacttgagcccactcatgtctctggggcttttctagccagatgatgcctgt

SEQ ID NO: 17026 - DNA, 60 bp, Homo sapiens
acatagagtggcctgacttcttgtcccatgagtccctcctgcttctgcagcagttgcgtc

SEQ ID NO: 17027 - DNA, 60 bp, Homo sapiens
gcacgagcatggctacctcagagctgagctgcgaggtgtcggaggagaactgtgagcgcc

SEQ ID NO: 17028 - DNA, 60 bp, Homo sapiens
ctgccagctgagaagacaccttcactctgtccagagctgacaacagatgatgccagaccc

SEQ ID NO: 17029 - DNA, 60 bp, Homo sapiens
tccgccgccggctcccgggtgtggtggtcgcaccagctctctgctctcccagcgcagcgc

SEQ ID NO: 17030 - DNA, 60 bp, Homo sapiens
cctcacttctcaagcaggtgtctttccagtctacaactcgttgaccacaggtggaattca

SEQ ID NO: 17031 - DNA, 60 bp, Homo sapiens
gctgcccttctgtggagacaatgtcatcaaccacttcacctgtgagattctggctgttct

SEQ ID NO: 17032 - DNA, 60 bp, Homo sapiens
ctccaccagctagctgccagtagcaacctccacttcctccagttacggaaccagggaaaa

SEQ ID NO: 17033 - DNA, 60 bp, Homo sapiens
ggatccttgatgactctggtaaggcagtgactacccctgctcagaatgcaagggtcgcta

SEQ ID NO: 17034 - DNA, 60 bp, Homo sapiens
tcctcatttgtctctaagttgaaggctttgttggaggggacagagcacaggaacagcctt

SEQ ID NO: 17035 - DNA, 60 bp, Homo sapiens
ggttagaaggcacaggtagttgagggattctgtaggtggcagctggttgagagtgttgaa

SEQ ID NO: 17036 - DNA, 60 bp, Homo sapiens
ggtgagagtcactgctccctgctgcaaatttcttattaaatctgtttgacagattttaga

SEQ ID NO: 17037 - DNA, 60 bp, Homo sapiens
aaaccaagctgaatgaagaagtaaactttctgaagacaggaagcttactgaagctggttc

SEQ ID NO: 17038 - DNA, 60 bp, Homo sapiens
ttctgctctgcaagactgcttcttgtgacatactataatcggtcactgtgaatctgggcc

SEQ ID NO: 17039 - DNA, 60 bp, Homo sapiens
aaccattcctgtcttctcacccccaacgatgccaatcacgacaactttccagcacactcc

SEQ ID NO: 17040 - DNA, 60 bp, Homo sapiens
ttgctttcctgccttttctctggttggtcaacatcttctggttcttccgagaggccttcc

SEQ ID NO: 17041 - DNA, 60 bp, Homo sapiens
tattactttggggatcattttgtcaaagtcttgaataaagttacccagtcctggcatgat

SEQ ID NO: 17042 - DNA, 60 bp, Homo sapiens
agtttgagaaccaatacccaacaacctacgtgattttggtgcaagtagtgtttgaaacac

SEQ ID NO: 17043 - DNA, 60 bp, Homo sapiens
gtggacttatttccagaaaactttggtgataattcttgagacaaaaggtggttaagtagc

SEQ ID NO: 17044 - DNA, 60 bp, Homo sapiens
aaaagttgctgtttactgttgctgtccgtaaactggaacctctgttcactcaagggacga

SEQ ID NO: 17045 - DNA, 60 bp, Homo sapiens
aggaggtggtgctctctgcccctgttgtatgaatggggaaacaaagcacagagggctgta

SEQ ID NO: 17046 - DNA, 60 bp, Homo sapiens
tgagtacatggacctgcagaatgacctaggccagacagccctgcacctggcagccatcct

SEQ ID NO: 17047 - DNA, 60 bp, Homo sapiens; identical to SEQ ID NO: 4855

SEQ ID NO: 17048 - DNA, 60 bp, Homo sapiens
ctatagactctttctgtctctcgaggtccctgtataatgaaaaagaaggctggaaaaagt

SEQ ID NO: 17049 - DNA, 60 bp, Homo sapiens
cctccccactagtaatcattcttctgactcctctcactgtagatttgctgtgcctgttca

SEQ ID NO: 17050 - DNA, 60 bp, Homo sapiens
ggcacattcaaacttatcccagcccaggggtgttcatcttaggggcagggggatttttta

SEQ ID NO: 17051 - DNA, 60 bp, Homo sapiens
gacaattcatagatgaggaaattcaagagccaataaatgcatagaacactttcaccacta

SEQ ID NO: 17052 - DNA, 60 bp, Homo sapiens
ttaaaagcccaacacgggcgaaaaagacgcggtctcagttaacggggacgctttagagaa

SEQ ID NO: 17053 - DNA, 60 bp, Homo sapiens
ttctcattcgtggctggatcacaccagcaagaaggattttaaaggacaactccttggggc

SEQ ID NO: 17054 - DNA, 60 bp, Homo sapiens
atcgggaggaggacgaggtgtacccgccagggccgtaccaccctttccccaactacatcc

SEQ ID NO: 17055 - DNA, 60 bp, Homo sapiens
attccgagctcagaccttccaacggcgtccatgtccctcagtaaaagccagagtcctaaa

SEQ ID NO: 17056 - DNA, 60 bp, Homo sapiens
tgaggacacacgtcctttctggaggatgcagcatcaaggcacccttggaagaggacattt

SEQ ID NO: 17057 - DNA, 60 bp, Homo sapiens
ggttgatcccctcttcagcatcagccaaggaatcttaccactccttaccatctgtaggca

SEQ ID NO: 17058 - DNA, 60 bp, Homo sapiens
ctgcgaccctcctaggctattgactgttaagtcctcaggtttggcccagattccagttcg

SEQ ID NO: 17059 - DNA, 60 bp, Homo sapiens
gatcgggatgcattatccaccagaaaacactgtagacgactcactcaccaggaaaagagc

SEQ ID NO: 17060 - DNA, 60 bp, Homo sapiens
tttgtgcctgaagattttgatgttgcatttggctacatttaatccactttcacccataag

SEQ ID NO: 17061 - DNA, 60 bp, Homo sapiens
atcccgaggcagaagtctcccaggagatttgatgtgtgggtttagaggagtactttccca

SEQ ID NO: 17062 - DNA, 60 bp, Homo sapiens
agaagaagtcttcacttcccaggagagccaaagcgtgtctggccctaggtgggaaaagaa

SEQ ID NO: 17063 - DNA, 60 bp, Homo sapiens
gatcacttgttgctgtcttaatggaatggttttctacaggagctgtaacatacttaaaaa

SEQ ID NO: 17064 - DNA, 60 bp, Homo sapiens
aatgtaacacgtgagaaagcctttggtcatgccacccactctaccagttgtccccaccat

SEQ ID NO: 17065 - DNA, 60 bp, Homo sapiens
ggagggcagagactgttttcccagaacctagaacaactcctggcacataccagatgtaaa

SEQ ID NO: 17066 - DNA, 60 bp, Homo sapiens
cccttcaattaccgtctcatttgctcctccatgccactccacatagtatacgggacatat

SEQ ID NO: 17067 - DNA, 60 bp, Homo sapiens
atcctctcgaccctagacttaccaagctggtggctaaatacaaccctcgtgggaagatct

SEQ ID NO: 17068 - DNA, 60 bp, Homo sapiens
tttaaatcagttggctgacaaacatactgttttaaacctacaggttcccctcagtccccc

SEQ ID NO: 17069 - DNA, 60 bp, Homo sapiens
caggagagataaggtagaaaaggagagcagagcagagagaagtgttagaagaactctacc

SEQ ID NO: 17070 - DNA, 60 bp, Homo sapiens
gccatggagcacagctagtctaagagctagaggcctggtgctttcaaaagacttcatgtg

SEQ ID NO: 17071 - DNA, 60 bp, Homo sapiens
ctctataaaaaatggttggcttcccacgtttgcttttgcagtccatctattgcagaaagc

SEQ ID NO: 17072 - DNA, 60 bp, Homo sapiens
aacgcgtcctctcacaccgtccactgtgcgtttgtatgtgtctgggatccagggcaatgt

SEQ ID NO: 17073 - DNA, 60 bp, Homo sapiens
gaataatgggaataatggtatgaacccttacaggagggcaacatggctgagtagtaacac

SEQ ID NO: 17074 - DNA, 60 bp, Homo sapiens
tactcaagtccctcagctctgttggcacaaatacgtgctggatgatagaagaaccgtttt

SEQ ID NO: 17075 - DNA, 60 bp, Homo sapiens
atttgggttggaagattttccttctgcccagagagccctgaaagagcaccctctgtgcta

SEQ ID NO: 17076 - DNA, 60 bp, Homo sapiens
agaggctgccatatggtctttgagtacggggatgtcccaaactggcccaccaatgagcat

SEQ ID NO: 17077 - DNA, 60 bp, Homo sapiens
ttgtaaatggcactacttggtcccaaactgaaccccactgcttgctcacatccatatcag

SEQ ID NO: 17078 - DNA, 60 bp, Homo sapiens
ggttgagagctattgctgattagttaccacagttctgatgatcgtcccatcacagtgttg

SEQ ID NO: 17079 - DNA, 60 bp, Homo sapiens
gcatgcacatgcagtagcttctctgcttgagtgagctggtgtgattaggttttctaaaca

SEQ ID NO: 17080 - DNA, 60 bp, Homo sapiens
ggtatcacagcctggagacacccacacagatggctggatccggtgctacgggaaacattt

SEQ ID NO: 17081 - DNA, 60 bp, Homo sapiens
ccgctctttgcgcactagctcgccggcgttcccaaggcccgcaggaatggccctcgcctg

SEQ ID NO: 17082 - DNA, 60 bp, Homo sapiens
tgtctcatctgcaaaaggtgagattatcacctatttcatgggaagatttagattggtaat

SEQ ID NO: 17083 - DNA, 60 bp, Homo sapiens
ccagatacacaacaaaataccatccaagaccataccacacagagacttccaaggccatcc

SEQ ID NO: 17084 - DNA, 60 bp, Homo sapiens
actctggtagccagtgcagagagatccagtgcagagagggtaacgttggagcaagagaac

SEQ ID NO: 17085 - DNA, 60 bp, Homo sapiens
gatgctgtcaacccaaactaactgctggaaatgcagaagtgaaagagccaatggctagcc

SEQ ID NO: 17086 - DNA, 60 bp, Homo sapiens
caggggtcaagcaaaaccaactccctctttggattcctggacttcagaaacggtctggga

SEQ ID NO: 17087 - DNA, 60 bp, Homo sapiens
caccctgtggaaaggctggccaggtaagttactgttcaaatcaggaccatttgtggagtg

SEQ ID NO: 17088 - DNA, 60 bp, Homo sapiens
gggtgctaccaaggttttgcttttgcatggaaatgtctactgcacagttgcaccactgag

SEQ ID NO: 17089 - DNA, 60 bp, Homo sapiens
gtacaggctgagtttcagccacaccaagaagtcaaagctaaccgaggctgtgccttccga

SEQ ID NO: 17090 - DNA, 60 bp, Homo sapiens
cgaaagcttcactttccctatagagaaagcaagcaacatgaatcttctgatttggggccc

SEQ ID NO: 17091 - DNA, 60 bp, Homo sapiens
ccaaatatctgcttgtgaaggttctgtctttaccaccaagcctaccggtatggcaaagac

SEQ ID NO: 17092 - DNA, 60 bp, Homo sapiens
tcagctctctgaaggctgatgaccacctgtttctcatctcttctagtgtatgtcaaagct

SEQ ID NO: 17093 - DNA, 60 bp, Homo sapiens
gaaatacagccctcacataggtgtctgacttaatgactcctgctgaagttgaattgtgag

SEQ ID NO: 17094 - DNA, 60 bp, Homo sapiens
gtcttctcgaagtaatagtagacgtcgccatgaaagtgaagaaggagatagtcacaggag

SEQ ID NO: 17095 - DNA, 60 bp, Homo sapiens
acaataggcaatctcttataaacatactcgtccatttgacatagcaatcctatttttagg

SEQ ID NO: 17096 - DNA, 60 bp, Homo sapiens
cctgtaaaagttgcaggcagttaatgctagcctgtgaaagcagctgtggggactatatgc

SEQ ID NO: 17097 - DNA, 60 bp, Homo sapiens
cttggagttgaggctactgactggccgatgaactcgcaagtgtaggtagtgtgctacatg

SEQ ID NO: 17098 - DNA, 60 bp, Homo sapiens
gtaccatttataaaggggaaaaattctgtgactactcatgttgacttaatgctgacttaa

SEQ ID NO: 17099 - DNA, 60 bp, Homo sapiens
tttcttctacatcatctacctggtggagggtcagtcagtcataaacagccagacctttgt

SEQ ID NO: 17100 - DNA, 60 bp, Homo sapiens
tcaggttgttaggaggactagataagagaactatgtgaaggaccctgcacagtgctagca

SEQ ID NO: 17101 - DNA, 60 bp, Homo sapiens
acttcattctctaccccacttgcgttaagaagcagtgaataagcggtaggttgacagagc

SEQ ID NO: 17102 - DNA, 60 bp, Homo sapiens
ggaaggtcaaccaatctagactggggcttatctgagggttccaggaggaaaactctactc

SEQ ID NO: 17103 - DNA, 60 bp, Homo sapiens
ttttatggctaatatattggaaagtgatgatatcttccattgaatcttatctgaagactg

SEQ ID NO: 17104 - DNA, 60 bp, Homo sapiens
tgtgggcctgcaatcaacttctgtggtaggagtgagttgcctacctgaagggaaactttt

SEQ ID NO: 17105 - DNA, 60 bp, Homo sapiens
ggcggccaggtgcttttgttttcgttctgctgcagggatgaaatctggatccttaataac

SEQ ID NO: 17106 - DNA, 60 bp, Homo sapiens
agaactacgccagcacctgccagactcaggggattacggtgactggctggaggaattaca

SEQ ID NO: 17107 - DNA, 60 bp, Homo sapiens
tcccagagtggatggatcaaagatgatcacctcgtgcccttcctcaccaagccatatgct

SEQ ID NO: 17108 - DNA, 60 bp, Homo sapiens
tcctggctgatgactgattagtctcttctgtcacaggggtgcctggagaccccttaataa

SEQ ID NO: 17109 - DNA, 60 bp, Homo sapiens
cacagaggaagtgaagcacattcaagggtagcccattggcttctcgtataggaatagtat

SEQ ID NO: 17110 - DNA, 60 bp, Homo sapiens
aacacttcaggacattagtctgggcaaaaattgtatgtgtagcacatcaaaagcacaggc

SEQ ID NO: 17111 - DNA, 60 bp, Homo sapiens
gggcgttggcgggatctgtgtctctcgctggcgctggcacaggaacttgggatccgtctc

SEQ ID NO: 17112 - DNA, 60 bp, Homo sapiens
gctttgtttacttcttcgggagcaagatgacagctttcttcctcatagtcagactcaaaa

SEQ ID NO: 17113 - DNA, 60 bp, Homo sapiens
cccaaactgattcaccaagagcctactgtctctgctttgtagatagctttgaccacattc

SEQ ID NO: 17114 - DNA, 60 bp, Homo sapiens
acgagtttatttcttggtgcctccaagagctcatggaaaagcagcacagtgagcaacaag

SEQ ID NO: 17115 - DNA, 60 bp, Homo sapiens
caaggaattagaccagttccctgctctctggtatggggcgaccatactgccaccacacct

SEQ ID NO: 17116 - DNA, 60 bp, Homo sapiens
caagagggccttcagtaagaccacaagtctgcaggaaactctggaatcaggaagaaaagc

SEQ ID NO: 17117 - DNA, 60 bp, Homo sapiens
aaaacctcaaagctgaggagggctgcaggacccttagcagattcagtgtgtcacccttgt

SEQ ID NO: 17118 - DNA, 60 bp, Homo sapiens
tcagtctgctgcctgtctccctgtcccataggatgtaatctctgttaccacaggaaataa

SEQ ID NO: 17119 - DNA, 60 bp, Homo sapiens
actctctgagaggaccctatgaaatggctgtacccttcagctgtgctgcttcagactttg

SEQ ID NO: 17120 - DNA, 60 bp, Homo sapiens
gcccccagtagtctttgtcgctgtttacaaagtcttttcagtgggcagagctagaacgtt

SEQ ID NO: 17121 - DNA, 60 bp, Homo sapiens
ctgccttttgcatctctgctctgagtcgcttttccatgtctgaggaagaacctttggtgg

SEQ ID NO: 17122 - DNA, 60 bp, Homo sapiens
acttcctgcacgaccccaaggtggcgctggagagcctctacccgctggccaagttcacgg

SEQ ID NO: 17123 - DNA, 60 bp, Homo sapiens
ggagttacctccatgtgaatggacagtggtgatggtgatctgtgaggtggtgatgtatag

SEQ ID NO: 17124 - DNA, 60 bp, Homo sapiens
gtgagctaggcaaacaaatgcatggagatttacatgccaggcaacagtcttaatatacaa

SEQ ID NO: 17125 - DNA, 60 bp, Homo sapiens
tgtagttgatgggttagcggaatttcaaactgatcacctggggatgagagcaatgggtat

SEQ ID NO: 17126 - DNA, 60 bp, Homo sapiens
ctatttggaatgatacccacaactctacaagcatcttatccctctacaggaatgactacc

SEQ ID NO: 17127 - DNA, 60 bp, Homo sapiens
gtagagtgcagagccaagcagagcatcagcttcttcttgcaattgtccatgtgtttctcc

SEQ ID NO: 17128 - DNA, 60 bp, Homo sapiens
gatcatttacagactccctaccatgaaacagtctactccttgttggatacactcagcccc

SEQ ID NO: 17129 - DNA, 60 bp, Homo sapiens
gccgctgactatgatgccgaccaagatccgggtgtgaaatcagtacgcaacatttacgaa

SEQ ID NO: 17130 - DNA, 60 bp, Homo sapiens
gggaaggttacaataagctgatgtcattgtgacggccattggtctgttcccgtccgaaag

SEQ ID NO: 17131 - DNA, 60 bp, Homo sapiens
aggttaattcctgggccatccagcaggtttccaagacccatttccagtggggaaccccac

SEQ ID NO: 17132 - DNA, 60 bp, Homo sapiens
cagcagcaccaacttccctgtggtatggcacaagacggtaagagggagaccaaagttatc

SEQ ID NO: 17133 - DNA, 60 bp, Homo sapiens
aggagtgaactatatctcaatatataaggggtgagttatagctcaataaagctgttaaca

SEQ ID NO: 17134 - DNA, 60 bp, Homo sapiens
ttcgttgtgtggacttctcatctaaaaggttagtggcttttgcttgggatcagtgctctc

SEQ ID NO: 17135 - DNA, 60 bp, Homo sapiens
tgctccctgctcacaccagacaccagaataaactcccaatatggcagacggtgtaaacca

SEQ ID NO: 17136 - DNA, 60 bp, Homo sapiens
gctgcaaaagtcctcagagcccaactaggattggtgactgaaggagagtggaaagatgct

SEQ ID NO: 17137 - DNA, 60 bp, Homo sapiens
cagtcagactcttcccattgtcatctgattgcagagagaaagcacaccttatttccaggg

SEQ ID NO: 17138 - DNA, 60 bp, Homo sapiens
aaacaagtggaagccggtgtctgtgttaccatggagatggtgaaagatgccttggaccag

SEQ ID NO: 17139 - DNA, 60 bp, Homo sapiens
tttacctgaagctgggacatgtgtggaattgtgaatcctagccctagatcttcccacagg

SEQ ID NO: 17140 - DNA, 60 bp, Homo sapiens
tcagagctggcacagttggggactgaccttccttgatctcacctcactttctgtatctat

SEQ ID NO: 17141 - DNA, 60 bp, Homo sapiens
ggtagtggtttgaggaaaactcattctgtgtgttgaatccatagtatgtcccattcagac

SEQ ID NO: 17142 - DNA, 60 bp, Homo sapiens
tgctgacggcggctgcggaggcgggcgacacttgcacgtgtaagtgtgctcacgatctgt

SEQ ID NO: 17143 - DNA, 60 bp, Homo sapiens; identical to SEQ ID NO: 4855

SEQ ID NO: 17144 - DNA, 60 bp, Homo sapiens
caattgcagaacagaaagtgagaaaacactgccagcggtgattgctacttgaggtagttt

SEQ ID NO: 17145 - DNA, 60 bp, Homo sapiens
gagttggggaaggcaagattggaaagacaggaagaccaaggcctcggcagaactctctgt

SEQ ID NO: 17146 - DNA, 60 bp, Homo sapiens
gcgtggacagcaccacattattgggtaatgcatgccaggactgtgcaaagaggaagttag

SEQ ID NO: 17147 - DNA, 60 bp, Homo sapiens
ctgtaaactacgttagcaccgtcatggagaggaggtcagaccgcagagtacagacagaga

SEQ ID NO: 17148 - DNA, 60 bp, Homo sapiens
caccctgtgggtgcagcacagctctctgaaagcaagaaccttcctacctattctaacgtt

SEQ ID NO: 17149 - DNA, 60 bp, Homo sapiens
ggccctcctcgcgtcgctctccgcttcccacgatcctccctatgcctcctttaccctcct

SEQ ID NO: 17150 - DNA, 60 bp, Homo sapiens
aaccagcgctcagaaccaccactgaggaagtgaagagatcaagctcagacaagctgcttt

SEQ ID NO: 17151 - DNA, 60 bp, Homo sapiens
ccctaaagaatgtacttgaagaacaatcaataggtgatgtctaggaagattgtggaaggc

SEQ ID NO: 17152 - DNA, 60 bp, Homo sapiens
tatttttggcgctgcgatcgcgacactgcactccagcttggggtgacaagactgtgtcaa

SEQ ID NO: 17153 - DNA, 60 bp, Homo sapiens
agtgccctcaaggctcggaagaatgtggagagttttctagaagcctgtcgaaaaatgggg

SEQ ID NO: 17154 - DNA, 60 bp, Homo sapiens
gatttccacagacttacaaagctaaggaagttttatgtccttgctctggctacactgcag

SEQ ID NO: 17155 - DNA, 60 bp, Homo sapiens
tttttcactgagttggcatgaggcaaaagcaatggaggataaaattgctccaccaaactg

SEQ ID NO: 17156 - DNA, 60 bp, Homo sapiens
ccatcacattgctgaccattgtctactactgaagactaactaacacagtcattaacagca

SEQ ID NO: 17157 - DNA, 60 bp, Homo sapiens
ctctttccccaactatcattgaaaaagtctggcttccaaattttccgggagactgatttg

SEQ ID NO: 17158 - DNA, 60 bp, Homo sapiens
agcctcaccctctcccaggtgtcagataatgctcgtaaatgccttagtccatcatctcag

SEQ ID NO: 17159 - DNA, 60 bp, Homo sapiens
gtctatgcatttgccttttctggaatttctcctcctagctgtttgcatggctggcttcat

SEQ ID NO: 17160 - DNA, 60 bp, Homo sapiens
ccgggcacatcacaaacatcccctgaagagttcacagatgcaaaacacgagtcactgttc

SEQ ID NO: 17161 - DNA, 60 bp, Homo sapiens
ttgagaagccccctattctcagtagctctttcaatcctatcacagggaccatgctggccg

SEQ ID NO: 17162 - DNA, 60 bp, Homo sapiens
gcttggctgaggagtcaatgtcatgctaccacctgtgggtttaacactcaacacgttaag

SEQ ID NO: 17163 - DNA, 60 bp, Homo sapiens
agacaagtttggacatctggccttaagcctctgttgaacaggagaagtgaagctgtttgc

SEQ ID NO: 17164 - DNA, 60 bp, Homo sapiens
tgcctgcaaacctccacttcaggaccctaaaactgtcaaactgatggactctccagtcca

SEQ ID NO: 17165 - DNA, 60 bp, Homo sapiens
cttccagttcaatgtgccacttacacactgcaaaccaaccttaacactgcttaagggaga

SEQ ID NO: 17166 - DNA, 60 bp, Homo sapiens
ggatcctagataagcaggtgaaatttaggcttcagaatatatccgagaggtggggagggt

SEQ ID NO: 17167 - DNA, 60 bp, Homo sapiens
actagtagctgactctgtggagttggtaggagggtcactggagaggaacttgcaacatat

SEQ ID NO: 17168 - DNA, 60 bp, Homo sapiens
agccttcagcaacatggagtttaagtggccctcttcactgtggccttgtggcttcatgaa

SEQ ID NO: 17169 - DNA, 60 bp, Homo sapiens
atgtagtcttcttgtcatgtaggtcccaattaaattactatagctcagatgggggtaggg

SEQ ID NO: 17170 - DNA, 60 bp, Homo sapiens
cagccctgtgtgacaccaagataagtaacgatcccgttgaagataccacattacacttag

SEQ ID NO: 17171 - DNA, 60 bp, Homo sapiens
ctactgatgttcacgatgccacacagtcacacacctaattcattctcaagtcggagcaac

SEQ ID NO: 17172 - DNA, 60 bp, Homo sapiens
agatttggcaattcttcgctgaagtcatcatgagctttttccaactcctgatgaaaagga

SEQ ID NO: 17173 - DNA, 60 bp, Homo sapiens
acgaagcccagaactacaggaagaaggcattgtgggtgtcctggttctccatcattgtca

SEQ ID NO: 17174 - DNA, 60 bp, Homo sapiens
tagttggtatctatcaggaaacaaatgggagatgccttcacctgaatgacatctacctcc

SEQ ID NO: 17175 - DNA, 60 bp, Homo sapiens
ccatgaggggagaggtcctagaaccatttcttcacagatagcaagtgacaacaatttatg

SEQ ID NO: 17176 - DNA, 60 bp, Homo sapiens
ccatcgagcgcctcaactatgtgcagtactaccccattgtggtcttcttcatccccgaga

SEQ ID NO: 17177 - DNA, 60 bp, Homo sapiens
aggcctatggagagcagcttgcgtgggctgggcctgcagtacctggtttgcatagatgat

SEQ ID NO: 17178 - DNA, 60 bp, Homo sapiens
ctcatctcttcagaagtcacacggatcacgactcttcagaagtccacagatccccgtgga

SEQ ID NO: 17179 - DNA, 60 bp, Homo sapiens
ttttggagagaaagtgactgcatgttggcaatgaagtacaccagtgtttcgtagtttttg

SEQ ID NO: 17180 - DNA, 60 bp, Homo sapiens
ctgtgttctgccttatgcctgtggctaagggatgcaaagtagaattgctttacattgact

SEQ ID NO: 17181 - DNA, 60 bp, Homo sapiens
gcctctccgaatcagagaagaagctgccaggattccagtacataccaaaacatgatgaca

SEQ ID NO: 17182 - DNA, 60 bp, Homo sapiens
tgtgactatcggcctgtgttgcctctcatgctggccagtttcatctttgacgttctctgt

SEQ ID NO: 17183 - DNA, 60 bp, Homo sapiens
tgtgtagaagttatggcttttctttcattagggtcttgttaggtggttggcaagtaagtt

SEQ ID NO: 17184 - DNA, 60 bp, Homo sapiens
atcttactcctttccttgtgttgggtcctatccgtcctctatggcctcatacacaccctc

SEQ ID NO: 17185 - DNA, 60 bp, Homo sapiens
tgtaggccgccttaagctttctaaatttggaacatctaagcaagctgaagggaaaagggg

SEQ ID NO: 17186 - DNA, 60 bp, Homo sapiens
gtttgcgccataatttaccgttggccacatatttcccatatcttaattctctccaataaa

SEQ ID NO: 17187 - DNA, 60 bp, Homo sapiens
tccattcttccatcgctgtgctcctgtgaacatttcctgctatgccaagtttgcagaggc

SEQ ID NO: 17188 - DNA, 60 bp, Homo sapiens
ttggtgtcactctagagccacatagcaagtggcttcaagaggtaattcttgatccttttg

SEQ ID NO: 17189 - DNA, 60 bp, Homo sapiens
tccgtaagcattgagtgtagccaaaagttccttcgtgtattgctctcccatctccgcagc

SEQ ID NO: 17190 - DNA, 60 bp, Homo sapiens
gtaagagtgtcatggaagcactcagcaagcaggctgattgcaatagactcagacatgcga

SEQ ID NO: 17191 - DNA, 60 bp, Homo sapiens
acaacccttctctgtccattgacctcacctttcacctgctgcggaccctgctggagctgg

SEQ ID NO: 17192 - DNA, 60 bp, Homo sapiens
ttcggcagctgttgcatcagctcattcaccatggggctgtcagtcaagtgtcgctatact

SEQ ID NO: 17193 - DNA, 60 bp, Homo sapiens
atctacagcttcagaaaccctgatgtgcagagtgccatctggaggatgctcacagggagg

SEQ ID NO: 17194 - DNA, 60 bp, Homo sapiens
aactaattctaactatgaagcacagtgaaatagaaagttaggctgtaagaagtgcgtgca

SEQ ID NO: 17195 - DNA, 60 bp, Homo sapiens
cgagcaattttgaggatgaaatgggaagatatcattgcttcctttttgcacctattgggt

SEQ ID NO: 17196 - DNA, 60 bp, Homo sapiens
aaccctagaacagcagggtttaatcccaagattctgcgctgattagctctgtgacctcgg

SEQ ID NO: 17197 - DNA, 60 bp, Homo sapiens
aaggttattccgggaaagcgctcctgcctcctgagaagggtcatcatctggggagatcat

SEQ ID NO: 17198 - DNA, 60 bp, Homo sapiens
ggttgaagagtcctgtcaaggccatctcaaaaggagaagcaaagcctgcagaggaggcca

SEQ ID NO: 17199 - DNA, 60 bp, Homo sapiens
agagatggtgctcgtgttgctcctggtgctgtaggtgcccctggtcctgctggagccaca

SEQ ID NO: 17200 - DNA, 60 bp, Homo sapiens
gtagtagccctccatcatcaaaacgcagtacttctattatgctctctgactgaacgaatg

SEQ ID NO: 17201 - DNA, 60 bp, Homo sapiens
atccaggtgtgcaatctcaccttaactcattctctgtgtgtgctagccaggccttggaca

SEQ ID NO: 17202 - DNA, 60 bp, Homo sapiens
tcttcagagggacgggtgatgggcagattggaaaaagcaccgcagatgggaaccttaatc

SEQ ID NO: 17203 - DNA, 60 bp, Homo sapiens
caggatttccgtttgggtctagtttagaacctgtccttaaacctaggggttgctgtcagg

SEQ ID NO: 17204 - DNA, 60 bp, Homo sapiens
atgttcaacatcatctcaacccttcctgaaacaatttatccagctggtcatcatggttca

SEQ ID NO: 17205 - DNA, 60 bp, Homo sapiens
ccgtgatcatttcagagcaccaacttcatcaccttcaggcttcagtgtactgggtaacac

SEQ ID NO: 17206 - DNA, 60 bp, Homo sapiens
gccaggctgttggaagctgactgccgagtactgaacattgtcaacgtggtctataaagtg

SEQ ID NO: 17207 - DNA, 60 bp, Homo sapiens
tacgaaggagactttcctaggctcagaggcttcccctaccctgctgaatggtgttaagtt

SEQ ID NO: 17208 - DNA, 60 bp, Homo sapiens
gagaagctctagcctttgtaacattgtgactataatgctgagaactgcttcactcatccc

SEQ ID NO: 17209 - DNA, 60 bp, Homo sapiens
gcctaggaattgtggtttgtatataaccctctaagcccctatcccttgtcgatgacagtc

SEQ ID NO: 17210 - DNA, 60 bp, Homo sapiens
aaccagagcctcagcatccaaagatggactgaagtgggatggctgacaggcacataactt

SEQ ID NO: 17211 - DNA, 60 bp, Homo sapiens
tggtgcgcctcatgacacatgttgaccttggagtcaagcaaattgctgctgaattccttt

SEQ ID NO: 17212 - DNA, 60 bp, Homo sapiens
tagctttatgtgcagcttgcagcttgctactgtggtggaggttccattgaaagcctgcaa

SEQ ID NO: 17213 - DNA, 60 bp, Homo sapiens
tagattttgccctgaatactggtgtgcccaggtatgccgtgctctctctctgtttccagt

SEQ ID NO: 17214 - DNA, 60 bp, Homo sapiens
gcacccctcaggactcatatgttgaccaatgcgatcttggtgcagcagatcatcaagaat

SEQ ID NO: 17215 - DNA, 60 bp, Homo sapiens
ccagagatcactgtctgatgaccctgtcttggaattggagccatgcaagttacactgacc

SEQ ID NO: 17216 - DNA, 60 bp, Homo sapiens
tacatggtttaaaacaaaggcacaaaatatttgatgctccctcttcaagagatggagcct

SEQ ID NO: 17217 - DNA, 60 bp, Homo sapiens
tcaggtggacaaggagcagtttgaacgagtcctaggctacatccagcttggccagaagga

SEQ ID NO: 17218 - DNA, 60 bp, Homo sapiens
aattatcccctccataccagctttgatgaccttccttccatactcctcaccagacacaac

SEQ ID NO: 17219 - DNA, 60 bp, Homo sapiens
gggtatgccagaaggtggccagttttgctttatgatcttatgaaggaagatttgtgaccc

SEQ ID NO: 17220 - DNA, 60 bp, Homo sapiens
ccactcaatgtccactttctttgacttacagtataaccatgtagccaattgtggcccact

SEQ ID NO: 17221 - DNA, 60 bp, Homo sapiens
tggcaagcgagaaaactgtgtcctgttctcccaatcagctcagggcaagtggagtgatga

SEQ ID NO: 17222 - DNA, 60 bp, Homo sapiens
tattatggcatccagtaaatgtttccttaattacttacctccattaacaagctttatgca

SEQ ID NO: 17223 - DNA, 60 bp, Homo sapiens
aagtccacactcctcaacaccatgtttgggctgcggtttgccacagggaagagctgcggt

SEQ ID NO: 17224 - DNA, 60 bp, Homo sapiens
attttctaggggtaaccactgttaatggtttggtatgtgtccttccagacactttctaca

SEQ ID NO: 17225 - DNA, 60 bp, Homo sapiens
tagtctcagcgtacttaagaacgtgcccggcctcgccatcctactttccaaggacgcgct

SEQ ID NO: 17226 - DNA, 60 bp, Homo sapiens
tctgtggcggatgagcacctgaggcactacgggaatcagtttccagcctaacagactttc

SEQ ID NO: 17227 - DNA, 60 bp, Homo sapiens
aacttcatggcagggacagcaggggtgtaccagacccaaggactggtgggcagtagcaat

SEQ ID NO: 17228 - DNA, 60 bp, Homo sapiens
ccctactgctgtcttattcatccattttccaaaccagttttccaaggcaggttttggtag

SEQ ID NO: 17229 - DNA, 60 bp, Homo sapiens
tatgtcaagccagcaggtgtaaaccgaccaggactgtcccaggcgaaaagaggatgaata

SEQ ID NO: 17230 - DNA, 60 bp, Homo sapiens
atttctctaccggcttcacatcctccaaagttggcaagcggtacccatgagacaacgtct

SEQ ID NO: 17231 - DNA, 60 bp, Homo sapiens
atacgccatctgacaaatcagaagatggaaggctaatttatactggcaatatggcccgag

SEQ ID NO: 17232 - DNA, 60 bp, Homo sapiens
gccgctcagacggatcttgagttgcaggttgttggcgacaaagtgggtaaggtcgccgtg

SEQ ID NO: 17233 - DNA, 60 bp, Homo sapiens
cctgttttctcctaacgattctgcttctgacattgcaaagcatgtatatgacaattggcc

SEQ ID NO: 17234 - DNA, 60 bp, Homo sapiens
tgtgttcagcgcttacaagagagagtcccctctcatcgtcaacactatgggatgggtttc

SEQ ID NO: 17235 - DNA, 60 bp, Homo sapiens
ggaatggaaagattaaacaacttgttgagggtagcataattgtaaatggtgaagacataa

SEQ ID NO: 17236 - DNA, 60 bp, Homo sapiens
ctgccaagaatgccgtcacccagttcgtttccagcatgagtgcttctgctgatgtgttgg

SEQ ID NO: 17237 - DNA, 60 bp, Homo sapiens
caagcttccaaaactcttcagctgccttcacatcagcacccacagactcagcattcatgt

SEQ ID NO: 17238 - DNA, 60 bp, Homo sapiens
tggagggcgtcactgggtttcggcgtctggcaagcggttcagctgtctgctccctagcag

SEQ ID NO: 17239 - DNA, 60 bp, Homo sapiens; identical to SEQ ID NO: 4855

SEQ ID NO: 17240 - DNA, 60 bp, Homo sapiens
gcagttaaagaacacggatgagaaaagaatgtgttacataggttgcatcacttgcagtta

SEQ ID NO: 17241 - DNA, 60 bp, Homo sapiens
ttggctggttttaccactcctatcagattgtagtgtaattgtgtgatacgcaaaccatta

SEQ ID NO: 17242 - DNA, 60 bp, Homo sapiens
gggccaagattgaggaagacactgagaacatggcagagaagtttctggatggagaacttc

SEQ ID NO: 17243 - DNA, 60 bp, Homo sapiens
tgaagcaggttcctattcctcattggcaacatggcaaacagatcacaggagtcaaagggc

SEQ ID NO: 17244 - DNA, 60 bp, Homo sapiens
aggctggctttactaacaggttcccagagtgcctctgttggctgagctctcctgggctac

SEQ ID NO: 17245 - DNA, 60 bp, Homo sapiens
tgagtgtctcatttccaaggtcccctgaagtgctggctcacctctgtttcccaaagcact

SEQ ID NO: 17246 - DNA, 60 bp, Homo sapiens
tgaaaagttggcgtggcatgtttgaggactctgcggatcagtgctacaggagtacatctg

SEQ ID NO: 17247 - DNA, 60 bp, Homo sapiens
atctaagcctgggcttgggagtgcagctagcgcagaaagatctgaggaactagagcaaaa

SEQ ID NO: 17248 - DNA, 60 bp, Homo sapiens
gctggggatgctacttgatctctcttcagcctcagtttcctcacctggacagtggagctg

SEQ ID NO: 17249 - DNA, 60 bp, Homo sapiens
gctatgcctctgctggtcagctgtggctctgctcctgtgacttcattctggaattcaaga

SEQ ID NO: 17250 - DNA, 60 bp, Homo sapiens
ccaaactgcgtctcaacgtggacgaggcttttgagcagctggtgcgggctgtccggaaat

SEQ ID NO: 17251 - DNA, 60 bp, Homo sapiens
aggtctgcgagcttcctttgctgccaagtatttccttctgcctaccacccatttggccac

SEQ ID NO: 17252 - DNA, 60 bp, Homo sapiens
ggcaccttcctcccagaagaaaaacttaatgactttcgtgatgaacaaattggacagttg

SEQ ID NO: 17253 - DNA, 60 bp, Homo sapiens
tcctcatttccacctcagcaaagcattttagcagaaaagctgacccagagcagtagctcc

SEQ ID NO: 17254 - DNA, 60 bp, Homo sapiens
aaagtgaactgctaggaatgtgagtggaattggtaatgtcagttaaaggcagaaggacgc

SEQ ID NO: 17255 - DNA, 60 bp, Homo sapiens
aaaattttgggagtggttggcatgcctctcttcattttactttttgactggctgcctgta

SEQ ID NO: 17256 - DNA, 60 bp, Homo sapiens
aggtgacctttagtaaatggggaaattaacaggactttcttcttcatcttcaaactcttc

SEQ ID NO: 17257 - DNA, 60 bp, Homo sapiens
ggaccagtcatggagaggtcatctcagttccacacaagatcatcacccaccttcgaaaag

SEQ ID NO: 17258 - DNA, 60 bp, Homo sapiens
gtcaggaccccactatgattggtgtagctgtagacacagttggaatcttgggatccaatg

SEQ ID NO: 17259 - DNA, 60 bp, Homo sapiens
cgtgggtgatactgtcataaaggggttgaaagtacctgttagctgtgtatgtcagaattg

SEQ ID NO: 17260 - DNA, 60 bp, Homo sapiens
ccattcatagcatgtgctcatcaaaaagtgctttccgtttctggtatgtcaactgtacta

SEQ ID NO: 17261 - DNA, 60 bp, Homo sapiens
gaacacaacctaaagccctctttcattgttcacacactaactcctactgccgacgaaccg

SEQ ID NO: 17262 - DNA, 60 bp, Homo sapiens
ccaggcagaggcatgtacctggtctttgatggttcagtggacctgcactaccattgcagt

SEQ ID NO: 17263 - DNA, 60 bp, Homo sapiens
tttaaacgccgaagacagccctgcagcaagcctgcacacgggcttgggtgggttcctttg

SEQ ID NO: 17264 - DNA, 60 bp, Homo sapiens
ctgctcagttgcctctggaagtcctttctggtgtgagaatgtgtccattgtccttctcca

SEQ ID NO: 17265 - DNA, 60 bp, Homo sapiens
ctaagtgaacgctgactggtctcagcgtgagctagaacagaccaagcccaaggacataat

SEQ ID NO: 17266 - DNA, 60 bp, Homo sapiens
acagactcaatcgtcacagggaggagtggaaagtctcactagagtggagaaatgtgtgac

SEQ ID NO: 17267 - DNA, 60 bp, Homo sapiens
gagactatatggtcttttgaagtttggtagcatttccctgtaaaactatctggggattga

SEQ ID NO: 17268 - DNA, 60 bp, Homo sapiens
tgatttagcagcaaccttggcctctgtttcttagatgccagtagcattgccactctccgg

SEQ ID NO: 17269 - DNA, 60 bp, Homo sapiens
ctcaatctgcctgagttgcaattccctctccattaaaccctttgtcagagctatcaacaa

SEQ ID NO: 17270 - DNA, 60 bp, Homo sapiens
actggtttatgtcctttggtcctgaaataaaactcaatacttcacagcagggaaggaacc

SEQ ID NO: 17271 - DNA, 60 bp, Homo sapiens
cgaagtccacggaacacccaccattacctgatctttggagcttgtcatttggccagtgga

SEQ ID NO: 17272 - DNA, 60 bp, Homo sapiens
ctgaaaacagactatctttacaacctaggcgtaggtatagtttttagacattacaccaaa

SEQ ID NO: 17273 - DNA, 60 bp, Homo sapiens
ggcttgagctgcagtcacaggccttggctggaccagggatggcccccagctcccaggagg

SEQ ID NO: 17274 - DNA, 60 bp, Homo sapiens
ccctattacaaataaaagctgttgtgatccagactgcatatacctcaattccttactttc

SEQ ID NO: 17275 - DNA, 60 bp, Homo sapiens
tagcttagggcagtggttctcagccctggctcagtgtcagaatcacctggggtacattaa

SEQ ID NO: 17276 - DNA, 60 bp, Homo sapiens
gcagcagtccataaatcccctccactcaaatctttctacagctacttagtgcccttcagt

SEQ ID NO: 17277 - DNA, 60 bp, Homo sapiens
gcacttactatgtgcccagcattgactaatgttcagtgaaatccttttgttaagagattc

SEQ ID NO: 17278 - DNA, 60 bp, Homo sapiens
tcaacattgtagacactggaggccttacagagtgctagcctcttccttcaggactcacct

SEQ ID NO: 17279 - DNA, 60 bp, Homo sapiens
cctccaggctaaactcccatcttccagcaggctttgagtgtctctgtagagtgagcaaaa

SEQ ID NO: 17280 - DNA, 60 bp, Homo sapiens
actatatagcaagagtggagaaggacttcacccttcctgtaggaagactacatggtggag

SEQ ID NO: 17281 - DNA, 60 bp, Homo sapiens
acgttacgaacaattcacagagaatttgcctttgtggcaactgaagatggaagtctgggg

SEQ ID NO: 17282 - DNA, 60 bp, Homo sapiens
taaggccccgtcattctcgccagtctgttgttgttcttaatgggctcctccttgaaatgt

SEQ ID NO: 17283 - DNA, 60 bp, Homo sapiens
ggaaattaagtctttctcaacctagaagtcaggagtttcaagagtaaacattcagtgttg

SEQ ID NO: 17284 - DNA, 60 bp, Homo sapiens
ggttatgggaggcagcaatgcagaatggaaaggcatggatttgggaggcaaccaatcttc

SEQ ID NO: 17285 - DNA, 60 bp, Homo sapiens
ccttaccattgggcatgcaagtgtgtatgtaggcaaagtggtgctaagtggcactactgg

SEQ ID NO: 17286 - DNA, 60 bp, Homo sapiens
ttcggccatcttggctcctccacaaaacaattaaaattggcgtacaagggacatacctca

SEQ ID NO: 17287 - DNA, 60 bp, Homo sapiens
gtcggagctttttacaggcatttccttcagtgcttcctacagagaacaatggagccagag

SEQ ID NO: 17288 - DNA, 60 bp, Homo sapiens
gcagtgtctatctagcacagtgcctgttatgtagtagcgtgtcaagagatgttctctctt

SEQ ID NO: 17289 - DNA, 60 bp, Homo sapiens
gctgctggtcttttccggttgttgaagacattggatactggggaaacaccttctgagacc

SEQ ID NO: 17290 - DNA, 60 bp, Homo sapiens
cattgagcccattttcctgtatctagtgctgtttggcgatattcttctggactgtaagga

SEQ ID NO: 17291 - DNA, 60 bp, Homo sapiens
aaggtagagaaggctacgtggtgggggagggtggggggagggtcgcggccgcactggcag

SEQ ID NO: 17292 - DNA, 60 bp, Homo sapiens
gcagccagaagtgacagcattcttgtgaatgtttacatcctgctgctgataggttcaagg

SEQ ID NO: 17293 - DNA, 60 bp, Homo sapiens
ttagctgcctaggtgcagtttaaagagggtctaggtactgtggctctcagcagcctttga

SEQ ID NO: 17294 - DNA, 60 bp, Homo sapiens
ctggagatggacagattgctctactccctcttgacagaaaacctgctaaacccctgtggt

SEQ ID NO: 17295 - DNA, 60 bp, Homo sapiens
gagtctaggtgatggcctgtcaaccgataaggaaggtgtccccaaatctagggaatccat

SEQ ID NO: 17296 - DNA, 60 bp, Homo sapiens
ttgtcagcagaaccccatcaggcatttgtcttctcactgagccttgcagcaaaccacaca

SEQ ID NO: 17297 - DNA, 60 bp, Homo sapiens
ccagaggctctcctcacctcagctgagctcctttgaaagtaattcaagggactatgtcac

SEQ ID NO: 17298 - DNA, 60 bp, Homo sapiens
tctaaagtggaaaattcagcgataatacctaaaactaaacactccacaggcagcaattta

SEQ ID NO: 17299 - DNA, 60 bp, Homo sapiens
ttagcagactctggggtattgtcctcagagaagagacaaggagatgatggatggggtgca

SEQ ID NO: 17300 - DNA, 60 bp, Homo sapiens
gctgctggaaactggcaggtttgctggttgaagtggtctggtgctttgatttgggatctt

SEQ ID NO: 17301 - DNA, 60 bp, Homo sapiens
ctgtgtgccaagcatagtgtctttctggcatgcattcaaccagtatttactatttgcttc

SEQ ID NO: 17302 - DNA, 60 bp, Homo sapiens
ctctagtgtctcacttgagaaagacctagatttgagtgggaagagttatgccttaaactg

SEQ ID NO: 17303 - DNA, 60 bp, Homo sapiens
tttctagcaggcgtgagatgctttcctttaccattccaaagtgttgtcgctgggactttg

SEQ ID NO: 17304 - DNA, 60 bp, Homo sapiens
gtccacttagcccacagcagattatgccaggggaatttgaacctggtagtacactgaagg

SEQ ID NO: 17305 - DNA, 60 bp, Homo sapiens
cggagccactcggcctttggctacaatggggagctgtacatctttggtggttataatgca

SEQ ID NO: 17306 - DNA, 60 bp, Homo sapiens
cttgctcttgtacctttggtcagttgtggaaagccagatagccatacttctggaggtggg

SEQ ID NO: 17307 - DNA, 60 bp, Homo sapiens
caggcttgcctggggtgccagtgaccacagatgccatgccaaggaccaacttccacagct

SEQ ID NO: 17308 - DNA, 60 bp, Homo sapiens
taggatgacagtggaggtccatccccaggtggtggtgagggcaatcctgacacagagacc

SEQ ID NO: 17309 - DNA, 60 bp, Homo sapiens
attccatgtctcttaagtctcagaatctcccctagctccctccaggtgtctgcagtggtt

SEQ ID NO: 17310 - DNA, 60 bp, Homo sapiens
ctccagcttgctgcctgaatttggacaacccactcactctcactgcctgtcttcacaatt

SEQ ID NO: 17311 - DNA, 60 bp, Homo sapiens
taaaagatggaaagccttggggagggggagaagaatgggtgtgaccattggagtggtgat

SEQ ID NO: 17312 - DNA, 60 bp, Homo sapiens
ggaggaatgtgaaggaatggtagaggagttaaaaagagtaagggtgaatgtgggtttaaa

SEQ ID NO: 17313 - DNA, 60 bp, Homo sapiens
actgtgagatccctgctccttcgagtctgagccttcatcatactcacctgacatactcag

SEQ ID NO: 17314 - DNA, 60 bp, Homo sapiens
cactagagtccttctgggtgcctgcttcacatccccagccactagagtccttccagatga

SEQ ID NO: 17315 - DNA, 60 bp, Homo sapiens
tgaaagggtctgcttcacaagaggtcatgcctctgcagggaatcacacaccttttgagaa

SEQ ID NO: 17316 - DNA, 60 bp, Homo sapiens
gctgaaagctgaaggtcaaagcctaacaggactggctgttgtgtggatgtgagttgtgtg

SEQ ID NO: 17317 - DNA, 60 bp, Homo sapiens
ttttagggccgaccacttgctcatctgaggagttggacacttgactgcgtgtgcaacagt

SEQ ID NO: 17318 - DNA, 60 bp, Homo sapiens
acaggtgaggtgatattaaggagtacttctgcactgaggcacttgtctcaactatatttt

SEQ ID NO: 17319 - DNA, 60 bp, Homo sapiens
gggcactgcagaggatcactggaatccagatcgagcgcagttcatgcacaaggccccgtt

SEQ ID NO: 17320 - DNA, 60 bp, Homo sapiens
aacttcagcttcagggcaaagatacccactcacaccgtgtcaacgcaagcagtagttcct

SEQ ID NO: 17321 - DNA, 60 bp, Homo sapiens
aagccgcgccgtctccgcctgcccggcgccctgacggccgctgttatgcgtattcccgta

SEQ ID NO: 17322 - DNA, 60 bp, Homo sapiens
agctgggatgcagggcaccaggttcctaggctgcacacagcagggggtttggaccacaaa

SEQ ID NO: 17323 - DNA, 60 bp, Homo sapiens
ggaaacttgggaaaggcttcatccttctttctggattccccaaagctcacagtttggcac

SEQ ID NO: 17324 - DNA, 60 bp, Homo sapiens
gcccttttcagtgaaagatgtcagaaacctcaaaacctttggcctgactcagaactacca

SEQ ID NO: 17325 - DNA, 60 bp, Homo sapiens
acaatgatcctgtgccaaggagagttggtagcttttacagagtgccatctccacgtccag

SEQ ID NO: 17326 - DNA, 60 bp, Homo sapiens
gtgcggtcatctcagcttctcagcaacaactcatgacatacagatgcccattgggatctg

SEQ ID NO: 17327 - DNA, 60 bp, Homo sapiens
gaggcctgtaaaagtcctgggcttagtcagacaaaggcagaggaccaccagaagttaagg

SEQ ID NO: 17328 - DNA, 60 bp, Homo sapiens
acatcctcgggctcaggaacaacatctactgcatggcccagctgctggacaactcagaca

SEQ ID NO: 17329 - DNA, 60 bp, Homo sapiens
gaatcttacagtccctttctgtgaagagaagtggacacacgtgggaactctcaccatctc

SEQ ID NO: 17330 - DNA, 60 bp, Homo sapiens
atggcctcacttgataccaaagctcgtctcagcaccctctacatcacagctgccgtgcat

SEQ ID NO: 17331 - DNA, 60 bp, Homo sapiens
ctggtggtgaaggagaactgctccccaaaagaggaaccataccaaatgcaagaaaagagc

SEQ ID NO: 17332 - DNA, 60 bp, Homo sapiens
actgtgaaccctagaccgtaccccgtagaatggtgtctcttgctttgtaacacatcgggc

SEQ ID NO: 17333 - DNA, 60 bp, Homo sapiens
agcgctccgtactcatccccgagacctaccaggccaacaattgccagggcgtgtgcggct

SEQ ID NO: 17334 - DNA, 60 bp, Homo sapiens
atgtggtgtgaggatattccacctgttctttgagctggtccagtgttgctggagagctct

SEQ ID NO: 17335 - DNA, 60 bp, Homo sapiens; identical to SEQ ID NO: 4855

SEQ ID NO: 17336 - DNA, 60 bp, Homo sapiens
gagtcagaggacaggctgaacaggttggataaggacataacagaagcaatagagactacc

SEQ ID NO: 17337 - DNA, 60 bp, Homo sapiens
acagaaccccagccaccgagaaccacttctgccccaaaagagtgcagttctcaccaacca

SEQ ID NO: 17338 - DNA, 60 bp, Homo sapiens
taaggttgcaggccttagcctcgtctcgtcccagaggcattgggtcaggagaatgggaat

SEQ ID NO: 17339 - DNA, 60 bp, Homo sapiens
ctggctcacatcaaaaggctaataggtgaatttgaccaacagcaagcagagtcatggtcc

SEQ ID NO: 17340 - DNA, 60 bp, Homo sapiens
agaatgtgtatgattgttacatgtccaagtataaccatgttcgcttttatggcttctgag

SEQ ID NO: 17341 - DNA, 60 bp, Homo sapiens
ctgcaactgaagaactgcagccaagaccttaattccaggaaagcacagaggacaaagtta

SEQ ID NO: 17342 - DNA, 60 bp, Homo sapiens
agcagagaaatgcgatggttcaacagctcgccctgccccaagtatgcagacttgaccttg

SEQ ID NO: 17343 - DNA, 60 bp, Homo sapiens
catcgaactacacatggggcaatgaatgaatttaaaagacatacatgttcagttcgtagc

SEQ ID NO: 17344 - DNA, 60 bp, Homo sapiens
tgtgctgtggatgaagggtggagggtggcctttttaatcaaaccccagcatagccaaaga

SEQ ID NO: 17345 - DNA, 60 bp, Homo sapiens
gtccatttgcctcatgctgcacgtggctgttgagcccctgaaagtggctagtctgaatta

SEQ ID NO: 17346 - DNA, 60 bp, Homo sapiens
acacaaaagtaaattagccaggcattggtggccttcaccttgttattcccagcttgcttt

SEQ ID NO: 17347 - DNA, 60 bp, Homo sapiens
gccaaaggtgacattacaggagatgctgaaaagctgtatggttcaagtagtagctgccta

SEQ ID NO: 17348 - DNA, 60 bp, Homo sapiens
ggcttagggctgggaaaagatgggatatggaatcgtcagctatagattgccggacaagaa

SEQ ID NO: 17349 - DNA, 60 bp, Homo sapiens
tattcttgatcacttgtcgttgcttttgtctttatgtctaggtgcaaagtaagaaaagaa

SEQ ID NO: 17350 - DNA, 60 bp, Homo sapiens
cccacatcagtagtgagcaatgcacgaaataatggaacactagagctgaacttcccaaaa

SEQ ID NO: 17351 - DNA, 60 bp, Homo sapiens
gctgggactacaggcatgcacactgttaattgttaagacagggtctccctacgttgccca

SEQ ID NO: 17352 - DNA, 60 bp, Homo sapiens
cggaactttgccacttgtacccgagtttttgattctcaacatgtccgagactgctcctgc

SEQ ID NO: 17353 - DNA, 60 bp, Homo sapiens
gtgctggccacagctatcacttcttaagtgttccctccccagaatgagtcatagcaagtg

SEQ ID NO: 17354 - DNA, 60 bp, Homo sapiens
gaatgagaaagcacctcaaagtaccaggtctatacagccattctttagatcaaacttact

SEQ ID NO: 17355 - DNA, 60 bp, Homo sapiens
aagtgggatgctataaaattcgggggagttttccttctacccggtttcattccccgctcc

SEQ ID NO: 17356 - DNA, 60 bp, Homo sapiens
tgtgaagaacttgatcctgaaaagccatctgattcactttctgcaagccttggacttcaa

SEQ ID NO: 17357 - DNA, 60 bp, Homo sapiens
ctggtgctgtttgtttctctgggtaaccctgagtatatgttaccctaaaataggcaataa

SEQ ID NO: 17358 - DNA, 60 bp, Homo sapiens
cccttccccacctttttaaagtaagccacagcttttctgattgaaagagtgaaaggccag

SEQ ID NO: 17359 - DNA, 60 bp, Homo sapiens
gtactatgatttagggcattctgtcctctgcccctgactgctaagtgttgagaaatgcaa

SEQ ID NO: 17360 - DNA, 60 bp, Homo sapiens
cagattatagggaagtgtttctcaaagtatggttccccaaacagcacaacctgggaattg

SEQ ID NO: 17361 - DNA, 60 bp, Homo sapiens
gtgacgtctgctcacgtgtctcttgcgttagttatctgtataacaggcctcttacatgat

SEQ ID NO: 17362 - DNA, 60 bp, Homo sapiens
cagcatagtctaattgccctttctactgatagatactcctcctcctgcatcttagcagct

SEQ ID NO: 17363 - DNA, 60 bp, Homo sapiens
taacacgcatggatgcctaaggagtgagttcctccgacacctggagaacgagatgcagag

SEQ ID NO: 17364 - DNA, 60 bp, Homo sapiens
gaacttctggcaggtttactggggaaatttccattaggaatattctggtccttaagtttc

SEQ ID NO: 17365 - DNA, 60 bp, Homo sapiens
ctaagaggatatggggagactgggaatgacagctaagggatgtggggcttcttttgagat

SEQ ID NO: 17366 - DNA, 60 bp, Homo sapiens
tactagcccttcctatgtttgccaagtggctatgttgactgaaaccagcccaattgtccc

SEQ ID NO: 17367 - DNA, 60 bp, Homo sapiens
atctgcgtcttcagtttcctgatattttcttaaaagatctagtgtcctttttgtacacta

SEQ ID NO: 17368 - DNA, 60 bp, Homo sapiens
gctgaaggcctgtatcctaggctacacactgaggactctgttcctcccctttccgcctag

SEQ ID NO: 17369 - DNA, 60 bp, Homo sapiens
gcttgttttctggtgctgttgacctgcaagagaatatacttttgcatatacaggtgaaag

SEQ ID NO: 17370 - DNA, 60 bp, Homo sapiens
actgcacactcttccttactagtcccaacgtctaccgtggcctgcttgccgacttccagg

SEQ ID NO: 17371 - DNA, 60 bp, Homo sapiens
ctttgcatgtggccattcctctggaaagcatctctatgcctttcatgggggattgagttc

SEQ ID NO: 17372 - DNA, 60 bp, Homo sapiens
acgcttggcactaatgggcacttgatagatgtttatttttgcatgaatggcatgtaaatt

SEQ ID NO: 17373 - DNA, 60 bp, Homo sapiens
ccttctgtgagctcttaggagatcagaatatgccatcctcaaatacgaaggattgttcag

SEQ ID NO: 17374 - DNA, 60 bp, Homo sapiens
catgtggtatgtccacagctcaccttcaaaggcttagatgtagccatcacagagagtggt

SEQ ID NO: 17375 - DNA, 60 bp, Homo sapiens
acggaaagccacagatgctaaagacccatcggtgattgaggagcctaatggggagcctaa

SEQ ID NO: 17376 - DNA, 60 bp, Homo sapiens
tccccgtcctccagcaatgcaaccctataataaacaagtctttccttgatcctcccctgc

SEQ ID NO: 17377 - DNA, 60 bp, Homo sapiens
ggacccaggcactgtgaccatcccccctgccatgtgggaactgcgatcagcctccttttg

SEQ ID NO: 17378 - DNA, 60 bp, Homo sapiens
tgaaagcaccctctccccaactggattgagttgtggtctgcttcagcacttggaaaagga

SEQ ID NO: 17379 - DNA, 60 bp, Homo sapiens
agcaatctgttcctgcttgcagtcctcggggccctcgcatcagcgagtgcgacagtgttg

SEQ ID NO: 17380 - DNA, 60 bp, Homo sapiens
ggctctctgagtccttccccgatcttcttggctcagcggctgaagattgatactgcccga

SEQ ID NO: 17381 - DNA, 60 bp, Homo sapiens
aaaactgtgtttctgtacgtgtgggtgggaattctctgacggtgctcgttcatagcacaa

SEQ ID NO: 17382 - DNA, 60 bp, Homo sapiens
tttgcctcatcagtccacccaactgattctgaatgggagagagtctgtagagaattgatt

SEQ ID NO: 17383 - DNA, 60 bp, Homo sapiens
aaaagggtctctgcctagacctggggaggtcagggaaagtactatggattggtaacaacc

SEQ ID NO: 17384 - DNA, 60 bp, Homo sapiens
gataaattaggtagtggcagctccacttgcttagggttagggggggaaaagatttctttt

SEQ ID NO: 17385 - DNA, 60 bp, Homo sapiens
tttaatgttaaacgccatcaggggcctctcctcccgtttctgccaggggcttttcttgtc

SEQ ID NO: 17386 - DNA, 60 bp, Homo sapiens
cctttgtggcacatgcgtcaagtctccagcacttgcttgatctttagctaacactgttgt

SEQ ID NO: 17387 - DNA, 60 bp, Homo sapiens
ttgcacctcagctttactgagctgttgtcctggccttcctccccacctcttccgttgtga

SEQ ID NO: 17388 - DNA, 60 bp, Homo sapiens
aagaagaagctgccgacctcccaacaaagcctacaaagatctccaagtttggatttgcca

SEQ ID NO: 17389 - DNA, 60 bp, Homo sapiens
gaattcgatgcgtattctgtggccgccatctgcgcagggtggtggtattctgtcatttac

SEQ ID NO: 17390 - DNA, 60 bp, Homo sapiens
cgtgccacacagaaggcgtgtcctcgtccattggttcttgcatgacaatcagagggacac

SEQ ID NO: 17391 - DNA, 60 bp, Homo sapiens
catgtttgatgacagatgcctctatctctagattcaagctgagtgttgaaatacactgct

SEQ ID NO: 17392 - DNA, 60 bp, Homo sapiens
ggggacaattgcgagaattatcctcagccataagtccctcacatggttatcacctgtcca

SEQ ID NO: 17393 - DNA, 60 bp, Homo sapiens
aaacctacctacgtggtgtactactcccagactccgtacgccttcacgtcctcctccatg

SEQ ID NO: 17394 - DNA, 60 bp, Homo sapiens
aacttacagtcctatggccaaagctaagtcagatctgccctagagcctttgaaggtaaaa

SEQ ID NO: 17395 - DNA, 60 bp, Homo sapiens
gacctctttggaggttccctgctgggtagttatccttgtatctgatggacccatctcaat

SEQ ID NO: 17396 - DNA, 60 bp, Homo sapiens
ttgacattgtggttgaaagtacagctccagcagaagctttgaaagatggagaagagcggc

SEQ ID NO: 17397 - DNA, 60 bp, Homo sapiens
actggggcaaacctggatatcatggagatgtgtttcagtggtgtgcggagtcctggcaca

SEQ ID NO: 17398 - DNA, 60 bp, Homo sapiens
cgggacaggaacccaaccccagccgaccttgagctccaggagttcgtctcttacgtctgc

SEQ ID NO: 17399 - DNA, 60 bp, Homo sapiens
tatgtgtcatgtagaagatgcctagccctggggaccttgtgaaatacgcaggaaccaggg

SEQ ID NO: 17400 - DNA, 60 bp, Homo sapiens
ttcctaccctcagtggaaactgtgaaggctaaatgtataaggaagactagatattaaagc

SEQ ID NO: 17401 - DNA, 60 bp, Homo sapiens
atgcagaagggaattgtggggccggagctcccacgtagagtccctaatggggcattatct

SEQ ID NO: 17402 - DNA, 60 bp, Homo sapiens
cctggtttccaaactgcttttaacaatggtagtgctcctggaacaatccttccaagctcc

SEQ ID NO: 17403 - DNA, 60 bp, Homo sapiens
gcaaacagcactgaaaggttgtagtagaactcagttatatggtggttactcatgacttaa

SEQ ID NO: 17404 - DNA, 60 bp, Homo sapiens
agcttcttgaaggttgtaaggccccaaacatgctgcctggcacatagatggctaatcaat

SEQ ID NO: 17405 - DNA, 60 bp, Homo sapiens
cctaatacgctgttgctgtactggacacttgctcccatctactctcttctctggaatcca

SEQ ID NO: 17406 - DNA, 60 bp, Homo sapiens
tacagccttgctagctcaaggtttgatccctgatcacagcgactggcacaggaatcatgg

SEQ ID NO: 17407 - DNA, 60 bp, Homo sapiens
agcacccacgtggcagagccaaggctggacagggatgattccaacatccaggattgtatt

SEQ ID NO: 17408 - DNA, 60 bp, Homo sapiens
tagtcttacttgcagagggcatagtgctgatgggacaagtgacatgggtatgagccccat

SEQ ID NO: 17409 - DNA, 60 bp, Homo sapiens
cttacctctcgaattcccaaacacccgaaagacacaaaccagaattgagccctactcccc

SEQ ID NO: 17410 - DNA, 60 bp, Homo sapiens
gtggggaggaggaccaggaggttggaatcaccttcaagctatagcttccacaatccctgt

SEQ ID NO: 17411 - DNA, 60 bp, Homo sapiens
ctgcagaaccttggagtacatttcccacaagcaaacctaaaggccaagttgtgcttagcc

SEQ ID NO: 17412 - DNA, 60 bp, Homo sapiens
cctttatggctcccagtcaagatagagctgcaccaagtccaattccattcctcatcacag

SEQ ID NO: 17413 - DNA, 60 bp, Homo sapiens
gtgacaatcaccatggagccagaattaacacagacttctgactctcaggccctttacatg

SEQ ID NO: 17414 - DNA, 60 bp, Homo sapiens
taatgctccacatctaggttccttcctaggtggtgggaacaccttgcagacgtgtgtgca

SEQ ID NO: 17415 - DNA, 60 bp, Homo sapiens
gttaacgcttgttatttctatgcagtgggattatgagaggtttcattttctcgtttaaag

SEQ ID NO: 17416 - DNA, 60 bp, Homo sapiens
atcatctttaccaaccagtggcttttcttgacttgccaaatcagtgaatggtactgctcg

SEQ ID NO: 17417 - DNA, 60 bp, Homo sapiens
ctggagctaaactgccaggttgaaatcttgcctccttcatttctcagctgtgtgggaatg

SEQ ID NO: 17418 - DNA, 60 bp, Homo sapiens
cagtcaggtgtgccatcccagaggcaaacacgtgtgcgagtgtgattctatcagtagatt

SEQ ID NO: 17419 - DNA, 60 bp, Homo sapiens
ttggcacagtggggtggccctttgacctctggtggaaaatcagcatctagtcatggagct

SEQ ID NO: 17420 - DNA, 60 bp, Homo sapiens
ccccaaagatggtggaaagatggcaggttagtgggagaagatatttgcagcatgcaaggc

SEQ ID NO: 17421 - DNA, 60 bp, Homo sapiens
gagagggacaggtacatccccataactgtctggggtgacataaggtggacaacctttcaa

SEQ ID NO: 17422 - DNA, 60 bp, Homo sapiens
gacccaagagttcggtcaatgcatatgttggcagccagctgcacatcgcaccaaatatga

SEQ ID NO: 17423 - DNA, 60 bp, Homo sapiens
ggttacatggctgcctgactcttggaaagaaatcctctgattctcaaatccaatcaaata

SEQ ID NO: 17424 - DNA, 60 bp, Homo sapiens
caaatttacagaatgttgttaatggaacaagacaaaacatatccactttagtttatcaaa

SEQ ID NO: 17425 - DNA, 60 bp, Homo sapiens
aatcccatttgtgtgaatgtccaggacaggccgattcagagacaggaaggggacacgtgg

SEQ ID NO: 17426 - DNA, 60 bp, Homo sapiens
tacagagccaacttgcagcacctggttatgcctcctttcatctcaaagccaaagagctgc

SEQ ID NO: 17427 - DNA, 60 bp, Homo sapiens
atgtggatttcactgttggagtagagtttgacgagtacacaaagagcctggataaccggc

SEQ ID NO: 17428 - DNA, 60 bp, Homo sapiens
tttgaaaggacggaagcgtattcactgtgcgccagtactcctggctgtgctgtggtttct

SEQ ID NO: 17429 - DNA, 60 bp, Homo sapiens
ttttgaatccccactcaccagttgtgtgaccataggcatcatcactaggtcccctcagag

SEQ ID NO: 17430 - DNA, 60 bp, Homo sapiens
tcaggccgcatgtagacaatgctgctaagaaacagaacaaaatgccaccccttctaatag

SEQ ID NO: 17431 - DNA, 60 bp, Homo sapiens; identical to SEQ ID NO: 4855

SEQ ID NO: 17432 - DNA, 60 bp, Homo sapiens
tgctcagtggcttccctaaccgtctgcagaaggagctaagcagcatgtgtcccaatgaca

SEQ ID NO: 17433 - DNA, 60 bp, Homo sapiens
aggacacagcctgcatgaccacgctggtgacggtggaggcagagtaccccttcaaccaga

SEQ ID NO: 17434 - DNA, 60 bp, Homo sapiens
gttttaaagccaggtccttcccacattcgttgagaaaaggtctgtagggcacggagatct

SEQ ID NO: 17435 - DNA, 60 bp, Homo sapiens
ttgctgatgccccaaatgaaatagccacagggattatccagtatcccatgtcccaggtgc

SEQ ID NO: 17436 - DNA, 60 bp, Homo sapiens
catggtcacatagcccaggcagaagaaaatctcggacttggaatagatcccagttgcctg

SEQ ID NO: 17437 - DNA, 60 bp, Homo sapiens
gtgtactcatcagccagcttaagatacagatgttgtcgacattttagaagttccctaagg

SEQ ID NO: 17438 - DNA, 60 bp, Homo sapiens
aagtgagatgatcacactcagagcccagtgagaggcagtgaggaaaaccaccagcgagac

SEQ ID NO: 17439 - DNA, 60 bp, Homo sapiens
taatggaagagcgcctggaaggagtccttatcctgattcccagatggtgaaactgagtgc

SEQ ID NO: 17440 - DNA, 60 bp, Homo sapiens
tgggaaaccctcaatgatgcaggttttaccactgcaaataatattgccaacttgaaaatc

SEQ ID NO: 17441 - DNA, 60 bp, Homo sapiens
ggtccactggaatgggtgtcttcgtcagtagtaaggtggtaggaatcatctcgggcaaaa

SEQ ID NO: 17442 - DNA, 60 bp, Homo sapiens
ctacagtgagttacagtcacgctactgcactctagcctcagtgacagagcaagactctgt

SEQ ID NO: 17443 - DNA, 60 bp, Homo sapiens
ttcaaccagctgctgattcacgcggccttaaactgcacctccagcgtccataagaacgta

SEQ ID NO: 17444 - DNA, 60 bp, Homo sapiens
atctgcagggagagaagttgctgtcagatgaatgtgagcagtctagcctggatgacatat

SEQ ID NO: 17445 - DNA, 60 bp, Homo sapiens
tccttacagcttccttgtaaccacagccctaaatccatgataaagctactcttgtactcc

SEQ ID NO: 17446 - DNA, 60 bp, Homo sapiens
gcacctacagcacatttgaaggtctaatggcatacttctgaaaagcattctgcatttcag

SEQ ID NO: 17447 - DNA, 60 bp, Homo sapiens
aatttctaaatggttttggacttttgactccttataagtgttaagatattttggtatcac

SEQ ID NO: 17448 - DNA, 60 bp, Homo sapiens
aagtggcgtaatcagatgtggcctttgtaagactctctggcattgctttagaggaagatt

SEQ ID NO: 17449 - DNA, 60 bp, Homo sapiens
gtagggtagtcaagcttccaagactccagacacatccaaatgaggcgctgcatgtggcag

SEQ ID NO: 17450 - DNA, 60 bp, Homo sapiens
gtgaggagaatggggtatctggaaacaggaaaatgatctggataaatctgagacctgggg

SEQ ID NO: 17451 - DNA, 60 bp, Homo sapiens
tacactttgtctcacagaatagttctgaggctccatgacagggttttgtcattgttgatg

SEQ ID NO: 17452 - DNA, 60 bp, Homo sapiens
ttcggctcttgaatcccagcgatgaaaccaggaactcactttcccgggatgccgagtctc

SEQ ID NO: 17453 - DNA, 60 bp, Homo sapiens
ctgcataatttgaaatcactctgcatttgtcactgcagcttactgtatgcttgaaaggcc

SEQ ID NO: 17454 - DNA, 60 bp, Homo sapiens
tgaaccatgtcctggtttgcatggccagcttccctgcagaggtgatagaaactgacttga

SEQ ID NO: 17455 - DNA, 60 bp, Homo sapiens
cgctcctccatcaccctcagcctccacacttcaaagttcaagttcaaagctgttcaagtt

SEQ ID NO: 17456 - DNA, 60 bp, Homo sapiens
acctagacccacagatcttttacagtctgagcccctctcggagaaacttcgaggagcctc

SEQ ID NO: 17457 - DNA, 60 bp, Homo sapiens
tctttcaagtgaacctttggggaaaactatataacgttccttactctctaggctctctgg

SEQ ID NO: 17458 - DNA, 60 bp, Homo sapiens
gaaattgtgccattgtcaaagtaccccgtagtgatgagcactgactggttcactggccac

SEQ ID NO: 17459 - DNA, 60 bp, Homo sapiens
atcgctaatcctaaccgaaaatacccaacaaccagtgggcagtatgtcgtaatgggcaac

SEQ ID NO: 17460 - DNA, 60 bp, Homo sapiens
accaagatcatagtgggagattttagcacacatctttcagaagttgacagaacaaagtag

SEQ ID NO: 17461 - DNA, 60 bp, Homo sapiens
gcacttctctggacttctctcctcaatccgttgccaactttgattgaatgggtgctgtgg

SEQ ID NO: 17462 - DNA, 60 bp, Homo sapiens
gtcgccgactcagaaggtgctttccgagacctccagggatctccgaggcgaggaaacccg

SEQ ID NO: 17463 - DNA, 60 bp, Homo sapiens
tctcgggcaggatggcttttgagcctgttgggagagaccttgccaggagaatggtgccca

SEQ ID NO: 17464 - DNA, 60 bp, Homo sapiens
tgagagttctgcagagtgctgggcatgtgcctggaactaccgagtaggagccatttcttt

SEQ ID NO: 17465 - DNA, 60 bp, Homo sapiens
cagaagagaagctgtccgagcaggagactgaagcggctgagaagtcagcttagcgggatg

SEQ ID NO: 17466 - DNA, 60 bp, Homo sapiens
gagcggaaggcgcaggccacagggcgcagagcgcaaggccatggcgaggacgcggccccg

SEQ ID NO: 17467 - DNA, 60 bp, Homo sapiens
cctaggtgttgtcttactggaatgtgtccacatggggattgtgatatgtcacgtggccca

SEQ ID NO: 17468 - DNA, 60 bp, Homo sapiens
caaacaaatgcacatttgtccctacaaagtacaacatgcctgaaccaacagtcattacag

SEQ ID NO: 17469 - DNA, 60 bp, Homo sapiens
tgtgctttgtcaagagaagcaccagcagacctctaagaactgctctctaaggctgcggta

SEQ ID NO: 17470 - DNA, 60 bp, Homo sapiens
gctctctccatcactttaggtctccattaaaactgtcagcttcagggaagttgccttccc

SEQ ID NO: 17471 - DNA, 60 bp, Homo sapiens
aggagcagcgtccagtcttcaagcagcacatccctgccaacaccaaggtcatgctgatca

SEQ ID NO: 17472 - DNA, 60 bp, Homo sapiens
ttggtatgaccaaagggccattgtccagttccatatagggaagggatctgtggggtcttg

SEQ ID NO: 17473 - DNA, 60 bp, Homo sapiens
atgaagttcaactgaattcccctgctcccctcttaccccctctcccctctccatacgtct

SEQ ID NO: 17474 - DNA, 60 bp, Homo sapiens
tcctattctcacccccctcttgctgtgctaactgcacctcctgttgccgacgggttccag

SEQ ID NO: 17475 - DNA, 60 bp, Homo sapiens
aatggtatgcagcactcattcagcacttactgttacctggcactgtgtcagggactagac

SEQ ID NO: 17476 - DNA, 60 bp, Homo sapiens
ttactgaccaactgaagtatagacttactgctggacaatctgcatgggcatcacccctcc

SEQ ID NO: 17477 - DNA, 60 bp, Homo sapiens
caggcaaaggccagacatggattctcatcctataggtattatgcagccattcgatagaag

SEQ ID NO: 17478 - DNA, 60 bp, Homo sapiens
ggagctcgtgaagcggaagcaggagctggcggaaacattggcaaatttggagcgacagat

SEQ ID NO: 17479 - DNA, 60 bp, Homo sapiens
cgtgatattttatacaagtacacttcagatgtattggatgtggctgattttaacaaatcc

SEQ ID NO: 17480 - DNA, 60 bp, Homo sapiens
tttagtcatcctagggcaggagccactgtggcatctgaggaagacccagggtacagtatt

SEQ ID NO: 17481 - DNA, 60 bp, Homo sapiens
ggactttgcctttcctgacccttacactcaccattgtgacagagattgctgattgtgccc

SEQ ID NO: 17482 - DNA, 60 bp, Homo sapiens
ccagtcaactgaacacagagcagctctcttcagaagcacttccaatgagtgatgcagaga

SEQ ID NO: 17483 - DNA, 60 bp, Homo sapiens
acactccagtactgagacctagagtccagatactttgtaggagccaagtcgtgttctaag

SEQ ID NO: 17484 - DNA, 60 bp, Homo sapiens
aggtggcaaggaaggggtgaagtgctagtatgcaagtgggcagcaattatttttgtgtta

SEQ ID NO: 17485 - DNA, 60 bp, Homo sapiens
aaaataaaagcatctccctctaacaccaccagacttttcctctctgtaccttatcatgta

SEQ ID NO: 17486 - DNA, 60 bp, Homo sapiens
cccatgtgtgacagtgtatgggcttttctcacgagcagattagatctgcagctcaagttt

SEQ ID NO: 17487 - DNA, 60 bp, Homo sapiens
cccaaataccgtttcaacagaaagaacccaaagagaccctcaaaatgcctgtaaaattat

SEQ ID NO: 17488 - DNA, 60 bp, Homo sapiens
aaagacaaagaaggagagagagaaagaaaagaaaggaataaagggggaaggaaggaaaga

SEQ ID NO: 17489 - DNA, 60 bp, Homo sapiens
gacccaggtaatgaaatggagcccttccctggaactaaccagtccttgatgttgtgtgac

SEQ ID NO: 17490 - DNA, 60 bp, Homo sapiens
tgtgcaagtcctggagtgtgttgggtcctcatcagcagggctgtatgaaggtgttcatta

SEQ ID NO: 17491 - DNA, 60 bp, Homo sapiens
ggggatttgttaaagtgtcatatggtgtccacaaaatactaaaaagatctgttccccgcg

SEQ ID NO: 17492 - DNA, 60 bp, Homo sapiens
tctgtactctgccatcagcatatggaaagcttcatttactcatcatgacttgtgccatat

SEQ ID NO: 17493 - DNA, 60 bp, Homo sapiens
cagttatggtgatgacttagcgtcaagactttgctgaactcagcacattcgggacaatat

SEQ ID NO: 17494 - DNA, 60 bp, Homo sapiens
aggttcccttcttgaatggctccccaatcttaacagtccggccccgtgtggttgtccggg

SEQ ID NO: 17495 - DNA, 60 bp, Homo sapiens
ggggaactgctggcaccctcaaagtgctgaccagcgaccaccacacccacagtcatcagc

SEQ ID NO: 17496 - DNA, 60 bp, Homo sapiens
atcctgataatcctgctaatagaagccttgttcttccttggtctttcccacttgagtggg

SEQ ID NO: 17497 - DNA, 60 bp, Homo sapiens
cataagcgaactttgtgcctgtcctagaagtgaaaattgttcagtccaagaaactgaatg

SEQ ID NO: 17498 - DNA, 60 bp, Homo sapiens
cctttggggctccttaaaccagaatgggagtttgaaagagagatcatactccagctgaag

SEQ ID NO: 17499 - DNA, 60 bp, Homo sapiens
cacggggctttcacacattgttgatagaaatgtgaattgatagactctttatgtaggtca

SEQ ID NO: 17500 - DNA, 60 bp, Homo sapiens
ttatcacttggagtaaatgccaaactcctcacaaacccctgtgtgacgcagcctctccca

SEQ ID NO: 17501 - DNA, 60 bp, Homo sapiens
aatatcctgctccaatcaaagccatgtcacctgcgttgtccagtgaaacgtcagcggaca

SEQ ID NO: 17502 - DNA, 60 bp, Homo sapiens
acaacaacgaccagtggacgctgatcttcggagacccaaccaagtttggactcggggtct

SEQ ID NO: 17503 - DNA, 60 bp, Homo sapiens
tgtgcatcagtcatctgaactaggttgatcctggaataatgaaaacacttcactagtatt

SEQ ID NO: 17504 - DNA, 60 bp, Homo sapiens
gaggcctgtgtcttccacaggtatcaactttgacaatccaagtgtacagaaggctctgga

SEQ ID NO: 17505 - DNA, 60 bp, Homo sapiens
aatgctgatgcctcttccctcaccagatccctcaacctgacctttgccacacctcttcag

SEQ ID NO: 17506 - DNA, 60 bp, Homo sapiens
aaaatgagacaggtatagaaccgaaatgcgagggcagaagcccgttttggtgcagtggca

SEQ ID NO: 17507 - DNA, 60 bp, Homo sapiens
cttatagctgtctgaaaagctgaagaatcttttagtctaagccaaaacatctgcttactc

SEQ ID NO: 17508 - DNA, 60 bp, Homo sapiens
atcctggtatctctcgtggtgactaattccttgcttgtgcatttcaagagctcaaaatat

SEQ ID NO: 17509 - DNA, 60 bp, Homo sapiens
acattgccacagtttacagtgtcattcttccacgaataggtaattgatagagtttatggg

SEQ ID NO: 17510 - DNA, 60 bp, Homo sapiens
tgacaaccccatgaaccagcgggccgtgcccttcaatgcccccaagtgagcccagaactt

SEQ ID NO: 17511 - DNA, 60 bp, Homo sapiens
cttactagtgctctcacagattccacgaccagaaccacctattccaccaatatgacaggt

SEQ ID NO: 17512 - DNA, 60 bp, Homo sapiens
tcttttcacatgcatatggtacattcaccaaaacagagcatgctgggctttgtacatgct

SEQ ID NO: 17513 - DNA, 60 bp, Homo sapiens
cgtgtaccttgatatgctaatggtgaaatctcctgtttcttgatttggtcttctcatctt

SEQ ID NO: 17514 - DNA, 60 bp, Homo sapiens
aaggctcctgaagctagaaccaggtttggataaagattgaagagccacaggccactcttc

SEQ ID NO: 17515 - DNA, 60 bp, Homo sapiens
cacccaaaggggtaattgtcctactggtggtctgtaagatgagttagggtgacttgctaa

SEQ ID NO: 17516 - DNA, 60 bp, Homo sapiens
gatgctgcttgctatgttttcaaacctttttgagccataggatccaagccataaaattct

SEQ ID NO: 17517 - DNA, 60 bp, Homo sapiens
caggaaaatgtgccagtagaacaggccatctccaggaaattggctctatttgggtcctga

SEQ ID NO: 17518 - DNA, 60 bp, Homo sapiens
tccaggttgccactggagtgatttctaccctccaggtaaggtttcagcttctcattattt

SEQ ID NO: 17519 - DNA, 60 bp, Homo sapiens
agtcacattaccttcaggagacttgatcccagtagactgaggtcttccctttcagcagaa

SEQ ID NO: 17520 - DNA, 60 bp, Homo sapiens
catcatcaacataaggaacccccatacagaaacaccatccaaagatcaaaggtaggtaaa

SEQ ID NO: 17521 - DNA, 60 bp, Homo sapiens
catgtcacatgataaacaggtgttcactgttggcagaatttgtgccagccgtaccagaat

SEQ ID NO: 17522 - DNA, 60 bp, Homo sapiens
taagcgatacgaatcccagcttcgggatcttgagcggcagtcagagcaacagagggagac

SEQ ID NO: 17523 - DNA, 60 bp, Homo sapiens
ttctctttaggttgtggacgaagtgtttatttatcatgcctgaacctgctaagtccgctc

SEQ ID NO: 17524 - DNA, 60 bp, Homo sapiens
cgcttactgatgagatatcgaggcaagctaaatcagcagttcctgaggacgcgcttgggg

SEQ ID NO: 17525 - DNA, 60 bp, Homo sapiens
gccaggctttcgaaatcccgagatttgcttccgaaaaggcacttaactttgctcaacagt

SEQ ID NO: 17526 - DNA, 60 bp, Homo sapiens
ggcaccctcagcttgattctcctttttaattgcctgtaagcagggaagcacaatgttttc

SEQ ID NO: 17527 - DNA, 60 bp, Homo sapiens; identical to SEQ ID NO: 4855

SEQ ID NO: 17528 - DNA, 60 bp, Homo sapiens
cgaatgacaggcttgcttatgactggagggtcaagggctattgagtgcaaaagctggatg

SEQ ID NO: 17529 - DNA, 60 bp, Homo sapiens
catgatgacttcgctggaggaaaggtgatacgtacatacgcattgagggcctcagcttta

SEQ ID NO: 17530 - DNA, 60 bp, Homo sapiens
agaggatagaccaggctggcatggggctattcgcagtagagggatctcgtctgaatgttt

SEQ ID NO: 17531 - DNA, 60 bp, Homo sapiens
ccgtgtgccacacacagataagcgaagaaatacgacaatgcttagtaagacctccaccag

SEQ ID NO: 17532 - DNA, 60 bp, Homo sapiens
cttgcctgagatcacacagctaggaaatgtgaagcctggacttgaacccagctctgtttg

SEQ ID NO: 17533 - DNA, 60 bp, Homo sapiens
ggccagaggtgtgaatagcccagaaccttctgagaagattcctttgtggacggaagaaag

SEQ ID NO: 17534 - DNA, 60 bp, Homo sapiens
tcatcagatgggggcggataccggggaagatcgaagagaagcctgtgctctcagtgcaca

SEQ ID NO: 17535 - DNA, 60 bp, Homo sapiens
ctggccttcagttcagcagcagagcccagagatgtactgggcaaaggtcctacaggtatg

SEQ ID NO: 17536 - DNA, 60 bp, Homo sapiens
gatgaatttgctgtccggtcaagacttcagctagcacattcctaattgacctgcctttac

SEQ ID NO: 17537 - DNA, 60 bp, Homo sapiens
ccggacacatctgaatgaagaacctctgaacataacacctttcagcgctgtaacactcac

SEQ ID NO: 17538 - DNA, 60 bp, Homo sapiens
gattcgttgaaggacaccagctgcggaatttgcggctttggcagattgaaatcatggcag

SEQ ID NO: 17539 - DNA, 60 bp, Homo sapiens
cagtcaacactttcttgctccctgttttctcttctgtgggatgatctcagatgcaggggc

SEQ ID NO: 17540 - DNA, 60 bp, Homo sapiens
ccaaagcagcagcataaactcagagatgaagacctctttcgtttaaaagagcctgtactg

SEQ ID NO: 17541 - DNA, 60 bp, Homo sapiens
caaggccagatacagtgtcttacgcatgtaatttcagcagtttggaaggatgatcacacg

SEQ ID NO: 17542 - DNA, 60 bp, Homo sapiens
acgttggtcttttaaccgtgctgagcagaaaacaaaacaggttaagaagagccgggtggc

SEQ ID NO: 17543 - DNA, 60 bp, Homo sapiens
agatttctgtgttcttagattcctgtgttcctagcaacttgtagggaataccttaaaaag

SEQ ID NO: 17544 - DNA, 60 bp, Homo sapiens
gacagcaccagtgcagacagcaagtatgaatgtttatcaaaaatagattttcaattgtac

SEQ ID NO: 17545 - DNA, 60 bp, Homo sapiens
gctgctgaaatctgcatatttgggaggcatttcccaccaccgattcacagcccatttgat

SEQ ID NO: 17546 - DNA, 60 bp, Homo sapiens
acattgttggaagaagttgcagagatctaaataaaggagagatactggtacatcaattgg

SEQ ID NO: 17547 - DNA, 60 bp, Homo sapiens
gtttattggcatagagctgcaaacagcctctgattctgaaatagctcttctggatcagtg

SEQ ID NO: 17548 - DNA, 60 bp, Homo sapiens
tcccctggggtttccaacttctgaccccactgaagtgtttatcctcttctctaatcccag

SEQ ID NO: 17549 - DNA, 60 bp, Homo sapiens
ttctgcccatccggaggaaatctcagctatccaacggcggtcaggagcagaggaaaataa

SEQ ID NO: 17550 - DNA, 60 bp, Homo sapiens
attctagtgggttgaaccgaacggtagtccgtttccaaaagaggaagccaagaccagagg

SEQ ID NO: 17551 - DNA, 60 bp, Homo sapiens
ggacaaacactactaataatcatatgtgttggcattgtgttccctcttgcacttcttccc

SEQ ID NO: 17552 - DNA, 60 bp, Homo sapiens
gctttgagttctgacatccttaatgacatggagtctgttttggctgccaccaagctagat

SEQ ID NO: 17553 - DNA, 60 bp, Homo sapiens
gcgtagcagctcagctctttggatcagtctttgtgatttcatagcgagttttctgaccag

SEQ ID NO: 17554 - DNA, 60 bp, Homo sapiens
gctgaacctaacagaagacattggccaagacgatcaccaaacaggaagtctgcggtcttg

SEQ ID NO: 17555 - DNA, 60 bp, Homo sapiens
gcagcagttccctccgccagcacttctttgttacccgcttcgaggccgataaatctaagg

SEQ ID NO: 17556 - DNA, 60 bp, Homo sapiens
agcacgcggccagcctgtgccgctgttatgaggagaagcaaagccccttgcagaagcact

SEQ ID NO: 17557 - DNA, 60 bp, Homo sapiens
ccccactgtggtggcaatcaggacctaaggtgaagcaaacttgaagttctatctgacaag

SEQ ID NO: 17558 - DNA, 60 bp, Homo sapiens
gccgttcctttagctagtggcatcttgattcctgctgtgtcttaactgaccattgtctta

SEQ ID NO: 17559 - DNA, 60 bp, Homo sapiens
gaagaatttgatgagtattttcaggatttgtttctatgagacgagagagagaagcctccg

SEQ ID NO: 17560 - DNA, 60 bp, Homo sapiens
cagcaagaatagcagatgggatggacctttcataggtaatgctatctaccaggttattac

SEQ ID NO: 17561 - DNA, 60 bp, Homo sapiens
aacagtgttggggcaggaaggtggatgctgttgtcatggagctgtgggagttggcactct

SEQ ID NO: 17562 - DNA, 60 bp, Homo sapiens
tcccacggcaagaaccatccgttcaagcccgacgccacctaccataccatgagcagcgtg

SEQ ID NO: 17563 - DNA, 60 bp, Homo sapiens
acagctgccagactattcccacagtgctccaaatgcacatgaacaacagtgacggctcca

SEQ ID NO: 17564 - DNA, 60 bp, Homo sapiens
actcagcacatcatacaaaccacattacttctgtcacttcagggcatcgggactggctgg

SEQ ID NO: 17565 - DNA, 60 bp, Homo sapiens
cagccacaggtgcaggcgttcaaggattgcatgagtgaacagcaggcgaggcggcaagag

SEQ ID NO: 17566 - DNA, 60 bp, Homo sapiens
cctaggagaatgttaacagtccagacctttttcactacatcaaccacggatgattggcat

SEQ ID NO: 17567 - DNA, 60 bp, Homo sapiens
gcaggtgtaggggtttaaaacaatacgtgtcgatcctcttacgttcttggtgtgggcagg

SEQ ID NO: 17568 - DNA, 60 bp, Homo sapiens
gcacaccgagcttcgggtaactcttacagtggaggattctcagccgtatgaagacaccct

SEQ ID NO: 17569 - DNA, 60 bp, Homo sapiens
cccacctgagggtgagcaactcctgtactgtaggggaagaagtgggaactgaaatggtat

SEQ ID NO: 17570 - DNA, 60 bp, Homo sapiens
cctacatcctcttcccaggcatgaccaagactggcatagacccttattcgtcagcccacg

SEQ ID NO: 17571 - DNA, 60 bp, Homo sapiens
gtgaaatacctaatgatgtgggcctaaatttgcctcattcagactgagacagggctgtta

SEQ ID NO: 17572 - DNA, 60 bp, Homo sapiens
cctccatacagtcagttggtgggcttattgtactgtggtgctttgcaatgcaaccctgca

SEQ ID NO: 17573 - DNA, 60 bp, Homo sapiens
gatatggagtggaaatttggagtgacatctgggagcagcgaattggagaaagtgggaagt

SEQ ID NO: 17574 - DNA, 60 bp, Homo sapiens
gattctatttacagggtctattctcattgcgtctattagcattatcacttatttattgtt

SEQ ID NO: 17575 - DNA, 60 bp, Homo sapiens
aaacaatggcatttacagaaagagtcaacagcagtggcaacaggaccttcttaagactgt

SEQ ID NO: 17576 - DNA, 60 bp, Homo sapiens
tgttgagtggacaggaggagctaagggaggtgaggggcatctctccagtactgacccctc

SEQ ID NO: 17577 - DNA, 60 bp, Homo sapiens
ggctctagaataccatggccttatacccctgcaggtatcacaattccctgtccgtcagaa

SEQ ID NO: 17578 - DNA, 60 bp, Homo sapiens
ggctaccacccttagccaagactcttttacctgggatggttagatatcaggctgctgtgt

SEQ ID NO: 17579 - DNA, 60 bp, Homo sapiens
agccaggcctaagggcccatcacagggagacgcaagaaagggagcaggtgacagaagcac

SEQ ID NO: 17580 - DNA, 60 bp, Homo sapiens
gcacgagaatgtgctactaccctctgtagtctcccctaacacgagaggtcagtgaaattg

SEQ ID NO: 17581 - DNA, 60 bp, Homo sapiens
ctacataaacgttttagcccctataaaaacatccggagatccttttgttgttcatgagca

SEQ ID NO: 17582 - DNA, 60 bp, Homo sapiens
tccatttcccctctgcacccagaacagtggtggcaacattcattgccaagggcccaaaga

SEQ ID NO: 17583 - DNA, 60 bp, Homo sapiens
gggacactggtgtcatttagactgtcagcagtgcacatgattgtacgatagactccaggc

SEQ ID NO: 17584 - DNA, 60 bp, Homo sapiens
tgttggtggatggcgaaagctaaaagagggcgagctgtaacacatgacctctggggcgat

SEQ ID NO: 17585 - DNA, 60 bp, Homo sapiens
ttcggaaagtcaacctcactcctcagcactcacagcacctagctctccaggttcctcatg

SEQ ID NO: 17586 - DNA, 60 bp, Homo sapiens
atttgaaatttctgggagtctgaggagtactgacataattacctgctggagtctgtaaat

SEQ ID NO: 17587 - DNA, 60 bp, Homo sapiens
tactaatagcttgccattcctctgtcaccactgctttctgcttagcacacgtcccctctg

SEQ ID NO: 17588 - DNA, 60 bp, Homo sapiens
aatccgaaaacaagacaccaagtccccaagacccctgatccaggagctcagcgacgagga

SEQ ID NO: 17589 - DNA, 60 bp, Homo sapiens
tgggctgagagcacctgtatcttggcccagagcatggtggggacacagagagtcatgcac

SEQ ID NO: 17590 - DNA, 60 bp, Homo sapiens
tctgccaagacagaacgtgcatcagctcagcaggaaaacagttcaacgtgtatagggtcg

SEQ ID NO: 17591 - DNA, 60 bp, Homo sapiens
acattctctcccaggtaacatagttctctcaatgtaaacttggaacctgaaaccctactt

SEQ ID NO: 17592 - DNA, 60 bp, Homo sapiens
gtttgaggacaccaacctgtgtgtcatccatgccaaacgggtcaccatcatgcctaagga

SEQ ID NO: 17593 - DNA, 60 bp, Homo sapiens
cagctgtggaccttcaactacgtctaggaagaataagactttgatggggcccataaatgg

SEQ ID NO: 17594 - DNA, 60 bp, Homo sapiens
aagcagcaaggccagtgacatttccccctgggcggataggtgaagacggaggctgaggct

SEQ ID NO: 17595 - DNA, 60 bp, Homo sapiens
gctgagtgtgcagatgtgcgtttaacaacggacacccattcccaattcatgacttcccac

SEQ ID NO: 17596 - DNA, 60 bp, Homo sapiens
cctttgtggtttgctggactccttatcacctgtttagcatttgggagctcaccattcacc

SEQ ID NO: 17597 - DNA, 60 bp, Homo sapiens
aatgtccaggcagtcggacatcctaggcttccccagcaagccgtcgaccagggagaaaga

SEQ ID NO: 17598 - DNA, 60 bp, Homo sapiens
tctcctgtgaaagagacttccagcttcctcctcctcctcttcctcctcctcctcctgccc

SEQ ID NO: 17599 - DNA, 60 bp, Homo sapiens
acatgagcagagctggccctgaatctgtagggtaccacctgagggctctctgggcagtca

SEQ ID NO: 17600 - DNA, 60 bp, Homo sapiens
tttgaaaaggtgtgggtccctgtgtcctcttccaggggtccaagggaacaggagaggtca

SEQ ID NO: 17601 - DNA, 60 bp, Homo sapiens
tgtgtcacgtgggaaggtctcatgggtgcaggaagccctctagttaaagcccaggttggc

SEQ ID NO: 17602 - DNA, 60 bp, Homo sapiens
ccaccccagagagccttggtgaatccgctcaggcccccggactctgtgcattccccaggt

SEQ ID NO: 17603 - DNA, 60 bp, Homo sapiens
acaagctggtgacgcccagcctcctacgtcatgtgtggccatgactgctccatgtgacca

SEQ ID NO: 17604 - DNA, 60 bp, Homo sapiens
atactttggtcaaagaagagagtaaaagcaggatctaggcagcctcatgaaactcggaaa

SEQ ID NO: 17605 - DNA, 60 bp, Homo sapiens
ccagtctgggatagttgtagaaatacaggcaggtagaggcctggcattgctcgctagcta

SEQ ID NO: 17606 - DNA, 60 bp, Homo sapiens
tctcagtagtggggagcatgttgggtgtgagggaacacagtgtggaccatctctcagttc

SEQ ID NO: 17607 - DNA, 60 bp, Homo sapiens
agagaggtggagatgctttctgaccccgtcgaggtcatccctgtactgggccttacataa

SEQ ID NO: 17608 - DNA, 60 bp, Homo sapiens
gtaactagtgtgcatatcaattcattccgagtctgttgagcctgtgtatgaattttataa

SEQ ID NO: 17609 - DNA, 60 bp, Homo sapiens
ggtactctcatgccactcattgcctgcatcagtcagtcatgacctttgcatcagcctttc

SEQ ID NO: 17610 - DNA, 60 bp, Homo sapiens
taatcccaaaacatacaatcacaaatgttgaaatcctgacatccaaattctggggaagtg

SEQ ID NO: 17611 - DNA, 60 bp, Homo sapiens
aatcagcgaggtgtcctgggctgagtccccggagtgggaagaggtggccggaagaagaaa

SEQ ID NO: 17612 - DNA, 60 bp, Homo sapiens
gcagggggaaggctgctgctgggataagtacaagtgatggcttttaccttacatgcttta

SEQ ID NO: 17613 - DNA, 60 bp, Homo sapiens
tacaaagcaggaaagtatgcttgggagaggccaagtgagtggggaatcagcccaaagcca

SEQ ID NO: 17614 - DNA, 60 bp, Homo sapiens
gcattgaaggtcattaggtgaatttacctacctttaaacatcttccatgacaaatggtta

SEQ ID NO: 17615 - DNA, 60 bp, Homo sapiens
ttgagtctcaagctacaatgctgttgggcagcctggtcttcccacgtgagggtttaactt

SEQ ID NO: 17616 - DNA, 60 bp, Homo sapiens
gctctcgtccatcctcagagacaaagaagagggcagggagtttgggcttggttttgaact

SEQ ID NO: 17617 - DNA, 60 bp, Homo sapiens
gaccacccaggaaaccatcgacaagactgctaaccaggcctctgacaccttctctgggat

SEQ ID NO: 17618 - DNA, 60 bp, Homo sapiens
atcagctcctcaacagtacctatctcttcaacaccagagcctgccacctccatatcagca

SEQ ID NO: 17619 - DNA, 60 bp, Homo sapiens
ggcatatgtgcccctctgtatcttttgagaagtgcggaataggttgcttctaccacctgt

SEQ ID NO: 17620 - DNA, 60 bp, Homo sapiens
atagtcctttcccttatggtgtccagctctatgcaggctctgcctcactccagattatgt

SEQ ID NO: 17621 - DNA, 60 bp, Homo sapiens
ggtgaggaactgcagtcaaatggcttaggttcaaacacgagttctgacacaaatctaggt

SEQ ID NO: 17622 - DNA, 60 bp, Homo sapiens
caccttttgctcttgctgctaattgcccattcgtagtgggtgtaatgccaggtggaatgg

SEQ ID NO: 17623 - DNA, 60 bp, Homo sapiens; identical to SEQ ID NO: 4855

SEQ ID NO: 17624 - DNA, 60 bp, Homo sapiens
atgaaagtaggcttgcgctccgcttgtagctgcttccgggtcagaggtcagacggtctag

SEQ ID NO: 17625 - DNA, 60 bp, Homo sapiens
agaatcctaaagagacagagggatgcagagaaatgcatagacagagagagacaaagaggt

SEQ ID NO: 17626 - DNA, 60 bp, Homo sapiens
ccatcattctagtcaaaaccttgcatctgcttttggtaagcactttgatgattagagcag

SEQ ID NO: 17627 - DNA, 60 bp, Homo sapiens
tcctctgggaggcttgaagttctgcagagatgttgatatgccttgcagcttggacccaat

SEQ ID NO: 17628 - DNA, 60 bp, Homo sapiens
gattggctagacaatcgaacgatcctctcttattggtcgaaggctcgtccagctccgagc

SEQ ID NO: 17629 - DNA, 60 bp, Homo sapiens
ctaacttgcactgcactaacttggactgcactaacttgtggagtctgcactaacttggag

SEQ ID NO: 17630 - DNA, 60 bp, Homo sapiens
atcttgtgttgtcactgcagagtttggaggccagttttccacagcctaaacagggaggag

SEQ ID NO: 17631 - DNA, 60 bp, Homo sapiens
ttgaacctgtcagcccccgtaggctgtgggtcaaaagtgccggtcaaaatggaagtgaat

SEQ ID NO: 17632 - DNA, 60 bp, Homo sapiens
ggtgaagacagagtcagactgacccaagcaaaggggtgacagagctgcatgaacagaaat

SEQ ID NO: 17633 - DNA, 60 bp, Homo sapiens
ggaagacttcccagctaaggcttggagcacaggtaggagttcatttggtgctaatagtag

SEQ ID NO: 17634 - DNA, 60 bp, Homo sapiens
tgggcacctgaggtggctgaggctcatctttgaggagcatggaactcgaggggagaagtc

SEQ ID NO: 17635 - DNA, 60 bp, Homo sapiens
tgggagactgttgggaaggcacgattggttttgaaatgggaggacatgaaattcggaggg

SEQ ID NO: 17636 - DNA, 60 bp, Homo sapiens
ttctggtgtttgaagctccgtttctgtgtagtgactgaccccaaggagtgcagacatgtc

SEQ ID NO: 17637 - DNA, 60 bp, Homo sapiens
ggcaatttgtaggcaggagcacagggggtgaggtcaatccattctttggagttgtataga

SEQ ID NO: 17638 - DNA, 60 bp, Homo sapiens
agaaccagcttctggactccctgcatggagctttctactatcccaggttgttgggtccct

SEQ ID NO: 17639 - DNA, 60 bp, Homo sapiens
gttggggatatagcagagcttttttgctgacttggattcctattcccattccttgagggc

SEQ ID NO: 17640 - DNA, 60 bp, Homo sapiens
ctgtgtcagctggagtagttggttgtgaatattaaaacctagtactattttccctcagta

SEQ ID NO: 17641 - DNA, 60 bp, Homo sapiens
ctgcatcaccactgttggagaccttgtacccttgcaagtgggatgcccgccttgtgcctt

SEQ ID NO: 17642 - DNA, 60 bp, Homo sapiens
gtcggtccagaagctgaattagatagactttccaccgaaacaagaatggatagatgttcc

SEQ ID NO: 17643 - DNA, 60 bp, Homo sapiens
ttggtctggccacctcatgaatccaacaagcattagtgtggcatttcagtggagaaggaa

SEQ ID NO: 17644 - DNA, 60 bp, Homo sapiens
aatctaaggtggagcccactcttctatgctgaagttcaccaggcagagcagttttcttac

SEQ ID NO: 17645 - DNA, 60 bp, Homo sapiens
ctgtaaaatcttctctgattcctcaaattagaattaaaggctctatctatgctctgtgaa

SEQ ID NO: 17646 - DNA, 60 bp, Homo sapiens
atttatttcctaaatccagaccgtgtttcagaataatccttacttgagagtagccatttc

SEQ ID NO: 17647 - DNA, 60 bp, Homo sapiens
gtgccacatgctgctctctaccagattgctcagctactcctaacctccacttacaaactg

SEQ ID NO: 17648 - DNA, 60 bp, Homo sapiens
actgccgcagaatctggagatcatggtagtagctccttctcagaattccgctatctcttc

SEQ ID NO: 17649 - DNA, 60 bp, Homo sapiens
ggccttggaaaccatcacagttgagagtaggtaacacccatttgttgcatagttttgtgc

SEQ ID NO: 17650 - DNA, 60 bp, Homo sapiens
gaaccctccacagcaacatgcaagaccatggagttaaagaaacccagagacctttatcaa

SEQ ID NO: 17651 - DNA, 60 bp, Homo sapiens
agcacatgattgagaacatcttgggacagaccaaaaccactgacagatggcaaggctcgg

SEQ ID NO: 17652 - DNA, 60 bp, Homo sapiens
agcgtggccatctacagcaagtgctgagcctcggcatttccacagacaaggcctccagca

SEQ ID NO: 17653 - DNA, 60 bp, Homo sapiens
aacctgaagtagcaaaggcaagaaggcaacgacgttccatctgtggaaggacctaccaac

SEQ ID NO: 17654 - DNA, 60 bp, Homo sapiens
ggaaagaagtggatgggaattgtaggcatagatttcatatcaagggcatttcaagacaga

SEQ ID NO: 17655 - DNA, 60 bp, Homo sapiens
gcactgtacacaaaggcaaaaccctatgactttggcatcatctgccattgatgtccagcc

SEQ ID NO: 17656 - DNA, 60 bp, Homo sapiens
cgcgtcagtctcataatctgaaggtcgtgagttcgatcctcacacggggcacaataattt

SEQ ID NO: 17657 - DNA, 60 bp, Homo sapiens
ataatcagggcagaaggcaacaggggaacacacatggccagagtaggagagagacagaga

SEQ ID NO: 17658 - DNA, 60 bp, Homo sapiens
caaatgtcttcaactcttacctgagaaaacatggcaaaatggtcagccagacccttccag

SEQ ID NO: 17659 - DNA, 60 bp, Homo sapiens
gtgtctgggtactctgccagtcaggagagatgttaccaaaggtacaggatttgagaagta

SEQ ID NO: 17660 - DNA, 60 bp, Homo sapiens
gtgggttctacacagtgtacttggtatcggttgtactcactcataatcgccttgtctttc

SEQ ID NO: 17661 - DNA, 60 bp, Homo sapiens
atgactagccttgttgccgtcgagttggagaaagtggtgctgaaatccacctttaaccgg

SEQ ID NO: 17662 - DNA, 60 bp, Homo sapiens
gatgcgaaattgaagcctgagactgagttgggcagtcccctttggacttgagtgctaaag

SEQ ID NO: 17663 - DNA, 60 bp, Homo sapiens
ggtcggcatataagcaaagttctgtaaacaccgtgaaggtaccatgagttctatgggtac

SEQ ID NO: 17664 - DNA, 60 bp, Homo sapiens
tttcaggtagtaaaccgttttattggaaactggttaaaaattaaggcactccaagcttta

SEQ ID NO: 17665 - DNA, 60 bp, Homo sapiens
gttggatcagtctcatttggctcattccaaggcagtctgtgaacttgccgcatgtgtggt

SEQ ID NO: 17666 - DNA, 60 bp, Homo sapiens
tttgtccagccatcagccacggcctctcgacagcaccaagatggaagtcaaaggtcagct

SEQ ID NO: 17667 - DNA, 60 bp, Homo sapiens
agctggatcccagggaaatatcagccttgggcaactgcagtgaccaggggcaccggctgc

SEQ ID NO: 17668 - DNA, 60 bp, Homo sapiens
atatgccactcattaagggcttttacctcggctgtccacatccagtcatgcatttggggc

SEQ ID NO: 17669 - DNA, 60 bp, Homo sapiens
tcggtcatagcggttccaagattagcttctactgcttcctgtagcttggctaatatactc

SEQ ID NO: 17670 - DNA, 60 bp, Homo sapiens
gatttgtatctaaacagcaaggtggcaccagatacacgtaatgctactggcctatgaccg

SEQ ID NO: 17671 - DNA, 60 bp, Homo sapiens
ggaagggtgtggtatggcgtgggaaggacactctttactggtactcctttgtatctcttg

SEQ ID NO: 17672 - DNA, 60 bp, Homo sapiens
ggggttttgctagtccatagcaattcgaagggcagtgggctagtgttatgagaatattgg

SEQ ID NO: 17673 - DNA, 60 bp, Homo sapiens
tatacgcataacaaagacaaacaccagttacttggctcaatatccaagttttaacctagc

SEQ ID NO: 17674 - DNA, 60 bp, Homo sapiens
ccaatcccaacacaactggattctactgaaattaccacatatttgaggtccacaagcaca

SEQ ID NO: 17675 - DNA, 60 bp, Homo sapiens
aatgttttttcatgcagttaccatgaactaatactacaataaaggatggtcttgggtgcc

SEQ ID NO: 17676 - DNA, 60 bp, Homo sapiens
tggagaaatctctgatacccagaaagccacatagtacacatggactgtgcttccccaggg

SEQ ID NO: 17677 - DNA, 60 bp, Homo sapiens
ctatgccgactctttgccaaggagaatgagtacataggtggacctagaggacaggtctgc

SEQ ID NO: 17678 - DNA, 60 bp, Homo sapiens
gtctacactcaagtcttcagtagttagctagttgtcttttaagttgctggcttcagtggc

SEQ ID NO: 17679 - DNA, 60 bp, Homo sapiens
ggtgggggccctcgctctccatggggctgagggactggctgagaaccgtgtgctgctgct

SEQ ID NO: 17680 - DNA, 60 bp, Homo sapiens
tgtggctggttggaatccgctttctgccatgctaagatagcacatggaaactaagccagg

SEQ ID NO: 17681 - DNA, 60 bp, Homo sapiens
cacaagactgagaccaggcaacaagaaaagcagagacaaatgactcaacaagacagccac

SEQ ID NO: 17682 - DNA, 60 bp, Homo sapiens
gtctgcacacgtctcatgaatgcatcacatttctgtcatatggatattagccattccgaa

SEQ ID NO: 17683 - DNA, 60 bp, Homo sapiens
tggggtaggagttctacagtgtctcgagcatatgattggggcagtgagaagcaaagtgct

SEQ ID NO: 17684 - DNA, 60 bp, Homo sapiens
caaattgcagacttccttgaaaggctcaagactgtagcatggtgatgtctagattcatac

SEQ ID NO: 17685 - DNA, 60 bp, Homo sapiens
aagttatgcttatctgatgtgtactgggatttaatattcttgcttgtggtcagacatatc

SEQ ID NO: 17686 - DNA, 60 bp, Homo sapiens
tactagatgtgaacttgaagaaggttgtcagctgcagccactttctgccagcatctgcag

SEQ ID NO: 17687 - DNA, 60 bp, Homo sapiens
cagattaatctaggggaacatctatttaaaatgtcaaatcatctcgttcaagaacaaggt

SEQ ID NO: 17688 - DNA, 60 bp, Homo sapiens
cattagcagaagacactgagatctggttcctggacagagcgttatactggcattttctca

SEQ ID NO: 17689 - DNA, 60 bp, Homo sapiens
ctgaactatctgatgagaattcctgtgttcccaaagcaactgatgtttacaggtcttgtg

SEQ ID NO: 17690 - DNA, 60 bp, Homo sapiens
ttgtcataagaatgtaccatagccttttaaagatttccctgatgttggatgtttagattg

SEQ ID NO: 17691 - DNA, 60 bp, Homo sapiens
ttttgacagccacagcatgttccgaagagatgattggaagatggaagtggagggttaaat

SEQ ID NO: 17692 - DNA, 60 bp, Homo sapiens
ggggacctatagtgccagtcgcagtttctatggcatggctgacaaggtagatgtgaaaac

SEQ ID NO: 17693 - DNA, 60 bp, Homo sapiens
gggcaaggagctacatccttcatcaactatccagtcaaatgcaagggaaagggctgaagc

SEQ ID NO: 17694 - DNA, 60 bp, Homo sapiens
agcctggtatagaaggtactgcctgtacatcagaacaggggagcaggagcctgatctgat

SEQ ID NO: 17695 - DNA, 60 bp, Homo sapiens
gctgtttgccagtctccctgcttaaatggtggaaaatgtgtaagaccaaaccgatgtcac

SEQ ID NO: 17696 - DNA, 60 bp, Homo sapiens
cctctggctccaagcccactaccagtctcaggtttctttactaaaagatcactacctttt

SEQ ID NO: 17697 - DNA, 60 bp, Homo sapiens
ggagttgtgaaagcttatacaactagagttggtattggtgcctttcctacagagcaagac

SEQ ID NO: 17698 - DNA, 60 bp, Homo sapiens
actgtgaaagagactaacaggttgctcctgccccatgccttctcccgcaaaccctcggat

SEQ ID NO: 17699 - DNA, 60 bp, Homo sapiens
ggaattggctgttactatgatgacagtaatgtgttaaggagcttttccagcacaggatcc

SEQ ID NO: 17700 - DNA, 60 bp, Homo sapiens
gtagtgcgaatcatgggaggcggctggtggtgggctcgggccgctcgccttgcccgtctt

SEQ ID NO: 17701 - DNA, 60 bp, Homo sapiens
ggggcagcaggtggacttctcaatagttcttttccacattctctacaaatcacatctacc

SEQ ID NO: 17702 - DNA, 60 bp, Homo sapiens
tccaggttctcagcgtgcctctatgcctgtgtgactgctcagcctgccccattccaggca

SEQ ID NO: 17703 - DNA, 60 bp, Homo sapiens
cataccatgaatcattggaaggcagggactgtgacctactttccttttcatcctttcatc

SEQ ID NO: 17704 - DNA, 60 bp, Homo sapiens
cctggctcctctccctacttgttctgtgattgaaccaaggactccagattcacaaactgc

SEQ ID NO: 17705 - DNA, 60 bp, Homo sapiens
cgaagaagtcatccgcccgtcctcatctgcgtccgaagaagtcatccgccgtcctcatct

SEQ ID NO: 17706 - DNA, 60 bp, Homo sapiens
agacagggtcttactcttcctgatctccagattactctttgtagctggaaagctcctccg

SEQ ID NO: 17707 - DNA, 60 bp, Homo sapiens
ggattctttcctctgttccattagtctgtctgttcttgtgccaatatcaagctgtcttca

SEQ ID NO: 17708 - DNA, 60 bp, Homo sapiens
tactccaagatagtattcagttctcaagatggttcatcacatttgccaagtttttctacc

SEQ ID NO: 17709 - DNA, 60 bp, Homo sapiens
tcagaggtcaggaaggagaacttggggagggtgtgtgggaagaatggagaaattcaggct

SEQ ID NO: 17710 - DNA, 60 bp, Homo sapiens
ctgtgtggatactgtgagtgttcagctttatcgatgacctagccttggaccagatagctg

SEQ ID NO: 17711 - DNA, 60 bp, Homo sapiens
ctcgatagaaaggaagtggtcagatcatgccagccaaacaaatctgtcaggctttgaaat

SEQ ID NO: 17712 - DNA, 60 bp, Homo sapiens
gggatgccaaatgggtataggaaagagatgataaagatccccatgccagaactggagcgc

SEQ ID NO: 17713 - DNA, 60 bp, Homo sapiens
ccctgccactgccaggaggacggcatcatgctgtctgccgactgctcttgagcttgggct

SEQ ID NO: 17714 - DNA, 60 bp, Homo sapiens
caggttgggttaggatggctgccctctggacctgcccctgaacatttataaatgaaataa

SEQ ID NO: 17715 - DNA, 60 bp, Homo sapiens
gacaaaggagttcgggaaacacttcatcctgtacgcccatcctggacattcacagcacat

SEQ ID NO: 17716 - DNA, 60 bp, Homo sapiens
caccccgtcataagcagaaactagtgatcctggaaatgagatgggccttactctgtcgac

SEQ ID NO: 17717 - DNA, 60 bp, Homo sapiens
caagatgtgagcctgtgcctggctggtcttttcttgaggaaaatctgacctggcattttc

SEQ ID NO: 17718 - DNA, 60 bp, Homo sapiens
aacagagcctcagagaaattcaggacgcctttcagtgcaccagtgtacatgtaatgagaa

SEQ ID NO: 17719 - DNA, 60 bp, Homo sapiens; identical to SEQ ID NO: 4855

SEQ ID NO: 17720 - DNA, 60 bp, Homo sapiens
cacctgggcttcctagggctgcttctgagtggttctttcacgtgttgtgtccatagcttt

SEQ ID NO: 17721 - DNA, 60 bp, Homo sapiens
ttgcttctcccatcgcctcgccctctattgaacctaaatccctccaggaaggaattgtta

SEQ ID NO: 17722 - DNA, 60 bp, Homo sapiens
ggccttggtcggtggtggtacgtaactgtgcatttgtcaagactcagtgctatatgctga

SEQ ID NO: 17723 - DNA, 60 bp, Homo sapiens
caaaagcttaccaaatacatgtgattatgggaaggggccagaaagttacactgcaagtaa

SEQ ID NO: 17724 - DNA, 60 bp, Homo sapiens
acatacattgatacccaccctttccccctattaaacgtgataaagtaggcatttctgtat

SEQ ID NO: 17725 - DNA, 60 bp, Homo sapiens
ctgaccagtccaagccagaaaactgatcctgtaccaaagcttgagtgtcaggttcaggct

SEQ ID NO: 17726 - DNA, 60 bp, Homo sapiens
gattggtgcaagacccatctcttatgcattgaccatgaccatcagcaaagcctggtggtc

SEQ ID NO: 17727 - DNA, 60 bp, Homo sapiens
gtctgagactaaccgagtgctgaatagcaatgggcttcagtgtctggaatggctttctgc

SEQ ID NO: 17728 - DNA, 60 bp, Homo sapiens
ggggctggaaaagggttagaagcctcctagctgggattgtctttgtttcacctttcttta

SEQ ID NO: 17729 - DNA, 60 bp, Homo sapiens
accaaccaaaatctcgtattggcagatcttgacaggctggacctgcaagatgtggcttga

SEQ ID NO: 17730 - DNA, 60 bp, Homo sapiens
ctgctttgtatctgctttgtactgttggtgccttcttggtattgtaccccaaaattctgc

SEQ ID NO: 17731 - DNA, 60 bp, Homo sapiens
aaaagatagggaaaagggggaaacttctttgaaaaatgaaacatctgttacattaatgtc

SEQ ID NO: 17732 - DNA, 60 bp, Homo sapiens
gatctgtgttaaaaacctgcattgccaacattgcagctcgaacttaaacttgttattcaa

SEQ ID NO: 17733 - DNA, 60 bp, Homo sapiens
cagcatggaaggaattaggaccttttcttcaggattacaggtacactggatgcagccatg

SEQ ID NO: 17734 - DNA, 60 bp, Homo sapiens
ccctgctctctcagcggatctcctccctcacagcatcactacatgcacacagccgcaaaa

SEQ ID NO: 17735 - DNA, 60 bp, Homo sapiens
ggcatcatgcttttgtcagcatactcttgagcttttaagtctactatgtctgaactgtgg

SEQ ID NO: 17736 - DNA, 60 bp, Homo sapiens
tggctgtggaatgaccctgttctcaggaagaagtacccgggtgtcatctacgtccctgag

SEQ ID NO: 17737 - DNA, 60 bp, Homo sapiens
atgttatcagcacatggtttaggtgcaggcaaactaccatgcattagccagtctggccca

SEQ ID NO: 17738 - DNA, 60 bp, Homo sapiens
gccccactgtcatgcagaaacagactgggggaatggcagtttccctgagtcttggtttct

SEQ ID NO: 17739 - DNA, 60 bp, Homo sapiens
aagtcctcaggaagaggtctgctggcctctgtgtggggagagatcaggaatgttccagtt

SEQ ID NO: 17740 - DNA, 60 bp, Homo sapiens
gtcccacgtgattgctctgtgacaggagacaacacttccttcagaaaacgggaaacttcc

SEQ ID NO: 17741 - DNA, 60 bp, Homo sapiens
tatatgccaatttctccatcccctttcagccctagggaggagccactaacgtgctttctc

SEQ ID NO: 17742 - DNA, 60 bp, Homo sapiens
gcttatggttcaaaattcagcgtgcatgcatcaatgagaaggggagcgaccgatatagaa

SEQ ID NO: 17743 - DNA, 60 bp, Homo sapiens
gtcgttatcttcatggtagttgtgaatactggtacctgtgttcagttatctggtttgagc

SEQ ID NO: 17744 - DNA, 60 bp, Homo sapiens
cgtgcctcaccagatctttggccagaacaattaccaggtgttgctgaatttgcagcttcc

SEQ ID NO: 17745 - DNA, 60 bp, Homo sapiens
ccacaaggccaaaggcaaataatgtctccatagaatcactttccaatacaacggctcttt

SEQ ID NO: 17746 - DNA, 60 bp, Homo sapiens
gcgaagggcaagtagaagcctggattagtttgcagcaactcaatcccaaaggaaccaaag

SEQ ID NO: 17747 - DNA, 60 bp, Homo sapiens
aaatggtgtaaagtgttctcacgccctatgtggagcagaacctgaccaggagtggctgtt

SEQ ID NO: 17748 - DNA, 60 bp, Homo sapiens
ctaacgcctgaacaacacacccgcatcaactagagcttttgctttattttggtgcaattt

SEQ ID NO: 17749 - DNA, 60 bp, Homo sapiens
cgggcctgacaacacgcatacggttaaggcattgccacctacttcgtggcatctaaccat

SEQ ID NO: 17750 - DNA, 60 bp, Homo sapiens
atatgaggaaatatccccaaacatcgtcatccccactgggatcctccacatgagtgtggg

SEQ ID NO: 17751 - DNA, 60 bp, Homo sapiens
gcaatggcactggaatgctgtatggagatgaagcaaaactaaacggcttttacaccacat

SEQ ID NO: 17752 - DNA, 60 bp, Homo sapiens
cactccagtctctgaaaccatctaccctatgtgtctgtgtggccttcacatggcattcct

SEQ ID NO: 17753 - DNA, 60 bp, Homo sapiens
cggtaaagctcgcgccaaggcaaagactcggtcttctcgtgcaggtttgcagtttcctgt

SEQ ID NO: 17754 - DNA, 60 bp, Homo sapiens
aagagccagacccatttgtgagagcctccactcctccctgcaagcgctgacagcctcaga

SEQ ID NO: 17755 - DNA, 60 bp, Homo sapiens
gctgtcaccaagtatacaagctccaagtaaatgtgtgcttaggtgctttaaaactcaaag

SEQ ID NO: 17756 - DNA, 60 bp, Homo sapiens
actggcatctgtcgtcatccacggataattaccaatcagcagagaccttcccactacctc

SEQ ID NO: 17757 - DNA, 60 bp, Homo sapiens
ttgactgttttggggcttttcaggaatcacttaaaaagcaccaagttcacagccaggcac

SEQ ID NO: 17758 - DNA, 60 bp, Homo sapiens
attactgaacaaccaaatctaccctccacggccctgaggccttatcagttccactgatta

SEQ ID NO: 17759 - DNA, 60 bp, Homo sapiens
ccttatggcacagaccaaatacttagtgcatggctgagtttctacaattcaaggagccaa

SEQ ID NO: 17760 - DNA, 60 bp, Homo sapiens
accagtcaaatctgctccagtccctaaaaaaggctccaagaaggccattaacaaggctca

SEQ ID NO: 17761 - DNA, 60 bp, Homo sapiens
gccaagcacgctgtgtcagagggcaccaaggccgttaccaagtacaccagctccaagtaa

SEQ ID NO: 17762 - DNA, 60 bp, Homo sapiens
gtccaaggctatggggattatgaactccttcgtcaacgacattttcgagcgcattgcagg

SEQ ID NO: 17763 - DNA, 60 bp, Homo sapiens
tgaactgcttattcgtaaactacctttccagcgcctagtgcgcgagattgcgcaggactt

SEQ ID NO: 17764 - DNA, 60 bp, Homo sapiens
cccggtctatggtatttttgttagtagcagccagaactaagacatctgtgctaaggcatc

SEQ ID NO: 17765 - DNA, 60 bp, Homo sapiens
cctctgcgtcttcagcctatttccctgggcagttaccaaacagttaattctagtgtcatg

SEQ ID NO: 17766 - DNA, 60 bp, Homo sapiens
acagctcgcagtagctggtgttagatgaggaaagccacttctccagacagctcttatgca

SEQ ID NO: 17767 - DNA, 60 bp, Homo sapiens
gcttctttcccgagcttggaacttcgttatccgcgatgcgtttcctggcagctacattcc

SEQ ID NO: 17768 - DNA, 60 bp, Homo sapiens
cttcagtgattagggtgaggcacaaagagtttcttgatcatccagagaacattgacagac

SEQ ID NO: 17769 - DNA, 60 bp, Homo sapiens
tctaccggcggcaaagctccgcgcaagcagcttgctactaaagcagcccgtaagagcgct

SEQ ID NO: 17770 - DNA, 60 bp, Homo sapiens
aagaagaaagacccctgaggggagacgtgtgaccctctccaggatttgaggggcttaaga

SEQ ID NO: 17771 - DNA, 60 bp, Homo sapiens
tggatttccctgaacttaattatcctggggactgggggccaaagggtcaccgataaactc

SEQ ID NO: 17772 - DNA, 60 bp, Homo sapiens
atccgcaagttgcctttccaacgcctggtgcgagaaatcgctcaggacttcaagacagat

SEQ ID NO: 17773 - DNA, 60 bp, Homo sapiens
tgtcactattatgcctaaggacatccagcttgcgcgtcgtatccgtggcgagcgagcata

SEQ ID NO: 17774 - DNA, 60 bp, Homo sapiens
gcggtaatggcgctgcaggaggcttgtgaggcctacttggtagggctctttgaggacaca

SEQ ID NO: 17775 - DNA, 60 bp, Homo sapiens
tggctttggcggttaaggttgctgatttctccacagcttgcatttctgaaccaaaggccc

SEQ ID NO: 17776 - DNA, 60 bp, Homo sapiens
caggagaaagagtagtagtcactgctaaaagtgtagtttcacgtgtttagtagctccggt

SEQ ID NO: 17777 - DNA, 60 bp, Homo sapiens
tcctggagaagaaatggcttttccattccttattaggctcatgtctttggaactagcccc

SEQ ID NO: 17778 - DNA, 60 bp, Homo sapiens
tgtaaacatacccctgtccttagctgatctaggtggaagcccagcttcatgtgctagggg

SEQ ID NO: 17779 - DNA, 60 bp, Homo sapiens
cgatcgcaaacattcacaggaaaagatggtggaaatggtttgggaataccagcagccttt

SEQ ID NO: 17780 - DNA, 60 bp, Homo sapiens
gagctgaaatgcgttgcgagaatgagtttggatgacagaaataaccgtgacagcctgcat

SEQ ID NO: 17781 - DNA, 60 bp, Homo sapiens
accggccattcggcgccttgctaggcgtggtggggttaagcgaatttccggtttgattta

SEQ ID NO: 17782 - DNA, 60 bp, Homo sapiens
cggcggctaatgctaccgcttaaacgactcagcatctcgacttcccaaatcaaaggccct

SEQ ID NO: 17783 - DNA, 60 bp, Homo sapiens
gcgttaagcgcatctcaggccttatatacgaggagacacgcggagttcttaaagtgtttt

SEQ ID NO: 17784 - DNA, 60 bp, Homo sapiens
ggtgccaagtgccatcgcaaggtactgagcgataatattcagggcattaccaagtgcact

SEQ ID NO: 17785 - DNA, 60 bp, Homo sapiens
gattcattcctgtgtagacactgtcaagtgtctgtatgtattgaaagtgtactacatggc

SEQ ID NO: 17786 - DNA, 60 bp, Homo sapiens
cgtcagaaagtctcggactcctctctgcttgcatgtgtaaagttttcattttcaggggcc

SEQ ID NO: 17787 - DNA, 60 bp, Homo sapiens
gactcacaattacatcattgactgctaacattaagacacatttcctctcatagacagatg

SEQ ID NO: 17788 - DNA, 60 bp, Homo sapiens
gcagaccctaacagaaaagctacagtgtgtttttgcagctatgaagtgaatggtttcctg

SEQ ID NO: 17789 - DNA, 60 bp, Homo sapiens
gggcacgggggttgcaaaacacaagggtcggggccacggtctaacggggcaaggggcaaa

SEQ ID NO: 17790 - DNA, 60 bp, Homo sapiens
gaggcagcctcagagggtgaacagtatagactttgtagaattggagcaccttcaacctga

SEQ ID NO: 17791 - DNA, 60 bp, Homo sapiens
ggggcctctatacactctggggagtatctattctcaggtgagcaaaataccgaatactga

SEQ ID NO: 17792 - DNA, 60 bp, Homo sapiens
cactctccctaagctggtccttccctccaaatcctgccttaaacacactcagaaggtaga

SEQ ID NO: 17793 - DNA, 60 bp, Homo sapiens
cagcctaaactttcctctaagaaacccagcctactcttgtgtcagactgctgaaggcagc

SEQ ID NO: 17794 - DNA, 60 bp, Homo sapiens
atgacattacccttctacatttctttttccatattttcactattggcatgtatttgtccg

SEQ ID NO: 17795 - DNA, 60 bp, Homo sapiens
agatagcatagctaggtgggcctacctggtcgtatcaacacactttcagatagatgcttc

SEQ ID NO: 17796 - DNA, 60 bp, Homo sapiens
atacagtcctctcagccagttctagttattgcagtggtgtgtaaaacaacataggcaata

SEQ ID NO: 17797 - DNA, 60 bp, Homo sapiens
ctctggtgcagcttgaatcttggtagcaaaacagtgacttcatcagaaaattttgtcact

SEQ ID NO: 17798 - DNA, 60 bp, Homo sapiens
caacaggacctctgttaagtccacccaccacacgccactgcagcaagcattaccatgctt

SEQ ID NO: 17799 - DNA, 60 bp, Homo sapiens
ttccctatccatgtgaaaacagccacgagaggtgaacctggaaaagctgggtatggagac

SEQ ID NO: 17800 - DNA, 60 bp, Homo sapiens
ccaagactcatagcaaacctgggcttagcatgccctttaatgctctaatgctgagacagc

SEQ ID NO: 17801 - DNA, 60 bp, Homo sapiens
tttcggcctagctagatcattgaagagccttgaaagttatctaaagtatggcttaatgta

SEQ ID NO: 17802 - DNA, 60 bp, Homo sapiens
tattttggtctgtgacttctagcccaatgcctggccccaattacactgtggcctatggtg

SEQ ID NO: 17803 - DNA, 60 bp, Homo sapiens
ggatttgtatgggatggttacagacacataaacatacttgtataggcccaaactggctcc

SEQ ID NO: 17804 - DNA, 60 bp, Homo sapiens
gtctttgctgcgcatcaggtgctttaagcttcggaacaactgtgcaggattctattttag

SEQ ID NO: 17805 - DNA, 60 bp, Homo sapiens
actcggactcagtccagaggtagcttattgccaaagcccaagcctacaacaaccctatct

SEQ ID NO: 17806 - DNA, 60 bp, Homo sapiens
gctttctaccccaggttcctttccttactgaaaagtcttgagcaaacagttgccgctctc

SEQ ID NO: 17807 - DNA, 60 bp, Homo sapiens
cccagtgcctctctctctgagtgtcctacgtttcagtcagggttgtgttctttcatgcat

SEQ ID NO: 17808 - DNA, 60 bp, Homo sapiens
tggtagagtaaatggggtcagatgttaacctttggaaaatctatgtggaggtatatggat

SEQ ID NO: 17809 - DNA, 60 bp, Homo sapiens
ggagagaaacctgtgtgccacaacatacagtgtccttgcttatgtggggtcgaagacatc

SEQ ID NO: 17810 - DNA, 60 bp, Homo sapiens
agcatggtctaacacagggataggaaaatgtatctgtcccagtatcgtttaacccagggc

SEQ ID NO: 17811 - DNA, 60 bp, Homo sapiens
actcacaccaggtgctccttctgtgcaggcgtgcgttactgtctgaaccatagacgcgca

SEQ ID NO: 17812 - DNA, 60 bp, Homo sapiens
ttttggcctgtttgcagcctctcctagccacagacagacactgtctcctctcagagaaag

SEQ ID NO: 17813 - DNA, 60 bp, Homo sapiens
ctggaggtccaggtctcctgcttaggaactcaagaaaagttgaagcttgaaaagtgggca

SEQ ID NO: 17814 - DNA, 60 bp, Homo sapiens
agggctggggaagatgctgcgtccagcgttaccgtggctgtaccttggcctctgcagcct

SEQ ID NO: 17815 - DNA, 60 bp, Homo sapiens; identical to SEQ ID NO: 4855

SEQ ID NO: 17816 - DNA, 60 bp, Homo sapiens
caaatgtccttctaatcatcctttgtatttccttactagtctaaatagcaaaggatatcc

SEQ ID NO: 17817 - DNA, 60 bp, Homo sapiens
gtggaaaatctctgaaatattacctgcctatgtagatgccaacccttcagcaatccagac

SEQ ID NO: 17818 - DNA, 60 bp, Homo sapiens
atgttatgcctctgatacaaaggcaacatttcaagctgttgaagcctaaagctatcttgc

SEQ ID NO: 17819 - DNA, 60 bp, Homo sapiens
cgtgcacatcttctcctcacctaacaaagcatagaaggatacggcatttctcactctgtg

SEQ ID NO: 17820 - DNA, 60 bp, Homo sapiens
agaaacaaagggatacttttagaagactatttctctaggggtgaccctatgcacagaggc

SEQ ID NO: 17821 - DNA, 60 bp, Homo sapiens
gggagagggtgtccaatgttttgtgaacagctctttgagacaatgctgctggaaccatcc

SEQ ID NO: 17822 - DNA, 60 bp, Homo sapiens
gtgctcgtctgtacaatcgctaatttactcagtttagagtagctacaactcttcgatact

SEQ ID NO: 17823 - DNA, 60 bp, Homo sapiens
acgttctcctgcccccgtcaccttgtctcttctaactcattagcctttccttcctttgtc

SEQ ID NO: 17824 - DNA, 60 bp, Homo sapiens
ttccaccattcgctagctggccatccacttggagtcagcagtgcttcctgtggtgagtgt

SEQ ID NO: 17825 - DNA, 60 bp, Homo sapiens
aatgagaccacggagacccagaggaccctcctcaatggagacctccaaaccagtatctga

SEQ ID NO: 17826 - DNA, 60 bp, Homo sapiens
ggcacttgatgtacattcgcgttccatcttcgtaaaaagcctgtggaataggtaggtatt

SEQ ID NO: 17827 - DNA, 60 bp, Homo sapiens
gctgtgggaacatgtcagtgcaggcacttcagagcttaccttatgtgttcattccacctg

SEQ ID NO: 17828 - DNA, 60 bp, Homo sapiens
ccgggtactacatttccatcccttccctattttgacaccaaattatggtgtagacagccc

SEQ ID NO: 17829 - DNA, 60 bp, Homo sapiens
agacgcacgaccacagcgaacaacaagacaaagtctgggcggccgaaagttacaacactg

SEQ ID NO: 17830 - DNA, 60 bp, Homo sapiens
gcttcctataggcaggagctcttcaatgtgtctgacaaatctcatctatcctttaggtcc

SEQ ID NO: 17831 - DNA, 60 bp, Homo sapiens
ctgaaacgtttgagatgaagaaagttctcctcctgatcacagccatcttggcagtggctg

SEQ ID NO: 17832 - DNA, 60 bp, Homo sapiens
catttgttctctgttctatgattctgataactcctgggctatgtggggccctgttctgtg

SEQ ID NO: 17833 - DNA, 60 bp, Homo sapiens
acacggtaaacaactaagggagtcaggatctatgcccaggaagatctgcaccacagtcag

SEQ ID NO: 17834 - DNA, 60 bp, Homo sapiens
gagcagtactttgataaagcacaaaatacaaattccctctggcacagtggggatgtgtgg

SEQ ID NO: 17835 - DNA, 60 bp, Homo sapiens
gttgatggtaaggccccaagaagagagtgaggtttagacattctgtgttttgccctcagg

SEQ ID NO: 17836 - DNA, 60 bp, Homo sapiens
atatctacaccatgaggtgtggtaagcaccactcggagggtgtctttcaatccaggggag

SEQ ID NO: 17837 - DNA, 60 bp, Homo sapiens
ttgggcctgagtcctccacatcattcagcagatggtgggtggttggagagttgagtgatg

SEQ ID NO: 17838 - DNA, 60 bp, Homo sapiens
agaaagaaagaaaggtaggcaggcattggtggtattttgataggaactctactgaatctg

SEQ ID NO: 17839 - DNA, 60 bp, Homo sapiens
acataactggttggttacattttgcatccagtgagtaacaccatcatcttcttagtttct

SEQ ID NO: 17840 - DNA, 60 bp, Homo sapiens
aaacccctcggatcacgtcattacatcctatagggctcatggtgtgtgctatactcgggg

SEQ ID NO: 17841 - DNA, 60 bp, Homo sapiens
gcacctgcatatctctgtgacatggtcacttagagcttatcttccctatgaatctccaga

SEQ ID NO: 17842 - DNA, 60 bp, Homo sapiens
ccccattgcacttaggttttccaacttgatggcagcagtttccacatccttgacatctat

SEQ ID NO: 17843 - DNA, 60 bp, Homo sapiens
gaaccaacattccacgagggggagtgtccggaagggcgacaatacacgggggatcttata

SEQ ID NO: 17844 - DNA, 60 bp, Homo sapiens
ggtaccagttctgtaccatatgagaaagttgccttcagaaggtgggaagatcattgttcc

SEQ ID NO: 17845 - DNA, 60 bp, Homo sapiens
atcagtctatactgagccacctctggtagatcaaaccgttcctcaatgctacagtgaggt

SEQ ID NO: 17846 - DNA, 60 bp, Homo sapiens
cactcttgacctggagccatcttcctagtgggccacccctaatcactattgcttcctaaa

SEQ ID NO: 17847 - DNA, 60 bp, Homo sapiens
gatccagtaagagctatggtgtctttgtgcctgcactagagggcctcagaaaagtgtacc

SEQ ID NO: 17848 - DNA, 60 bp, Homo sapiens
cagctgcctctgccaggagtctaccaaatgaagaaatagtgcagaagatagaggaagtac

SEQ ID NO: 17849 - DNA, 60 bp, Homo sapiens
ggagagaaacaagatggttaggggacagtgatgagacttactttttaccacatactcttt

SEQ ID NO: 17850 - DNA, 60 bp, Homo sapiens
cccgtaagtaataactgcaaccaatcagtgttattcagtgctatgcctccttgtaatggg

SEQ ID NO: 17851 - DNA, 60 bp, Homo sapiens
ccactggtggatatttcctcacagcagaggacacaattgcatgtgctgggtacagtacct

SEQ ID NO: 17852 - DNA, 60 bp, Homo sapiens
gctatgacacatagattgagctacaccacgaatctctccatgtaacccaggaacccaagg

SEQ ID NO: 17853 - DNA, 60 bp, Homo sapiens
ccaagcctaagtcggggaagccgaaggttacaaaggcaaagaaggcagctccgaagaaaa

SEQ ID NO: 17854 - DNA, 60 bp, Homo sapiens
ccagatctctttccccaagttgctattgtaagagtattctgctgcgtgtggatgcagtta

SEQ ID NO: 17855 - DNA, 60 bp, Homo sapiens
caggcatgatgtttcatacctgcagtcccagctatgtgaaagctaaggtggaagatttgc

SEQ ID NO: 17856 - DNA, 60 bp, Homo sapiens
acatccatattattgtgttatcaccataagtggtgatattccactatcaccgtaagtgga

SEQ ID NO: 17857 - DNA, 60 bp, Homo sapiens
acgaagttggcgggagcctataaaagctggtgccggcgcgacccgcggacacacagtgca

SEQ ID NO: 17858 - DNA, 60 bp, Homo sapiens
agcaactattagcacaagaacgcgggcaatgtggcctggaacaactccagcttcgcctaa

SEQ ID NO: 17859 - DNA, 60 bp, Homo sapiens
tgatgtttgtcccaccacgaggatcccgttcatttgagcaagtgcagatgtgtgtctggt

SEQ ID NO: 17860 - DNA, 60 bp, Homo sapiens
caacagagctatataaatgtgctcctatgtattcccttaaagcccatcttctttctacta

SEQ ID NO: 17861 - DNA, 60 bp, Homo sapiens
ctgctgaatcagtagcaccaacatgtgtacccaccaccttctcaagtgtggctttataag

SEQ ID NO: 17862 - DNA, 60 bp, Homo sapiens
caaagggccaaatttccccaaactgaacgggctcaggaaatgttcctttacactcagaac

SEQ ID NO: 17863 - DNA, 60 bp, Homo sapiens
ctgactgtagggactatattcattactgctggactatgctgctttccccaaccccctagg

SEQ ID NO: 17864 - DNA, 60 bp, Homo sapiens
ttcttaaagccttatttttcaaaagcgccccccccattcttgttcagattaagagttgcc

SEQ ID NO: 17865 - DNA, 60 bp, Homo sapiens
gcccccacctgcctctccctggttcccacagtgttagcgtccctgaaaagacaatattct

SEQ ID NO: 17866 - DNA, 60 bp, Homo sapiens
gtgcagggaccatgaataggggaatgtcgctgtgtagcacataatacgtgaacaagactg

SEQ ID NO: 17867 - DNA, 60 bp, Homo sapiens; identical to SEQ ID NO: 14337

SEQ ID NO: 17868 - DNA, 60 bp, Homo sapiens
gtctgagaaacaataggaaagccagagaaactattacagccacaaggagcattaggagac

SEQ ID NO: 17869 - DNA, 60 bp, Homo sapiens
gccttggtgtctgtcctaattcctttctcactcaccgatgctgaatacccagttgaatca

SEQ ID NO: 17870 - DNA, 60 bp, Homo sapiens
gcacagcctgtctcttcacatgagtcagacgtgcagggtaggatcagaaggagatactct

SEQ ID NO: 17871 - DNA, 60 bp, Homo sapiens
atcaatgaagagttccttctcagtttctagcatatgatgattagaaaagagttcttaaaa

SEQ ID NO: 17872 - DNA, 60 bp, Homo sapiens
tcaacagaccgatgctcgcaaaagaggcgctgttctctgcagcaaagagcctcatacatt

SEQ ID NO: 17873 - DNA, 60 bp, Homo sapiens
gggattcgagtgtgcattgtggagatgggactgggtctcgatcttgaagagtggatggat

SEQ ID NO: 17874 - DNA, 60 bp, Homo sapiens
ttctgcatgactctttccagaatgtggctgctgtctgtgatttgctcagcattgtctgca

SEQ ID NO: 17875 - DNA, 60 bp, Homo sapiens
ctactctaagtgatgggtcctgtaaccctgatctattggaggttaaactgagattcagag

SEQ ID NO: 17876 - DNA, 60 bp, Homo sapiens
ccccagcaacatgtgtgacttacaggaggagtacgattcaagatgagatttggggccagg

SEQ ID NO: 17877 - DNA, 60 bp, Homo sapiens
tcccaaactactgctgttaccagcaagtgatcaggaagactaggagctatttctgactgt

SEQ ID NO: 17878 - DNA, 60 bp, Homo sapiens
ccttggacaaggcttctggcctcggcgtctgtcaagcagaagggatgtttgtcacttgtt

SEQ ID NO: 17879 - DNA, 60 bp, Homo sapiens
ttttgcaatgggacaaatttaaagccagttgtctttcatcctgagtggttctctcactct

SEQ ID NO: 17880 - DNA, 60 bp, Homo sapiens
cagccgccatcagcccaacgggaagcaacctcccaacccagaggaggcagaataagaaaa

SEQ ID NO: 17881 - DNA, 60 bp, Homo sapiens
atgtcttaccctgccaagcacattgtctggcacgtagtagctgttcagtagaggaagtgg

SEQ ID NO: 17882 - DNA, 60 bp, Homo sapiens
taggtttcgtgcttctaggacagggaaggatagggagaagtgggaggactttgagggact

SEQ ID NO: 17883 - DNA, 60 bp, Homo sapiens
actcacagtacccagcagtctgagttcttcagataggcacaaagaaacgagaagttacat

SEQ ID NO: 17884 - DNA, 60 bp, Homo sapiens
gacttatctggaggtgagcaaagtatgtttggtagtgaggtcacaaaggcaatcagcccc

SEQ ID NO: 17885 - DNA, 60 bp, Homo sapiens
cttaaattccctcacttttcatttattagggggtaagaaagatcccactgttttactcat

SEQ ID NO: 17886 - DNA, 60 bp, Homo sapiens
ggagggcctgaactgttacacaattcccaagggccaccattaacactgtactctacattt

SEQ ID NO: 17887 - DNA, 60 bp, Homo sapiens
caggattgtgaatttgtgactgcagctttaggcgtatcccaaggttttcagtactagttt

SEQ ID NO: 17888 - DNA, 60 bp, Homo sapiens
ttcatttctctagggtatgcctcagagtggacttgtaggattgggttagactatgcattt

SEQ ID NO: 17889 - DNA, 60 bp, Homo sapiens
atcacccatctgttgtggaagatctgtcacctggggttcaactggatcaggagggaaaca

SEQ ID NO: 17890 - DNA, 60 bp, Homo sapiens
ctagaacatgtgtctacttggagaaccgaagcccaggcaaatcagatctctctgccacgc

SEQ ID NO: 17891 - DNA, 60 bp, Homo sapiens
ctcgttgttctgtgtgcattggggacatggaacggaacttgtgttttctgagtgagggag

SEQ ID NO: 17892 - DNA, 60 bp, Homo sapiens
acaagggaaattatttggtattatgttttggattatgttctctccatagataaaagacgt

SEQ ID NO: 17893 - DNA, 60 bp, Homo sapiens
ggctggtccgatggtagtgggttatcagaacttattaacattagtgtcactaaagttggt

SEQ ID NO: 17894 - DNA, 60 bp, Homo sapiens
tagaaaataccttcaagagcaggcctaccgcctgcagcagggtattgtcaccagcaccac

SEQ ID NO: 17895 - DNA, 60 bp, Homo sapiens
atctaattatccagctcaaaaacagcaaattaatcctcacccacctctgtaaacagaagg

SEQ ID NO: 17896 - DNA, 60 bp, Homo sapiens
caccggcttcagtagttaccaactcatggcctcctgttgcatttctaacgttcatgttca

SEQ ID NO: 17897 - DNA, 60 bp, Homo sapiens
ataattgcaatccccgatccccatcacgaatccccgatccccatcacgaatggggttcaa

SEQ ID NO: 17898 - DNA, 60 bp, Homo sapiens
gatgactgattacctgagaaataattgatgaaatctcaagaaaattcctctagatagtca

SEQ ID NO: 17899 - DNA, 60 bp, Homo sapiens
ggcaagaaagtagctgcaaaagcatatgggcccgaagaaggagttgaaaacaaacatgtt

SEQ ID NO: 17900 - DNA, 60 bp, Homo sapiens
aatggaacacagccatccatgcttatgtaagtgtgcatattctctggctgttttcactgc

SEQ ID NO: 17901 - DNA, 60 bp, Homo sapiens
atcttggatgcactctcacattgcctcataaactggctcaccatttcagcagacgtggca

SEQ ID NO: 17902 - DNA, 60 bp, Homo sapiens
gggcccctataaggaggagataatagaaagaagggggcgttaaaggcgtggtgggaaggg

SEQ ID NO: 17903 - DNA, 60 bp, Homo sapiens
gaacttgatggagcatgggcagatttcagtgatacgagaaaggggactggtcatctatag

SEQ ID NO: 17904 - DNA, 60 bp, Homo sapiens
gaagtcctgccatttcacatctaataagtacatgggaaagatgctaatggttgactttgc

SEQ ID NO: 17905 - DNA, 60 bp, Homo sapiens
ggactacagtcatccctcagtatatgtgaggaattcattccaggaaccattccccttctt

SEQ ID NO: 17906 - DNA, 60 bp, Homo sapiens
cctactttatctctccttgcttttctcacctctcacttacccccattccctattacccta

SEQ ID NO: 17907 - DNA, 60 bp, Homo sapiens
tagatgatgttatcaggaagccaggttcccaccagagtcggtgcttggtacctggtctct

SEQ ID NO: 17908 - DNA, 60 bp, Homo sapiens
agtttctagagttgtgagaaaaccagagagtggctgtcctgattcttcactgtgaggggc

SEQ ID NO: 17909 - DNA, 60 bp, Homo sapiens
catgtttattaatttgtcccattgcaggatatgtttctgttgtccgcatgggtagagata

SEQ ID NO: 17910 - DNA, 60 bp, Homo sapiens
ttaatagcagggaagaaggtacttcaaagactctgcccctgaggtcaagagaggatgggg

SEQ ID NO: 17911 - DNA, 60 bp, Homo sapiens; identical to SEQ ID NO: 4855

SEQ ID NO: 17912 - DNA, 60 bp, Homo sapiens
aaacaagaaacctatcaaaacttccgagatacagtaaaagcagtgctgtgaggaaagttt

SEQ ID NO: 17913 - DNA, 60 bp, Homo sapiens
ctttgttatcgagtttgctgaattcttttgaacgatgatcttaaaggcacaaacaccacc

SEQ ID NO: 17914 - DNA, 60 bp, Homo sapiens
acatagaatatcatacatttgagatttttgtacttgcttaaaggaaaccaacaggaagac

SEQ ID NO: 17915 - DNA, 60 bp, Homo sapiens
gatggaaaaggccaagccatttttagggtgctgttgggagcagtgaaaaggtcacaccct

SEQ ID NO: 17916 - DNA, 60 bp, Homo sapiens
gctgcatagtttgtagtagtggggatttggagatagcctagctaaatatccatcactggt

SEQ ID NO: 17917 - DNA, 60 bp, Homo sapiens
tggcactgtcaacagattacttgtgaacaagatcactttgtacgcttaagtctgcgatgc

SEQ ID NO: 17918 - DNA, 60 bp, Homo sapiens
ccatccattttcttgtttggtacttacaacaatcctgtgagataagtaagatgagtattc

SEQ ID NO: 17919 - DNA, 60 bp, Homo sapiens
acagaagccgctagtaagtcgccaagacctacagcaggaattctgcaccaaagggcataa

SEQ ID NO: 17920 - DNA, 60 bp, Homo sapiens
gaagactgaggaggcttcacgagcatgtcaggtgatttatggcaggcttgaattggagct

SEQ ID NO: 17921 - DNA, 60 bp, Homo sapiens
caacatggcgtcttcgggagctggtgaccctctggattctaagcgtggagaggccccgtt

SEQ ID NO: 17922 - DNA, 60 bp, Homo sapiens
tcctatctcctgtctctgggatcacatcatactgcctccaagaatcctgtccttaacccc

SEQ ID NO: 17923 - DNA, 60 bp, Homo sapiens
cccaggataaggcggcagaggctacaaatgactatgagactcttgtaaagcgtggaaaag

SEQ ID NO: 17924 - DNA, 60 bp, Homo sapiens
gcaaagcaccatgggggtggctggacaggcttgttggagtcgtataatgcaatgaataaa

SEQ ID NO: 17925 - DNA, 60 bp, Homo sapiens
ttgtcctgagttctacagtatgtgaacaatatcgtgtgaagtgtgtttttgcatttgtgc

SEQ ID NO: 17926 - DNA, 60 bp, Homo sapiens
ttccgttcggcttttgctttgcgttagggtgaagaccctagcgtccagctcccctcaacg

SEQ ID NO: 17927 - DNA, 60 bp, Homo sapiens
aaccaggacatgagccggcagtacgagcagatgcataaggagctgacagacaagctcgag

SEQ ID NO: 17928 - DNA, 60 bp, Homo sapiens
tttgatgatgctggaggtgaaggtgtgaccagccacgtggatgatgaataccgatgggca

SEQ ID NO: 17929 - DNA, 60 bp, Homo sapiens
gtttcgggtttgacttgagacaagcagcccttgcaaactcctttagtgagtcagagaaat

SEQ ID NO: 17930 - DNA, 60 bp, Homo sapiens
ggactctcacaattagcagagatgcagagtgacctaatccaacatcccagctgaaacgtg

SEQ ID NO: 17931 - DNA, 60 bp, Homo sapiens
gtcaactttggaggagaactgatttggcttgagttttctcagacatgggaacttttgacc

SEQ ID NO: 17932 - DNA, 60 bp, Homo sapiens
gacgtgtgccacacatagtagctcatagttcactgggaacgcagttacttgttcagtctg

SEQ ID NO: 17933 - DNA, 60 bp, Homo sapiens
ataaatattcctatcagcccaagaagtctgtccaaccccaaaaggtcttttcagagcccc

SEQ ID NO: 17934 - DNA, 60 bp, Homo sapiens
agtcgtacaagccaatctgcatttcctctagtggaaactgtatagctggtcatctttcca

SEQ ID NO: 17935 - DNA, 60 bp, Homo sapiens
tgtttcctgccctcctacttagactgggatctggtttccctcagctggttcccttgctag

SEQ ID NO: 17936 - DNA, 60 bp, Homo sapiens
ctcaggaaacatggacagtagactctctagggctaacagtgagttgactctggactgcta

SEQ ID NO: 17937 - DNA, 60 bp, Homo sapiens
cttcttccacgacatcctgcacaccaagtaccgcgcagccaccgacgtctatgccctcat

SEQ ID NO: 17938 - DNA, 60 bp, Homo sapiens
tttcttgaacacaggctttgtctgaatgatgttcttttatctcttgaacacaagctttga

SEQ ID NO: 17939 - DNA, 60 bp, Homo sapiens
ggaatcagatgggatggctgcacggcgtggtgaaggtactgaacgccacctcactgtaag

SEQ ID NO: 17940 - DNA, 60 bp, Homo sapiens
ctggaaaagaacctccagtagggaccactacatctactcagaacaagccaatgacctggg

SEQ ID NO: 17941 - DNA, 60 bp, Homo sapiens
gtgagatgggaactgttatgcctggcttactaagagtcttgtgagagactgagaagttga

SEQ ID NO: 17942 - DNA, 60 bp, Homo sapiens
tttaaatcagctctagtggctagtaaggtgagctggatcttcctgcccactctcttaaaa

SEQ ID NO: 17943 - DNA, 60 bp, Homo sapiens
gtgcccttgctcgccctgtattgaccaaggagcagctggacaaccaattggatgcatata

SEQ ID NO: 17944 - DNA, 60 bp, Homo sapiens
gaagacctggccaacctgtccagctcaattatccagcagttctttgacctcactgagatc

SEQ ID NO: 17945 - DNA, 60 bp, Homo sapiens
ctagaggactgtaaactatgaactaaaaaatgggctctgaccagacaccaaatctgcaag

SEQ ID NO: 17946 - DNA, 60 bp, Homo sapiens
actcttgttggcctgggaacttcttggaactttaactcctgccagcccttctaagaccca

SEQ ID NO: 17947 - DNA, 60 bp, Homo sapiens
caagtgtaagcatggacactggcaaccctgctcccacctgcaccctgccacaggtacaag

SEQ ID NO: 17948 - DNA, 60 bp, Homo sapiens
tgtcagctatccaggctcatgtggtgcctgtgatggtgttacactgttggaagagcaaac

SEQ ID NO: 17949 - DNA, 60 bp, Homo sapiens
ctggctctgtgccaagcccttcaaagtcatctgtatcttcgtctctttcctcagctttga

SEQ ID NO: 17950 - DNA, 60 bp, Homo sapiens
gaatgccacatacccaaacctatgggagacagctggcactattctcatagccttaaatgc

SEQ ID NO: 17951 - DNA, 60 bp, Homo sapiens
acatagggcaagttccagaagggtccaggagcttcagtccccatggagttggggtatata

SEQ ID NO: 17952 - DNA, 60 bp, Homo sapiens
ctgttttggaacctcctcatacttgcacaaaaaaattcctcttgtacaaaggcttttctc

SEQ ID NO: 17953 - DNA, 60 bp, Homo sapiens
ggaggtcctgaataaccatggtggctgctgtttgtcatcagacaatagaattgtctttac

SEQ ID NO: 17954 - DNA, 60 bp, Homo sapiens
ccggctccttcaacaagcaagattcaaaagctgacgtctcccagaaggcggacctggaag

SEQ ID NO: 17955 - DNA, 60 bp, Homo sapiens
tggtgcagctcttaggagctctcacaggatgtgttcagcatatctgtgccacacaggaat

SEQ ID NO: 17956 - DNA, 60 bp, Homo sapiens
tctcactggatctgatgcgacttgagagcgatggggagacaggatgtgccgcagagtcct

SEQ ID NO: 17957 - DNA, 60 bp, Homo sapiens
cttctgtggtcatactgccttctctcgtctgtaacctgaccctcatgcatccctcttttc

SEQ ID NO: 17958 - DNA, 60 bp, Homo sapiens
ctccacagctaagtgagatgcctcacaccattaggtgatgctttggacagaacagagtat

SEQ ID NO: 17959 - DNA, 60 bp, Homo sapiens
ccagccttcattagtatggcggcaagtttaatgcagaaccctcaagttcaacagctaatg

SEQ ID NO: 17960 - DNA, 60 bp, Homo sapiens
gcagagggtgctaattctataaaagagaccatgttgggaatgaagtttttggtgtcacca

SEQ ID NO: 17961 - DNA, 60 bp, Homo sapiens
agtctttttgtctatgtatttctgtttctgtttgtgtgtctggtggtatgggtatgtaat

SEQ ID NO: 17962 - DNA, 60 bp, Homo sapiens
ctctagttccaggtttgcctcgcttcccctctgagggtgttctggagaagcagtgctttt

SEQ ID NO: 17963 - DNA, 60 bp, Homo sapiens
ccaccaacactacggtgaccccaaccccaacaccaaccggcacaccgagtacaaccctga

SEQ ID NO: 17964 - DNA, 60 bp, Homo sapiens
taggattgaagcctgcatgtggggtatcggtacagcaatcggagagctgcctccatattt

SEQ ID NO: 17965 - DNA, 60 bp, Homo sapiens
gagagaccttccagcaggggtcaacagacatctggtgggtgcccgtctgagacgaagctt

SEQ ID NO: 17966 - DNA, 60 bp, Homo sapiens
gcctggctgtcgtatcggtaatttggtgaatgttgcttaagatcagcctggaaaggtagt

SEQ ID NO: 17967 - DNA, 60 bp, Homo sapiens
ctggaggctttgtcaacattttgggctttcctgtaccgaacagatttgcttgttgggtcg

SEQ ID NO: 17968 - DNA, 60 bp, Homo sapiens
aaaaatgtcaccaatggatttgctccatgcagggatgctagaaaccttcagtttgttaaa

SEQ ID NO: 17969 - DNA, 60 bp, Homo sapiens
ggatggctggaagtgtctcagggcactctgaaagtttagcaagcttatcaaggagtcctc

SEQ ID NO: 17970 - DNA, 60 bp, Homo sapiens
ctcagctgtaacctaccaactatgtgagcttgggaaagttacccagcttccctatgcctc

SEQ ID NO: 17971 - DNA, 60 bp, Homo sapiens
ctgaaattctccctgtatttgtgagactcgcaggagtccccatctgtagcacaggcaatg

SEQ ID NO: 17972 - DNA, 60 bp, Homo sapiens
tggcaagtttgtgggaagggatgggcaagggtgagtgggtttgctccacaccgtcctgtg

SEQ ID NO: 17973 - DNA, 60 bp, Homo sapiens
caactgttaccatctcttgcctagagagacaaggagaaggatctagaacccagggagagc

SEQ ID NO: 17974 - DNA, 60 bp, Homo sapiens
ggagttttccgggagcgcgtggggcttgaggccgagaacggcccttgctgccaccaacat

SEQ ID NO: 17975 - DNA, 60 bp, Homo sapiens
tctccgccgtatcttccgaccctcgccgccgcgcagctccccgcgctcgtgccaccgccg

SEQ ID NO: 17976 - DNA, 60 bp, Homo sapiens
gatgacataggactcttatcgtgatgtatcatgacaattagactactccccagatgttag

SEQ ID NO: 17977 - DNA, 60 bp, Homo sapiens
cggatgatggacactgaagtcctcagcttgctaagttcagttgctctccctagcctcctt

SEQ ID NO: 17978 - DNA, 60 bp, Homo sapiens
gagacataggccatgcttagtggagactcattcacaatggaaacaaagcttagatgctga

SEQ ID NO: 17979 - DNA, 60 bp, Homo sapiens
gatcaacccaagttcatggccctcttctatggagtggtgactccctcactcaaccctttt

SEQ ID NO: 17980 - DNA, 60 bp, Homo sapiens
gatctttttcaagtcttctgaaaggaagtagacagtattacaccctgaataaataaggtg

SEQ ID NO: 17981 - DNA, 60 bp, Homo sapiens
tcctacggccctggattcgggagctgattctggggtcagagacaccctccagtccacgag

SEQ ID NO: 17982 - DNA, 60 bp, Homo sapiens
tgattttgtgactttgagttggttgcggaatggcccaataggagggtggcaggattggag

SEQ ID NO: 17983 - DNA, 60 bp, Homo sapiens
actctagtgttcgacattcgccgtgatacagtggtgtcacgacgtgtgtaactgtggtca

SEQ ID NO: 17984 - DNA, 60 bp, Homo sapiens
gcctgcagcattgggctgattgtagcaataacgcaagtgacatctgtattcaggttaccc

SEQ ID NO: 17985 - DNA, 60 bp, Homo sapiens
ccattatgatgccgccaaggtgtactacatcaactagagctagccaggtgttgccggacc

SEQ ID NO: 17986 - DNA, 60 bp, Homo sapiens
atcaatcctttaacctggattttattctcctgggagttactagtcagcaagaacagaata

SEQ ID NO: 17987 - DNA, 60 bp, Homo sapiens
ccctctagtcattggcaatggctctttcagctcggaggaagcttggaggaaactcagatt

SEQ ID NO: 17988 - DNA, 60 bp, Homo sapiens
ctgcttttgatactgtattacgtgccaatagtttcccaatcacatagcaggcaagagata

SEQ ID NO: 17989 - DNA, 60 bp, Homo sapiens
tgtggggaaagtgcaaacttccagtagaatcccggtcttttcatccaagtgcttgcaggg

SEQ ID NO: 17990 - DNA, 60 bp, Homo sapiens
cagaattgacttctctgggaaaactggagatgagaatctgcccagtgctctgctgtccag

SEQ ID NO: 17991 - DNA, 60 bp, Homo sapiens
ggtcacatatgaccagtaattgaaagacgtcatcactgaaagacagaatgccatctgggc

SEQ ID NO: 17992 - DNA, 60 bp, Homo sapiens
aggaggtctctcgcagtctgcgtttcatcgggctctcagaggatgtggtgagcttctttg

SEQ ID NO: 17993 - DNA, 60 bp, Homo sapiens
ttcaatacgtgcctctcccatctgctggtggtgttcctcttctatggctcagccagctat

SEQ ID NO: 17994 - DNA, 60 bp, Homo sapiens
ccccactccagtccctctgtccttcaggagaagttgttctctgtcttttatgccatttta

SEQ ID NO: 17995 - DNA, 60 bp, Homo sapiens
atggtgtgatctcgctcactgggattacagtcatgagccacgacacccggcctaattttt

SEQ ID NO: 17996 - DNA, 60 bp, Homo sapiens
taacgttcatgggtagccagggtgtatgtggccagagcagagtaagcatgggcgaaagta

SEQ ID NO: 17997 - DNA, 60 bp, Homo sapiens
gctggtccctccatttctcaatccacttgtctatggtgcaaagaccacacagattcgcat

SEQ ID NO: 17998 - DNA, 60 bp, Homo sapiens
cctgtttaaccttatgccagtgccacagtgccttgatcagtgctgctttgttgtgagaag

SEQ ID NO: 17999 - DNA, 60 bp, Homo sapiens
gcctgtgcgtttcctttctgtgacgggattagcttagacatccttgcaaagcgatcactt

SEQ ID NO: 18000 - DNA, 60 bp, Homo sapiens
cctggtgtctggtgtgatggaggggattattcctcatctctcctgagttcagtcttctgt

SEQ ID NO: 18001 - DNA, 60 bp, Homo sapiens
accaaccaggatgtgggagaccaaataagcaattaccacctacccagatgcaggagaacc

SEQ ID NO: 18002 - DNA, 60 bp, Homo sapiens
ttttggaccaaacagacgctcacagtggaggcttatcaagggttgcattggggaagaagc

SEQ ID NO: 18003 - DNA, 60 bp, Homo sapiens
ttggacaaccccaggaacttggaccaaggcagagccaatcttgcaaactggccatggatg

SEQ ID NO: 18004 - DNA, 60 bp, Homo sapiens
gtccctgcccttccttgcatatcctgggtgaggctggttgatggtacattgttgtagaat

SEQ ID NO: 18005 - DNA, 60 bp, Homo sapiens
aactggaacaccggctgacctctactgctcgtggaaggggatccacttctaacttctaca

SEQ ID NO: 18006 - DNA, 60 bp, Homo sapiens
actttgcagacttgcggagtgagaagcctcttggccagaacttggggcaaggcacaaatc

SEQ ID NO: 18007 - DNA, 60 bp, Homo sapiens; identical to SEQ ID NO: 4855

SEQ ID NO: 18008 - DNA, 60 bp, Homo sapiens
tacacgtttcctctcccatgtcaagtttagaagcagtgtcaagacccacagcagtcctgc

SEQ ID NO: 18009 - DNA, 60 bp, Homo sapiens
gagtttgcgttttacacccagcgatgcttggggatggcagagagatggatggataatgag

SEQ ID NO: 18010 - DNA, 60 bp, Homo sapiens
tgataatatgctgcatgatgtattaggctgggttctctcagacagaacctacacgtatac

SEQ ID NO: 18011 - DNA, 60 bp, Homo sapiens
tcatgctcattcaccttatgcctgaggctcggttgggaggttgacaactggctatttgca

SEQ ID NO: 18012 - DNA, 60 bp, Homo sapiens
catttctcacgttcttaaaagagagcacagatgttgcatcatctggttagataccctgag

SEQ ID NO: 18013 - DNA, 60 bp, Homo sapiens
attcacacccacagcctttcggcctaacacataacacttccactgctgcagcttttgcag

SEQ ID NO: 18014 - DNA, 60 bp, Homo sapiens
cgctctttgcgaggttgtccaggctgtgtttgtcgcatgctcttcttctgtatagttctc

SEQ ID NO: 18015 - DNA, 60 bp, Homo sapiens
gtcttgccactcccatctcagtgcttcctgaagaggctgttttgagtgttgatgaaaagc

SEQ ID NO: 18016 - DNA, 60 bp, Homo sapiens
gcataattaggaaactttttaacatgtactttctccctgcactctaaaccccaaggttta

SEQ ID NO: 18017 - DNA, 60 bp, Homo sapiens
ttccggtttgacgtggagtgtggggatgaagtcctgtactgctatgaagtgcagttggaa

SEQ ID NO: 18018 - DNA, 60 bp, Homo sapiens
gaacatcatctatgagaagctggactcctcagtgccaagaccgtcatgtgtacctgccaa

SEQ ID NO: 18019 - DNA, 60 bp, Homo sapiens
acttcgctgcttgcctcatcagcctcacagttccccacagctgtcgaggatgccctgatg

SEQ ID NO: 18020 - DNA, 60 bp, Homo sapiens
gcatgtgctgttcccattgcctgaaatactttccctctaccctgtccatctagctaattc

SEQ ID NO: 18021 - DNA, 60 bp, Homo sapiens
ttgacagggtctatagctcaagtcccaaagaggcaagactcaggatggaatgcatgtggc

SEQ ID NO: 18022 - DNA, 60 bp, Homo sapiens
tgcagctgcattcctggacccttatctaggcgctacagcaaggtcaccagacttgcttta

SEQ ID NO: 18023 - DNA, 60 bp, Homo sapiens
attcatgatgtgaatatggggaatgacctgagagccacactcagctcctcaagggcagcc

SEQ ID NO: 18024 - DNA, 60 bp, Homo sapiens
aaacagcattagcaggatgaggatagcaatggggaagggttgtgggcaatgcagtaacag

SEQ ID NO: 18025 - DNA, 60 bp, Homo sapiens
tgcagtgtttcacaggagaaagtggccttaactgccccttattctctctccacgttgtaa

SEQ ID NO: 18026 - DNA, 60 bp, Homo sapiens
ccctagcaaacgccattctgctttctgtctctaatttgagccaacatcgaggaagagtac

SEQ ID NO: 18027 - DNA, 60 bp, Homo sapiens
ggtctctgtactgtatgctgtcattgtaccattgctcaatcccatcatttactgcctgcg

SEQ ID NO: 18028 - DNA, 60 bp, Homo sapiens
ccagaatgtctgaatccacccaactgggcatagacgtttgtgttcattcaagatacagac

SEQ ID NO: 18029 - DNA, 60 bp, Homo sapiens
cagctggtgtctgccataggattgattgtttgcttggtgtatgggcttaaccccatcacc

SEQ ID NO: 18030 - DNA, 60 bp, Homo sapiens
cacttacatgccaagtgttttcgaatatgatatgtgacttaatcctgaacaaactagagt

SEQ ID NO: 18031 - DNA, 60 bp, Homo sapiens
ggtgggtcagctatggtggcagactcactaagagtgtcatcctcaactatcctgtattgc

SEQ ID NO: 18032 - DNA, 60 bp, Homo sapiens
ccaacagccaccgcccaggacgctgaggctcccttgcctgactgtgacttgtgcctctct

SEQ ID NO: 18033 - DNA, 60 bp, Homo sapiens
tctatcacagcctctgctaaggtaagtgtgagtgacgcagctctattcccaaagacctgg

SEQ ID NO: 18034 - DNA, 60 bp, Homo sapiens
caacaaagttcttcactgtggcgtttgtagatgtggggaaaagagagatcaggctggtac

SEQ ID NO: 18035 - DNA, 60 bp, Homo sapiens
gccaaatctacactcagcctaactcttggcttcatctgctgccatgccgtctctgggcaa

SEQ ID NO: 18036 - DNA, 60 bp, Homo sapiens
tcggaacatgtgtgtgttatctcggttcatatcaagtccaaagctaatggagccttcccc

SEQ ID NO: 18037 - DNA, 60 bp, Homo sapiens
gtcaaggaacagattctctcctagaaattctggaggatgaagcatcccaccaacaatttg

SEQ ID NO: 18038 - DNA, 60 bp, Homo sapiens
tactggttgacggtcaggtgggctgattggttctccctgctacagtggtagaattcagcg

SEQ ID NO: 18039 - DNA, 60 bp, Homo sapiens
cttcatgttatatgccaagtccatgcagctaaacaactgtcctctcctgctggaggctac

SEQ ID NO: 18040 - DNA, 60 bp, Homo sapiens
agatgttcctggaggaggacactcccatcagaacttggcagccttgaagttggggtcagc

SEQ ID NO: 18041 - DNA, 60 bp, Homo sapiens
ttaaccatgactgttgaagtgaagggtccctatgaatacctcacacttgaagactatccc

SEQ ID NO: 18042 - DNA, 60 bp, Homo sapiens
gggtccatttattaggttaaagttgacccattcagtgtaaaaataaccatagtgtgtgag

SEQ ID NO: 18043 - DNA, 60 bp, Homo sapiens
gtctggaaaacccatctggtgcactaaaatgctatgcaacaccaaatggcttcttcccct

SEQ ID NO: 18044 - DNA, 60 bp, Homo sapiens
attcattaagttaggaatggttggtggtcctaagagcctcagcaaccgagaggagtcttg

SEQ ID NO: 18045 - DNA, 60 bp, Homo sapiens
ctctgcctagccaccctgtctgggaggtctaccacagaggccagacgcagtgtgggggct

SEQ ID NO: 18046 - DNA, 60 bp, Homo sapiens
acagcagcttcacgacctctgcaggaacctatcttggtaaagaaacggggcctatgtggt

SEQ ID NO: 18047 - DNA, 60 bp, Homo sapiens
aggctttctgctgtagagaattcaaacccaaacttttgcccaagaccagaaggccctgtg

SEQ ID NO: 18048 - DNA, 60 bp, Homo sapiens
gactctacaggaggaatgttctccattgctgaaatgacaatttcccacagacaaggacct

SEQ ID NO: 18049 - DNA, 60 bp, Homo sapiens
acacattcccgcggtccttcagactgcccggagagcgcgctctgcctgccgcctgcctgc

SEQ ID NO: 18050 - DNA, 60 bp, Homo sapiens
gtccaagacattcaaccagccctgcccacaaagggagaagtattgcttcctgtagagcac

SEQ ID NO: 18051 - DNA, 60 bp, Homo sapiens
tgaagctgtgtcctcattccactccccactgatacccaagccaacaaggagatgccctga

SEQ ID NO: 18052 - DNA, 60 bp, Homo sapiens
aagaaacagtggaggcatatgaggcagcattaggggtggctatgagatgtgatatagtac

SEQ ID NO: 18053 - DNA, 60 bp, Homo sapiens
aagacgcccattgagacactgatcagagacatgctgctgtcggggagtaccttcaactgg

SEQ ID NO: 18054 - DNA, 60 bp, Homo sapiens
aggaaaatgacccttctctgcatggcactcagtggtgtaaagacactcggactcttaagc

SEQ ID NO: 18055 - DNA, 60 bp, Homo sapiens
ctttgcccaacaagtgtagaatcttagtagccagaacagtgtgttcacagtcctcaatga

SEQ ID NO: 18056 - DNA, 60 bp, Homo sapiens
gaccaggactacagctttcctatatcttctattctagagtggtaaactctctataagtgt

SEQ ID NO: 18057 - DNA, 60 bp, Homo sapiens
agactgaggcatccgtgaggcagggacaagtctttctcctctttgagaccccagtgcctg

SEQ ID NO: 18058 - DNA, 60 bp, Homo sapiens
gccctaagacccatacctgagtataattttctgaatgtgcagttcaaccacttcatactg

SEQ ID NO: 18059 - DNA, 60 bp, Homo sapiens
cactcaggagtcacggagtgctgttggaagttcaatactcttcttcaatacatgaccgag

SEQ ID NO: 18060 - DNA, 60 bp, Homo sapiens
atatagctgtatatactggtagtatgaaagcaactagtgtcattgatgattttttggggg

SEQ ID NO: 18061 - DNA, 60 bp, Homo sapiens
caatcttcacattgggtcaccaccactactccttcagtttagccttggctagcaaaaggg

SEQ ID NO: 18062 - DNA, 60 bp, Homo sapiens
ccacctcaagagcccatttcctgtgggatggaatttgggacaagagaaaccttaacgtcc

SEQ ID NO: 18063 - DNA, 60 bp, Homo sapiens
ggaacgaaacgaaacaaaagacaacgaaaaagcaacagcaaaacccaaaaggggtaccga

SEQ ID NO: 18064 - DNA, 60 bp, Homo sapiens
ttgcagactgcgtctgtctggagctagagagccagagagccagcctgtggggataatgct

SEQ ID NO: 18065 - DNA, 60 bp, Homo sapiens
acagtgatagtgggctaagcggggcatgtgacctaatgacacatcagtcaggggaagcta

SEQ ID NO: 18066 - DNA, 60 bp, Homo sapiens
gctcaccctagatgagtcctttggttcggtggttcggaaaagtctctttgttccttctcc

SEQ ID NO: 18067 - DNA, 60 bp, Homo sapiens
gtatcccaatgctaaggcacctttatatgaagtgggtaagactcactaaaccacagccat

SEQ ID NO: 18068 - DNA, 60 bp, Homo sapiens
ggtggcgtatgtgttcgtgttttaatgtattcagagccattgggcaataagcagtccaga

SEQ ID NO: 18069 - DNA, 60 bp, Homo sapiens
cacccttttgtgtttcacagatctggctttgattggctgatgagtgtctttgtgatcagt

SEQ ID NO: 18070 - DNA, 60 bp, Homo sapiens
gaaacaaatgaagattcttgtgacttgtttattctataagctgtataaccccaaagaaaa

SEQ ID NO: 18071 - DNA, 60 bp, Homo sapiens
gcacgtgtcacaacctctgtttagtctagtcacaacctaggactgtaagccagtgttggc

SEQ ID NO: 18072 - DNA, 60 bp, Homo sapiens
agaagacgtgacacataacaactgaagggaactcatggtccaagattttctttgcctata

SEQ ID NO: 18073 - DNA, 60 bp, Homo sapiens
ccagggtctgttgattcgacagtaaatgcaaaactcctctgctttcttcctgtggaggag

SEQ ID NO: 18074 - DNA, 60 bp, Homo sapiens
ctgttttaaactgggtgctatttagaagacagtgggtcttcattggttgctggttttagt

SEQ ID NO: 18075 - DNA, 60 bp, Homo sapiens
accacttgtgtgattccagtgtcatgtcttgggtttgatgtcgttggacagaaaagtgta

SEQ ID NO: 18076 - DNA, 60 bp, Homo sapiens
attgttaaagagagcatgaaaatggttctatgactttgcctgatacagatgctacttgac

SEQ ID NO: 18077 - DNA, 60 bp, Homo sapiens
cttaaaactgccacacgcaaaaaagaaaaccaaagtggtccacaaaacattctcctttcc

SEQ ID NO: 18078 - DNA, 60 bp, Homo sapiens
acttttgtagagactatcagagtattatttccttgtggacacagtaaatgtatgatgatg

SEQ ID NO: 18079 - DNA, 60 bp, Homo sapiens
tttctcttgccagtgactttaaactaaagaacttaattaaagaacattgttcccataggt

SEQ ID NO: 18080 - DNA, 60 bp, Homo sapiens
acctgggtcccatgaccagctccccgtctccataggggtaggcatttcactggtttatga

SEQ ID NO: 18081 - DNA, 60 bp, Homo sapiens
ggtacttactcttgtacctcctgttcagccaggtgcattaacagacctccctacagctgt

SEQ ID NO: 18082 - DNA, 60 bp, Homo sapiens
atatctccaaagagcacaatcaacactggagcgcacatctcactgcagacaggtcagtgg

SEQ ID NO: 18083 - DNA, 60 bp, Homo sapiens
tttgtctggtgtcctggactctaagctccgcaagggcaggaattgtctggcatcattgct

SEQ ID NO: 18084 - DNA, 60 bp, Homo sapiens
gttttaagaattgtttttggaattttaaataaaaggtcacttgaatttcaaaccatccaa

SEQ ID NO: 18085 - DNA, 60 bp, Homo sapiens
ggagaggtctgcatttagacggaaacagaaatggcttttcccctcactgttcctgaatgc

SEQ ID NO: 18086 - DNA, 60 bp, Homo sapiens
ccgcttgcagttcaaattctcagaggaagttccctgtactccacccagtgccaagtttag

SEQ ID NO: 18087 - DNA, 60 bp, Homo sapiens
gatcatccagtagtaccccatgtgagagcactgtcctctggcatctgttagggcctacaa

SEQ ID NO: 18088 - DNA, 60 bp, Homo sapiens
tggatctcctcacctgccaggaacttcctctccacaagccggccatcccagcaaaagttc

SEQ ID NO: 18089 - DNA, 60 bp, Homo sapiens
ccatggaggaaagccagattattcggtgaaaagtgttaggacatcggctggtcttccagc

SEQ ID NO: 18090 - DNA, 60 bp, Homo sapiens
tggatttcacagagaagataggtgaaggtacagcatggcatccacccctcaccagagggg

SEQ ID NO: 18091 - DNA, 60 bp, Homo sapiens
actgacacccacttctgggttctcaggctggctgacaggtctgacagcccatcacgaaag

SEQ ID NO: 18092 - DNA, 60 bp, Homo sapiens
gccttttagagataggttcttgatattcagacatctgcagaaatgttctggttcccaaag

SEQ ID NO: 18093 - DNA, 60 bp, Homo sapiens
agccatcagcacctggcttctatagctgcagcccaagaggccaactggaacgttaacatc

SEQ ID NO: 18094 - DNA, 60 bp, Homo sapiens
gggcagatggaatctggcttgcatctgggggttaactgggcagttgtggggcactggaat

SEQ ID NO: 18095 - DNA, 60 bp, Homo sapiens
aaatggaggcttcaccaaggtgtggtttgccatgaagaccttccttacgcccagcatctt

SEQ ID NO: 18096 - DNA, 60 bp, Homo sapiens
atccctctagacgagaacgagggcatctatgtgcaggatgtcaagaccggaaaggtgcgc

SEQ ID NO: 18097 - DNA, 60 bp, Homo sapiens
ttttcaaccagccactccagtaggggtctcagggggcaagggggatactggcagagggga

SEQ ID NO: 18098 - DNA, 60 bp, Homo sapiens
tggcggctatgcagtagcagagctccaccgcggtggcggccgcctaaaatggtcactttt

SEQ ID NO: 18099 - DNA, 60 bp, Homo sapiens
cccaaatccttacccagcttagttctcttgggaagctcttaattgttcctattttctagg

SEQ ID NO: 18100 - DNA, 60 bp, Homo sapiens
tgacgagaaattcaggaagcctgcaagcctagaggtcagctcagtggccaccttctgaag

SEQ ID NO: 18101 - DNA, 60 bp, Homo sapiens
cagcctcctggttatggtacagatacaaactggactctcaggacaaaacgacaccagcca

SEQ ID NO: 18102 - DNA, 60 bp, Homo sapiens
agtctagaatagggaggtggagaatgatgacttaccctgaagtcttcccttgactgcccg

SEQ ID NO: 18103 - DNA, 60 bp, Homo sapiens; identical to SEQ ID NO: 4855

SEQ ID NO: 18104 - DNA, 60 bp, Homo sapiens
aattttgaaggactattaatgcatcatgtgacacaattaaggaaatgaggcatccacttc

SEQ ID NO: 18105 - DNA, 60 bp, Homo sapiens
cccaggaaccttccagtctgagaggctggtattctggttctttcatcatgtgacttatac

SEQ ID NO: 18106 - DNA, 60 bp, Homo sapiens
ggagcagctaatctacctcccctattgaccaatgacaagaatggaagaaaatatacaatc

SEQ ID NO: 18107 - DNA, 60 bp, Homo sapiens
aaagtccaagaatgcaaaatagcaaggagtgattaggaagttgtcttattaacctttctt

SEQ ID NO: 18108 - DNA, 60 bp, Homo sapiens
tctgtcacctgacttttcagctagtgtctggagccctctgaactccagcgtaatctctag

SEQ ID NO: 18109 - DNA, 60 bp, Homo sapiens
agctgggactacaggggactacaggcgcatgccaccatgcccagctattttttttggtat

SEQ ID NO: 18110 - DNA, 60 bp, Homo sapiens
gtctgttgctcaaatcacaaaacataaaacggaggggtctcccttggagaccataaagtc

SEQ ID NO: 18111 - DNA, 60 bp, Homo sapiens
taagggcttcctgactttcaacagtggtgctgatcccagttctgaagagtggaacatcag

SEQ ID NO: 18112 - DNA, 60 bp, Homo sapiens
ttagggctgaggtgatgctggattggcttgtcctggaggatgcgccaagactgttgatta

SEQ ID NO: 18113 - DNA, 60 bp, Homo sapiens
ggatgacaatcgagcagcagaagaatggtgtgcctaccctttaatgctgcagtttaagag

SEQ ID NO: 18114 - DNA, 60 bp, Homo sapiens
gtaaattatttctgagtcccaagggctgggagtagctgcctgaaatgctgcgctgggaag

SEQ ID NO: 18115 - DNA, 60 bp, Homo sapiens
ggccgccctatctgggaggtgtacccaatagctccgaagagacagcgaccatcgagaacg

SEQ ID NO: 18116 - DNA, 60 bp, Homo sapiens
atatggttacctggcaaccagtccgtatccacccatggcagcctcatgactgcagagcag

SEQ ID NO: 18117 - DNA, 60 bp, Homo sapiens
tttcagataggacagctcaaccttacgatgcctacctgatgccaggtgatgcttattttc

SEQ ID NO: 18118 - DNA, 60 bp, Homo sapiens
tgcatagactcgtggtttgaagtgaacagatcttgtccggaacaccctgcggactgacct

SEQ ID NO: 18119 - DNA, 60 bp, Homo sapiens
aaggtgggcacactggtgcttacagactgggtggagagccctaccttccaaggtcttgat

SEQ ID NO: 18120 - DNA, 60 bp, Homo sapiens
ggttggtgggaagattgtctgatgtacgatttgggaacgtggctgacccagcaatggaat

SEQ ID NO: 18121 - DNA, 60 bp, Homo sapiens
gctgcaaattttgggtctcaatttttactgtgcctttgtttttactagtgtctgctgttg

SEQ ID NO: 18122 - DNA, 60 bp, Homo sapiens
gcccttgaggaggtttcagtgtgctggcaaaaccaagacaagccacacacaagaccattt

SEQ ID NO: 18123 - DNA, 60 bp, Homo sapiens
cacaaattccaaacatcagaaataaaggaggggcatcactactggtaacatggctaataa

SEQ ID NO: 18124 - DNA, 60 bp, Homo sapiens
tgcagcaacgcgagtgcgagcaccaggatctcgggctcggaacgagactgcacggattgt

SEQ ID NO: 18125 - DNA, 60 bp, Homo sapiens
atggtgatggatggtttggaaagggaatgttggtgccttttgtgccacaagttaagatgc

SEQ ID NO: 18126 - DNA, 60 bp, Homo sapiens
gcagtcacttgtccaaggatagagagaaccagcaaccctatggccctaactcctgatatc

SEQ ID NO: 18127 - DNA, 60 bp, Homo sapiens
cttcaagcccatcgacctgagtgacctgaagcgccggagcacgcaggatgccaagaagtc

SEQ ID NO: 18128 - DNA, 60 bp, Homo sapiens
gctccaattcaatggtgtttagaagtaggaagtcactgtgagcaatgccaccaagtggtg

SEQ ID NO: 18129 - DNA, 60 bp, Homo sapiens
ccttagtagaggttttatgtcaacaccttcaggagggaagcccttatttctgggttgaac

SEQ ID NO: 18130 - DNA, 60 bp, Homo sapiens
tgccatgtgagaggttttatcttttatacaaactgcaggaagacagaagcaactgtgggg

SEQ ID NO: 18131 - DNA, 60 bp, Homo sapiens
taatgcctcagtgctgccagtgagagtcgaggtggacatggtgcgagtgatggaggtgtt

SEQ ID NO: 18132 - DNA, 60 bp, Homo sapiens
gtggagaggaataactctgagtcttaagctaattttttgagccttgctccgacaaggcta

SEQ ID NO: 18133 - DNA, 60 bp, Homo sapiens
gccttgctgtgaatgctttcttgctctatctgaagtattcccaccagagttgtttccaac

SEQ ID NO: 18134 - DNA, 60 bp, Homo sapiens
ggggagaaaggtcagtaaatgtcacaaaagagactcctagtaacacaatctgagggagct

SEQ ID NO: 18135 - DNA, 60 bp, Homo sapiens
cttgttaatgcatgaatgttccatgcagtaggagaataaagcactacagttcggttgttc

SEQ ID NO: 18136 - DNA, 60 bp, Homo sapiens
tatctcgacagctgttactgggaccacaaggaggccccttactcagatattgaggaccac

SEQ ID NO: 18137 - DNA, 60 bp, Homo sapiens
gaacttttcctggacaacagtcagtcaaatgaaggcaaattggaaggcctcgcagatgaa

SEQ ID NO: 18138 - DNA, 60 bp, Homo sapiens
cgcgtgccttataccaaggtgcaattaaaagaacttgaacgggaatacgccacgaataaa

SEQ ID NO: 18139 - DNA, 60 bp, Homo sapiens
agggttgcttttcctttggggttaaggctgtgcagcacgttttacagcagtcctggaaca

SEQ ID NO: 18140 - DNA, 60 bp, Homo sapiens
tatttggtgttgagcctctcttccacaagagctcctccatgtttggatagcagttgaaga

SEQ ID NO: 18141 - DNA, 60 bp, Homo sapiens
acagcttctactaccagcccttggggcactcacccctgtgatcaagcaatcattgtcaat

SEQ ID NO: 18142 - DNA, 60 bp, Homo sapiens
gatttgctcccattactctgatcgctccgttaggctgtgtgtctgttacaggtagtgcca

SEQ ID NO: 18143 - DNA, 60 bp, Homo sapiens
gtgattggtggagtaagggagggcttcttgcttaattgttcccctaatattgggcatgac

SEQ ID NO: 18144 - DNA, 60 bp, Homo sapiens
gcaccccaaatgtttctctgaatgtaatgtttaggatctctgcgctaggtcgtttaccgc

SEQ ID NO: 18145 - DNA, 60 bp, Homo sapiens
aaaatgtggttgctttctctggcagctagccctcctcctgaagcagtctcggagcttgca

SEQ ID NO: 18146 - DNA, 60 bp, Homo sapiens
cgcctcattactgcgcctcaccactcccgtctcagcctcatgaacctagcatctaacgta

SEQ ID NO: 18147 - DNA, 60 bp, Homo sapiens
acaaggagttcctgctgtgggagtcatgaaggaattagttgagcgattcgctttatatgg

SEQ ID NO: 18148 - DNA, 60 bp, Homo sapiens
cagttcaggtacttttgagggttgttgtgctgaccctgtggttgtcgctgatgtacacac

SEQ ID NO: 18149 - DNA, 60 bp, Homo sapiens
ctgccataaacacttgaatgtgcacacaactgcagagcttaatgccacaacctccaggag

SEQ ID NO: 18150 - DNA, 60 bp, Homo sapiens
tgggtttcagctcctctgtgctgtggacactgactttggctcagaactccgatttagtac

SEQ ID NO: 18151 - DNA, 60 bp, Homo sapiens
atccgttttgctcccaggcctttgactggtcagagaaactgatgcctttgcccacaggag

SEQ ID NO: 18152 - DNA, 60 bp, Homo sapiens
taagagagctttccagcctgtgctaagaaaactgccccacatcatctgcagtaggacggg

SEQ ID NO: 18153 - DNA, 60 bp, Homo sapiens
ttctgcctttccaacagaagcggtgatcgtctaagtatgagcctgtggcttcctttgtgc

SEQ ID NO: 18154 - DNA, 60 bp, Homo sapiens
gcgaaggatttcaaacgttagctctgttatattttgttccagcaaagcagacaaagatca

SEQ ID NO: 18155 - DNA, 60 bp, Homo sapiens
gtcagctttttggtgaactttagtggacttctgtgagattgtagttgtactttgtatctc

SEQ ID NO: 18156 - DNA, 60 bp, Homo sapiens
gagatggcattaactctgcatgtaaagaaaacacatgtatacccaggctgtacaactgcc

SEQ ID NO: 18157 - DNA, 60 bp, Homo sapiens
ggatttagaactactgtgtttgtctttgaaggcaaggacaactgtctttgaatccatgta

SEQ ID NO: 18158 - DNA, 60 bp, Homo sapiens
ttgttaagttgatttaacattgtctccccccacaaccgcgcttgactagcttgctgtttt

SEQ ID NO: 18159 - DNA, 60 bp, Homo sapiens
cagaacaggacctgctccagtcagtgctcaacatggacatgctgaatgaacgaatgaagg

SEQ ID NO: 18160 - DNA, 60 bp, Homo sapiens
cccatgcatgttatgcctaaactaagacggatacccctgaattaagaggtgctgttatac

SEQ ID NO: 18161 - DNA, 60 bp, Homo sapiens
ggacaaagagaaaacaatgccaagaatagctagagaaagacaatagtgagtatgagattg

SEQ ID NO: 18162 - DNA, 60 bp, Homo sapiens
atgctgctggcacaactgctggcggatctgcggtgatgagtgcctgttgtccaagttcca

SEQ ID NO: 18163 - DNA, 60 bp, Homo sapiens
gagtgagctgatttgggctcaggaaaacctagtcgcttgttgctctcgtctgtgacattt

SEQ ID NO: 18164 - DNA, 60 bp, Homo sapiens
gagcttaggtgagcaggattctggggtttgggatttctagtgatggttatggaaagggtg

SEQ ID NO: 18165 - DNA, 60 bp, Homo sapiens
ccagccttggggaaccacctacacttgagccacaattggttttgaagtgcatttacaagg

SEQ ID NO: 18166 - DNA, 60 bp, Homo sapiens
tattgttcagcatgggtgaccaccagaaagtaatcttaagccatctagatgtcacaattg

SEQ ID NO: 18167 - DNA, 60 bp, Homo sapiens
acaaattgtcttagaacttcaataggtaaagaatctcctcagtagaaccttttatgcata

SEQ ID NO: 18168 - DNA, 60 bp, Homo sapiens
gtcccatgcctcagcttgctgcttgtgccagttgcctgtttcgcttcagtgtttgattct

SEQ ID NO: 18169 - DNA, 60 bp, Homo sapiens
actagaggctcactggctgattgcaggcttgagaactgaccatgtttgtttctgccagag

SEQ ID NO: 18170 - DNA, 60 bp, Homo sapiens
gatgtaagctatcttgtcaaacactgagctggaactcgctctccctctagttctccaggg

SEQ ID NO: 18171 - DNA, 60 bp, Homo sapiens
gccggatctgcttccccaacacctaccttcaaaaccagaaaacatcgggactttcgttca

SEQ ID NO: 18172 - DNA, 60 bp, Homo sapiens
ctttagaggtaagacaggtatctctgtaagggcacatccagatcctcttgggcataaggc

SEQ ID NO: 18173 - DNA, 60 bp, Homo sapiens
gctgctcctccgaggacgacgattccaaggagtccacgtgcagccccacgcccgatagca

SEQ ID NO: 18174 - DNA, 60 bp, Homo sapiens
cccaggggttcctttactgccatgaggcaggtgtactctacagaattagacagtgacaat

SEQ ID NO: 18175 - DNA, 60 bp, Homo sapiens
gtcatcgatctccttaagaagagactcgtagatattgactgggagacccaagctgaatgc

SEQ ID NO: 18176 - DNA, 60 bp, Homo sapiens
gcatccctcctgttgctagcagccttttgacctatctgcaatgcagtgttctcagtagga

SEQ ID NO: 18177 - DNA, 60 bp, Homo sapiens
tgagtcctgcggagcgcgagctactcgacttctccagctggttagggggctactgagcgc

SEQ ID NO: 18178 - DNA, 60 bp, Homo sapiens
atcttgcagccagtgcaggaggaaaacagcaaaacttcgcctcggtcccacagaagcgac

SEQ ID NO: 18179 - DNA, 60 bp, Homo sapiens
ttggaaacaaagtccctgagcagctccgtgttaccacccagctatgcttcagatcgcctg

SEQ ID NO: 18180 - DNA, 60 bp, Homo sapiens
cctgaagggtactctagctattgacagtctttactctcttcagtttgctggaggtaactg

SEQ ID NO: 18181 - DNA, 60 bp, Homo sapiens
attaggcaactgtaggcagttcactttgctcctttggaccagagatttctcatctacaaa

SEQ ID NO: 18182 - DNA, 60 bp, Homo sapiens
gcctctatcactggcagagtcctgacatccaccaggtccggattccctggtctgagtttt

SEQ ID NO: 18183 - DNA, 60 bp, Homo sapiens
tgagcctttgtttggattgcttcaagaggtcgctaggattcaaccaatgccttacttcaa

SEQ ID NO: 18184 - DNA, 60 bp, Homo sapiens
ccaaggtggaaatgctgagactttctctggcacgaaatcttgctcgggcaattataagag

SEQ ID NO: 18185 - DNA, 60 bp, Homo sapiens
cggctttgtagctagccaggctctgagtgtgtgtgtagatgaaccatttctctctccagt

SEQ ID NO: 18186 - DNA, 60 bp, Homo sapiens
gcaatgaactggggaaaacctttcactgtaagtcattcctcactgtccatcagaaaactc

SEQ ID NO: 18187 - DNA, 60 bp, Homo sapiens
agtaaaagtgtgaaatggatataatttcaggctttaacacatattaagacagatttggga

SEQ ID NO: 18188 - DNA, 60 bp, Homo sapiens
atatatcaccatccagagaaaatcagagctggcagttaacctgggcctttccgagagaca

SEQ ID NO: 18189 - DNA, 60 bp, Homo sapiens
atgctctcgctcttcatctgtggcacagctggcatcttcctcatggcccactacaaccgg

SEQ ID NO: 18190 - DNA, 60 bp, Homo sapiens
tagtccctgggatggctccaagggcctgctctaggaaggcagcatgctcagtgggacaca

SEQ ID NO: 18191 - DNA, 60 bp, Homo sapiens
gtcgactcttcatacctggagtctctctatcaatcctgtccgaggggagttgtgccattt

SEQ ID NO: 18192 - DNA, 60 bp, Homo sapiens
gaacttgaactggcattgtgttgtgtccaagtatccttcacccttggattggggagagtc

SEQ ID NO: 18193 - DNA, 60 bp, Homo sapiens
acaagctccagtctgtgtgggatcgatcatgaggcgctcaacaagcagattatggagtac

SEQ ID NO: 18194 - DNA, 60 bp, Homo sapiens
tagaaagggattgtgactgtacccctcatccaagcttgaacctaggggacatgcattctc

SEQ ID NO: 18195 - DNA, 60 bp, Homo sapiens
cgtgaataggcctttggaaagaggtgctgttaacccaaaacagagaggcagcagctttgc

SEQ ID NO: 18196 - DNA, 60 bp, Homo sapiens
tggggtggcttccaagcctcacttctccagtgttcaaagctgaacttcagatggacttcc

SEQ ID NO: 18197 - DNA, 60 bp, Homo sapiens
tttcagcattacagcttctgccgaatacagctaagtgatcatttctccattgacctacag

SEQ ID NO: 18198 - DNA, 60 bp, Homo sapiens
tctttccctgccgccgccgagtcgcgcggaggcggaggcttgggtgcgttcaagattcaa

SEQ ID NO: 18199 - DNA, 60 bp, Homo sapiens; identical to SEQ ID NO: 4855

SEQ ID NO: 18200 - DNA, 60 bp, Homo sapiens
atacagtatctccccttgtccccacccagtcaccaaagccacctacatgacagtccatcc

SEQ ID NO: 18201 - DNA, 60 bp, Homo sapiens
ccctccgtctcagacacacctccatgattggtccctgcctcacatcccagtttcttcaaa

SEQ ID NO: 18202 - DNA, 60 bp, Homo sapiens
tgaaaagttgagaaccacaggcttagtggtacgttggggtttcccacgctaggctgcata

SEQ ID NO: 18203 - DNA, 60 bp, Homo sapiens
actcttaaaataagttactcccttcatgccatatcccacatcacttgcttgtataccgtg

SEQ ID NO: 18204 - DNA, 60 bp, Homo sapiens
tcgactttgtcttcgccccagacccttgaaggaaggtgctcccttcacacacccaggctg

SEQ ID NO: 18205 - DNA, 60 bp, Homo sapiens
ccatcctggctaacatggtgaaaccctggcgccctcttgaactctctcttcaaagttctt

SEQ ID NO: 18206 - DNA, 60 bp, Homo sapiens
cccaggatatctgcaggtgtctctccctctggtttggtcatggctctctctgttctagaa

SEQ ID NO: 18207 - DNA, 60 bp, Homo sapiens
ctctctttatttgcacgcgcgcttctagcttttttcctgacattttccactccacgctcg

SEQ ID NO: 18208 - DNA, 60 bp, Homo sapiens
caccattgagttgactgcctctgagaagcagcactaggcctgttgaaatgcaatgtgctg

SEQ ID NO: 18209 - DNA, 60 bp, Homo sapiens
aaagtctgttcctggtacagctcttgaagccaacccctgcactcatcaggttgagttctc

SEQ ID NO: 18210 - DNA, 60 bp, Homo sapiens
tgtctcagctacacattacattgtgatactgcagctcaaattcagaatggcaatgataca

SEQ ID NO: 18211 - DNA, 60 bp, Homo sapiens
ccccatttccccacatcctcacctcacagtcacacattaacttttgccagcttgatgggt

SEQ ID NO: 18212 - DNA, 60 bp, Homo sapiens
gaagcaaggagatgttgaatgactcacccatttcatagcttttccgtggcaaagcctcac

SEQ ID NO: 18213 - DNA, 60 bp, Homo sapiens
gagatgattctgaaggcccgagttaggagattgaggctggttgcactggggtcaggagtg

SEQ ID NO: 18214 - DNA, 60 bp, Homo sapiens
ccaggttggcactcagatccgcaccatcaccgaggagatcagagatgggaaagtcatctc

SEQ ID NO: 18215 - DNA, 60 bp, Homo sapiens
cagcatgaagggctgaaaatgttagagaaattgtcagtattactaagttggcattcctgg

SEQ ID NO: 18216 - DNA, 60 bp, Homo sapiens
tcaagctgtacccctttcttggctatgtaggatgagttcctcctaggcccttgttaggag

SEQ ID NO: 18217 - DNA, 60 bp, Homo sapiens
gttgatggctatttgtggtgctaacatgtagttggggcacctacaattgggttctcttaa

SEQ ID NO: 18218 - DNA, 60 bp, Homo sapiens
attgacatcagtccctacaagttccgcaacctggatggccagaaggagtgggtccacgtg

SEQ ID NO: 18219 - DNA, 60 bp, Homo sapiens
gagtgtctccagctgaactcatcgtgtctaatcctcaccctagcttatcctgttcaaatc

SEQ ID NO: 18220 - DNA, 60 bp, Homo sapiens
ggtgtccagatctacgttctcctctccatctgcatagaccggttctacaccatcgtctat

SEQ ID NO: 18221 - DNA, 60 bp, Homo sapiens
tgatctcaccctgacactcctgatgccgcatctgtgatagcactcgtgttgccttcacat

SEQ ID NO: 18222 - DNA, 60 bp, Homo sapiens
tctcccagtctgtgatgaattgctttgacttctgacacctcgtatgaaaactgcacgtgc

SEQ ID NO: 18223 - DNA, 60 bp, Homo sapiens
gtagtagaagcagtatggtataggggagaaagtgattgtagttgggatctgaggatagtc

SEQ ID NO: 18224 - DNA, 60 bp, Homo sapiens
cgtagaaacacagaaccaatgatgtcttctgacaactgtttcctgatggttgagcaacag

SEQ ID NO: 18225 - DNA, 60 bp, Homo sapiens
cagctttgaaatccgaaccatcacttcaccctcctcaggggcaatcatgtctttgagaat

SEQ ID NO: 18226 - DNA, 60 bp, Homo sapiens
aagtgcgtatttgggcagagagtccctcatgatagacatctctggataaacgagttacag

SEQ ID NO: 18227 - DNA, 60 bp, Homo sapiens
ggctacagacatgtcacaaagcagtggtgggagaaatgtagtctttggtgtaagaacttc

SEQ ID NO: 18228 - DNA, 60 bp, Homo sapiens
gagcaaagaatgacagcaagaggcaaaacttcggacatagaggccaaccaacctttggag

SEQ ID NO: 18229 - DNA, 60 bp, Homo sapiens
caaaccaactttccaattctgacttgtaagggtgccttaaatcctgaatactgtactctg

SEQ ID NO: 18230 - DNA, 60 bp, Homo sapiens
ctggagaagctcttctgaaaactgctctgacctcagtgtctaatcacagaaactcgaggc

SEQ ID NO: 18231 - DNA, 60 bp, Homo sapiens
gtatacacaccacaagaagatgaaggtccattcagctggtaggagggatgtccgggccaa

SEQ ID NO: 18232 - DNA, 60 bp, Homo sapiens
agtggaggttctcgtaactggaggccagtctgcaggttggaaatgggtggaacttgaagt

SEQ ID NO: 18233 - DNA, 60 bp, Homo sapiens
caggctttgaagtactcagatttgatttttgctttcttggaaagactcactttaccaagc

SEQ ID NO: 18234 - DNA, 60 bp, Homo sapiens
gacgaataacttcctctagtacatcgccgattccagccgaaaatatgaacacggggatgc

SEQ ID NO: 18235 - DNA, 60 bp, Homo sapiens
ggtttcccaaagtcctatagctagtaagtggaaaagccatattcagacccaagcagatac

SEQ ID NO: 18236 - DNA, 60 bp, Homo sapiens
cggcatcgcagctgatggtgaaacttttggtgtggcagaagagtgtccacaaacttcgga

SEQ ID NO: 18237 - DNA, 60 bp, Homo sapiens
acacacgggaatttatatagccaactttttatcaacaaaagattcagaaaagtaccacgg

SEQ ID NO: 18238 - DNA, 60 bp, Homo sapiens
gatcacggtgaccagagatttctaggagtctctaacctttccaccctatcctgttaaccc

SEQ ID NO: 18239 - DNA, 60 bp, Homo sapiens
cccgggagattttggatggaaaagtcaggaggattgacagcagacttgcagaattacata

SEQ ID NO: 18240 - DNA, 60 bp, Homo sapiens
ccgagaccacctccaacagtactgccagcttgacttcttcaatgaccaccaccgagacca

SEQ ID NO: 18241 - DNA, 60 bp, Homo sapiens
gtgtgagccaccgtgcccggccaagtatctcttttctacagccttattaaactaactaca

SEQ ID NO: 18242 - DNA, 60 bp, Homo sapiens
gtatacatgtgcgtgctggtcgcgtgcaccactactgtatctagatagtatttccatgct

SEQ ID NO: 18243 - DNA, 60 bp, Homo sapiens
attatctctgaagtccctacctgcacttccctgattgccctgtagcaacaccagcatggt

SEQ ID NO: 18244 - DNA, 60 bp, Homo sapiens
cttgcccttctcccaccgtccagcaataaagcgagagaaacaagtgcaggaaactggccg

SEQ ID NO: 18245 - DNA, 60 bp, Homo sapiens
ctccaaggatgggaatcaggcatgtgtcccttccaagctgtgttaactgttcaaactcag

SEQ ID NO: 18246 - DNA, 60 bp, Homo sapiens
taagcgtggcgttctttctcaactcagagtccaaccacttacccctatctctaggctcca

SEQ ID NO: 18247 - DNA, 60 bp, Homo sapiens
ggtttgtatctggttatatctcttgtccttagcacagtacctggcacatcctaagccatc

SEQ ID NO: 18248 - DNA, 60 bp, Homo sapiens
aggcaatgactcgttacctgccgcccaacaccttggaggccttccctggccttgagtata

SEQ ID NO: 18249 - DNA, 60 bp, Homo sapiens
gcaactcctctgtgaacctactggatgtcccttctgtctctattgtggcgctgaacaaga

SEQ ID NO: 18250 - DNA, 60 bp, Homo sapiens
gtctgtctctcatcttagataagtgttagcgcactgtacatactgttctccaccttgctg

SEQ ID NO: 18251 - DNA, 60 bp, Homo sapiens
aatactcaggaccccaagatacagaaggaaatcatgcgtgtgatcggaactcaggtttac

SEQ ID NO: 18252 - DNA, 60 bp, Homo sapiens
cctgctcgaaaccaccctgttctctgtcctatggtcactcagttgacatcacaatccgaa

SEQ ID NO: 18253 - DNA, 60 bp, Homo sapiens
gggctccagaagcagaccagcaaaccagcagaccagcaggtggacagccaaacgatgcgg

SEQ ID NO: 18254 - DNA, 60 bp, Homo sapiens
gcaagtatgtccttcatcaggtaatcaggaactcttcagttgaagctgaggaactaactg

SEQ ID NO: 18255 - DNA, 60 bp, Homo sapiens
gtgcaccaggtactcctcttggctctcattaaccctctcctggtcatgctactagctggg

SEQ ID NO: 18256 - DNA, 60 bp, Homo sapiens
gggtagtacaagtggaaggacaccatcttagcatcagatcactttctgagcaactttggc

SEQ ID NO: 18257 - DNA, 60 bp, Homo sapiens
atttgtggctactcaagtcttactgtccagccaagggcccctacgtctcagcccaatggg

SEQ ID NO: 18258 - DNA, 60 bp, Homo sapiens
agccccatgatggctgaatccgaaatcctcgatgggtccagcttgatgtctttgcagctg

SEQ ID NO: 18259 - DNA, 60 bp, Homo sapiens
tattctcactggtactcctctccacaccaggacacgatgcagagaccacagatgatgtga

SEQ ID NO: 18260 - DNA, 60 bp, Homo sapiens
atggattgctgttaactagaaacacttctgtatgtcagtcagcatttaatgaccacctac

SEQ ID NO: 18261 - DNA, 60 bp, Homo sapiens
aaatgtagaccctgagaaacctgtccctgcagaaaggttcccttgggccatgctttgggc

SEQ ID NO: 18262 - DNA, 60 bp, Homo sapiens
attgactctgcggcgcgggccctttaataaagctaggatacgcctttggtgcagctaaaa

SEQ ID NO: 18263 - DNA, 60 bp, Homo sapiens
cactggtagcaataaatgcttcaggcccacatgatgctgattagttctcagttttcattc

SEQ ID NO: 18264 - DNA, 60 bp, Homo sapiens
caccaggcctaaccaggccaactggaattatctctcccagagccatctgcattgggattg

SEQ ID NO: 18265 - DNA, 60 bp, Homo sapiens
aaatcactcccatgatgagaccctggaggactccaaatcctcgctgtgaacaggactgga

SEQ ID NO: 18266 - DNA, 60 bp, Homo sapiens
tccgtgtgtttaatgaaatctgttgtcgatgtactaatcttggtttacagcatcttgaat

SEQ ID NO: 18267 - DNA, 60 bp, Homo sapiens
tttaaaacagggtgcaactttcttctctgtgaggactcaagcagtttgagagtttagatg

SEQ ID NO: 18268 - DNA, 60 bp, Homo sapiens
gggcaatagaggttctgaaaggtctgtgtcttgtcaaaacaagtaaacggtggaactacg

SEQ ID NO: 18269 - DNA, 60 bp, Homo sapiens
cagtctctcacttgagctgttaacaattcacaaccacagtgtatgcacctctgcactcac

SEQ ID NO: 18270 - DNA, 60 bp, Homo sapiens
ggcatgtgcacaggtccgtggcatgaattatttcagccaaattgaagtctggagatgtgc

SEQ ID NO: 18271 - DNA, 60 bp, Homo sapiens
cccttcaaagagatgtgaagaacaaagttcagaaatgttaaggacggtaaacgatatcat

SEQ ID NO: 18272 - DNA, 60 bp, Homo sapiens
tgtaattatccatctccttcactaggctgtaactctgtgaggacaaggaccacgtctgtc

SEQ ID NO: 18273 - DNA, 60 bp, Homo sapiens
gtgttggggttacagccgtgagccactgcacccaacctactttatatttttcatgatact

SEQ ID NO: 18274 - DNA, 60 bp, Homo sapiens
tctgctttcccttagcaaccctcatatacctccctgcaccgttacgctgtgatggcaact

SEQ ID NO: 18275 - DNA, 60 bp, Homo sapiens
aagcatcgggccagatcaaccgttaataacatgcttctgagctatgtggatgtataaatg

SEQ ID NO: 18276 - DNA, 60 bp, Homo sapiens
atggtgctttggaggcgttggtaagatgtgaccctctgttgcctatgcccataaaccagt

SEQ ID NO: 18277 - DNA, 60 bp, Homo sapiens
gcattagtgcttggtagcatattgtagtgccatgttaggggttagtgcatgagtctagtg

SEQ ID NO: 18278 - DNA, 60 bp, Homo sapiens
aaagtccttacgcattagcgggcaggattaaacgacttcacaccacgaggtgcaagactg

SEQ ID NO: 18279 - DNA, 60 bp, Homo sapiens
actgctacagtggagtattgccagttacactcacgcctcaagactcgccaaattcctctg

SEQ ID NO: 18280 - DNA, 60 bp, Homo sapiens
caggaagcatagctgtgatgcaagaagcatggccttggtgagtgctggagtatgttctct

SEQ ID NO: 18281 - DNA, 60 bp, Homo sapiens
aaggtttccgtttgtccgggagaggagtgactccactggctccagctctgtctacttcac

SEQ ID NO: 18282 - DNA, 60 bp, Homo sapiens
atcagtgtggttgccttcagacctgagtacttagctgagggtgggtgagagccctttgtt

SEQ ID NO: 18283 - DNA, 60 bp, Homo sapiens
tgggggagttttcgtggtgggatcaggaaagcagggcattcttcttgagcaccgagaaaa

SEQ ID NO: 18284 - DNA, 60 bp, Homo sapiens
tctccaaatcattgtcattgggcctcagtagtaaatctcacctctgaagtcttgcttcag

SEQ ID NO: 18285 - DNA, 60 bp, Homo sapiens
cggatccagggggtcggctgccaggtacaggtttcctaaagacaaaaaaaaatggaggaa

SEQ ID NO: 18286 - DNA, 60 bp, Homo sapiens
gccaacctctggctcctcctgacagtccgacttcagagaaatgaaccaaaccaattcaac

SEQ ID NO: 18287 - DNA, 60 bp, Homo sapiens
ttaccccacagggacgtgctctggtcccacggtccagtgctcttttgtcggttagttttg

SEQ ID NO: 18288 - DNA, 60 bp, Homo sapiens
aaaactaaccgacaaaagagcactggaccgtgggaccagagcacgtccctgtggggtaac

SEQ ID NO: 18289 - DNA, 60 bp, Homo sapiens
gcgacgcccagcggcgcttgtggctacagcgtgcacagatggacactctgctctacaaca

SEQ ID NO: 18290 - DNA, 60 bp, Homo sapiens
aagcctccccgactcggtcggtgagtacgtgtgtcggagaccaggggactggagtgcgga

SEQ ID NO: 18291 - DNA, 60 bp, Homo sapiens
tccctccacatcataggctatcagccccaaagatcccttcattcccacagcactgctgaa

SEQ ID NO: 18292 - DNA, 60 bp, Homo sapiens
acatgccttgacccagttcctttggtaaccaagttcacgtcatagcagataccctgtggc

SEQ ID NO: 18293 - DNA, 60 bp, Homo sapiens
agtgagcttggaggttctatgtgccataattaacattgccttgaagactcctggacgctt

SEQ ID NO: 18294 - DNA, 60 bp, Homo sapiens
ggaatctgaagtaaggtgtactaagcttgtttatgggttaagtgatatagccaaattcaa

SEQ ID NO: 18295 - DNA, 60 bp, Homo sapiens; identical to SEQ ID NO: 4855

SEQ ID NO: 18296 - DNA, 60 bp, Homo sapiens
gggttggtccaacattgactttcttcatcactgcaacatttctctgactagcaatgtgac

SEQ ID NO: 18297 - DNA, 60 bp, Homo sapiens
ggccactgaaagctgctcgctaggttttgcttggtggagaaacataatctgcacctatcc

SEQ ID NO: 18298 - DNA, 60 bp, Homo sapiens
acacttttcagcaaaatgccctctctcagcagcaggctcccaatggacacaatggcgact

SEQ ID NO: 18299 - DNA, 60 bp, Homo sapiens
gggggaagctaaagagctactcaaaattcttgctaggttactgtttctaggtcagaaagg

SEQ ID NO: 18300 - DNA, 60 bp, Homo sapiens
aaagtgctgagctgcttgaggaagaagcacccgacattcccctaaggagagtccacagca

SEQ ID NO: 18301 - DNA, 60 bp, Homo sapiens
gtagtccaaggtgccatttctctgtgccccttgtctcacacttgaaaagagtgacaccga

SEQ ID NO: 18302 - DNA, 60 bp, Homo sapiens
taggatcactgtcctcggacaaagagctcactcgtcccaatgaaaccaccattcacactg

SEQ ID NO: 18303 - DNA, 60 bp, Homo sapiens
ggaaaagtctggaagcacctcatgtggagctcaactcaaccacagttcttatgggaatgg

SEQ ID NO: 18304 - DNA, 60 bp, Homo sapiens
atcaaatcggagctgtgctggtcactggtttgagttgaaagttggggctcaaggctcaag

SEQ ID NO: 18305 - DNA, 60 bp, Homo sapiens
gaaatgatcccccctgctgtcactccaaaattaacactcaggataaatgtgcaaccccag

SEQ ID NO: 18306 - DNA, 60 bp, Homo sapiens
tatccctacccctggccctcaacttacaaaagggaaagtttcccatggaaagttcgttcc

SEQ ID NO: 18307 - DNA, 60 bp, Homo sapiens
ctgtggtgatcatggacaaccattgcgctgaactgctcttcatggtaaggatttcagtgt

SEQ ID NO: 18308 - DNA, 60 bp, Homo sapiens
gttgtgactcactcagtgttgacactcatcaccttcttgtgaacagttcatctcttcagt

SEQ ID NO: 18309 - DNA, 60 bp, Homo sapiens
cccttgggcggcacctttgtacaggggacaggggaagggaactgggttgtaggcatatta

SEQ ID NO: 18310 - DNA, 60 bp, Homo sapiens
ctgggagggagtgggaaaggttagtaagaggggactagataggtatgctcatccttaacc

SEQ ID NO: 18311 - DNA, 60 bp, Homo sapiens
ccttttcatcaccagcctctctgctcagtgctctggagttcttgaccttgtcctttatca

SEQ ID NO: 18312 - DNA, 60 bp, Homo sapiens
gtcacatctaagtgccatggtggtagttactccttccatctctacttctgcatgggaaac

SEQ ID NO: 18313 - DNA, 60 bp, Homo sapiens
aggagccatctaggaaaggggaatggaaactgagatgctggcactttggccctgccaatg

SEQ ID NO: 18314 - DNA, 60 bp, Homo sapiens
ctggcaggagagggcagatctccatgcaaagtatgtcagaaagcagatggaagccaggcc

SEQ ID NO: 18315 - DNA, 60 bp, Homo sapiens
ggctggtgtccatgtggaacatgacatctttccagtatccctgatccaggaaactgcagt

SEQ ID NO: 18316 - DNA, 60 bp, Homo sapiens
ccccgcactctggcgcttacagaatgaagatctacgacagagatgaattgaggggacaaa

SEQ ID NO: 18317 - DNA, 60 bp, Homo sapiens
gaaagttgggaaactgtggttgcttttgagctccctgtggccgtcttcagagtatgtgtg

SEQ ID NO: 18318 - DNA, 60 bp, Homo sapiens
agggctgctgccttctggccgcttttctgcctccagtcccaaaaggaatttctctggaca

SEQ ID NO: 18319 - DNA, 60 bp, Homo sapiens
tttcctttgctctgaataaaactgaactgtgggttctctataagtggcaaaaaaaaccaa

SEQ ID NO: 18320 - DNA, 60 bp, Homo sapiens
cgccggccgtctccttaacaccgaacaccacataaatgagcatattctgatgtactcttt

SEQ ID NO: 18321 - DNA, 60 bp, Homo sapiens
ctgacccttaataggatccaaacgagacagagggtatgcaaaggctaatgcggtataggg

SEQ ID NO: 18322 - DNA, 60 bp, Homo sapiens
caagagaccagacatggaaaggctaagacggtaccgtgagcattaatagaaggtctaaag

SEQ ID NO: 18323 - DNA, 60 bp, Homo sapiens
aaaagtacctggatgccgagcagagttatgcgatggcggtggaagcagggcagagccgaa

SEQ ID NO: 18324 - DNA, 60 bp, Homo sapiens
ggagtggaataccagcacaactcacagctgcttcctgttcctcgtccctgttttcaggaa

SEQ ID NO: 18325 - DNA, 60 bp, Homo sapiens
tgatctctacacctacttcaccatgctcaaggccatctgtgtggatgtggaccatgggct

SEQ ID NO: 18326 - DNA, 60 bp, Homo sapiens
ttacaaatggcgtgtttaggctggacccaattgctccggcggaataccaactgagcgtgg

SEQ ID NO: 18327 - DNA, 60 bp, Homo sapiens
tcaggcccttcctggccccttgatctcctgcactgagctgtggtgagcacatccgggtcc

SEQ ID NO: 18328 - DNA, 60 bp, Homo sapiens
ggcccatcttcagaggtggaatttgaagttccttctttatcgctgtcctttggtttggac

SEQ ID NO: 18329 - DNA, 60 bp, Homo sapiens
ttctcctcgcgctgcaaggatgctcctgggatttcggagaggccgcaggagtcatttcaa

SEQ ID NO: 18330 - DNA, 60 bp, Homo sapiens
cttcagttctggagtccttagacagtcatcttactagcaccttccagcattctcctttca

SEQ ID NO: 18331 - DNA, 60 bp, Homo sapiens
agtcttgggaaagtggcttggaagcctccctccagaaagaccacccttttgtccatcttc

SEQ ID NO: 18332 - DNA, 60 bp, Homo sapiens
agcaactggcgacctccacagcctatcaataacagggtggtgagagcttccttcaaatga

SEQ ID NO: 18333 - DNA, 60 bp, Homo sapiens
gctaccagctcaaactctgaactggcaactcagttttcacctccaatccagcctccttct

SEQ ID NO: 18334 - DNA, 60 bp, Homo sapiens
agcgcctaagcaagaagctgcggaggaagttacagatgtggctgtggtcgcagacattct

SEQ ID NO: 18335 - DNA, 60 bp, Homo sapiens
cctgtgatgtgtttcaatctagatgcaaagaacatggaaaaatcaaagtgctcgagtggt

SEQ ID NO: 18336 - DNA, 60 bp, Homo sapiens
gttatttatagggattctcttaaggcacaccagctgcctgttttgcatggtatttgcaaa

SEQ ID NO: 18337 - DNA, 60 bp, Homo sapiens
ctcggccgtatttgaatgcagatcctggcactgcagcagtgagaccacagagaaacaaca

SEQ ID NO: 18338 - DNA, 60 bp, Homo sapiens
agtattttggagataacggcagtggaggtgggcattgtggccatcaggggtctcttctcc

SEQ ID NO: 18339 - DNA, 60 bp, Homo sapiens
agaggacaacaggcatctggaagtgctctctcgccactctgggtgctttactgtctctgg

SEQ ID NO: 18340 - DNA, 60 bp, Homo sapiens
gtccccagagacatgcaagtcatgggtcacacctgacaaatggaaggagttcctctaaca

SEQ ID NO: 18341 - DNA, 60 bp, Homo sapiens
cctagtggagagaacacatggtacaatcgtaacacatgaaggacaagtaagtgctgcagt

SEQ ID NO: 18342 - DNA, 60 bp, Homo sapiens
gaggtccagttgtcactcacccagatcacactctcatctgctgatgggaggagtatttga

SEQ ID NO: 18343 - DNA, 60 bp, Homo sapiens
ccaagaagattccaaccttgagatccagtgtcaggagttctctattcctcccaactctga

SEQ ID NO: 18344 - DNA, 60 bp, Homo sapiens
atctctattcccaccgtttctctgggttcccacaatgggccactcaacactggcctaaca

SEQ ID NO: 18345 - DNA, 60 bp, Homo sapiens
aggacacatggctgactctgaactcgcagcttcagggaaaccttccagcagtttctccac

SEQ ID NO: 18346 - DNA, 60 bp, Homo sapiens
caaacttctttgtgaagagtgaaatgtgtttctgtacctctgggtttcacttacgggcat

SEQ ID NO: 18347 - DNA, 60 bp, Homo sapiens
gccaaagtaacgtggaagcgcacagcagaaaatcttcagaaagacatcaggtttgttctg

SEQ ID NO: 18348 - DNA, 60 bp, Homo sapiens
ttggtgaacaactcgacatactgggtgggtagcatgcccagagacttgatggaaactctg

SEQ ID NO: 18349 - DNA, 60 bp, Homo sapiens
ggggaagaatcctggaaaatgacaggacaccttgaacattcaagccctaggtgagcagtc

SEQ ID NO: 18350 - DNA, 60 bp, Homo sapiens
gcctctcgctcgccgagctccagccgaaggagaaggggggtaagtaaggaggtctctgta

SEQ ID NO: 18351 - DNA, 60 bp, Homo sapiens
atgccgaggttcaggagagctagcacagtgggaccccattgcctgtagaacagttgctct

SEQ ID NO: 18352 - DNA, 60 bp, Homo sapiens
attcatcaactcctgtgatagataggcccttcagagtatctcacatctaccacttctatc

SEQ ID NO: 18353 - DNA, 60 bp, Homo sapiens
cttaggtagagaaggagcactaaatagctactccagatataaaagctgtacatttgtggg

SEQ ID NO: 18354 - DNA, 60 bp, Homo sapiens
tattgacaccaagttatcatcccagaactaatgaagcaagtccagatgctagacgtggcc

SEQ ID NO: 18355 - DNA, 60 bp, Homo sapiens
accaagcaaaatagtgtgcctccttcacagaccaagtctgaaactagctgggaatctccc

SEQ ID NO: 18356 - DNA, 60 bp, Homo sapiens
tcattctttgtcgctgcagtcagatctttagtgagggttaataatccatatgactagtag

SEQ ID NO: 18357 - DNA, 60 bp, Homo sapiens
gcgtgtgttctgagagtcagggtgagtgttgaagggatggaaagaggcaggcaattatct

SEQ ID NO: 18358 - DNA, 60 bp, Homo sapiens
caatgctgcattacagaactccaaatctgaaagtacctccctttatcattcagttctcag

SEQ ID NO: 18359 - DNA, 60 bp, Homo sapiens
cttggaacacttaactgcattatgtccattgtccctgaagcttgagagaaggcagagaga

SEQ ID NO: 18360 - DNA, 60 bp, Homo sapiens
gtcatgctggtattgggctacaaccggaaaaatactgaaggtacacaaaagcagaaagag

SEQ ID NO: 18361 - DNA, 60 bp, Homo sapiens
atcttgggcgggacagtggcttactatccagttccaattcaggagaccctggaatcaatg

SEQ ID NO: 18362 - DNA, 60 bp, Homo sapiens
atcctgtcctccatcctcgacaccatcttccacaaggtgctttcttcgggctgtgattat

SEQ ID NO: 18363 - DNA, 60 bp, Homo sapiens
tgtggctcctgctctgtggctgtttccagtccaaagtgccctttcgttccaggtctccca

SEQ ID NO: 18364 - DNA, 60 bp, Homo sapiens
tctacacgctcgtgctgggcttcgccatccccgtgtccaccatctgtgtcctctatacca

SEQ ID NO: 18365 - DNA, 60 bp, Homo sapiens
tcaggacaatggcactggccacaatgccaccttctccgagccactgccgttcctctatgt

SEQ ID NO: 18366 - DNA, 60 bp, Homo sapiens
ttaaactgtgtcaggcacattttaagtgctcagtagatagtgctggtaggctggctatag

SEQ ID NO: 18367 - DNA, 60 bp, Homo sapiens
cttgctggatgcctttcaccctctattccttgatagcggattacacctacccctccatct

SEQ ID NO: 18368 - DNA, 60 bp, Homo sapiens
tgacattcacgtttcattctgccacactcgggaacggtgatcggggaagcatggggatcc

SEQ ID NO: 18369 - DNA, 60 bp, Homo sapiens
tacgttagacattgaagctataacaaaataaggcccaggtatcgctcctgaagagtagca

SEQ ID NO: 18370 - DNA, 60 bp, Homo sapiens
ttgacttacagatgcgtttataccctcgagttataattcaacgcctgtaagatctttaca

SEQ ID NO: 18371 - DNA, 60 bp, Homo sapiens
gcatcttgcccatgctgttggatacaaggacaaattctcatgtggttgggatacctggtc

SEQ ID NO: 18372 - DNA, 60 bp, Homo sapiens
ctttatcaaaccacagagaagcatgcgaaggtgaagagtggtattgcctggtagcagacc

SEQ ID NO: 18373 - DNA, 60 bp, Homo sapiens
ccaggtccatcctgggcagcaaaggcgtgtccccttctgtcagacagcttcacagagtgt

SEQ ID NO: 18374 - DNA, 60 bp, Homo sapiens
catgggagtattctcccccttgctctgactcaagccacatgctgaagatgatgtgttacg

SEQ ID NO: 18375 - DNA, 60 bp, Homo sapiens
tgacctgctactgttgcattgcaaggaagctgtgtgcccattaccagcaatcaggaaagc

SEQ ID NO: 18376 - DNA, 60 bp, Homo sapiens
ctgctgatacctgctctagatcagccacctctaatgtggaatgtatgtacctagagaaaa

SEQ ID NO: 18377 - DNA, 60 bp, Homo sapiens
aaggcaggaggactccgaaggtgctacccgtgagcaaagtgtaattaccgaatcctgact

SEQ ID NO: 18378 - DNA, 60 bp, Homo sapiens
tggcgcgaaggatcagctcagcctcctcgctctccagggacgacagttccgtgttccgtt

SEQ ID NO: 18379 - DNA, 60 bp, Homo sapiens
tttggcctcatcgtgttctgcaatgcaggcatcatcagggctctccagaaaagactccgg

SEQ ID NO: 18380 - DNA, 60 bp, Homo sapiens
ttccactccaagaaggtggaccagggtctgcaagttcaacggtcatagctgtccctccag

SEQ ID NO: 18381 - DNA, 60 bp, Homo sapiens
accatttaagtgcagactgatactttcatgaattagcatgttgaagcttctactacatgc

SEQ ID NO: 18382 - DNA, 60 bp, Homo sapiens
tcttcctacttcgttgaaggcccttcccagtcttttttgcaacttctctttttcatcctc

SEQ ID NO: 18383 - DNA, 60 bp, Homo sapiens
ggggccttcacacttcacttcatcccttctacccatcacaacatacaaagcaactacacc

SEQ ID NO: 18384 - DNA, 60 bp, Homo sapiens
acgtggctgatgagaacctcaaggccttcctcaggatggagatccggctgcacaccaggt

SEQ ID NO: 18385 - DNA, 60 bp, Homo sapiens
tcctgtatcatttgagctgggattcccacatcctctgagttggaagtcccatctcaagtc

SEQ ID NO: 18386 - DNA, 60 bp, Homo sapiens
cacttctgagtccaggtgttgggatcgaggtgttaactgtgattccatccagcgagtgcc

SEQ ID NO: 18387 - DNA, 60 bp, Homo sapiens
attactgaacctgtcttgctgtgcctcgaaactctggaggttggagcatcaagttccagc

SEQ ID NO: 18388 - DNA, 60 bp, Homo sapiens
tgtacactcgcagcctcatttaatccccaacagcgttatgagatgggcacagtgatgcac

SEQ ID NO: 18389 - DNA, 60 bp, Homo sapiens
tgtcatcctcatcggcttggcaggactcctgggactcatcacatgcctgatctgcggtgt

SEQ ID NO: 18390 - DNA, 60 bp, Homo sapiens
taccaaaacccgtcactcaagccaatgactacaattaagatatgagtaacatttcctaga

SEQ ID NO: 18391 - DNA, 60 bp, Homo sapiens; identical to SEQ ID NO: 4855

SEQ ID NO: 18392 - DNA, 60 bp, Homo sapiens
ctgattgccaatacaccccaccctcattacatcatcaggacttgaagccaagggttaacc

SEQ ID NO: 18393 - DNA, 60 bp, Homo sapiens
gggcgattggctgggaactgtatccacccaaatgtcaccgatttcttcctatgcaggaaa

SEQ ID NO: 18394 - DNA, 60 bp, Homo sapiens
agatgaaatagagcctcccagcagttaagtaacttgtgtgaagatgggacccttgttcct

SEQ ID NO: 18395 - DNA, 60 bp, Homo sapiens
ttagagccttcaaggttttacgtaccctgggaagcaagtgtggtgactttcttcgcagcc

SEQ ID NO: 18396 - DNA, 60 bp, Homo sapiens
ctggaacaagcattggaagagatgaagacaaaccactgtaggagagttgttcgcaacatc

SEQ ID NO: 18397 - DNA, 60 bp, Homo sapiens
tttcttggagcaaggctgggtgcaccttgtcatgcaatctgcacacacttgccaagtgcc

SEQ ID NO: 18398 - DNA, 60 bp, Homo sapiens
tggccatgtaggtcagggaaactccggcagaattcagtcctttcctttgagaaggctcga

SEQ ID NO: 18399 - DNA, 60 bp, Homo sapiens
catctcattggccagaaaacagtcacatggacaggtaacagcaaacaggctaggaaatgc

SEQ ID NO: 18400 - DNA, 60 bp, Homo sapiens
gtagtcaaactgcttattcaggctaagtgggaaatgaatttgtgcagtgtgttcccttaa

SEQ ID NO: 18401 - DNA, 60 bp, Homo sapiens
actttatggcttcagagtttcgtgaccaactatcccgccatggcagttctgtgacccgct

SEQ ID NO: 18402 - DNA, 60 bp, Homo sapiens
aaggagctatggagtcccatccagcaggttacagccacatcctctaaatgggcgcgattt

SEQ ID NO: 18403 - DNA, 60 bp, Homo sapiens
gggcgtttatcatattccttctgaagtttctagcccaagttgtaaagggctgtgtaaacc

SEQ ID NO: 18404 - DNA, 60 bp, Homo sapiens
ttgcaaatgggaggcaggactagcttgtggctccactcagagcagcatatggagacttgt

SEQ ID NO: 18405 - DNA, 60 bp, Homo sapiens
ttgtgggctcttagtccatagctgcctttgaggtggtgtagaccttgctaaccaggacgg

SEQ ID NO: 18406 - DNA, 60 bp, Homo sapiens
tctcagcttttggaattgcttcgacctgacatccgttgtaaccgtttgccacttcttcag

SEQ ID NO: 18407 - DNA, 60 bp, Homo sapiens
tgccggaactgtgattaccagcaggaggccgacaacagctgcatctatgtcaacaagatc

SEQ ID NO: 18408 - DNA, 60 bp, Homo sapiens
tctcgggcatgtttagctcttggtagagtggctttcctaacaaatagggagcagtggagg

SEQ ID NO: 18409 - DNA, 60 bp, Homo sapiens
ctatgcttttggatgccttcctgtaggaactgaaccttttgtgcaccacaagtggctggg

SEQ ID NO: 18410 - DNA, 60 bp, Homo sapiens
cagtaaattgcattgtagagagtacacttctgtcttcaaactgtatcttctttggatgga

SEQ ID NO: 18411 - DNA, 60 bp, Homo sapiens
taaatgactctgtgattctgaagaggtggcttgggagttgggagaagcccagcggatgcc

SEQ ID NO: 18412 - DNA, 60 bp, Homo sapiens
aaatgaggatgatactagtttgcaagacttctgtaaagaacaagagagctgctgggtacg

SEQ ID NO: 18413 - DNA, 60 bp, Homo sapiens
gacaaaacctgtgcagtggacagcaagactcaagcgtttacactgatactagcatcgatg

SEQ ID NO: 18414 - DNA, 60 bp, Homo sapiens
caggaagaacaaaggaagcaggaaaatgctcttaaacccaaaggggcttcactgaagagc

SEQ ID NO: 18415 - DNA, 60 bp, Homo sapiens
gggaaacaaagctcatacagctttatgcagcttcaggtaggataatcaatggataattac

SEQ ID NO: 18416 - DNA, 60 bp, Homo sapiens
agcattaggataatgacggttattctgtcccacagaagagtgttgaactggaacgcttcc

SEQ ID NO: 18417 - DNA, 60 bp, Homo sapiens
ccctcagtcaacagtctacaagacactgaatcttgccagcagccaagcagtgagcttgaa

SEQ ID NO: 18418 - DNA, 60 bp, Homo sapiens
aaggactgctgaagaggcatgtctgcacatgtcacctagaacatctccagccatcatgtg

SEQ ID NO: 18419 - DNA, 60 bp, Homo sapiens
ccgggctctgtgatttgtttgttttttgagatggagtctcgcactgtcatccaggctgga

SEQ ID NO: 18420 - DNA, 60 bp, Homo sapiens
tcccattccccagctgacagtggctgtctctggaactcctaccacagtcttcaattggta

SEQ ID NO: 18421 - DNA, 60 bp, Homo sapiens
gtttttgccgaagattaccgctggcctactgtgaagggagatgacctgtgattagactgg

SEQ ID NO: 18422 - DNA, 60 bp, Homo sapiens
aagcagatcaagttcgagaaagacctgaggcgcatctggctgaaggcggggctaaaggaa

SEQ ID NO: 18423 - DNA, 60 bp, Homo sapiens
tgtgcctttgcccaacaggaaaatgtgtctcatgcagaggggcgttacccagtctccaat

SEQ ID NO: 18424 - DNA, 60 bp, Homo sapiens
agcagcctcaacagctgcatggaccccatcgtctactgcttcgtcaccagtggcttccag

SEQ ID NO: 18425 - DNA, 60 bp, Homo sapiens
cccatgagtccttctagcaaatctccaaacatggaggcagtcttgtggatccctgacaca

SEQ ID NO: 18426 - DNA, 60 bp, Homo sapiens
cgaagtaagtcgaggccaagggttgctaattccgctcaatgtactaggggtacaacacgt

SEQ ID NO: 18427 - DNA, 60 bp, Homo sapiens
gtgtattgcgagtggaaaatagaaattcatgtttgactcaagctttagagattttgtaat

SEQ ID NO: 18428 - DNA, 60 bp, Homo sapiens
acaatctctctgtcagacaagccagctgactgatgctacctggttaagacagtgggtcct

SEQ ID NO: 18429 - DNA, 60 bp, Homo sapiens
tgacgtgtcttggagtgtggctagacaaagtggcagacatgaaagaaagccttcctccag

SEQ ID NO: 18430 - DNA, 60 bp, Homo sapiens
gcagaatctgcacacaacggagtcaaagatctgaggccaaatcctactacactttacgac

SEQ ID NO: 18431 - DNA, 60 bp, Homo sapiens
gtgaagcattctgtgccttgactgtggcgatgattacatgaaaactacagatgggatgaa

SEQ ID NO: 18432 - DNA, 60 bp, Homo sapiens
ttgaagcgctggagaaagatgtagcacttaagcctcaggaacgtgtggagaaacgccaga

SEQ ID NO: 18433 - DNA, 60 bp, Homo sapiens
ccttctgactattaaagccttgattaatatcctgtcaacaaaggcggaggaaagcagata

SEQ ID NO: 18434 - DNA, 60 bp, Homo sapiens
ggatggcattaaaacatttttaaggcagttgtctaatatgaccaataatctaaacaatat

SEQ ID NO: 18435 - DNA, 60 bp, Homo sapiens
aggggctacagaaacactcatttttatgctgttccctcttgggcttcatgcaaagacaat

SEQ ID NO: 18436 - DNA, 60 bp, Homo sapiens
agaaaacggttccgtggagagcgatggcttgaccaacgactcatcctcgctgatgggaga

SEQ ID NO: 18437 - DNA, 60 bp, Homo sapiens
gaacaaatggaaaggacctttggatctgagatgtaagactgtttgaatccttgcttaggc

SEQ ID NO: 18438 - DNA, 60 bp, Homo sapiens
ggtctggaactgaaagtgatgcgtatttctgagttatgcctgtatttaagaagctgagtg

SEQ ID NO: 18439 - DNA, 60 bp, Homo sapiens
tgaccccactgctcagctctgagccacccttcctgcagctcctttgcggcctccttgccg

SEQ ID NO: 18440 - DNA, 60 bp, Homo sapiens
ttattctaagtgaaaaactgcaatggaaaatcaaatactgaaggggtgcgttgcccctcc

SEQ ID NO: 18441 - DNA, 60 bp, Homo sapiens
gcagcaccatttaaaccctctgcagtacctcttcctgttcgaatgggttatccagtaaaa

SEQ ID NO: 18442 - DNA, 60 bp, Homo sapiens
ctgtgttcctagctctctccaacttaagcagtcatttcctgccctaaacctgggcatcct

SEQ ID NO: 18443 - DNA, 60 bp, Homo sapiens
ccatcgaggaagctctttacatagtccagtgtttatttcgaggagtgagggatggcaggc

SEQ ID NO: 18444 - DNA, 60 bp, Homo sapiens
gttgtataccaggctgagggctttctgtgtcacttcacaggaagtaggtaaacaccgaaa

SEQ ID NO: 18445 - DNA, 60 bp, Homo sapiens
tacttctgagggctgcagctccgcagtgtggaagccgataagaaaaggatttgaagcatt

SEQ ID NO: 18446 - DNA, 60 bp, Homo sapiens
aaaccccgactgagttgctgtcttggcatgatgtcagagagctaaaggagccatggtgat

SEQ ID NO: 18447 - DNA, 60 bp, Homo sapiens
ctgggaacacggggctttaggtctgcttgaaaggtgaggacgtgactcccacatgtaatc

SEQ ID NO: 18448 - DNA, 60 bp, Homo sapiens
tacctacctagccttgtagccagcagtctctcccattcatctactgtcatcagtcagatt

SEQ ID NO: 18449 - DNA, 60 bp, Homo sapiens
gccacttgctttgctcagttctgtgtttcagccacatttccacggtggaccctgtttgtt

SEQ ID NO: 18450 - DNA, 60 bp, Homo sapiens
accagacactgtgttaggcaaggggtcttcaatgggccacaaatagatgtggtccttgac

SEQ ID NO: 18451 - DNA, 60 bp, Homo sapiens
cagttcctgcaagcagcctacttcagtatgagagcagaggtttatcagtgttatgcctac

SEQ ID NO: 18452 - DNA, 60 bp, Homo sapiens
gtgcctcagatgcatgatggagttggtggaaggcaggagattagtagagaacttcgaaag

SEQ ID NO: 18453 - DNA, 60 bp, Homo sapiens
ctgagtgatggatgagatgggaattgcccttgattggctaggtggctggtttaaagagcc

SEQ ID NO: 18454 - DNA, 60 bp, Homo sapiens
gtctcacagagaattgactccttgcccacctatactacctttgtgggtagagactccagt

SEQ ID NO: 18455 - DNA, 60 bp, Homo sapiens
cagtgccctgcaggtagcaagatatacctagagtggaggtttccaaaatctacagtctca

SEQ ID NO: 18456 - DNA, 60 bp, Homo sapiens
ggatggatggatggatggatggactatccaatctagtgaattccatgaaatgctcaatgg

SEQ ID NO: 18457 - DNA, 60 bp, Homo sapiens
agacaaggacctgggttcccatgtgctcatgctgagaacttgagaagggacaggaattct

SEQ ID NO: 18458 - DNA, 60 bp, Homo sapiens
gcagggcatgagttagggagactgaagagtattgtagactgtacatgtgccttcttaatg

SEQ ID NO: 18459 - DNA, 60 bp, Homo sapiens
gcatcacctgagacctgtgaacactgaagctccagctcagacatgttggggaccatttta

SEQ ID NO: 18460 - DNA, 60 bp, Homo sapiens
tcttcggacctcaaggttccccttaacacagagcgccccgcagtcttcgcggaaagcgtt

SEQ ID NO: 18461 - DNA, 60 bp, Homo sapiens
gttcaaagagaggtcaagtcatgcaaccatctttcctccagcacttttggggtaaggagg

SEQ ID NO: 18462 - DNA, 60 bp, Homo sapiens
tgaaggcagatcccgacgtgacgctagcgggacaggaagccatcttcattctggcacgag

SEQ ID NO: 18463 - DNA, 60 bp, Homo sapiens
tacaatgcagactgccccaatgtgacagcacctgtttgtgcctcaaatggccacactttc

SEQ ID NO: 18464 - DNA, 60 bp, Homo sapiens
gatctgatcaaattgccctgtggagacacacgccccaatagcatcctggctctatttgtc

SEQ ID NO: 18465 - DNA, 60 bp, Homo sapiens
ggatgctgttgggtgcactgctcttatcctgtggtagtaccgcatctctgatcaatgagt

SEQ ID NO: 18466 - DNA, 60 bp, Homo sapiens
attcagttgctaccctggtccagtatctccccttttatgcagggatggatatggggacca

SEQ ID NO: 18467 - DNA, 60 bp, Homo sapiens
tccacttcactgatgctgagcagccctacgttgaaaaggattctaaagggaaagtgctag

SEQ ID NO: 18468 - DNA, 60 bp, Homo sapiens
ccgctggtctccctgaggactgagggtgaacttcgctctttgccttaaacctctttattt

SEQ ID NO: 18469 - DNA, 60 bp, Homo sapiens
agaggctgagcagttaatataggcgctcgaccttacaggaggagagtccgaggtctttat

SEQ ID NO: 18470 - DNA, 60 bp, Homo sapiens
atttaaaaaatggcaaaggatttggatagatctccagagaggacatgcagatagccagtg

SEQ ID NO: 18471 - DNA, 60 bp, Homo sapiens
ttgggctttggagccccccaggccccagtagataatctcagtgataccttgaagaagctg

SEQ ID NO: 18472 - DNA, 60 bp, Homo sapiens
ttgggctttggagccccccaggccccagtagcagataatctcagtgataccttgaagaag

SEQ ID NO: 18473 - DNA, 60 bp, Homo sapiens
catttggtacaaccagtggcgggctctttgataatctcagtgataccttgaagaagctga

SEQ ID NO: 18474 - DNA, 60 bp, Homo sapiens
catttggtacaaccagtggcgggctctttgcagataatctcagtgataccttgaagaagc

SEQ ID NO: 18475 - DNA, 60 bp, Homo sapiens
ccggtagcgcttgcagcatggctgaccaactgactgaagagcagattgcagaattcaaag

SEQ ID NO: 18476 - DNA, 60 bp, Homo sapiens
tcctgctttggcagagagaagaaaatagccactgcccgctttcaaggcaagatcgacctt

SEQ ID NO: 18477 - DNA, 60 bp, Homo sapiens
ggtcaaatgggtgattggtattttctggaacagactccaaatctacacgtttcactcagc

SEQ ID NO: 18478 - DNA, 60 bp, Homo sapiens
agctgtggaaagtcagcgagcgtgataagaggccagaaggctacaatctgaaagatgagg

SEQ ID NO: 18479 - DNA, 60 bp, Homo sapiens
tgccatctgacagtatgacaaatggtcccatgtgcgatattcacactgcattgtagtcaa

SEQ ID NO: 18480 - DNA, 60 bp, Homo sapiens
agttgagctcctcttgcctaagtggtcgcgccccctttaagagcagcgattgtaaggaga

SEQ ID NO: 18481 - DNA, 60 bp, Homo sapiens
cctcacattcacaatccccattggtctgaagtcacgtagcacagagcatctatagcacat

SEQ ID NO: 18482 - DNA, 60 bp, Homo sapiens
acagtgctgatccaactctgtgctggggagaggtagaggaaggagcatgagtttctgatt

SEQ ID NO: 18483 - DNA, 60 bp, Homo sapiens
ctcacgggctctggaatcagagtttcaagttggaatcctgacttcctagctgtatcggtt

SEQ ID NO: 18484 - DNA, 60 bp, Homo sapiens
cgtgtgtatgtgtatttggggggactgaagggtacgtggggcgaaacaaaaccggccatg

SEQ ID NO: 18485 - DNA, 60 bp, Homo sapiens
ctactactcccacaacacatatctccttagacactaatgctgtgttataagactcatggc

SEQ ID NO: 18486 - DNA, 60 bp, Homo sapiens
acaaggccagggatagaaaacactccataattgctttccttgattttgctgaggatttgg

SEQ ID NO: 18487 - DNA, 60 bp, Homo sapiens; identical to SEQ ID NO: 4855

SEQ ID NO: 18488 - DNA, 60 bp, Homo sapiens
cacagcatctttatggcctatctagttactgtagttttatggcttaagaagaagaccacc

SEQ ID NO: 18489 - DNA, 60 bp, Homo sapiens
accttgagtggtaaggttttataaggtagggtttccatgatttaggatgtgaatgcgaaa

SEQ ID NO: 18490 - DNA, 60 bp, Homo sapiens
cagatcgaagtggaggaaaccattgaggctgccaaggctgaggaagccaaggatgagccc

SEQ ID NO: 18491 - DNA, 60 bp, Homo sapiens
tttttgtacccctttttgcacactgtcagcaaaacacgtccctttgagtatctccggctc

SEQ ID NO: 18492 - DNA, 60 bp, Homo sapiens
aaaccatttggcaaggtctggaccatctctctgcaactgacctgccttggccgcacagag

SEQ ID NO: 18493 - DNA, 60 bp, Homo sapiens
tggggcaggaagtaagtgcccatcaggacaaaaggccttatctaccactttcttgtcatg

SEQ ID NO: 18494 - DNA, 60 bp, Homo sapiens
ttttgcctggaagcactaaggcttacagtctgtggtgactggcagtaagaatcaacatgg

SEQ ID NO: 18495 - DNA, 60 bp, Homo sapiens
gaccgaagagccagtaaccagtagctccaacttgtctcagcatcacatcttctgtgctct

SEQ ID NO: 18496 - DNA, 60 bp, Homo sapiens
tcagccagtattcacgtgccagcaacagacctactccacttggctaccctgcaattaaga

SEQ ID NO: 18497 - DNA, 60 bp, Homo sapiens
aaatggaatgcttcacaaatatgccccttccttgcacagaggccatgctaatttgtgaag

SEQ ID NO: 18498 - DNA, 60 bp, Homo sapiens
tcaggacctcgcccgaagctacggcatcccctacatcgagacctcggccaagacccggca

SEQ ID NO: 18499 - DNA, 60 bp, Homo sapiens
tcaggctgaaattaaagccatgcaaaagaaggtctaggtccatcaaggaaattcccctcc

SEQ ID NO: 18500 - DNA, 60 bp, Homo sapiens
agacgtcttgtagtgctacattgggtgaaaccgttggtccatttttgtctgtttctatga

SEQ ID NO: 18501 - DNA, 60 bp, Homo sapiens
ggagacggattcagaagggctacagaccaaggttgttgaaaaccagacatatgatgagcg

SEQ ID NO: 18502 - DNA, 60 bp, Homo sapiens
atgctctaccgactctagttatggtgcttctggcctttactgtgctgtcatcacttgggg

SEQ ID NO: 18503 - DNA, 60 bp, Homo sapiens
cctctccgcagcagttctcgaactggcctccttaacgtcgcttcgccttcgcttctgcaa

SEQ ID NO: 18504 - DNA, 60 bp, Homo sapiens
aagcatggcaagagtccctgggacagctacaaaagctccatgacactcaacaccactgag

SEQ ID NO: 18505 - DNA, 60 bp, Homo sapiens
ctgtataacaagatttctaagactataaaggcaagccaaactaattgtcttgctgcctca

SEQ ID NO: 18506 - DNA, 60 bp, Homo sapiens
catgtcccaatcacctcatagttcctgagtctctcttctgcataaggcatgtactagttg

SEQ ID NO: 18507 - DNA, 60 bp, Homo sapiens
aacagagaggttcctgtttgaacccaggagagtggaagagagattgggactgagtgctga

SEQ ID NO: 18508 - DNA, 60 bp, Homo sapiens
acccaggctgtactgttgtttcttaccaacagcataggttttcatcactggaaggagcct

SEQ ID NO: 18509 - DNA, 60 bp, Homo sapiens
gaagggtctcaatggcttcaggctaagaagagatttctccctgttataagcagcaagaca

SEQ ID NO: 18510 - DNA, 60 bp, Homo sapiens
tccaggtctgggtggtcagaatggatccacgcctgatggctccacgcatttcccttcgtg

SEQ ID NO: 18511 - DNA, 60 bp, Homo sapiens
tttacccatttgtgagcacttaaaacactccacagagtcagacagtgggaaaggtcaccc

SEQ ID NO: 18512 - DNA, 60 bp, Homo sapiens
gaggatctacgtgacgcttctcagcaccctgaactcctgtgtcgacccctttgtctacta

SEQ ID NO: 18513 - DNA, 60 bp, Homo sapiens
tgttgggacgcagaggcaaagacacagcagaggggacaaatgaggacaggggtgtgggtc

SEQ ID NO: 18514 - DNA, 60 bp, Homo sapiens
ccgagaagcaagggataatgctgtggctgaaaaggaacgagcagtgatggctgaaaagga

SEQ ID NO: 18515 - DNA, 60 bp, Homo sapiens
ccgtctacggccataccaccctgaacgcgcccgatctcgtctgatctcggaagctaagca

SEQ ID NO: 18516 - DNA, 60 bp, Homo sapiens
gacctagcaactgttgagcttggttttggctgtcaggctctgttctgctgatggattgag

SEQ ID NO: 18517 - DNA, 60 bp, Homo sapiens
cctcagccggactggccgggcctgagacccatgcccaggaaaataacagagctggatgct

SEQ ID NO: 18518 - DNA, 60 bp, Homo sapiens
cttgacctaaagcctagcataaaattagctaagtagaatgtttccaatgatggctgcatc

SEQ ID NO: 18519 - DNA, 60 bp, Homo sapiens
gcctgggtggaacctcagcttactgtgtttactgactgggtaatgtggcctctgaagctg

SEQ ID NO: 18520 - DNA, 60 bp, Homo sapiens
gtgtggagaacgtgacagatgtgaaggttgggctgacagacacacggcctgcagcagccc

SEQ ID NO: 18521 - DNA, 60 bp, Homo sapiens
tgcaggcgctcgaggcgcttttcgtgcagaaccagtatcctgacgtgagtacgcgcgagc

SEQ ID NO: 18522 - DNA, 60 bp, Homo sapiens
cttgtgaaaccgctgattgctgacttttgtgtgaagaatcgtgttcttggagcaggaaat

SEQ ID NO: 18523 - DNA, 60 bp, Homo sapiens
gtcagaggaatagcttaccacgaacccctcagcatactgggaatctcttcctgaacaacg

SEQ ID NO: 18524 - DNA, 60 bp, Homo sapiens
atgggattgtggaggatcggaggccaaaggaaaggatctcttttgaggtgatggtgctgg

SEQ ID NO: 18525 - DNA, 60 bp, Homo sapiens
cccagcgaaggccaaagcagttaaacccaaggcggctaaaccaaagaccgccaagcccaa

SEQ ID NO: 18526 - DNA, 60 bp, Homo sapiens
tgccaaaccgaaaaaggcaaccaagagtcctgccaagcccaaggcagttaagccgaaggc

SEQ ID NO: 18527 - DNA, 60 bp, Homo sapiens
ctataagcatcttgtcactccgcaattagacagctaagagatctgtgttacttccctcac

SEQ ID NO: 18528 - DNA, 60 bp, Homo sapiens
cagtgcttccatggcttgcttacacataatttgctgaggtaacttttgcagaaagtaacc

SEQ ID NO: 18529 - DNA, 60 bp, Homo sapiens
cacttcagattgtctgatttacagtttggaaaggacaccgcaatgttcaaataggtagga

SEQ ID NO: 18530 - DNA, 60 bp, Homo sapiens
gatgtgttggcatgtattatctgaatctattgctgatgtgtaataacactttagctctag

SEQ ID NO: 18531 - DNA, 60 bp, Homo sapiens
gcacgagccagagtgtctgcctcagactagatttgacttgagttctttatgacccaggac

SEQ ID NO: 18532 - DNA, 60 bp, Homo sapiens
gaagcaactgtgagacaccagggcatacttccctgtatgagtggaaaacaaggcacggaa

SEQ ID NO: 18533 - DNA, 60 bp, Homo sapiens
ctaccgtgcacaggatggccctccacaatggattctgtggccccaaatgttaatagtgcc

SEQ ID NO: 18534 - DNA, 60 bp, Homo sapiens
tgtggaagaagctgggcagcaacgtcggcgtctacacgacagaggccctggaaaggacct

SEQ ID NO: 18535 - DNA, 60 bp, Homo sapiens
agagtcctctctgagacaggctcagtttcagacaacaacccgctggaatgcacagtctca

SEQ ID NO: 18536 - DNA, 60 bp, Homo sapiens
tattatgtgcatctgttcatgagcccattgaacaagtatcagctgactaacatctattat

SEQ ID NO: 18537 - DNA, 60 bp, Homo sapiens
agctgctggagacagtggtgaacaggaccagagacgggtggcaatggttctggagcccga

SEQ ID NO: 18538 - DNA, 60 bp, Homo sapiens
accctgctgaagagaggacagtgaccacagaactcagtgtaccaaacatgcatacaaagg

SEQ ID NO: 18539 - DNA, 60 bp, Homo sapiens
gcctttaattggagtcaccaagcgataaaggggacattgtcctcaacaataaccctataa

SEQ ID NO: 18540 - DNA, 60 bp, Homo sapiens
tttgagggcatcgacttctacacgtccatcaccagggcgaggttcgaggagctgtgctcc

SEQ ID NO: 18541 - DNA, 60 bp, Homo sapiens; identical to SEQ ID NO: 17403

SEQ ID NO: 18542 - DNA, 60 bp, Homo sapiens
gtaaatgcatcagagatggatattcaaaatgttcctctatcagaaaagattgcagaggta

SEQ ID NO: 18543 - DNA, 60 bp, Homo sapiens
tcttcggtgacattcttctacctagtaggagtcatgcccctgtagtgcccaacctagcca

SEQ ID NO: 18544 - DNA, 60 bp, Homo sapiens
caggacacctgcccgctctttccctggaataacagcctctgagtggattctgcatgttat

SEQ ID NO: 18545 - DNA, 60 bp, Homo sapiens
aaattatggggctatgtacctgttgggccaaaggcacaaacccaccctgctgtgtgcagg

SEQ ID NO: 18546 - DNA, 60 bp, Homo sapiens
cactttggacccagcaatttccaggagttcatcctgatgagagaactgaaaggtgtgcac

SEQ ID NO: 18547 - DNA, 60 bp, Homo sapiens
gtccacgtagtcatgcccgattcctctttgccttctggcatgattgttcaagatggtgga

SEQ ID NO: 18548 - DNA, 60 bp, Homo sapiens
acgggcctcagacactcatggattatcaccttctgcaaagaaaacaccagtgccctggag

SEQ ID NO: 18549 - DNA, 60 bp, Homo sapiens
ctgcccctcaggtgcgagtttgtgcggtaaagaacacaccccggagatgtggacacggcc

SEQ ID NO: 18550 - DNA, 60 bp, Homo sapiens
tcctctgtccacggaaccgctgcccatctaaccttcgtaaagacctgtctcctgtttcca

SEQ ID NO: 18551 - DNA, 60 bp, Homo sapiens
atcggtggcaagaagtcctctcctgggtccttcagtattaccaggtccctgaaaagctac

SEQ ID NO: 18552 - DNA, 60 bp, Homo sapiens
tccaggtgagcactatgttctcagaggacgacttccagtcaacagaaagagccccatatg

SEQ ID NO: 18553 - DNA, 60 bp, Homo sapiens
agcggggtctgatctcgtgtagccatatagagtttgcttctgagtgtctgctttgtttag

SEQ ID NO: 18554 - DNA, 60 bp, Homo sapiens
accagcacaacctcttcccctacaagtagcacaacctcagctcctacaaccagcacaact

SEQ ID NO: 18555 - DNA, 60 bp, Homo sapiens
cgggagaagtgaccagagcaatttcggctcctacaaccagcacaacttctggtcctggaa

SEQ ID NO: 18556 - DNA, 60 bp, Homo sapiens
gcctgtcatctcttccacttcagttaggccttaaagcttcctcttagctaccatgttccc

SEQ ID NO: 18557 - DNA, 60 bp, Homo sapiens
gaagactgtgaatacaggttccattggtcacctttcgggcttctttccccagtgctgaag

SEQ ID NO: 18558 - DNA, 60 bp, Homo sapiens
tcacaaacccacttttcctcttgcctgagtgcctcacataccctactgcctgagatggtt

SEQ ID NO: 18559 - DNA, 60 bp, Homo sapiens
agaagttggaagatctgctgtgcttccagacaccctcttaccctctaggaggcacataca

SEQ ID NO: 18560 - DNA, 60 bp, Homo sapiens
aatagaactcccatggggcacatgaagcagctggatgtagccgaccagtggatctggttt

SEQ ID NO: 18561 - DNA, 60 bp, Homo sapiens
cctcaccttctgtttctcattgtggctcctcaaatgggatttgcatgttcctgtcaagcg

SEQ ID NO: 18562 - DNA, 60 bp, Homo sapiens
gacgagacggaatcccaggactactggaaagcttgggacgcgaactacgcctccctcatc

SEQ ID NO: 18563 - DNA, 60 bp, Homo sapiens
acatttggtcactttcaaagtcttgctatagatttgcagcttaataacattgttgtacaa

SEQ ID NO: 18564 - DNA, 60 bp, Homo sapiens
gccacatctggctaatttcagtgcaatctgtatcaaaagtccaattggcttctctgcaga

SEQ ID NO: 18565 - DNA, 60 bp, Homo sapiens
ctttgagcaagaggaggaactcctggtgcctttctgagcctgcgtgggagaaccccaatt

SEQ ID NO: 18566 - DNA, 60 bp, Homo sapiens
gtttaacttcctcctcctggctttcatgctagtgtcataaattttacttgtagattttat

SEQ ID NO: 18567 - DNA, 60 bp, Homo sapiens
agaatgattctttcccagagtcattcatggccacatccctgcatcagcactgggcatgca

SEQ ID NO: 18568 - DNA, 60 bp, Homo sapiens
gggtgagggacgagtccacgggacacccaaaggcaacatgacggaaccttgccaaaagaa

SEQ ID NO: 18569 - DNA, 60 bp, Homo sapiens
gcttcagagaaacgtggaacaccattaactgctccaacatacacttagtatcggaaggag

SEQ ID NO: 18570 - DNA, 60 bp, Homo sapiens
gacgaaacaggagtaggtgtgagttgataattgttgaagttaagtgatcagtacgtgggt

SEQ ID NO: 18571 - DNA, 60 bp, Homo sapiens
ctgtacgaagccaatgattacgaggagattgtctttctcatgttcaccctgaagcaagcc

SEQ ID NO: 18572 - DNA, 60 bp, Homo sapiens
cccttcagtacctcacgcatggtccccagcttctcctaggatcccagtggcatttatcag

SEQ ID NO: 18573 - DNA, 60 bp, Homo sapiens
gggctttgtgtggacttttcactactgatgtggccaggactaccaacacagtctggctta

SEQ ID NO: 18574 - DNA, 60 bp, Homo sapiens
aagaggacatgggatagaccttgtgacagaccaattctgtgacccctgtcttctgggtca

SEQ ID NO: 18575 - DNA, 60 bp, Homo sapiens
ccctagcagtgaactgtaacaacacatgggaattaggcaagctccttagaaactctgccc

SEQ ID NO: 18576 - DNA, 60 bp, Homo sapiens
acgttctagcaggacatcggtgctttgctgtccatcttcccatgctgcaatttcttcctg

SEQ ID NO: 18577 - DNA, 60 bp, Homo sapiens
tgcgtctgttccgtgacttcgcctgggtgggatgtaccgcaggtgcatcgcgtcgaggtg

SEQ ID NO: 18578 - DNA, 60 bp, Homo sapiens
ctgaatgcagatggatgctgggagatggatatggtgagatggtgtggggaggatgttaga

SEQ ID NO: 18579 - DNA, 60 bp, Homo sapiens
ggtcatttctgtatcaagtatggtgttattgcctttaaccaagccctgtccaaggccaaa

SEQ ID NO: 18580 - DNA, 60 bp, Homo sapiens
caaccatccccactccattccttcgacaacttcccagagcacattcaatcagtgtccctt

SEQ ID NO: 18581 - DNA, 60 bp, Homo sapiens
gtctaagcagaagcccctgcgaccattccaacactgacagaacattcctctgccttgttt

SEQ ID NO: 18582 - DNA, 60 bp, Homo sapiens
ccttgtgtctttgctgtttttcttggcctctcagcaaggatttgaaagatgccatagaag

SEQ ID NO: 18583 - DNA, 60 bp, Homo sapiens; identical to SEQ ID NO: 4855

SEQ ID NO: 18584 - DNA, 60 bp, Homo sapiens
cataagtctctgcggctttgcggagaagaactctgtggaggttagtcagtggtggactct

SEQ ID NO: 18585 - DNA, 60 bp, Homo sapiens
ggttacctttggtaggattattgactaagggagctttctgtatcttggtctggatggtag

SEQ ID NO: 18586 - DNA, 60 bp, Homo sapiens
caaacatttgaagtctccttgtacatcactaccaagtggagtttattccagaaatgaaag

SEQ ID NO: 18587 - DNA, 60 bp, Homo sapiens
gaggcggaaagtgcagacacatttaatcaaaccaggcaccaaaatgctaacactccttcc

SEQ ID NO: 18588 - DNA, 60 bp, Homo sapiens
ccagctcacgtctgaatccctcggcgccccctttctcttctcctagccccttcctcacgt

SEQ ID NO: 18589 - DNA, 60 bp, Homo sapiens
agcactctgcgcgcccgctcttctgctgctgtttgtctacttcctcctgcttccccgccg

SEQ ID NO: 18590 - DNA, 60 bp, Homo sapiens
ttactggctgacggcagcagtgactcccgcttaaaagtcccgcggacgcaaactcgcggt

SEQ ID NO: 18591 - DNA, 60 bp, Homo sapiens
gagcagaacagtgaggcatccttagaactatcttggttgcaaagggtaggtctctaatgt

SEQ ID NO: 18592 - DNA, 60 bp, Homo sapiens
taggagcagccagaagacgaagaaccatagctgtagcagtaggagtagtagaagtcgacg

SEQ ID NO: 18593 - DNA, 60 bp, Homo sapiens
ggctggattccacctcgctcagtgatgatagtctgtttccctggaacattcctgtggttt

SEQ ID NO: 18594 - DNA, 60 bp, Homo sapiens
ctctacccaagagtgatataacaggtccgatctcacgtcaccgataagtgtctacgcttg

SEQ ID NO: 18595 - DNA, 60 bp, Homo sapiens
cctgataaatgattttaggttgtttcgatgtgtacttgataaagatatcaaggaactttt

SEQ ID NO: 18596 - DNA, 60 bp, Homo sapiens
ttacttgggtcaagttgcaatcctcctcttcaagtcaggctaggtggccatggtgaaggt

SEQ ID NO: 18597 - DNA, 60 bp, Homo sapiens
gggaaagttgaagccagtgatctttctgggatagcacaagttaccctgtatctttgctca

SEQ ID NO: 18598 - DNA, 60 bp, Homo sapiens
gtggtaaagtttcaaagaacaaagtttgagagaatcttttcttgagagtaatagagtctg

SEQ ID NO: 18599 - DNA, 60 bp, Homo sapiens
taggagccgtataacgctgtgctgtagctgtacggttctcaacatcaggaagggcaattc

SEQ ID NO: 18600 - DNA, 60 bp, Homo sapiens
cctcattcgaagggatccagggtatccttgggttatgtaggagggaatcatatttgttct

SEQ ID NO: 18601 - DNA, 60 bp, Homo sapiens
gaacagcaagaagcccccagcaaacatccacagatggccctggacatcagccacattctg

SEQ ID NO: 18602 - DNA, 60 bp, Homo sapiens
cttttcaaggttgatcttggcatgttgttttgcagaataagtggctgaatatgtaagaat

SEQ ID NO: 18603 - DNA, 60 bp, Homo sapiens
cttcaagtccatatgcgtatttgcagacctttcctgttcccactcttgttggctcttctg

SEQ ID NO: 18604 - DNA, 60 bp, Homo sapiens
ccggaacactcatctatacctgtctgacaaggtcaagctccaaggaagggactctctaca

SEQ ID NO: 18605 - DNA, 60 bp, Homo sapiens
gggcctttggtacctctgatctcttcgtttagcaacttactgtgcacccatatgcttagc

SEQ ID NO: 18606 - DNA, 60 bp, Homo sapiens
aaccgctcccatttactcccggactcgatcacagtagaacatccaaactcgattttcgcg

SEQ ID NO: 18607 - DNA, 60 bp, Homo sapiens
gaacagcacttaagaactgagctcaaaatggcctataagggtatttccctatagtggtcg

SEQ ID NO: 18608 - DNA, 60 bp, Homo sapiens
ccagcctgagaggtagtgtggcaccatccctacttatccgtgcttccttcctcaatttac

SEQ ID NO: 18609 - DNA, 60 bp, Homo sapiens
gccttacagagacctcaccattaacagcatctgcaagagaagattaaagcacacgattac

SEQ ID NO: 18610 - DNA, 60 bp, Homo sapiens
gggttcaggagctgccaaggttgtgttcatgctgacctgttggcatagcgtacagcagtg

SEQ ID NO: 18611 - DNA, 60 bp, Homo sapiens
caaataatggagattaaacatagggagaggcaatatgcaaatgaggtcacttgtgcccca

SEQ ID NO: 18612 - DNA, 60 bp, Homo sapiens
tcactagggagtgccagacagtgggcgcaggtttgatctcagttactcccttacttgaag

SEQ ID NO: 18613 - DNA, 60 bp, Homo sapiens
cagggcatgttggtttccctggcctctcagtgtcctaactggagcccagagtgccttgtt

SEQ ID NO: 18614 - DNA, 60 bp, Homo sapiens
gggctcttcgactgcgactgaatggcttgttttatggcttacttaccctgggatggaaaa

SEQ ID NO: 18615 - DNA, 60 bp, Homo sapiens
agagaaattggcagctggatgctgaaggctttgaactctgggactaggggcttgtactga

SEQ ID NO: 18616 - DNA, 60 bp, Homo sapiens
ccgctagcctctgtgggtcaagtttctggacaccaagtctctgggaactagtgtttgatt

SEQ ID NO: 18617 - DNA, 60 bp, Homo sapiens
ggtttgcactgaattgtcttttgtacatacagtgaattgttttgctgttctccccactcc

SEQ ID NO: 18618 - DNA, 60 bp, Homo sapiens
tctctcagacaacttcaagcgctctttccaacgcatcctatgcctcagctggatggacaa

SEQ ID NO: 18619 - DNA, 60 bp, Homo sapiens
ttccagattagggttagggtagggaggactgggtgttctgaggcagcctagaaagtcatt

SEQ ID NO: 18620 - DNA, 60 bp, Homo sapiens
ggttggttttgtattgtttttatagagctgccctcacatgcttagcaacattagatgtct

SEQ ID NO: 18621 - DNA, 60 bp, Homo sapiens
gctctgtgcctcaaaatgtatcttgcacttgatcttcatcctcaacagtgaccagcttct

SEQ ID NO: 18622 - DNA, 60 bp, Homo sapiens
cattgttaacgatgaagaaactaaatctcaggaagaaaaactaagtgaagacaaaagaag

SEQ ID NO: 18623 - DNA, 60 bp, Homo sapiens
atggacatgcttcatccatcatcggtgtccacgacctcagaacctgagaatgcctcctcg

SEQ ID NO: 18624 - DNA, 60 bp, Homo sapiens
tgctgaacctcgtcgtgaccagccttgatgccaccgtcaaccacgtgtcccttatcctca

SEQ ID NO: 18625 - DNA, 60 bp, Homo sapiens
gaagagccaaaagattgaagtagtctatgtctcagtcaccatatgggagggcaaatgccc

SEQ ID NO: 18626 - DNA, 60 bp, Homo sapiens
atcccaccccatggatgtttctgatcctaccatatgccaactgctccctctttcgggaga

SEQ ID NO: 18627 - DNA, 60 bp, Homo sapiens
cttccagaaggttctgtgcctccgcaagggctctggtgccaaggacgctgacgccacgga

SEQ ID NO: 18628 - DNA, 60 bp, Homo sapiens
ccccctcccagaaaaggaactttgaggctgagatgaaagtgctccctatttctatcctgg

SEQ ID NO: 18629 - DNA, 60 bp, Homo sapiens
aggtgtttgtgcttcacccccagacgtcagcctcgaaggcaggactgtggggtgttcgtg

SEQ ID NO: 18630 - DNA, 60 bp, Homo sapiens
tgatgactcagaggaggagaaggcagcagcacccccaagaagactgtacctaaaaagcaa

SEQ ID NO: 18631 - DNA, 60 bp, Homo sapiens
agcgccttttggtaacttcaccaagaagctgaccgcttgtatgtctacagtagggctgct

SEQ ID NO: 18632 - DNA, 60 bp, Homo sapiens
acttattgccatggtgcagctcaagagcagatctcaggatggagaggtgtcccacctgag

SEQ ID NO: 18633 - DNA, 60 bp, Homo sapiens
gataactttattaagtctgaactctgatgtaaagtgggatgcaagcagatactaacggtt

SEQ ID NO: 18634 - DNA, 60 bp, Homo sapiens
acatgtagtagcccaagcccaggcattgcagtgcacagagcaacattggggtaacaggat

SEQ ID NO: 18635 - DNA, 60 bp, Homo sapiens
ctctacaatgagcaaatgagaggggcctagaaaacatttctgtcaggtttgagatggttt

SEQ ID NO: 18636 - DNA, 60 bp, Homo sapiens
aatacagactggtgttagctataacaaaactccagtaaggccaaagaatcccaagttctt

SEQ ID NO: 18637 - DNA, 60 bp, Homo sapiens
caacatgacaggatgtcacaggtcgctgagcagagattttcagactcagtttccacccga

SEQ ID NO: 18638 - DNA, 60 bp, Homo sapiens
cctggagagactgagcaccgtacctgagttcaaacttgggaatgttctagatggtgactc

SEQ ID NO: 18639 - DNA, 60 bp, Homo sapiens
cacagagcccgttctgcgccccacaccatctggagcaggggcttctcttctgagtgaact

SEQ ID NO: 18640 - DNA, 60 bp, Homo sapiens
tctctagacttagggcctctagccgcaagcacccctcagtactcctcactaccaccctca

SEQ ID NO: 18641 - DNA, 60 bp, Homo sapiens
catctgtgattccgtatgaaggctttctaagccctgaaatttgcagggtcatttcctcag

SEQ ID NO: 18642 - DNA, 60 bp, Homo sapiens
gggtattcaggaggtgtctaacacatcatcaagagcctgtgtgttttcaggatgctctgc

SEQ ID NO: 18643 - DNA, 60 bp, Homo sapiens
gctttctgggtaatgtagtttcccaggttccaaggccgtaaagagagagattcccagggg

SEQ ID NO: 18644 - DNA, 60 bp, Homo sapiens
accatgtatgtttgtactttcacttattattggacatttctatcattccacgtttgggct

SEQ ID NO: 18645 - DNA, 60 bp, Homo sapiens
ctctctatgatgtgataatacagtaaaagctttcttacccagcatagtgggagagtggag

SEQ ID NO: 18646 - DNA, 60 bp, Homo sapiens
atataccacacatgatggtgtctctgagccgaccagattatggaaactcaattgtcagag

SEQ ID NO: 18647 - DNA, 60 bp, Homo sapiens
aggagaaggccagtgttgattctgacagcaatcttctggctctcattcgagatgtcttac

SEQ ID NO: 18648 - DNA, 60 bp, Homo sapiens
ggcagggtaggctagcaagcaagagacctagagaaaagttgatgttacagtctcaagtcg

SEQ ID NO: 18649 - DNA, 60 bp, Homo sapiens
ggcttgttgatttctcagctctaagagaatctctgcttttgccaataggcacacataaga

SEQ ID NO: 18650 - DNA, 60 bp, Homo sapiens
agctgaaagaggtgctggcagcttactgagatagaaatagggctaccttacaagacattc

SEQ ID NO: 18651 - DNA, 60 bp, Homo sapiens
cagatcacaactcatccttggtctctgggtgtgtctgcgtctattactgacttaccctgg

SEQ ID NO: 18652 - DNA, 60 bp, Homo sapiens
accagttctgtggtctccacccaggaactgactcagcataagagaagagctttgactccc

SEQ ID NO: 18653 - DNA, 60 bp, Homo sapiens
tcattggtagcaagcagtttaggtttggatgaaaccaaaagccagttcgcatgtgtgtag

SEQ ID NO: 18654 - DNA, 60 bp, Homo sapiens
cctgaaagaagcagatcccagttcaaaagtagccataagaaggaaggattcaccacctcc

SEQ ID NO: 18655 - DNA, 60 bp, Homo sapiens
cagttctgagactagctggcaagtcaatgttggttgttcctagagctttcgctgcattgg

SEQ ID NO: 18656 - DNA, 60 bp, Homo sapiens
ggcttgatcaactgtaatagacatgaaccaacatgacaccctggaggatgcatgtgatgt

SEQ ID NO: 18657 - DNA, 60 bp, Homo sapiens
cttaaaagtataatataaaaaataaattcttacttgaattgtgcaatttgtagaacttta

SEQ ID NO: 18658 - DNA, 60 bp, Homo sapiens
caggacccatctcgggtcgacaaaatctgaagacaagttaagggaacaggcagctgtttg

SEQ ID NO: 18659 - DNA, 60 bp, Homo sapiens
tgtgaacagctactgtgacatgcaaaggaaaggacagtgcagaattaaaccgtgttgaag

SEQ ID NO: 18660 - DNA, 60 bp, Homo sapiens
ctctcatttcctctgatgtctggatgatcggcagggcaggaatctgagcgctggccccgt

SEQ ID NO: 18661 - DNA, 60 bp, Homo sapiens
ccccgcctcccagcctctggtgaccatcatatggttctctactccgttagatcaactttt

SEQ ID NO: 18662 - DNA, 60 bp, Homo sapiens
cttacgccgcattacagagagaacgtcaaatttagcagccatatctgccatagggtccaa

SEQ ID NO: 18663 - DNA, 60 bp, Homo sapiens
cgcacgtgtgcgcaggttcgaatctccgccgcttcgcggttgcttctcaacgtccgggcc

SEQ ID NO: 18664 - DNA, 60 bp, Homo sapiens
actgtcagttccatgacggagggaacccatttgtttttgctcaccattgtattcccagca

SEQ ID NO: 18665 - DNA, 60 bp, Homo sapiens
ctgcctttccccgtcatgtatccatgtgcatgctcttagagaccttgaatggttgagggt

SEQ ID NO: 18666 - DNA, 60 bp, Homo sapiens
aaaacagcttgcttgaccccctcccttagagattccgattcagtagatctgggttggtca

SEQ ID NO: 18667 - DNA, 60 bp, Homo sapiens
cggccagtttcctgcacttgtttctctcgctttattgctggacggtgggagaagggcaag

SEQ ID NO: 18668 - DNA, 60 bp, Homo sapiens
gcctagtgcagccaatagcgagttcatctacatggtaggcttggaagaagtcgtacagag

SEQ ID NO: 18669 - DNA, 60 bp, Homo sapiens
cagaaagccctgggcatggatggattcctgtctaccctctggtttccactgacacattta

SEQ ID NO: 18670 - DNA, 60 bp, Homo sapiens
gctactgtcacacccatactaacctagggagcctgtctctgaaacactgccacatacttg

SEQ ID NO: 18671 - DNA, 60 bp, Homo sapiens
agatgctctaatatgccaagttcaaactggaatggccctagaatctgagtcatgccctag

SEQ ID NO: 18672 - DNA, 60 bp, Homo sapiens
taatatagttctccagtcactgaccttgaattgacttacataaactactgccaatgttta

SEQ ID NO: 18673 - DNA, 60 bp, Homo sapiens
aggctcctgcagacagagaggcagagtcagggtggaaggaggagcccagcgttatttgct

SEQ ID NO: 18674 - DNA, 60 bp, Homo sapiens
agcgggcgagggcaacccgctggtcaccagcagtgcgacatccttgcgtttggtggcagg

SEQ ID NO: 18675 - DNA, 60 bp, Homo sapiens
gcctggagccgtggctaagcatttctccagaccactcctggttttcttaacagtttgctt

SEQ ID NO: 18676 - DNA, 60 bp, Homo sapiens
tcaccacactggagtgcacacacgtaccccgcacccagtatttcctgacagaaagctcct

SEQ ID NO: 18677 - DNA, 60 bp, Homo sapiens
caccccatatctaagttctggctctaagcaaaagggttcatctctcctcaagcccttaaa

SEQ ID NO: 18678 - DNA, 60 bp, Homo sapiens
gcacatgttcacaaagaagcatgtacagggatttcattgcagcaatgcatgtaacaagaa

SEQ ID NO: 18679 - DNA, 60 bp, Homo sapiens; identical to SEQ ID NO: 4855

SEQ ID NO: 18680 - DNA, 60 bp, Homo sapiens
ctgccactaccttattaagctgttatgtcagatataagcctgcttatcaatccagtgaca

SEQ ID NO: 18681 - DNA, 60 bp, Homo sapiens
ctgctgtctctcaaacacagttcaagcatgccttagccactaccttaggtacttgaccac

SEQ ID NO: 18682 - DNA, 60 bp, Homo sapiens
cttgacagtcttgtctcgtgtattgaattcgtgccaaaggtgagggtaaggggttgtgag

SEQ ID NO: 18683 - DNA, 60 bp, Homo sapiens
tctgccacctgctaccattgacctacgtgaacacagacattctgtctccaccttgatggt

SEQ ID NO: 18684 - DNA, 60 bp, Homo sapiens
gtcggagctttgccaagtgagatagaatcaactgtcaccccattcctttcccagaaggtc

SEQ ID NO: 18685 - DNA, 60 bp, Homo sapiens
gcatatcctgcaaagggctgtgaactatcttggtgaactgtcttgggtcccctttccatg

SEQ ID NO: 18686 - DNA, 60 bp, Homo sapiens
ccccacttacacacaatctttctgcagttgctcccagcattaattctggaatggggactg

SEQ ID NO: 18687 - DNA, 60 bp, Homo sapiens
tagaggtgcgataaagaagaggacattgccagtcgtcacagcagctgcaatagctcctct

SEQ ID NO: 18688 - DNA, 60 bp, Homo sapiens
ctgttggtgaggcatgggaatcttttcacaccaaggtgttagacatagtggcatttaacc

SEQ ID NO: 18689 - DNA, 60 bp, Homo sapiens
cttgccagctttgacccaagattaccctgggtctgcgagttttatcacctgctttatcat

SEQ ID NO: 18690 - DNA, 60 bp, Homo sapiens
caccattacacaggactgcctttcaggaaggttctctgccactggaaaagggtacagctt

SEQ ID NO: 18691 - DNA, 60 bp, Homo sapiens
cagagccctactgcagtgatttgaacaactcctaaatagatgccataataaagacaagac

SEQ ID NO: 18692 - DNA, 60 bp, Homo sapiens
atgatgttggaggcaagaggactatggaagcgtagtttgaggagaccacaaaggctctcc

SEQ ID NO: 18693 - DNA, 60 bp, Homo sapiens
gacgtcacgaagagatatagcgatggcgtcgtgcagatgcagcacgtcgcacacagacat

SEQ ID NO: 18694 - DNA, 60 bp, Homo sapiens
tctggcagctggaggaggctgattgcactccacaaacaggactgtctggaccaagggaaa

SEQ ID NO: 18695 - DNA, 60 bp, Homo sapiens
ttccgaaggtgcgttaccagattgctgccgtttttgtgctgggtcatcagagcagattcc

SEQ ID NO: 18696 - DNA, 60 bp, Homo sapiens
ccttcatccactccatgctcagcacgtctcatcccaagcgacaattagttggctagaaac

SEQ ID NO: 18697 - DNA, 60 bp, Homo sapiens
agaccggggaactctactcttcctacgttgggctggtgtacatgtttaacctcatcgtgg

SEQ ID NO: 18698 - DNA, 60 bp, Homo sapiens
aggacaaatctactccagccacgatgagaagtgggtgagccagggtctgagtttcacatt

SEQ ID NO: 18699 - DNA, 60 bp, Homo sapiens
aagagcaacgtcaccagtttccagaggaggggtcctagagccagcgtgaccaacgacagc

SEQ ID NO: 18700 - DNA, 60 bp, Homo sapiens
aggcccagcttgctgagttagacctgctagccagtatgttccctggtgagaatgagctca

SEQ ID NO: 18701 - DNA, 60 bp, Homo sapiens
ctcttcagccacctctctgcggtccagacgaggggcatcaagcacagaatcaagtggaac

SEQ ID NO: 18702 - DNA, 60 bp, Homo sapiens
atttgaagaatgcctgtgaagccaggtgtgggttctactcagtgccatagatagactgag

SEQ ID NO: 18703 - DNA, 60 bp, Homo sapiens
aggctattgatattttgatagagattgctttcagtctgcagattccttaggaagtattga

SEQ ID NO: 18704 - DNA, 60 bp, Homo sapiens
tgccagcagggcagaacagccatctgtcactctaatagaacctcactcccactcgaattc

SEQ ID NO: 18705 - DNA, 60 bp, Homo sapiens
cactggtgcacttacaggcggaagagcttcctcatttgctgagggcttttcctgaatccg

SEQ ID NO: 18706 - DNA, 60 bp, Homo sapiens
aagcaagagaacttcatcctaggcagctgtggcacagaccaggtgaagggtgtgctgact

SEQ ID NO: 18707 - DNA, 60 bp, Homo sapiens
ccttttttctgatgttcaagttgattgttgttcagtatggcatatatgacaaaagtatat

SEQ ID NO: 18708 - DNA, 60 bp, Homo sapiens
gagatgcatttcagagatagggaacctctcatggtgcaccatctgcaggagtgcctctgt

SEQ ID NO: 18709 - DNA, 60 bp, Homo sapiens
agtttgccatgatggatgccagaacctgcacctggggcttggtgacgcgatgactgagat

SEQ ID NO: 18710 - DNA, 60 bp, Homo sapiens
caacattgtgatctgtactacaggaaccaaatgtcatgcgtcatacatgtgggtataaag

SEQ ID NO: 18711 - DNA, 60 bp, Homo sapiens
tgccctctctgtcagacacctgtccttccttctacagaccatgctggacttcttgtcgga

SEQ ID NO: 18712 - DNA, 60 bp, Homo sapiens
tttgttaggtcacggcttgtcctgtctggattctgcatctggaagcgctgcatgctctca

SEQ ID NO: 18713 - DNA, 60 bp, Homo sapiens
tttgtcttgaagttacccaaaggcctgtgtattgttctcaatggtcccaagaattactct

SEQ ID NO: 18714 - DNA, 60 bp, Homo sapiens
cagctcggcgctctgctggggggtgatggcctcctcgctgttggcctcattagccattga

SEQ ID NO: 18715 - DNA, 60 bp, Homo sapiens
gagccctggcggctgctgaagttgaggctgtgcagatggaggaggatattctgcagctgc

SEQ ID NO: 18716 - DNA, 60 bp, Homo sapiens
gctagcatgtttatttctaggcctactcaggtaaaaaatcatgcgagcttaccgctgtgt

SEQ ID NO: 18717 - DNA, 60 bp, Homo sapiens
atgcctctgtctcttgctgcaagcagagaaacaacgtctgtactcgagccgggtttatgt

SEQ ID NO: 18718 - DNA, 60 bp, Homo sapiens
tggtgcactgggcggtaccacttcaccacgtctttcagtggtccttccgtgtgttccaaa

SEQ ID NO: 18719 - DNA, 60 bp, Homo sapiens
cttccctctctactgaatctgctgaagatcatgcagctgctgttcctgcctctaaaaccc

SEQ ID NO: 18720 - DNA, 60 bp, Homo sapiens
caacctaatattcctatggaaaacccttgcaaacatgaaacaatgcatttgcccaagtcc

SEQ ID NO: 18721 - DNA, 60 bp, Homo sapiens
cttcttgaatgcactgtatgttcgttagcaattcctgagacaaatgctttgtttatatcg

SEQ ID NO: 18722 - DNA, 60 bp, Homo sapiens
ccgccttagacaaactaccaaagtacaatcgtgtctctctctagccggaatgctacagag

SEQ ID NO: 18723 - DNA, 60 bp, Homo sapiens
tggcactcatcactgtcatgtgcaatgacttcttccagggctgcccagaccgaccctgaa

SEQ ID NO: 18724 - DNA, 60 bp, Homo sapiens
cagcccagtgaacctatgtactaatggcaagttaggggcaaatggaaatggacacatccg

SEQ ID NO: 18725 - DNA, 60 bp, Homo sapiens
cccactccatggggctttcagaaagacaggtagaacataagagtctagagagaccttggg

SEQ ID NO: 18726 - DNA, 60 bp, Homo sapiens
acacctgagcctgtctgtggtgaccattccgctcctctcccactaccctccaatctatca

SEQ ID NO: 18727 - DNA, 60 bp, Homo sapiens
tgacgaggacaagcagtcccggctgcgctaccagaacctggagaacgatgaggatggagc

SEQ ID NO: 18728 - DNA, 60 bp, Homo sapiens
tctgttattctccaccaccactcaatctgtctatcatctatctctccattcattcttcca

SEQ ID NO: 18729 - DNA, 60 bp, Homo sapiens
tcttcggcaagatcgtcaaccgaggctgtcgagaaacggcgtttatcttcgctatcacct

SEQ ID NO: 18730 - DNA, 60 bp, Homo sapiens
agtgtcacgaaatcttctgctgcccgctgaagcaagtacaccacaaagagaacacagagc

SEQ ID NO: 18731 - DNA, 60 bp, Homo sapiens
gcgcgcccaatatctcccgggcgtctgaggttccaggggcacaggacgacgagcaggaga

SEQ ID NO: 18732 - DNA, 60 bp, Homo sapiens
ggtgaggttcgagagcgggaccttcttcgagttactggagatgtgcgagatcgagatctc

SEQ ID NO: 18733 - DNA, 60 bp, Homo sapiens
tggagggacgcacgcctggcctgtacccctcatcaaggatccattttgttggacaaagac

SEQ ID NO: 18734 - DNA, 60 bp, Homo sapiens
cccaccactgtctcccatgccgctggctcctgcagctgcctctttactgactgtgccgac

SEQ ID NO: 18735 - DNA, 60 bp, Homo sapiens
caccccaaactactgtaaaggaacttgtctccgagtactacgcgatggtctcaattcccc

SEQ ID NO: 18736 - DNA, 60 bp, Homo sapiens
cctgctagattagcctgaaggtggggcaaatgactggcaccttgtcacaagacattgttg

SEQ ID NO: 18737 - DNA, 60 bp, Homo sapiens
cttgtagcaaaggcagtaaaaaggaacggaacagttctggaatggcaaggaaggctaagc

SEQ ID NO: 18738 - DNA, 60 bp, Homo sapiens
ccttgaagccttgactcactgtagcacgtgcatatagcacgctactccagtctccatgat

SEQ ID NO: 18739 - DNA, 60 bp, Homo sapiens
atatactgcagtcccaaggttcatccctcatcagaatcggtcttgagcactctccagcct

SEQ ID NO: 18740 - DNA, 60 bp, Homo sapiens
aacataggactctccagcctctcaccgcactcattggggttgaatttgcacaaatatgag

SEQ ID NO: 18741 - DNA, 60 bp, Homo sapiens
agccgtggggaccgattcgccaagtgctctactgtgagacatcacaggtggtcattctag

SEQ ID NO: 18742 - DNA, 60 bp, Homo sapiens
cttcgatgaagagatgatgacgagtctgacttggggatgttctctttgcccaggtggcct

SEQ ID NO: 18743 - DNA, 60 bp, Homo sapiens
gtggaggagtgccagtgcaaggtgaagacggagcatgaagatggacacatcctacatgct

SEQ ID NO: 18744 - DNA, 60 bp, Homo sapiens
agaagtttgagagtggtgccagagaactgaccgagtcagaaaccaagtccttgatggctg

SEQ ID NO: 18745 - DNA, 60 bp, Homo sapiens
tggaccccactgccatcttctggcgcaaggaggactcggatgccatagattggaatgagg

SEQ ID NO: 18746 - DNA, 60 bp, Homo sapiens
ggtacgaggctagagtgacagtgagtcactattcacagagtacgaacatagtaaccttga

SEQ ID NO: 18747 - DNA, 60 bp, Homo sapiens
gtacaaccatttacgattgacacctataagtgtatctctgtgtcacacgagagactgcgg

SEQ ID NO: 18748 - DNA, 60 bp, Homo sapiens
cagttcgtgagtactcggcaggggtgtaatccgaatttttgtctacgttaagggcctgca

SEQ ID NO: 18749 - DNA, 60 bp, Homo sapiens
agggcttgatgcttgcagtgagaggctggagagtgctagacaaagttctggattctgggc

SEQ ID NO: 18750 - DNA, 60 bp, Homo sapiens
ttgtcaccaggcttcctcttccatgtcaatggagtctggaggcagagttggaatccagct

SEQ ID NO: 18751 - DNA, 60 bp, Homo sapiens
atgacgagtcagaaaggtcacgtcctgctcttggtccttgtcagtgccatgttctgtggt

SEQ ID NO: 18752 - DNA, 60 bp, Homo sapiens
tgggccagacgctggtgtggtgtctgcacaaggagtgaccttctcatgctgatttgcaga

SEQ ID NO: 18753 - DNA, 60 bp, Homo sapiens
tacgctcatggagagagggcgcagagcaaaccatgtcacgccatccaatgacaccagctg

SEQ ID NO: 18754 - DNA, 60 bp, Homo sapiens
gttctgagcaaacatggctcccgcacacaaggactttaagatgataagaaggaacatgtc

SEQ ID NO: 18755 - DNA, 60 bp, Homo sapiens
gacccaccacacttcctttattggtctgggtttttaggcttctctgaacttgggttttag

SEQ ID NO: 18756 - DNA, 60 bp, Homo sapiens
tcagcctcccagtggtctttgtagactgcctgatggagtctcatggcacaagaagattaa

SEQ ID NO: 18757 - DNA, 60 bp, Homo sapiens
ggtgctgtgtaggaatggcctcagctcttgttttgctgctggttttaggggccaaagtaa

SEQ ID NO: 18758 - DNA, 60 bp, Homo sapiens
catacatctgcaaaggttagggagaaaacggtagccctggcagagaagagctagttagtg

SEQ ID NO: 18759 - DNA, 60 bp, Homo sapiens
agctggatcacgcgccctcttcaatgacatgacacgcagctagagtgtatgagcttgctg

SEQ ID NO: 18760 - DNA, 60 bp, Homo sapiens
gagaaccataacaagaaaagacatcgtcattccgagtaggaaaagccacctgcctgcagg

SEQ ID NO: 18761 - DNA, 60 bp, Homo sapiens
agccttagaatcagccttctgggagctcagcttcagagtttacaagggagcagtttctgg

SEQ ID NO: 18762 - DNA, 60 bp, Homo sapiens
tatccaaaagaataactagacataaattttaccattgagagaaaggtttatacactgaag

SEQ ID NO: 18763 - DNA, 60 bp, Homo sapiens
ccaccggcacaagatacccaactccgacaccaatcaccaccaccactacggtgaccccaa

SEQ ID NO: 18764 - DNA, 60 bp, Homo sapiens
gaatgcaaatcccagtgtgtgaaaagtgtgggttaggacaataaaaggggaggtgacacc

SEQ ID NO: 18765 - DNA, 60 bp, Homo sapiens
gtgaatgtcaaccaccgcagagtctgaggctcatttccactagagaaaacgaaacccaag

SEQ ID NO: 18766 - DNA, 60 bp, Homo sapiens
agcgtggtcgcggccgaggttcgaagacgatcagataccgtcgtagttccgaccataaac

SEQ ID NO: 18767 - DNA, 60 bp, Homo sapiens
agggcgtggtgcggagggcggtactgtaggataaggaggaaggcagtaaagctgcagtat

SEQ ID NO: 18768 - DNA, 60 bp, Homo sapiens
attcaatgagctgacacaggaggtgtggcacttggagaacctggatcatgaagcagagca

SEQ ID NO: 18769 - DNA, 60 bp, Homo sapiens
tctcaaaactgatacataaattaaacttactcccacaaggattctagcgtttgtcgtaag

SEQ ID NO: 18770 - DNA, 60 bp, Homo sapiens
aggtcacgaagaggatgaagctgtcctggtttaaccatgtgctcaccatagaccccatca

SEQ ID NO: 18771 - DNA, 60 bp, Homo sapiens
ccagtgttaggacacagcaagctgaagacttcttttacatggcaaaaccagccctctgac

SEQ ID NO: 18772 - DNA, 60 bp, Homo sapiens
catgctcagcaaccacgaggaccagtcctagcgcatcaaggtgccgggagggaaaggaca

SEQ ID NO: 18773 - DNA, 60 bp, Homo sapiens
caagagtcacacaagttcaccactttgcacttcatagagaaggtacatagagacattgca

SEQ ID NO: 18774 - DNA, 60 bp, Homo sapiens
taaatgtgtgcccagttatgttttggaaatggcagttccttggggtcatgtttctactgg

SEQ ID NO: 18775 - DNA, 60 bp, Homo sapiens; identical to SEQ ID NO: 4855

SEQ ID NO: 18776 - DNA, 60 bp, Homo sapiens
tgagtgctccagatcatccagtgaagccatgaccaaagcaaggtcaggttcatcggctca

SEQ ID NO: 18777 - DNA, 60 bp, Homo sapiens
gacaggcgtctaggattaggggagtagtctgaggctgaaaaccacacatttagggaacct

SEQ ID NO: 18778 - DNA, 60 bp, Homo sapiens
gttcttgacatgttagggtggcatttactgcttgtctcctgttcaagtagcttttctttc

SEQ ID NO: 18779 - DNA, 60 bp, Homo sapiens
tgtagcattccagcggcttgaccaatgacctatgtcacaagaggtggcgtgtaaggaatg

SEQ ID NO: 18780 - DNA, 60 bp, Homo sapiens
gaaggatgacctggattgtcctagaactttgttccaacagattacatgtgttcataacga

SEQ ID NO: 18781 - DNA, 60 bp, Homo sapiens
ggcgctccatcgtgtacggggtaaagcaaaaagatggccaagaactaagtaacgatctgg

SEQ ID NO: 18782 - DNA, 60 bp, Homo sapiens
actggtttcagcgagagcctctgtactgctctgtagtctctgctaggacatggacgaaaa

SEQ ID NO: 18783 - DNA, 60 bp, Homo sapiens
gggccgagccctcctgaccagaaaacccgaccagtctcacacaggtcccacagcacagaa

SEQ ID NO: 18784 - DNA, 60 bp, Homo sapiens
cttcgactatgcagagttcgagccgcacatcgtgcccagcaccaagaacccgcaccagtt

SEQ ID NO: 18785 - DNA, 60 bp, Homo sapiens
tctggggaagctaaggatggtcctcccaagaagcaggtctgtggggatagcatcaagcct

SEQ ID NO: 18786 - DNA, 60 bp, Homo sapiens
ctcaaccagcttccactcaaccaactcaccagttagacaatgggccctctcctgtgttta

SEQ ID NO: 18787 - DNA, 60 bp, Homo sapiens
ataaggttttatgtttttggatgaaacaatatggtaaatagtaggctgggcacggtggcc

SEQ ID NO: 18788 - DNA, 60 bp, Homo sapiens
caggccaagtcattttttatgatgggtctctgagatagggcagtttgttagaggagaggc

SEQ ID NO: 18789 - DNA, 60 bp, Homo sapiens
aacaagtaactcaagaagcaatgagaaaggaagccgagaaaactgccttgtctacaatag

SEQ ID NO: 18790 - DNA, 60 bp, Homo sapiens
ggtattgtcatctctttgtgtctactttgccacctttccccagaataggcctgaatgaga

SEQ ID NO: 18791 - DNA, 60 bp, Homo sapiens
gtcaagccttgtttaagagtcccagttggagcacccagttggaaaccccatttgccattc

SEQ ID NO: 18792 - DNA, 60 bp, Homo sapiens
gccagaagctctagctttacccagctctgcctggagactaaggcaaattgggccattaaa

SEQ ID NO: 18793 - DNA, 60 bp, Homo sapiens
ctaggttgctacggcttatcatgtgcttggtaaaaggtgatcgcaggttctcagacgagt

SEQ ID NO: 18794 - DNA, 60 bp, Homo sapiens
ttgttccctttgcgtttgcagtgcgttttactcaagtagccagaaacaccccacgtttct

SEQ ID NO: 18795 - DNA, 60 bp, Homo sapiens
cagtaagtgccagaactgacttgaacctagctctctgtcttgattcaggaactactgctc

SEQ ID NO: 18796 - DNA, 60 bp, Homo sapiens
ggggtagagatgaggggagggagtaagttaaaccttggactagcaagtagaagcctgggg

SEQ ID NO: 18797 - DNA, 60 bp, Homo sapiens
acaggaccttcttcaacagataaaacacacagacccgcagctttgggaacaggctgatgg

SEQ ID NO: 18798 - DNA, 60 bp, Homo sapiens
tgagaagctggtttgtgaagcacctgccatgaaatcctgtggccttgctggtggtagtct

SEQ ID NO: 18799 - DNA, 60 bp, Homo sapiens
acagagtgttacaaggacatacacactacagatgtctccacggtgggatctgcccacact

SEQ ID NO: 18800 - DNA, 60 bp, Homo sapiens
attgttgggctaaatgaaactttctcactttgtctcactgacagagctatcattacctgg

SEQ ID NO: 18801 - DNA, 60 bp, Homo sapiens
agtactcatagagtcaaagtatgagcatagcaaaggtcagggcttaatgcccaatgcccc

SEQ ID NO: 18802 - DNA, 60 bp, Homo sapiens
gatggcgatccatgtccctatttcagaccacacttttcccatcagtgatactcttacact

SEQ ID NO: 18803 - DNA, 60 bp, Homo sapiens
caattacaaccagcatgcgtatcccactgcctatggtgggaagtactcagtcaagacccc

SEQ ID NO: 18804 - DNA, 60 bp, Homo sapiens
ttgaccattttggagtcaaatgagcagacttccaaggagttgaccagtttgtgactagtc

SEQ ID NO: 18805 - DNA, 60 bp, Homo sapiens
ctggttcaattacgctgaactctgactacatgtgggccagtaataatatgaattggactt

SEQ ID NO: 18806 - DNA, 60 bp, Homo sapiens
cagcgcgttgctgtctatcctgtccttcctgatcctctacttctcccactgcatgataaa

SEQ ID NO: 18807 - DNA, 60 bp, Homo sapiens
ggcgcttcatgtccagtgtgtggcccttctgaaacttatggtcatctctcccactgaaac

SEQ ID NO: 18808 - DNA, 60 bp, Homo sapiens
tccgcataccttcgcatacacatatacacacacaaatagagaaagcaaatgcaggctggg

SEQ ID NO: 18809 - DNA, 60 bp, Homo sapiens
ctggagggatgcttcagttctccccttcaagacttacacaaccatgtctctgttgggcta

SEQ ID NO: 18810 - DNA, 60 bp, Homo sapiens
gatggggaagatctcagggcagagactccatattgcaacatggggatcatgcactcccca

SEQ ID NO: 18811 - DNA, 60 bp, Homo sapiens
acaagcctcagagtacttcgagtctccttaccatttccgacggcatctacggctcaacat

SEQ ID NO: 18812 - DNA, 60 bp, Homo sapiens
accggagaagggggggggcagtgtgccgtgccgccatcaaaccaagcacgtacgactctt

SEQ ID NO: 18813 - DNA, 60 bp, Homo sapiens
gaatgggaaagcgtaacactaagtatgcagtctattatgaaatcatgttgacaactaagt

SEQ ID NO: 18814 - DNA, 60 bp, Homo sapiens
catgcatttgaatatgacccttgacctgtttttgtccatcatcactcagatttgtggctg

SEQ ID NO: 18815 - DNA, 60 bp, Homo sapiens
gtgccctctgctctcagtcttgttgccctagtatcaagcaatcttagacaaacatcctga

SEQ ID NO: 18816 - DNA, 60 bp, Homo sapiens
gacgaacacaaagcgaaagaggagaggacacccgatatatgttctctaggccttttagga

SEQ ID NO: 18817 - DNA, 60 bp, Homo sapiens
cggctcccaagttctatttccctcctaccctgacaaagtgtccagaactctacacacccc

SEQ ID NO: 18818 - DNA, 60 bp, Homo sapiens
ggaaaatttagacacagaagggaactagacagttttccccctggagagatgaaaagcttt

SEQ ID NO: 18819 - DNA, 60 bp, Homo sapiens
ccaaagttgctacgtgggatccgatgttgtcgccagactttcagccaaaatcagccttca

SEQ ID NO: 18820 - DNA, 60 bp, Homo sapiens
actgaagtccaaacaagccaagctacccaaccaaggctcacagcaggcaagaggataaaa

SEQ ID NO: 18821 - DNA, 60 bp, Homo sapiens
actgagtttgaggagtggattcttccccagaaaagccttgagatgtctaaagcccaggag

SEQ ID NO: 18822 - DNA, 60 bp, Homo sapiens
gtgaccgtggtggcttcaataaatttggtgtgttcaagaaggaagtgtatcttcatacat

SEQ ID NO: 18823 - DNA, 60 bp, Homo sapiens
attgcctgagcgcgtcgagccagacagactgctgagcgactatattgagaaggaggtaaa

SEQ ID NO: 18824 - DNA, 60 bp, Homo sapiens
agtggtggtggaggtggaggtggaggtggagtgttcaagaaggaagtgtatcttcataca

SEQ ID NO: 18825 - DNA, 60 bp, Homo sapiens
cagtattgtgtgagtttgctagggctgtgtaacaaagtgatacaaacctgatgtctcccg

SEQ ID NO: 18826 - DNA, 60 bp, Homo sapiens
ggctacgtgtacagatgcacgcccaagaatcttgattacaagagagacttgttttgcctc

SEQ ID NO: 18827 - DNA, 60 bp, Homo sapiens
ggactgggctaatgctaatgtcagcagacagattgaggacactgtattatacggttacta

SEQ ID NO: 18828 - DNA, 60 bp, Homo sapiens
gatggaagaggcaggctgcagcagagagatgcagagttctttcacacgtcgtgacttaaa

SEQ ID NO: 18829 - DNA, 60 bp, Homo sapiens
agcttctcctcctatgcacaactacccaagcctacttctacctactccctgagcagcttt

SEQ ID NO: 18830 - DNA, 60 bp, Homo sapiens
tgtgagatgggaggaagcagtgagccagcaactttcccaagggtatgcagctagtaaatg

SEQ ID NO: 18831 - DNA, 60 bp, Homo sapiens
gaatctctgacttattgattatggaacctgtcaagtagttttcaactctcccagtgagga

SEQ ID NO: 18832 - DNA, 60 bp, Homo sapiens
gacacagatgtttctcccagtaaagagaggataaggagctggaactcgtggcacagttcc

SEQ ID NO: 18833 - DNA, 60 bp, Homo sapiens
tgtcctgacttccaagctggactttgggaagctgggaagagatctttctctggagctcaa

SEQ ID NO: 18834 - DNA, 60 bp, Homo sapiens
aaatgtttaacttcacttagagaaatgcagattaaaattacactgggccaggcacagtgg

SEQ ID NO: 18835 - DNA, 60 bp, Homo sapiens
ttcacttccagatgcatacctctgctgctttctctcctataaatagtgatgctataaact

SEQ ID NO: 18836 - DNA, 60 bp, Homo sapiens
tttgacagaagcttgaaactctggcatctatctgcccaacgatgggggctttcgttctgt

SEQ ID NO: 18837 - DNA, 60 bp, Homo sapiens
aaaaaaccagatatcctctctgactctagctccattagcccccactaaaaatgagccaag

SEQ ID NO: 18838 - DNA, 60 bp, Homo sapiens
cacccctaatagacagacagatacacagccaaccactcaagtcccagcaacagagcgctc

SEQ ID NO: 18839 - DNA, 60 bp, Homo sapiens
gaggagaaaatggtcagaggaggtgtatctggatcagggaagttacgctgaagtggatca

SEQ ID NO: 18840 - DNA, 60 bp, Homo sapiens
tttcgttttccggagacttgttgagaaatacgaccccacagactgcgagactgaaccgcc

SEQ ID NO: 18841 - DNA, 60 bp, Homo sapiens
actgtccccttccccactgtgcgagtacttccctcagggctgctctggtgatgctacctg

SEQ ID NO: 18842 - DNA, 60 bp, Homo sapiens
tgttgctgacttcttttgtttgatttcatggggatgggtatgttagcgatatggtttggc

SEQ ID NO: 18843 - DNA, 60 bp, Homo sapiens
acaagctgagcaaatatatgcaaaacacttcacagataatgacattatccctaatacttg

SEQ ID NO: 18844 - DNA, 60 bp, Homo sapiens
aggaagatcatcagtcaaggaagacccactggagaggacagaaaatgaagcagtgtttta

SEQ ID NO: 18845 - DNA, 60 bp, Homo sapiens
tattgttcccggttttgtacggaccatgccctctgtcaggtcgtccccataaaagcagcc

SEQ ID NO: 18846 - DNA, 60 bp, Homo sapiens
ctgcccacagagccttcggtgggttttgctttgctccttcttactgtcttttggctcatt

SEQ ID NO: 18847 - DNA, 60 bp, Homo sapiens
agaattactgcctccaacaggatgtattcactctgccggaggtaagtgtgtcagtgggct

SEQ ID NO: 18848 - DNA, 60 bp, Homo sapiens
acccagaagcaccccttcaacctgggcctcgatgaaggctcactcctccgtcaggcctct

SEQ ID NO: 18849 - DNA, 60 bp, Homo sapiens
caaccagccccgtgccgcagagaacatggccaatcagggtcgacgagaagctgggagaga

SEQ ID NO: 18850 - DNA, 60 bp, Homo sapiens
gatctccttggttgggatggatttattcaggagcagtttttgagcaacttgccatgggca

SEQ ID NO: 18851 - DNA, 60 bp, Homo sapiens
cagggcctacagtaacatgccaaaagttgcttccaacatatttctctgctttggatgggg

SEQ ID NO: 18852 - DNA, 60 bp, Homo sapiens
ttgtgtgtgtctgtcttcatcccaggctgagctccttgaggtgaggatgttgtgctgttt

SEQ ID NO: 18853 - DNA, 60 bp, Homo sapiens
ttatgtgccatgtcacgtttaatgctatcttgtgtgaccagatcccaccagtaatgacaa

SEQ ID NO: 18854 - DNA, 60 bp, Homo sapiens
tctttagttctcattacatctgtccaggctcttctatcagcatcaatcctttcctgcagg

SEQ ID NO: 18855 - DNA, 60 bp, Homo sapiens
ggctggagataaagctgaatttgaatgcatctagttcagggttctcccttccagtccacg

SEQ ID NO: 18856 - DNA, 60 bp, Homo sapiens
gtcacaacatgtgtaataactctctaactccccatgtcgctatgcccgaaagcaagacag

SEQ ID NO: 18857 - DNA, 60 bp, Homo sapiens
ggaccaggagatttagggcccacttggagttcttatggtgaaacagtagtagcttcctag

SEQ ID NO: 18858 - DNA, 60 bp, Homo sapiens
gggggcggctggacatgaaccacggcttcgtgcaccatatccgacggaaccagatcgctc

SEQ ID NO: 18859 - DNA, 60 bp, Homo sapiens
tgtgcgagacggtgtagcagtgtcacgggccgcattccccacctcgaacaactggttcga

SEQ ID NO: 18860 - DNA, 60 bp, Homo sapiens
gcctcatgttcattcaagctgaagatgcatagctagttccacagagcatgcccacatgga

SEQ ID NO: 18861 - DNA, 60 bp, Homo sapiens
cattgggatttacagcaaattggacacacacaagaaaggatcagtgaacttgagcacagg

SEQ ID NO: 18862 - DNA, 60 bp, Homo sapiens
tgatccttgtgatcccaggctccaagagtccacccttcccagctcagctcagtacctcag

SEQ ID NO: 18863 - DNA, 60 bp, Homo sapiens
aacttgatctcatcgctggtatttggccagactcccagccaagagacccttccagaagag

SEQ ID NO: 18864 - DNA, 60 bp, Homo sapiens
tttcggaagcataattttttggtatttgggcagctggtgatcgttggtcccggcgccctt

SEQ ID NO: 18865 - DNA, 60 bp, Homo sapiens
gggaaaggcagtgagggcatggtgagggggaagtggggaatgttaacgggcacaaaatgt

SEQ ID NO: 18866 - DNA, 60 bp, Homo sapiens
agaatcttacgtaaataggatcacgaagtataacctttgagaatggccttttcactccat

SEQ ID NO: 18867 - DNA, 60 bp, Homo sapiens
gggtcgtccagcaagatgctgatttgtctttcagttggtatggtttctgtgatcggggta

SEQ ID NO: 18868 - DNA, 60 bp, Homo sapiens
gtgtgagcacccaagggtaacaaccagatggcttcactgaaacctgcttttgtaaattac

SEQ ID NO: 18869 - DNA, 60 bp, Homo sapiens
agtccccacctgatgcaaagacattcgaggcagccagcgtgcttctacatccagtttata

SEQ ID NO: 18870 - DNA, 60 bp, Homo sapiens
gcttcttggattatgggtgctcaacctgtataggaaacgtggagatggagcatgaatcag

SEQ ID NO: 18871 - DNA, 60 bp, Homo sapiens; identical to SEQ ID NO: 4855

SEQ ID NO: 18872 - DNA, 60 bp, Homo sapiens
ttcatcaaggaaggcaagcctgcctgcttctgcatcgacagatagccgtcttcagcttga

SEQ ID NO: 18873 - DNA, 60 bp, Homo sapiens
caaaataggtgatgaacctctggttttaccataatgcaatgtgccacggaaagtttgggg

SEQ ID NO: 18874 - DNA, 60 bp, Homo sapiens
aagacacagcctcagaatggccagatggattgcacgaaacctgacttggattcaccatct

SEQ ID NO: 18875 - DNA, 60 bp, Homo sapiens
atgaagcaagtgccacaacacctgtgctccctgaaccctggatgagcagctgtgatgtgt

SEQ ID NO: 18876 - DNA, 60 bp, Homo sapiens
agctcaatgatgagaaggtgctgcaggtgagtggccctgcctggctccccatgtgggcac

SEQ ID NO: 18877 - DNA, 60 bp, Homo sapiens
agccccacccagctccgcctcctcaccctgtaccttcaggagctagacatgagtgatttt

SEQ ID NO: 18878 - DNA, 60 bp, Homo sapiens
tggtgggtatggatgatgcccaatctcccctctcctccctctcacaggtacgacctgcag

SEQ ID NO: 18879 - DNA, 60 bp, Homo sapiens
tcagcaagctactcagtatctgacgtggtttctaaggtggagttgcatggggagcactct

SEQ ID NO: 18880 - DNA, 60 bp, Homo sapiens
cagctgctcatgccggtgtgggcggagcgggcagggcggtgtgacttgggaggggatggg

SEQ ID NO: 18881 - DNA, 60 bp, Homo sapiens
taaagagaagctggacaaagcctccttcgctactccgtatgggtacgccatggagaccgc

SEQ ID NO: 18882 - DNA, 60 bp, Homo sapiens
cctctcgtctctgaagaagacatggtgactgtggtggaggactggatgaacttctacatc

SEQ ID NO: 18883 - DNA, 60 bp, Homo sapiens
ggtgtcctcagctctggcattctgctgagcctttctcctgcctctcccagattgtcctgg

SEQ ID NO: 18884 - DNA, 60 bp, Homo sapiens
tccagagcctggatgcggtgaggaggggcccctggcttggggactggggctggggactgg

SEQ ID NO: 18885 - DNA, 60 bp, Homo sapiens
tggctggtggcctgtggcttacaatgggtccttgtgcagctgttggagatgaagtcgact

SEQ ID NO: 18886 - DNA, 60 bp, Homo sapiens
ggtatcttccttgctggatgtggcagaatccacaccagcttatcaaccaacacagctaat

SEQ ID NO: 18887 - DNA, 60 bp, Homo sapiens
cttcattaaggcctacaaggtattcgggtctggggcaggctgggagccctgtagggcact

SEQ ID NO: 18888 - DNA, 60 bp, Homo sapiens
gtagggcagtagggagggccaccctcatggagactgccttggcccacagaaagctgagca

SEQ ID NO: 18889 - DNA, 60 bp, Homo sapiens
gacagtaacttcgcattacttgtagaaaacaggatcaaggaagagatggaggctttcccc

SEQ ID NO: 18890 - DNA, 60 bp, Homo sapiens
ctgagtcttcagggacattgaggcatgtctgcatttagctcaaaaggtagaagtctcaca

SEQ ID NO: 18891 - DNA, 60 bp, Homo sapiens
aagtcagcgacagaagtgtttctgagtggattaggaaaggtgttcatcagaacagacacc

SEQ ID NO: 18892 - DNA, 60 bp, Homo sapiens
agcacccaaggtaggcaactgctcctgggcttggtactgggctgcagggatgcatggcat

SEQ ID NO: 18893 - DNA, 60 bp, Homo sapiens
ttttggtgatggggaggcatcctggagctggagctataaattccccttagtcaccgccaa

SEQ ID NO: 18894 - DNA, 60 bp, Homo sapiens
tgcatcccatgactcggagctgatggccttcatgacgaggaagttgtgggacctggagca

SEQ ID NO: 18895 - DNA, 60 bp, Homo sapiens
atcatcacaggtaagggcttggccaggccttggttcttatcctcagtctgtccttctaag

SEQ ID NO: 18896 - DNA, 60 bp, Homo sapiens
atccttgctggacacagtgaaggaggctgtttatgttgtggtactgggagaagcggggga

SEQ ID NO: 18897 - DNA, 60 bp, Homo sapiens
tatcatcgcccaggctgagtgtaggggcctagggttgttgtgggcacggggcaggtgggt

SEQ ID NO: 18898 - DNA, 60 bp, Homo sapiens
aaacagtacaggtaagcaggggagacaagcctgagtgggaaggtggggactggacccagc

SEQ ID NO: 18899 - DNA, 60 bp, Homo sapiens
tgttaggacatacaaggcactgcacccagatgagctgaccttggagaagactgacatcct

SEQ ID NO: 18900 - DNA, 60 bp, Homo sapiens
gctcactgaggtaactaatcccccggcacctgtatatgtccctctaccagcaacctgggg

SEQ ID NO: 18901 - DNA, 60 bp, Homo sapiens
gggaaagattagggtcaagagtatgatttaggagactgtgcaccattcatatgcaagtgg

SEQ ID NO: 18902 - DNA, 60 bp, Homo sapiens
gacgtcaaaggtaaggcccaggccccacggccctgatccccagcaggctcttctctcaca

SEQ ID NO: 18903 - DNA, 60 bp, Homo sapiens
accagctctgagtggggttgctgcctgtattccctgtttctcaggaacttacatgggtct

SEQ ID NO: 18904 - DNA, 60 bp, Homo sapiens
gatgcagaaaagtcacaggcatctagaagtgtggcccaagttctgttcttcaatcagccc

SEQ ID NO: 18905 - DNA, 60 bp, Homo sapiens
tctacttctcttcagatttgtcttatgcattttccaactatgtatgcatcacagctattc

SEQ ID NO: 18906 - DNA, 60 bp, Homo sapiens
tatatggcacctttaaaattgagtcagagccttttagtgaaagaatctgttttccctaaa

SEQ ID NO: 18907 - DNA, 60 bp, Homo sapiens
actacagcaaggtagaagagccccacgctggctgacccggggggcagaaacagaggtgga

SEQ ID NO: 18908 - DNA, 60 bp, Homo sapiens
gcctggtctaagtatcagacagtcatgttcaaccgacccttcctggtcatcatcaaggag

SEQ ID NO: 18909 - DNA, 60 bp, Homo sapiens
tcccagtctttcacagccatcttccacttttccctgcagaattattcctcaacagcctgt

SEQ ID NO: 18910 - DNA, 60 bp, Homo sapiens
gtcctgctgtcactattttgggtggaggagatctggctgattgtgcaatgatggtcttcc

SEQ ID NO: 18911 - DNA, 60 bp, Homo sapiens
cgcccacagctaatgttgtagttgctagttctccatattgattaaagcaacaataacagt

SEQ ID NO: 18912 - DNA, 60 bp, Homo sapiens
ggatcctggagcccagggccctgagtccgtacccaatcctgttgtttcagaacccatcaa

SEQ ID NO: 18913 - DNA, 60 bp, Homo sapiens
tatttcaatggtacagtccaattcccacctgctcagcagtccccgtggcagctgatctgc

SEQ ID NO: 18914 - DNA, 60 bp, Homo sapiens
gttaactgagatactgctgctggaatgggcgagacattgctgcaaagaagtcaagctttt

SEQ ID NO: 18915 - DNA, 60 bp, Homo sapiens
gtgaagtccatgtctcaaggatgtccagactaaacatccaaaagagataagaactatttg

SEQ ID NO: 18916 - DNA, 60 bp, Homo sapiens
acagatgtctggcccattgtttccagtctgttcctgtccacagcttccctttatgctgag

SEQ ID NO: 18917 - DNA, 60 bp, Homo sapiens
tgaagtccttcctcaaagaggcgatcctgaaacctacaccaagtgacgtgagcatcagga

SEQ ID NO: 18918 - DNA, 60 bp, Homo sapiens
ggatccaacagcagacgcccgacgacgtctactcgcaggtgggcaccgtgagcgccgaca

SEQ ID NO: 18919 - DNA, 60 bp, Homo sapiens
tgtctactgcctgctgggtgatgcccactctccacctctctacacctatcttaccttgct

SEQ ID NO: 18920 - DNA, 60 bp, Homo sapiens
gcaacaatgcttgaagttgtatacagtctgctctttcctggttctaagagaagagagagc

SEQ ID NO: 18921 - DNA, 60 bp, Homo sapiens
tgtgtacttctcgtccgactggctgaatgagttctgggatgcactggatgtggatgacta

SEQ ID NO: 18922 - DNA, 60 bp, Homo sapiens
ttttgtccctcctccacccaggtatctgcctattttcttgctaatcccagaacctttcct

SEQ ID NO: 18923 - DNA, 60 bp, Homo sapiens
gcacgagctaactatctcacaatataggtccccaaccactgaccaaactccagtccaggc

SEQ ID NO: 18924 - DNA, 60 bp, Homo sapiens
gctgaccacaaactccattacactgcacgccacagactacgtccggtcttgggtcatttt

SEQ ID NO: 18925 - DNA, 60 bp, Homo sapiens
tctcagtgatgtaattccaatagatccttctgaccctccactgtggactcaatagcaggg

SEQ ID NO: 18926 - DNA, 60 bp, Homo sapiens
gggtggatgtgtcacagttgttgaaactgcattgatccatcaccatcaaccagagtccac

SEQ ID NO: 18927 - DNA, 60 bp, Homo sapiens
aattatggagatcatagttccgtgagcgagcaattcagggactcggcgagcatgcactcc

SEQ ID NO: 18928 - DNA, 60 bp, Homo sapiens
gtggtccctgctcctctaacatgtatttgccaagttgtacttactacgtctcgggtccag

SEQ ID NO: 18929 - DNA, 60 bp, Homo sapiens
tgggaattgagaggtaatagtctccaggcatgtcagtgagaaggtctagtcaccatcccc

SEQ ID NO: 18930 - DNA, 60 bp, Homo sapiens
ttgtgcagccaagcaggaacggtgtacctttctagacccatcctcttgcaatcttggacc

SEQ ID NO: 18931 - DNA, 60 bp, Homo sapiens
cagactctcacagtatgtgtaaccacttcctcctctgcacggaatcaccccagaagatca

SEQ ID NO: 18932 - DNA, 60 bp, Homo sapiens
gtggtggataacgtgtttccaaattgcatcttgttgctgaaacttcctggacttgagaag

SEQ ID NO: 18933 - DNA, 60 bp, Homo sapiens
atttagacagtgttgagaaaaccaaactttggccatagaaaccattcccctcccgggccc

SEQ ID NO: 18934 - DNA, 60 bp, Homo sapiens
gagggcaggacagttcttatggctttatccgttgcgtaagcacagagaggtctgcgaggt

SEQ ID NO: 18935 - DNA, 60 bp, Homo sapiens
agcctcccagtctggtgaagcttcctgtatggtccatgaccgtattccaccccaggctct

SEQ ID NO: 18936 - DNA, 60 bp, Homo sapiens
acccatggcgtgctagaggaatgggacgtgaagcgcttgcagacgcactgctacaaggtc

SEQ ID NO: 18937 - DNA, 60 bp, Homo sapiens
caaaatctacctttgtcatcacttccttcagaaagcctcctggggctgagtgcagtgcca

SEQ ID NO: 18938 - DNA, 60 bp, Homo sapiens
tatgcaacaatgtcttaacccaagcatgttctgcctcagggcctttgcacttgttggcct

SEQ ID NO: 18939 - DNA, 60 bp, Homo sapiens
gtctataggagtcccgtgaagattcctgaaatgtctgtagtaactgttagtcatgtttga

SEQ ID NO: 18940 - DNA, 60 bp, Homo sapiens
cttcccatccagtttccaacttccacacccaactcatttccccaacatccagatgagcag

SEQ ID NO: 18941 - DNA, 60 bp, Homo sapiens
gaaaacactgctgttctttaaatgcgttcctcatccatgcagataacagctggttggccg

SEQ ID NO: 18942 - DNA, 60 bp, Homo sapiens
atggcacttttcttgacatccaacctgggactctggtgattctgtgttctggtgaattta

SEQ ID NO: 18943 - DNA, 60 bp, Homo sapiens
ggctcaagaatgggcagcacagactctcttaataagaccaatggtggctgttccacagag

SEQ ID NO: 18944 - DNA, 60 bp, Homo sapiens
gtgcccattaaccaacctcactccccctgccactacccttctcagcctgtggcaaccatc

SEQ ID NO: 18945 - DNA, 60 bp, Homo sapiens
atcactattacataacatactcaggacaaagaactttgctcagggaacataccatgtaat

SEQ ID NO: 18946 - DNA, 60 bp, Homo sapiens
ttctgagagaaaatcaggaatgaactatgaagtccttgtattcctagtccctaataggac

SEQ ID NO: 18947 - DNA, 60 bp, Homo sapiens
gtggggtgttgagcaagagagagctgttcttgtttggtactgagcaaagcctacatccac

SEQ ID NO: 18948 - DNA, 60 bp, Homo sapiens
cagccccattgagctgactccagcttatttttgcactgatttccaccatttccttcccac

SEQ ID NO: 18949 - DNA, 60 bp, Homo sapiens
agattataaataagagaaggatgcaacacagtactggaagtcctacccagacttggtagg

SEQ ID NO: 18950 - DNA, 60 bp, Homo sapiens
gcagccttgaagacaacagcctgcattcttgatataggttcttagtgttcgagggagcag

SEQ ID NO: 18951 - DNA, 60 bp, Homo sapiens
actaacactgtgcagtggagtgatgcaaaccccagttttccagtggatggagctgctgtg

SEQ ID NO: 18952 - DNA, 60 bp, Homo sapiens
gatccttcttttgactgccagctgattttgattgccagctttacctgcttcatgagctca

SEQ ID NO: 18953 - DNA, 60 bp, Homo sapiens
ttctgacatctcggtggttagcaattattcctctgagtgggagctggaccctgtaaagga

SEQ ID NO: 18954 - DNA, 60 bp, Homo sapiens
ctgggaagctcatggccaaaactgtgatccatctctagtcagcaggatagccttaaaggc

SEQ ID NO: 18955 - DNA, 60 bp, Homo sapiens
gctacagctagagttcgttcaagaccagagcttcggattcagtttgatgaaggctatgac

SEQ ID NO: 18956 - DNA, 60 bp, Homo sapiens
ggacttgaccgtcaacttgggattgttaaggtaaatggtgtctccttctgtcgccaaggc

SEQ ID NO: 18957 - DNA, 60 bp, Homo sapiens
cagcagagtctgttacaggagaaatctcagcgacagcacacagatggcaccacaataagc

SEQ ID NO: 18958 - DNA, 60 bp, Homo sapiens
ttgtgcttttcccagtttggtgttaggtggccttaagttctcagtaatgacacttatcaa

SEQ ID NO: 18959 - DNA, 60 bp, Homo sapiens
ttgcattgacgcctgactctggtgagcttttctggggactagacggacttggcacaacat

SEQ ID NO: 18960 - DNA, 60 bp, Homo sapiens
agttctgggctgtagtgcgctatgccgatcgggtgtccgcactaagttcggcatcaatat

SEQ ID NO: 18961 - DNA, 60 bp, Homo sapiens
actaaaagagcagatcccaaactgaggcagcaactacaacgagtaaacagagtagtgtac

SEQ ID NO: 18962 - DNA, 60 bp, Homo sapiens
agacccacctcctcctgtgccctgagctgctgagacccgacagatcatgaaggctagtaa

SEQ ID NO: 18963 - DNA, 60 bp, Homo sapiens
gttgtgttccggccccatccaaccacgaagttgatttctcttgtgtgcagagtgactgat

SEQ ID NO: 18964 - DNA, 60 bp, Homo sapiens
gatggccgatgttatggttttctacgaagtcagtgcttacttagctcactaacagcgctg

SEQ ID NO: 18965 - DNA, 60 bp, Homo sapiens
aacaaaaaatctctgggtcaaaagtctaaaacgcttaggctggcaaccatcagatccttg

SEQ ID NO: 18966 - DNA, 60 bp, Homo sapiens
tggcagggaatatacttatgtatggaaggttacctgctctggagtgaattaaaagttatt

SEQ ID NO: 18967 - DNA, 60 bp, Homo sapiens; identical to SEQ ID NO: 4855

SEQ ID NO: 18968 - DNA, 60 bp, Homo sapiens
tctttgcagtgaattatgctttgctttaaaacattccgctaaaatcataatgggacatat

SEQ ID NO: 18969 - DNA, 60 bp, Homo sapiens
tctgtgtaggggacccccatgctgacccagtggctgttttatcctgtgcatataaataca

SEQ ID NO: 18970 - DNA, 60 bp, Homo sapiens
atcaccttctaaaggtctctttcctgcagcgatacaggttccttggtctctttcctgcag

SEQ ID NO: 18971 - DNA, 60 bp, Homo sapiens
gccaaccctactgaaaggaagatatgtgatttacctaacaggacatttagaaggagtcat

SEQ ID NO: 18972 - DNA, 60 bp, Homo sapiens
gacagtaagcttctctacctgtaagtgatgaaatcatagctaatgcacttgccatggagt

SEQ ID NO: 18973 - DNA, 60 bp, Homo sapiens
gcatcaagcctggtacatactgaaaaccctataaggtcctggataattttggtttgatta

SEQ ID NO: 18974 - DNA, 60 bp, Homo sapiens
gtgcctggattcctttgatgaaagggcaaagccttgaacctaagtcatcttcgagtcctc

SEQ ID NO: 18975 - DNA, 60 bp, Homo sapiens
ccaagctccctgtgggtcctagccacaagctctccaacaattactattgcactcgcgatg

SEQ ID NO: 18976 - DNA, 60 bp, Homo sapiens
tccaagtaccaaattcaggagcatcagccaaaagtagcactgagcacgttgagagatctc

SEQ ID NO: 18977 - DNA, 60 bp, Homo sapiens
ccaaccaagtaaactggaagatctgttactggtagaacaggttgaggagacagtaggaat

SEQ ID NO: 18978 - DNA, 60 bp, Homo sapiens
gtgaagtggaaatacgaatcaagcaaattgagtcagacaggcagaacctcctcaaggagg

SEQ ID NO: 18979 - DNA, 60 bp, Homo sapiens
cgaagccaagagggccgagagtatctcagcacctagaaatggacaaggctggttattaga

SEQ ID NO: 18980 - DNA, 60 bp, Homo sapiens
gccgacacacaagctctgttgaggaatgaccaggtctatcagcccctccgagatcgagat

SEQ ID NO: 18981 - DNA, 60 bp, Homo sapiens
tcaggagatgtttgtgcgtatccagcggtacagtgggaaacagaccttctacgtcaccct

SEQ ID NO: 18982 - DNA, 60 bp, Homo sapiens
cagccccctacccactgggacctctgtttgtagtcagagtttgtttggctacttcctttg

SEQ ID NO: 18983 - DNA, 60 bp, Homo sapiens
cggccattcctgtagccagtatggagtttgcagccatatgtctcagaaatgccttgttgc

SEQ ID NO: 18984 - DNA, 60 bp, Homo sapiens
ctcttgtgataattaaccaagagtagctctatttgtccaacctcacacctaaagaagaaa

SEQ ID NO: 18985 - DNA, 60 bp, Homo sapiens
agggccatgggaggttggaaggcacccacatccttaaagccatcagtagctatagtgggt

SEQ ID NO: 18986 - DNA, 60 bp, Homo sapiens
gatctccgaatctaaaaaaccttcaggagactggaagtgttttgaagttgagggttgtgg

SEQ ID NO: 18987 - DNA, 60 bp, Homo sapiens
gcaagttactcttaacataggttgccctacacagtggctcctgcagtgtgatcagcagga

SEQ ID NO: 18988 - DNA, 60 bp, Homo sapiens
ccccttgcactacaagtgtgttcacggctctgctaccttagaaaatgactttctctgatc

SEQ ID NO: 18989 - DNA, 60 bp, Homo sapiens
ggagtttgaggtggctaaaatcctgagtaggtggaacaaaatggtggtgggagatgaggc

SEQ ID NO: 18990 - DNA, 60 bp, Homo sapiens
ctccacaggcgaactcattttgaggagataaggaaggccagttgagtatatggcccaggt

SEQ ID NO: 18991 - DNA, 60 bp, Homo sapiens
tcaaagaagagcccctcgatccagaggaagctgaagggcccctgtccttagtgacaacag

SEQ ID NO: 18992 - DNA, 60 bp, Homo sapiens
acaaggacaataaatattcaaaatgcatccctaattactacatttgaccacgatctgtgc

SEQ ID NO: 18993 - DNA, 60 bp, Homo sapiens
ggtcactttcagtatttgccaaagcattaggtcagccagacatgtgaaacatctcggagc

SEQ ID NO: 18994 - DNA, 60 bp, Homo sapiens
ctgcaggcacaagtgcgcattggtgggaaagtgaatatgtttacaaaccaaggaacagtg

SEQ ID NO: 18995 - DNA, 60 bp, Homo sapiens
aagcagaagtgcacactggtcggaaaggaactgctcacaggaaaaaggtggttcacacga

SEQ ID NO: 18996 - DNA, 60 bp, Homo sapiens
acctcttccccatctgcatgagttctggaactctgtcctgttggctgcttgcttccaatt

SEQ ID NO: 18997 - DNA, 60 bp, Homo sapiens
cagcacaccgtcagcatctccactccctgtagtcacagaccacgccatgacaaatgatgt

SEQ ID NO: 18998 - DNA, 60 bp, Homo sapiens
ccattggtggaactgctcacagaaagaaggtggttcacagaacagccacagcaaatgata

SEQ ID NO: 18999 - DNA, 60 bp, Homo sapiens
atttgtgcttctgagtgcttgtattctaggtgaaaccgcactgagaaggtatttgtggcc

SEQ ID NO: 19000 - DNA, 60 bp, Homo sapiens
aaggctctagaaaggaatgtctgaggaagcatcggagactgggtcccgccatgcctgtgt

SEQ ID NO: 19001 - DNA, 60 bp, Homo sapiens
atccagggagtgtggctgcttaccgaggtggatcactggaacaatgagaaggagcggctg

SEQ ID NO: 19002 - DNA, 60 bp, Homo sapiens
ctgatgctagaagctatcttaggccctgtctctaactcactgtatgtttcaggcaaaaca

SEQ ID NO: 19003 - DNA, 60 bp, Homo sapiens
aaatctgaacccctggatgagagtgacaatgacttctgacccttttgccaagggaccctg

SEQ ID NO: 19004 - DNA, 60 bp, Homo sapiens
ccctgctagccttctaactgccagttcacaccagactcacagtgacatgaacacctaaca

SEQ ID NO: 19005 - DNA, 60 bp, Homo sapiens
acatacgcagagttggaaagacgagttttagtctgagttctgtacgacggagttaacccg

SEQ ID NO: 19006 - DNA, 60 bp, Homo sapiens
gcgttgtttcataggtttcaatgtctctgtaaatgtggtagaaatgcaggctttatgggc

SEQ ID NO: 19007 - DNA, 60 bp, Homo sapiens
aaaaggggtatccacaccaaccgggtttggcacagagtagacaccattttgccacaggaa

SEQ ID NO: 19008 - DNA, 60 bp, Homo sapiens
gcaggattcagactacaatatagctgctaagtgctgtgttgtcgttccccctgcttaaaa

SEQ ID NO: 19009 - DNA, 60 bp, Homo sapiens
ttacctcaggaagaatctcattagtttattctgtaaatagttcctagtaaaatgataaag

SEQ ID NO: 19010 - DNA, 60 bp, Homo sapiens
actcaagcaggactcctcgcccgaccacgagaaaagctaccactactctatgcactactc

SEQ ID NO: 19011 - DNA, 60 bp, Homo sapiens
ttcacttactgcaggattttcagcttcagcaagcagatgctgttccactgccagggactc

SEQ ID NO: 19012 - DNA, 60 bp, Homo sapiens
agcaaactgcccgatgaaagcaccttgctaggcagatggcattattggaaggagctaact

SEQ ID NO: 19013 - DNA, 60 bp, Homo sapiens
agataaatggacaaaagacatgaacaaacagcttttataggatagtatggctaacaaact

SEQ ID NO: 19014 - DNA, 60 bp, Homo sapiens
tgtcaagggggaattcgcgggtccatagaggtggttaattcggaacgagtactgatgttc

SEQ ID NO: 19015 - DNA, 60 bp, Homo sapiens
cgagggaatgcacctgctcattacagctgctgtctgtgtattcttcacggcaatggatca

SEQ ID NO: 19016 - DNA, 60 bp, Homo sapiens
catccatgatgtgaattcttgctttgtgcggcatattcatgcttaaattctccccaccca

SEQ ID NO: 19017 - DNA, 60 bp, Homo sapiens
taattttgctgacctcaacacaccactgtgggaagcacaggacgatgggaaggtgcccca

SEQ ID NO: 19018 - DNA, 60 bp, Homo sapiens
ttccatgccacctgtgcctttaggaactgcccagaagaaaatccaaggctttagccagga

SEQ ID NO: 19019 - DNA, 60 bp, Homo sapiens
aagacaggcagactaccacagtagccccgatggaagcagtgagaatgaactggaaggagc

SEQ ID NO: 19020 - DNA, 60 bp, Homo sapiens
catggacaaggtatgtgctttggctgactgaatgttagtggacatgatagaagcaatggc

SEQ ID NO: 19021 - DNA, 60 bp, Homo sapiens
cattggaaatgctgggcacattgcagtcagtgagctgctgccaaaacggcgttaagtaga

SEQ ID NO: 19022 - DNA, 60 bp, Homo sapiens
tggagctctggaagatcatcgcagaaccagtaacatgacccatcgcctccaccaggcgcg

SEQ ID NO: 19023 - DNA, 60 bp, Homo sapiens
cacccagtgtcactgtggcaagtgtgacagcgacagcactgattgtactgtgcgaggcct

SEQ ID NO: 19024 - DNA, 60 bp, Homo sapiens
aaacggctaacaaggagatttggtcagcaaaacagacccagcctttccgaggcttcgtct

SEQ ID NO: 19025 - DNA, 60 bp, Homo sapiens
ggatccagagttctgtgggaaatagaagatcaagcattactgtcctttgattaaatgtga

SEQ ID NO: 19026 - DNA, 60 bp, Homo sapiens
ttgtcagagcccatgaggtaatagacgcggcgacacagccgtacaacggtgtgtgaacac

SEQ ID NO: 19027 - DNA, 60 bp, Homo sapiens
atggctggtacatcgtcttcagctgcatccttctctacgtggtctttcagaagctttccg

SEQ ID NO: 19028 - DNA, 60 bp, Homo sapiens; identical to SEQ ID NO: 18688

SEQ ID NO: 19029 - DNA, 60 bp, Homo sapiens
ctgatgctgattttccaactatttgcagcaaaatatgggcagtgaaatgcatccacgagg

SEQ ID NO: 19030 - DNA, 60 bp, Homo sapiens
ggtggtcagtaaggaacgtctttgctgctaagtggaagaaagctaatggaacgtaatcaa

SEQ ID NO: 19031 - DNA, 60 bp, Homo sapiens
actggaacttagagcagaattaccaggatagtgggagaaatctgaaaccatatcatatgg

SEQ ID NO: 19032 - DNA, 60 bp, Homo sapiens
aaactggtgagacctactctccactgctctgcagctggatggctgatggcaggctgagca

SEQ ID NO: 19033 - DNA, 60 bp, Homo sapiens
ccaggcgcccttggccttaggacccaacttctcttaccgccatggagttcgacctgggag

SEQ ID NO: 19034 - DNA, 60 bp, Homo sapiens
attctgcccaagtaacccctactgcgcctgctacatgtctctcttccaggtgaacggcat

SEQ ID NO: 19035 - DNA, 60 bp, Homo sapiens
ccaagacaatgagacagacatagctgcaaccgtagtaagccagtcagaaatagccagcgc

SEQ ID NO: 19036 - DNA, 60 bp, Homo sapiens
gaggccactgctatttgaaagagttgctcagaaaaatgcaagaatggcagcagaaaagca

SEQ ID NO: 19037 - DNA, 60 bp, Homo sapiens
ccaaggccaacctagctctcagggaccaacctgcagaactcaagattgagcgaaatgttt

SEQ ID NO: 19038 - DNA, 60 bp, Homo sapiens
gtaagtgctgtgcttaagggtgtcctttagggtggaagccctcacataaccttactgctg

SEQ ID NO: 19039 - DNA, 60 bp, Homo sapiens
tcccctcactcttccctcgtgtgactgagactctgtggtttaatctggatcgaccctgtg

SEQ ID NO: 19040 - DNA, 60 bp, Homo sapiens
tactgaggcggaaggtttgaaggttacggctcagggctgccccattaaagtcagtgttgt

SEQ ID NO: 19041 - DNA, 60 bp, Homo sapiens
cggggactgcgaggcacgctgctcgggtgttggggacaacattgaccaacgctttatttt

SEQ ID NO: 19042 - DNA, 60 bp, Homo sapiens
gagatattgtataagaatatgcttaagaatagggatctgtatttgactgacaaagggtaa

SEQ ID NO: 19043 - DNA, 60 bp, Homo sapiens
tgtaacaaccttgaatttcagaggactctgagtgcttctatgtccactacctattgttct

SEQ ID NO: 19044 - DNA, 60 bp, Homo sapiens
gactgctctctttctgatgtccatgctttttggccttgcatgtgggcaagcgatgtcttt

SEQ ID NO: 19045 - DNA, 60 bp, Homo sapiens
gcagtatatggtgtgtcaaaacggtggagtgactacactctgcatttgccaacgggaagc

SEQ ID NO: 19046 - DNA, 60 bp, Homo sapiens
ctgtcgtgtagcagagagtacaagaatcatttcagcaaagcagtgactcaccatgagacg

SEQ ID NO: 19047 - DNA, 60 bp, Homo sapiens
agtggccttgccgcacggacatgttgcgatttcattctggaaacaagttagacctatgtg

SEQ ID NO: 19048 - DNA, 60 bp, Homo sapiens
gactgtcttcactaccaaaccaagtctcctaaagctcacttgaatgtctgcttattcgtg

SEQ ID NO: 19049 - DNA, 60 bp, Homo sapiens
tccgagctcgtccgtagattggaatcgccctgaagatgtagaccctcaagggatttatgt

SEQ ID NO: 19050 - DNA, 60 bp, Homo sapiens
ggcagactgattacagtggtgtgggccagaaacaagggacagtgaaacacccagagactt

SEQ ID NO: 19051 - DNA, 60 bp, Homo sapiens
cttccagacctacgagcacaacgactggatcatccacctggctggcaagctcctggccag

SEQ ID NO: 19052 - DNA, 60 bp, Homo sapiens
cagtgtgaacaaatggtgaatcataagacagttcagtgcttattttctgtaggttttagc

SEQ ID NO: 19053 - DNA, 60 bp, Homo sapiens
aagggacttggccttcgccctcagacgctcttaagggtaggcggcgttgtcctcagttct

SEQ ID NO: 19054 - DNA, 60 bp, Homo sapiens
cggacaacagaacaacacttccgtgtgctaaatagtaaagcaccaagacagggtcagatg

SEQ ID NO: 19055 - DNA, 60 bp, Homo sapiens
tattatggaccattgtggtttcttccagtcacttagatggaaaggaggttaaacctaggt

SEQ ID NO: 19056 - DNA, 60 bp, Homo sapiens
cacccctgaaaacagctgcccctttggcccagtgtgcacaatggcctagatatggagaga

SEQ ID NO: 19057 - DNA, 60 bp, Homo sapiens
tcattcccacatcttgccaagacagcctttgtccagctgtccacattgagtcagactgct

SEQ ID NO: 19058 - DNA, 60 bp, Homo sapiens
ggctggtcctaaccaggttctattttacccattccttacccacacaagtttcttttccca

SEQ ID NO: 19059 - DNA, 60 bp, Homo sapiens
ggaagtagaatgttcgctgatgacctgcacaaccttaataaacgcatccgctatctctac

SEQ ID NO: 19060 - DNA, 60 bp, Homo sapiens
tctggactagctgagccgattccttcctgtgagcacactgtaagctttcaagttctctgg

SEQ ID NO: 19061 - DNA, 60 bp, Homo sapiens
acttgtttgccattcgcagtctggccccattgtgccattctagacttacctcctgccact

SEQ ID NO: 19062 - DNA, 60 bp, Homo sapiens
ccaggttaccatgaggaggatttctggccttcgaggaaatgctccaaggctggaattttc

SEQ ID NO: 19063 - DNA, 60 bp, Homo sapiens; identical to SEQ ID NO: 4855

SEQ ID NO: 19064 - DNA, 60 bp, Homo sapiens
ttcctcataccagctcgcacaagttaaggctgtacgagagagatgactaccgaggcctta

SEQ ID NO: 19065 - DNA, 60 bp, Homo sapiens
caagggcctgcattcccaacatcccattacatgtttcccactccagaaagtctctgggtt

SEQ ID NO: 19066 - DNA, 60 bp, Homo sapiens
atcccctgatcaagcccagcaggcacttgctgagcccacgctcacctagaacccgtgtgt

SEQ ID NO: 19067 - DNA, 60 bp, Homo sapiens
atcaggccgagacactttaactaaattatctgcttctttgaccaccggaaagccgaattc

SEQ ID NO: 19068 - DNA, 60 bp, Homo sapiens; identical to SEQ ID NO: 18506

SEQ ID NO: 19069 - DNA, 60 bp, Homo sapiens
gttgcctggtttgggtgccagtgagtttaacaaaacttctcacatgaagatctgaggggt

SEQ ID NO: 19070 - DNA, 60 bp, Homo sapiens
cagccaactcctgaagcactctctcagagcatactgctgctgtaatgggctggcttaatt

SEQ ID NO: 19071 - DNA, 60 bp, Homo sapiens
agccaccaactgctgtccccaaggaaatggtgtccgaaaaatcccaccttggcaaccccc

SEQ ID NO: 19072 - DNA, 60 bp, Homo sapiens
gacatcattacccagcccttgaaagatgagctgttcccgccgccactccagctctggctt

SEQ ID NO: 19073 - DNA, 60 bp, Homo sapiens
gctacttgaatccgatttacttctgttaagtgatgcttttctaaccgttttctggatgga

SEQ ID NO: 19074 - DNA, 60 bp, Homo sapiens
ggtgtggttgccgtgctcaagcccatgctgatttgtacactacatgtctaacctacctca

SEQ ID NO: 19075 - DNA, 60 bp, Homo sapiens
gcaatagagtccagggttttcagctcagtgtctttagcctgtctctgctggtcatgtcag

SEQ ID NO: 19076 - DNA, 60 bp, Homo sapiens
cccttaggcaaagactgttgaaacccatgtgccaggaaaacttacctattgaagctgttt

SEQ ID NO: 19077 - DNA, 60 bp, Homo sapiens
gtcttctcattgagctcctttctgtctatcagtggcagtttatggattcgcacgagaaga

SEQ ID NO: 19078 - DNA, 60 bp, Homo sapiens
ggggaaaactcagtccactctaaagaagcatcggcgttttggatggacgaatgctgcttc

SEQ ID NO: 19079 - DNA, 60 bp, Homo sapiens
gcacatcccaagggaggcaaagaaggtatttcgggaaaatggtgaatgcttttggttggc

SEQ ID NO: 19080 - DNA, 60 bp, Homo sapiens
tttgctgtattctcctgaaaggtcgtaggctgacaggcgctcacattccttggctgcctc

SEQ ID NO: 19081 - DNA, 60 bp, Homo sapiens
aggaagttagatgggggttctcagaagtggctgattggaaggggacaagcttcgtttcag

SEQ ID NO: 19082 - DNA, 60 bp, Homo sapiens
gacccctgaccatcccccagaagtagactcccatctcttctgcagcaagataacatgcta

SEQ ID NO: 19083 - DNA, 60 bp, Homo sapiens
agccatccacacttccctcgatactggacatccctacatactcacagcagtctgcaaaac

SEQ ID NO: 19084 - DNA, 60 bp, Homo sapiens
ttctggctggcacacctggcttcccctccatgctcagaactgcttcctactctacatcca

SEQ ID NO: 19085 - DNA, 60 bp, Homo sapiens
ggagtgagaactcttaaacccctcaggccccaactcagttgtggagatgaggacaagatt

SEQ ID NO: 19086 - DNA, 60 bp, Homo sapiens
gaatttcgtgaaaatggtccctttcaacacctgcaccctcgagcaggacctctacgtctt

SEQ ID NO: 19087 - DNA, 60 bp, Homo sapiens
gcctgcggaactgaggtaaacaagctcaggtactgacactaggagggtctaccttacata

SEQ ID NO: 19088 - DNA, 60 bp, Homo sapiens
caaacagggaaagcaaacgcgatgcgctgaatgtcataagaacacaacttttcgatgtga

SEQ ID NO: 19089 - DNA, 60 bp, Homo sapiens
cctgatgaccactctgctcgttactttagggatgttagaacggagaaactgcaaattggc

SEQ ID NO: 19090 - DNA, 60 bp, Homo sapiens
ctgtcgggttttggcctgttttgccttcacccataagcccttggaattttggtggaaggt

SEQ ID NO: 19091 - DNA, 60 bp, Homo sapiens
tccacctgagcattgcccacctccaccatgccaggataaatgccctcctgtgcaaccata

SEQ ID NO: 19092 - DNA, 60 bp, Homo sapiens
agaggttctcagcctcatgactcctaaactcctggtacttgagcaccgatctgcttcgga

SEQ ID NO: 19093 - DNA, 60 bp, Homo sapiens
ccattgccaatacctggccatctggcttccaatagtacagtggctactcaagttcaagcg

SEQ ID NO: 19094 - DNA, 60 bp, Homo sapiens
agaacattttccagatggcgaggtcacagcagagagatgtggccacctagcctttcctta

SEQ ID NO: 19095 - DNA, 60 bp, Homo sapiens
tcagtattgcttgcaaagacctttgtttctgtgatgtaccaactttacagttgtgttgcc

SEQ ID NO: 19096 - DNA, 60 bp, Homo sapiens
gagtgcttcctgcaattccaagtcaacgaagacacagcacagcagcagaagagagtgaac

SEQ ID NO: 19097 - DNA, 60 bp, Homo sapiens
tttgctatggcgttgcactagaggacttggactgcaacaagtggatgcgcggaaaatgaa

SEQ ID NO: 19098 - DNA, 60 bp, Homo sapiens
cttataaggctgagaggcaatcgctgatatccctgctttgaacttgaccctcttacaaga

SEQ ID NO: 19099 - DNA, 60 bp, Homo sapiens; identical to SEQ ID NO: 18528

SEQ ID NO: 19100 - DNA, 60 bp, Homo sapiens
gggcaattgagatcttttcagcatcaaacattcatgtctaggaatgtggtacttctctcc

SEQ ID NO: 19101 - DNA, 60 bp, Homo sapiens
gtaagaatttgccagtaaagtgatctggacctgaagatttctttttcagaaggttttacc

SEQ ID NO: 19102 - DNA, 60 bp, Homo sapiens
tacagtccttggaagcagcgaataaggtggtcctgcagttgaaataactggaaatgatga

SEQ ID NO: 19103 - DNA, 60 bp, Homo sapiens
gtcccaaatttgttcgcccacaagaatggccccttttccactttggtgatgaccaacaag

SEQ ID NO: 19104 - DNA, 60 bp, Homo sapiens
gccactactggtgcaacgattataagagttactcggaaaacctttgccacgtagactgtc

SEQ ID NO: 19105 - DNA, 60 bp, Homo sapiens
gtagtgttgcttcctaaggtatcatgttgtctttgtgctttgtccatctcttccgtggcg

SEQ ID NO: 19106 - DNA, 60 bp, Homo sapiens
ggcttccccagcaaagattagggaaagagacttgaccccaggactgtactacgactctta

SEQ ID NO: 19107 - DNA, 60 bp, Homo sapiens
cccaagaagagtttctggaaaatccctggaaggatcgaacaaaggctgaagaaccatcag

SEQ ID NO: 19108 - DNA, 60 bp, Homo sapiens
gacacccagtgaaaaacatcttttaaaagacatttattcaacatcatgatcagactatga

SEQ ID NO: 19109 - DNA, 60 bp, Homo sapiens
ccttctatcagatgcaaatgcctatgccaaggacagtacctgaagacctaccatcactcc

SEQ ID NO: 19110 - DNA, 60 bp, Homo sapiens
cgtgggggattttagccatgagaatatgaagctgatgtcagcctgctaacctgttttacc

SEQ ID NO: 19111 - DNA, 60 bp, Homo sapiens
cggcccagcagacatgcgagcttccagagtgcaatctatgtgatgtcttccaacgttaat

SEQ ID NO: 19112 - DNA, 60 bp, Homo sapiens
cagcccacctgtcgtggaggtcccttccttctcaggccacagaaataaacccgtgtactg

SEQ ID NO: 19113 - DNA, 60 bp, Homo sapiens
aatacgactcagaaccacagttagaggacgagtgttggcaaggatgtggagaacttgggg

SEQ ID NO: 19114 - DNA, 60 bp, Homo sapiens
ccccgaattcttgcagcactatttcccagttggttgatgccaaggcaaaaagataacttt

SEQ ID NO: 19115 - DNA, 60 bp, Homo sapiens
cttaggaaacagggttgttcttcatgtggatgactctgtgccgaaagcatgggaacagct

SEQ ID NO: 19116 - DNA, 60 bp, Homo sapiens
gtagcagcttggaatagaatctggcatgcctaaggcctttggggaactgggatgcttatt

SEQ ID NO: 19117 - DNA, 60 bp, Homo sapiens
ttcttatagcggtggtttaaacagaggtgcaaacagcaagcggatcttgtcgcctttggg

SEQ ID NO: 19118 - DNA, 60 bp, Homo sapiens
gcaggttgcaattacagtgcttcattttgtggaagtactgccattatcctgctgaaagaa

SEQ ID NO: 19119 - DNA, 60 bp, Homo sapiens
cctattcactgagatggcccatgctggtcctaagtctgacttcctgttgtaaagaactgc

SEQ ID NO: 19120 - DNA, 60 bp, Homo sapiens
aagggtgctgaaacaagtcagaagagaaagtgggaaccagtgcctctcctgggagacttg

SEQ ID NO: 19121 - DNA, 60 bp, Homo sapiens
gttgggattaggactacggcataaagcctatgagagaaaactgggcaaagtggcaccaac

SEQ ID NO: 19122 - DNA, 60 bp, Homo sapiens
aagtgggaaccactgagaaggaacatgaagagcatgtctgttcgatcctggcttccctcc

SEQ ID NO: 19123 - DNA, 60 bp, Homo sapiens
gaatcgtaatgaggcgtccgccgccaatatgcactgtacattccacaagcattgcctttc

SEQ ID NO: 19124 - DNA, 60 bp, Homo sapiens
catgtgtccccaaacctagttctttccctaggtctggtttcataaatgctggtgataaac

SEQ ID NO: 19125 - DNA, 60 bp, Homo sapiens
ctgaaagttatgcttcccttcatgttatatgcacattgccaagaattactgtcaagagaa

SEQ ID NO: 19126 - DNA, 60 bp, Homo sapiens
gcagctaccaatgatgcaggcaaagaactgttcaagccagcactcattcttcaaagctgc

SEQ ID NO: 19127 - DNA, 60 bp, Homo sapiens
attctacatgacacttccgaggatccccagtgggcatgacctcaatcgcccacattggat

SEQ ID NO: 19128 - DNA, 60 bp, Homo sapiens
atgaccgaagagcccgattccctagtcatgaggtagattcttccagagagactggacaca

SEQ ID NO: 19129 - DNA, 60 bp, Homo sapiens
cctttccggtggccttggaaacagattgctccgagctggagaatgtcgggtgaggtgtat

SEQ ID NO: 19130 - DNA, 60 bp, Homo sapiens
ctcactttccttctgtctagagccaccagtttgaaacttccccattttcctccaactgcc

SEQ ID NO: 19131 - DNA, 60 bp, Homo sapiens
tccgtgtggttgccaagccaagccgcctgctaccttcatcaccaaattgcactcgctcct

SEQ ID NO: 19132 - DNA, 60 bp, Homo sapiens
aggctgtgtgcgagctggaagaaagtgtgacccgttcgacggaacaaaggacatgacagc

SEQ ID NO: 19133 - DNA, 60 bp, Homo sapiens
gtgtgactagctggagacacaactgcagaaatgatcctgaaccgggaaggactgggaaag

SEQ ID NO: 19134 - DNA, 60 bp, Homo sapiens
tgtgcaccctcatcacggccatggatgccaatagtcagttcaccagcacctacatcctga

SEQ ID NO: 19135 - DNA, 60 bp, Homo sapiens; identical to SEQ ID NO: 16506

SEQ ID NO: 19136 - DNA, 60 bp, Homo sapiens
cctaggccattgcagcatccttagatgggacgcataatcattaccttaaagcatcaccac

SEQ ID NO: 19137 - DNA, 60 bp, Homo sapiens
ctcctaaccttcctgtaaacccctttagtggcttcattagagcaggcgttcagctcactg

SEQ ID NO: 19138 - DNA, 60 bp, Homo sapiens
tagcgtaacacttcactgaatgtgacgtaaaagcattctgatgaaaactggttctgttat

SEQ ID NO: 19139 - DNA, 60 bp, Homo sapiens
gatgtgctgcaataagggccactgagggggacagtgtaggttgggggtgaggaatgtatt

SEQ ID NO: 19140 - DNA, 60 bp, Homo sapiens
gtagatctccctttccattccacagtgacattgaagatccgtaccttaggttatctttgg

SEQ ID NO: 19141 - DNA, 60 bp, Homo sapiens
atctctgtctcaaggagagcagggtaggtgaaagtctagagaaagaggctacctgcccag

SEQ ID NO: 19142 - DNA, 60 bp, Homo sapiens
acagaaatgggtattccatgggagagaacgtggtaacctatgttttgtcatcatttgttt

SEQ ID NO: 19143 - DNA, 60 bp, Homo sapiens
gaactttcctgtagtcaatcttcctcgatctaccagatgggagagacccttggacaactt

SEQ ID NO: 19144 - DNA, 60 bp, Homo sapiens
acaacccgacagcaactcacacgaacagacacaccaacgcccacagacgaataccaaccg

SEQ ID NO: 19145 - DNA, 60 bp, Homo sapiens
ctgtgtcttccagctctaatcagaaagctgcttgtcgagggcatggggaatcaaactgaa

SEQ ID NO: 19146 - DNA, 60 bp, Homo sapiens
tctttcatacgttgcagtgcttacagttccaacagctttccaagaaaacatttccatatt

SEQ ID NO: 19147 - DNA, 60 bp, Homo sapiens
aacgtattgtctgtgggatgatctaatttaaaagcctttcatgcttgatcctggcagtgc

SEQ ID NO: 19148 - DNA, 60 bp, Homo sapiens
ggtgagaaccttagagcagtggagatttgctacctggtctgtgttttgagaagtgcccct

SEQ ID NO: 19149 - DNA, 60 bp, Homo sapiens
ggatatctggatcccttttattgactcacaatttgtggcaccactttctcatcccagaac

SEQ ID NO: 19150 - DNA, 60 bp, Homo sapiens
ccacctccgtgactaccctacttactacacaagcctctgtgtcgacttcatgcgcaactg

SEQ ID NO: 19151 - DNA, 60 bp, Homo sapiens
tactggcaagtgcttgaagtaacttcctgtgagttctctgtcagatactgcaaagactgc

SEQ ID NO: 19152 - DNA, 60 bp, Homo sapiens
atgacctgaatggagccgtggaggatgcaaagacggcccggctgttcaacatcaccagtt

SEQ ID NO: 19153 - DNA, 60 bp, Homo sapiens
gaccacactgacagcactgctactatttgcaactggtcacgacctatctgggctttaacc

SEQ ID NO: 19154 - DNA, 60 bp, Homo sapiens
ggtgagatttccatgaaataatctaggggaaagacttcatactgttcttcattcttgtgc

SEQ ID NO: 19155 - DNA, 60 bp, Homo sapiens
cacgagttttctagccctcacagtaacagagctaagaattcagatgtcaggaagtctgtg

SEQ ID NO: 19156 - DNA, 60 bp, Homo sapiens
attctgtaccttgctttgcccctttctggctacaggagcctcagaagtcattcagagatg

SEQ ID NO: 19157 - DNA, 60 bp, Homo sapiens
gctgagctctgtaaagctctgtttgtggtgctgaaacctctcatgatgtatgagcatgtc

SEQ ID NO: 19158 - DNA, 60 bp, Homo sapiens
atcctgttcttcaagttatctttagtcatgctagaaaagaagcaaactgggaagagaaag

SEQ ID NO: 19159 - DNA, 60 bp, Homo sapiens; identical to SEQ ID NO: 4855

SEQ ID NO: 19160 - DNA, 60 bp, Homo sapiens
cacgctgctcaccatgcctgtgtgttatctccccatgaaaagtcacctaggccgagcatg

SEQ ID NO: 19161 - DNA, 60 bp, Homo sapiens
ggctttccgaatgatccctttcatcagataaagcttactggcttagtctaggacatttgt

SEQ ID NO: 19162 - DNA, 60 bp, Homo sapiens
catatgtctgtaaggatttggagtgcctgcagtgttttatgtgtgggaagtaagggtgag

SEQ ID NO: 19163 - DNA, 60 bp, Homo sapiens
ctccacttttgaattggattgtattctggttagcatatggtcaaagtctgcctatcgacc

SEQ ID NO: 19164 - DNA, 60 bp, Homo sapiens
cggcagagactggtaggaagataaggacaagtcagaatcaggggtgtcaactgagatgca

SEQ ID NO: 19165 - DNA, 60 bp, Homo sapiens
ctggtcattggacggatctttcatattgtggagaatgatctgtacatagattttggtgga

SEQ ID NO: 19166 - DNA, 60 bp, Homo sapiens
tcgacaggcacatggaatccttgagtcagtccaaaagtttccgtcgtcggcacaactcct

SEQ ID NO: 19167 - DNA, 60 bp, Homo sapiens
gacccctgcacaccactcatgtcaccacggcgtgcatcatgttcatccccatctatttat

SEQ ID NO: 19168 - DNA, 60 bp, Homo sapiens
ccctgaggagccccttgaaggaaccacatggacacactccttgaaagctcaattactctc

SEQ ID NO: 19169 - DNA, 60 bp, Homo sapiens
cacccagacacacaggtgtggttgtcagcgagcacctcaggagaactgagaagctctttt

SEQ ID NO: 19170 - DNA, 60 bp, Homo sapiens
agtcgcccttcttgccaggggtgtcctatagactttgtcatggagtgaaacagaaacaaa

SEQ ID NO: 19171 - DNA, 60 bp, Homo sapiens
aggtggactggaaccaggaggaaccgcaaatagagatctatcagttgcttactgcaccag

SEQ ID NO: 19172 - DNA, 60 bp, Homo sapiens
gtcgtcagtactctgtggctttctgcaatcacgtgcgcactgaagtagaacagcaaagag

SEQ ID NO: 19173 - DNA, 60 bp, Homo sapiens
accaagtgatttaaccacagtggcagtggcagtttctgaaccgtcaagtatgaacatcac

SEQ ID NO: 19174 - DNA, 60 bp, Homo sapiens
tccctgagcctgagtgagcgtgtggccatcatcaaaggcacgtatgagcctgacgaggac

SEQ ID NO: 19175 - DNA, 60 bp, Homo sapiens
gactacattctccagggccaaacaggaggtgaggaaggtaatgtgttaccgtaaataggg

SEQ ID NO: 19176 - DNA, 60 bp, Homo sapiens
ctagccaagagcgacgaacccaagaagtcagtggccttcaagaagaccaagaaggaaatc

SEQ ID NO: 19177 - DNA, 60 bp, Homo sapiens
ccacattcttgctgtcatctcagccatccacacctcccacatcacaaatttactccctca

SEQ ID NO: 19178 - DNA, 60 bp, Homo sapiens
attttgtcaaggggctttgcattcaaactgcttttccagggctatactcagaagaaagat

SEQ ID NO: 19179 - DNA, 60 bp, Homo sapiens
aaaatccgcatctttttgcgaatttccccctatagggggctcataaaatttccacgcccg

SEQ ID NO: 19180 - DNA, 60 bp, Homo sapiens
acactgtaaggacagactactcagcatgggcaacatttacagaccactggatgatgaaga

SEQ ID NO: 19181 - DNA, 60 bp, Homo sapiens
atgtcctgtgctaaatatgaattcactgatgccctgctgtgccatgatgatgagctggaa

SEQ ID NO: 19182 - DNA, 60 bp, Homo sapiens
aattgaatgctgtctgatgctacaattcatatggatcctttcctggattgaagcctgact

SEQ ID NO: 19183 - DNA, 60 bp, Homo sapiens
caagggcttactgacataggaacaacagaaatgctcctggaacttcaagttgctgaatta

SEQ ID NO: 19184 - DNA, 60 bp, Homo sapiens
gaagcagtgcgtctatccagacaattacccatgtacttatcaaaagaggacatccaagac

SEQ ID NO: 19185 - DNA, 60 bp, Homo sapiens
actggtgttgacctggatgaactggctgaggtcgtacttgccaagtttctccaccataca

SEQ ID NO: 19186 - DNA, 60 bp, Homo sapiens
gtccatggtcatgtcattgttgtcagccaacactccagaggaggaccagaggacttatgt

SEQ ID NO: 19187 - DNA, 60 bp, Homo sapiens
aagcgaaccctgcgtcgaggaggggcctttgtcccggaaaacccactaacgtttgtaact

SEQ ID NO: 19188 - DNA, 60 bp, Homo sapiens
catacagcacgtctgctgcaatgacaacatctggctggaagcagagactgatggaccatt

SEQ ID NO: 19189 - DNA, 60 bp, Homo sapiens
ggctgccttgcttctcttcgtagtttcaccacataggaatgtattcccaaacaatacgct

SEQ ID NO: 19190 - DNA, 60 bp, Homo sapiens
ttcttaaagccattggctctggagaatctgagacacctccatccacacccacagctcagg

SEQ ID NO: 19191 - DNA, 60 bp, Homo sapiens
tctgttgaatgaaccaaaagcaactgccaacctctccatgcaccatgtgtttcagaggag

SEQ ID NO: 19192 - DNA, 60 bp, Homo sapiens
tctgaacacctctcgcctgctgcctgcctcacaccctctgcattcgctgtttcctctgtt

SEQ ID NO: 19193 - DNA, 60 bp, Homo sapiens
gagaataaaactaattttttctcccaattttctcttcctttttcttttttctgttccccc

SEQ ID NO: 19194 - DNA, 60 bp, Homo sapiens
gggtaacagctacctgctattgctaacctctgggtgccacaaaattgcttgttgggtctc

SEQ ID NO: 19195 - DNA, 60 bp, Homo sapiens
cataagctggcccatgactgtctctgcagactgatctcatgccactagctcattctgttt

SEQ ID NO: 19196 - DNA, 60 bp, Homo sapiens
tgctgttttccagatagcacatacccacttgtccctcactcatcacgagaagctgtgggt

SEQ ID NO: 19197 - DNA, 60 bp, Homo sapiens
cccacgcaaggcaattctctatgtgatctcacccatatctgcctctcaaacagttgaaga

SEQ ID NO: 19198 - DNA, 60 bp, Homo sapiens
ctgagaaactgacagccaggagtctgcaagaatgcccatcatcatcatcatggaaatggc

SEQ ID NO: 19199 - DNA, 60 bp, Homo sapiens
tgagaacaatacaccttctattccttcatttggttacacctttccttgtgacatttagcg

SEQ ID NO: 19200 - DNA, 60 bp, Homo sapiens
aattcatctcacggaattgtagctttcccctcaagaagccgatcactaagactgttcttg

SEQ ID NO: 19201 - DNA, 60 bp, Homo sapiens
atggtcttcggtggatggcgaggactccactgatgactcctatgatgaggactttgctgg

SEQ ID NO: 19202 - DNA, 60 bp, Homo sapiens
aaatgttacctggcagttggggaataatctgacttcgttggcagttggccttaacttctt

SEQ ID NO: 19203 - DNA, 60 bp, Homo sapiens
acatgtggaatccccaagtccttttagaaccccactcgtggtcacttcaggatctacttc

SEQ ID NO: 19204 - DNA, 60 bp, Homo sapiens
ttctccgtgtagaatcgaagaaggcagtcccaagggctcttctgccccgtatccccgcct

SEQ ID NO: 19205 - DNA, 60 bp, Homo sapiens
ttttgaagtcttgcctaggcaaggctgaatgttctgttactaaagagagacgtgtgggtg

SEQ ID NO: 19206 - DNA, 60 bp, Homo sapiens
aaagcctgcaacaaacgggattggctgctcaggggaacattctggggctcttccctcaag

SEQ ID NO: 19207 - DNA, 60 bp, Homo sapiens
tgcctggacagtgcaattagaggagtgagaggcattgagatgatcctggtcctcaccagg

SEQ ID NO: 19208 - DNA, 60 bp, Homo sapiens
aggcgcttcctcctccatttccgtctactacactttatggagccaattcgatgagggctc

SEQ ID NO: 19209 - DNA, 60 bp, Homo sapiens
gtaacttctgaaagacaacaggaatttgaccaggtttgtggttaaacttgacatttgggg

SEQ ID NO: 19210 - DNA, 60 bp, Homo sapiens
gttttcaggcagctgactgctattgctgtaagcatttccatttggtgtcagctcttggtc

SEQ ID NO: 19211 - DNA, 60 bp, Homo sapiens
gcagcagtggactataagggaccatgtggaaagggacaagtggaatcacaagcccctggt

SEQ ID NO: 19212 - DNA, 60 bp, Homo sapiens
cacctgaccaactcatgcagaactgttacctcatgcttggagatgtaggaacaggaagag

SEQ ID NO: 19213 - DNA, 60 bp, Homo sapiens
ctcttaagtgtgtttgagagtagatctgccaattatgttgacaagggaatgatcaaaagc

SEQ ID NO: 19214 - DNA, 60 bp, Homo sapiens
gcagtttgaatcgcggtgcgacgaaggagtaggtggtgggatctcaccgtgggtccgatt

SEQ ID NO: 19215 - DNA, 60 bp, Homo sapiens
gaacgaaagggaaacagatacttgatatgaaagccataatgacggtgacttgcgtcgtgg

SEQ ID NO: 19216 - DNA, 60 bp, Homo sapiens
gagtgatctcattcacactcagtgtatcttcagctaccctcatatgaagtcacagactca

SEQ ID NO: 19217 - DNA, 60 bp, Homo sapiens
attattctccaggctttgagatccgtctgacaatccttaggtgtgtctttatgcggctgg

SEQ ID NO: 19218 - DNA, 60 bp, Homo sapiens
taatgtcacgactttacatctttggcaatcggctggaaggggtctgtgtacatcagcaac

SEQ ID NO: 19219 - DNA, 60 bp, Homo sapiens
actccctcctcactgtcgctgccgagatccacagtcggttgtggctcagcccctgttgca

SEQ ID NO: 19220 - DNA, 60 bp, Homo sapiens
agagatgagacactgccccaatcctaaagaggccagaactgaagtgctacattgtgggag

SEQ ID NO: 19221 - DNA, 60 bp, Homo sapiens
gctttcctaagggtaggcacgtggaggactaagggtaaagcattcttcaagatcagttaa

SEQ ID NO: 19222 - DNA, 60 bp, Homo sapiens
aattaagacactgtgatagactgggcagacatttcctggcaatttatgatcagctggagg

SEQ ID NO: 19223 - DNA, 60 bp, Homo sapiens
gcagattcaaatcctgacggttttggtaaagtcaattcaatctctccaagactccgttta

SEQ ID NO: 19224 - DNA, 60 bp, Homo sapiens
cttctgtacctaatgacctgagcaatccttctctgctgaacctggtagtgtcatctttag

SEQ ID NO: 19225 - DNA, 60 bp, Homo sapiens
ctcttgcaggaggctcagcaaagctgaattaactcaggcagaagagcacagatgtgtggg

SEQ ID NO: 19226 - DNA, 60 bp, Homo sapiens
ataatgaggtcacaagtcctgtactacgatgaggtaggagtgtgtgaaataccatggtgg

SEQ ID NO: 19227 - DNA, 60 bp, Homo sapiens
aactgccagccctggcctctgtggcttctgccagagaggtcaacggacactcgaagtcca

SEQ ID NO: 19228 - DNA, 60 bp, Homo sapiens
gtgccaaggtccagcttaacatctacttgacccagagggaagatggagccacagatgaaa

SEQ ID NO: 19229 - DNA, 60 bp, Homo sapiens
cattgtcatcatggaggagtgcatttccttggctattccagaagtcctacctcccttctg

SEQ ID NO: 19230 - DNA, 60 bp, Homo sapiens
aactctaatgaggcacctaccagccaaagaacccagagagagccgggagagctgacctta

SEQ ID NO: 19231 - DNA, 60 bp, Homo sapiens
atgcccccaatgctgaggcccccacttccctccgaaggcccagggaacatacctccccct

SEQ ID NO: 19232 - DNA, 60 bp, Homo sapiens
tccgaccagcacgccacatattactgtgcgacagagcggcgcgaacgaggatggaatcct

SEQ ID NO: 19233 - DNA, 60 bp, Homo sapiens
ggagcctgaagattttgcaatgtattactgtcagacgtatggtggttcctcgtacacttt

SEQ ID NO: 19234 - DNA, 60 bp, Homo sapiens
cagacttatggtgggtcctcgtacagttttggccaggggaccaagctggacttcaatcga

SEQ ID NO: 19235 - DNA, 60 bp, Homo sapiens
ttattactgtcagacctatggaggttcctcgtacacttttggccaggggaccaaggtgga

SEQ ID NO: 19236 - DNA, 60 bp, Homo sapiens
cagacctatggtggttcctcgtacacttttggccaggggaccacggtggacatcaaacga

SEQ ID NO: 19237 - DNA, 60 bp, Homo sapiens
aacctttatctgatactctattccctgtggaattgcaaaatggagaaagctgcacgccag

SEQ ID NO: 19238 - DNA, 60 bp, Homo sapiens
tctgtgtctgtgaaccagggcaggtaattgtgacactgcatctcatagaactctgcctgc

SEQ ID NO: 19239 - DNA, 60 bp, Homo sapiens
agaatgaattggaaggtgttaacctctgatcctcagttcgcagcaccataaggtgggcat

SEQ ID NO: 19240 - DNA, 60 bp, Homo sapiens
tgcgagaggtcgtcccgttcgaggttttggctggtttttgccactggactactggggcca

SEQ ID NO: 19241 - DNA, 60 bp, Homo sapiens
ccacggctgaatcaagtctttgatctttggagtgacttctgccacagtgagcatatctgt

SEQ ID NO: 19242 - DNA, 60 bp, Homo sapiens
ctctcattaactacaacctctgcccatgttactcaaaatgtgattcaattcagttattca

SEQ ID NO: 19243 - DNA, 60 bp, Homo sapiens
ctcccctgaataaaaagtggtttcccatttctctcagggtaaagacaaaagtcctgaaca

SEQ ID NO: 19244 - DNA, 60 bp, Homo sapiens
tttgcggttttttccccgggacgcctttaatatctggggccaggggactgtcgtcagtgt

SEQ ID NO: 19245 - DNA, 60 bp, Homo sapiens
ctgaggggaagaggtcaatgggaatgggtggcggtggttaaagggagtgggtttcttttg

SEQ ID NO: 19246 - DNA, 60 bp, Homo sapiens
tgtcatggggtctcctgcccatcttcccaaggatgccattgctgtcttcatcgtcttccc

SEQ ID NO: 19247 - DNA, 60 bp, Homo sapiens
gagctgaagatttgcatgtattactgtcagtactatggtggctcctcgtacacttttggc

SEQ ID NO: 19248 - DNA, 60 bp, Homo sapiens
agaggtttggtacctcaccgctatacacttttggccaggggaccaagctggagatgaaac

SEQ ID NO: 19249 - DNA, 60 bp, Homo sapiens
tatattctctcttaatactatggtatgggggtcccctgcgaaggtcaatggatgggccca

SEQ ID NO: 19250 - DNA, 60 bp, Homo sapiens
acgctgggtggttcaaggcttctgcatgatcctcaaatgtcaccccaatctgctgtgaca

SEQ ID NO: 19251 - DNA, 60 bp, Homo sapiens
agaatcaaggatatgctactataggcccatacaagataacagagggatgctatgcgtttt

SEQ ID NO: 19252 - DNA, 60 bp, Homo sapiens
atcagctccatggcagaagcaatcctcatgatgaacacccaaacttgacccagcctctca

SEQ ID NO: 19253 - DNA, 60 bp, Homo sapiens
tattttgccctaggtcatccatctctagtaagtggcacagccagggattgaacccaggtc

SEQ ID NO: 19254 - DNA, 60 bp, Homo sapiens
tattacttctgtttgggagactgtgctctctgtggtgcctctcttggctctactccacag

SEQ ID NO: 19255 - DNA, 60 bp, Homo sapiens; identical to SEQ ID NO: 4855

SEQ ID NO: 19256 - DNA, 60 bp, Homo sapiens
ttctggattttctcccagtctaggactgaagacaccgatctctggtgccggttgagattt

SEQ ID NO: 19257 - DNA, 60 bp, Homo sapiens
gagagcttggggaaagcatctgtccatccttttcagggattttgggaacaagtttggaaa

SEQ ID NO: 19258 - DNA, 60 bp, Homo sapiens
tcgccgccttagtacccggagtgacccaggtagataacaagtccggtttcctgcagaaga

SEQ ID NO: 19259 - DNA, 60 bp, Homo sapiens
cagatgtccctgtcctttatatattagatggtggagatggatagccagaaacagacataa

SEQ ID NO: 19260 - DNA, 60 bp, Homo sapiens
ttagttccttcatgttctggagaaaccctttgcccaacatcgatcatgaactgcaggagc

SEQ ID NO: 19261 - DNA, 60 bp, Homo sapiens
ttttcctctggctttagataaattaatgcttgtaatctaagttttgttgctactttaaat

SEQ ID NO: 19262 - DNA, 60 bp, Homo sapiens
aacacatctggggaaacctgaaatcacacaagggctgaaaattcctcagaggcaatataa

SEQ ID NO: 19263 - DNA, 60 bp, Homo sapiens
ccccaacccatgattcttgcttggaaacatgaacctgatgttccacgtgcgttcagccaa

SEQ ID NO: 19264 - DNA, 60 bp, Homo sapiens
atgtcctgggctcctgtcctgctcatgctgtttgtctactgcacaggttgtggtcctcag

SEQ ID NO: 19265 - DNA, 60 bp, Homo sapiens
gtctatacttgtaccatgtaagttggttctcagatcatacaatgcatcatgagagtagag

SEQ ID NO: 19266 - DNA, 60 bp, Homo sapiens
gctatgcctcaactcatagaagatgaacccttcaagaaaacgtgaagtagaacgggtggg

SEQ ID NO: 19267 - DNA, 60 bp, Homo sapiens
ccagcgtcctgctgctttgcttcgatgtcaccagcccgaacagctttgacaacatcttta

SEQ ID NO: 19268 - DNA, 60 bp, Homo sapiens
ctccatatgcaggttgcagaccaagtaaatgcagcagcaatggcatgcagaatttgagtg

SEQ ID NO: 19269 - DNA, 60 bp, Homo sapiens
tgtctcatttcagctaactgtccctcactaaccctttctccgctcccacacccacttgct

SEQ ID NO: 19270 - DNA, 60 bp, Homo sapiens
atctgatcttgtgtcttagagaagcccccatacctggtagagcatgtaccatcttacatg

SEQ ID NO: 19271 - DNA, 60 bp, Homo sapiens
caaagtccctccctttgccctccagtgtgaatcggccccgaattgacctgatcgtgtttg

SEQ ID NO: 19272 - DNA, 60 bp, Homo sapiens
ccgtcgctaaagatactctacacatgccccttgaccaagaaatagcacttatgggaactc

SEQ ID NO: 19273 - DNA, 60 bp, Homo sapiens
ggacgactgccaccatcgcgcccattcttagcgtgccactctccggacagtttctgcagc

SEQ ID NO: 19274 - DNA, 60 bp, Homo sapiens
aacagtacctttaccacagaaagaagtgttgataatgcagtcagaatagctggatgatgc

SEQ ID NO: 19275 - DNA, 60 bp, Homo sapiens
tagactcgccccttgttctggagcaggccaagaatgacccgtttccccaccttgttaagt

SEQ ID NO: 19276 - DNA, 60 bp, Homo sapiens
taatgctcgtgtttcccaagcacctggaagacatgccagatccatgtgcagtaatgcctg

SEQ ID NO: 19277 - DNA, 60 bp, Homo sapiens
aggtgctcacctcactgcttcaagttactgaatgcggttctgtggcaggattcctacatg

SEQ ID NO: 19278 - DNA, 60 bp, Homo sapiens
tcctcatcttcctagagaagcgtttgcacaagacacacaggctgaaggagagtgtagctc

SEQ ID NO: 19279 - DNA, 60 bp, Homo sapiens
cacttcacagggatgaatataaaagatacggtctctgcctttaagtagcttacaatccag

SEQ ID NO: 19280 - DNA, 60 bp, Homo sapiens
caggtggctgggtctgagggaactccgagcagcccttaggtcctcaaagtctggatttgt

SEQ ID NO: 19281 - DNA, 60 bp, Homo sapiens
atcaattggcggttgattccaccaagcgagatctatagtctggatgggccgaaacagata

SEQ ID NO: 19282 - DNA, 60 bp, Homo sapiens
agggtcccgaatgctgccttggagggtggagtccagctctgagggtcctgaagtcagctt

SEQ ID NO: 19283 - DNA, 60 bp, Homo sapiens
gctgtcggaaaaggtaacagaagatggaactcgaaatcccaatgaaaaacctacccagca

SEQ ID NO: 19284 - DNA, 60 bp, Homo sapiens
acctgattaactgagttcaggagttgtcacacttttatggactgggtatagaagtactcc

SEQ ID NO: 19285 - DNA, 60 bp, Homo sapiens
gcacgagggtgatttgacctatagaattttccaaattcaaaatgtagaaaattaacctgg

SEQ ID NO: 19286 - DNA, 60 bp, Homo sapiens
actggggatgagagaaagaggaggaggcaggtccaagggtagccaaggatggctgcagct

SEQ ID NO: 19287 - DNA, 60 bp, Homo sapiens
gggctcagtaagttgttatgttgctggaattgaactactccaccagaaactagagctccc

SEQ ID NO: 19288 - DNA, 60 bp, Homo sapiens
ccttcacttaaccctctcgtatacaccctgaggaacaaggagataaagcgagcactcagg

SEQ ID NO: 19289 - DNA, 60 bp, Homo sapiens
cttgcttcttctgttgttgctcattgcaagggagtcttcttcaaggttattctcaggact

SEQ ID NO: 19290 - DNA, 60 bp, Homo sapiens
acaaatctcagagctaccttcaaagaagagccagccctcagttggtgaatgaagatactt

SEQ ID NO: 19291 - DNA, 60 bp, Homo sapiens
gatggtgcaaggaaaacagtggcaactctgtgggatggacatgcagccgtttggcatggt

SEQ ID NO: 19292 - DNA, 60 bp, Homo sapiens
tggcgtagagttcagtgttcgcagtcgcatattacaaccatgtttcacacagccctgctc

SEQ ID NO: 19293 - DNA, 60 bp, Homo sapiens
ttaggcatactctcctttggaggccagcagcctttcacaaaccctgcctctaaaagggcg

SEQ ID NO: 19294 - DNA, 60 bp, Homo sapiens
tggtggataaaacggggcttgttaccgggtgcccccaaggggtggacttgaataacggta

SEQ ID NO: 19295 - DNA, 60 bp, Homo sapiens
aaagcgcacatggctattttgatacacaaagttgtgtttgctactttagaagcttttgtg

SEQ ID NO: 19296 - DNA, 60 bp, Homo sapiens
tcagcccggccccgacatggagcagccgcaacatggaggcgccaaggacagtgctgcggg

SEQ ID NO: 19297 - DNA, 60 bp, Homo sapiens
atacagaaacaactgatggctgtgtagcagatgcactgggagcagcctttgccacaaggt

SEQ ID NO: 19298 - DNA, 60 bp, Homo sapiens
tcaacatggcgtggcttatgaaggtgtggctcacatcaaggtcattctggtgcacgttca

SEQ ID NO: 19299 - DNA, 60 bp, Homo sapiens
gatgcctaatgacctacacagggctttctagcaaggagtgactttctttctgctacgtgt

SEQ ID NO: 19300 - DNA, 60 bp, Homo sapiens
agtgacacctcaaactgctacagtcacctttgcagcaagcctgaagatgccaccaacatc

SEQ ID NO: 19301 - DNA, 60 bp, Homo sapiens
gccatcaccacaatcaagacagtgaatgtgtccaccacccctaagtttcctcaatgtccc

SEQ ID NO: 19302 - DNA, 60 bp, Homo sapiens
tctgcaagctggacggactcatccaccgcttcatcacgctccttgcggacaccagcgact

SEQ ID NO: 19303 - DNA, 60 bp, Homo sapiens
ggcatatcacagtgttgtgtcactactacaaggtaaagcatctacagcggagaatgagct

SEQ ID NO: 19304 - DNA, 60 bp, Homo sapiens
gaaggtatgctttcaagaatgttgatccttcctgctcctgttgtacctaagcaaaagagg

SEQ ID NO: 19305 - DNA, 60 bp, Homo sapiens
gaaccatgagacctctgagtccctccaggacatgaagcactttcaggacaagtattctct

SEQ ID NO: 19306 - DNA, 60 bp, Homo sapiens
cttcagtggaaggaagagtgggtcagatgagacgtgtccatttcatcagtcagccatcgg

SEQ ID NO: 19307 - DNA, 60 bp, Homo sapiens
ggtgatagttttacatgaccagttatcaaacggtcatagtatgaagtgtgcagttgttca

SEQ ID NO: 19308 - DNA, 60 bp, Homo sapiens
gggctggcttagatgaagatgaagatgcacatgtctgggaggataattgggatgatgaca

SEQ ID NO: 19309 - DNA, 60 bp, Homo sapiens
ggcacagttgttttggaaagcaatagatgagagtacctgttttaccatggtcttaccagc

SEQ ID NO: 19310 - DNA, 60 bp, Homo sapiens
caaggctgccacagagtgttcgacatcatctaattatttctcacttctcatcaaaggatt

SEQ ID NO: 19311 - DNA, 60 bp, Homo sapiens
ctgaatcaagtctaaccccaacagccacatcctcctatacctagacatctcatctcagga

SEQ ID NO: 19312 - DNA, 60 bp, Homo sapiens
gagtagtaagctactatcagaacgttaaggctaagaaaatgtcactttgcaatgaaaacc

SEQ ID NO: 19313 - DNA, 60 bp, Homo sapiens
tgcattagagccaactggttttatcattgtcagtgggtgtttcgatgcagtctcttggct

SEQ ID NO: 19314 - DNA, 60 bp, Homo sapiens
tgttcatgaaggcagagggactaagtttccaacatgtgattttttaagggatacattcaa

SEQ ID NO: 19315 - DNA, 60 bp, Homo sapiens
tcccacccactgctggtcacaacccgctgtctggacctgccgcttatgggatgaggtggg

SEQ ID NO: 19316 - DNA, 60 bp, Homo sapiens
atgcctccctgtgcataaggtggcaggaagaagaatcgaccgtctgaccctagtgattgg

SEQ ID NO: 19317 - DNA, 60 bp, Homo sapiens
ccactttctgctggtctccgagagactgattcaggtgttcaggagtctgttcgctattac

SEQ ID NO: 19318 - DNA, 60 bp, Homo sapiens
gtattggcttgcctggctgattcatgtgggagagtccttgtatgccatagtattgtgcaa

SEQ ID NO: 19319 - DNA, 60 bp, Homo sapiens
ggcctgttttcccacaggattgtgggctctctgcttccttagtcggaagtgttttcaact

SEQ ID NO: 19320 - DNA, 60 bp, Homo sapiens
ttggattactggaatacccatgggccctctcaagagtgctggacttctaggacattaaga

SEQ ID NO: 19321 - DNA, 60 bp, Homo sapiens
atcattcatctcatcagttcagcaaagcaaatgccctcaatggtttcttttgtgattcga

SEQ ID NO: 19322 - DNA, 60 bp, Homo sapiens
gatttcagggattttgtcagggagaaaaagtatcggacagaagctgagatgtttggatgg

SEQ ID NO: 19323 - DNA, 60 bp, Homo sapiens
aaggagccttaactgatggggtcgtaccatacgaacagcccctttagggcctctaattca

SEQ ID NO: 19324 - DNA, 60 bp, Homo sapiens
tcgaaactgcatcttgcagcttttcgggaagaaggttgacgatggctctgaactctccag

SEQ ID NO: 19325 - DNA, 60 bp, Homo sapiens
gcaagagaggcaggaaatttgagttcgcaattctatcctgggtaggtaggacctataatc

SEQ ID NO: 19326 - DNA, 60 bp, Homo sapiens
gagtgaacagtgtgacagtacctagtcttggtaagaatatggagccccgattgtgaatac

SEQ ID NO: 19327 - DNA, 60 bp, Homo sapiens
gaatactgagtctgtatcagctgctccaagtgcagcaagagagctcagcttaacctcaca

SEQ ID NO: 19328 - DNA, 60 bp, Homo sapiens
cagcaccaatgaagcacctaccccatgcagggtccttcagaaacaaagagtgagatagct

SEQ ID NO: 19329 - DNA, 60 bp, Homo sapiens
ttggttttggaagctgagtcctcctagccagctgctgaaacatgtgaactccactccacg

SEQ ID NO: 19330 - DNA, 60 bp, Homo sapiens
aaggcattctgggatgttatggatgaaatcgatgagaagacctgggtacttgagccagaa

SEQ ID NO: 19331 - DNA, 60 bp, Homo sapiens
aggatgctacatatccagggactccctcctggccttcctgtgtcacttcacaatgtgaca

SEQ ID NO: 19332 - DNA, 60 bp, Homo sapiens
attccagtaacttgcccaaagtcacttagtaccagcaaacggacttttccccctctccct

SEQ ID NO: 19333 - DNA, 60 bp, Homo sapiens
acgtgctggacctggaagcccgcggctacatcaagccccacgtggacagcatcaagttct

SEQ ID NO: 19334 - DNA, 60 bp, Homo sapiens
gggaccacaaagaattttcagtgggaatgtctagtctgaggggtctgaggttgtttttac

SEQ ID NO: 19335 - DNA, 60 bp, Homo sapiens
ggtgagcaatctgttatagggattgtgtgattgacttgtatgatagtcgatgctagtggg

SEQ ID NO: 19336 - DNA, 60 bp, Homo sapiens
ggttcgagaatgtcaagccagattttgttcagcccagggatgttcaggagctgaaagacg

SEQ ID NO: 19337 - DNA, 60 bp, Homo sapiens
ttcccggccagcggtacaactgcagaactgcaggagactatctttctagacaaggcagtt

SEQ ID NO: 19338 - DNA, 60 bp, Homo sapiens
cccttcacagagagactctaagtgtacatctgacttgcagaactagacgagttgagtcac

SEQ ID NO: 19339 - DNA, 60 bp, Homo sapiens
tgtagtctgtgttggtacaggcttctgcatgctgtaagtcagcaggcgttcaggaacaac

SEQ ID NO: 19340 - DNA, 60 bp, Homo sapiens
tctaagtcagagccttgacattctactccaaaaggaagtccaaattagagcccataggct

SEQ ID NO: 19341 - DNA, 60 bp, Homo sapiens
gagaacatgtatgcataatcagaaggatgcagtgcagatgcctagtgaaactctgaaagc

SEQ ID NO: 19342 - DNA, 60 bp, Homo sapiens
gcagtcttctgacatcccacagagcacagctgcaccaaaacaaggaagattctacctctg

SEQ ID NO: 19343 - DNA, 60 bp, Homo sapiens
catacacgaaggtctcctggagctcagaaggtcagacacaaagtcactccttgaccctat

SEQ ID NO: 19344 - DNA, 60 bp, Homo sapiens
ggtgctattcctaaggttaactttgaatatgtgacacacacactcctaagtacctttaag

SEQ ID NO: 19345 - DNA, 60 bp, Homo sapiens
aactccagttaagacttgagatgtccacagtggcagccactagcttgactgcaacttacg

SEQ ID NO: 19346 - DNA, 60 bp, Homo sapiens
cgggatcgctatgatgaccgaggcagcagagactatgatagaggctatgattcccggata

SEQ ID NO: 19347 - DNA, 60 bp, Homo sapiens
aaacccaggactgtttggaggctatggctacagcaaaactacggacacttacggctacag

SEQ ID NO: 19348 - DNA, 60 bp, Homo sapiens
tgtccccgtgtttggagggtccaccctatcccatccgaaccctgaagctttcacacaact

SEQ ID NO: 19349 - DNA, 60 bp, Homo sapiens
ttccccgtgtttgaagggtccactcctatcccttccaaactctggagctttcgtacatgc

SEQ ID NO: 19350 - DNA, 60 bp, Homo sapiens
ctgccttctgaggggatcttggcctcacggtgtttggaggctgctgccccctggctttgg

SEQ ID NO: 19351 - DNA, 60 bp, Homo sapiens; identical to SEQ ID NO: 4855

SEQ ID NO: 19352 - DNA, 60 bp, Homo sapiens
aggtgttcataatgtgacagccctgagcaacctcataacgtggcagaaggtggattatga

SEQ ID NO: 19353 - DNA, 60 bp, Homo sapiens
gctgaataggctacatttaatgctatgaaagctctgtatctatgtgctttatatcccatc

SEQ ID NO: 19354 - DNA, 60 bp, Homo sapiens
cgagataccagtgagaaccttctagatgctgaattgtccagtataacggataaggtctta

SEQ ID NO: 19355 - DNA, 60 bp, Homo sapiens
gtaatgtcttcagtggaacacaaatgaaaatgaatagcttgtttctgtcaagcatattgg

SEQ ID NO: 19356 - DNA, 60 bp, Homo sapiens
gctgcatttgacaacggagaccagaaggtgttcttcgatctgtgggaggagcacatttca

SEQ ID NO: 19357 - DNA, 60 bp, Homo sapiens
gctgggtttgtgtagacaactctgttatcttcaggagtaattccccgtttccttcaagag

SEQ ID NO: 19358 - DNA, 60 bp, Homo sapiens
ggttatgctaatgctacaaggaatttgtaagttttccatctcttcctgtactgaaacagt

SEQ ID NO: 19359 - DNA, 60 bp, Homo sapiens
gccctgtgcatatgaagtcgttcttcccccaactcttgaacgatgatgatattcagacga

SEQ ID NO: 19360 - DNA, 60 bp, Homo sapiens
ggagcttgtatgtgtgtctttggtgatgacatgtgttgtgagggtagatgggaaccatgt

SEQ ID NO: 19361 - DNA, 60 bp, Homo sapiens
cagctctaactctggtcatatacttgtttttggatctctgcttctttttctggcaacata

SEQ ID NO: 19362 - DNA, 60 bp, Homo sapiens
ttgcccggcaacctggtgggcatccggctgaactgggatgaccgcaccgtcaatgacctg

SEQ ID NO: 19363 - DNA, 60 bp, Homo sapiens
ttagtaatgggctcccacttgtcctccatcaccatgtggttttccttggccctcatcatc

SEQ ID NO: 19364 - DNA, 60 bp, Homo sapiens
gccatagtagggtgtggagcaggaaagtagcacaatcacgtgtgcgtatctgcgtattta

SEQ ID NO: 19365 - DNA, 60 bp, Homo sapiens
tcaacatcaggctactgaagttgaggctttagggtaactttcctatattgagcccatggg

SEQ ID NO: 19366 - DNA, 60 bp, Homo sapiens
ctcatttggtgacgtcttactggtgatcatctcctcaccccatctcccaccttgtggaat

SEQ ID NO: 19367 - DNA, 60 bp, Homo sapiens
gggttctaggtccccaggtggaggcgttggctggcgaactatcctcatgggctcagctct

SEQ ID NO: 19368 - DNA, 60 bp, Homo sapiens
gccttcaaaggagggattgcaaagcaaggcaaagcgttctgtcttcattttccccatccc

SEQ ID NO: 19369 - DNA, 60 bp, Homo sapiens
ctgcccattccacagaatttgtgcagcagtacaagcaaaagctaggacacaagacacaag

SEQ ID NO: 19370 - DNA, 60 bp, Homo sapiens
gcctgcaatgacctctacatcactctccttgtattcaccactacagccacactgctttcc

SEQ ID NO: 19371 - DNA, 60 bp, Homo sapiens
gcaacttctgaggtctgctaaaccaagttcaagtgagctgtccacttagcgtctgtttag

SEQ ID NO: 19372 - DNA, 60 bp, Homo sapiens
ataaggagcttattgagctatcatgtcgtaagccggtggagaagtccagggctagtgtgg

SEQ ID NO: 19373 - DNA, 60 bp, Homo sapiens
tagaaccatgcaagtgtgtgcattaagccctggaaatactggaggcattttgtggggcag

SEQ ID NO: 19374 - DNA, 60 bp, Homo sapiens
atgcacccactgccagctgagagctgcttcccaatggcctgcattaaagcattcgtaaca

SEQ ID NO: 19375 - DNA, 60 bp, Homo sapiens
ctctgggctgtttgctgtggagcaaggctaattcctgagcccttggggacgacagctcca

SEQ ID NO: 19376 - DNA, 60 bp, Homo sapiens
ctgctgccacaaagactgtaaagtgcttcatttcaacagctgaggcaagccaagtgatca

SEQ ID NO: 19377 - DNA, 60 bp, Homo sapiens
tattttcctgaccacctcattccagccaatgtatggttatccactctgtgtgccaaaacc

SEQ ID NO: 19378 - DNA, 60 bp, Homo sapiens
gcccagaatgataaggtgatatctgaacaggttccccaaacacaaagacgagcatgcatg

SEQ ID NO: 19379 - DNA, 60 bp, Homo sapiens
ggacaggcttgataaactaagcccacagtcaacctgccattaaaagcagagtgagttaga

SEQ ID NO: 19380 - DNA, 60 bp, Homo sapiens
tagttgagccctcagtcgcccaaacatgaggagagacccaactccagcagccagaattta

SEQ ID NO: 19381 - DNA, 60 bp, Homo sapiens
cttaggtgcatgtgcctgcatgacctgggctctcctacaatttgatcacccaatctgatt

SEQ ID NO: 19382 - DNA, 60 bp, Homo sapiens
tctgtagtgggtagaggttgagtagaatggcgactgtagagaagcattggattggcgcgt

SEQ ID NO: 19383 - DNA, 60 bp, Homo sapiens
agaaccaataaagttcttgcacagctacagttgttggcctgcactgctatcaagggtctc

SEQ ID NO: 19384 - DNA, 60 bp, Homo sapiens
tgctgctcttgtgtcccacgtggtacttagttcaaggctgccccagcagatgcttaataa

SEQ ID NO: 19385 - DNA, 60 bp, Homo sapiens
ctctgagacgagaactgccttggtgaaggcaagttcaagcaccacttgagactgggggca

SEQ ID NO: 19386 - DNA, 60 bp, Homo sapiens
gccacatacgggctctactcaaagggagtccacagagaactcaaaataaatgagccgacg

SEQ ID NO: 19387 - DNA, 60 bp, Homo sapiens
ttcacagcgtacgtcccgccacctggaggaggactacgcagatgcctaccaggacctgta

SEQ ID NO: 19388 - DNA, 60 bp, Homo sapiens
tgcctctgtgtagttaacactgccccagacagcagctctgatttcagtcacagttctgct

SEQ ID NO: 19389 - DNA, 60 bp, Homo sapiens
atggaaatagcagaaacatgggtacatacaacagagcatcactcccttgataagttctat

SEQ ID NO: 19390 - DNA, 60 bp, Homo sapiens
tgtggaattgtcgcggcccctggtctgccgcggcgttttttgtctacattcgtcgtagct

SEQ ID NO: 19391 - DNA, 60 bp, Homo sapiens
catggtttgatggtatctgaggcagggttgctccacagggtaggctctaggaggggctgg

SEQ ID NO: 19392 - DNA, 60 bp, Homo sapiens
cccccccctccgtcggaattcctcgagccgggatccataggatgtggagttagttttgtt

SEQ ID NO: 19393 - DNA, 60 bp, Homo sapiens
atcaaaactgtggtattggagaaaggatacatagatcatcagaacagagcagagcagagc

SEQ ID NO: 19394 - DNA, 60 bp, Homo sapiens
cctcctagaattggaagaagatggccctattctccgtgtcatcagcctggacatttatgg

SEQ ID NO: 19395 - DNA, 60 bp, Homo sapiens
cctgggcaacgtggcaagaagataacatgtagacaagcagtcaaacatgtattctttttt

SEQ ID NO: 19396 - DNA, 60 bp, Homo sapiens
ttacagaaaggggtggctctggagacaccatgacagcaaaaggactgggactgatttctc

SEQ ID NO: 19397 - DNA, 60 bp, Homo sapiens
tgtttacttcagccagatgaacaaggtcaacattaacagttacatgtggcatagtgccac

SEQ ID NO: 19398 - DNA, 60 bp, Homo sapiens
ctttgttaggatacagaaatgctttgtgtcctgcaatactgttaaatctccttattagtt

SEQ ID NO: 19399 - DNA, 60 bp, Homo sapiens
aactttattaggttagctgcatagtcgtggtacacgcttctgtgcctgtagtcccagctg

SEQ ID NO: 19400 - DNA, 60 bp, Homo sapiens
agccccaccttgttagcgggaaaccacagttcagagcctaaagtaagctgcaaattaggc

SEQ ID NO: 19401 - DNA, 60 bp, Homo sapiens
gctgaagtattcagtgaaacatctactctgggaccaaagaccttccatagatgcagattc

SEQ ID NO: 19402 - DNA, 60 bp, Homo sapiens
gctactgctacacctgctactgctatccccactattcctactaccattgctcctactgcc

SEQ ID NO: 19403 - DNA, 60 bp, Homo sapiens
tcttccttactgccatttcacatctccatcagtgagttcctcaggatttgcctttatgtt

SEQ ID NO: 19404 - DNA, 60 bp, Homo sapiens
ccgttccaacctcgtttccatttcttgaatgttgagtattacaacatcactgcgctaggg

SEQ ID NO: 19405 - DNA, 60 bp, Homo sapiens
ccaactaataccaccgtggaggtagtggggtcttcaggtcagaatggagatgaaaagcag

SEQ ID NO: 19406 - DNA, 60 bp, Homo sapiens
ccccagctgtctttcctcatatgtttttgcatcatcttacctctgcgtctgtgttcaagt

SEQ ID NO: 19407 - DNA, 60 bp, Homo sapiens
gctaggaatactgcttgtaaagccagggctagaaataatgcctgctcacaactactactt

SEQ ID NO: 19408 - DNA, 60 bp, Homo sapiens
tctcaagccctacgagtgcggagtctgcgccaagaagttcatgtggcgagacagcttcat

SEQ ID NO: 19409 - DNA, 60 bp, Homo sapiens
atagggtggggtagaagtatttcagacagaaagaatggcatgtgtaaaagccctgtggtc

SEQ ID NO: 19410 - DNA, 60 bp, Homo sapiens
agggtgtgttggaggtcagtagcacagtttggctgagatgcatggtacttgttagaaaac

SEQ ID NO: 19411 - DNA, 60 bp, Homo sapiens
ctctccggggtcttgtttactcgggcacgaatcccattcatgagggactccacctttatg

SEQ ID NO: 19412 - DNA, 60 bp, Homo sapiens
ttatctcaccatttccattagtacagagtctgggcacagcttaactgaatccactgttca

SEQ ID NO: 19413 - DNA, 60 bp, Homo sapiens
tccagattgtgacgaagcagacaggcaatgagtgtgtgacagccattgagattgtgcctg

SEQ ID NO: 19414 - DNA, 60 bp, Homo sapiens
acctaaaacagagcaggctaagtttccaggccagccagcataattctgtgcttatccata

SEQ ID NO: 19415 - DNA, 60 bp, Homo sapiens
cttttctaacgttcatgtcttttccctactgcccacccaaatctagcctcatacttcatt

SEQ ID NO: 19416 - DNA, 60 bp, Homo sapiens
gcactcgctagctttcctgacacctggaactgtgcacctggcaccaagcggaaaataaac

SEQ ID NO: 19417 - DNA, 60 bp, Homo sapiens
ttgggaagctggattcatacgaaatgactccaagacgcttagctatctctctgaaaactg

SEQ ID NO: 19418 - DNA, 60 bp, Homo sapiens
cagaatctactcttacaatgccttcctacagctcactggggtgcttaccaaagccatagc

SEQ ID NO: 19419 - DNA, 60 bp, Homo sapiens
ggagtcagacctcagtccaaatcctacttccgccacttcggacaagtgacttaatcagtc

SEQ ID NO: 19420 - DNA, 60 bp, Homo sapiens
ccatccactcgaaatgtaacttagccctcggcttctccttacctttcaggagttctctcc

SEQ ID NO: 19421 - DNA, 60 bp, Homo sapiens
gggggagggggttgaaagttcaatcgacgtaaatcactaaacgaagattctgtacatttt

SEQ ID NO: 19422 - DNA, 60 bp, Homo sapiens
ctgctgctaatcggtttcccttgtgatctggttcctgaggtcttcggatctgtgcaatga

SEQ ID NO: 19423 - DNA, 60 bp, Homo sapiens
ctcgtgcccaataagggtatcccaaagcgggcagaatgctcattaggggaaggtgagaca

SEQ ID NO: 19424 - DNA, 60 bp, Homo sapiens
cagggaggaactctcaatgaccacccacaagtaatgaccacctgaaatactacgtctcag

SEQ ID NO: 19425 - DNA, 60 bp, Homo sapiens
ggcacttctagaaaccaaatccttgaagatgactaaccagaaatgcccgtcatagcactg

SEQ ID NO: 19426 - DNA, 60 bp, Homo sapiens
tttttcactccttatctcattcctgtttggtgatgggatggattggggtaggaaggaatg

SEQ ID NO: 19427 - DNA, 60 bp, Homo sapiens
ttttagggatttacagagaacacggggttctcactgttggcgggatggtcaactctggct

SEQ ID NO: 19428 - DNA, 60 bp, Homo sapiens
gcatctgggtctttgcagctgtcagttgctctttcaactctaggatccatctttggacca

SEQ ID NO: 19429 - DNA, 60 bp, Homo sapiens
agcttggctcatctggggtttgctgggcttaacacccaataaagaactttgctgactact

SEQ ID NO: 19430 - DNA, 60 bp, Homo sapiens
aggacggttgctgtcctcatttgcattccaagaagagcatgtcctccctcgagaaacagt

SEQ ID NO: 19431 - DNA, 60 bp, Homo sapiens
tcgtgccccattactatgtggagagcatcgcagacttgacagaggggttggaggactgag

SEQ ID NO: 19432 - DNA, 60 bp, Homo sapiens
tacaaatgtgcctgcctgcgttctgatcacccctggagactccaaagctgtgcttcctcc

SEQ ID NO: 19433 - DNA, 60 bp, Homo sapiens
acaggccaacccagaggacaggattccctggaggccacagaggagcaccaaggagaagat

SEQ ID NO: 19434 - DNA, 60 bp, Homo sapiens
gtccgccccgcgagcacagagcctcgcctttgccgatccgccgcccgtccacacccgccg

SEQ ID NO: 19435 - DNA, 60 bp, Homo sapiens
ctggatttcccagagtcgtcttttaaaggagttaagattctagctctggcaggaaagtca

SEQ ID NO: 19436 - DNA, 60 bp, Homo sapiens
ttttctgttgatggatgctgctgccctctcctcaacctctcacactctgcactacagaca

SEQ ID NO: 19437 - DNA, 60 bp, Homo sapiens
gatatcatctgtagaagacccaattttggggtttcagattaggaagggtttgatggtttt

SEQ ID NO: 19438 - DNA, 60 bp, Homo sapiens
tagattcaagtgacagtaaaaggatttgttcccttcagtgacttgagtgttttagttatg

SEQ ID NO: 19439 - DNA, 60 bp, Homo sapiens
accacgaccactgcaaacaccgcacctgcctaccagccaccagctgcctacaaagacaat

SEQ ID NO: 19440 - DNA, 60 bp, Homo sapiens
ggttaaagagggcagtcactgttccaaggagtgaaggactgggtgttactggagggaaca

SEQ ID NO: 19441 - DNA, 60 bp, Homo sapiens
ccgctcttctaccaatcccagccaaagaatgctcctgttaccttcattgtggatggagca

SEQ ID NO: 19442 - DNA, 60 bp, Homo sapiens
ttaggtcagtctgcctcctgacagtttttgcgtagtcaagctctaggcggtatgggaatg

SEQ ID NO: 19443 - DNA, 60 bp, Homo sapiens
catttggatcatcttttacactgccatccattatgactgatggtgtacagctcccaagtg

SEQ ID NO: 19444 - DNA, 60 bp, Homo sapiens
ttgtatggtttattcagaagtgccaaatttcagtgaacccaacccagattatcgaggaca

SEQ ID NO: 19445 - DNA, 60 bp, Homo sapiens
tccctcctaacagcctccctccagcgtcttcttggccgcagcggcgaagcagctccgcag

SEQ ID NO: 19446 - DNA, 60 bp, Homo sapiens
accttcgacgtcttcgtctggttcggctgggctaactcctcactcaaccccgtcatctat

SEQ ID NO: 19447 - DNA, 60 bp, Homo sapiens; identical to SEQ ID NO: 4855

SEQ ID NO: 19448 - DNA, 60 bp, Homo sapiens
gacttccttaatgatctcagctagatcctttgaatatcttgctgtaacttctgcttgcgt

SEQ ID NO: 19449 - DNA, 60 bp, Homo sapiens
tatgcacttctaggcctggtttctgaaacttcttccatgatcctctgtgctgtctcattt

SEQ ID NO: 19450 - DNA, 60 bp, Homo sapiens
ccttgtattactgtacaaaaagaaggggggtgacagacattgacccttttgatatctggg

SEQ ID NO: 19451 - DNA, 60 bp, Homo sapiens
ccaaaggtttgggagaacaacaacagccaaaagtgtctgcaggatgctgagtgatttgtg

SEQ ID NO: 19452 - DNA, 60 bp, Homo sapiens
ccggctacagagtatcagccgctcttgaagaagccgacaagatgtttctgagaacaagag

SEQ ID NO: 19453 - DNA, 60 bp, Homo sapiens
cagccccaaccttgacatcactgtggatgccatcagggtggtctggttcacttatacaac

SEQ ID NO: 19454 - DNA, 60 bp, Homo sapiens
ccatgagaacctgtggccagcccttttcattggctgagttccctgctgttgtgcgtggtg

SEQ ID NO: 19455 - DNA, 60 bp, Homo sapiens
gttcctttgcctggtcgtcctctattacatcgtctggtccctcctgttcctgcggtccct

SEQ ID NO: 19456 - DNA, 60 bp, Homo sapiens
aaagtaaagcttacctgaaaagtgcatagtttggggcaatggtatctacatctcccactg

SEQ ID NO: 19457 - DNA, 60 bp, Homo sapiens
gagacaagcattcagcatggcattagtaatgatggtttaaactaggtgcagaactgtccc

SEQ ID NO: 19458 - DNA, 60 bp, Homo sapiens
acatgtcctaagacttagtgcagagaagcttggcagtacgttctttgacttaaggatggc

SEQ ID NO: 19459 - DNA, 60 bp, Homo sapiens
cacttccatttgcctgcaaagccagaaacttctctcaagaagattatagctgagtatgta

SEQ ID NO: 19460 - DNA, 60 bp, Homo sapiens
gtaaagcccaagaaagtagctaaaagccctgctaaagctaaggctgtaaaacccaaggcg

SEQ ID NO: 19461 - DNA, 60 bp, Homo sapiens
gtcctcagagaccaaaaaatgcttacatcttaaagaagtctcggatctctaagaagcctc

SEQ ID NO: 19462 - DNA, 60 bp, Homo sapiens
gctgctcaatctcattctaagagaaggttccagtgaacaataaatggtacaaagccttgg

SEQ ID NO: 19463 - DNA, 60 bp, Homo sapiens
catctgaagtgtttcttcttggagggtgggatgtggctagaatacagtatgattgtgaag

SEQ ID NO: 19464 - DNA, 60 bp, Homo sapiens
cttgcagagcaattcagcatccaaggaaagactgacagctttgaaagagacctgataatg

SEQ ID NO: 19465 - DNA, 60 bp, Homo sapiens
accaagattccagatggggatagtaactagaaggtgcttcagatgcactgcctgcgggtg

SEQ ID NO: 19466 - DNA, 60 bp, Homo sapiens
cagacccgactgaatgctcggattgggaaaatgaaacggaggaagcaagatgaagggcag

SEQ ID NO: 19467 - DNA, 60 bp, Homo sapiens
gacccagatcccccatatcagatggcatagatccccaatttacacaagaagctcaagact

SEQ ID NO: 19468 - DNA, 60 bp, Homo sapiens
gtcacaattagtaaaaatcctgaaaattttgagtgaaatatgttaggtgatttcccttcg

SEQ ID NO: 19469 - DNA, 60 bp, Homo sapiens
tatcccttcaggtggagttggaatctgacccacccatctgaactggtggttttctaggtg

SEQ ID NO: 19470 - DNA, 60 bp, Homo sapiens
gtgaattttaggagcagtgaaagagatatttttggaaagattggatttttgctgattctc

SEQ ID NO: 19471 - DNA, 60 bp, Homo sapiens
gccaaaactcgggaggtgctcgtcagccacctggcatcttacaacacatgggctttacaa

SEQ ID NO: 19472 - DNA, 60 bp, Homo sapiens
catgaaggatggaaggtaaagggatcttggaagaatttctacatcacatttaaagtggca

SEQ ID NO: 19473 - DNA, 60 bp, Homo sapiens
gagcttctcctctcctcacgaccgagagcagtcattatggcgaaccttggctgctggatg

SEQ ID NO: 19474 - DNA, 60 bp, Homo sapiens
tatttctgtcatctggaaatgcctgcgcataagccccatgacggatgtgcttggctaaaa

SEQ ID NO: 19475 - DNA, 60 bp, Homo sapiens
ttttattctccagctttcagtgccaaagaggccatgctgagttaggtaggtgggcgctgc

SEQ ID NO: 19476 - DNA, 60 bp, Homo sapiens
tggttttatgttaaaccttgtagcctaacaaactgctgttctttctaactgacagacatg

SEQ ID NO: 19477 - DNA, 60 bp, Homo sapiens
atctaacctcagaaagcttcgcattttccttagggccaacacggaactccttcccaagcc

SEQ ID NO: 19478 - DNA, 60 bp, Homo sapiens
gttgtataagtgaaccagaccaccctgatggcatccacagtgatgtcaaggttggggctg

SEQ ID NO: 19479 - DNA, 60 bp, Homo sapiens
aagtgaagatgatctgattttagagagcccagaaccacagccaaatccaggtggcaagat

SEQ ID NO: 19480 - DNA, 60 bp, Homo sapiens
cctgtgttcacgttctagagtatagccatctctatgacctaccaaacatctctgtatctc

SEQ ID NO: 19481 - DNA, 60 bp, Homo sapiens
ctgatcccagaactcaatctctattgtgcagcagtatcaaaggtccttaaattctcaaca

SEQ ID NO: 19482 - DNA, 60 bp, Homo sapiens
atctgcacaagccctggctagatatgtgtgaatgtgtggcatcatttcacttcagccgcc

SEQ ID NO: 19483 - DNA, 60 bp, Homo sapiens
tactctttatccaaattagtttgcattcacaaattctggagcttagtacttggacatata

SEQ ID NO: 19484 - DNA, 60 bp, Homo sapiens
ctgcgcttggccgttttgttatttggcttagtctacattgggcggaagtctgtgtgcaca

SEQ ID NO: 19485 - DNA, 60 bp, Homo sapiens
tctgcctccatccttttctcacagcaatgaattttgcaatctgaacccaagtgaaaaaca

SEQ ID NO: 19486 - DNA, 60 bp, Homo sapiens
gggacacagcagtcagaaggcaggtttcatcagggtactctgcccaaactgtagtatcta

SEQ ID NO: 19487 - DNA, 60 bp, Homo sapiens
accaagtgggaattgcaccactggaaacaaatcaccaggataaagcagtctctggctggg

SEQ ID NO: 19488 - DNA, 60 bp, Homo sapiens
tgagggaaaataaccagtcctctacactggaattcatcctcctgggagttactggtcagc

SEQ ID NO: 19489 - DNA, 60 bp, Homo sapiens
agggttcatgaccacatcctatgtacgtattgtcagaaccatccttcaaatgccctcggc

SEQ ID NO: 19490 - DNA, 60 bp, Homo sapiens
acagcactttgatgtgcagcaatacaacaagttaaaagaagaccttgctaaggctaaaga

SEQ ID NO: 19491 - DNA, 60 bp, Homo sapiens
attaccccctaaagcttctttttgtccatttgtaatccatcccctatcctgtccccagga

SEQ ID NO: 19492 - DNA, 60 bp, Homo sapiens; identical to SEQ ID NO: 4855

SEQ ID NO: 19493 - DNA, 60 bp, Homo sapiens
tgaatgtggtagtgtgagtgtgattctgaaagctatagcagccgactcgtaaccccgagg

SEQ ID NO: 19494 - DNA, 60 bp, Homo sapiens
gactgcatagtcactacttttagtgagtttgaaatctgtttggagagctatgtaagtacc

SEQ ID NO: 19495 - DNA, 60 bp, Homo sapiens
atgccagatcactcagagcctatgaatgtggatatcaacaccaggtctctagcaccgctg

SEQ ID NO: 19496 - DNA, 60 bp, Homo sapiens
ccatgaggtctgacttgtgctggctactttacccttggtgcctccatttccttcactgga

SEQ ID NO: 19497 - DNA, 60 bp, Homo sapiens
cagtagaggtgggtttggattggcagatggaagattctggcattctgggtccatagcgtt

SEQ ID NO: 19498 - DNA, 60 bp, Homo sapiens
ctccaggagtctctctgagaaccaggccaaagtagctgcttatggtctaggatacaccta

SEQ ID NO: 19499 - DNA, 60 bp, Homo sapiens
ggcttttctgtcgctgagtggtactgcctagtccagatgtcgtggctcagggtgtaaata

SEQ ID NO: 19500 - DNA, 60 bp, Homo sapiens
cacgtccgacagcagagttgaatgaagcctgcatgcttgcacaacatcagaactgtcaga

SEQ ID NO: 19501 - DNA, 60 bp, Homo sapiens
agttatctatgatgtgtctctctgcacattcttggctgcaaactgggcaacgaatgactc

SEQ ID NO: 19502 - DNA, 60 bp, Homo sapiens
tgtcggtaggagagaccaagctgtctgtgtgccgatgtcttgacacctgagacttcaggt

SEQ ID NO: 19503 - DNA, 60 bp, Homo sapiens
gagcatttttctcatgaaagggtataagattttgtcactttttgtgcgtgtctactgagc

SEQ ID NO: 19504 - DNA, 60 bp, Homo sapiens
cgacctttttgctttagcccacacaatatgacctcggggaggatgcgaggaagatgaact

SEQ ID NO: 19505 - DNA, 60 bp, Homo sapiens
caatactatccagtttacatggtcctaccctgggaacaacctcagcaaacagttccaagg

SEQ ID NO: 19506 - DNA, 60 bp, Homo sapiens
acaccctcccagcaggggatgggaaccctgtcccatgaagccctctcctcagctttactt

SEQ ID NO: 19507 - DNA, 60 bp, Homo sapiens
gtacattgctgcagtgtcagtgcagtgtagaagcagaagtggcagccatgttctgtctct

SEQ ID NO: 19508 - DNA, 60 bp, Homo sapiens
gggtccattcaagaattgtgcccacaatataccaggcacttgtccagacctgcatcgtcc

SEQ ID NO: 19509 - DNA, 60 bp, Homo sapiens
cccagttggtggcactgttacagtagctctcagaaattaatacgctgagtacaaagtcaa

SEQ ID NO: 19510 - DNA, 60 bp, Homo sapiens
agggcaggagatagactctggcccttgtttctagcctccttccttgcagtgtttacaaca

SEQ ID NO: 19511 - DNA, 60 bp, Homo sapiens
ggtaagacaaatacacattggatgaccacagtaacagcaaacagggcacaaactggattc

SEQ ID NO: 19512 - DNA, 60 bp, Homo sapiens
ctctgcacctacttcctgaacacagacttgacacgaactggacctccttcagctacccta

SEQ ID NO: 19513 - DNA, 60 bp, Homo sapiens
cctaaaggattgctggaagttcgggaagccctggaaaaggtacacaaagtagaagacctt

SEQ ID NO: 19514 - DNA, 60 bp, Homo sapiens
caactagtcagtgcagaggtgggaaacataaccagatttgttcggcatgaacttgtgcca

SEQ ID NO: 19515 - DNA, 60 bp, Homo sapiens
ggcagggacttcttagatagctgcttccttagggcatggcatgtagtgggtggttaatga

SEQ ID NO: 19516 - DNA, 60 bp, Homo sapiens
gcctcagaaagacagtatcagagaaggctggaagatgaatgagactgaacttcagcagtc

SEQ ID NO: 19517 - DNA, 60 bp, Homo sapiens
tattgctatgttcctggcccatcaaatggccactttccaaactgacccacattttaggaa

SEQ ID NO: 19518 - DNA, 60 bp, Homo sapiens
tcatgggttgggtgaagcctctagtgctgaaggacaaagctcacacaactccccgctttt

SEQ ID NO: 19519 - DNA, 60 bp, Homo sapiens
atatgcaccccagtccctggggattctgtcaaaaggcagattcacattcagcaggtctag

SEQ ID NO: 19520 - DNA, 60 bp, Homo sapiens
tggactgtgggctgctgtgtagcctttgctacaaggctgaggaagcagaagaaagatgaa

SEQ ID NO: 19521 - DNA, 60 bp, Homo sapiens
gaggagttttatccagtcacttctgtgttacctgtcatttccacccttagtgccttgtag

SEQ ID NO: 19522 - DNA, 60 bp, Homo sapiens
cttacagaccaataacctaaaacctaagtggagactgttgggctaaccagaggtgagctc

SEQ ID NO: 19523 - DNA, 60 bp, Homo sapiens
acacaatcttaggccagtcacgtaacttctctggtcgtttgttttctcatccataaagta

SEQ ID NO: 19524 - DNA, 60 bp, Homo sapiens
aagtctcttggttgccggaaggagagtacgatagacaagaactggatcccaactggagag

SEQ ID NO: 19525 - DNA, 60 bp, Homo sapiens
ctacttcacctgaaaccacagatccatggcacttagtttctctgtaacagcagctctacc

SEQ ID NO: 19526 - DNA, 60 bp, Homo sapiens
ccaggttccatgccaacaaactatgagctgtactatggcttcacaaggtttgctattgag

SEQ ID NO: 19527 - DNA, 60 bp, Homo sapiens
ccttatgcccaagcatttactctggtgctgaataacgcgaactactggaatcagcctccc

SEQ ID NO: 19528 - DNA, 60 bp, Homo sapiens
atgtgaaaccgtgtacttgagtgtgtgtctgtgtgcagcctatgcctgctgctcagagca

SEQ ID NO: 19529 - DNA, 60 bp, Homo sapiens
atctctgcttctcactgttagaggagtgaatctgtgctgccttaggaggcatggaacctg

SEQ ID NO: 19530 - DNA, 60 bp, Homo sapiens
tgcattgtgccagtcaaatgatgagatatctgcttggaggagcaaaagatagggtggtgg

SEQ ID NO: 19531 - DNA, 60 bp, Homo sapiens
tcactgttgatgtgctagggctgcaggaacaaaatactgcaaactaggcagcttaaacaa

SEQ ID NO: 19532 - DNA, 60 bp, Homo sapiens
ctgtaagggcgagagaactgaagttgatgttgacaggcccacagggaattggccttccct

SEQ ID NO: 19533 - DNA, 60 bp, Homo sapiens
caggcattgaagtgtcctatcccaagaggccttgcattcttccctgacatcttctctcca

SEQ ID NO: 19534 - DNA, 60 bp, Homo sapiens
aagcccaagtcaacaggaacaccatctatagcaccctggtcacctgtgtgacatttgtgg

SEQ ID NO: 19535 - DNA, 60 bp, Homo sapiens
ttgatgcaacttggcatttggttacccctgctgataagagcagccattacctgccactgg

SEQ ID NO: 19536 - DNA, 60 bp, Homo sapiens
catggatctggatctggatcttgtcagtgactttatgagagtttctgccacaaggtgccc

SEQ ID NO: 19537 - DNA, 60 bp, Homo sapiens
atcaggctctggaagccgagcttgtatgtaggttttcacactgtccgggagtcaagacac

SEQ ID NO: 19538 - DNA, 60 bp, Homo sapiens
catcatctcttccatctttgggtccttagtgcaatacctggcagctagccagtgctcagc

SEQ ID NO: 19539 - DNA, 60 bp, Homo sapiens
tattgtgttcttggtggaccggttcctgtatgggctcgacgtctctggaaaacttctgca

SEQ ID NO: 19540 - DNA, 60 bp, Homo sapiens
ccccagtaatctctccccagagtgcatcaggcaataacaggaagatactcagctgttcat

SEQ ID NO: 19541 - DNA, 60 bp, Homo sapiens
cacttgacctaataagcattcttactcatctccaactcagttagcaaggtttaccatggc

SEQ ID NO: 19542 - DNA, 60 bp, Homo sapiens
gaaacagagacaagtcatcagtcatccatccccactgtgccctttccaagtttgtgagca

SEQ ID NO: 19543 - DNA, 60 bp, Homo sapiens
aaatttcagcttctcagtccctctagccaacatttcaggtgcatgacagcctcaggtggc

SEQ ID NO: 19544 - DNA, 60 bp, Homo sapiens
cctggtacaatgatggaggaagagtttggaataaaaccctgctcgtttgagcatgccagc

SEQ ID NO: 19545 - DNA, 60 bp, Homo sapiens
cttgagcacccaaggtgtgtgctgctggatctttcaaggggtccagaattggtagtatag

SEQ ID NO: 19546 - DNA, 60 bp, Homo sapiens
ttacatcagcgatgtggaactatggataggcttccttgggttcctggctccacactataa

SEQ ID NO: 19547 - DNA, 60 bp, Homo sapiens
atctaggggtaaggatgccttcataccaacctcgtcatgactgtgctaagtggcaggtct

SEQ ID NO: 19548 - DNA, 60 bp, Homo sapiens
gactggcaagaggaactctgcacatgaggctgaatgcacacatgactcttaggaaagtgg

SEQ ID NO: 19549 - DNA, 60 bp, Homo sapiens
acagggaggatggattctaagggagaagtaacagcctctgccacaatcaggattcttctc

SEQ ID NO: 19550 - DNA, 60 bp, Homo sapiens
taaggaatgctatgagtgctgagagggcatcagaagtccttgagagcctccagagaaagg

SEQ ID NO: 19551 - DNA, 60 bp, Homo sapiens
tcatcaaaaccaagtcgcagctgagcgtgtcccaggacagtgacatcttgttcggaagtg

SEQ ID NO: 19552 - DNA, 60 bp, Homo sapiens
ccttgctgtatagcttactgtctcctaaccattattctatgctacctttcatgggccctc

SEQ ID NO: 19553 - DNA, 60 bp, Homo sapiens
gccttgggagactctcaaatccctggcttagcctactgaattgcttgctacttgcctttt

SEQ ID NO: 19554 - DNA, 60 bp, Homo sapiens
acagctgcccttgaatctcattgcctcagagaagactagagggctcttggactatcccta

SEQ ID NO: 19555 - DNA, 60 bp, Homo sapiens
taaggtgagcagaaactcaaggaaaactgtccaaataccggctcgactcctgggtacgct

SEQ ID NO: 19556 - DNA, 60 bp, Homo sapiens
atcatctcccaggttctcattggaaaggcagggttaaaaggaaatggaccaggccaggtg

SEQ ID NO: 19557 - DNA, 60 bp, Homo sapiens
atgatgtaggaggacaacgcagcctgataaacaagtggacgacttttcttaaggccagac

SEQ ID NO: 19558 - DNA, 60 bp, Homo sapiens
ggccttccctcgtgattcacaccactgtcccatttggagttacatacttggaacacagca

SEQ ID NO: 19559 - DNA, 60 bp, Homo sapiens
ttatctccagtggagtgcctgctgtgttcagggcattgcacagggtgctggtgatgtaat

SEQ ID NO: 19560 - DNA, 60 bp, Homo sapiens
tggaagcttgtaaggacatgcttgttttagtccagtggtttccacagctggctaagccag

SEQ ID NO: 19561 - DNA, 60 bp, Homo sapiens
actcagccctgcaactgctcatgtcccttcctgaccccttcccatcttgccgtatgtttt

SEQ ID NO: 19562 - DNA, 60 bp, Homo sapiens
gcgactgtgtgccaagcaagaagcagtgttgtatgggacaccctagctgtgtataaggta

SEQ ID NO: 19563 - DNA, 60 bp, Homo sapiens
cactttcttgttcctgttgcctagttgtcctggttgttaggagcatgttgacttttgaga

SEQ ID NO: 19564 - DNA, 60 bp, Homo sapiens
gaagcctttctctcgtctccttcataccttggtggatctgtgtttccggacacttttcct

SEQ ID NO: 19565 - DNA, 60 bp, Homo sapiens
gtttgaccacacatagtcagggagtttgatctaacctctcaatgcctcatttctcagctg

SEQ ID NO: 19566 - DNA, 60 bp, Homo sapiens
cctggaaagtgtttagaacacagcatgtggtccctcaataggccgtggctgacagtactt

SEQ ID NO: 19567 - DNA, 60 bp, Homo sapiens
ggctgcacataagtgtttctgactagctaaggctacttcagacttttcactttccatttg

SEQ ID NO: 19568 - DNA, 60 bp, Homo sapiens
cgtgatacaccaaaagaagagttgacttcagagatgtgttccatgctctctagcacagga

SEQ ID NO: 19569 - DNA, 60 bp, Homo sapiens
ggttgttttagcttctaatcagagaatgaggtgcctttgcaactagatgtcccagtgaca

SEQ ID NO: 19570 - DNA, 60 bp, Homo sapiens
ccagcagtcatcatacaagaacctttggtattgaccgaaccaaccagaaaccggcttcag

SEQ ID NO: 19571 - DNA, 60 bp, Homo sapiens
cccagtcaagctcctagtatgccctgtaatttttctgggaagtcctagcccctcacttcc

SEQ ID NO: 19572 - DNA, 60 bp, Homo sapiens
gcgtaatacggaagccctcagagcagtacgcttcaagcagtttatgaagtccttagcgtc

SEQ ID NO: 19573 - DNA, 60 bp, Homo sapiens
ccatactcagacttgagtgccaaagcccacaggcctacacttctgtctttgaacatgctc

SEQ ID NO: 19574 - DNA, 60 bp, Homo sapiens
agtttcctatgaaatgggagcatgaagttgaagtgagggctgagcagaggggagcagaca

SEQ ID NO: 19575 - DNA, 60 bp, Homo sapiens
ttctgtcatggatgctgtcctgagaataacttgctgtcccggtgtcacctgcttccatct

SEQ ID NO: 19576 - DNA, 60 bp, Homo sapiens
ggggttggcatttggaggtggagaggtagtgtaaggcacaactgtttatcaactggtatc

SEQ ID NO: 19577 - DNA, 60 bp, Homo sapiens
gaatctcatcacagttgaacagggtagaagcagcttaacctctctccttgtgcctcgctg

SEQ ID NO: 19578 - DNA, 60 bp, Homo sapiens
ccgcagtggagattgtggcagatgggtcagatagcatgtgtcctgtcgctgtcacaactt

SEQ ID NO: 19579 - DNA, 60 bp, Homo sapiens
tcctagattcaaacgcaaatcattacagggtattgatgaaacagtgcctctctgatcact

SEQ ID NO: 19580 - DNA, 60 bp, Homo sapiens
cttgccccctgacccatgatagggtctttgagggcatacataacacatctggagcttaaa

SEQ ID NO: 19581 - DNA, 60 bp, Homo sapiens
tcaggccctgtgaccctggaacaatccccttcctggtcctccatgtaggagcaataacat

SEQ ID NO: 19582 - DNA, 60 bp, Homo sapiens
atctgagccatcgagggaagagtggggctgctaggcaagtggattagggggtctggatag

SEQ ID NO: 19583 - DNA, 60 bp, Homo sapiens
ctgactgtggcactcttctccaaatacctctgttctcctccatatttctcagcccctttg

SEQ ID NO: 19584 - DNA, 60 bp, Homo sapiens
gctcttggctgatgagagcactcatacctggagaagtaatctggaagggaaagtcaagga

SEQ ID NO: 19585 - DNA, 60 bp, Homo sapiens
caaggaatgtcatggaagatagcactaacagagtcatacagaacaggtgcacatcagctg

SEQ ID NO: 19586 - DNA, 60 bp, Homo sapiens
ggtgggcctaaagcaagctccttaactgagcaaaatttggggcttatgagaatgaaaggg

SEQ ID NO: 19587 - DNA, 60 bp, Homo sapiens
tatatggacaagtgtttctgagggtagtcaccaggaagggaaatgattgggtcaaaggac

SEQ ID NO: 19588 - DNA, 60 bp, Homo sapiens; identical to SEQ ID NO: 4855

SEQ ID NO: 19589 - DNA, 60 bp, Homo sapiens
taatctctgcctccagcaaaacatgctggctttgtcctgagccacactgacctgaatgtg

SEQ ID NO: 19590 - DNA, 60 bp, Homo sapiens
aatcatcagaagctgttcctgcctcttccgtcaagcaaggggctctggaggccagaaaat

SEQ ID NO: 19591 - DNA, 60 bp, Homo sapiens
tcaggaacgtgctacacgaccagtgtactatggattgtggacatttccttctgtggagac

SEQ ID NO: 19592 - DNA, 60 bp, Homo sapiens
ctatgtgcttaaagaggtataaaagaagggtagggagcagataagacaaaggaagggcta

SEQ ID NO: 19593 - DNA, 60 bp, Homo sapiens
ggcagcaccgtttaaaatggggagaaaattggaaacaacagaattgtagcaatacatatg

SEQ ID NO: 19594 - DNA, 60 bp, Homo sapiens
ctggcacaaaagaactcggtctacattagcttatgttgttgctgttgattgaatgagctc

SEQ ID NO: 19595 - DNA, 60 bp, Homo sapiens
cacaccctgaagttttctcacctccccaatgtattgccatgaggataaggacaggtccct

SEQ ID NO: 19596 - DNA, 60 bp, Homo sapiens
ggagacaggcagattagatggaaggacggagttgtactccaagccaaagatgatggagag

SEQ ID NO: 19597 - DNA, 60 bp, Homo sapiens
agtaggaagatgcagctgatacactgctgcttcataacctgaataagacgtaccagaata

SEQ ID NO: 19598 - DNA, 60 bp, Homo sapiens
ttgcttggaatttgggatcctcttctgtctcttgagttgaaatcagaggctgcttgccgg

SEQ ID NO: 19599 - DNA, 60 bp, Homo sapiens
ccccagccttcatcgcgtctcatctgctctgaaaatccactttgactatttcagtccaca

SEQ ID NO: 19600 - DNA, 60 bp, Homo sapiens
tctctggctcttagagaggcagcatgggataatggggcaagcgaatagggccttaaagta

SEQ ID NO: 19601 - DNA, 60 bp, Homo sapiens
tcaattacagcaacccttttgagaggtgccacagggtccacaggagttgccactagcatt

SEQ ID NO: 19602 - DNA, 60 bp, Homo sapiens
caaccactttgaccaattataggtggattttgtgaaatctacatatgtgtgtgttagtga

SEQ ID NO: 19603 - DNA, 60 bp, Homo sapiens
cacaaattctgatatcggctattgtgagaatccctgtgcgagtcagctagaagcccctgc

SEQ ID NO: 19604 - DNA, 60 bp, Homo sapiens
ttctggatggtcagtgtggtagttctttccattacatccttgagatcctgctgttcacac

SEQ ID NO: 19605 - DNA, 60 bp, Homo sapiens
tttcgtaaacctggcttgcctcctcctgcatctaaacctttgagacctaccactaagatt

SEQ ID NO: 19606 - DNA, 60 bp, Homo sapiens
ggtagtgataaggcgtgaatttgaacccaaacaatctgactctagaacccatgctgttag

SEQ ID NO: 19607 - DNA, 60 bp, Homo sapiens
cactttgcattgtattctggacctcctcttgcattaatacatggaaatttacctcattta

SEQ ID NO: 19608 - DNA, 60 bp, Homo sapiens
ccttccctgctattgtgaccccatccaaacacaggatcagcataaccgccaaagtgcaat

SEQ ID NO: 19609 - DNA, 60 bp, Homo sapiens
cagttttgtgaagagatggaagaagccaactgaaacagtagcgtaggaacccagccctgc

SEQ ID NO: 19610 - DNA, 60 bp, Homo sapiens
gctgagagatttgaagcgtcaaccaagtaagctgtaggagattacatgtggtggaagact

SEQ ID NO: 19611 - DNA, 60 bp, Homo sapiens
gggagacatactgttttcatggatggaaaactcaacctagtagagctgtcacttctttcc

SEQ ID NO: 19612 - DNA, 60 bp, Homo sapiens
ctgagaacctgtttgtgaactacctgtcccgcatccatcgtgaggaggacttccagttca

SEQ ID NO: 19613 - DNA, 60 bp, Homo sapiens
cgcggatcaagtgaaatcctacatggtacactggactttggggaattcggtagtggcggg

SEQ ID NO: 19614 - DNA, 60 bp, Homo sapiens
gatggcgatgctttgaatgttcctgggagtgtctgttggtgggtagagcatgcatttctc

SEQ ID NO: 19615 - DNA, 60 bp, Homo sapiens
gagacagatctgactgcctgatccgaccaactctgatttgtggctgaggtttctttcatg

SEQ ID NO: 19616 - DNA, 60 bp, Homo sapiens
ctgtaacagaacagggccgtttcctgctgccagaaacgtagcccacctgtccatatagat

SEQ ID NO: 19617 - DNA, 60 bp, Homo sapiens
acgcaggcagagctttgttcaggggtgattcaggttggtgaaggccctgtgagtcacctg

SEQ ID NO: 19618 - DNA, 60 bp, Homo sapiens
gtccccacagcagacagctacttgggcatgaagagccaaggtgtgaaaagcagatttgat

SEQ ID NO: 19619 - DNA, 60 bp, Homo sapiens
accggagcattctcctggggtcactcccacatggctgcctcacatagctgttttgcaaca

SEQ ID NO: 19620 - DNA, 60 bp, Homo sapiens
ggctgttacagtatggaatttgtggcccaaaggcagcgtggtaagttagacactaggtgc

SEQ ID NO: 19621 - DNA, 60 bp, Homo sapiens
gcatgcccttgacacccatccaccgttccttacttctgaccccataagtgcaatgaacat

SEQ ID NO: 19622 - DNA, 60 bp, Homo sapiens
tcatctatcaagctccaaccccttatacagctcctctggtggaatccatgactcatatgt

SEQ ID NO: 19623 - DNA, 60 bp, Homo sapiens
gctagtcgtctctgttctggcctcgaacagtaatgattatggtctgatgattgccctgtg

SEQ ID NO: 19624 - DNA, 60 bp, Homo sapiens
ttcttcctgcaacaagtcgtcttcgcctcccttgctgtccttgccctgctgtgtgtcctg

SEQ ID NO: 19625 - DNA, 60 bp, Homo sapiens
cacaagggtagctctctgaagaggtccatttgtccctactgactctgagggcacagctgt

SEQ ID NO: 19626 - DNA, 60 bp, Homo sapiens
gtgatgttttctccccacccttgccctacttggactcttgattggaatgttctccctgca

SEQ ID NO: 19627 - DNA, 60 bp, Homo sapiens
ttgtggcacgttgttggtatttactcaggatctttggatttgcttggctgcatgtatatg

SEQ ID NO: 19628 - DNA, 60 bp, Homo sapiens
tggccacccactgtgtgtctgggtccttgaggtttgtacgtttctctttgatgaccagga

SEQ ID NO: 19629 - DNA, 60 bp, Homo sapiens
tttcaccctttcgcctcctgtctttctgcttcgccccttcatcttactctgtttccattt

SEQ ID NO: 19630 - DNA, 60 bp, Homo sapiens
tgcttgtggactctcacatctgcagccatgagcagaggcgacaactgcacggatctactc

SEQ ID NO: 19631 - DNA, 60 bp, Homo sapiens
gcggaagcgtccctactgaggcggacccacctctgctccctcagcaagtcggacaccaga

SEQ ID NO: 19632 - DNA, 60 bp, Homo sapiens
tcagatagatgtctttggagcccagccttccctgtgtagtgagctggaaactcctttaga

SEQ ID NO: 19633 - DNA, 60 bp, Homo sapiens
gttccactttgtccaaggaaaaggactggcgttacagtagacacctcatagcgcaggagt

SEQ ID NO: 19634 - DNA, 60 bp, Homo sapiens
ccatgtggagcatcaccccagatacctccatccagctatactggaaatggtttgtctctc

SEQ ID NO: 19635 - DNA, 60 bp, Homo sapiens
cctgccatgcttgaggaagaagatactgaagattagacatggttgggaagacgtcaccaa

SEQ ID NO: 19636 - DNA, 60 bp, Homo sapiens
gacctccctgattgagagacatggggccagttctgttgctgtggctacacgggaataata

SEQ ID NO: 19637 - DNA, 60 bp, Homo sapiens
tcttctctgaacatccatgaggatgaagaacagtcactgaggtgacggtaccaagtcacc

SEQ ID NO: 19638 - DNA, 60 bp, Homo sapiens
caagcaaagataggtaggacagaaaggaagacagccagatccagtgattgacttggcatg

SEQ ID NO: 19639 - DNA, 60 bp, Homo sapiens
gcctgatcttcagtgggacagtgggaaatggagtagaaaccactcactctctctgggatt

SEQ ID NO: 19640 - DNA, 60 bp, Homo sapiens
cagagccagtgaagttgccttctcctccaacatgaccacattttcctctgagcagacaaa

SEQ ID NO: 19641 - DNA, 60 bp, Homo sapiens
gtatctgctccctgacatgtctctatgtccagtccccttgtcaagatgcatgtagatgca

SEQ ID NO: 19642 - DNA, 60 bp, Homo sapiens
tttggactcacctgttatcgatggaaatggtacagtaatggatatcagtggtgttaaaga

SEQ ID NO: 19643 - DNA, 60 bp, Homo sapiens
aaccacccaaggtgagggtaaggatgctgctgcttagaaagagatgcagacaaatgtact

SEQ ID NO: 19644 - DNA, 60 bp, Homo sapiens
gttatgtggtatgcaaaagcccctttgtgggagagctgtagctagccctgaaaagagagc

SEQ ID NO: 19645 - DNA, 60 bp, Homo sapiens
ggtgactttcatgctgctgtcaggaacgatctaatttcagctctgggtgactgattgcaa

SEQ ID NO: 19646 - DNA, 60 bp, Homo sapiens
gttgatgaccgaactgtgaaattctccccttgtcacctggaagatggcatggtgccttct

SEQ ID NO: 19647 - DNA, 60 bp, Homo sapiens
gcagagctcacagtctcatgggaaggagttcttacacaggtgaggtaagtgttagggaga

SEQ ID NO: 19648 - DNA, 60 bp, Homo sapiens
gttcccctagaccgggagacaaaggactggatttgaatcctgtctttgcctttcaccaga

SEQ ID NO: 19649 - DNA, 60 bp, Homo sapiens
cttgtacaggtgatatctgaaccaaagagtctgaggccagaacctgcacttctaaccacc

SEQ ID NO: 19650 - DNA, 60 bp, Homo sapiens
gtacaagcagcattttgccatgctttatcccatagcctgcctcctgcagtctcatctttt

SEQ ID NO: 19651 - DNA, 60 bp, Homo sapiens
ttcctccctgtcttctgttcaggaatactgttcaggctgaataccgtcctgtgacatggg

SEQ ID NO: 19652 - DNA, 60 bp, Homo sapiens
cacatcacggaaagcactgtggtcctgtctgctaccatggcttcctgaagctatatgttc

SEQ ID NO: 19653 - DNA, 60 bp, Homo sapiens
gtcttccagcaggatctggtcatgttcccattgagcagaactagtctgaggctcagttct

SEQ ID NO: 19654 - DNA, 60 bp, Homo sapiens
ctgggccttctgaatccaggctctcaactagtaagccacatggcttctttcattagctac

SEQ ID NO: 19655 - DNA, 60 bp, Homo sapiens
caatggaacaaagaggaaatcacaaaagatgccacaaaacactttgagatgaacgaaatg

SEQ ID NO: 19656 - DNA, 60 bp, Homo sapiens
actcatgggcatagggaatagcggctcaaatgtagttctgacatgaaaagcaaggtgctg

SEQ ID NO: 19657 - DNA, 60 bp, Homo sapiens
ggacatggggcagcagttagagggttgtgctctttctagtgtgggatagtttgcaagatg

SEQ ID NO: 19658 - DNA, 60 bp, Homo sapiens
tgattggaggtggtttagggcttttgctctgctacatgatactgctctaagcactcctgg

SEQ ID NO: 19659 - DNA, 60 bp, Homo sapiens
atatgtactgaaagaagatcctctcatactgccacagccaagagataaggttgtaaatct

SEQ ID NO: 19660 - DNA, 60 bp, Homo sapiens
aatctttgtccattactcccttactccctatgagactgtggacctgtcacttggcctctc

SEQ ID NO: 19661 - DNA, 60 bp, Homo sapiens
ctaaatactgaggctctgaatttcccaagttggataccccagacagctagagtgatctta

SEQ ID NO: 19662 - DNA, 60 bp, Homo sapiens
gccctttgtcgtatgtgttgcaggtgcttttccagtttgccagtggtcattcattttggt

SEQ ID NO: 19663 - DNA, 60 bp, Homo sapiens
aggctaaccaggtctataggttttaatgggagatgtctcctaacttttcaaagaccagat

SEQ ID NO: 19664 - DNA, 60 bp, Homo sapiens
cttttaaaggcagttactgcatttctgcatttgtacagtatgtgtcttggccattttaga

SEQ ID NO: 19665 - DNA, 60 bp, Homo sapiens
tctagatattcgtttgatcacaaactaaaggcttggaggggcacggaggagccgattggg

SEQ ID NO: 19666 - DNA, 60 bp, Homo sapiens
ggagcaagcttgaaggagttagaatcttctgtgcttagggtttgctgctgctggtgagct

SEQ ID NO: 19667 - DNA, 60 bp, Homo sapiens
ggaccctccagggtactaatggggctctgttctgagatggacaaattcagtgttggaaat

SEQ ID NO: 19668 - DNA, 60 bp, Homo sapiens
gtgagaatttgcagtgtctggaggatctggtcagaaggattcttacaggttcagggcagc

SEQ ID NO: 19669 - DNA, 60 bp, Homo sapiens
gatggggcctaaaagccagatagtttgtttgacttgaaggtcactggttaatgagccttt

SEQ ID NO: 19670 - DNA, 60 bp, Homo sapiens
cttgagggatctgagctggagcccatcacctctgttactgcccttgaacactcttacaaa

SEQ ID NO: 19671 - DNA, 60 bp, Homo sapiens
gggaccataaagccaagaaaacccttcaaagcaccccaaggaatgatgaccatgaccttc

SEQ ID NO: 19672 - DNA, 60 bp, Homo sapiens
cgaggggtgtccaagccctgtgagactgaaaaagcactttgaggaaccttaaagaccttg

SEQ ID NO: 19673 - DNA, 60 bp, Homo sapiens
cctcaaggatccctcaagtttccaacttgtaaaaagaaaagtgcctgtaaagattcgaat

SEQ ID NO: 19674 - DNA, 60 bp, Homo sapiens
tgctaagcacatgtcaggaaacagttttgtggtctttggacactcgctgtagccattccg

SEQ ID NO: 19675 - DNA, 60 bp, Homo sapiens
gagcacaattcttgatgcagaatcatctctctgttcccctactcgcttgtgagagggaac

SEQ ID NO: 19676 - DNA, 60 bp, Homo sapiens
ctaaatgtgggaaataatggactagacctgtactaatatatggtagtcactagcaacctg

SEQ ID NO: 19677 - DNA, 60 bp, Homo sapiens
atcgatgtgggcgggatccagaacctcatcgagctgcggaagaaacgcaagcagaagaag

SEQ ID NO: 19678 - DNA, 60 bp, Homo sapiens
attcatactgtatgtactgttctgtatgtaacttgctttctgactttatgatatctagtt

SEQ ID NO: 19679 - DNA, 60 bp, Homo sapiens
atttgttagcacagagtcacaggctgtgggacacaaagcttggagctgcagaaagatggg

SEQ ID NO: 19680 - DNA, 60 bp, Homo sapiens
gcagggcaagtgccgtcactgggaactgcaccagatgctcagacttggttgtcttatgtt

SEQ ID NO: 19681 - DNA, 60 bp, Homo sapiens
agccagggactcagccattaagtcccctcctgcctcaatcctcagcctacccatctataa

SEQ ID NO: 19682 - DNA, 60 bp, Homo sapiens
cctactggaggacttggcctgacaatgtagtgaatagatttaacctgtggcctattgaaa

SEQ ID NO: 19683 - DNA, 60 bp, Homo sapiens
ggatttccctgcaagtgtctccctcatgctgaagtgaactagctgaatatgctcttaaag

SEQ ID NO: 19684 - DNA, 60 bp, Homo sapiens; identical to SEQ ID NO: 4855

SEQ ID NO: 19685 - DNA, 60 bp, Homo sapiens
ccatcaggggcctgtccgcacagggaaacaccatgtgaggatacagaaaacaaccatctg

SEQ ID NO: 19686 - DNA, 60 bp, Homo sapiens
cattcaggagcaaatacttcgtgcaaactaaacgccaagattctgtagagatgcagggcc

SEQ ID NO: 19687 - DNA, 60 bp, Homo sapiens
ctctgggattgttgcacaaacttacctgagctggccatctatcttgattgttcaggacaa

SEQ ID NO: 19688 - DNA, 60 bp, Homo sapiens
tcacgtcactgcaaatctgaagcctaaatcctggcatgaagacccctgtcttgtgcacct

SEQ ID NO: 19689 - DNA, 60 bp, Homo sapiens
ccagtgcagctctggaaagagtgagcagtcgtggaccaaacatttcatggtctgatgaaa

SEQ ID NO: 19690 - DNA, 60 bp, Homo sapiens
ccccttggtcacaaatattggctcaggaatggacatgtggccctgttcaagcctatgaga

SEQ ID NO: 19691 - DNA, 60 bp, Homo sapiens
agtacaaggtaactctgaaaatgccaccaaagggaggctagggacaggaaagccatctcc

SEQ ID NO: 19692 - DNA, 60 bp, Homo sapiens
gggaagactaaggtccaagcttgaatgacctgccatcatggggataaccggaattgatac

SEQ ID NO: 19693 - DNA, 60 bp, Homo sapiens
ggacattaccagaccccaataccttagggtctcacagcctgaaggacacagagcattgaa

SEQ ID NO: 19694 - DNA, 60 bp, Homo sapiens
caggattgagcactgaattccaagctccactggcatttcagtctgacgtggataaagaag

SEQ ID NO: 19695 - DNA, 60 bp, Homo sapiens
tttaatcaccccaaatttccatggcccccacagtcaagacctgccattcgttttctcttg

SEQ ID NO: 19696 - DNA, 60 bp, Homo sapiens
ggcaaaatgataggtgtcttgggagaccaggcaaagagagctggattaggagccgttaag

SEQ ID NO: 19697 - DNA, 60 bp, Homo sapiens
tcccaacactccgaacatctgggtcataagaggggcaaaacgtatgtggaatgaaggact

SEQ ID NO: 19698 - DNA, 60 bp, Homo sapiens
gaccgtcatcatactgttgcagttagcacactttctcctgacataagtgcacagagcttc

SEQ ID NO: 19699 - DNA, 60 bp, Homo sapiens
gggataaagaagaggcatgaagagacttggggtatctgctactgaagacatcagctctct

SEQ ID NO: 19700 - DNA, 60 bp, Homo sapiens
agctcttggcattcctagcatactaccttgaaaggactgtgtcttgcctcctagaaattc

SEQ ID NO: 19701 - DNA, 60 bp, Homo sapiens
gcagagagacaggggaagacggcttggtttatggtggaaatgatgagttcagtttgagcc

SEQ ID NO: 19702 - DNA, 60 bp, Homo sapiens
cagatactaaggatgagcttccccatacttggcattagcctctgggatagtcagccaacg

SEQ ID NO: 19703 - DNA, 60 bp, Homo sapiens
atctgcacgtctctttcaatgcgggcgtgcgaacttccaggtagagccgagttcaagaaa

SEQ ID NO: 19704 - DNA, 60 bp, Homo sapiens
gaagaaaggcaaattggtcttactctcttggagctggaatacacgcttccattcctgccc

SEQ ID NO: 19705 - DNA, 60 bp, Homo sapiens
cctgcttatgccctcagtgccaatcggctcttggtgagatgactgtactcctaaggaaaa

SEQ ID NO: 19706 - DNA, 60 bp, Homo sapiens
tctaagcctcagtggctcctccagctcaccccaagcccaggtgatggtgcacatggcaaa

SEQ ID NO: 19707 - DNA, 60 bp, Homo sapiens
ggaacatcgggtaaaacccagtcctcctctcagtgcatctctactcaccaacaatggtga

SEQ ID NO: 19708 - DNA, 60 bp, Homo sapiens
gccagccactcttgctggatgtctgttttctgttgtgtctgagttgttgtgaagtgaagg

SEQ ID NO: 19709 - DNA, 60 bp, Homo sapiens
ctgtttggcacaacagggtattgataaagagtgggctcattgttatggcaaaggattcac

SEQ ID NO: 19710 - DNA, 60 bp, Homo sapiens
ggggtcttcaatacctctagcccaaaacagtatctccatcaggattcttctctgatagtg

SEQ ID NO: 19711 - DNA, 60 bp, Homo sapiens
attggtgcagctagaggcgagtgtaccccttggtccagtctatggctgggagtggtacca

SEQ ID NO: 19712 - DNA, 60 bp, Homo sapiens
ggcagctcagttcataggatgtaatcatggttggatggactccagagggtcataggatcc

SEQ ID NO: 19713 - DNA, 60 bp, Homo sapiens
ggctcagaaaggttaagtaaccaacctaaggtcaggtagtactgaggagctgtgcttgga

SEQ ID NO: 19714 - DNA, 60 bp, Homo sapiens
cttgctctcattttgggtatcaagaaaattgcaggaaaacacaactagctctataatgag

SEQ ID NO: 19715 - DNA, 60 bp, Homo sapiens
aaatgaccattgtactagccttgtattggggctcagaatgtcagttttcagcttgtcctc

SEQ ID NO: 19716 - DNA, 60 bp, Homo sapiens
ggatcaacaaattaggcctctggatcatacatggcattttctagctgtgtccttatacat

SEQ ID NO: 19717 - DNA, 60 bp, Homo sapiens
ctgctctgttagctctttctgtcttcactactctaactagcttagattccatggccttcc

SEQ ID NO: 19718 - DNA, 60 bp, Homo sapiens
agagtggggagcatattgggctggggtaagcactagacccaagtagactggacacaaagg

SEQ ID NO: 19719 - DNA, 60 bp, Homo sapiens
tcaaggaccgcgtttcactagaggtggcaaggagctttcgtcccactgaccccatggaaa

SEQ ID NO: 19720 - DNA, 60 bp, Homo sapiens
gagtattttgccttcacataccagacatgagacatgagagcagccttcctcctaggcttc

SEQ ID NO: 19721 - DNA, 60 bp, Homo sapiens
agtaaaagtgagctgaaaagtgctgggctgacacaaggtagccctgcacatagccaggga

SEQ ID NO: 19722 - DNA, 60 bp, Homo sapiens
agcagtctccttgtccctgcctatgggcttcctcatggccagttctacctctgttctaaa

SEQ ID NO: 19723 - DNA, 60 bp, Homo sapiens
gagctcttctcacaagtttcccaagagagaaattgcccctccaaatgtgaggagtctcac

SEQ ID NO: 19724 - DNA, 60 bp, Homo sapiens
ggcacagacccagctgtctgcagtactatcaagagatgacatggacttcaaggatcaaac

SEQ ID NO: 19725 - DNA, 60 bp, Homo sapiens
aataaacggagtagcacagtgctgctcggtgatttacgggggcaattagtcaccacccca

SEQ ID NO: 19726 - DNA, 60 bp, Homo sapiens
gctttcagagcatgaagaacttgctttagagtccctgtgtcttttgactcgaatacacag

SEQ ID NO: 19727 - DNA, 60 bp, Homo sapiens
ttgggaaatacatgtgaaagtgtattcctgagtcctagccagttgtaccaccttaccttc

SEQ ID NO: 19728 - DNA, 60 bp, Homo sapiens
gaagggtgattcttgcagccctaatgaacagacaccatcagaacaccaaagagaggcgac

SEQ ID NO: 19729 - DNA, 60 bp, Homo sapiens
cagttcttcctgcttcgtcttttgctacctttgtcttttggagggaaagcaatggatggg

SEQ ID NO: 19730 - DNA, 60 bp, Homo sapiens
ccctgttctacttaccacctcagctcatagcgagacacttttgtcagaggaggttgtaca

SEQ ID NO: 19731 - DNA, 60 bp, Homo sapiens
aactgacccaaagtccaaatgtgaagtaccttggtgtctctcaaattggtagtgatgggg

SEQ ID NO: 19732 - DNA, 60 bp, Homo sapiens
cacagagaagttaaatgcggtgtagcaaagttatggggtctgcttgagggcactaacctc

SEQ ID NO: 19733 - DNA, 60 bp, Homo sapiens
gcgctattcacagggaaaatagtgacacatctgtggggttctcaccgaaatgatgtgact

SEQ ID NO: 19734 - DNA, 60 bp, Homo sapiens
tcctaaattcttgacatccggtaaggaagtctcctctgcccacccttctctgtatttcaa

SEQ ID NO: 19735 - DNA, 60 bp, Homo sapiens
tgcaaaagctacagacctgtctctgtggcagtgatccaccatccactctaccatgagtgt

SEQ ID NO: 19736 - DNA, 60 bp, Homo sapiens
gactggcaggtttaaactcctcgatgggccagcaactgttgaaaggctcttcagtttctc

SEQ ID NO: 19737 - DNA, 60 bp, Homo sapiens
tttgttctgcaaatcttccatgaccaaggtcacctctttggattggcagacccagggagt

SEQ ID NO: 19738 - DNA, 60 bp, Homo sapiens
ctctcatgttgactcctccttacctttctgatctctctgacatacgcttctgccaccagc

SEQ ID NO: 19739 - DNA, 60 bp, Homo sapiens
cgggtaggctgtgttggccctcacttgggattctcagcagttacatgaaagttgtgctga

SEQ ID NO: 19740 - DNA, 60 bp, Homo sapiens
taaagaaaggccaagttctgggcatgtggctgcaggcatgtcttacgggacagagacagc

SEQ ID NO: 19741 - DNA, 60 bp, Homo sapiens
agaatgtcttcacagccccgacatcaactccttctagcatccagcaagtcaatgtcaccg

SEQ ID NO: 19742 - DNA, 60 bp, Homo sapiens
ggccaaggacactgaggagctaaatctgcctcactaaggaacgagcttgtttccaagaaa

SEQ ID NO: 19743 - DNA, 60 bp, Homo sapiens
cactgcaattttgggtgttctctttcttgtttgcatatggccttacttatgtggaagatt

SEQ ID NO: 19744 - DNA, 60 bp, Homo sapiens
tcagtgtgaagtggcacagctctgatgtagtgctaagtctagcctccagatttgaggcag

SEQ ID NO: 19745 - DNA, 60 bp, Homo sapiens
acaacacagaacttcccagttacaccaggcatcctggcccaaagtttcccaaatccaggc

SEQ ID NO: 19746 - DNA, 60 bp, Homo sapiens
gttatatcacagcatatgttggtatgttttggagtgtgcttccattgtgctcagcttttg

SEQ ID NO: 19747 - DNA, 60 bp, Homo sapiens
ataggaaaagagcaccagctaaaatatcttgcccttggatttcttcagccagctgctgaa

SEQ ID NO: 19748 - DNA, 60 bp, Homo sapiens
gctttgtgaccttatcctacattttaatcatcccatcaagactgagaacttagcagaagc

SEQ ID NO: 19749 - DNA, 60 bp, Homo sapiens
ggctacttgatggctctcaagaccttagaaccccagaaccatctaagacatgggattcag

SEQ ID NO: 19750 - DNA, 60 bp, Homo sapiens
gctgcctccactccgcacttggaatggacagaagttgctgtggctgccagagaagtctga

SEQ ID NO: 19751 - DNA, 60 bp, Homo sapiens
gtagccttaatttaccttgagacaaactgagggacaaggacaccctttaatacctttcag

SEQ ID NO: 19752 - DNA, 60 bp, Homo sapiens
agtttctgaacactacacagacgccaggtagcttcttcaggagaacagccctctgaggag

SEQ ID NO: 19753 - DNA, 60 bp, Homo sapiens
ccttgacagtggaggacattggcccgagaactcttcatcgacctgatcaaacctctcttg

SEQ ID NO: 19754 - DNA, 60 bp, Homo sapiens
gaagcctcatcttcctttcaactctaagtccattgagtcaagaaccttgtcttcttaatg

SEQ ID NO: 19755 - DNA, 60 bp, Homo sapiens
aatggattcccaggaaaccacccagggttccccgttggcttcccttccatctaaaggcct

SEQ ID NO: 19756 - DNA, 60 bp, Homo sapiens
ggaatgtctcgaaaaatagggcatgcgtgtgaacttcgggaaatcatgggaacaccagaa

SEQ ID NO: 19757 - DNA, 60 bp, Homo sapiens
atgtgggagcaacatatcacggaatggcatgcgatccaaagtttgcaacaggaattgctc

SEQ ID NO: 19758 - DNA, 60 bp, Homo sapiens
gggttcagactgaagtcagggacagagcagcaggcatcttggatgtcagagccatgtttt

SEQ ID NO: 19759 - DNA, 60 bp, Homo sapiens
ctcaggtcattccaaagacagaccatttaaccactggatctggggcaacaaaggtggatc

SEQ ID NO: 19760 - DNA, 60 bp, Homo sapiens
tggaactcaacgctgtaaaggagcgaaggagcttctatacagagcctggatgcctgtctc

SEQ ID NO: 19761 - DNA, 60 bp, Homo sapiens
actgagcatcgaaccactccaacttgccttgggaggaggacttgaatgctaccaaagact

SEQ ID NO: 19762 - DNA, 60 bp, Homo sapiens
ggccccttgagatttgagaaagagttccctctactggcagatctaagacagtctgttgac

SEQ ID NO: 19763 - DNA, 60 bp, Homo sapiens
aataaataccctccttaccttgctcgattgccttgctgactacatcatggagcgggtagg

SEQ ID NO: 19764 - DNA, 60 bp, Homo sapiens
ctttcatccatcagaaggtgtttcagatacatccttttccaagagtgcagagagcagcac

SEQ ID NO: 19765 - DNA, 60 bp, Homo sapiens
tgcgcacttgctgccaccagaaactggaggacatgatccaggagcttcaggagaccccac

SEQ ID NO: 19766 - DNA, 60 bp, Homo sapiens
caggcaattgatgtgatactcgaaggctattctgctactcccagggtaaggggatagcac

SEQ ID NO: 19767 - DNA, 60 bp, Homo sapiens
tgacttctcacccatcacgttatacgcctcatgctgcagtgaccctctgtcaggttcaga

SEQ ID NO: 19768 - DNA, 60 bp, Homo sapiens
cactgtggtgtctgcctggttgatcttgaatgatggcaagtgggcacttttcaggtaact

SEQ ID NO: 19769 - DNA, 60 bp, Homo sapiens
agaagaaaacatcacctaggccggtgtgtgcctggcagaacactgcactccaatttcctc

SEQ ID NO: 19770 - DNA, 60 bp, Homo sapiens
gtaagatcctagtcagacagagccctcacaactggatagacctttctcaagggttagccc

SEQ ID NO: 19771 - DNA, 60 bp, Homo sapiens
ctgactgggttccaattccagtccactagttgctacctgtgtgagctagagcaaattaat

SEQ ID NO: 19772 - DNA, 60 bp, Homo sapiens
ggaagtgaagtggtgagccatatctgatggaagatcattcccagaaaaggaaacagcagg

SEQ ID NO: 19773 - DNA, 60 bp, Homo sapiens
tcacctactttcagcttcaaccccaggccctcagaaaccagagccatgagacctaccata

SEQ ID NO: 19774 - DNA, 60 bp, Homo sapiens
caggggctggaatgtcctgtggccgcatctctcatggacgcggctgaaacgtgttttcac

SEQ ID NO: 19775 - DNA, 60 bp, Homo sapiens
ggacacaatagagaagattccactaggaacagaaatattcatactgaccccaaagagtca

SEQ ID NO: 19776 - DNA, 60 bp, Homo sapiens
tgtgaaaagcgaggtcgtgaagacgccggcctcataccgaagggtaggacggtgaggtca

SEQ ID NO: 19777 - DNA, 60 bp, Homo sapiens
gaaagtgggattaacccatctgtgaagttctagtctgtgcagtcacaattgaccactgca

SEQ ID NO: 19778 - DNA, 60 bp, Homo sapiens
catctcaggctccatattccatgtccctgttgaatacagatccccgaactgagaaataag

SEQ ID NO: 19779 - DNA, 60 bp, Homo sapiens
gtgaactcttttcgcaagctggtttccagcgaaatctttgcctgttttaactctactttg

SEQ ID NO: 19780 - DNA, 60 bp, Homo sapiens; identical to SEQ ID NO: 4855

SEQ ID NO: 19781 - DNA, 60 bp, Homo sapiens
ccctgatgcttaggtgtgagttgatggcagtttggcatttggagagcagttgcactccta

SEQ ID NO: 19782 - DNA, 60 bp, Homo sapiens
gagcttagagacatggcaactgaatgtagtgtgtggtcctgaactggttcctttcgccat

SEQ ID NO: 19783 - DNA, 60 bp, Homo sapiens
gtgaggagaaactttgagaccttgttgacaattctgttcctcatcaaatctacccctcct

SEQ ID NO: 19784 - DNA, 60 bp, Homo sapiens
caaatgagcaagaggaagcctctaagggggtttaagcagggactgacgtaatcagatctg

SEQ ID NO: 19785 - DNA, 60 bp, Homo sapiens
aagttattcgacggaggacagagtatgtgagcctttgccgaacaaacaaacgtaagttat

SEQ ID NO: 19786 - DNA, 60 bp, Homo sapiens
tcctttgagaggatgctgaggcatctgtagcagctgtttcaaacaccaatgtcacctctc

SEQ ID NO: 19787 - DNA, 60 bp, Homo sapiens
tcgctctcatcttgctcaattccctttgcttcctcatgatgaccattgcctacaccaagc

SEQ ID NO: 19788 - DNA, 60 bp, Homo sapiens
catgatacctacccagtatccctgtgagcagctgacattcctttctccaagcagttgctg

SEQ ID NO: 19789 - DNA, 60 bp, Homo sapiens
cttgctataagttcgatgacaccgtgaatctaataaggttcactgttgacacagtacaag

SEQ ID NO: 19790 - DNA, 60 bp, Homo sapiens
ctccctggtcaaatacagctacagtctccctgcagatacgagttttccagaaatgagccg

SEQ ID NO: 19791 - DNA, 60 bp, Homo sapiens
ccaacagtagagagtcagagtagtgcataacagggagattctgaacttaccttggagagt

SEQ ID NO: 19792 - DNA, 60 bp, Homo sapiens
gatttccagcatatatacatcttcaccaatcccaccaccttgctccagcctgtcatatca

SEQ ID NO: 19793 - DNA, 60 bp, Homo sapiens
gaaagtgaccttggtattcgaagacagagctgctcactactgtcagtaagacgtatatct

SEQ ID NO: 19794 - DNA, 60 bp, Homo sapiens
aatacgcatggttaattgatgtgcaggctggaagtcttacagctaaggtcacagcaccac

SEQ ID NO: 19795 - DNA, 60 bp, Homo sapiens
ggtggcctctagccagtagtcagcaagaaaacagatccttgttctagtagtgtgccagga

SEQ ID NO: 19796 - DNA, 60 bp, Homo sapiens
tttacccttgctaaggctgcctctgcagggtctctccctttataccttcatacccagtcc

SEQ ID NO: 19797 - DNA, 60 bp, Homo sapiens
ttatcaaagcagttgctggcatgtggcaggcattcaacagaaaccgtgttgctatgttat

SEQ ID NO: 19798 - DNA, 60 bp, Homo sapiens
tcctgctgaaggggccttcagaggattttatgctggaaatatgaccctgtgcagactgct

SEQ ID NO: 19799 - DNA, 60 bp, Homo sapiens
agatagagaatgtctccctccctggagactttcccagagaagatttggttgcattccagg

SEQ ID NO: 19800 - DNA, 60 bp, Homo sapiens
agtgtcttgcccagacaaggggcatagccaactaactgatccctcagatcttgccctggt

SEQ ID NO: 19801 - DNA, 60 bp, Homo sapiens
acatggtgtacttggcgggatcttacagctctgttgcccatctcaagacctaagaacaat

SEQ ID NO: 19802 - DNA, 60 bp, Homo sapiens
tctttctatccgccacatcactgattcatacaccctagtcttccatcacagtctcttaat

SEQ ID NO: 19803 - DNA, 60 bp, Homo sapiens
catcatgaaagtgtacatgcatatgcaagtgtgaattacgtggtatggatggttgcttgt

SEQ ID NO: 19804 - DNA, 60 bp, Homo sapiens
gtgtgccatgagttacacacagactcctaaatcagtttcacctgtggtgtcctcattctg

SEQ ID NO: 19805 - DNA, 60 bp, Homo sapiens
aacacctacatgagccaggccttccagctccctgagtcggaaatgccagaggagggtgac

SEQ ID NO: 19806 - DNA, 60 bp, Homo sapiens
ctaccaagacagcaatcaagaagggcaataatgatgcattgacaggcagggtttcccact

SEQ ID NO: 19807 - DNA, 60 bp, Homo sapiens
tctggctgtgaccagggtagcagagagagcaaagaggtcctttcctcaggtgggtggagt

SEQ ID NO: 19808 - DNA, 60 bp, Homo sapiens
agtgtggctgatgaacatcacggagcagtgaccttcatggacagacagaatttgagctgg

SEQ ID NO: 19809 - DNA, 60 bp, Homo sapiens
gcagaggaagttgaggaggcagccaacagaataggaaggtagctaagaaagggtgttgtc

SEQ ID NO: 19810 - DNA, 60 bp, Homo sapiens
tggtctccacttgtgtgtggctgagatgtgttctgagatggcccagtgtccgagttttat

SEQ ID NO: 19811 - DNA, 60 bp, Homo sapiens
aacaattccgtttagcagctgttgggccaactacacagaccttactccccttagaacagg

SEQ ID NO: 19812 - DNA, 60 bp, Homo sapiens
cttgggagagaccgtccccttttgtgaagcatgtgcttccctggtgtgtggagagataaa

SEQ ID NO: 19813 - DNA, 60 bp, Homo sapiens
ccttccgattcccaagtggggaagatggggtaaaattctaagtgacttctcgctccgaag

SEQ ID NO: 19814 - DNA, 60 bp, Homo sapiens
gctatgtgttgcagagcctaaattccatggaggtgtggcctagaagccagggtgtttctt

SEQ ID NO: 19815 - DNA, 60 bp, Homo sapiens
ccacctagagttttgaacacagtcagctcagaggatggtcatgaaaatgggagggaagtc

SEQ ID NO: 19816 - DNA, 60 bp, Homo sapiens
gagacttgtcaagggtactgggatgtgcatgtccaggataaggatctgcaaagtgttagc

SEQ ID NO: 19817 - DNA, 60 bp, Homo sapiens
gcactgtttggtacattacagccaccattagccttaaaagctgcagcagccaaattcggt

SEQ ID NO: 19818 - DNA, 60 bp, Homo sapiens
gatatatctgactagagaagtgggtaggggccagaaagtaggctttgtatgcagcacttc

SEQ ID NO: 19819 - DNA, 60 bp, Homo sapiens
ctgccgctcactcggttccatccccctgagtttagatagctctggtgcctctcagaactc

SEQ ID NO: 19820 - DNA, 60 bp, Homo sapiens
gactcaggggatcagttctgtgaatgccattgcacgaagaaagcaaatgtttgccttgat

SEQ ID NO: 19821 - DNA, 60 bp, Homo sapiens
gtggcacactgtggaccagtcacctgtgcttatcctgggaggcattcccaatgagaagta

SEQ ID NO: 19822 - DNA, 60 bp, Homo sapiens
tatgttgatgaggcaccattgccattcccaggacacacgcttattgccgtggcaacagcg

SEQ ID NO: 19823 - DNA, 60 bp, Homo sapiens
tgcacaggtgacagcagcagtaggtgggttagacccttttcaatcccactttagagctct

SEQ ID NO: 19824 - DNA, 60 bp, Homo sapiens
catactcctgctttgtctatcatcacttgtatgtttccttgcagtgtggcctcaggaaac

SEQ ID NO: 19825 - DNA, 60 bp, Homo sapiens
ccctaatgtgcaccttgctagcagatagaaactagtgtgaaacaggtagcctgtgattct

SEQ ID NO: 19826 - DNA, 60 bp, Homo sapiens
tgagcagctccaaagcactggcttggggtccgagaccttcaaagtaaagcaggcggaatg

SEQ ID NO: 19827 - DNA, 60 bp, Homo sapiens
cacttgtgtgtgcgtttttaagaggctaatattttggtttgactatttggtcttaactgt

SEQ ID NO: 19828 - DNA, 60 bp, Homo sapiens
gccccacactgtctcacccttaggaagcccaaatgctcactccttgagtttctaatgcat

SEQ ID NO: 19829 - DNA, 60 bp, Homo sapiens
ctgtaaaagggacaagagcgtagttctgtgagaacctgggtgcagagttctgagaccttc

SEQ ID NO: 19830 - DNA, 60 bp, Homo sapiens
cagggtttccggtcttctgttgttagtggtgacatttctggtgcccttcaaatgctgtgc

SEQ ID NO: 19831 - DNA, 60 bp, Homo sapiens
tgtactgccttctgacttcttcagctgctatgtctgtacttgccctcctatgtgccctga

SEQ ID NO: 19832 - DNA, 60 bp, Homo sapiens
agctggcacgttaccttacacattccacgattttccatggaggatgtgagttggttcctg

SEQ ID NO: 19833 - DNA, 60 bp, Homo sapiens
agtgccgactgaagaggagggtgaccgttcatgccgtgtgttctgaagttctgaagtcgg

SEQ ID NO: 19834 - DNA, 60 bp, Homo sapiens
gaacggagtccagaactagatccacgcagatatggccaattgatcttccaaaaaggcacc

SEQ ID NO: 19835 - DNA, 60 bp, Homo sapiens
gagcagagagaacttgagggagctagaaaatgcatgtgctatcagatgagggcaactgct

SEQ ID NO: 19836 - DNA, 60 bp, Homo sapiens
caggacagggaaggtacctatgcctcatgcagcagtggtatagtcatgtgagagtgacta

SEQ ID NO: 19837 - DNA, 60 bp, Homo sapiens
tcatttgtccctgtgtcttctcctatctcactggcctcctatctccacagcctagtccat

SEQ ID NO: 19838 - DNA, 60 bp, Homo sapiens
aactcacggggtttcaagagaagatggctgacccctgatgctgtgagcagtgtgagccct

SEQ ID NO: 19839 - DNA, 60 bp, Homo sapiens
atgtgaacatcacgtctctcactctggacaaggggacgaggaggttcaggcaagtgaaat

SEQ ID NO: 19840 - DNA, 60 bp, Homo sapiens
atcctgacaattggagctttggggcaaggtccctggagaaggggtcacgtggggaggaaa

SEQ ID NO: 19841 - DNA, 60 bp, Homo sapiens
atactcctactgtctgtgtggtcacagctagtttctgtcagctgggctctctgggagaaa

SEQ ID NO: 19842 - DNA, 60 bp, Homo sapiens
gtgatctgtggtggtagaaatgaaaacactgtttgcctcaggtggtcaggtgagacattc

SEQ ID NO: 19843 - DNA, 60 bp, Homo sapiens
ccaaccagttgtggctgtggagttagagtcacatagcaggaacacagttgctgataagcc

SEQ ID NO: 19844 - DNA, 60 bp, Homo sapiens
agaaaaccaagtggcaagctcagtggcttgtgtgactatctggaggtgatgcctgggcat

SEQ ID NO: 19845 - DNA, 60 bp, Homo sapiens
ggcactaacttggtatatcctcctgacaaccctatgactgaagcagcatcttcatgagag

SEQ ID NO: 19846 - DNA, 60 bp, Homo sapiens
ccaggcacctgtgttaagagcatgatggttaggaaatcccccaagtcatgtcaactctca

SEQ ID NO: 19847 - DNA, 60 bp, Homo sapiens
ataatccctcaagcccctgaagattgtcaaacactgaacttgcctttcagctatttctac

SEQ ID NO: 19848 - DNA, 60 bp, Homo sapiens
gccaggtggcaatcatgagtgaatggatgaagaaaggccccttagaatggcaagattaca

SEQ ID NO: 19849 - DNA, 60 bp, Homo sapiens
aatgtgctaggccacactgtcatggaccccagatatacagcagcaaacaaagcagccatg

SEQ ID NO: 19850 - DNA, 60 bp, Homo sapiens
cctgattccttctgtcctgaacacatagccaggcaattttccagccttctttgagttggg

SEQ ID NO: 19851 - DNA, 60 bp, Homo sapiens
gatatgagtctctcccgctctcaggaatcattctctcatctcatttggatggctatctcc

SEQ ID NO: 19852 - DNA, 60 bp, Homo sapiens
actgaggccaaccgcttcgcctatgctgccctctgtggcatctccctgtcccagttattt

SEQ ID NO: 19853 - DNA, 60 bp, Homo sapiens
gggaggaaactgacagttattgatggactcacatatcccatagtgaagtaggcattacat

SEQ ID NO: 19854 - DNA, 60 bp, Homo sapiens
tcatcaattctcaggctgcagggacaaactttccgatagggctcagtaggatcaagccga

SEQ ID NO: 19855 - DNA, 60 bp, Homo sapiens
gtgtaacctcgccatttttaacccttcttttgtgatctttgcaagtctggtaactggagg

SEQ ID NO: 19856 - DNA, 60 bp, Homo sapiens
gtttactgcgaaatccccaacaactatagcatttccaggcacatagtagatgcttaagaa

SEQ ID NO: 19857 - DNA, 60 bp, Homo sapiens
gcggtgtgtgtgtaatcactgatcgcagggtgaagctcaaggtctggattctgttatgga

SEQ ID NO: 19858 - DNA, 60 bp, Homo sapiens
ttatcatgcacaatcccacttgttctgcctctccaccctggcaccttctccgaacccaga

SEQ ID NO: 19859 - DNA, 60 bp, Homo sapiens
gttcctcttcctgacatcgcaggtacaattggccatgatgccctctgcatggtcaaacta

SEQ ID NO: 19860 - DNA, 60 bp, Homo sapiens
catgatctccctttccagattttcaaaacgcccaagtgacgtgaaatggtgtgtgtattt

SEQ ID NO: 19861 - DNA, 60 bp, Homo sapiens
atggagtggatgagcctggtcatgtacaactgaagcaaagaggaaagcagacccatggct

SEQ ID NO: 19862 - DNA, 60 bp, Homo sapiens
ccctgccaagtcatgatttcttatgcactgaacgtaggggcattagagtagaaggttgcc

SEQ ID NO: 19863 - DNA, 60 bp, Homo sapiens
cctggggatctatggctccttctggcttatgcctgtgtaacagatgggagagaaatgaag

SEQ ID NO: 19864 - DNA, 60 bp, Homo sapiens
ggtgatcggttcccagcaccgcacttgcagaggagcgaattgggccaaaacagctttaat

SEQ ID NO: 19865 - DNA, 60 bp, Homo sapiens
ccctgtaccaggggcttgggatataacagtgaataagttcctggggcttacatcagtcaa

SEQ ID NO: 19866 - DNA, 60 bp, Homo sapiens
cctctgcaaacaagggaacacttactagcagtacttgaagacttgtgagttggaattgca

SEQ ID NO: 19867 - DNA, 60 bp, Homo sapiens
ggtgtgctctttaacgaaatgcccatcaccactgctcttaatagcatgaagaccacatgc

SEQ ID NO: 19868 - DNA, 60 bp, Homo sapiens
gtttgttcatcctgccatccccaacccttttctacctcaagtctgtgtgaccactcacag

SEQ ID NO: 19869 - DNA, 60 bp, Homo sapiens
cacccaacatcttgttgcatcttccagagtaaatctggggtccataaaccaaaccaggag

SEQ ID NO: 19870 - DNA, 60 bp, Homo sapiens
caggctgtagagccagatactggggtttgaatccttattcaacatgggaacataggagct

SEQ ID NO: 19871 - DNA, 60 bp, Homo sapiens
ggtaggctagtccatgtgtgtgttacaggggctgctagaaagttcctccctattttgagc

SEQ ID NO: 19872 - DNA, 60 bp, Homo sapiens
gctacatctgtaggatagggagatcccaagcaggtttagtacggtgcttcactgaaggaa

SEQ ID NO: 19873 - DNA, 60 bp, Homo sapiens
gttgaattctcctattatggatgctagcttctggccatctctggctctcctcttgacaca

SEQ ID NO: 19874 - DNA, 60 bp, Homo sapiens
tatttagagcagagcacaactctccttgcgtctgggtcccttcacacaggtgactgagag

SEQ ID NO: 19875 - DNA, 60 bp, Homo sapiens
gggcgccacagaccttgtcagaaggggtctgagcagagacattgatttggtttcattatc

SEQ ID NO: 19876 - DNA, 60 bp, Homo sapiens; identical to SEQ ID NO: 4855

SEQ ID NO: 19877 - DNA, 60 bp, Homo sapiens
atttgtcctgcacagtttgctttggcttcaccccagtctcaggcccttcatcccttccca

SEQ ID NO: 19878 - DNA, 60 bp, Homo sapiens
tcccaactttagcagccggaagtcgcaactgaagagaccagccatttggattaggaagac

SEQ ID NO: 19879 - DNA, 60 bp, Homo sapiens
ccagttcccacatctcacccacttttagggatgtcactttcctttgggcttcagcttcct

SEQ ID NO: 19880 - DNA, 60 bp, Homo sapiens
gctcttcagtcgacaagggaaattgcggctacagaaatggtacatcactctccctgataa

SEQ ID NO: 19881 - DNA, 60 bp, Homo sapiens
gtagagcctgacctggtattgccattgcttcactgttggctttgaccagggtatgatctc

SEQ ID NO: 19882 - DNA, 60 bp, Homo sapiens
tgaaagagcccgtcactccttcgcgatggtgtgctgagatggcaagaagccgtcttttat

SEQ ID NO: 19883 - DNA, 60 bp, Homo sapiens
gataaagtggaagggcactgtagttgaggtgaaaatcgaagaatgaagtcctggtagggg

SEQ ID NO: 19884 - DNA, 60 bp, Homo sapiens
tactgacacccacacctgtgcatatcccaggtatcctatcccaaccttgccagcatgtat

SEQ ID NO: 19885 - DNA, 60 bp, Homo sapiens
caagacagattgccatggagcatgttgtgcccaactagggacagcgcagatagattctgt

SEQ ID NO: 19886 - DNA, 60 bp, Homo sapiens
aagcaaattcctgtagttccaaatcagtagctcaagttcctgggtcagactacccgcagg

SEQ ID NO: 19887 - DNA, 60 bp, Homo sapiens
cctccagctcaattgtcaacctggatcttacaagtccacaaggtcatggatgccagggaa

SEQ ID NO: 19888 - DNA, 60 bp, Homo sapiens
ccctaccagaagaggcacaggctagcatggatgattccaaacaagggattgagaagtcac

SEQ ID NO: 19889 - DNA, 60 bp, Homo sapiens
tgaatggggagggatcctttgtgttctcatggttggctctgactttcagctgtgttggga

SEQ ID NO: 19890 - DNA, 60 bp, Homo sapiens
gctctgtaaagtactgtgcaaaagttgtgagtagagtagttgtggtgctgtctttcttcg

SEQ ID NO: 19891 - DNA, 60 bp, Homo sapiens
gcatgatggttaaactctgtgagctataggctgtcaagttcagctgcacagcggctaact

SEQ ID NO: 19892 - DNA, 60 bp, Homo sapiens
gccttctttcatccatgctcacctgagagttccagtgttttccttgttcttgtttctgca

SEQ ID NO: 19893 - DNA, 60 bp, Homo sapiens
gctggagcctaggtcactgcacaggtttgatgccatgtggtcaatgaatgactgatctgt

SEQ ID NO: 19894 - DNA, 60 bp, Homo sapiens
tgcacctccacccacagtgcagtgttgtggcccctttgccaggctgtgagttgacgggca

SEQ ID NO: 19895 - DNA, 60 bp, Homo sapiens
gaatggcaccaaagagacttttatcagctattttccgtgttacatgtgttagcagttcct

SEQ ID NO: 19896 - DNA, 60 bp, Homo sapiens
ttctcttctgtggcttattgatggcactcaagcaccacacagcaatgacgtctgtcctgg

SEQ ID NO: 19897 - DNA, 60 bp, Homo sapiens
atggtggaggtagtatggggttttcaatctcaaagcgtccctttctgccttctcggctct

SEQ ID NO: 19898 - DNA, 60 bp, Homo sapiens
agaccaggacaaggatgacagcgaacaaatggatgtagctgaaaaggcaatgggaccacg

SEQ ID NO: 19899 - DNA, 60 bp, Homo sapiens
gatcttagcgtaaatgtcactgctttggggaagcttttccagcccatgcccctaagttgt

SEQ ID NO: 19900 - DNA, 60 bp, Homo sapiens
ggttacttaggtcatgtagggagttgcaggtagagcagaactcagatgcagaaatatgct

SEQ ID NO: 19901 - DNA, 60 bp, Homo sapiens
caacttttactgttcactggacaactattttgggaatttgcagacctataaagcccatct

SEQ ID NO: 19902 - DNA, 60 bp, Homo sapiens
taggacagaagtgcccttcctgagagtatggcagcataatgacattctagcacctggacc

SEQ ID NO: 19903 - DNA, 60 bp, Homo sapiens
accccaagtctgtaagggccgctcccaggaacacctgctactgcacactccaaaccaata

SEQ ID NO: 19904 - DNA, 60 bp, Homo sapiens
gcctctttctgtagatcaaatgaaatatggcccaatttacaagggtatacaccttcatgg

SEQ ID NO: 19905 - DNA, 60 bp, Homo sapiens
cacagaaaacacagggctgaggaaccagttaaacttcaccagggaatacagttcacaaaa

SEQ ID NO: 19906 - DNA, 60 bp, Homo sapiens
actttaggagaaaagcttgcttcagggtccttagagaaagtcactggggcctgccaagct

SEQ ID NO: 19907 - DNA, 60 bp, Homo sapiens
gagagcatgactctggcttactcatctgtctattccagaagaccttgtctgttcttggca

SEQ ID NO: 19908 - DNA, 60 bp, Homo sapiens
gggttctaatgccagctcagctacttcctgcgcttatggtttagggtcccatatgctctt

SEQ ID NO: 19909 - DNA, 60 bp, Homo sapiens
cgcgtaactagaacaatctgtcatgggactaagtggaagaatccatcagcactacacagc

SEQ ID NO: 19910 - DNA, 60 bp, Homo sapiens
ttttgggtgttcatctgacccaggtctctcttctcactgctgcagagcctgagcttccag

SEQ ID NO: 19911 - DNA, 60 bp, Homo sapiens
tgccactgatcaagtagttgcacaagttggtaattttccaagggtaaagttgagcagggg

SEQ ID NO: 19912 - DNA, 60 bp, Homo sapiens
cagttaagagcagaactggaattcatactctgtggaatgaatcagcaatgtggaaggagt

SEQ ID NO: 19913 - DNA, 60 bp, Homo sapiens
gatgtccttaagattggattcattcctgaccccaaataggcacagcatggttctaggttt

SEQ ID NO: 19914 - DNA, 60 bp, Homo sapiens
agagaccaaagtctcacaacaagtgagcagcaaagatgggactggaacacgtctcctgac

SEQ ID NO: 19915 - DNA, 60 bp, Homo sapiens
gccattggtacttgtgaattagaagagacatctatgttctgatccactgttgaaagctgt

SEQ ID NO: 19916 - DNA, 60 bp, Homo sapiens
gcacagtcagccgctgagacaggactgctagataactacagaggttatgcattgcaccat

SEQ ID NO: 19917 - DNA, 60 bp, Homo sapiens
atttagtgccttgctgccttttcagatccctcccctgaactgctggcacctgatgtttga

SEQ ID NO: 19918 - DNA, 60 bp, Homo sapiens
gtgagcaagccctcaagcctacctcattcctgaagagttgaaggagaaaatgccgtgcta

SEQ ID NO: 19919 - DNA, 60 bp, Homo sapiens
cccctcaaggcagtaaggcttctgtcgtctcctgatgaatctatgcttgggtaagtgaga

SEQ ID NO: 19920 - DNA, 60 bp, Homo sapiens
aatatcagagggcacaagcccagattgaagctggaagacatagtgctccagaaaggtcct

SEQ ID NO: 19921 - DNA, 60 bp, Homo sapiens
acagaagagcaacgacttccttgttaagagtctgaaaatctgggtgagagcctgtcagac

SEQ ID NO: 19922 - DNA, 60 bp, Homo sapiens
tttattctcctcactcccagcagatacgaggacaccaacaatgcagttgatccctctggg

SEQ ID NO: 19923 - DNA, 60 bp, Homo sapiens
ctttcaaagggtgcccaaccactggatgccatacttgtgttattagctatctctatctgc

SEQ ID NO: 19924 - DNA, 60 bp, Homo sapiens
ataaagttccacatggaagctgggttgcctcccacaagtccccagtagagtggatctgta

SEQ ID NO: 19925 - DNA, 60 bp, Homo sapiens
ccctgcaaggagctcatctgtgtgttgagagggcatctagctttgggctccaattacaag

SEQ ID NO: 19926 - DNA, 60 bp, Homo sapiens
tcactggtttccacgatcaagcaaggcttcatggagcaagacaacttcacccaggtcttg

SEQ ID NO: 19927 - DNA, 60 bp, Homo sapiens
cttaaccagcatcattgtgattccacacaggagcccatctgcttgaggaatttagctgta

SEQ ID NO: 19928 - DNA, 60 bp, Homo sapiens
gtaggacctgaccccgctgacacagctggtcaccttattgctgtgatgttgtctatgatt

SEQ ID NO: 19929 - DNA, 60 bp, Homo sapiens
tattgaaaatggggtactgacatcttctactgtattgctaattgctatttttcccttcag

SEQ ID NO: 19930 - DNA, 60 bp, Homo sapiens
gcacctaccacacaggactcttatgtggaccaagtgattgacacatgtaaagcacttata

SEQ ID NO: 19931 - DNA, 60 bp, Homo sapiens
gatcaggagactgacaacaacccgccttctgacagagcaaggaggacatgatgggggcgt

SEQ ID NO: 19932 - DNA, 60 bp, Homo sapiens
gtgaaagagagtgtagggtcactcgtctgggaacacagtagtgaactaagaaagcccttg

SEQ ID NO: 19933 - DNA, 60 bp, Homo sapiens
aagattggggagacaagatggggtagattgtggcaaagaatgctctggctggttaccagg

SEQ ID NO: 19934 - DNA, 60 bp, Homo sapiens
agctcaggaactctgcccttgttgtcctctcctgtattccccacactgaggataagtgat

SEQ ID NO: 19935 - DNA, 60 bp, Homo sapiens
ggtggcctgaagttgtttctagtaatagctcctgtaccacgtgccaactgggcttttcat

SEQ ID NO: 19936 - DNA, 60 bp, Homo sapiens
tgtctacctttactgagaaatccattgcactgctcccttggcttccttctgtcttgactc

SEQ ID NO: 19937 - DNA, 60 bp, Homo sapiens
tgggttctgtggccgaaaccctgcccctctgaaacgtcaaccagaaagctctgaaatcag

SEQ ID NO: 19938 - DNA, 60 bp, Homo sapiens
agggaccatctgtcccctgaggtgacctgagaaacaaccagttgcccacagactgttatt

SEQ ID NO: 19939 - DNA, 60 bp, Homo sapiens
acacaaggctggcaaagcttgtctgctgcccagcaagcacttcaggctcacaccatttta

SEQ ID NO: 19940 - DNA, 60 bp, Homo sapiens
cttctatcccttcagaaagacaaggggtcagtgcaagcacctgaaataagcagcaattcc

SEQ ID NO: 19941 - DNA, 60 bp, Homo sapiens
aatttgcaccgcttcagccagggaatttcagctctcctgggtgggatagtgataggggat

SEQ ID NO: 19942 - DNA, 60 bp, Homo sapiens
ccttggtaatgacagctcagggaaggtttcacaaggtcatgatcaggagacttgaattgt

SEQ ID NO: 19943 - DNA, 60 bp, Homo sapiens
cctgggtcacactgggcttcagattgagggttgattcatgttctgagtccatatgatgag

SEQ ID NO: 19944 - DNA, 60 bp, Homo sapiens
gttctttgcaggcagcactgactccatgtgtagctgagagagtggagcattggcttttac

SEQ ID NO: 19945 - DNA, 60 bp, Homo sapiens
agcgtgtcacaactgttttcccgggtgtcactgctgtggtttgagtttgtgtgtccccag

SEQ ID NO: 19946 - DNA, 60 bp, Homo sapiens
ggtacccaaatgaagtcgtttatgtcacactctaacaagaggccctgaagaagccctcac

SEQ ID NO: 19947 - DNA, 60 bp, Homo sapiens
gtcacaggatcttcggttccgagggcctttagaacccaagagttgtagagtcctcacatt

SEQ ID NO: 19948 - DNA, 60 bp, Homo sapiens
tcctgctttggagcaatgagaaatgggagggaaacttcaccttttcatagcttttgatgt

SEQ ID NO: 19949 - DNA, 60 bp, Homo sapiens
gtgtgacgtgaggaggggcactgaagtgggtgatctttaaggccagatgtctctgtaaaa

SEQ ID NO: 19950 - DNA, 60 bp, Homo sapiens
gaagtgcataggcaaggagcttcaacggaattcaatgtcaacctggtcatcttaccatga

SEQ ID NO: 19951 - DNA, 60 bp, Homo sapiens
ttcaaccactaagcctcttgtcagagccctcaggcaggcagatgtgtcacccaaataaac

SEQ ID NO: 19952 - DNA, 60 bp, Homo sapiens
gcttgtgtttcctgccagcagcacatcttaaccaaagatgttccagctaagttaacccag

SEQ ID NO: 19953 - DNA, 60 bp, Homo sapiens
cctgatccaccattaccatccttgctatgtgccatttgacgctatatgtcagcgtactac

SEQ ID NO: 19954 - DNA, 60 bp, Homo sapiens
ggcatgatgtggacctcgaatgaatggcttagtgaactgacccaggaagttgatgtagac

SEQ ID NO: 19955 - DNA, 60 bp, Homo sapiens
ctgtacacagttgagcgaggaagtggcgacagcacggtttgaatctggctgataaaacag

SEQ ID NO: 19956 - DNA, 60 bp, Homo sapiens
tgacgtaggtagtgcttgagaccgccagaagctcggaaaagcgatccaggtgctgcagaa

SEQ ID NO: 19957 - DNA, 60 bp, Homo sapiens
ttgacaggggtttcctctggcttctccagactttctgttcctccaccacagcccttagca

SEQ ID NO: 19958 - DNA, 60 bp, Homo sapiens
cagatgtggtttggacaaatgggtggatggcgatgctggtcaaagccaatacatggttga

SEQ ID NO: 19959 - DNA, 60 bp, Homo sapiens
cggcacagtgtagttgaggtgaatataggcaagaaggcttaggaagcctacaacaaagga

SEQ ID NO: 19960 - DNA, 60 bp, Homo sapiens
tgtacctactgggccctctagaaatggtagacatcatcactgctctttcagacatgcagc

SEQ ID NO: 19961 - DNA, 60 bp, Homo sapiens
tgtattgggaagagagcagcctggggaaagtcacttacctacttgacctccctttgctct

SEQ ID NO: 19962 - DNA, 60 bp, Homo sapiens
ctaagagatacatgaaacaacagtgtcagaaacgatgctgtcttccatgcgatgaaattg

SEQ ID NO: 19963 - DNA, 60 bp, Homo sapiens
gatttttctggcagtgtaaggtctacaccattttcctctcagcatcagagaaggcagaaa

SEQ ID NO: 19964 - DNA, 60 bp, Homo sapiens
gtacaggatttcttcagacgtggctcaggaaatggccgagagtaaggtgaatcacaaggc

SEQ ID NO: 19965 - DNA, 60 bp, Homo sapiens
cacgaaaacagcgctcccaacaatgccacctccaagacaaaacttcctgtgtgtatgtgg

SEQ ID NO: 19966 - DNA, 60 bp, Homo sapiens
gaaacaaagtgtaccagcacacagttaaactggcttttattcttcacttgagactagttc

SEQ ID NO: 19967 - DNA, 60 bp, Homo sapiens
aaggataccaagctcaagactctcccttgttcatttgaggccttcccaaagatgactgac

SEQ ID NO: 19968 - DNA, 60 bp, Homo sapiens
acacatcgagaagcacacagggatgagccactaggtatcccatgctggaggcttgtggaa

SEQ ID NO: 19969 - DNA, 60 bp, Homo sapiens
ggggttagtgaaggggaattaagggctagagaagtaaagatcagctggaagtcatgtgtg

SEQ ID NO: 19970 - DNA, 60 bp, Homo sapiens
ctgggtgggtctgaaaaggcaacttctcttcacaaactcaggaacagggctactctatgg

SEQ ID NO: 19971 - DNA, 60 bp, Homo sapiens
gctagggtcatggggcctacagagacatatcagacagtagtaggagatgataggttcata

SEQ ID NO: 19972 - DNA, 60 bp, Homo sapiens; identical to SEQ ID NO: 4855

SEQ ID NO: 19973 - DNA, 60 bp, Homo sapiens
cttcctcttctgcagtcccacactgccatggttgcttttatcacactgttaagagagttg

SEQ ID NO: 19974 - DNA, 60 bp, Homo sapiens
tgagcaggcagagaatgggacgtgtcccctcagaggagcctcgagcccagttccagccag

SEQ ID NO: 19975 - DNA, 60 bp, Homo sapiens
gggctcagctggcatctgtactgattgatgtgcttacattcttcatgtggatgtggccag

SEQ ID NO: 19976 - DNA, 60 bp, Homo sapiens
agaagaaaactgggcttgattcatgctgcctcagatgactgtgctagagttggtaggcaa

SEQ ID NO: 19977 - DNA, 60 bp, Homo sapiens
aaatcatgtagtaacgtcccctgtacctgagtttcagtgcagttaaggggcgtaattgca

SEQ ID NO: 19978 - DNA, 60 bp, Homo sapiens
ggtctcagataccagaagctgacagtctccttccagacataaagggatacccagcagaga

SEQ ID NO: 19979 - DNA, 60 bp, Homo sapiens
ggctgcagaaggcttctctgagggtgtaacacttgttttgagagctaaaggatgaacggg

SEQ ID NO: 19980 - DNA, 60 bp, Homo sapiens
tgaaatgggttgactttcagggaagactcaacaggcttccaggtgtgaaaacaggaaggt

SEQ ID NO: 19981 - DNA, 60 bp, Homo sapiens
acttagctatgtgtgctgcaagactgtatgtgtttctgaatcctctgcttcgagggaaaa

SEQ ID NO: 19982 - DNA, 60 bp, Homo sapiens
cttgggtcttccaggccaggtgtaagcaaatgtagggagttcagccccaggagagataaa

SEQ ID NO: 19983 - DNA, 60 bp, Homo sapiens
cttgccaataagactgaccgatccctcattgaggaaaccaatggttgaacacaagtccct

SEQ ID NO: 19984 - DNA, 60 bp, Homo sapiens
ttaaacctagtaccatccaaaaccatgtaatggattttaagaatctgttaggccttctta

SEQ ID NO: 19985 - DNA, 60 bp, Homo sapiens
caccacagtctccacctttacctactgcatccctgctgagacaaagtggtacatgccatt

SEQ ID NO: 19986 - DNA, 60 bp, Homo sapiens
tcagttgtttgtgcaacatccagtgtggtctctggagccatcccattagctgaaaagtat

SEQ ID NO: 19987 - DNA, 60 bp, Homo sapiens
tagacctttcaagtccacttgggcatggggagctgagagctagcatgccgtttaacttgg

SEQ ID NO: 19988 - DNA, 60 bp, Homo sapiens
tttcctgcactgaatctctgtgcttgagcctactgaaatgatccccctaagccatgctgc

SEQ ID NO: 19989 - DNA, 60 bp, Homo sapiens
tctgagaagcagcgacccaaggagcctccatccctggaccagcttcgagctgaacgtctg

SEQ ID NO: 19990 - DNA, 60 bp, Homo sapiens
tgctatttcccctctactgagctctgctcactttgccggtcaaaggtgtgttttcaggct

SEQ ID NO: 19991 - DNA, 60 bp, Homo sapiens
ggcagcataaacagactactgtaggagcttagactctgggtcctgatacatatcggatcc

SEQ ID NO: 19992 - DNA, 60 bp, Homo sapiens
agtaaagaagagcccaacccaatgtccttcctgccataaagcaacccacaaatcctctgc

SEQ ID NO: 19993 - DNA, 60 bp, Homo sapiens
aggtcagggctggctttggatgtagatggtgcccagaccttttccctcaacttttcagtt

SEQ ID NO: 19994 - DNA, 60 bp, Homo sapiens
gaatgtctctgaggtggccaacattagtccttctatagccagattagcaatcttagagcc

SEQ ID NO: 19995 - DNA, 60 bp, Homo sapiens
gagatacctctgagcctggaggatgcgagtaggagaacaaaggggatactttagatgtga

SEQ ID NO: 19996 - DNA, 60 bp, Homo sapiens
tagtagcagcaggacacagagagggaatgacagaggagcagtgtgtagtcccctgtttga

SEQ ID NO: 19997 - DNA, 60 bp, Homo sapiens
aatacctttgtacagaaagcaacactggccacacctaagaaagcgatgcttccagtcccc

SEQ ID NO: 19998 - DNA, 60 bp, Homo sapiens
cacgcttagtcatctcttgctctttgaactccatgtctgtatcagctacccagaggaccc

SEQ ID NO: 19999 - DNA, 60 bp, Homo sapiens
gcatgcttcatctcctttgtccttcctcagcataaatgcctggcccatacaggtaggttg

SEQ ID NO: 20000 - DNA, 60 bp, Homo sapiens
gtgcacacacgacctgctcttactgctttccatgttctgtatgtggaaggagatcagtca

SEQ ID NO: 20001 - DNA, 60 bp, Homo sapiens
ctgaaaggccagagcatcttcttcactgggagtgcaggtagtgggggcagagaggaggta

SEQ ID NO: 20002 - DNA, 60 bp, Homo sapiens
gggcctctcttgaagattcagattagatcctggagctcttaacactgtgctttgctgccc

SEQ ID NO: 20003 - DNA, 60 bp, Homo sapiens
attgaacacctataatgagctggacactctatgggccttgcaatttagacatgaatagag

SEQ ID NO: 20004 - DNA, 60 bp, Homo sapiens
ctcttctcacattgttagcatttctgtatgttaacctgtacttctacccatcaagctgcc

SEQ ID NO: 20005 - DNA, 60 bp, Homo sapiens
ggctacatgatgagctgaggcgttttcgtctgactttgcattggtcttcttactcaagtc

SEQ ID NO: 20006 - DNA, 60 bp, Homo sapiens
ccgccacgcgtttgcttgttggaatttggaagctttgtgcatgaccttgaatgcactgga

SEQ ID NO: 20007 - DNA, 60 bp, Homo sapiens
atctcatcatttcacagagtggggagctatggccacaacgtgcctatcacacaagtccag

SEQ ID NO: 20008 - DNA, 60 bp, Homo sapiens
caggaagcaacataccatgaatgtactgcaagggaacacatttgtgtcatgtgaagagac

SEQ ID NO: 20009 - DNA, 60 bp, Homo sapiens
gaacctgtcaggccataatagctagcctggaattttccttgccaagtctgtcctccttga

SEQ ID NO: 20010 - DNA, 60 bp, Homo sapiens
ctttgtgtaacttgagttcatcaaacgctaatccaagttccctgcaaaacctgttctgtt

SEQ ID NO: 20011 - DNA, 60 bp, Homo sapiens
agtacttacctctgggggtggcagcattgactaaagaggtacaagggagtcttctggggc

SEQ ID NO: 20012 - DNA, 60 bp, Homo sapiens
gataaacacccatgtgagggaaggctcttgcagcctgaagccgtaagacatgtaaagggt

SEQ ID NO: 20013 - DNA, 60 bp, Homo sapiens
ggtgtctgcgtgttgcccagatctaccttgaaaactctagttgcttcctaacacctaggt

SEQ ID NO: 20014 - DNA, 60 bp, Homo sapiens
gcctcagaaatctgacaatggggaagtagagtgctccatgccacaattatggtgtgggga

SEQ ID NO: 20015 - DNA, 60 bp, Homo sapiens
ctgaggagtaactcaaaccaaacttgtgggtctcacagagaggatatcgtcttgcccatg

SEQ ID NO: 20016 - DNA, 60 bp, Homo sapiens
caaaagtggcaagcatggagagagaggtcagactggctaggctgcagggggaattacctt

SEQ ID NO: 20017 - DNA, 60 bp, Homo sapiens
acagagctcatggtgtccgtgggatatgaggcagaccacatccagtccttgttagaacaa

SEQ ID NO: 20018 - DNA, 60 bp, Homo sapiens
tccagaaggtagatctttcccatactgggctcagctcacaactggctcttgagggcctct

SEQ ID NO: 20019 - DNA, 60 bp, Homo sapiens
acacacagcacatatatgcacaaaatagcctgcccttcccacatgtctccctaacctttt

SEQ ID NO: 20020 - DNA, 60 bp, Homo sapiens
ggagctatttccaagttcaggtgaaggggacatggaggttaagcaaggccagaaagacag

SEQ ID NO: 20021 - DNA, 60 bp, Homo sapiens
ttcagaaaagcaatgtctcgggtcaccagtgctaggacgcaagaccacatcactctccgt

SEQ ID NO: 20022 - DNA, 60 bp, Homo sapiens
tcctcagggagccttccccacttacaaccacaggatgacctcctggtttacatgtctttt

SEQ ID NO: 20023 - DNA, 60 bp, Homo sapiens
ctgttccctgggcagttgtctcttttaacgtcccaccctaaacttgccaaccctcatatg

SEQ ID NO: 20024 - DNA, 60 bp, Homo sapiens
gccaaatgcctggataaccatcgacccctacccaccaaatctagtcagtagagaaaaggc

SEQ ID NO: 20025 - DNA, 60 bp, Homo sapiens
aatggctagcacgggaaagggcccaaagtaggtgctcagtgctgatgagagagtagaatt

SEQ ID NO: 20026 - DNA, 60 bp, Homo sapiens
tgaccttgattctgaacctgcatctatgggaagggcttgcagtgtctgagtgagcttgga

SEQ ID NO: 20027 - DNA, 60 bp, Homo sapiens
agctaactattttgaccacaaggtggagctgtgatgtcacaatttggcaagatttgtaag

SEQ ID NO: 20028 - DNA, 60 bp, Homo sapiens
cttcttggagtctgctcttgtgcaaatgagcctagaaagcccgttaactttgggtggagg

SEQ ID NO: 20029 - DNA, 60 bp, Homo sapiens
acagtcagcagctgatccccgacagaaacgcagcagatgcagacgctcctgatgaaatca

SEQ ID NO: 20030 - DNA, 60 bp, Homo sapiens
aaaacatctcatatggaattgaaccgatggaggctgtatcaggatttatacacaagattt

SEQ ID NO: 20031 - DNA, 60 bp, Homo sapiens
tggccaagtatggggtcatggattccaggccacaaattccaggcctagttcagtttgggg

SEQ ID NO: 20032 - DNA, 60 bp, Homo sapiens
ttcttcacaggacacacacacagggccatgaaaacggccttcttcaaagatcccacggct

SEQ ID NO: 20033 - DNA, 60 bp, Homo sapiens
aaagtagaaggaaacaagtctcttcagtcacaaaatgtcgtacatcccgcatatactaga

SEQ ID NO: 20034 - DNA, 60 bp, Homo sapiens
ggggctgttgcagactgaatgtcattttgacagcagtgtccaagaatcaggaagctgttc

SEQ ID NO: 20035 - DNA, 60 bp, Homo sapiens
ggctcaagttgcatggtttcccgaatctatgcacctggagtaagcacttttctggttgcc

SEQ ID NO: 20036 - DNA, 60 bp, Homo sapiens
gcccgcaccctttgatcctgtgagtggagaaatgaagagaactccaaatccttaatccat

SEQ ID NO: 20037 - DNA, 60 bp, Homo sapiens
ttaagggcagttggggaagatgagcagagccgggaaacagcaagaggtatagaccctctg

SEQ ID NO: 20038 - DNA, 60 bp, Homo sapiens
ccatcaccccaaactacaagcaacagctcttggctgtacaaatgagagtgtctatgttga

SEQ ID NO: 20039 - DNA, 60 bp, Homo sapiens
caggatgtcctgtgatagcagcctgacctgtcaaagccatgcgaataccatctgttcagt

SEQ ID NO: 20040 - DNA, 60 bp, Homo sapiens
catagtttctgccagatgttgcaaaagtgagttagataactgacctttcttctggggcct

SEQ ID NO: 20041 - DNA, 60 bp, Homo sapiens
gacagaaccatgctagtctttgagagaacgtgtggattgggtggatgtttggaccgaatg

SEQ ID NO: 20042 - DNA, 60 bp, Homo sapiens
aggatatgccacggacattgggaagggatggaggatggacggaggaaggacgtgcagttg

SEQ ID NO: 20043 - DNA, 60 bp, Homo sapiens
taatttcctggaagacctcgatgaaccagacacagaggatttccggactgaccgggcagt

SEQ ID NO: 20044 - DNA, 60 bp, Homo sapiens
tcctgataccaagagggtgtgcctgcgaaatgaagagcagatgaaactgcccgcagaagg

SEQ ID NO: 20045 - DNA, 60 bp, Homo sapiens
gctttcttatgtggtaaatgtctcagtattttgctgcctggtatttgttcagtttccttg

SEQ ID NO: 20046 - DNA, 60 bp, Homo sapiens
tgctaaaatcacacggcctatttgttgatgtaagttgcctgaattccgtggtatgctatc

SEQ ID NO: 20047 - DNA, 60 bp, Homo sapiens
ccgtggcaaataacagaaatgccttctggcactgcgtgaatggagtcacgtaccagcaga

SEQ ID NO: 20048 - DNA, 60 bp, Homo sapiens
ccccagttgtcaccttcggcatcaaacactctgattacatgactcccctgctggttgatg

SEQ ID NO: 20049 - DNA, 60 bp, Homo sapiens
gctggaccttgagttgtcactcagagaaaagagtgccatctaccgaaactccacagtttc

SEQ ID NO: 20050 - DNA, 60 bp, Homo sapiens
actggcatacacagggcatcctgctagcccatagcttggccatataggaccaggtcaaca

SEQ ID NO: 20051 - DNA, 60 bp, Homo sapiens
tagtcatactcctcagttcatggcatactatcatcagaccatgacagtgaggccctcttg

SEQ ID NO: 20052 - DNA, 60 bp, Homo sapiens
gcccattcacctcctccttcagcacaacgtcacccattgggcaagagatccagatttgtt

SEQ ID NO: 20053 - DNA, 60 bp, Homo sapiens
cacgttttccacctttattcttctgttgatggttgctttggcaattaggggtcctttgca

SEQ ID NO: 20054 - DNA, 60 bp, Homo sapiens
gctggaaataaggaggccaatatctaggcctgacctgtcattaacgagccatgaggcatg

SEQ ID NO: 20055 - DNA, 60 bp, Homo sapiens
agaagggaatcatcctgagaggctcctgaaggatgaggctgagtgtgggccaccatgagt

SEQ ID NO: 20056 - DNA, 60 bp, Homo sapiens
ctcgtgggttggaggagacttattcagagggagttttggtcttgctagaaattgcatgag

SEQ ID NO: 20057 - DNA, 60 bp, Homo sapiens
aggcctgtagatccttctaagttgccctccatgtccagagacctctttcactataggtaa

SEQ ID NO: 20058 - DNA, 60 bp, Homo sapiens
agaggtcttttcaccgagctgctgctggttgcagttctttctggtgcacattggctaatg

SEQ ID NO: 20059 - DNA, 60 bp, Homo sapiens
accctcctgctgccttcccaccctcgttcttgggtacgttcaataaaaggattgttttcc

SEQ ID NO: 20060 - DNA, 60 bp, Homo sapiens
atggagatccgcacccctgacatcaatcctgcctggtacgccagtcgcgggatcaggcct

SEQ ID NO: 20061 - DNA, 60 bp, Homo sapiens
aagggtaggaatgatatgtggtgcggacatagaagtacaaggcaaaagagtgacgccgag

SEQ ID NO: 20062 - DNA, 60 bp, Homo sapiens
gtgttgtagctcatagtgtcggttaaggttagacatctcagtcacatgctgtcttggcac

SEQ ID NO: 20063 - DNA, 60 bp, Homo sapiens
gagacaacgaatgtgaatcatgcttgcaggtttgagggcacagtgtttgctaatgatgtg

SEQ ID NO: 20064 - DNA, 60 bp, Homo sapiens
gtgtattgagaatgaacacctttactttgcctcattcctagtaccctccctggagttcag

SEQ ID NO: 20065 - DNA, 60 bp, Homo sapiens
actctacaccgtggactgcaggttccgggagcgcatcgaagagaacggccacaacaccta

SEQ ID NO: 20066 - DNA, 60 bp, Homo sapiens
tgctgaccagagccccgaaagtctcctgcagctgaaagccttgaagccgggagttattca

SEQ ID NO: 20067 - DNA, 60 bp, Homo sapiens
tatcctttccctgaccccagaccgctgccaagcctgttctcccccattacaacatggtct

SEQ ID NO: 20068 - DNA, 60 bp, Homo sapiens; identical to SEQ ID NO: 4855

SEQ ID NO: 20069 - DNA, 60 bp, Homo sapiens
tagctaccctggaggactgtgccaccatgagagactcttcaaacccaaggcaaaattgga

SEQ ID NO: 20070 - DNA, 60 bp, Homo sapiens
tcagggccaaggagtcagcccagaggccatcccacagggaacatgttgagctttgaatgg

SEQ ID NO: 20071 - DNA, 60 bp, Homo sapiens
tcataccccagtggtctatacctccagcagcaagtcgagtgagcaagtgatgtcctgaaa

SEQ ID NO: 20072 - DNA, 60 bp, Homo sapiens
ctggagagcatccatcaggagttcacgcgcaccaacttccacctcttcatccagacttag

SEQ ID NO: 20073 - DNA, 60 bp, Homo sapiens
atcctgggatggggtttgagatggattaatggcctttgcatggcacagaggatgtttgcc

SEQ ID NO: 20074 - DNA, 60 bp, Homo sapiens
ggtctggattttgtaggtccgactacacagcagtgttaactcatttctcatgccattagc

SEQ ID NO: 20075 - DNA, 60 bp, Homo sapiens
ggcgtttctcctcagtctcctgtccaatttcttgctggtggtcagcaggcatagggaggc

SEQ ID NO: 20076 - DNA, 60 bp, Homo sapiens
acatctcactgttcaggatacagactcttcctcaacctcctggtggttggtatggtgcac

SEQ ID NO: 20077 - DNA, 60 bp, Homo sapiens
gagacccatggaaatcagatcaatgctcgctcgctctgtgactttcatcatccacgtgct

SEQ ID NO: 20078 - DNA, 60 bp, Homo sapiens
agtcatgtggtagtgcgtttggcccttcattgagtggtggagccaggagttgagctgagg

SEQ ID NO: 20079 - DNA, 60 bp, Homo sapiens
gtgatatcgccagggttcctgactgggtaagtgatggaggctgaatttgagccagatcta

SEQ ID NO: 20080 - DNA, 60 bp, Homo sapiens
ggcaggccttgagagcatggaacagtggtgctcgcatcagtgaatcctactagttgaaat

SEQ ID NO: 20081 - DNA, 60 bp, Homo sapiens
ccataataggacacactgggtgcatacgatattctcggcactaggctgagcaacacagtg

SEQ ID NO: 20082 - DNA, 60 bp, Homo sapiens
aagactcaaggatgacttgtatacctttgaccagagcaactaagtgggtagtgtatgggc

SEQ ID NO: 20083 - DNA, 60 bp, Homo sapiens
atgtaaaagtgtgattcactgagctacatgaaagcatgagtgactattattcctctaccc

SEQ ID NO: 20084 - DNA, 60 bp, Homo sapiens
gcccttccttagctcttcactgtgttaagtgtatttcaccacctcccattctttccacag

SEQ ID NO: 20085 - DNA, 60 bp, Homo sapiens
gcctcttccttcacctcattccttcccatcgccatttgaggatggttaagtcatgctctt

SEQ ID NO: 20086 - DNA, 60 bp, Homo sapiens
taacctgagcagccttctctatgcctccatcgcatctcacaactctgtggcttaagattc

SEQ ID NO: 20087 - DNA, 60 bp, Homo sapiens
atccctgagtgccgtgttggcaggaagcgagactcgtaccttaggctgaatggatttctt

SEQ ID NO: 20088 - DNA, 60 bp, Homo sapiens
gagatgccagggacactgtgcctctcatcactgatctgatgcagaacttagttcctaagt

SEQ ID NO: 20089 - DNA, 60 bp, Homo sapiens
ccaagcaaagtaactttgtggcacatgtcctgctcctgctgggatgccttctattccatt

SEQ ID NO: 20090 - DNA, 60 bp, Homo sapiens
gagtttctcccttacttgacttggaaacacttctccactggctcttccccaccactgtga

SEQ ID NO: 20091 - DNA, 60 bp, Homo sapiens
ttcagctttgaagacagatcccggctttgaagacagacccgagggtaatcatgaggacag

SEQ ID NO: 20092 - DNA, 60 bp, Homo sapiens
ggaccacatttctctgcatgcaaatatccgttgcccaaagcattacatgggaagtcaaac

SEQ ID NO: 20093 - DNA, 60 bp, Homo sapiens
gctttggcgctagtgaccttgagtgatggtgaggattacagtgggactttcttgtgggta

SEQ ID NO: 20094 - DNA, 60 bp, Homo sapiens
aggtaaagagacagagactgagaggcgagacctcacctcaaaccatgtggcaggacagct

SEQ ID NO: 20095 - DNA, 60 bp, Homo sapiens
gaaaatatacagtaagctattgtgtatccacccttcagtgcagcaaaactactgaattca

SEQ ID NO: 20096 - DNA, 60 bp, Homo sapiens
ccgtgcccaaccctctttaacagcattttaacatggcaactgggacatacaaaattacat

SEQ ID NO: 20097 - DNA, 60 bp, Homo sapiens
caagatggtgtttgcagaatcctacactgcactgtggagttgggtcagttgcatcatgaa

SEQ ID NO: 20098 - DNA, 60 bp, Homo sapiens
ctcagaactgagttagttaaatgaactgtagctcttgctgataattcactcccacatgag

SEQ ID NO: 20099 - DNA, 60 bp, Homo sapiens
tcaagcctgctttctaggttcccacgaggtacccaaataagaaccttccttgccagcagg

SEQ ID NO: 20100 - DNA, 60 bp, Homo sapiens
tatgactagagaagctactcggggagaagcctgagatggaccttccaggtgcatccctga

SEQ ID NO: 20101 - DNA, 60 bp, Homo sapiens
acagtatatcgcatgggtccgttgcacagagtgatgacattacatttactggacctagtg

SEQ ID NO: 20102 - DNA, 60 bp, Homo sapiens
gacaaatactgacggccatctgccaactacagagctgtgaactgttcactcattaacagt

SEQ ID NO: 20103 - DNA, 60 bp, Homo sapiens
tccaaaagtagccctgacccacagcttcaggtatattgactcattcagcctgcaaagcgc

SEQ ID NO: 20104 - DNA, 60 bp, Homo sapiens
gagaggaaaggcagtggggaaagcaagagtgctaatattcttgtccaaaatcgtcataga

SEQ ID NO: 20105 - DNA, 60 bp, Homo sapiens
tcccatctgttccaagctatttgtccatgtaagactgtcaacgttccaagccactgactg

SEQ ID NO: 20106 - DNA, 60 bp, Homo sapiens
atataaactggacatatatcccagtagaagtgacaagtgacagccaaagaggcccaaggg

SEQ ID NO: 20107 - DNA, 60 bp, Homo sapiens
ccaatcccatgaacacagcaggacttgctaaatgcacccactgcttctgcatctactgtg

SEQ ID NO: 20108 - DNA, 60 bp, Homo sapiens
gttgctgtggacacacacgtaccttctatttgctattcctgaactgggaaaagcagcatc

SEQ ID NO: 20109 - DNA, 60 bp, Homo sapiens
gatgtctggtcacagccacttcctcacagatgacaccttccttctgtgtctcacatagtg

SEQ ID NO: 20110 - DNA, 60 bp, Homo sapiens
aaatgactagagggcaagtgtgcaggtggtctccaagactgctccaggctcacttgtttg

SEQ ID NO: 20111 - DNA, 60 bp, Homo sapiens
ggcacatgtaccatgtgtcctgctgacagtaaaaggtgagctactttccatccaaggaac

SEQ ID NO: 20112 - DNA, 60 bp, Homo sapiens
acttcagtaacagctcatcaatcccatcaataattgcaacctgatttccaccgaaggcag

SEQ ID NO: 20113 - DNA, 60 bp, Homo sapiens
atgctggtagcctcccaagggacgactctcccataacagaagtcccaggggtgttctgga

SEQ ID NO: 20114 - DNA, 60 bp, Homo sapiens
gcttggtttctcacacactctacctgctttttctcatcccctttagtctctattccttgc

SEQ ID NO: 20115 - DNA, 60 bp, Homo sapiens
tttcactggaggataaaagccggtgcttattgcatgcacaattgctttccagccgtcagc

SEQ ID NO: 20116 - DNA, 60 bp, Homo sapiens
tggccacagtgagaagtggatagcgccacagctgcggcgatggactcgttcataggaata

SEQ ID NO: 20117 - DNA, 60 bp, Homo sapiens
caaaaggccatccacagtaagagaagacacacaggagcactgagagtggggatgcatttc

SEQ ID NO: 20118 - DNA, 60 bp, Homo sapiens
aaaggcctcaatcccaaccccagccatcaaatgaccaaacgaaagagagtggtcctagtc

SEQ ID NO: 20119 - DNA, 60 bp, Homo sapiens
aaaagtccacagtacctgacaacggtggtacataagtaggtctcaagctaaggacgtcgg

SEQ ID NO: 20120 - DNA, 60 bp, Homo sapiens
tgcagtggttccagacttacgagtacatccgcaacttcctctcgcgctatgcctggatgc

SEQ ID NO: 20121 - DNA, 60 bp, Homo sapiens
catcagatgatagcaaagcagtagctataatcaagtctgttggagaactatcagtaccag

SEQ ID NO: 20122 - DNA, 60 bp, Homo sapiens
gaccaagccaagattgatgcttaccacctactggttgccaagcctttcatttgcattgct

SEQ ID NO: 20123 - DNA, 60 bp, Homo sapiens
tggccgatggagagttctcgtctgaacaggtggcaaaggctggagggacctggctgggca

SEQ ID NO: 20124 - DNA, 60 bp, Homo sapiens
attgacagcctcaaggttcctggctttttgaaccaccacagacatctcctttcccggcta

SEQ ID NO: 20125 - DNA, 60 bp, Homo sapiens
gccaagacctttccattcgccttcaactcggtcaacgtggggcctctggcttcgcagccc

SEQ ID NO: 20126 - DNA, 60 bp, Homo sapiens
cttgattccttcattcagtcacaatttattgagcaccgactttgcatcaacctcttgctg

SEQ ID NO: 20127 - DNA, 60 bp, Homo sapiens
ttcgtttcctctgaagcctaaaccagtgtctacgcaggcggagctgaacggagaggtgaa

SEQ ID NO: 20128 - DNA, 60 bp, Homo sapiens
agcagtagttctgttgtccatcatgttttccctatgagcacccctatgcccactctaata

SEQ ID NO: 20129 - DNA, 60 bp, Homo sapiens
acatgtaaagcacgaacctcctgatacagctgtccttgctcatgaaacacatagagatag

SEQ ID NO: 20130 - DNA, 60 bp, Homo sapiens
ccttccttgaattgggtgtttattggccagaagggctagtcaatactagacctgcttgca

SEQ ID NO: 20131 - DNA, 60 bp, Homo sapiens
ggtgaaccatggacttcaaactaagggatttgctggtttctcttctgctgccacagtagc

SEQ ID NO: 20132 - DNA, 60 bp, Homo sapiens
tgttacatagattgtaataccctaatttcaagagaaccttctcccttgttggctttgagg

SEQ ID NO: 20133 - DNA, 60 bp, Homo sapiens
tctgtgtcaccagggtctggttcaattgtcatctgcaggtccttctgcaacgttaaggct

SEQ ID NO: 20134 - DNA, 60 bp, Homo sapiens
aaaagcatggaggcctgaacccacagcatttgtgagctatcagactgtgccatgtggcta

SEQ ID NO: 20135 - DNA, 60 bp, Homo sapiens
aaggagtggtagccaggcaatagtgaccttgtaggtgtcaagaaggcagattggacgttg

SEQ ID NO: 20136 - DNA, 60 bp, Homo sapiens
ttacgtgacatatcaggggcaagggcttccaaaccaagacagactcaaggctgaatcctg

SEQ ID NO: 20137 - DNA, 60 bp, Homo sapiens
aatggattgcagcaaggagcgatcagacgcaaggagaccactacagtggcgacatttaca

SEQ ID NO: 20138 - DNA, 60 bp, Homo sapiens
tgccactttcagtagtggtatgaataagtccccagccaagccaggtggaagccagtcttt

SEQ ID NO: 20139 - DNA, 60 bp, Homo sapiens
tagacacaagcttccacttcccaaggcaactccaaacttccagtaacttgggccaacacc

SEQ ID NO: 20140 - DNA, 60 bp, Homo sapiens
cgggtgatgacaaaggcgggacatgcaagttctctaatggacggtaacagaagaaagcag

SEQ ID NO: 20141 - DNA, 60 bp, Homo sapiens
aaaggaccgattgctagtaatcttcaaataggactgctactgacaggcaacttgtgaaca

SEQ ID NO: 20142 - DNA, 60 bp, Homo sapiens
gctctgtttacagtgcttggatgaccatagtatggacagctgaaggaatccaggggactg

SEQ ID NO: 20143 - DNA, 60 bp, Homo sapiens
taaagatgatgagaactaagtcagccaccagtggcctgaaaatcatggcagcagcatgct

SEQ ID NO: 20144 - DNA, 60 bp, Homo sapiens
gcatcctagggagctgacctaagaatcactgtagccatatgcagcacaggaacctgaaac

SEQ ID NO: 20145 - DNA, 60 bp, Homo sapiens
gagcaagtgtatatccctaaactgctgagcctcaacactcacaggatgcctaccaacagc

SEQ ID NO: 20146 - DNA, 60 bp, Homo sapiens
ggtagcatagtcttaggaatctacttgagttttatttatgcatgaataccatccacaccc

SEQ ID NO: 20147 - DNA, 60 bp, Homo sapiens
cattccatgaggaatcgaagaccaattcagtcaagcagcagcccaaggttacacgtctaa

SEQ ID NO: 20148 - DNA, 60 bp, Homo sapiens
gggtaggtcttggttctctcctcacttgctatattagtagcatgttacacaaaaggtcac

SEQ ID NO: 20149 - DNA, 60 bp, Homo sapiens
aatccaggagaccagggtgaaagctgcaagatcttttaggatctggccttggaagcacac

SEQ ID NO: 20150 - DNA, 60 bp, Homo sapiens
tatcttttttcagaagccttctgtcaaggtggcccatggtatttcacctcttccctagcc

SEQ ID NO: 20151 - DNA, 60 bp, Homo sapiens
cgctttcctagatgttacagaggaccatgtgtgaaccttttctggcaggaagctctggtg

SEQ ID NO: 20152 - DNA, 60 bp, Homo sapiens
ccgaccctctaccctcttttcacatactgtgcattttgattcctgtacactgtgtagctc

SEQ ID NO: 20153 - DNA, 60 bp, Homo sapiens
cccactgtggggttattgtttacatcacagaaactgtagaatctctatgctcatgtactg

SEQ ID NO: 20154 - DNA, 60 bp, Homo sapiens
cacacccctcgtacctgtcactgggatgcagactctcgacatccgagtccaagcgcaggc

SEQ ID NO: 20155 - DNA, 60 bp, Homo sapiens
atcacggtgttccaatcgtcgaaggtcatgtcaaccaaattggcgtcttttgcaggcccg

SEQ ID NO: 20156 - DNA, 60 bp, Homo sapiens
tggagacctgtgcgaagcactgtgtatccacagtaaaaggagcaacactaacttgttgtg

SEQ ID NO: 20157 - DNA, 60 bp, Homo sapiens
cgaatcttcctacacccatggctatcttcctctgtttaagagccctgtcctttcgctaca

SEQ ID NO: 20158 - DNA, 60 bp, Homo sapiens
gccactatcaaactgtaagtggctcatcagttctatccatggtgtaattttggaatcccc

SEQ ID NO: 20159 - DNA, 60 bp, Homo sapiens
gaagcatgtatacgtcaacatccttcctcacactcccactcttttttccactagtcgttc

SEQ ID NO: 20160 - DNA, 60 bp, Homo sapiens
cagagtactaagtcttccagcttcctcagcatttctgcctaatgccttggggtaggtgaa

SEQ ID NO: 20161 - DNA, 60 bp, Homo sapiens
ctcgtttccaggagctttgcagatagggggagggaaatccgcctcgattctccaggagaa

SEQ ID NO: 20162 - DNA, 60 bp, Homo sapiens
aaggtcccaatagagagggtcacaactgacaaaagcttcagatatgtcctctaatctccc

SEQ ID NO: 20163 - DNA, 60 bp, Homo sapiens
gtggatgagatgctgtcctctgggctcctaaccttccaccactagtattcaccatatctg

SEQ ID NO: 20164 - DNA, 60 bp, Homo sapiens; identical to SEQ ID NO: 4855

SEQ ID NO: 20165 - DNA, 60 bp, Homo sapiens
gctacattgcttataaaacactgagttgaacatgagaaagccttttgtctgcagctgtac

SEQ ID NO: 20166 - DNA, 60 bp, Homo sapiens
agttggcttcacccttaacagcgggtactgggactctgtggacacatggacaactttact

SEQ ID NO: 20167 - DNA, 60 bp, Homo sapiens
aaaccacagtcgaggagggaatgaagaatcagcaaagggacagagattcctagtggcagg

SEQ ID NO: 20168 - DNA, 60 bp, Homo sapiens
cagatgaagttagctttcagcctggcattcccgtccaagcacatgtaaggctccgcaaaa

SEQ ID NO: 20169 - DNA, 60 bp, Homo sapiens
tttcaaaataatgatctataccagttgacttagagtgatttccacgatgctctggtgaaa

SEQ ID NO: 20170 - DNA, 60 bp, Homo sapiens
acttccacgctccttaccaagctacccttaccaagctacgggtgcaggaagcctttagat

SEQ ID NO: 20171 - DNA, 60 bp, Homo sapiens
ggttttaaagaatggtgtagacaggttttccttaaatggcctctgttgttctcctttctc

SEQ ID NO: 20172 - DNA, 60 bp, Homo sapiens
agggtgaatgtggtgagaacaccaggaaggaggaccttgcattgttttaccaaagctcag

SEQ ID NO: 20173 - DNA, 60 bp, Homo sapiens
tcagaaaagcagtctagcaaatgtcccttctgtatgtaaaaagcacgttataaatatgag

SEQ ID NO: 20174 - DNA, 60 bp, Homo sapiens
gcaattttcaatcaagcctgtcccatggagacacaacgcaatagtgacatgagcacttga

SEQ ID NO: 20175 - DNA, 60 bp, Homo sapiens
gcttaatgtggcagtcacctttggatctgacttcccttgtgacagttcaccaccctgtga

SEQ ID NO: 20176 - DNA, 60 bp, Homo sapiens
ctggattaatcacccattaagtgtaaatcacttcaggttctttacagtaccagaaagtaa

SEQ ID NO: 20177 - DNA, 60 bp, Homo sapiens
tgctttagctctgtttcataaagaccagtgtaaactcacacttgcaaagagtacctctag

SEQ ID NO: 20178 - DNA, 60 bp, Homo sapiens
acaatctttggaaggcaggctcctgatctactgctgtggggactcagatttcgccaactg

SEQ ID NO: 20179 - DNA, 60 bp, Homo sapiens
gcacatctgacagcaatgatgagagcgacagccagagcaagtctggtaacggtaacaaca

SEQ ID NO: 20180 - DNA, 60 bp, Homo sapiens
gttaatgacttagtgcttaactagtagaacttccggcaacagccaacttctctgctttgc

SEQ ID NO: 20181 - DNA, 60 bp, Homo sapiens
acgatggagtaatgtggagactcaaggctgattcttagccaggccagtggcttcagaaag

SEQ ID NO: 20182 - DNA, 60 bp, Homo sapiens
tcgcgatgacaagggctcagactttatccagacactggtggaggtcctcagagccaaccc

SEQ ID NO: 20183 - DNA, 60 bp, Homo sapiens
ttaacgacgagttgtttcactacccgttgcgtcgatacgccagacaatcgcctgccacag

SEQ ID NO: 20184 - DNA, 60 bp, Homo sapiens
aatcacaagtggtacggcgtccactgcttggtcaggtatctcaggttcttctaacgcctt

SEQ ID NO: 20185 - DNA, 60 bp, Homo sapiens
gcagccagaagatggaagaatgaggctcacctgatgctcgttgccatgggacacctccga

SEQ ID NO: 20186 - DNA, 60 bp, Homo sapiens
ctaggactacaccacagtcattcccagctccatacctctgctctgacctgcaacaaaatg

SEQ ID NO: 20187 - DNA, 60 bp, Homo sapiens
ggactcttcatctgtgttgctaagcagaccaacatttagccagacacctctatctgcaaa

SEQ ID NO: 20188 - DNA, 60 bp, Homo sapiens
ccctcagttgtgtaacatgttgcttgattctgttgaagaccctgtattccgggtgttcat

SEQ ID NO: 20189 - DNA, 60 bp, Homo sapiens
caccaggctctcacccactctgatgttttcactcctgactcctaagaagcagattggcaa

SEQ ID NO: 20190 - DNA, 60 bp, Homo sapiens
gcaaaccacttcacagtgctaggatgaagagctcacactcagggacttcgagagtgaatc

SEQ ID NO: 20191 - DNA, 60 bp, Homo sapiens
atggaagacgctgtgactttgatccacatgacctctccaagctcccaacagcctgtagga

SEQ ID NO: 20192 - DNA, 60 bp, Homo sapiens
atcatcccacagagctatggagagtattgccaagccaccactggagcacccaggtatgta

SEQ ID NO: 20193 - DNA, 60 bp, Homo sapiens
gtcccaagcatatttatgccaaggctgctgattctcagctcctcggcatatggggacaat

SEQ ID NO: 20194 - DNA, 60 bp, Homo sapiens
aggtagccctgtcttacaaccatagcctcctaccactgccccaacatgcacactgagttc

SEQ ID NO: 20195 - DNA, 60 bp, Homo sapiens
ctgagcacaaagaaggatgatcaacttcccaaaataggttgtgtctcaggaaagcataac

SEQ ID NO: 20196 - DNA, 60 bp, Homo sapiens
cctcatgtttcttggacccatcctcctcattttctcatcccaggcttctccgagatactg

SEQ ID NO: 20197 - DNA, 60 bp, Homo sapiens
ttggcttgggagttggacagagctgcattctaaccttggctgtgccaattactcgccaag

SEQ ID NO: 20198 - DNA, 60 bp, Homo sapiens
ctggcatcataagctctctcaatttgaccacatttgagcccagttcagcaaatccaaaga

SEQ ID NO: 20199 - DNA, 60 bp, Homo sapiens
agtataggaagcaaagtggggagcccttctaggagccaatggaggtcctggaaggaagtg

SEQ ID NO: 20200 - DNA, 60 bp, Homo sapiens
agagatgcagagtcatgtttccaggaggaggttatctgagcataacagggacagggtggg

SEQ ID NO: 20201 - DNA, 60 bp, Homo sapiens
gtgttggccacgtcccctcccagtttagtctaggatactgaacccagagatggacagtat

SEQ ID NO: 20202 - DNA, 60 bp, Homo sapiens
tggtagtgatggttagaggcaatgagggacggagaagttgctcccgtttcagagatgctt

SEQ ID NO: 20203 - DNA, 60 bp, Homo sapiens
aaagtaaatccagtcaacgcgagtgtgtcattccccagctatgcctgtctgcctggaatg

SEQ ID NO: 20204 - DNA, 60 bp, Homo sapiens
gctgtcatctggaaacactctgcaggttctcaatgcctacaaaagcaagcttcacaaggc

SEQ ID NO: 20205 - DNA, 60 bp, Homo sapiens
ggaatcctcttcctgaaattgctgtcttcttggatgggctctccacatcttccaccacga

SEQ ID NO: 20206 - DNA, 60 bp, Homo sapiens
atcagtaccccaactagcaagagtggcccgttcattggccgaggttcttgaggatagagt

SEQ ID NO: 20207 - DNA, 60 bp, Homo sapiens
agaagctaacggtgctcatcgtgtggcacgcaggtgcgttgttttctctccactaaggct

SEQ ID NO: 20208 - DNA, 60 bp, Homo sapiens
tctttggtatccccatctccatcttccacaacagacagtttgaacagccgcaccactcca

SEQ ID NO: 20209 - DNA, 60 bp, Homo sapiens
ccactgcgttcagctctggcggtccacagcccgaagcgcggcttaggaatgttcgtgtca

SEQ ID NO: 20210 - DNA, 60 bp, Homo sapiens
ttctgtaactgaggacgcagaaccctggacggtgatcactctgttcaaaacacatgataa

SEQ ID NO: 20211 - DNA, 60 bp, Homo sapiens
atctatctatccgtccacccatttaggtgaggcctgagagacagagtcgaggaaatgtca

SEQ ID NO: 20212 - DNA, 60 bp, Homo sapiens
acttcaaccatctaggttgaggttttccagtaattctaggtcagcaattatggaccctac

SEQ ID NO: 20213 - DNA, 60 bp, Homo sapiens
ccggtgagactcagtgaaagccatcagcaaaactacagtaatgcggcactatcaccacca

SEQ ID NO: 20214 - DNA, 60 bp, Homo sapiens
tactgagtgtatctacagtgctatggggacacctaggagaacctctaccagtctgagatg

SEQ ID NO: 20215 - DNA, 60 bp, Homo sapiens
tgtgactggtgactccaggcacgtccctgaagcttgcttccctgatttcctaaaacagga

SEQ ID NO: 20216 - DNA, 60 bp, Homo sapiens
aaagcatggcacaagtgctgagccagaggctggaagccgaggggctgagtacactacagt

SEQ ID NO: 20217 - DNA, 60 bp, Homo sapiens
gggctctatctggatttgctttatagatctgcttcatttcatgccagatttgggcaaacc

SEQ ID NO: 20218 - DNA, 60 bp, Homo sapiens
gggttctatacatggtctctcttaaggcacctttcatttcaagaaatcctgcatctttcc

SEQ ID NO: 20219 - DNA, 60 bp, Homo sapiens
cacagaggctcttgggatcaaggctgacagaagctccatctgaagacttttatactatag

SEQ ID NO: 20220 - DNA, 60 bp, Homo sapiens
ctcgtccttggaaacggagctggttgtatctaccgtgcagggatgtagagggcttaaatt

SEQ ID NO: 20221 - DNA, 60 bp, Homo sapiens
gtgcgcttggctatgccctaaaatgtcagtttattgtccctaaagacgtatttattgatg

SEQ ID NO: 20222 - DNA, 60 bp, Homo sapiens
catagaagcttgtacacaatacagcctctgtttgccagtttgagtgctttgctccatctg

SEQ ID NO: 20223 - DNA, 60 bp, Homo sapiens
tcttacactgcacccaaaatccaaccccaagtgaccacagcagtgggctacaaacagggt

SEQ ID NO: 20224 - DNA, 60 bp, Homo sapiens
gcccctctggaaccactgcacacctttccctctgttctcagattaaactgctgcataaaa

SEQ ID NO: 20225 - DNA, 60 bp, Homo sapiens
ctgataaaggaatgactagagtagtacacctacagttcttgctggccagagccaggaggg

SEQ ID NO: 20226 - DNA, 60 bp, Homo sapiens
attttcctgtgtcaactccgttctctggcctgggttttcaatacacgagaaatcacggag

SEQ ID NO: 20227 - DNA, 60 bp, Homo sapiens
gaaggctggttgattacatttaacacaggtcaatgaaagataacgaaagtccttccttgg

SEQ ID NO: 20228 - DNA, 60 bp, Homo sapiens
gagattcccctggaaatgatgtggaagatgagaggaattcagcatggtgatggagggagg

SEQ ID NO: 20229 - DNA, 60 bp, Homo sapiens
gggaatagtgtgtccttttctttgccaggttgtgtgatttctactggaaagacagcaatc

SEQ ID NO: 20230 - DNA, 60 bp, Homo sapiens
tagaacagaggagtgccgttgctcttggatggtttacgcggcaaaacagcccgagtagtt

SEQ ID NO: 20231 - DNA, 60 bp, Homo sapiens
tctccagaactggaaggaagttagaaccgggcactaaaatcctcagcagaggccttgcaa

SEQ ID NO: 20232 - DNA, 60 bp, Homo sapiens
aaccaaagatcatcttcaccttccttctcactctgcattccattggtcagcttctgttaa

SEQ ID NO: 20233 - DNA, 60 bp, Homo sapiens
gccgcaaacaaacgccaaattcttaggcatttgtgtggcttggagcacatagttggttct

SEQ ID NO: 20234 - DNA, 60 bp, Homo sapiens
cagttgaagagatgtcacaagccaagaagactggcacaaatggtagtgctaaaggagttc

SEQ ID NO: 20235 - DNA, 60 bp, Homo sapiens
ctggtcattgtctggtaagattgcacatgtacctaatccatggtccaacagtttctctcc

SEQ ID NO: 20236 - DNA, 60 bp, Homo sapiens
ggggaaaaggcgagcagaaagagagtccacagagtgcagcttctttacttggtagtgaat

SEQ ID NO: 20237 - DNA, 60 bp, Homo sapiens
gacgttgttggttagcatgtctgagacagagataaggcttatgcgtcttcacacccctgg

SEQ ID NO: 20238 - DNA, 60 bp, Homo sapiens
caccttcccttacacgctgcagcttttctgaaggctctgtactctcaccaaagagcaaca

SEQ ID NO: 20239 - DNA, 60 bp, Homo sapiens
gggtagtagactgcaaccaccatgcagccaagcaaactacagagccaagcctataacatc

SEQ ID NO: 20240 - DNA, 60 bp, Homo sapiens
gactcctgcaagcctcgctacttctactctggtgtctagaatccacctcacaggaaatac

SEQ ID NO: 20241 - DNA, 60 bp, Homo sapiens
gcttcaatatatgccttccactcaggttcctgacacagcctacattctcttttctggtta

SEQ ID NO: 20242 - DNA, 60 bp, Homo sapiens
agtaactggaatggcttttcctgatgacccagacagcctgctcaagagcacactgttgca

SEQ ID NO: 20243 - DNA, 60 bp, Homo sapiens
ccctgtagttaatgctcccctcaccttctcttggacctgtggtctgactggagtataaga

SEQ ID NO: 20244 - DNA, 60 bp, Homo sapiens
taaggatgaagaagaacaggaactctcactggtggctgatgggattgcaaagcgtcaggg

SEQ ID NO: 20245 - DNA, 60 bp, Homo sapiens
tgctgctgtttgttcccgaaactgtactgtgagcccacggcgggggcagattgttctgag

SEQ ID NO: 20246 - DNA, 60 bp, Homo sapiens
attaaacactggcaagaatgcctgtcttaatcctatccaaacgctggaagttctgttctc

SEQ ID NO: 20247 - DNA, 60 bp, Homo sapiens
gataagctaggattcagtccggttcagaggcctgaattcatgctacctatgtggtctaaa

SEQ ID NO: 20248 - DNA, 60 bp, Homo sapiens
aaaaccaagtctccaaggccctagtctgggcaaggccacaggtgctcttgcaaaactaac

SEQ ID NO: 20249 - DNA, 60 bp, Homo sapiens
caacgtgactgctgttcttcaaaccatcaggcagttcccaaaatgaagctgttgtacatg

SEQ ID NO: 20250 - DNA, 60 bp, Homo sapiens
gtatctgtcagccttccaaatactgaatagctaacagcataatgtggtcaaactaaagtg

SEQ ID NO: 20251 - DNA, 60 bp, Homo sapiens
ctttccaaatcaacctatagagttagtgcaatatcaaagtctcagcaggcaaattaactc

SEQ ID NO: 20252 - DNA, 60 bp, Homo sapiens
atcccttgtgggccccaatgggctgtgtgacctctttgagccacattctatctgaaacat

SEQ ID NO: 20253 - DNA, 60 bp, Homo sapiens
cacacacaacttctctgctacgaaaagtcttgattgattctggcctcaggatgtgaacag

SEQ ID NO: 20254 - DNA, 60 bp, Homo sapiens
ctgagcccatcttctgtactgctacaagttcctttggcaatgaccactttgctgtaaaca

SEQ ID NO: 20255 - DNA, 60 bp, Homo sapiens
ggctgtttgggaaggaggacaggatatgtcatctaacttttttccatccctagctgagtc

SEQ ID NO: 20256 - DNA, 60 bp, Homo sapiens
ttagaacccagtggagtgactgcagacagagtagatgctgcgtaagtctctaaacaaagt

SEQ ID NO: 20257 - DNA, 60 bp, Homo sapiens
gacgtggtaaaactgcatattcagagcactaagactagggactcagtatctgtttggtgc

SEQ ID NO: 20258 - DNA, 60 bp, Homo sapiens
gggtttcctacagttcccagtaccttgttaatcctgagaaattacccagtgagccaattc

SEQ ID NO: 20259 - DNA, 60 bp, Homo sapiens
tgacagcacacctccctaatctggccccacaacatggacagagtctgtgcactttaggaa

SEQ ID NO: 20260 - DNA, 60 bp, Homo sapiens; identical to SEQ ID NO: 4855

SEQ ID NO: 20261 - DNA, 60 bp, Homo sapiens
agcattcctcctttgccagctagttgaaagttaagcttcatcaatagaggacactcgagt

SEQ ID NO: 20262 - DNA, 60 bp, Homo sapiens
ggctctaatagcgaccacattggacagtgcagatctagactgtgtccatatagattgctg

SEQ ID NO: 20263 - DNA, 60 bp, Homo sapiens
tttagggcttttaggcattaaggctgggatcactgtagacccaatttgacccaagacatc

SEQ ID NO: 20264 - DNA, 60 bp, Homo sapiens
tgcttgacctgagcgttaaggatgaataactctgaactacaggacaacagatcaggcctg

SEQ ID NO: 20265 - DNA, 60 bp, Homo sapiens
gacaagggagaggctctgacagtttggactcagatcgtctatccagaaaacactggtctg

SEQ ID NO: 20266 - DNA, 60 bp, Homo sapiens
gaagtgaacctttaaggctgtggacaatgcaaactccctcatgtaccttgctccttgcca

SEQ ID NO: 20267 - DNA, 60 bp, Homo sapiens
gtgggagatatccagaacctgttttacactgggctcctactgtgtttggtgatcagaaac

SEQ ID NO: 20268 - DNA, 60 bp, Homo sapiens
ctgtttgtgacatgaagggtgtggggatgacagagatggcattgttagatgggttaaata

SEQ ID NO: 20269 - DNA, 60 bp, Homo sapiens
actggtgtatgtgtgtgtctttcccaagttggagtgggagtgcctttgacatgggactgt

SEQ ID NO: 20270 - DNA, 60 bp, Homo sapiens
gtatgggtccatgtgtgaggaagtcttcaccatccctcttacgctgtgtcaacctgttga

SEQ ID NO: 20271 - DNA, 60 bp, Homo sapiens
cttacctgagactgggcctgaagggagagtttcagttcttcattgacggttgctttcaag

SEQ ID NO: 20272 - DNA, 60 bp, Homo sapiens
ctctaggaaagccccaagtttgattctgatacaagaagggtagaaagtggagatgggagc

SEQ ID NO: 20273 - DNA, 60 bp, Homo sapiens
tgtgaggcaaaccaagacatacagagacagagaggcagacaggcacatacacggaatagc

SEQ ID NO: 20274 - DNA, 60 bp, Homo sapiens
caactgaattccaactttagtgagccatgacagatactgaaatgaacttacaagaaatgc

SEQ ID NO: 20275 - DNA, 60 bp, Homo sapiens
tttctagacaaggaaggaatcaccagtagcactgctgggctatgggtaggtgggcaacta

SEQ ID NO: 20276 - DNA, 60 bp, Homo sapiens
gtgccaagagttgcaagattgagatcactttgggattatgactgttgccccattgtgctg

SEQ ID NO: 20277 - DNA, 60 bp, Homo sapiens
ggagacacagactgtaaatgagtaacaggaaaacattcctatagctgtaattgctaggtc

SEQ ID NO: 20278 - DNA, 60 bp, Homo sapiens
ccctgcaaagagcattgccatccattcaaaccagattaggtaaattgacaaccaggaagc

SEQ ID NO: 20279 - DNA, 60 bp, Homo sapiens
gcaggttcacctgttaaaattccagtcactttatgtatagtcagccttcacacaatcttc

SEQ ID NO: 20280 - DNA, 60 bp, Homo sapiens
tttattcccccattttaggatgtaggactaaggtctttgaggactggtctgctcctagga

SEQ ID NO: 20281 - DNA, 60 bp, Homo sapiens
cacaaccttcctcagacctagccttacgatccaggatctcttcctacagcaatgcaccaa

SEQ ID NO: 20282 - DNA, 60 bp, Homo sapiens
cttacatatggttacagaggcatgttatcagggtccttccatcttgccacactaacactt

SEQ ID NO: 20283 - DNA, 60 bp, Homo sapiens
gccttcgaggaagaatcagataagccatcagcagtaattgcagtacctggcatagaaggg

SEQ ID NO: 20284 - DNA, 60 bp, Homo sapiens
atccatctcagtaggaacttgagggaaggttgagggaactttagggaaggtttccagttc

SEQ ID NO: 20285 - DNA, 60 bp, Homo sapiens
ttttggctgtttctcatcatctcatggaaaggtgggcagggatcagggtgccacagaacc

SEQ ID NO: 20286 - DNA, 60 bp, Homo sapiens
cagccagcaggtgagaaatgagatcagctaggatactagcatggctaagcatctctctcc

SEQ ID NO: 20287 - DNA, 60 bp, Homo sapiens
caggccctgatatacttcctaggcactagggaaacaagcagactagaagttcccattgat

SEQ ID NO: 20288 - DNA, 60 bp, Homo sapiens
ttactcacatgccaaggaaaatggcacggaagacccacgtgtagccacagcagagtctat

SEQ ID NO: 20289 - DNA, 60 bp, Homo sapiens
ctgctgactcctctcacgctttcaagctacagtgcttcccatcacattgcagaaggccgc

SEQ ID NO: 20290 - DNA, 60 bp, Homo sapiens
taacagattcagggcctcatcctttgactcggaaccaggaaggaattaggagcgagtcct

SEQ ID NO: 20291 - DNA, 60 bp, Homo sapiens
ccctgacatcagaggtaagagcatctggaagtgagggtaggagctgggttggaaacttaa

SEQ ID NO: 20292 - DNA, 60 bp, Homo sapiens
cacttttgtggaaattgagcaaaggtgagagataaaatgatgtgatcaggctgggtgcgt

SEQ ID NO: 20293 - DNA, 60 bp, Homo sapiens
ttctggtgaacctggttctctttgtggtgggcatactgggtaggagaatcacccaaaggt

SEQ ID NO: 20294 - DNA, 60 bp, Homo sapiens
cctctccacttacatgtcccaaatacgtggacacctaaggatgcctgtacctgcctaaac

SEQ ID NO: 20295 - DNA, 60 bp, Homo sapiens
agctggaactagaaactcatgcctctcaatccagtgttctttccactgtaacagattggc

SEQ ID NO: 20296 - DNA, 60 bp, Homo sapiens
ttcggagagcaggcaataggagtaaaggtgaggaactggagaactagctgagtgcagaag

SEQ ID NO: 20297 - DNA, 60 bp, Homo sapiens
ttttgtgcggcaaaagcacagaatgccaggtaagggcctagaaggctaaagcagtaaaat

SEQ ID NO: 20298 - DNA, 60 bp, Homo sapiens
ccaggattcaagtccaaagagccccagcccaaagcttgtactcttggccactcttgtata

SEQ ID NO: 20299 - DNA, 60 bp, Homo sapiens
gcttaaggtttggctatcatggtgagaactcctatgtaccctgctcaggtcctggtaaac

SEQ ID NO: 20300 - DNA, 60 bp, Homo sapiens
ggggtgcagactcaggagatcttagctcaggagcagacttagcctgacttcctcttttat

SEQ ID NO: 20301 - DNA, 60 bp, Homo sapiens
gataaggaggctactgcccaatggctgatgtttgtgaatgaagctgtatgcagatgggca

SEQ ID NO: 20302 - DNA, 60 bp, Homo sapiens
caccaatgtggaacaaatggagtgatctgttatcccctgggtttagacgctgcctttcta

SEQ ID NO: 20303 - DNA, 60 bp, Homo sapiens
cttcggtcctcgaactaagcaaggtatggaacactgaagtgccttcaatggtcaggaaag

SEQ ID NO: 20304 - DNA, 60 bp, Homo sapiens
tgaaaggtgaggcacaatctgggactgaatccatcatctagcctttagagtgcccttccc

SEQ ID NO: 20305 - DNA, 60 bp, Homo sapiens
ttactttacgagccctgagggagcgtcttggtgagttcctgggtgaagatgctattgcag

SEQ ID NO: 20306 - DNA, 60 bp, Homo sapiens
tccaatgtgatccatagtacacagtcatgtgggagactcaagagaaagctccttcctggt

SEQ ID NO: 20307 - DNA, 60 bp, Homo sapiens
acgtggtggtgtctgccgcaggccatagggatccagcccacttaggcagtcccttgggga

SEQ ID NO: 20308 - DNA, 60 bp, Homo sapiens
gttgctggaggtgacaaggattgggtcccacataaagcagtcaggaatccacatggtgta

SEQ ID NO: 20309 - DNA, 60 bp, Homo sapiens
tggctgctgcaacatcagaatccactactgtagagcctggcaagctggatgtgggagcca

SEQ ID NO: 20310 - DNA, 60 bp, Homo sapiens
aagctggaacacgctcagagccggatcctgtccctggaaagccagttagaggactcagct

SEQ ID NO: 20311 - DNA, 60 bp, Homo sapiens
cccaccttggcagggttattctatggagtatatgggttaaaacaaggatttggccaggtg

SEQ ID NO: 20312 - DNA, 60 bp, Homo sapiens
atcaagagccaaccagtctccaaacctgagtctcgagcatccactagcacatctgtcagt

SEQ ID NO: 20313 - DNA, 60 bp, Homo sapiens
gcttagtaaagccactatggacctcacgtatctaaacccttccctgaaatgcatctctct

SEQ ID NO: 20314 - DNA, 60 bp, Homo sapiens
atttgtgagaaaagatactgatcgccaatatttcaaataccgtcttgcaatgtatagttt

SEQ ID NO: 20315 - DNA, 60 bp, Homo sapiens
acttagagaactgtggacggtggaaagtcttatcatgaccaggccatccttcgctggggt

SEQ ID NO: 20316 - DNA, 60 bp, Homo sapiens
tagcttgaatctgtgcgacttatgccacacagttagaggagaggcctgcagttctggaga

SEQ ID NO: 20317 - DNA, 60 bp, Homo sapiens
ggagtgtaatggttgttgctgttactgtcatcatcaactttagggaccttattgtggaca

SEQ ID NO: 20318 - DNA, 60 bp, Homo sapiens
cgcccaggaactgtcattttccagttaccagaatctgaatcattgtctaatgtgccacgt

SEQ ID NO: 20319 - DNA, 60 bp, Homo sapiens
gggtctccagtcatacagtgtaaaacactcctaacctctgtactttcctctgcagtgcag

SEQ ID NO: 20320 - DNA, 60 bp, Homo sapiens
ttagaaacaagttgctcctcagagctctcaagcagggactgctctttaggaaggggagca

SEQ ID NO: 20321 - DNA, 60 bp, Homo sapiens
gagaatttgcttggtcagtaggtcagcattcaagagtatgggctggatgcagagtaaacg

SEQ ID NO: 20322 - DNA, 60 bp, Homo sapiens
cacccagcagcgcaactgtcaacttgcagaggacttcagtggtatcagtagtgttccttt

SEQ ID NO: 20323 - DNA, 60 bp, Homo sapiens
ctagctttctgctcctttgctctgccactttcatgttctctagacgtgctggaactccag

SEQ ID NO: 20324 - DNA, 60 bp, Homo sapiens
gatgcattgaggtcatactgtgagaaaatgtctttagggtatccctccaaaataggagcc

SEQ ID NO: 20325 - DNA, 60 bp, Homo sapiens
tatctggtaccttgctggaatagtgagctggggagatgaatgtgcgaaacccaacaagcc

SEQ ID NO: 20326 - DNA, 60 bp, Homo sapiens
agcctgtgtgtgtgacagaacagcctgtgcgtgtgacaggacgtcaagaactacatacaa

SEQ ID NO: 20327 - DNA, 60 bp, Homo sapiens
cactccttggcttcctttcctagatagtgacgtccaccaaccttggaggtgccttttcaa

SEQ ID NO: 20328 - DNA, 60 bp, Homo sapiens
tccttcttgtttgctatggtaatgcgggcctaaaacagtgcctggctcagagcgagtatc

SEQ ID NO: 20329 - DNA, 60 bp, Homo sapiens
ggtcccagaaaggtggttcccatttacctgcccgaaggtaattcacccttactgatactg

SEQ ID NO: 20330 - DNA, 60 bp, Homo sapiens
tgagtaacttgtggactttgtcgtctggccagtcatgcaggatccggcacaggacgtaca

SEQ ID NO: 20331 - DNA, 60 bp, Homo sapiens
cccgtacagcagctgtcactgagatactgcctcatgacaaacctagaactggctagtgaa

SEQ ID NO: 20332 - DNA, 60 bp, Homo sapiens
cagtaacgacaccatggcgagtggctggagagcatctagtttccacttcgattctgaaga

SEQ ID NO: 20333 - DNA, 60 bp, Homo sapiens
catgagcagtgagcacagtctgcattcatcatgaaacactatcttctaccaggaggaggt

SEQ ID NO: 20334 - DNA, 60 bp, Homo sapiens
gccatgctacctccctgaattcccaggattgtgatgcaaggtctaatgcagtagttctcc

SEQ ID NO: 20335 - DNA, 60 bp, Homo sapiens
gacccggtctggggagtcacgattggggtgggagatgagcaaacctgctgaataaagtta

SEQ ID NO: 20336 - DNA, 60 bp, Homo sapiens
atgtctctaaatgccccattcatgcagccgcagaagcaggccaactgttgattctgaagg

SEQ ID NO: 20337 - DNA, 60 bp, Homo sapiens
cccatgcaaccgccattacagacatagaaactttccaacatcccagaaggctccctcata

SEQ ID NO: 20338 - DNA, 60 bp, Homo sapiens
ttatcacaccataccaaggtaatcatcagcaggtctaggcctgatcatgtctctaggcct

SEQ ID NO: 20339 - DNA, 60 bp, Homo sapiens
gcacaatgctccttctgcctctcagatgagacacaaggcccttgctatggtgtaaatgct

SEQ ID NO: 20340 - DNA, 60 bp, Homo sapiens
gcaagaaggaatggtcaaactgtgggaagtcagagttaggttgcgaactatctacgcagg

SEQ ID NO: 20341 - DNA, 60 bp, Homo sapiens
gcccatgtcatccgaatcatttgctgtttctagcctaggtgctttgactatgccagcttg

SEQ ID NO: 20342 - DNA, 60 bp, Homo sapiens
ataactcaagctggtgctgataaagtcagcaaaaggccagatgctgcagccttataaact

SEQ ID NO: 20343 - DNA, 60 bp, Homo sapiens
ctgcatcagtcccaatgaccccacttcccatcctttactctctgagatctggatttgcct

SEQ ID NO: 20344 - DNA, 60 bp, Homo sapiens
cagctctggagtgcacagaaaatcaagcaggctattctacatccggacaccaatgagaag

SEQ ID NO: 20345 - DNA, 60 bp, Homo sapiens
aatgggcttcccagaagcagccttgttcatctccatggttccaatctggcaaggaatctc

SEQ ID NO: 20346 - DNA, 60 bp, Homo sapiens
cagatggaagaaggctttccttggggtttgaagaggaagccagttgtgggagtctctttg

SEQ ID NO: 20347 - DNA, 60 bp, Homo sapiens
ggagtagcaaggaagacacctaattccagtctcagatccagtggtatgagctgtgagagg

SEQ ID NO: 20348 - DNA, 60 bp, Homo sapiens
ctggacctttttgaaggacgcgtttggcttagaggaggaataaccatgccagttttggtc

SEQ ID NO: 20349 - DNA, 60 bp, Homo sapiens
gtgtgggacattgggacttggttgcattgctctaaccagcaagaagcttgggtatcagct

SEQ ID NO: 20350 - DNA, 60 bp, Homo sapiens
cccctaaactccaacccttcttatcaggactacagagagaaaacaggtggtcttcttgac

SEQ ID NO: 20351 - DNA, 60 bp, Homo sapiens
gctgagacgatgccctccacgccgctcttaaggtagtactgtaatgtaggattcacgtaa

SEQ ID NO: 20352 - DNA, 60 bp, Homo sapiens
gcctttgtctctatgcttctaaaatcgctcatgcttagttgtggtatggatgtcttccgc

SEQ ID NO: 20353 - DNA, 60 bp, Homo sapiens
atcttagtcaggagtaagctctgtgcgagagatctgtgaataaccagataaccccagctg

SEQ ID NO: 20354 - DNA, 60 bp, Homo sapiens
aaagcgccagtaaaccatcggatcaattggaaagaaggcaactcttcagcctttgttatc

SEQ ID NO: 20355 - DNA, 60 bp, Homo sapiens
gtgtatctcttgtttacagccccagtgtcctcttgtaaaacccatgcaaaatgggattct

SEQ ID NO: 20356 - DNA, 60 bp, Homo sapiens; identical to SEQ ID NO: 4855

SEQ ID NO: 20357 - DNA, 60 bp, Homo sapiens
aggtgcatgtgctcagctgtcttgtgtcacccaaagtcagctagaaatgggagacccagg

SEQ ID NO: 20358 - DNA, 60 bp, Homo sapiens
tctgggtttgactccagactccggtcgtacagcctggcagagggaccaggaatgtgaact

SEQ ID NO: 20359 - DNA, 60 bp, Homo sapiens
ggttaaagcaggaggatgaagatggcagaggttggaatggcattgtgccaaaaccatggg

SEQ ID NO: 20360 - DNA, 60 bp, Homo sapiens
agatgcaggctctgtttgcagattatggcccagagtctctgcttgtgggtgcttgatcca

SEQ ID NO: 20361 - DNA, 60 bp, Homo sapiens
agcctcaggcaagggcaggcctctccttcatgtccagcagacagcatctactccttattt

SEQ ID NO: 20362 - DNA, 60 bp, Homo sapiens
cactgctcacctggtgactaggtcttctcagccagatcagttcatgtgctctggtgtttt

SEQ ID NO: 20363 - DNA, 60 bp, Homo sapiens
gggtctacgtggctttattcatttgcgcgcagattctcattggaatgggctccacaccta

SEQ ID NO: 20364 - DNA, 60 bp, Homo sapiens
gaacttggagccagaacaatctgagtttcaggccagggtctacagaatgggagcacttca

SEQ ID NO: 20365 - DNA, 60 bp, Homo sapiens
gtgaggatgagggacttagggtggaaaccttcacaaggaccactgagaatatgttggtcc

SEQ ID NO: 20366 - DNA, 60 bp, Homo sapiens
ggtggtgcatggcgtagatcaccttctcagttgatgctgtacaagctgaagcaatggata

SEQ ID NO: 20367 - DNA, 60 bp, Homo sapiens
gaagtactcacttgcccctattactatatgccctacccaagaaatggtagacgataccat

SEQ ID NO: 20368 - DNA, 60 bp, Homo sapiens
ggggtctcatgcttacctatttctctgtgccagtatagtagacctgttttcaagcctggc

SEQ ID NO: 20369 - DNA, 60 bp, Homo sapiens
atggactgctatcgggccatggtctgtctgttagaaaccatgagccctatcgggtcacag

SEQ ID NO: 20370 - DNA, 60 bp, Homo sapiens
gccacctatatgccaggcacctctatgctaacttctactataagagagaatgggagagag

SEQ ID NO: 20371 - DNA, 60 bp, Homo sapiens
aatacttagccaggcttgtactgagcctaacaatcaggcccaaaagcgtagggtctttgc

SEQ ID NO: 20372 - DNA, 60 bp, Homo sapiens
ctagggcagccatgacagtctcacagatggagaggcttgaaaacagacatttatgctgcc

SEQ ID NO: 20373 - DNA, 60 bp, Homo sapiens
tgacatgagcccagagtggtacacagaaccctgttcatagttagactcagggcactgagt

SEQ ID NO: 20374 - DNA, 60 bp, Homo sapiens
ctctaacagggccagcagcttccagtcacttctgtcccttaccttttctccagtctcatt

SEQ ID NO: 20375 - DNA, 60 bp, Homo sapiens
ttcccgatcttggtttctggacccagctctggaaaagaagccagatcctagccacttgga

SEQ ID NO: 20376 - DNA, 60 bp, Homo sapiens
aactgaaggtaggtcctgggtcctgggtgtcacaaagagcatacccctgcttctgggagg

SEQ ID NO: 20377 - DNA, 60 bp, Homo sapiens
ccttgaagcttctgctgctaaacatggtcaggtgaacccactgccagctgtgcccagaag

SEQ ID NO: 20378 - DNA, 60 bp, Homo sapiens
actgctcctccaggctgtatagacctgccctcttgcattaaacaacttctcttgagctgc

SEQ ID NO: 20379 - DNA, 60 bp, Homo sapiens
tctgccacatggcctccagtgaactgtagactcctgcatagccttccaaagttcttcatt

SEQ ID NO: 20380 - DNA, 60 bp, Homo sapiens
gccactgcattcccgcttaagtgccaggattgtgtcagcaacaggatggcctaaacaatc

SEQ ID NO: 20381 - DNA, 60 bp, Homo sapiens
ctgtggtctcagtagagaggtgacaaatacgtcttgacctgttcttgcctgaggaaaacg

SEQ ID NO: 20382 - DNA, 60 bp, Homo sapiens
cagagttctaacgtggtgtgtcatcacaagacacatgccagagagaagccctaccagtgt

SEQ ID NO: 20383 - DNA, 60 bp, Homo sapiens
acatgtgatcttccagcgaagggaaggattcagtaggaatgtgccacaaggctggcaggt

SEQ ID NO: 20384 - DNA, 60 bp, Homo sapiens
ggaactgtgactacgaagtatgtagatggagatgtgcagaaggatccagagacttagagc

SEQ ID NO: 20385 - DNA, 60 bp, Homo sapiens
ctgtgctgaaaacctttgaacctcacggtgtcctgatgaaggaagcagaggaagtcttcc

SEQ ID NO: 20386 - DNA, 60 bp, Homo sapiens
gcagacttggcaagaacctctggttcacattttcatccaaaggctcgattttccccacta

SEQ ID NO: 20387 - DNA, 60 bp, Homo sapiens
gaactcagatggggttcatgtgggattctgggagctttctgggaattcagttggagtcaa

SEQ ID NO: 20388 - DNA, 60 bp, Homo sapiens
ccgtaatcagacacctggcacacactcatgatgtcacttattcctcccaacaaccctgca

SEQ ID NO: 20389 - DNA, 60 bp, Homo sapiens
atagcaatacctgtgagctctcagactggcagtcagaaccctgctgaaaggattagcgcc

SEQ ID NO: 20390 - DNA, 60 bp, Homo sapiens
aagagtcaaggaacgcttccaccaactattcctgccattccagttgggagggttgtctga

SEQ ID NO: 20391 - DNA, 60 bp, Homo sapiens
tcaccagccatcctaactccatcggccaccttcctaattccttagcttctacgccactaa

SEQ ID NO: 20392 - DNA, 60 bp, Homo sapiens
ctgcacactgcaccacatgaagggaaaagcaggtttctgttcccacatggaatacacggt

SEQ ID NO: 20393 - DNA, 60 bp, Homo sapiens
ttcatttgatgagcatttcacatgcatcctctgagctagaggcactgcagggagctctag

SEQ ID NO: 20394 - DNA, 60 bp, Homo sapiens
tcatgaatgagcctttcctgttgatggaggaggctccaggagggttttgacggatttaaa

SEQ ID NO: 20395 - DNA, 60 bp, Homo sapiens
tcagactgatcctggtaacgatactccatggctgcatgaagatgctggaggcatcaagtg

SEQ ID NO: 20396 - DNA, 60 bp, Homo sapiens
cctgtaaaggcatgagggataccgtggtgaatatagcagtcatgacagacagggagcctg

SEQ ID NO: 20397 - DNA, 60 bp, Homo sapiens
ggtacttgcgcctcacgtttagaaccagggtagatttggagactcctgggatcttttgac

SEQ ID NO: 20398 - DNA, 60 bp, Homo sapiens
agtgtatgactggccaagctcagataacaggctcacagccaggctataccaggagctggg

SEQ ID NO: 20399 - DNA, 60 bp, Homo sapiens
caatatgcaacttatgggtcacctcccgtgtgccactcatttctagatgtaggaggccct

SEQ ID NO: 20400 - DNA, 60 bp, Homo sapiens
ccctggactgggctgtatttggaatgagtggtcatatcagcttctagtgagttttcacac

SEQ ID NO: 20401 - DNA, 60 bp, Homo sapiens
tgctttgcccctaccagctgtcctgagggctgaaggatcatgggtgccaagtctctgcat

SEQ ID NO: 20402 - DNA, 60 bp, Homo sapiens
ggtacattttcccacccgtactcttgaaaccatttcctccactctttatggcccatcact

SEQ ID NO: 20403 - DNA, 60 bp, Homo sapiens
ttatgggaccctctcaatgaggggatctctgctgtctctagcaccggaaagatgctttct

SEQ ID NO: 20404 - DNA, 60 bp, Homo sapiens
tagaaataccggaacaaagtgcagatgaacacctttgtcccaaggggcctgggccatgct

SEQ ID NO: 20405 - DNA, 60 bp, Homo sapiens
aactcacaaagcaatgcttggagcaaaactcctgagctagacagcacagcagcacccatc

SEQ ID NO: 20406 - DNA, 60 bp, Homo sapiens
ttgcccatcacagtgatacgtgcttagagagtaagcttctgggccgctttcttagacggc

SEQ ID NO: 20407 - DNA, 60 bp, Homo sapiens
atccttgagccgagaggtgaacacagacctaggggagctattgaatgggcgtatagtaca

SEQ ID NO: 20408 - DNA, 60 bp, Homo sapiens
acccaggatagaagctttacctcaccaggacagactctgattggctgagcaaacccaagg

SEQ ID NO: 20409 - DNA, 60 bp, Homo sapiens
ccttcaacaaggtcccttccctgagagactcagtttgtgacgcttgtgattgtgaagctc

SEQ ID NO: 20410 - DNA, 60 bp, Homo sapiens
cgaagtatgtgttccaaactttccacggttccaaactgagcgcttccattaagagaagcg

SEQ ID NO: 20411 - DNA, 60 bp, Homo sapiens
aagcgactctgagccaagagtacgaacctgtaagtggagtggtggttggcccattagaaa

SEQ ID NO: 20412 - DNA, 60 bp, Homo sapiens
caatggaacgccatgctgggctacttgtcagcgctgtgccaggcttgtgcctatcctggc

SEQ ID NO: 20413 - DNA, 60 bp, Homo sapiens
ataatggaagcctaaagagagtgtggatcttggggagcaatggctttgctgttggggagg

SEQ ID NO: 20414 - DNA, 60 bp, Homo sapiens
tccaagccccactggtctttgcaagctgtacgttgtaggcaatctgagaactggaaaggg

SEQ ID NO: 20415 - DNA, 60 bp, Homo sapiens
cactgctcagaaaggacaaagacattcgaagactgcgggactttcaggaagtggaactca

SEQ ID NO: 20416 - DNA, 60 bp, Homo sapiens
tagctttagttgaggccactgctgctcttagcttctctggcccatctatgcttctagatg

SEQ ID NO: 20417 - DNA, 60 bp, Homo sapiens
ggtctgaatctccctgcaactttgtgatgacctcctttggcctgttctgttcagggcttt

SEQ ID NO: 20418 - DNA, 60 bp, Homo sapiens
attctgattccttactccccgtcagaccataatctgagagaaacctcataacctggccac

SEQ ID NO: 20419 - DNA, 60 bp, Homo sapiens
gcactgatctgtggtgtgctgtagtggccaatctgagtccccagttagtgtgaaatagac

SEQ ID NO: 20420 - DNA, 60 bp, Homo sapiens
tagcaaccctagctcctctttaatctcaagaggcaagaggtactcgatgaaccacatgct

SEQ ID NO: 20421 - DNA, 60 bp, Homo sapiens
tgctcagtctgtggcttgtggccagctgttcctctgtggggtctatgttggctgtgttaa

SEQ ID NO: 20422 - DNA, 60 bp, Homo sapiens
ttcaggcaactacacatctgagttctctgcttgttactagagctcatggttgctggctcc

SEQ ID NO: 20423 - DNA, 60 bp, Homo sapiens
aaagagcgtatgttttcccccgaagtcggtttctaatgactatccagtaatggagttgtg

SEQ ID NO: 20424 - DNA, 60 bp, Homo sapiens
cctggattaatgagctagcccctgatctcatgggagattctttctcatctttctgctgcc

SEQ ID NO: 20425 - DNA, 60 bp, Homo sapiens
tttcgggtagtgggtactgtctcctggtatcgacaaccaaatggagacccctcatatcca

SEQ ID NO: 20426 - DNA, 60 bp, Homo sapiens
tcctacaagactgagcagagtgggagaaaagcaagcaatggatttgagggcaagcagtcc

SEQ ID NO: 20427 - DNA, 60 bp, Homo sapiens
ctgccttgacgcgtttgaatgcaacatgagctgcccttattgtgtggttctcacagtgtc

SEQ ID NO: 20428 - DNA, 60 bp, Homo sapiens
cccaagctgtgatgctgttaagggctgaaatgtgtctgctgaagtcctaaacctgcaaac

SEQ ID NO: 20429 - DNA, 60 bp, Homo sapiens
ggcggtgtgtccgcatcagagttcaggtcgttcattgtgaatggatggtgcatcttttac

SEQ ID NO: 20430 - DNA, 60 bp, Homo sapiens
ttacctgtgcactctcctagtacgtgcctcttcagaccaagcagaggggaatttgtgcaa

SEQ ID NO: 20431 - DNA, 60 bp, Homo sapiens
ctctacacagatgctaaccctactaagggcagagaccagctttcaaagtcagttcattct

SEQ ID NO: 20432 - DNA, 60 bp, Homo sapiens
agaggctgcacacttatgtaccacattagactcaccaccttctcaatcctagggccatgc

SEQ ID NO: 20433 - DNA, 60 bp, Homo sapiens
ggagccaagtgcaagagcagaagctgaggacaagggtttccagaagtcttgatgaagact

SEQ ID NO: 20434 - DNA, 60 bp, Homo sapiens
gcagaggaactgtcacctttctcagggtaggctactatacttctcttaatgcagcctgag

SEQ ID NO: 20435 - DNA, 60 bp, Homo sapiens
aggaattggcacactatctgttggctaaagccatcttcctgtctacttaccttatctgtt

SEQ ID NO: 20436 - DNA, 60 bp, Homo sapiens
atgtgacttatctcacagatgtggaaggtagatgtgatcttccagcattcaattcagggg

SEQ ID NO: 20437 - DNA, 60 bp, Homo sapiens
caagggcactgtggacagaaattggatttgcagagttagtgtaggtcttggttctacctc

SEQ ID NO: 20438 - DNA, 60 bp, Homo sapiens
ccaaaggctattgttcaacgaatggtgctgagacaactgcaaaagactaggacccttacc

SEQ ID NO: 20439 - DNA, 60 bp, Homo sapiens
catgcttggctcactcccctcattagagcacatcttccaggacacacatctgtccatatc

SEQ ID NO: 20440 - DNA, 60 bp, Homo sapiens
tcagcataatgtagtgggaagtcaggagggttctgcagtatctgtgggaaggacccatca

SEQ ID NO: 20441 - DNA, 60 bp, Homo sapiens
caagcaaggtgaggtgcctacattttcccatgcaagtgccccaatctgtccctgagaatt

SEQ ID NO: 20442 - DNA, 60 bp, Homo sapiens
ggctgaagggcttttccagtatatccctagtactacaaagtacgttttggagtcagacaa

SEQ ID NO: 20443 - DNA, 60 bp, Homo sapiens
acagcatccctcagtagcaggctgtgaagtatctgacctgtgttatcagtagacggtctt

SEQ ID NO: 20444 - DNA, 60 bp, Homo sapiens
gagccttgggaccaaatgaagtgactgccagtgcaagtcatctgaggctttaagctgctt

SEQ ID NO: 20445 - DNA, 60 bp, Homo sapiens
accatgtataaaagagatatgtactctcccatatccattgcagatttactcacaacagtg

SEQ ID NO: 20446 - DNA, 60 bp, Homo sapiens
atgccatccacaggaagtgctgggcttcggaactcactgaaaagccatcagacacagtgt

SEQ ID NO: 20447 - DNA, 60 bp, Homo sapiens
tcctgtgtgggtggaaaagtgaggacccagtggagcaggtagacaaagatcagttcaaca

SEQ ID NO: 20448 - DNA, 60 bp, Homo sapiens
atcactctgatccacatcagtcccgttgtgatgaagtttgctgagcacagagccggtgat

SEQ ID NO: 20449 - DNA, 60 bp, Homo sapiens
aggcatcatgctgttggcttatgattggagatcgcagactgccgaggtataaggacagca

SEQ ID NO: 20450 - DNA, 60 bp, Homo sapiens
taagctgcttgaggctagggaggcttttaccacgtgcctgagaggcagttgttggttata

SEQ ID NO: 20451 - DNA, 60 bp, Homo sapiens
gctgtcagctggaataattgcgtactcatacaacaggagttaggttagaactgctattat

SEQ ID NO: 20452 - DNA, 60 bp, Homo sapiens; identical to SEQ ID NO: 4855

SEQ ID NO: 20453 - DNA, 60 bp, Homo sapiens
ctggaggggtgaatacagaaatgtccagatgccaatagctgcagaatatgcagcaatgga

SEQ ID NO: 20454 - DNA, 60 bp, Homo sapiens
agtgcctgaacccactaagtgtgcactgaatgtggtattaccagagaatacagcaccacc

SEQ ID NO: 20455 - DNA, 60 bp, Homo sapiens
gccaccgtgagacacagaaagtgtgagactgggacagggtgtgagattgagagagtttaa

SEQ ID NO: 20456 - DNA, 60 bp, Homo sapiens
gccaggagtatttgtgccatgcctgctcagagccgctatggacaagctcagtttgttagt

SEQ ID NO: 20457 - DNA, 60 bp, Homo sapiens
actggtgaaagactaggcaccttgccctgtgactcctctctagaaccctgcagactttta

SEQ ID NO: 20458 - DNA, 60 bp, Homo sapiens
ctggccactcatcttcattacaggttaattctcacaacctccaggtgtggtatgcagtgg

SEQ ID NO: 20459 - DNA, 60 bp, Homo sapiens
cagaacccctccaagtcactggccaactatgactcatgtttggtgatgttggatgccagt

SEQ ID NO: 20460 - DNA, 60 bp, Homo sapiens
gcgtctgtctccctgacctgaatgacaactaacatagcccttgtttccttcttggtcccc

SEQ ID NO: 20461 - DNA, 60 bp, Homo sapiens
gtaccaacagagtccatgcgaaaagttgagaaaatgcccacaccaagttaccttgttgtg

SEQ ID NO: 20462 - DNA, 60 bp, Homo sapiens
tgaccgagtggatttaggcttggaatataaggcagcatttgaaaatcagtcaatgtaggg

SEQ ID NO: 20463 - DNA, 60 bp, Homo sapiens
gatgagagtagtgtggaggggcaaaagagggcttaccaagagggcatcaggaaacctttg

SEQ ID NO: 20464 - DNA, 60 bp, Homo sapiens
cctactctggtagtcagctttgtttggtctagggtgggtccaggactcctcacttttagt

SEQ ID NO: 20465 - DNA, 60 bp, Homo sapiens
atgacatgcagcatgagctgtgcactagttgtggagaatacgactgcctgttggtccacg

SEQ ID NO: 20466 - DNA, 60 bp, Homo sapiens
aaagaaaccctgtcctgcggagtctgtggttctggaagggctcactgggaatcttcgttt

SEQ ID NO: 20467 - DNA, 60 bp, Homo sapiens
cagtgtgaggcagacaaagcatatctgtgggttacatttggccctaggccagcaatttgg

SEQ ID NO: 20468 - DNA, 60 bp, Homo sapiens
ggtacctacacatggttgaaatgttaaccctgtactttgctgcttagcaagactgctgta

SEQ ID NO: 20469 - DNA, 60 bp, Homo sapiens
ggacttctctaggtgagatttgatgcttgcttatctagggtgatgtgtgtggaaatgggg

SEQ ID NO: 20470 - DNA, 60 bp, Homo sapiens
caactcagggtgttcaggcatagagacagacatatagatgaacagaactgagagtctgga

SEQ ID NO: 20471 - DNA, 60 bp, Homo sapiens
tttcattatctgagttcccagagacctccctgattggttgcctgtctgacccacagctgt

SEQ ID NO: 20472 - DNA, 60 bp, Homo sapiens
ccccatagagtgttgatgatggtttgaattgagtcactttctgtcactttctgggagcca

SEQ ID NO: 20473 - DNA, 60 bp, Homo sapiens
ctccacactcaccacaattgcaccctccttcacttcctttccatcctttgaactcttgcc

SEQ ID NO: 20474 - DNA, 60 bp, Homo sapiens
gtggcacccatggtatgtcccattcatgcagtgcctttccagcctcttccagaaagaatt

SEQ ID NO: 20475 - DNA, 60 bp, Homo sapiens
ggattccctcatgattcctctgagtgacaatgtgatgttggccgactgtgtcttcttcag

SEQ ID NO: 20476 - DNA, 60 bp, Homo sapiens
gcagagccaagagtaaacctggatttgcccaactgccaagcccagactccgaattactgt

SEQ ID NO: 20477 - DNA, 60 bp, Homo sapiens
aaatgcccacatccattctactaacatggcatctactaacgtggcatctactaggatgcc

SEQ ID NO: 20478 - DNA, 60 bp, Homo sapiens
cagggaaccaaatgatctcagagtatctggttggtgtcttgtctccctcagaaatgttgc

SEQ ID NO: 20479 - DNA, 60 bp, Homo sapiens
ctgttagcgatagctcctcagaaagtgaggaagatgaagaaccacctgaccatcgtcagg

SEQ ID NO: 20480 - DNA, 60 bp, Homo sapiens
ctatttgtgcctcatcacaggtagaccggcatgttttgccacaatagctgcgagttcaaa

SEQ ID NO: 20481 - DNA, 60 bp, Homo sapiens
ggatacactcaacggccctttatatgcttccttcattttggagcaggttcctctgctgtg

SEQ ID NO: 20482 - DNA, 60 bp, Homo sapiens
gagagctccagacccagacagtgagacttcagaacttcatagatgtcaaagcatctttga

SEQ ID NO: 20483 - DNA, 60 bp, Homo sapiens
gcacagtttcagttgcccagcagtatcattaaatcctctggagtgattccagtcccacaa

SEQ ID NO: 20484 - DNA, 60 bp, Homo sapiens
cgttaggtatgtagaggtagatactgaattaagctcctttgggtgtcacttcatatgctc

SEQ ID NO: 20485 - DNA, 60 bp, Homo sapiens
gttggtgtccagtgctagagcaaggagtttcagctttagttaggaagcaatggggagcca

SEQ ID NO: 20486 - DNA, 60 bp, Homo sapiens
tgtgggattaggggtcagtgtaggaccagggtcagagatcaaggggagaatcacgcaaaa

SEQ ID NO: 20487 - DNA, 60 bp, Homo sapiens
gccttcttacatgaatcaggggttttattccgccttgcatcacaggttcctttagggaag

SEQ ID NO: 20488 - DNA, 60 bp, Homo sapiens
ctgaaggcagagagtcagtgaggatgtaagtctctagggatggccagaaatcatgaggag

SEQ ID NO: 20489 - DNA, 60 bp, Homo sapiens
gcctgctcataagcccctgaaaataggggtttcaaatggaaagcctcacagacttcagac

SEQ ID NO: 20490 - DNA, 60 bp, Homo sapiens
tagcttgtttcactaggcggataagcgtgggcagtaaactgggaggtgtccctttatcag

SEQ ID NO: 20491 - DNA, 60 bp, Homo sapiens
attggcctatcggtgtcccatcacagcctctgtaacagccaggataagcttcaagccaag

SEQ ID NO: 20492 - DNA, 60 bp, Homo sapiens
ggtcatagagctttggatttagacagactgcttacaagcccaatttcttcattcaagagc

SEQ ID NO: 20493 - DNA, 60 bp, Homo sapiens
ggagcttgcatcttgggcctcctaagtcagtgaacttttctgtgatgttttagggttcct

SEQ ID NO: 20494 - DNA, 60 bp, Homo sapiens
gatgttagtcttttagggcccattagctctcaagccttcctgtacaactgtaagatggcc

SEQ ID NO: 20495 - DNA, 60 bp, Homo sapiens
gaccatgaaatgtgtcactggatctcctgcagaaatctgccagagctacaatgtgactgg

SEQ ID NO: 20496 - DNA, 60 bp, Homo sapiens
ctgaacagtggtattccagagtatgtgcagtaaactcacctgcctacagaagagtgaccc

SEQ ID NO: 20497 - DNA, 60 bp, Homo sapiens
acaaccatggaaggctgtcttggagtagaggagttgtcagtaagagagaaaccagtttct

SEQ ID NO: 20498 - DNA, 60 bp, Homo sapiens
ggcatgtgagactttcagtgctacacccagcaaagccctggcaaactcgatgagttgatt

SEQ ID NO: 20499 - DNA, 60 bp, Homo sapiens
gggcacaatgccctgaaggtcaacaaccatggccaagagcatgaggtaatgtcaggaata

SEQ ID NO: 20500 - DNA, 60 bp, Homo sapiens
ttagactcctgaaacagctaacgtcactcatcacacacctgccatactagctgggagtga

SEQ ID NO: 20501 - DNA, 60 bp, Homo sapiens
cagactgcaaggtctccacctaccccagctcgcatcataactccttgaagtcaatccaga

SEQ ID NO: 20502 - DNA, 60 bp, Homo sapiens
tgtaggatactcagacttgtacgaccatcactacaccagttttagaggctttaatcaccc

SEQ ID NO: 20503 - DNA, 60 bp, Homo sapiens
gcttctcagacttcaagggcacgagcaccacctggaggtcttgttagacagcaggtctgt

SEQ ID NO: 20504 - DNA, 60 bp, Homo sapiens
tgtacctcctggtttgatgcaagagacagtacacaacagtagtaatagcaccaataaaga

SEQ ID NO: 20505 - DNA, 60 bp, Homo sapiens
ctggcaccaaaacgcatgctccctatgccacctatcaggatgcacccttaaagcactttt

SEQ ID NO: 20506 - DNA, 60 bp, Homo sapiens
tggatgaggaaatgaggttaaacgagacccgttcttgtaagagcaaggagagtgcctggc

SEQ ID NO: 20507 - DNA, 60 bp, Homo sapiens
atggcctggttctggcctgagaactggtctacactggaagcatgaagctccatacaatca

SEQ ID NO: 20508 - DNA, 60 bp, Homo sapiens
gacgtgctaatgactcagtttattgacctaggggttatttaagccgctcagcaagttccc

SEQ ID NO: 20509 - DNA, 60 bp, Homo sapiens
tgtaattgcagagctcctagggccattgagtctgaggggacaggagtgggtgtcactgca

SEQ ID NO: 20510 - DNA, 60 bp, Homo sapiens
ctctggacaaccgctctagtcttgctttgtctactgctcctgcctatctcccttaaaagc

SEQ ID NO: 20511 - DNA, 60 bp, Homo sapiens
agtaactgttcctggggctctaggactattagcgcagattctagactgagatgggatctg

SEQ ID NO: 20512 - DNA, 60 bp, Homo sapiens
ggggtatggcaatagtctagttggaagaggttaaggtcatgcagtaggacataatagggc

SEQ ID NO: 20513 - DNA, 60 bp, Homo sapiens
cagaatagcagtgttaagattctgacctttcacttgctatgtgacctagggcaagataca

SEQ ID NO: 20514 - DNA, 60 bp, Homo sapiens
ggcatcacttcctgcacattctactggtcaaatagtcacaaggtccctagattcaagggg

SEQ ID NO: 20515 - DNA, 60 bp, Homo sapiens
cccagaacctgcacggtgcttgcttggtacagactaactactgagtgtccattaagccaa

SEQ ID NO: 20516 - DNA, 60 bp, Homo sapiens
ggcttctgacgcagtgcctgcaaggagcaaacccaggccttaggagtgatcaaactcact

SEQ ID NO: 20517 - DNA, 60 bp, Homo sapiens
ccctcacttgatgttggccaatggaatttagcaggcatgatctatttggtaggctgaatg

SEQ ID NO: 20518 - DNA, 60 bp, Homo sapiens
ctgcaagctcagctctagcaatctctgaggtgcaggttcagaagtatgttgtgtttcatc

SEQ ID NO: 20519 - DNA, 60 bp, Homo sapiens
tctgttgtaagaaggtgaaatatggcctatcagtaaggacagcaaaatgcactggacctc

SEQ ID NO: 20520 - DNA, 60 bp, Homo sapiens
gtattgtccaggtcacttaagcatgccatgaggagttggatggcgtggcttgtcaggccc

SEQ ID NO: 20521 - DNA, 60 bp, Homo sapiens
atatcagctaaggcctactgcagccactcaccagaagggtctctccactagagaacagta

SEQ ID NO: 20522 - DNA, 60 bp, Homo sapiens
gccaacagagttgggagactcagcactgacttcaccccaaaatccaagtaagctgggtat

SEQ ID NO: 20523 - DNA, 60 bp, Homo sapiens
gtgatgctcattccaactagggaggcaagcatttgtacctgctatctacaaggcaccaaa

SEQ ID NO: 20524 - DNA, 60 bp, Homo sapiens
aaagaactgctgctgcttcttagtgacatcacccttcccagaagcttgaactgagttaat

SEQ ID NO: 20525 - DNA, 60 bp, Homo sapiens
gaatatttagtgtacaacccctgtctcccagtaattctgctgcccaaggaaatcagttac

SEQ ID NO: 20526 - DNA, 60 bp, Homo sapiens
tagattgactttcttgtgctcccatctgctggccacactgtgtaaagcagccatgctgag

SEQ ID NO: 20527 - DNA, 60 bp, Homo sapiens
ggatagtggctccaggttttgcctataggtgttttcttggaccacctttcaatggaagtg

SEQ ID NO: 20528 - DNA, 60 bp, Homo sapiens
aaggtaagtgtgaacagggcatctcactcaccacccctctatccttataggcattcctgc

SEQ ID NO: 20529 - DNA, 60 bp, Homo sapiens
ggggctacctgtttttatgcactggtctttggggtgcttttgaacagtagtgtctgatgt

SEQ ID NO: 20530 - DNA, 60 bp, Homo sapiens
acctacctcctcctgtcttctctgactccagccatttgcactgtcccttgattcaagttc

SEQ ID NO: 20531 - DNA, 60 bp, Homo sapiens
cggagttataggtttatcagcatgggtctggatgtaaggtctggcattcctatggctatt

SEQ ID NO: 20532 - DNA, 60 bp, Homo sapiens
tcttaggaaagcctctcatgggaatggcatttccaagattaggggtaaagtgggacctcc

SEQ ID NO: 20533 - DNA, 60 bp, Homo sapiens
gcacccatccttctggagtttctcctttgcttgatggctttcagaaagtatgcagccctg

SEQ ID NO: 20534 - DNA, 60 bp, Homo sapiens
gagcccaggaacagtatcacgaagcttgagataacaccagttacattatcctgactgccc

SEQ ID NO: 20535 - DNA, 60 bp, Homo sapiens
gggccaagtagacttgaaggaaggcaggttgctgatagagtggagagctgaagattctga

SEQ ID NO: 20536 - DNA, 60 bp, Homo sapiens
gccaccttatgctgcttctctctagtgcctttctgtctctctacctgatctctttttcag

SEQ ID NO: 20537 - DNA, 60 bp, Homo sapiens
tcacatgatgactgagggctccaagagggtgaaagcaggagcatctgggctaggcctctt

SEQ ID NO: 20538 - DNA, 60 bp, Homo sapiens
gactcctcacactacatgatggtcctctttaatggttacctcctgcccttggagttctcc

SEQ ID NO: 20539 - DNA, 60 bp, Homo sapiens
cagttttatggtattcggtagagaacagcccagcacatgcttttgcagtttggagatatt

SEQ ID NO: 20540 - DNA, 60 bp, Homo sapiens
ccctgtgcagacaggatacattcttgttcactcttccctgttgataggaggttttgtagg

SEQ ID NO: 20541 - DNA, 60 bp, Homo sapiens
ggccaggagatggacaccacattttgatggtttctcaaaccgtgtgtgaccttttcctgg

SEQ ID NO: 20542 - DNA, 60 bp, Homo sapiens
gcaagtcacatgtgctcaaggtaacacagccagtggcagagtgggcttaacccctaattt

SEQ ID NO: 20543 - DNA, 60 bp, Homo sapiens
tgtgtgaagccactggattgcgacagagttgcccgttggagggattgatgcttagatttc

SEQ ID NO: 20544 - DNA, 60 bp, Homo sapiens
actcctctccctattccccaccaccatttggtgctccacattgcagacagggcaatattt

SEQ ID NO: 20545 - DNA, 60 bp, Homo sapiens
atgcatatctataggtcagtgctaacaaggggtctagttagcttcttagctatctgcaga

SEQ ID NO: 20546 - DNA, 60 bp, Homo sapiens
gtgttcagcagcacagtagccaggagccacgtgtggctgtttcagtctccgtcttagtta

SEQ ID NO: 20547 - DNA, 60 bp, Homo sapiens
cggtggtcaagtgatgttgctttgtgtgtctgttttctcttaggtggttcaggtaccctg

SEQ ID NO: 20548 - DNA, 60 bp, Homo sapiens; identical to SEQ ID NO: 4855

SEQ ID NO: 20549 - DNA, 60 bp, Homo sapiens
gcagcaaaagggagacaatggtgttcaagggaagactttctttaaggaggcaagggcagg

SEQ ID NO: 20550 - DNA, 60 bp, Homo sapiens
tataagagcatgcagatcctgtgtatctacggcagggaacattagctccctgctcagcct

SEQ ID NO: 20551 - DNA, 60 bp, Homo sapiens
tttgtcctgaaagcctgagtgtcgtggcctaaccctactgcaagagagcactgcaaccag

SEQ ID NO: 20552 - DNA, 60 bp, Homo sapiens
cctggagttacaggtgcttatccactaaaccaggggttttcaagcaagaagtcagaatgc

SEQ ID NO: 20553 - DNA, 60 bp, Homo sapiens
accatacatcccaagatagtgatccacgaggcagatctttgggctgcctacgtggtgaaa

SEQ ID NO: 20554 - DNA, 60 bp, Homo sapiens
ggatgaaacaatgagagacacaatgatgacatacatctgccaagtagatgctgattttag

SEQ ID NO: 20555 - DNA, 60 bp, Homo sapiens
gcaccctcattctcctgggaggatgccttgctttcttggtctggtggtctcttagttaca

SEQ ID NO: 20556 - DNA, 60 bp, Homo sapiens
atggaaaagtgtctctctgtcaaggacatgaggaagccacatccgcagccttgtctaagg

SEQ ID NO: 20557 - DNA, 60 bp, Homo sapiens
tagaatagagcaaattgtagggtgagatcaaggcagcctgacttcttggggcatccaaaa

SEQ ID NO: 20558 - DNA, 60 bp, Homo sapiens
gcctgatgcctttatcattaccttacacttccacctagcctatgtgcctcaacaggatag

SEQ ID NO: 20559 - DNA, 60 bp, Homo sapiens
gctggccactaagtagctgatgctagtcttcatgatccttgctcttgatggccgattcca

SEQ ID NO: 20560 - DNA, 60 bp, Homo sapiens
cccaattcctgcactcacctagtgtcagaaaggtacaagatggactcgctacatggtgtg

SEQ ID NO: 20561 - DNA, 60 bp, Homo sapiens
gcagtgtctttctgagttaatgtgtctgttggccttctggtaatcccacagtcagctgcc

SEQ ID NO: 20562 - DNA, 60 bp, Homo sapiens
agctttctaagctgaatcactgggaatgccacttcaggtctcatcctgtcgctggtacca

SEQ ID NO: 20563 - DNA, 60 bp, Homo sapiens
ctagcttagagatcttggacaagtcctttaacagttctctgtcagctgcttggactgtga

SEQ ID NO: 20564 - DNA, 60 bp, Homo sapiens
cctagaggttaagttacctgctcaagacaacgtagctagtaggagcaaagccaggattca

SEQ ID NO: 20565 - DNA, 60 bp, Homo sapiens
caggatgccctttatatggaactctagcaattaagtactgtaagaaaaggaccagggaaa

SEQ ID NO: 20566 - DNA, 60 bp, Homo sapiens
ggaaaggataggaatggagcagcaaatgaaagttcaggctatgggttaggagttgagtgg

SEQ ID NO: 20567 - DNA, 60 bp, Homo sapiens
gagggagcagcagaaatgcctaggatgggaatgttctgtccaactactatgaggcttcca

SEQ ID NO: 20568 - DNA, 60 bp, Homo sapiens
gctgagcacacagggagaaccctgcatttggattcactggcaaagaccaaacttgaagct

SEQ ID NO: 20569 - DNA, 60 bp, Homo sapiens
cttaccttctgtcgtttgtgcaccaaccatatgagccagtaactgcatcacctctaccac

SEQ ID NO: 20570 - DNA, 60 bp, Homo sapiens
ggttgtgataaaccgcaagaggagcaatacattttgaggatgtcatagaactcatgctct

SEQ ID NO: 20571 - DNA, 60 bp, Homo sapiens
gagtgaagttaaagttggcaaacaagatcagttttggcttttgcactaacctcaagaaaa

SEQ ID NO: 20572 - DNA, 60 bp, Homo sapiens
gttgactctgctgaggcagtcagggcagtgtgatctcctcctgggaattgctgtatttga

SEQ ID NO: 20573 - DNA, 60 bp, Homo sapiens
cggatgaatggtgagaaagatgttctgtggtcctgacctcagtatagtctactctctaca

SEQ ID NO: 20574 - DNA, 60 bp, Homo sapiens
gccataggatgaatcagacaggtttgcttctagttttcaccactctatttgaccttggac

SEQ ID NO: 20575 - DNA, 60 bp, Homo sapiens
aagagagttgtgcctcatggcattgtagcaggtaaactttcatgtgggcaggaatcctgc

SEQ ID NO: 20576 - DNA, 60 bp, Homo sapiens
tttctgctagctgctggcatcagtaagcgctgtgaacccttttggctatatttgcgaccg

SEQ ID NO: 20577 - DNA, 60 bp, Homo sapiens
tccctgggtatgtactgcaccagcaatgtgtcaggcttcggcttacagaggtgaataaga

SEQ ID NO: 20578 - DNA, 60 bp, Homo sapiens
taaaggtctggctgatgttccatgccacatctggacatgaagacccatgtctgcccttct

SEQ ID NO: 20579 - DNA, 60 bp, Homo sapiens
gtaactctccctggttatttccacagtcactttaggcacttgggaaaatgcattctccca

SEQ ID NO: 20580 - DNA, 60 bp, Homo sapiens
gcagggtcctgatgaagagtaactatttgcacagaaagtagaagtcgcccttcaagagag

SEQ ID NO: 20581 - DNA, 60 bp, Homo sapiens
tgtgccttaacaaggactggtgaggacactcagccattccctcagtgcatcaaaatggag

SEQ ID NO: 20582 - DNA, 60 bp, Homo sapiens
atctggagatgatcacactttccaagcagagagctgaagtgaaggcttgaggggatgcct

SEQ ID NO: 20583 - DNA, 60 bp, Homo sapiens
tcacgcctcctaagtgtagcctcattatcgacacagacgcctgcagagtcgtttctctat

SEQ ID NO: 20584 - DNA, 60 bp, Homo sapiens
cacttggtgaggcaatcacagggtcttagccctgaaggcgcccatactgactttatcagt

SEQ ID NO: 20585 - DNA, 60 bp, Homo sapiens
tttgggaaatgaagcggtggggcagaggctggcagctcaggcagtgaccatgcatattat

SEQ ID NO: 20586 - DNA, 60 bp, Homo sapiens
tgctgcagaggtagccaagaaaccaagattaggacttcagctggacaatgttggcctgct

SEQ ID NO: 20587 - DNA, 60 bp, Homo sapiens
ttgactagacaaagctattgaaggcctgaaagtgccccatccagcctcttcccactgcag

SEQ ID NO: 20588 - DNA, 60 bp, Homo sapiens
cctccaagattgttccagatctattgaggcctgctctgtctaaatagtgcttccaggaac

SEQ ID NO: 20589 - DNA, 60 bp, Homo sapiens
ccagccatcagaagagatgaagagatggtgcaaaacaagcactgcagcagacctttcaga

SEQ ID NO: 20590 - DNA, 60 bp, Homo sapiens
cctactaatgtgaagccaaccagtggtagcctggaagctgggatggcaagaagaatcgat

SEQ ID NO: 20591 - DNA, 60 bp, Homo sapiens
gggacaaggggaagacaagtttgtgaaagcacagatgatagtgtgagctgtggaggtagg

SEQ ID NO: 20592 - DNA, 60 bp, Homo sapiens
cagtcaggtagaagaagggtcaaggacgactccaagggttacggactgagcaactaaaga

SEQ ID NO: 20593 - DNA, 60 bp, Homo sapiens
attttgactctgttttgaacaggtcaccaggaaaatgagacttggtagcctggcgaggtg

SEQ ID NO: 20594 - DNA, 60 bp, Homo sapiens
ggccgtcatctactgggagagtcagtatagcgtgtacgtgcgttagaggtgaaatgcata

SEQ ID NO: 20595 - DNA, 60 bp, Homo sapiens
gacttccaccaagtctaggggatctgtacggaactatcctttcccaaggtacatcatgca

SEQ ID NO: 20596 - DNA, 60 bp, Homo sapiens
aacttggtgggaggtagagaggccaatgtagagaaaggggcatccttcacgcaataaagg

SEQ ID NO: 20597 - DNA, 60 bp, Homo sapiens
gaggtggaactcatccccaacttttggcctggctgtgagacatccctccttgttatgtct

SEQ ID NO: 20598 - DNA, 60 bp, Homo sapiens
ctcattgccaatggcctcctaatagcctaacagggctgtgtttatttattcattgcttta

SEQ ID NO: 20599 - DNA, 60 bp, Homo sapiens
ccccttatagcagctgtgcatacacaacaggagctactcagaaatatgccttagaaagct

SEQ ID NO: 20600 - DNA, 60 bp, Homo sapiens
aggtcagattctcccacctgtcactcctcttgtacacttgatacctgtgcagcatagtag

SEQ ID NO: 20601 - DNA, 60 bp, Homo sapiens
gaacataatagcctgtcctgcatttgggttctgtgcagagaacattgcacctctattaga

SEQ ID NO: 20602 - DNA, 60 bp, Homo sapiens
ctgaattgcagtaaaaccgtgtgcttctatgaggggataaagtatttacttgtggctggg

SEQ ID NO: 20603 - DNA, 60 bp, Homo sapiens
atgatcttctcaatcttctccacagcctccagctgattccccactgactcagtttgctgg

SEQ ID NO: 20604 - DNA, 60 bp, Homo sapiens
ggagtctaagaacaggcaaaagtcgtatgtggtgctagaagtcaggatggttggctcttg

SEQ ID NO: 20605 - DNA, 60 bp, Homo sapiens
ggatcttccctggaaatagtctcaggtgtcacttgtcaccctgcattgggacttcatgag

SEQ ID NO: 20606 - DNA, 60 bp, Homo sapiens
ccccaaaggtggaaccataagcgagaacggctttgtgtggtagccaaaagcacatcttca

SEQ ID NO: 20607 - DNA, 60 bp, Homo sapiens
gacacccatgtttcctcccagctataacagcagcctatgactctgtgatgatgtcactgc

SEQ ID NO: 20608 - DNA, 60 bp, Homo sapiens
gtctgtgtgcctacaagcaggtagaacaaactatccattaggctgagctggtgagagtgg

SEQ ID NO: 20609 - DNA, 60 bp, Homo sapiens
tctattgatggcacagcaggcaacggtgtgtgaaaaacaggcacttaaagactctgggcc

SEQ ID NO: 20610 - DNA, 60 bp, Homo sapiens
cagttcctggcttttggcatgttggagagagacctgtgcttattggatggagtgagaaac

SEQ ID NO: 20611 - DNA, 60 bp, Homo sapiens
cgtagctcctaactggatgtagtgtcttggattcagacccagctgtttgtctccgaagtc

SEQ ID NO: 20612 - DNA, 60 bp, Homo sapiens
acagatttctcatttgggctcttacataggggaatacagagtgacagtataacagtatcc

SEQ ID NO: 20613 - DNA, 60 bp, Homo sapiens
acttgggatacggcttcattcctgcatcacagacttggtgagcacctcctcagccctgga

SEQ ID NO: 20614 - DNA, 60 bp, Homo sapiens
tttcttatgggaggatttcagccccaagcctacgatcaggcatagatgtcagctgggcca

SEQ ID NO: 20615 - DNA, 60 bp, Homo sapiens
ttcatctcctgcccttgctaccagtccctgccacttcaggcttcaggattctcatctatc

SEQ ID NO: 20616 - DNA, 60 bp, Homo sapiens
gaggcaagggcactccattctgacacggagagtccaagggaatgtaaaggccaaattgtt

SEQ ID NO: 20617 - DNA, 60 bp, Homo sapiens
tgtctccttctgagggtgacctgagccacgatgttatgggatggaggctaacacctggta

SEQ ID NO: 20618 - DNA, 60 bp, Homo sapiens
agtcagttgcgacccaaggggcttagggtaggagtgtttctccataggggaagagtaaca

SEQ ID NO: 20619 - DNA, 60 bp, Homo sapiens
gggcatggaaatggcctttggaagttaatgggattcttggggtcagattggattctccag

SEQ ID NO: 20620 - DNA, 60 bp, Homo sapiens
attgctctaagcagagaggaaaccagtgccattctggctcccaaatgctggtacaagacc

SEQ ID NO: 20621 - DNA, 60 bp, Homo sapiens
tggttggagcctagaggctgatgcagagcaagaggtcagaccttgtgtatgccataagga

SEQ ID NO: 20622 - DNA, 60 bp, Homo sapiens
ttgcatcccagctttgcagtcccatcaggaggggcaacaacactttgtgtccatcacaaa

SEQ ID NO: 20623 - DNA, 60 bp, Homo sapiens
ttcaaccgtgtttactgaaaccctcaaaaatacaaagataggatttccagccttcttttc

SEQ ID NO: 20624 - DNA, 60 bp, Homo sapiens
aaatgacttgttctctgactggtgactttggtccctgcatcaaggagtggcagaggtctc

SEQ ID NO: 20625 - DNA, 60 bp, Homo sapiens
ggacatgctctcagctctcctcccaagtcctagcaatcagctacaagaatctgcttcatt

SEQ ID NO: 20626 - DNA, 60 bp, Homo sapiens
ttgggacttctggactagctgccgtttgcaacagtggacttaccagtttgccactactct

SEQ ID NO: 20627 - DNA, 60 bp, Homo sapiens
gctctaatcatgacctttgtgcagctctcactgatggctgatcctccacctggatgttct

SEQ ID NO: 20628 - DNA, 60 bp, Homo sapiens
cagcattctcatatgcatgtgtgtcctttgtatgaacgttatctgcccagtagtgcccag

SEQ ID NO: 20629 - DNA, 60 bp, Homo sapiens
aggatggaatcagcacacgccggtgttgaaaacggctttgacacataggctcaatgtgct

SEQ ID NO: 20630 - DNA, 60 bp, Homo sapiens
ggtaagaccaagagacgtagcgtgagagagaactgtgcacccttaggagtgtacaaatcc

SEQ ID NO: 20631 - DNA, 60 bp, Homo sapiens
taagggattatactgattgctatgtagagcacatgaggtaaaatgaaagcagaggtgggc

SEQ ID NO: 20632 - DNA, 60 bp, Homo sapiens
gaggactcatgggaaaggtggggttagggcaaaacattcaaacttcatcagtgacacatg

SEQ ID NO: 20633 - DNA, 60 bp, Homo sapiens
cccagttccaacttacttgcatagagctcccataagcattcagcccatagaacccggaca

SEQ ID NO: 20634 - DNA, 60 bp, Homo sapiens
ctttcacagtgctcagaaaagagctggtcaccaggtggctgctaggtaaacagaaatcga

SEQ ID NO: 20635 - DNA, 60 bp, Homo sapiens
agacaggactggagttcacatcctagctgggcgtcttactggctatgggtcttagaagtt

SEQ ID NO: 20636 - DNA, 60 bp, Homo sapiens
ggaaaacaggccttaatttgtgtgactccttgattaggctgtggcttcttagataggtca

SEQ ID NO: 20637 - DNA, 60 bp, Homo sapiens
atgacaagatccggggtgtgacagtttgtgcacggttacccagctgcctttccctaaaga

SEQ ID NO: 20638 - DNA, 60 bp, Homo sapiens
gagcacatacctggaagtcccctaaaacataggttgttgaactctgactctgccacttcc

SEQ ID NO: 20639 - DNA, 60 bp, Homo sapiens
ccagtgaagaatgtgctgttggcatccatacggctagatgggccagtactgtggattctt

SEQ ID NO: 20640 - DNA, 60 bp, Homo sapiens
caactcagtcactaggcaagaggatggatcttggagtctgacagacaggcatgggttcaa

SEQ ID NO: 20641 - DNA, 60 bp, Homo sapiens
ccagagacagtgggaaatgcctacatcttcttggaggcaagaccaagttgttgcccatgt

SEQ ID NO: 20642 - DNA, 60 bp, Homo sapiens
ctggatttgtgtcctgactgaaagtcctggacatgggtgtcctgtcacactctgggacag

SEQ ID NO: 20643 - DNA, 60 bp, Homo sapiens
gtcttaggctttgctctggcgtcctctagagcctgaaaagttgcttcatttctcagcagc

SEQ ID NO: 20644 - DNA, 60 bp, Homo sapiens; identical to SEQ ID NO: 4855

SEQ ID NO: 20645 - DNA, 60 bp, Homo sapiens
ccatccacatggcttctcagtcctgaggtcctgagggatcttctataagcccatttacct

SEQ ID NO: 20646 - DNA, 60 bp, Homo sapiens
ggtgagtatcaggtttcccacttcatcccaacatctactttctccagtcacgctgtgaaa

SEQ ID NO: 20647 - DNA, 60 bp, Homo sapiens
tgtcatctgtttccgtttctctaagatagggatcctggcgaagcccatgaaagccatggg

SEQ ID NO: 20648 - DNA, 60 bp, Homo sapiens
catccctcagagtgctggctatggccacttgtctgagaaccatccaacaacatggcaaaa

SEQ ID NO: 20649 - DNA, 60 bp, Homo sapiens
ggacaagcttagcagggagctatgcttcacctccatgagagcagactacctacctaacta

SEQ ID NO: 20650 - DNA, 60 bp, Homo sapiens
aagtcaggtgagatgggacgtgagcctcaggaacgctggggtcactacaaggaacacctt

SEQ ID NO: 20651 - DNA, 60 bp, Homo sapiens
gaaacgaatccatgagccctgtgcggaaaccctctaggtctgttcctctcaggacattaa

SEQ ID NO: 20652 - DNA, 60 bp, Homo sapiens
cggcagctgaagtgcacatggaaataagttgtccaaggtcacgcaatctgaactccctga

SEQ ID NO: 20653 - DNA, 60 bp, Homo sapiens
ggccctgtgtccttaagatccagacactttgcagtacagtcagctcgcagtctctgtctt

SEQ ID NO: 20654 - DNA, 60 bp, Homo sapiens
gtagtgtgcttaggaccttgccaggtgcatagtgagtgcttgacaaacattgaccatcct

SEQ ID NO: 20655 - DNA, 60 bp, Homo sapiens
gattttcttccatgcgtctaggctgagctgagctgtgtctttaggctgagctgtagagac

SEQ ID NO: 20656 - DNA, 60 bp, Homo sapiens
tcaggagccgtatttggtgtctgatcccaaagtgtctgagcagctggaaatctgaactgg

SEQ ID NO: 20657 - DNA, 60 bp, Homo sapiens
ttcataaccagcacccgattaggcgctaattcagttccacaaatgctccctgagcctgac

SEQ ID NO: 20658 - DNA, 60 bp, Homo sapiens
aagctgccacaaggttaactgtagcttcactgctggaaagccctgcctagggcatatgtg

SEQ ID NO: 20659 - DNA, 60 bp, Homo sapiens
gaggtttgaccccttctgagctgaatgtgtcctgatttaggggatagctagggcaataag

SEQ ID NO: 20660 - DNA, 60 bp, Homo sapiens
ccagggttttctgcagctcaacccatcaggggtctaggtgatgactgggatttctagggg

SEQ ID NO: 20661 - DNA, 60 bp, Homo sapiens
ccccaagccaacaccacatccaacaggagcctgcacccagtcttcagcatagaggtgaaa

SEQ ID NO: 20662 - DNA, 60 bp, Homo sapiens
tactgaaggctagagaatgagggtcttgcacaacagcctgccattgaggttggaggagac

SEQ ID NO: 20663 - DNA, 60 bp, Homo sapiens
agcagccccatgagatcagggcttattgtgtttgctccatgtatcatgagggtgcatcct

SEQ ID NO: 20664 - DNA, 60 bp, Homo sapiens
caccaagatgaatgccaatatgctaccacctaactctggttataagtgctaacccaggtt

SEQ ID NO: 20665 - DNA, 60 bp, Homo sapiens
gatgttagagaactatacatacgttgtctctgagtcggaataacttaccttcagaatatc

SEQ ID NO: 20666 - DNA, 60 bp, Homo sapiens
ccaacctcagcccttttcccatgtatctctttgatcacatccctacctcatagatcaccc

SEQ ID NO: 20667 - DNA, 60 bp, Homo sapiens
ttaacttgcctgagggcacacagtggggaagacacagggctaagactgtacctcacatct

SEQ ID NO: 20668 - DNA, 60 bp, Homo sapiens
gactgaaaactggttatttgctcctccaacccaaagccatctaggaacagcactcagaac

SEQ ID NO: 20669 - DNA, 60 bp, Homo sapiens
atggagtccccagatactgatgagggcagggtttgagtttgagggctgttcattcttctg

SEQ ID NO: 20670 - DNA, 60 bp, Homo sapiens
ggatcgccctctgtgtgcgttggtttgctgtgttcttgctactcgcccttggataagatt

SEQ ID NO: 20671 - DNA, 60 bp, Homo sapiens
tgatacatcgtgaacacattgaaggaaattggaagaaatggaattctggctcctgggtcc

SEQ ID NO: 20672 - DNA, 60 bp, Homo sapiens
gccagtgtctctcacaatgcttgcctacacatagtaggtgcttgatgaacatgtgctgac

SEQ ID NO: 20673 - DNA, 60 bp, Homo sapiens
ctggtggcatggccaaggcttcctcataccttatctcagtctacccattttcagggaaga

SEQ ID NO: 20674 - DNA, 60 bp, Homo sapiens
cagttcatggaaccagaaagaagaggttagcaagggctggggagatgggcagttaatttc

SEQ ID NO: 20675 - DNA, 60 bp, Homo sapiens
ccattctctgtacctgacccagtttgagtctccttatgacacttggcttcctccagatgg

SEQ ID NO: 20676 - DNA, 60 bp, Homo sapiens
ggcactgatcaaaggacgtggtgatcatgggaacactctggagagcacgtagccatattt

SEQ ID NO: 20677 - DNA, 60 bp, Homo sapiens
ttacatccccaaattccctcttccatgaaccactgcgcactgtacattgccacattaatg

SEQ ID NO: 20678 - DNA, 60 bp, Homo sapiens
acaatccgccacacttctaactgcgctcattcgcactgccacggatactttgtcaacagt

SEQ ID NO: 20679 - DNA, 60 bp, Homo sapiens
gggcaggtgaggtcacaatgagaatctacactattgtacttcggggttcaacccaaacag

SEQ ID NO: 20680 - DNA, 60 bp, Homo sapiens
ggtgtcaaggcacaggctgagtcatcagaacaccttccctgaattgtgtcaaacaagtgt

SEQ ID NO: 20681 - DNA, 60 bp, Homo sapiens
ctgtgctcctcatactagggcatccttatttccaggccttttcagcactcagagctagga

SEQ ID NO: 20682 - DNA, 60 bp, Homo sapiens
atcaagggacttgtaggtgggcctgcccagtctgtcctcagccatcttttcccctacctt

SEQ ID NO: 20683 - DNA, 60 bp, Homo sapiens
ctttggaagatgctgatcaggtaataactgttctgtgccctacaaggaggatgccacctg

SEQ ID NO: 20684 - DNA, 60 bp, Homo sapiens
ccctcaataggtcatttcctagacaactttccagaatacgacaagaagcacataacttca

SEQ ID NO: 20685 - DNA, 60 bp, Homo sapiens
gcagtgttacaagcatcatcctattgaatcctcagctcaccccttgttgaggggcttcta

SEQ ID NO: 20686 - DNA, 60 bp, Homo sapiens
tctagtgcccgacataaaagtgctcagcatacgacgatcatgagccatgtctaagcaggc

SEQ ID NO: 20687 - DNA, 60 bp, Homo sapiens
gagatctagtagatgtctagttgcagcaaaggctggaagatgcagtgttcattctgaaca

SEQ ID NO: 20688 - DNA, 60 bp, Homo sapiens
gattcctccactagagttagtgatgatggcaacagacaaatgccggatgagaggtttggg

SEQ ID NO: 20689 - DNA, 60 bp, Homo sapiens
caaatcaagcttataagattacaggtcttcagaataagaccatagatacattggtaaaag

SEQ ID NO: 20690 - DNA, 60 bp, Homo sapiens
aacttgactttcaactctgtgtcattagtgcctcaaacagggtctggctaataggaggca

SEQ ID NO: 20691 - DNA, 60 bp, Homo sapiens
tagttccagcacagtgaaccccagtagtgtttcgcttctcagcctttgccatctcctcat

SEQ ID NO: 20692 - DNA, 60 bp, Homo sapiens
ggcactctctgcccagactttcagtgcacagaaactgtgatgctaaatggatgttgcttg

SEQ ID NO: 20693 - DNA, 60 bp, Homo sapiens
gccttaatccctcaccagctgaatacctcctacatgctaaactcctggaatgaaaggtcc

SEQ ID NO: 20694 - DNA, 60 bp, Homo sapiens
gctcttacttgcaactgacagctacctcccacaccctcttggcatttctctagtgaagct

SEQ ID NO: 20695 - DNA, 60 bp, Homo sapiens
gtcaccccagtagccaagtaatgaagcaggaaaaggttgaaaatggcctatatcccacag

SEQ ID NO: 20696 - DNA, 60 bp, Homo sapiens
gcagtgtgttccacccagcagtccctgtgtttgacctcttcgtacactctcagttgtatt

SEQ ID NO: 20697 - DNA, 60 bp, Homo sapiens
gagtgttgccattgcccaatccaggaatggtccaatccaagaatggtctatcagtctagg

SEQ ID NO: 20698 - DNA, 60 bp, Homo sapiens
aacagatgttgtgcctcatgcctggagctgctgttggcaatcgctgcatgctcatgttat

SEQ ID NO: 20699 - DNA, 60 bp, Homo sapiens
ggtaacgccttgtttatcaggaaataacttttacccaacaacctagccaagaattaggga

SEQ ID NO: 20700 - DNA, 60 bp, Homo sapiens
tgaggtattgaagacagtagtagtggatgggaaggcaacattactgatcttcgcagtggc

SEQ ID NO: 20701 - DNA, 60 bp, Homo sapiens
caggttctggtgactgctccatcctcttgtcccagtcccaggggattctgctattacttg

SEQ ID NO: 20702 - DNA, 60 bp, Homo sapiens
agttttcctagtctccctttcagattagcacgaaggaagcagctctgctatgtgccggct

SEQ ID NO: 20703 - DNA, 60 bp, Homo sapiens
gcgagtggaagccattgaacagttcttaactgagtgtgctgctgtgagtttgtgtttcag

SEQ ID NO: 20704 - DNA, 60 bp, Homo sapiens
cagaatgccctgtagactcaaagcctctcattatctggaatagtggaatgttggaggccg

SEQ ID NO: 20705 - DNA, 60 bp, Homo sapiens
gtatcctcacttggagaatagggatgatgatagcatggatgtgcctgaaatgcccagcca

SEQ ID NO: 20706 - DNA, 60 bp, Homo sapiens
gccctcaggttggacaatgtcatgtcttatatcctagcatggcttcatgttggggtgcac

SEQ ID NO: 20707 - DNA, 60 bp, Homo sapiens
gttcattgctgtgtgaaacacgcttgtggaaggaattatgccagctttgcatagtgtgca

SEQ ID NO: 20708 - DNA, 60 bp, Homo sapiens
ttgtcaatggcagggaaggttgcctgtagccagcactgcagattcaggacttagaaacgt

SEQ ID NO: 20709 - DNA, 60 bp, Homo sapiens
cctctgctttggatgaggttacagggctgagtgcgagtgagtcattagtggttcctttga

SEQ ID NO: 20710 - DNA, 60 bp, Homo sapiens
ctggttggatgagttcaccagatgggcctcttatgggaccatcccaaaatgacaacatac

SEQ ID NO: 20711 - DNA, 60 bp, Homo sapiens
ggagagcttgattaagcagtgggtcagatgctctgaaccaccttgattcttagaaggtca

SEQ ID NO: 20712 - DNA, 60 bp, Homo sapiens
aagccagtcatcaggctgtgaaggagcccaaaggagcccacacagagagaccatggagaa

SEQ ID NO: 20713 - DNA, 60 bp, Homo sapiens
gacatctctttccacttactctttgcaattctcttctggtgtccatgctgctggtgatct

SEQ ID NO: 20714 - DNA, 60 bp, Homo sapiens
gagaccttggagatgagctgtgggaaagaactacccaattcggttgctgttgtcttgtca

SEQ ID NO: 20715 - DNA, 60 bp, Homo sapiens
aataaccttgtggctcttggctctcctgggctgtcattttggttgcctaagggctctagg

SEQ ID NO: 20716 - DNA, 60 bp, Homo sapiens
tagggcgctcttgactttccttggggaactggcattcctcttagagagatggggaagtca

SEQ ID NO: 20717 - DNA, 60 bp, Homo sapiens
cgagatgcgggttaagccagctgttgggccaaagtagtgaacaagccagacgaagtaaaa

SEQ ID NO: 20718 - DNA, 60 bp, Homo sapiens
gtgaaagaggatgcatagatcaccttcaagtagctaaggcataatgagataaggatgctg

SEQ ID NO: 20719 - DNA, 60 bp, Homo sapiens
ctacctcagagactctgggagccacaaacaggatcccacttcttgaacaatgcctagaac

SEQ ID NO: 20720 - DNA, 60 bp, Homo sapiens
gagggccttctgcctctgaaacttgctctatttccctcaagtcctgcttccttttgtagg

SEQ ID NO: 20721 - DNA, 60 bp, Homo sapiens
cactggaaccatacaggttttgattcgcagagttgggagccctgggtagatactgaatca

SEQ ID NO: 20722 - DNA, 60 bp, Homo sapiens
ggaggacagtatccttaggcttctcagaaattccacatgggagcctcaaatggacatgct

SEQ ID NO: 20723 - DNA, 60 bp, Homo sapiens
ggaagtgctagtttgctcacaggctggtggtaacagtctactgtggtcattgagagcagt

SEQ ID NO: 20724 - DNA, 60 bp, Homo sapiens
ggcatgctgcaccagttgtctgattcagcaatgctgtgagagaattgagagggcgttcat

SEQ ID NO: 20725 - DNA, 60 bp, Homo sapiens
cgtcccacattgctcgtgtattctgccactaacaagaatgaagacatcacattggccggg

SEQ ID NO: 20726 - DNA, 60 bp, Homo sapiens
agctgagttattcagcacactcctagatgtggggtctgattgttggtcaaactgaaggac

SEQ ID NO: 20727 - DNA, 60 bp, Homo sapiens
ccctcaccctatgtcaagtgctttatctcttttggagaagggagcctgagtttactgagg

SEQ ID NO: 20728 - DNA, 60 bp, Homo sapiens
tgcagaccacactaactgaagactgtggctttcccatgcgtgccctttctgttctgggac

SEQ ID NO: 20729 - DNA, 60 bp, Homo sapiens
ttcgcagtatgtgggttgggagaaggttccagttgtccttgtccgttctccattttctca

SEQ ID NO: 20730 - DNA, 60 bp, Homo sapiens
ggatttgcctcttagctcttggagctggagagtggatgacttcctgcaaggcacgatttt

SEQ ID NO: 20731 - DNA, 60 bp, Homo sapiens
ccgagtctgactcccaaagctcactgttctcatcccactcattgtgatcgtggctagaat

SEQ ID NO: 20732 - DNA, 60 bp, Homo sapiens
tgacaaaggtaacactcaactcggtttttctcaaagtagctgtggaacagatggctgccc

SEQ ID NO: 20733 - DNA, 60 bp, Homo sapiens
cagtggttgccaaaggcaaggatgaataaggagaacacaggggattttatgtgataagta

SEQ ID NO: 20734 - DNA, 60 bp, Homo sapiens
gtgtgttttcatgatctcttaacaatacccagcaatgttgtgcacatgggaagaatgctt

SEQ ID NO: 20735 - DNA, 60 bp, Homo sapiens
tgggaatcccctgtacttcaatccccttcctgttctgtctctgtcctgacttcatccagt

SEQ ID NO: 20736 - DNA, 60 bp, Homo sapiens
ggctgtattttcggtctgggaacctgatactcaacctaatgccactcagtttcgtctccc

SEQ ID NO: 20737 - DNA, 60 bp, Homo sapiens
ccctcatggagcacaactgccaactccccacgtgccactcacatttcatgcaagagaaat

SEQ ID NO: 20738 - DNA, 60 bp, Homo sapiens
tcttgctggtgttaggatctgtccttccagggaggatacgccatgagtcagaagtagatg

SEQ ID NO: 20739 - DNA, 60 bp, Homo sapiens
agagttttcatcatgtcctttgtccccacatgcatgtagccttccccactgtgaacatgc

SEQ ID NO: 20740 - DNA, 60 bp, Homo sapiens; identical to SEQ ID NO: 4855

SEQ ID NO: 20741 - DNA, 60 bp, Homo sapiens
ccaacacatagaatacactgaaggtcaggttctgtccagaaaccactcaacaccagagca

SEQ ID NO: 20742 - DNA, 60 bp, Homo sapiens
gtctctcttaacacacattgcctccttatagaggttcaggcaccatgctgagcctgggag

SEQ ID NO: 20743 - DNA, 60 bp, Homo sapiens
gcaaaaggagggtcaggggtaaaatagcgactttcgaactgtcaggggtaaaatagcgac

SEQ ID NO: 20744 - DNA, 60 bp, Homo sapiens
gcctgtagtttcagcttctcgggaagccaaagcaaaggatctcttgagcctcagtatctg

SEQ ID NO: 20745 - DNA, 60 bp, Homo sapiens
tgtttcaggttggagctgcagtctgttgagagtaagctatgggaaggcctgtatacgagg

SEQ ID NO: 20746 - DNA, 60 bp, Homo sapiens
tcttctatcccatccccatcttccgtacagtccgatgacctccacagaggagatcgggat

SEQ ID NO: 20747 - DNA, 60 bp, Homo sapiens
cctggcacctccaagggctccatagaaaggtggggtattactgtcttaccgtgtaattga

SEQ ID NO: 20748 - DNA, 60 bp, Homo sapiens
gaaagctacgaagccaaggcaagaattcgtcaccagattttgcctatagcacctacagat

SEQ ID NO: 20749 - DNA, 60 bp, Homo sapiens
actggggtgggaacatgtggggaaagtaactgtgaggggtgtgttctaactggggagtta

SEQ ID NO: 20750 - DNA, 60 bp, Homo sapiens
gcacgaaccagagtggttggactaagaactcattttcaccagaggaaaacccattgtaga

SEQ ID NO: 20751 - DNA, 60 bp, Homo sapiens
tggaataggccatgtgagatcagttcaagggcctgaaacctgcggaagagccacggaaat

SEQ ID NO: 20752 - DNA, 60 bp, Homo sapiens
cggtagctaatttgacatggacaaatagcctacaacatctacggtaacctccgcaactcc

SEQ ID NO: 20753 - DNA, 60 bp, Homo sapiens
gctgaggaggtccatccacaccatagactcaactacgatggcccaatgtctaacagacat

SEQ ID NO: 20754 - DNA, 60 bp, Homo sapiens
ccagcactgacccacttctggctggtaggaatttgaggaattggattctatagcccaaag

SEQ ID NO: 20755 - DNA, 60 bp, Homo sapiens
tgtacaaaccaaagaaatgacaatgtggcaaacccaatcaacgtggtccctgcagcccag

SEQ ID NO: 20756 - DNA, 60 bp, Homo sapiens
ccttagagcactagatccagcattttccatctgctatcgctgcatgacaaaccaccttaa

SEQ ID NO: 20757 - DNA, 60 bp, Homo sapiens
cgttgtactcacatctttctggggacactgacatgtcttttcctacattagattcagtac

SEQ ID NO: 20758 - DNA, 60 bp, Homo sapiens
gtgaagatgagaggactggcttctcccaatacttcctttgtcattccgatcctgctggac

SEQ ID NO: 20759 - DNA, 60 bp, Homo sapiens
gcttttgctacctgtttcagggccatctacacacacccatagtatccactgctggtattc

SEQ ID NO: 20760 - DNA, 60 bp, Homo sapiens
tgagcccctaccctcctgagtggcaagacatttcaagtcagaattactggggtctggttg

SEQ ID NO: 20761 - DNA, 60 bp, Homo sapiens
tcgaattcactagggcagagtgactggcatggtccatgtggctccaacaatccctgcatg

SEQ ID NO: 20762 - DNA, 60 bp, Homo sapiens
aaaatacaggctggagctgtgggtttgagtgttgtcctcataggaggtgatggctgaggg

SEQ ID NO: 20763 - DNA, 60 bp, Homo sapiens
ttgacagctgcctcttggagggttatgggagcctgtgaatgccaacatccccatttgcct

SEQ ID NO: 20764 - DNA, 60 bp, Homo sapiens
cagcaagtactgaagatgtcaatcgtagatacgaacaagcaaacttccttttggtgatac

SEQ ID NO: 20765 - DNA, 60 bp, Homo sapiens
catttcacctccatgtaggcagattttgggcctcatgaagaatcacactgcttgtgaaga

SEQ ID NO: 20766 - DNA, 60 bp, Homo sapiens
ccattgtagtgggaagtcatctacattctcagcactatgttctcttactcaaagcagggg

SEQ ID NO: 20767 - DNA, 60 bp, Homo sapiens
cagttggaggtgagttcgtccagctaaagtgtgccatgtcaccacgcatatttggtggta

SEQ ID NO: 20768 - DNA, 60 bp, Homo sapiens
ccctttccatgtaagagaccaaggctaatacagtctagggtctaccttcacacctctgtg

SEQ ID NO: 20769 - DNA, 60 bp, Homo sapiens
gtgcctgcacagatttgggataacaaacatttgtatgctcttctatggattagaaaactc

SEQ ID NO: 20770 - DNA, 60 bp, Homo sapiens
tcactcaacatgcttttcactctgtgctgggtgatgctgaagaagtgggaagaccaggtc

SEQ ID NO: 20771 - DNA, 60 bp, Homo sapiens
gataaagatcccactctgccttggatttagccatcgcagtccctgtgtaaaaccccaccg

SEQ ID NO: 20772 - DNA, 60 bp, Homo sapiens
gtccccgttaccgaagaccgccaccatcacgacatagcgcagcacatatgggtaaacaaa

SEQ ID NO: 20773 - DNA, 60 bp, Homo sapiens
cccaagtggatgatacctcccagctggagaactactgcaagactttgtatctcatgaagg

SEQ ID NO: 20774 - DNA, 60 bp, Homo sapiens
gggttccagtcctagctctatcacctaaaggcacgttgtctctggacaaagagagccttt

SEQ ID NO: 20775 - DNA, 60 bp, Homo sapiens
tccacaactctttcaccctgaggtccccttagggtcaggatgaccgacacatgcactcca

SEQ ID NO: 20776 - DNA, 60 bp, Homo sapiens
ggccaaatgttcgagctataccaagtagggagataatggagaagcagcacgtctatctat

SEQ ID NO: 20777 - DNA, 60 bp, Homo sapiens
aagtggttgtgtctctagaatggaggctgaggtgtgttcgtggcacatctgcccagtaat

SEQ ID NO: 20778 - DNA, 60 bp, Homo sapiens
gacacagctctgttatgaacacctccaggccagaaggcttgtgttatctgcacagctaag

SEQ ID NO: 20779 - DNA, 60 bp, Homo sapiens
atggcactcttctcagtgtccccaaactccctgtgggatgcaagtaaccagacaggtttt

SEQ ID NO: 20780 - DNA, 60 bp, Homo sapiens
ttgcattttgggtaggtagctctctctgctgacaaggcagggagaataggatgggaaggg

SEQ ID NO: 20781 - DNA, 60 bp, Homo sapiens
gttttccagggttgcagacaagtcaagagagtggatatgatgcctcagtccgcaccatca

SEQ ID NO: 20782 - DNA, 60 bp, Homo sapiens
aagctaactgaaatcagagcatattagagcagagcaaaagaaggaccgtctctacttcca

SEQ ID NO: 20783 - DNA, 60 bp, Homo sapiens
aaaatgtcaggttgctgaatcatgcggaggcaatcttcataaaatgcctgaaggtgattg

SEQ ID NO: 20784 - DNA, 60 bp, Homo sapiens
ggtcaagggtcaagaaccttttctaggtctctctgatttgggcatctggctggctggaaa

SEQ ID NO: 20785 - DNA, 60 bp, Homo sapiens
gctgataatcccagggaaaattgctgatcaagtcttgaaatccaacacatccttcggagt

SEQ ID NO: 20786 - DNA, 60 bp, Homo sapiens
gcgcattacatgtcacacactaatcagggggtcacatctgggctcatatgacaagtgtta

SEQ ID NO: 20787 - DNA, 60 bp, Homo sapiens
gggacttccaggtcttaccttacgagtgggtcacaacactgacaaaggggacaatatcca

SEQ ID NO: 20788 - DNA, 60 bp, Homo sapiens
tttgccacaaccaagagaggcttggggattatctgactccttccaacctgctctgccaca

SEQ ID NO: 20789 - DNA, 60 bp, Homo sapiens
aaacaggcgcaattctggggcactgtctccattctagccagagcacctctgcttttaact

SEQ ID NO: 20790 - DNA, 60 bp, Homo sapiens
ggagtcttggcaaggttagattgatcatcttagaaaacctgtgtgcagaatggttaggca

SEQ ID NO: 20791 - DNA, 60 bp, Homo sapiens
ggttctccatccacatgcctaagacaggggtgagtgtgaagatgggaactgactcagaat

SEQ ID NO: 20792 - DNA, 60 bp, Homo sapiens
ctcaccccatgtcaccccatgtctgtccctgctttaccctagagcatcctgaagaaaact

SEQ ID NO: 20793 - DNA, 60 bp, Homo sapiens
gggcagtgactatccagtgcaaaatccagattccgttagtaaaggatgttgatggagtgg

SEQ ID NO: 20794 - DNA, 60 bp, Homo sapiens
ggccttaggaaacgctgactgtcttcattcttgcttcttgtttgaaggtaatgtgagtgg

SEQ ID NO: 20795 - DNA, 60 bp, Homo sapiens
cacgaatttcagtttcacaacctgggagaactgtcgccttgctcgatgtattcccaaggg

SEQ ID NO: 20796 - DNA, 60 bp, Homo sapiens
ccgtagttcaaccctgtactcataccttcctagtcagtgacattgccaaaggacaagtct

SEQ ID NO: 20797 - DNA, 60 bp, Homo sapiens
aggggaaccgagggacatcatggcacaaatctggaacccgagcaaagcgagttttctgaa

SEQ ID NO: 20798 - DNA, 60 bp, Homo sapiens
cagtctccaagtgtccttctctagaggcaactactcttcccagtttcttgtgaagccttc

SEQ ID NO: 20799 - DNA, 60 bp, Homo sapiens
gcaacttcctttcctgcctgagcagccctgagcagacagtgctgtgtctttcatgatcat

SEQ ID NO: 20800 - DNA, 60 bp, Homo sapiens
tcgggtatcaggcgatctctggccaggacatcttagccattctctccattgttatgtgtt

SEQ ID NO: 20801 - DNA, 60 bp, Homo sapiens
gcatgcctgtcggtctctttctggcaccctccttgaggccagcatcaggctttgggttca

SEQ ID NO: 20802 - DNA, 60 bp, Homo sapiens
gacagcacagctttgaaagtctttgaagggaatatcctaaaaggtactaaagtagaggtt

SEQ ID NO: 20803 - DNA, 60 bp, Homo sapiens
ttgacttctgtcatccttgccccatgaagccatcggaactgcagctcgttttccgctttt

SEQ ID NO: 20804 - DNA, 60 bp, Homo sapiens
cattctgtcacttgtatcaactggacctgttttctgaccaataggctaggacataagggg

SEQ ID NO: 20805 - DNA, 60 bp, Homo sapiens
ctaggaaaactgttctttgagttgtgatagtctcagtactatgtagtgattcagaaaatg

SEQ ID NO: 20806 - DNA, 60 bp, Homo sapiens
ttactacactgtccgtgtgtgcgtcttccccaaaggtccagttcaggtgtcaccttccta

SEQ ID NO: 20807 - DNA, 60 bp, Homo sapiens
aagaatgtgcctatcgagatccactacatgaagctgtagccagacactcctggggagacg

SEQ ID NO: 20808 - DNA, 60 bp, Homo sapiens
gcattcgaaacatgagtatacagaagtctttggtaattcaggatcactgatgagtaaaac

SEQ ID NO: 20809 - DNA, 60 bp, Homo sapiens
gtacaacaggggctagcttgccagcacaccgttggttagatgacatccgtaagttctgta

SEQ ID NO: 20810 - DNA, 60 bp, Homo sapiens
aaatgacttcccagggctgacctctgacttcagggcaggattggggaatgaagccaggca

SEQ ID NO: 20811 - DNA, 60 bp, Homo sapiens
gcccaccattgacgggagagcaggagaacttgtatgtgatccagggatgcattgaatggt

SEQ ID NO: 20812 - DNA, 60 bp, Homo sapiens
ggcatgtccattaactgccctcaccgttcttttccaagcataactgctagactggatggc

SEQ ID NO: 20813 - DNA, 60 bp, Homo sapiens
ctagaatcttctccacataccacctcccatcagaaatcatgtccttgaaagtgctgttga

SEQ ID NO: 20814 - DNA, 60 bp, Homo sapiens
gaaaagggcagaataatgcagtagttaggaacacagctctggggacagattgcctgggct

SEQ ID NO: 20815 - DNA, 60 bp, Homo sapiens
tgcgtccaagtcgtgtggcatttggcagcgtgtttccaagtggacctgtggtaatcactt

SEQ ID NO: 20816 - DNA, 60 bp, Homo sapiens
ctcctagctacaagtagaaggagtccactctaccattgactgtgtgcaaagtagcacatt

SEQ ID NO: 20817 - DNA, 60 bp, Homo sapiens
ggttgagctgtgtatccctggacaaattggttgaccactcaaagaccctcctttctaatc

SEQ ID NO: 20818 - DNA, 60 bp, Homo sapiens
ttgatggaggatggtctgggagactatccccttctacggaaacattccctactaggagac

SEQ ID NO: 20819 - DNA, 60 bp, Homo sapiens
gcaagtcatttgaggtcccagaagtccagcatagagatagggagattgtgggcagatctc

SEQ ID NO: 20820 - DNA, 60 bp, Homo sapiens
caacatagagcatttcatctccccagcaagatccatgtgtcttttcctagttaatgcctc

SEQ ID NO: 20821 - DNA, 60 bp, Homo sapiens
gcctcgaattactcatcgtgaaattgaggtcaagccactcattcacagacagggctgtgg

SEQ ID NO: 20822 - DNA, 60 bp, Homo sapiens
tgtgggttaggaatctggacagtgagggcagggttaatcttcagttctgtgccaccagct

SEQ ID NO: 20823 - DNA, 60 bp, Homo sapiens
cctgattccttgtcctttgcttcatccgctggacagatgctgagcattgtctgcagtagt

SEQ ID NO: 20824 - DNA, 60 bp, Homo sapiens
cgcctccaagaccctgagccgtgccaaactggagattcttcaccttcgctctatgttgaa

SEQ ID NO: 20825 - DNA, 60 bp, Homo sapiens
cctttgtagccatggaacccaatcagacacggagcctgttactatgacttccctgcagat

SEQ ID NO: 20826 - DNA, 60 bp, Homo sapiens
ccatctctggcacatggtaaattctcgtgactgaaccctagtacagcattgtgaaggact

SEQ ID NO: 20827 - DNA, 60 bp, Homo sapiens
tcttgcctggcttctttctctaaggcagttccatcaagactgtctttgtatcgcgaagcc

SEQ ID NO: 20828 - DNA, 60 bp, Homo sapiens
gatggtaagtgaggttacacacatgctctgtttgttttccacttttgcttgatgggacag

SEQ ID NO: 20829 - DNA, 60 bp, Homo sapiens
ggatcagtgatttgtcatgcacagacacagcacataactccacatttcaggtaacagctc

SEQ ID NO: 20830 - DNA, 60 bp, Homo sapiens
gagtggtctgacttcacactcaggaggtacttgttgaacactgattgtatgccataaggg

SEQ ID NO: 20831 - DNA, 60 bp, Homo sapiens
gtctggaggcacaaatcaaaggggacctaagtaggcaggaagtatcactgaaaaccttca

SEQ ID NO: 20832 - DNA, 60 bp, Homo sapiens
acagcaaacaatggactattgactaagctttcagagctgtgggtgttctcagagggaggc

SEQ ID NO: 20833 - DNA, 60 bp, Homo sapiens
gggtaattcccactaaacaagacagaggtggtgcctgtcatcaggaacttacattctgga

SEQ ID NO: 20834 - DNA, 60 bp, Homo sapiens
agagacttctgaccccaaaatgccaacattactcttggtggtctttcaaggtaattcccc

SEQ ID NO: 20835 - DNA, 60 bp, Homo sapiens
tcattgcaaagaagatagtgagaagtccaccctctgagggttcctcttgccacttggggt

SEQ ID NO: 20836 - DNA, 60 bp, Homo sapiens; identical to SEQ ID NO: 4855

SEQ ID NO: 20837 - DNA, 60 bp, Homo sapiens
ttgtaagactgcttcttcctcagtatctcgtgcaggcagcttgcagagggacccttaatg

SEQ ID NO: 20838 - DNA, 60 bp, Homo sapiens
agactggggatttcaaagctctctggctctaactgcctcctgggaacagcatggaagctt

SEQ ID NO: 20839 - DNA, 60 bp, Homo sapiens
gttgagagctccagggagtcactgcgactacttccttgctccatttgtgaactgagaagt

SEQ ID NO: 20840 - DNA, 60 bp, Homo sapiens
ccagcttcagagttaatgaggtaacacaaattcccacaccatcacaatgtgagatgggtc

SEQ ID NO: 20841 - DNA, 60 bp, Homo sapiens
aaaacaggcttgataaaggccagccgacttctgccagtaggctaaaactcacagactctc

SEQ ID NO: 20842 - DNA, 60 bp, Homo sapiens
tccacagacttgggtttgagctccacgtcccacagtcaccacgtgatcttcagaaaagaa

SEQ ID NO: 20843 - DNA, 60 bp, Homo sapiens
catccttccccattgcttcctccaggaatactggaataatatggctttgagatattggcc

SEQ ID NO: 20844 - DNA, 60 bp, Homo sapiens
aacccaagcagcaccctgagaaccatcccagaatatgcagagtgtcagagctggacatat

SEQ ID NO: 20845 - DNA, 60 bp, Homo sapiens
gttaatcagtgagatttgatgggtgatgagtctaagaaatggattttgccatggccaggt

SEQ ID NO: 20846 - DNA, 60 bp, Homo sapiens
ggtgacccatctgttgccatatgctaggcatctgcttttatcaccctcatttgtggtcct

SEQ ID NO: 20847 - DNA, 60 bp, Homo sapiens
ggggaataggtgaaggtgagccactgtcactacaacaactgagttcatccatgatgacta

SEQ ID NO: 20848 - DNA, 60 bp, Homo sapiens
ctggcttccctgagttccagcatactgtacttggatctgtcccactaatctcctatcttt

SEQ ID NO: 20849 - DNA, 60 bp, Homo sapiens
ctgataaagtgtattcagtcctgaatgtcaattgagaactggctctcatcactggctttc

SEQ ID NO: 20850 - DNA, 60 bp, Homo sapiens
ggcccgtaggattctatagttgctttgagattctaaagtacctcagtggactacaaacct

SEQ ID NO: 20851 - DNA, 60 bp, Homo sapiens
cgctgcctctcaaatccagggacatgtagatggtggtagaatctcacctttcaggtggaa

SEQ ID NO: 20852 - DNA, 60 bp, Homo sapiens
cactatggaccagcttacagagcaggaacttacctgcattgttcttgggtgctattgggg

SEQ ID NO: 20853 - DNA, 60 bp, Homo sapiens
taccagtagtaaccagaagaaactcctagataggctgtacaagtggttttctagcttctt

SEQ ID NO: 20854 - DNA, 60 bp, Homo sapiens
gtgataggaactgatatttccaaggaatccctgcatcagtcctggcctttctttgcgcta

SEQ ID NO: 20855 - DNA, 60 bp, Homo sapiens
tttccctgtccttccagctggtcagcaagagcttagccagcactgtggtgtgagtgtgat

SEQ ID NO: 20856 - DNA, 60 bp, Homo sapiens
catcagaaaagctcatcagtagagccggacagaaaagcttcatagatccttaaaatgcag

SEQ ID NO: 20857 - DNA, 60 bp, Homo sapiens
ctgcttactgatgagaaatccccaacttatgatctcaccatctgtttgccaagtccaggc

SEQ ID NO: 20858 - DNA, 60 bp, Homo sapiens
tttctgtctgctgctggcatccttcttgtcttgttttgagttgctcgcctctgtctgctc

SEQ ID NO: 20859 - DNA, 60 bp, Homo sapiens
ctagactatgtagactatgcccaaatcagaacgggaaccacatcatcccacccagtgcac

SEQ ID NO: 20860 - DNA, 60 bp, Homo sapiens
taggtacatgtctaggctatcctacggacgcttctgaggttcctgatagagtgtgactcc

SEQ ID NO: 20861 - DNA, 60 bp, Homo sapiens
gctcatcaaacagcctttgaggaccaactgtgctcacagcaaagagcttatccttgcact

SEQ ID NO: 20862 - DNA, 60 bp, Homo sapiens
ctcaatgcactttatactcttaggaggaaatcccctactcatgggctgttgaagaacctt

SEQ ID NO: 20863 - DNA, 60 bp, Homo sapiens
tccacatcagacctgggaggcaggactcagtggatgaggctgtgttttgcatttctgagt

SEQ ID NO: 20864 - DNA, 60 bp, Homo sapiens
caagccccaaacagccttgtgactcaatgttctcatctgtacaatagggattatggcacc

SEQ ID NO: 20865 - DNA, 60 bp, Homo sapiens
gactgaacaccttccctgtgttagcttatagggtacatttcccagtgtgtgtaatgcacc

SEQ ID NO: 20866 - DNA, 60 bp, Homo sapiens
ctcatagcctacttcttgccttctagcctagagccacctgattgtcccttgaagctctga

SEQ ID NO: 20867 - DNA, 60 bp, Homo sapiens
aggggatccttagtggcagatgcttaaacctttgagccttccctgaaatactgctcaggg

SEQ ID NO: 20868 - DNA, 60 bp, Homo sapiens
ggttctgcttctgtggatgtagaatggggcaatcaatggctgtcttgctcaattggccag

SEQ ID NO: 20869 - DNA, 60 bp, Homo sapiens
gtgggtggagaatgcttgttgagccaaaagcctgcatccttcttgcttctgtcttgactg

SEQ ID NO: 20870 - DNA, 60 bp, Homo sapiens
gatgttaccatcagtagggctgtggttctgtgacgtgtcctctagccacacacttaatgc

SEQ ID NO: 20871 - DNA, 60 bp, Homo sapiens
gcaggtcacagctgagataccagttgatctgaataccagggaagtcatcagagaatcagg

SEQ ID NO: 20872 - DNA, 60 bp, Homo sapiens
agcctttcctcattcaatgtcggtcctgtgtttgaagacctgcaaattaactgataacaa

SEQ ID NO: 20873 - DNA, 60 bp, Homo sapiens
gaatgcagagagcaatggctattacaggcctcaaagagtccgaatcctttgcaatggcca

SEQ ID NO: 20874 - DNA, 60 bp, Homo sapiens
ctcgttccctgtcctgcttcctccactccctcatcggtatcttgagagcactgcttaata

SEQ ID NO: 20875 - DNA, 60 bp, Homo sapiens
gtgatgtcactctgaggctcaggaaaagaaccagggctttgaatgttcaactccaggcag

SEQ ID NO: 20876 - DNA, 60 bp, Homo sapiens
ctcagccttcaacctattttgccccattctgacagtaggtttcaggcctccttttcacca

SEQ ID NO: 20877 - DNA, 60 bp, Homo sapiens
ctcaggaaggcattcctagctcagagtaccctcctggagtctacactggaaggggctcct

SEQ ID NO: 20878 - DNA, 60 bp, Homo sapiens
cataataggtcatggtggtcacatgaaaagtaaagggtaaccgattggggtaggtggtgg

SEQ ID NO: 20879 - DNA, 60 bp, Homo sapiens
acgtgtaggttcaggcactcaacagcaccatcaagatgcaaaacagctctgtcccctcaa

SEQ ID NO: 20880 - DNA, 60 bp, Homo sapiens
gccagacaggtagtgaagaatgctgatggcgttttcatgcctgagtctgctgagaaagag

SEQ ID NO: 20881 - DNA, 60 bp, Homo sapiens
ctgtgcctgtcactgagtaagatgcaggagaagttgggcaaaagccctcaggataaacga

SEQ ID NO: 20882 - DNA, 60 bp, Homo sapiens
gccagtcccatcagtgctcaagttgcagacagcatcaaaaccaattgacctctcagtagc

SEQ ID NO: 20883 - DNA, 60 bp, Homo sapiens
ctttggtaacaccatagggcgtaggtttgagcttcttagcctttggcgctgtctgaaaag

SEQ ID NO: 20884 - DNA, 60 bp, Homo sapiens
agactgcaggctacaagagttgtggctgagatttgaaccctgctctgtcttactccagag

SEQ ID NO: 20885 - DNA, 60 bp, Homo sapiens
aaaattcgaaaccatcagtagacaccgaagggcctgctctggtggagatagacagatctg

SEQ ID NO: 20886 - DNA, 60 bp, Homo sapiens
caggccacaggcaagtctgtccagagcactggtaggaatgagggaaactaggaatgacca

SEQ ID NO: 20887 - DNA, 60 bp, Homo sapiens
cacaggtgactgacaagactttcacaagtgcagacaaaggtttggattcaaagcctggtc

SEQ ID NO: 20888 - DNA, 60 bp, Homo sapiens
caaggaggctctccagcgtgtttccatgtaacctagatattggagctgtaaaagggcttg

SEQ ID NO: 20889 - DNA, 60 bp, Homo sapiens
gctccttgttcagattgaagcttatgtacagcacttagctgtctgacctttcacggcagc

SEQ ID NO: 20890 - DNA, 60 bp, Homo sapiens
tgtactgtaggagtgctgctggcttgaggctcctgagatctggcatggctgttatactga

SEQ ID NO: 20891 - DNA, 60 bp, Homo sapiens
ggccaacaaaccagataacctagcagaaaccaaagacaaggttagactacggcactatga

SEQ ID NO: 20892 - DNA, 60 bp, Homo sapiens
gcctagtgctcactttacaagatgagaagtgtaataggagacccagttcctgtaattctg

SEQ ID NO: 20893 - DNA, 60 bp, Homo sapiens
gagtgaaataggcaagtctttccagtaaagttcaaaagaggtaagaatgcctgctatcac

SEQ ID NO: 20894 - DNA, 60 bp, Homo sapiens
tcctagtctgccctcacatatccctggaatggacacatacaggctggtcagggctttctt

SEQ ID NO: 20895 - DNA, 60 bp, Homo sapiens
gccaaaagtcaaccctcagtgtgttggactgcgattggaagtatcagtatcaatggattg

SEQ ID NO: 20896 - DNA, 60 bp, Homo sapiens
ccatctgctggtgttacctattgcccaaagataggtatgaatcagtcttaggattttgaa

SEQ ID NO: 20897 - DNA, 60 bp, Homo sapiens
aaaaccgaatgcttttgttccgtggagatgcactaacccagctggatgtgttgaatccag

SEQ ID NO: 20898 - DNA, 60 bp, Homo sapiens
ctgagctcccatccatcatataggacttctgtgattaaagaccgaagcacatggttggac

SEQ ID NO: 20899 - DNA, 60 bp, Homo sapiens
actcccttcatcaaccgggcactttacacctgagccacatttgcttcctggaaagcatga

SEQ ID NO: 20900 - DNA, 60 bp, Homo sapiens
tgtacatgatgtgatctactgtcccctgaaggtcagccgtgatcagttaaaggtgtaccc

SEQ ID NO: 20901 - DNA, 60 bp, Homo sapiens
aagccaccttcatccctagcccagcctatcctaatgaactacctgatttctgcctccagg

SEQ ID NO: 20902 - DNA, 60 bp, Homo sapiens
cacaggagaaatacaggcagctgtgccagcaactttccctaagagagtgttaacccaata

SEQ ID NO: 20903 - DNA, 60 bp, Homo sapiens
gctgactactatggaataaagcaggtgattgacttgggttccggtaaaggctacctaagc

SEQ ID NO: 20904 - DNA, 60 bp, Homo sapiens
gtgaaggaaagctgatatttgtgagtaggatgcaagggaaccgtagacatagagacctgc

SEQ ID NO: 20905 - DNA, 60 bp, Homo sapiens
ttgaaagcagattagactcgtgttcaaatcccagatcttgttagcagtgtcatcttgggc

SEQ ID NO: 20906 - DNA, 60 bp, Homo sapiens
atttagaaggggttgagagttcaccctgccttaggctcagcatagtgctggcattataca

SEQ ID NO: 20907 - DNA, 60 bp, Homo sapiens
gaaggatggggaacacagagcagggattaggctcactgaagtcctcattctgctttctac

SEQ ID NO: 20908 - DNA, 60 bp, Homo sapiens
ccattggaagggcactaggggagctcattgtctaagactgccatccctaactgcctttta

SEQ ID NO: 20909 - DNA, 60 bp, Homo sapiens
actgcactcttcgtagtgccagggttggatgtgttgcttctcctaagctgtttccctgca

SEQ ID NO: 20910 - DNA, 60 bp, Homo sapiens
tttctgttcggaggactaaaggaagccagagctggttcagatgttcatgagcacctgtgc

SEQ ID NO: 20911 - DNA, 60 bp, Homo sapiens
tcattgccagtgtagttcccaatatggcctcatactgacttcagataccccagtgtatct

SEQ ID NO: 20912 - DNA, 60 bp, Homo sapiens
gggtgcaatgggtaatttggaggcgagactaggggaaagtgcatgtgctgtttctaccat

SEQ ID NO: 20913 - DNA, 60 bp, Homo sapiens
gaaattgcaacccttgtacacactggccacaggacctcagggaagatgtcttatctgtgt

SEQ ID NO: 20914 - DNA, 60 bp, Homo sapiens
ctttcagtgttcacctctaagagttgtagggagtcaacgagtaaacacatgtaaggcacc

SEQ ID NO: 20915 - DNA, 60 bp, Homo sapiens
cctggccaagctgacgtccctccattttctcaactgttgccactagaatgtagtaggaac

SEQ ID NO: 20916 - DNA, 60 bp, Homo sapiens
cactggccgattcactcagtgtggggtccttcaggactgcccttttctgccttctcaatt

SEQ ID NO: 20917 - DNA, 60 bp, Homo sapiens
tattcctggttcatttccatgcttattgcctctgagcctttgctcctgcttgccctgctg

SEQ ID NO: 20918 - DNA, 60 bp, Homo sapiens
cccaaaagccatagattgggcaagaaggattagagacttcctcagcacagttagttctga

SEQ ID NO: 20919 - DNA, 60 bp, Homo sapiens
tctctgaagccctgtagtacttccccgggtttgtcctgcagaccaaggcacattgtagtt

SEQ ID NO: 20920 - DNA, 60 bp, Homo sapiens
taattgaaccaacactgggatctagccccaaattctatcactgtgagcacacaggctcac

SEQ ID NO: 20921 - DNA, 60 bp, Homo sapiens
cacaaattccctggttgtgtccccgttcatgccagttgttctagcattatggttggtaat

SEQ ID NO: 20922 - DNA, 60 bp, Homo sapiens
aagtactctatatccagcccaatcaccaggcctttacttgtgctgtggcccctactacag

SEQ ID NO: 20923 - DNA, 60 bp, Homo sapiens
aattttgcatgtgggtcttattcactgtctccctccagtcaaacgcaagctccaggcagg

SEQ ID NO: 20924 - DNA, 60 bp, Homo sapiens
tttgctgtataccaggcctacacagtgctagacactggaggcaaagacagacaaacagac

SEQ ID NO: 20925 - DNA, 60 bp, Homo sapiens
ccccagggtttatttgaaggttctcttgttcctgtaaatcctgtgccttgacatgcttac

SEQ ID NO: 20926 - DNA, 60 bp, Homo sapiens
gatttctgccttgggcttaaggatgattgtgtgggctgcacaggctgaaggttagttgag

SEQ ID NO: 20927 - DNA, 60 bp, Homo sapiens
gtagcacataacacaaagctcctgtaagcaacctgctagcccctttctccaagagtccag

SEQ ID NO: 20928 - DNA, 60 bp, Homo sapiens
catcaagaaacaggtaccgttaagggaatggccaagtaagtatcaatcagttcccaaatt

SEQ ID NO: 20929 - DNA, 60 bp, Homo sapiens
tgcaaactcctacaggacagtggatcctccaaagaaggtatacgatgaggcatccaggga

SEQ ID NO: 20930 - DNA, 60 bp, Homo sapiens
cctgacacttcaagccctagacctgtgcctaagctttaccctactctgtacatccttgac

SEQ ID NO: 20931 - DNA, 60 bp, Homo sapiens
gcatcacatggatgctataatggagcatttctaccccagaaatctgtgctctgcctatta

SEQ ID NO: 20932 - DNA, 60 bp, Homo sapiens; identical to SEQ ID NO: 4855

SEQ ID NO: 20933 - DNA, 60 bp, Homo sapiens
aaaggcacagttaagcaagccaatgttgtgtgggcataagagactagtgatgaatgatca

SEQ ID NO: 20934 - DNA, 60 bp, Homo sapiens
ccaagggaaccaaagtcatgatgacatatgccagagcttgggtaaaggatacagtgagga

SEQ ID NO: 20935 - DNA, 60 bp, Homo sapiens
gccatggtcaaaggagacattccaccattttccatccccgtaattggttggcccttttct

SEQ ID NO: 20936 - DNA, 60 bp, Homo sapiens
agtggcataagcatcctggaacgcaaacggcatttcccagaaagctacgcgacaatctga

SEQ ID NO: 20937 - DNA, 60 bp, Homo sapiens
tcacgcccatgttcccttttatggagctgcacctgacattcgtaaagagcccatagtgag

SEQ ID NO: 20938 - DNA, 60 bp, Homo sapiens
aaagttccctgacaccttgaccgtgggtctgagagaacagaaatacagctccatcgttgg

SEQ ID NO: 20939 - DNA, 60 bp, Homo sapiens
gagtgcttggctgtgctacctgattcctgagattggtgaaagagggcttggtttaccaag

SEQ ID NO: 20940 - DNA, 60 bp, Homo sapiens
ccctgggtttcttgctgctaagcttgttccagctcgcagaagtcagtgataacagaacac

SEQ ID NO: 20941 - DNA, 60 bp, Homo sapiens
tggatattccagtcctcgcagctcagggctctgcactccccatgaaagaagcataacaat

SEQ ID NO: 20942 - DNA, 60 bp, Homo sapiens
agctagaattccacccctttcactcccaccccagaaagcaagcaagaatgaatgttctgg

SEQ ID NO: 20943 - DNA, 60 bp, Homo sapiens
ggcattctgttgtatctttccagggtattgggaggatccagttggatgctctgtgaaact

SEQ ID NO: 20944 - DNA, 60 bp, Homo sapiens
tcgtccaatacttggtcggagaggcactgcatctaaaagggcctgttttggtggctaatc

SEQ ID NO: 20945 - DNA, 60 bp, Homo sapiens
gatagattgtaggtagaattgaggtcccttttgtacccttcccagtgctcttcaacttct

SEQ ID NO: 20946 - DNA, 60 bp, Homo sapiens
gttcagcacattgccctgtcctctcgatattagcacacagtgcaggttcaggcacattga

SEQ ID NO: 20947 - DNA, 60 bp, Homo sapiens
gttgctgtgtgcatctgtgctgcttcccgtttcattgctgagtggtgttcctgtaaatgg

SEQ ID NO: 20948 - DNA, 60 bp, Homo sapiens
ggagagcagagatcctagtaagacaggaagttcagagaagtgagcctggcactttccttg

SEQ ID NO: 20949 - DNA, 60 bp, Homo sapiens
aacggcagagtgagttgtagccagcaccttgcagtctatgctgtagctttctttccaatt

SEQ ID NO: 20950 - DNA, 60 bp, Homo sapiens
tacattctcctgccatcctggaagaaaggcagctctgggattaagatcgagggacagtag

SEQ ID NO: 20951 - DNA, 60 bp, Homo sapiens
atgaggcagctctggaactcaagagtcacagcctggtcatgatcatcagggagagaagct

SEQ ID NO: 20952 - DNA, 60 bp, Homo sapiens
gttatggaagagttgtcccttcagctttccccagcagttggtttttctctgtttctaggg

SEQ ID NO: 20953 - DNA, 60 bp, Homo sapiens
tcactctgtaatgaatgtaaaaccacctttgggtagagagtatgataccagtagttctat

SEQ ID NO: 20954 - DNA, 60 bp, Homo sapiens
ggaagtacaggagttacctaggcactgaagatgagagaggaagccttccagacagagaga

SEQ ID NO: 20955 - DNA, 60 bp, Homo sapiens
gtcatctctataatggggacattagctgactaccaggtgttccacctgaaagctctgtaa

SEQ ID NO: 20956 - DNA, 60 bp, Homo sapiens
cttcccctgttctgtccctgcacagaggcagttaaggcagaaaatcacacaccaagttca

SEQ ID NO: 20957 - DNA, 60 bp, Homo sapiens
agaacttgcctcctgaacctgactaggttactcgcctgatgaaccagtatctccatcacc

SEQ ID NO: 20958 - DNA, 60 bp, Homo sapiens
catctgccatcactgcttctcaccaatggccacactcaggagaaaacacaggcactagtg

SEQ ID NO: 20959 - DNA, 60 bp, Homo sapiens
tagaaatgtgctatctcccgagaaagcatcagtgtgggatgccttcagctcatgccatcc

SEQ ID NO: 20960 - DNA, 60 bp, Homo sapiens
taaggatttctctagcacaggatcagagaggatcttggttattggtgactggtgagattc

SEQ ID NO: 20961 - DNA, 60 bp, Homo sapiens
tctcttgggacaagcacactttaaggggagcgtattcattgcaggaccaaggctcaacgt

SEQ ID NO: 20962 - DNA, 60 bp, Homo sapiens
cagttgatggatttcccatccccagaacggggaagcaagatgcactgtggattttccttc

SEQ ID NO: 20963 - DNA, 60 bp, Homo sapiens
ggtctagctcatggttcagaaggtgcaaacctagtccatgaatccctgcttgtaatgatg

SEQ ID NO: 20964 - DNA, 60 bp, Homo sapiens
cagtatggagcacaattctgtgcctattagatgctcttaaatacccgacttctcagggcc

SEQ ID NO: 20965 - DNA, 60 bp, Homo sapiens
gttgcgggtgcttgcactgataatgtgagggcatggagacagacaataggttgaatgctc

SEQ ID NO: 20966 - DNA, 60 bp, Homo sapiens
tgttcttgtcatccgcattttccaaacggagtatgaagcccagaggtgctgggtgacttg

SEQ ID NO: 20967 - DNA, 60 bp, Homo sapiens
ttagagtcattaaccaagagtgaacacctctatccctttctacctagacttcatggtaga

SEQ ID NO: 20968 - DNA, 60 bp, Homo sapiens
gggttgcttctatcagaaatggggaaaatagatgttggatagcaaaagtccaccatgtcc

SEQ ID NO: 20969 - DNA, 60 bp, Homo sapiens
agggtagatttaggcacgggaaatgtaaacagcaaatcagccactaaaagtgcgttaatg

SEQ ID NO: 20970 - DNA, 60 bp, Homo sapiens
tccaggcaggaacaggaggctctgcgtgatggcgtcaacacaagtcagaactccacttta

SEQ ID NO: 20971 - DNA, 60 bp, Homo sapiens
cctcgcctatgagttgtctttcatccttgagcatgagttttagagtcagaagaacaacag

SEQ ID NO: 20972 - DNA, 60 bp, Homo sapiens
aagaaactccacagagatggtgactttcccccagcacagctcttgccctcaaggaagaga

SEQ ID NO: 20973 - DNA, 60 bp, Homo sapiens
tcagtattgctccagagaacctgcagcatgacatcatcaccagcctacctgagatcctag

SEQ ID NO: 20974 - DNA, 60 bp, Homo sapiens
tgacttaccttcctcagtcctgtgcatccaggctgttaggtgactctgctgtgacttagt

SEQ ID NO: 20975 - DNA, 60 bp, Homo sapiens
gtctggcgttatgagaggagatagtaaggtgacaggtggaatccattgtgtaaggtattc

SEQ ID NO: 20976 - DNA, 60 bp, Homo sapiens
gaaatcgcaacatcatggtacattgctaagtccatgcttgtgtgtgtgacagtaggcttg

SEQ ID NO: 20977 - DNA, 60 bp, Homo sapiens
ctttggcatcttttaatgcccaatccttatttgccttttcctgattttctcaagaataca

SEQ ID NO: 20978 - DNA, 60 bp, Homo sapiens
cccagaggttaagagaatgttgtgtatttctgcgaacttctttcagatggtcattttggc

SEQ ID NO: 20979 - DNA, 60 bp, Homo sapiens
ttaatgcctggagggtccacgtttcatatatccagtacaccagtgaaaaggtacatgacg

SEQ ID NO: 20980 - DNA, 60 bp, Homo sapiens
ggaaacagctaggcttaagtgttactcagacattgctagattcagcagaatccacagccc

SEQ ID NO: 20981 - DNA, 60 bp, Homo sapiens
cccgttatgctgcctgtacaacctgtattgttccatagcctctttcatcttctctcaccc

SEQ ID NO: 20982 - DNA, 60 bp, Homo sapiens
gttgttttcacgaagttctgtgtactggcaaagcctgttgccttcagcacactcacaaaa

SEQ ID NO: 20983 - DNA, 60 bp, Homo sapiens
ggcagtgagtgagtctggcattggtaggtgatgctcacacttatgcattccagtgataac

SEQ ID NO: 20984 - DNA, 60 bp, Homo sapiens
ttgaagatctgcagtgagagggtagcctggattagccacgtgtgcccaaaagcagagact

SEQ ID NO: 20985 - DNA, 60 bp, Homo sapiens
taccattgccctttgcaagggtctgcccaatcaggtgacaactgctcactttccaaagtg

SEQ ID NO: 20986 - DNA, 60 bp, Homo sapiens
gagcatttgtgaggaagacacattagccccacatgaccctgtttaatgcggttaggtatt

SEQ ID NO: 20987 - DNA, 60 bp, Homo sapiens
tctgtggtgtgacagacatccagtggccttggtaaactctacattcaggcaggcttactc

SEQ ID NO: 20988 - DNA, 60 bp, Homo sapiens
gaggttctgttgaagcaaagacccctagacacaaagtaatgacttgttagtagtggaatt

SEQ ID NO: 20989 - DNA, 60 bp, Homo sapiens
ctcggggtgaggaccagaccttgttcataaccctgggcctcttaaccactgatctttgaa

SEQ ID NO: 20990 - DNA, 60 bp, Homo sapiens
gcaggcttcttggttcagcagacagaggccattgggaagttaagagaggctctcaaactt

SEQ ID NO: 20991 - DNA, 60 bp, Homo sapiens
gcagaaaacgatagcagtggagaggagtttgtttcagacgaccttcaaggttatggctca

SEQ ID NO: 20992 - DNA, 60 bp, Homo sapiens
cctatagctctagaagtgtgactccaggattatgctattgaggacataaggcactctctt

SEQ ID NO: 20993 - DNA, 60 bp, Homo sapiens
ccccatttagccctaaaaaggcgtgaaggactgatgcgtgccgcaacacagatgtacttt

SEQ ID NO: 20994 - DNA, 60 bp, Homo sapiens
ggccttaaagacagcaaaccagatttaggtgatagagaataactggagagaatgttggga

SEQ ID NO: 20995 - DNA, 60 bp, Homo sapiens
ccgtgggaactgcattctagcacctaaaggaatgggtgaggagcatgagcaacagatgaa

SEQ ID NO: 20996 - DNA, 60 bp, Homo sapiens
gggacctggtctgatggggattagtaggcttatatgaagagacacaagagggcttgctct

SEQ ID NO: 20997 - DNA, 60 bp, Homo sapiens
ggctcctgttcccaaggcagcagtcttcagacatttcactcgggaatctcctgaaagaat

SEQ ID NO: 20998 - DNA, 60 bp, Homo sapiens
tactttcaagggtcatcggtagcataactgcaccttggtgcttggagaaagcagagcgca

SEQ ID NO: 20999 - DNA, 60 bp, Homo sapiens
cagatgcgttttgtgtcaactcaggatccagtgattcgagtaggtaaccttgttgctcca

SEQ ID NO: 21000 - DNA, 60 bp, Homo sapiens
gcgtccattcaaacacgcataagcacacacacataccgtccagcttctctactacagaag

SEQ ID NO: 21001 - DNA, 60 bp, Homo sapiens
ttagaggtgctggaaaggattgtcacttggagcctttagtagacaaaaggcagaaagtga

SEQ ID NO: 21002 - DNA, 60 bp, Homo sapiens
tgaaccaggcccaagctggggaatagcaactcagtccctgcccttgtggagtctgtggct

SEQ ID NO: 21003 - DNA, 60 bp, Homo sapiens
tttggctgcttatgctttcagtgtcatctaggaaccatagcctaatcgaaggtcattagg

SEQ ID NO: 21004 - DNA, 60 bp, Homo sapiens
gaagtcacaggctgtggtgcctaggcagaccctggtttgaatcttggccttaccactttt

SEQ ID NO: 21005 - DNA, 60 bp, Homo sapiens
aagccacgagggtaacatgagctatggcagtcggttgtgaaaccacaggaagtgtatggg

SEQ ID NO: 21006 - DNA, 60 bp, Homo sapiens
gtccctactgcacttccagcaatggactgggaaaatcaggctcaagtcattgatactggt

SEQ ID NO: 21007 - DNA, 60 bp, Homo sapiens
tcacagtgccctttcagctacctggctctgggagtgggttcagtatcaacctattctttc

SEQ ID NO: 21008 - DNA, 60 bp, Homo sapiens
gtgagaactaaggtctttctgatgcaaaatctaccctctttctacaacacccaatcgccc

SEQ ID NO: 21009 - DNA, 60 bp, Homo sapiens
ttgagagccatcatagtggtgaggagtgtgagtgctagagtcaggctgatcaaatcccag

SEQ ID NO: 21010 - DNA, 60 bp, Homo sapiens
cctctggttcctcagccttcactgttcgtgttccaatcttgaaacaaagtcagaaactgc

SEQ ID NO: 21011 - DNA, 60 bp, Homo sapiens
ggttcatcccacctggcatatgtatgcatgaactagagatgtgtttgcctgctgggcatg

SEQ ID NO: 21012 - DNA, 60 bp, Homo sapiens
ggtgagacagtgctgtgggttatgagtgtattcacaatgatggtttctatgtggtgaaga

SEQ ID NO: 21013 - DNA, 60 bp, Homo sapiens
gctgactcaactgaaatcatggcgtttgacagcacttggaaggtagaccggagtgaaaac

SEQ ID NO: 21014 - DNA, 60 bp, Homo sapiens
caaacagactttgaatttagaggagggcaatggccagagtgaaaatgggcgatatcatga

SEQ ID NO: 21015 - DNA, 60 bp, Homo sapiens
acaataagctgctgctcggaggcatttgtcacttctgagtttgcaactgtgtcagaggcc

SEQ ID NO: 21016 - DNA, 60 bp, Homo sapiens
taattacggtgactctaaccacagcctcctgctctgacagcactgcagaccaagcctgca

SEQ ID NO: 21017 - DNA, 60 bp, Homo sapiens
cttcacctcctcgatcttgtaggtttaagtttgcacttatcattcatttcactggcaaac

SEQ ID NO: 21018 - DNA, 60 bp, Homo sapiens
gaggtgcctgtgcagcgagcagtaaacatggaagcactgagggtcttatgcagaaactaa

SEQ ID NO: 21019 - DNA, 60 bp, Homo sapiens
ggctgatagtaaaccaaacctcaaaaggaccaagacaacagagagcatggaaagaaatgg

SEQ ID NO: 21020 - DNA, 60 bp, Homo sapiens
ccctatttacacctcagggtgaatttgttgatcaccttagctcctgtggtccttggggct

SEQ ID NO: 21021 - DNA, 60 bp, Homo sapiens
cccatgtgaaacagtgaacagtgacacagaaatgcatgaaggcctactcaccccgagtag

SEQ ID NO: 21022 - DNA, 60 bp, Homo sapiens
taattctgtggaccactgtaaacgagggcctagttcagtgtctgcctcatgggaagcttc

SEQ ID NO: 21023 - DNA, 60 bp, Homo sapiens
cccatcatctgctttggtcacttcagtgcaccttgcttgcgaagagtacagtaggcattc

SEQ ID NO: 21024 - DNA, 60 bp, Homo sapiens
cagctgcggtgagtgttgcttcttgcctgatgggacttctttggtgttgctgctcctccc

SEQ ID NO: 21025 - DNA, 60 bp, Homo sapiens
ggtcaaatgagcaaaaggagaagcagcagacaagtggggcaagcctatttggtcaaaagc

SEQ ID NO: 21026 - DNA, 60 bp, Homo sapiens
tatggaagtacatgaaggactatttccccatctcgctggtcaagactgctgagctggacc

SEQ ID NO: 21027 - DNA, 60 bp, Homo sapiens
gggaaagtaacaagtgttcatgaagatgtggagaatttgagaccctcgtattttgctgat

SEQ ID NO: 21028 - DNA, 60 bp, Homo sapiens; identical to SEQ ID NO: 4855

SEQ ID NO: 21029 - DNA, 60 bp, Homo sapiens
gcagcctacatgccttgttcctgctattagctcctagcacagtgcttgtacacagtggat

SEQ ID NO: 21030 - DNA, 60 bp, Homo sapiens
catgatgctgactgggtcaaatcccttgaggaccaagacttggccttggcattcagtaac

SEQ ID NO: 21031 - DNA, 60 bp, Homo sapiens
ctaccttaacagctacctattacagccgtattctgctgtccgtggagacggtaagatctt

SEQ ID NO: 21032 - DNA, 60 bp, Homo sapiens
gaacttggggtccccatttatgggaggtgggtgaatatgggctcctagcaggtgattatt

SEQ ID NO: 21033 - DNA, 60 bp, Homo sapiens
tgcagtgctgtagtcagcatctgccatagtatcagagccaacagcccatatgacagctgt

SEQ ID NO: 21034 - DNA, 60 bp, Homo sapiens
cttctctctgaccatagctcctgtctttccagctcactttctgtagtatcccagatccag

SEQ ID NO: 21035 - DNA, 60 bp, Homo sapiens
caggcgggaatgagaactgagatcagttagtagtatctgctgtgggtatgctttgtcctt

SEQ ID NO: 21036 - DNA, 60 bp, Homo sapiens
gcagccctagaatcaggatcaagggtgctgtttagagcggtttctgtagcatgtagcctt

SEQ ID NO: 21037 - DNA, 60 bp, Homo sapiens
cacattttcccacttgtgttccacctctcaatctaacctcactcccctgctcttaagccc

SEQ ID NO: 21038 - DNA, 60 bp, Homo sapiens
gaggtattgggccttcatagaaattgcctggaacccttgttcactaaagcctgttacact

SEQ ID NO: 21039 - DNA, 60 bp, Homo sapiens
aatttctggtacagcccagcttgaaatggctcttgagcctccgcttttcagctgactcct

SEQ ID NO: 21040 - DNA, 60 bp, Homo sapiens
gttaacagagaaatagatgctatgagagcatgagagcatggaggagagatgagtagagta

SEQ ID NO: 21041 - DNA, 60 bp, Homo sapiens
gtctaccagttgcctgggactgaggtagtggaagagttggggtggagtaggccaagaaaa

SEQ ID NO: 21042 - DNA, 60 bp, Homo sapiens
gcttttgtgtaactgcatctggtgtttgatcctcatgagagccctgttaaggaagggtac

SEQ ID NO: 21043 - DNA, 60 bp, Homo sapiens
atagcccactccaaatctatccttctcgagttcccactcactggaatctccagccttcca

SEQ ID NO: 21044 - DNA, 60 bp, Homo sapiens
cagagaagggcaagaactgtcttctgctttggccatcgtgatgacacattgaatgcctga

SEQ ID NO: 21045 - DNA, 60 bp, Homo sapiens
caaaatggtgtgagttatgagggatgaaggtaggcaagaatctgacttgaaggagcccca

SEQ ID NO: 21046 - DNA, 60 bp, Homo sapiens
gtggtccaaaaggtcacattcagttgtcatcaggcaactttaacccttagagtgcttccc

SEQ ID NO: 21047 - DNA, 60 bp, Homo sapiens
acacaaggtgcgggttgaagtagagttgaaaggggctgaggagctccagctgctgtggaa

SEQ ID NO: 21048 - DNA, 60 bp, Homo sapiens
gcccaggttctttgtaatatcttcctccacgtttttacgtatcaatcctgcattcaaaca

SEQ ID NO: 21049 - DNA, 60 bp, Homo sapiens
aaaacgactttgcctgtgttgattttctctgctcttctgttttctgtcaaatgacagaga

SEQ ID NO: 21050 - DNA, 60 bp, Homo sapiens
gtgagagggacactgtttcatctaagaggggaagctcgggaatgggtttgaggacttaag

SEQ ID NO: 21051 - DNA, 60 bp, Homo sapiens
gctaggatctggttagttgttccagactcaagttggtccctccttctgctctgtggagaa

SEQ ID NO: 21052 - DNA, 60 bp, Homo sapiens
gaagaatttgagagcataccatggctggcagtccataaaagactagttaggaacatcagc

SEQ ID NO: 21053 - DNA, 60 bp, Homo sapiens
cacagagcctggccattgctctcggcccattggttcatcatggtgcattgcgattcattt

SEQ ID NO: 21054 - DNA, 60 bp, Homo sapiens
gctgttgactcctgggaaagattggcattttgcaggctattcattcactagaattcgtgt

SEQ ID NO: 21055 - DNA, 60 bp, Homo sapiens
gcctgctttctgtgtgaatacgttgtcatttgatgtcatggtgttaagtatgaaggtgct

SEQ ID NO: 21056 - DNA, 60 bp, Homo sapiens
tgtcctgcctttctaggagctctgctgatgggcagatggttgaggatggttgtatgcata

SEQ ID NO: 21057 - DNA, 60 bp, Homo sapiens
ggatgcctcgcttttcagagactcgcgttcttggaacttacaccctcttgggtttgctat

SEQ ID NO: 21058 - DNA, 60 bp, Homo sapiens
tcaagcgatgaggagttcccagagctgagtggcccattctgctcagaacgaggcttcctc

SEQ ID NO: 21059 - DNA, 60 bp, Homo sapiens
ctgcagagaagctggaggtcaatcttgaaatctagggcaagaggagcactaggcaattgc

SEQ ID NO: 21060 - DNA, 60 bp, Homo sapiens
tctgaagcagtaatgccatgactcaccagtaatgccatgactcacaaacatatctttgtg

SEQ ID NO: 21061 - DNA, 60 bp, Homo sapiens
cccatctcacagttttgtctcccaggacttgggaagattacgttagatcatctatagggg

SEQ ID NO: 21062 - DNA, 60 bp, Homo sapiens
catggtatctgcccttgtgatgccagtaaacttaagccttcatggggctctctgacttca

SEQ ID NO: 21063 - DNA, 60 bp, Homo sapiens
ctcctcagcttcattgtgagacctcaagttcctcagcttccaggatgatcaacctagctg

SEQ ID NO: 21064 - DNA, 60 bp, Homo sapiens
cattccatcctcttcctgacaccaaacttctccctgttcccaaaccctgcctagctcact

SEQ ID NO: 21065 - DNA, 60 bp, Homo sapiens
caatcagtcaagctctatccaggacagggcaagcaggactctcacctccttcattagaga

SEQ ID NO: 21066 - DNA, 60 bp, Homo sapiens
cccagattgcactgaaagataggagctgctgcttcgttgtaaggagagctcaacctgttc

SEQ ID NO: 21067 - DNA, 60 bp, Homo sapiens
gtggtcagagggctcattcagcctcctacttcaggtcgaactatacttaccttctcttac

SEQ ID NO: 21068 - DNA, 60 bp, Homo sapiens
cttgatgtaagtgttctgtcaatttctgcagtaggtgcttgaccacatggttgtgagcag

SEQ ID NO: 21069 - DNA, 60 bp, Homo sapiens
cgacaacctccactgccattacccactaggcaagtacatcctgttttcagaatcagccca

SEQ ID NO: 21070 - DNA, 60 bp, Homo sapiens
tcaactcagggacagggttagaagggaggctcagaatgacaggcgtggtcaactccagag

SEQ ID NO: 21071 - DNA, 60 bp, Homo sapiens
gagctatttggtgatattgtctttgtccttggatccgaggcttctcctaccaactcattg

SEQ ID NO: 21072 - DNA, 60 bp, Homo sapiens
cagacattccagtgatagcatccaatgacctatgtaacggcacccttttttgctgtacgc

SEQ ID NO: 21073 - DNA, 60 bp, Homo sapiens
gggatgggaagctcgacccaggatgggaagcctactttgtgttgaacttcctattttgtc

SEQ ID NO: 21074 - DNA, 60 bp, Homo sapiens
aggacttggagcacatacctgttacgggtttaaagcctactttagtcttggccgggtgcg

SEQ ID NO: 21075 - DNA, 60 bp, Homo sapiens
agtgtagtgtcatggctaggagcacagaccctgcagtttgtcctccaggattcaaatcct

SEQ ID NO: 21076 - DNA, 60 bp, Homo sapiens
cgtcaaagctggtccacgtgggttcaacttggtgctctcactctcctccagcattgtttt

SEQ ID NO: 21077 - DNA, 60 bp, Homo sapiens
ctgacagcttagcaaaaagggccaaagctttccataggcgtgctgcacttgcttggtaaa

SEQ ID NO: 21078 - DNA, 60 bp, Homo sapiens
aaccccggagaccactgtgtcagcaatgggtgtggccatgagtgtgttgcagggtaagga

SEQ ID NO: 21079 - DNA, 60 bp, Homo sapiens
caaatgcagtgtccctcttgtctcacttgtggctagcaaatacagcagcagccttgagaa

SEQ ID NO: 21080 - DNA, 60 bp, Homo sapiens
ctcctgagtatttacatgtctctgtatgctcaaatatgcagatgtgtccctatgcgtgta

SEQ ID NO: 21081 - DNA, 60 bp, Homo sapiens
gcagctgtgtatacctgcagtgattgtttctcttgttgattgctgagaagggttccatcg

SEQ ID NO: 21082 - DNA, 60 bp, Homo sapiens
ggcgaagctctatgagtttgttcacagttttcaggatgagaagcgtcagctggcttacca

SEQ ID NO: 21083 - DNA, 60 bp, Homo sapiens
gtgagtcagtatgtataaaatgctcagaacagtgcctgtacaagctacatgattgtttgc

SEQ ID NO: 21084 - DNA, 60 bp, Homo sapiens
cattcctaatggggatttgtctcctctgttttcttcactagtctggctacagctggtggg

SEQ ID NO: 21085 - DNA, 60 bp, Homo sapiens
gctctgcatggagctacctattgggccttcaacagcgagggttttagtcagaaacacaga

SEQ ID NO: 21086 - DNA, 60 bp, Homo sapiens
acatgcgctttctctcccagcagagtcgtatggcaacgatcctgacattgagatggcttg

SEQ ID NO: 21087 - DNA, 60 bp, Homo sapiens
cagtttagctgctttagcaagtgaagaggtagtcggtattcaggatgctgtgggaatgca

SEQ ID NO: 21088 - DNA, 60 bp, Homo sapiens
cctaatggagatccatctgtcctgtgtggaatccagtgaggaattttattggtggaactg

SEQ ID NO: 21089 - DNA, 60 bp, Homo sapiens
ggtgagaagctcgctcctttcaacttgtttggtactgacagctgatagaagctattttct

SEQ ID NO: 21090 - DNA, 60 bp, Homo sapiens
catacctgtaggatgctgtgtaatgggaaaccatagaattgggcttttgtcatttcaaag

SEQ ID NO: 21091 - DNA, 60 bp, Homo sapiens
agcagcaccagaaaaccaagatgatcgtcctgggattctccaaccccatcaactgggtta

SEQ ID NO: 21092 - DNA, 60 bp, Homo sapiens
ctgtgtgtgacatgcaagtttcatggtgtgggagattgcagagcatttgggttactgctt

SEQ ID NO: 21093 - DNA, 60 bp, Homo sapiens
agagtgctcccagcaaccgccacgtacaaggtctgaaatgacaagggcaagagtgagata

SEQ ID NO: 21094 - DNA, 60 bp, Homo sapiens
ggatcatgagagtgcctgtcccttgtgagcactatgaaagtgttagctgttctttaccag

SEQ ID NO: 21095 - DNA, 60 bp, Homo sapiens
ggcataccgagggttgggatgagagcctacttcctacctcttaaggcactttcctcatta

SEQ ID NO: 21096 - DNA, 60 bp, Homo sapiens
ccgttcacatcacgcgcttcactaagcctcctatcactagtaaccttccagcgcattgtt

SEQ ID NO: 21097 - DNA, 60 bp, Homo sapiens
tgggtgaggccccaaacccctctctggtagggaaccgtggggatgaagatgaagcttata

SEQ ID NO: 21098 - DNA, 60 bp, Homo sapiens
gtctttagaagaagtgtgtgacctgctgcacgcggctcctttccagaacatcttgccgcg

SEQ ID NO: 21099 - DNA, 60 bp, Homo sapiens
ggacctatcttctctgtccacataaggaagttgggaccacaaggtcttttatctccttgt

SEQ ID NO: 21100 - DNA, 60 bp, Homo sapiens
aaaagggcagagtggtttggattcttgtccagggtctggaaagagctcatcttgccgaga

SEQ ID NO: 21101 - DNA, 60 bp, Homo sapiens
ccagcttgccagggacttaggtttatcctgttttgtttgctactggttacaaattctatt

SEQ ID NO: 21102 - DNA, 60 bp, Homo sapiens
ctgcaagggctgggaattgcgcatgtgaacttggagctgcatttatgagcactgtagaca

SEQ ID NO: 21103 - DNA, 60 bp, Homo sapiens
ggtgaaaataaggcagaattgaggagcatgacctttggcatatcatcagagtaatagcag

SEQ ID NO: 21104 - DNA, 60 bp, Homo sapiens
aaaagggtgttaagccaattccagatgaagcaaagacatgaaaacaggaaagttctagaa

SEQ ID NO: 21105 - DNA, 60 bp, Homo sapiens
gtcttgagacacagaaacacacagacttaaggattctggctgcgtgagccacatagagcc

SEQ ID NO: 21106 - DNA, 60 bp, Homo sapiens
gtttatcagtcattgagaatggacttattgagtctcccagttatgactgtggatttttcc

SEQ ID NO: 21107 - DNA, 60 bp, Homo sapiens
ggctatggatttcacttctaatccttgtctgatggaagtacacaagtaagaggccaggtg

SEQ ID NO: 21108 - DNA, 60 bp, Homo sapiens
ggccctcaatgtccacaaagccattcagcatcttcttctgagaagcccagacactatggt

SEQ ID NO: 21109 - DNA, 60 bp, Homo sapiens
aggaatatccaagaagctgttgtcctctctcgaaccctgaccagatcatcagccactgag

SEQ ID NO: 21110 - DNA, 60 bp, Homo sapiens
cccatgccccacacgggcaagcagcccactgatctgttttgtagctgaggttttgcatac

SEQ ID NO: 21111 - DNA, 60 bp, Homo sapiens
ctgaaactgtcggaatatatgggtcttgaaattcagaagatgatagtcactcttcccata

SEQ ID NO: 21112 - DNA, 60 bp, Homo sapiens
ggactgtagtgatccctaccctgtagagaaatcaacagaactagagaagctaagggcttg

SEQ ID NO: 21113 - DNA, 60 bp, Homo sapiens
gccttcccgagaagtactgcattgaagctgagcgcaaagctaacatcctgccagctacct

SEQ ID NO: 21114 - DNA, 60 bp, Homo sapiens
cagtttcctttctgcaaggacttttcagccttcaatgtgtgctgtgcatggtgaatcccc

SEQ ID NO: 21115 - DNA, 60 bp, Homo sapiens
ggaatttgctgacacaatatcttccgcctggtgctgggcatatcctaagaacttacaact

SEQ ID NO: 21116 - DNA, 60 bp, Homo sapiens
cccaggattcactgtccctaatcttctgcccaagtgggctcctgatcattgttctgaagt

SEQ ID NO: 21117 - DNA, 60 bp, Homo sapiens
ggagaccaggtgggaatctttcgcaccaagtcaggaaggaaatagagttgtcacaaaagc

SEQ ID NO: 21118 - DNA, 60 bp, Homo sapiens
gtctttgctgtatacccactgagatcaattccctagacccctctggctcttagtgtacta

SEQ ID NO: 21119 - DNA, 60 bp, Homo sapiens
tcctttcgagactgctggggaacctggtggtgaagaacaagaaggcccagtttgtgatga

SEQ ID NO: 21120 - DNA, 60 bp, Homo sapiens
accctaagagaaaagtgaagcgagatttctggaggtctggaagtggccagctgacaatat

SEQ ID NO: 21121 - DNA, 60 bp, Homo sapiens
ggggtcatgggagtgcacagcattagacagtatttggttcaccctgtaaagtagccaaga

SEQ ID NO: 21122 - DNA, 60 bp, Homo sapiens
gcaaacccacctcaaagagtatttgaacttgttgaccagattaatccatctattttctgc

SEQ ID NO: 21123 - DNA, 60 bp, Homo sapiens
ccaggacctggaacactttaacagaaggaaatgccgaagcagcttgcacagttgctttac

SEQ ID NO: 21124 - DNA, 60 bp, Homo sapiens; identical to SEQ ID NO: 4855

SEQ ID NO: 21125 - DNA, 60 bp, Homo sapiens
gacagccccacccatgtcaacagcaggcaacctgtgttttcatttcaagtgggatacagt

SEQ ID NO: 21126 - DNA, 60 bp, Homo sapiens
aactggcactgttgtcacctgagactaagtggatgttgttggctgacatacaggctcagc

SEQ ID NO: 21127 - DNA, 60 bp, Homo sapiens
ctctatgttgttgctgactactgacaacctgaaaccaataattccacaaggaaagaatac

SEQ ID NO: 21128 - DNA, 60 bp, Homo sapiens
gatggtggaagatcaggaaatgcaccttacttcctctgttatgccagatatggttagcca

SEQ ID NO: 21129 - DNA, 60 bp, Homo sapiens
cccagaagccttagtgacccagatctcaaccagagactcaagatagcctcaaatacagtg

SEQ ID NO: 21130 - DNA, 60 bp, Homo sapiens
atctcatgaccaggtgctaaatgacccgacatgcatcacctgcctttcgatgaccaacct

SEQ ID NO: 21131 - DNA, 60 bp, Homo sapiens
cggcatcacacatgcaaattactggactctgccccagatccacagaattggagactgggg

SEQ ID NO: 21132 - DNA, 60 bp, Homo sapiens
accaagacatgttccaggacctgaaccggaagctgcagcacgcagcggagaaggacaagg

SEQ ID NO: 21133 - DNA, 60 bp, Homo sapiens
gcagttaaatgtgcaccttggtcttcctccgtgtgttcagattccttctggttaaagttc

SEQ ID NO: 21134 - DNA, 60 bp, Homo sapiens
gaccaccagagctacatggcttttaccttctgtatatcagatgtcactggaatcaagcat

SEQ ID NO: 21135 - DNA, 60 bp, Homo sapiens
cgcaggatgaagaagtgcatcaggtgccaggtggtcgtcagcaagaaactgcgcccagac

SEQ ID NO: 21136 - DNA, 60 bp, Homo sapiens
aatcgtttccgttgcctctgaacatgggtgagtaatgcctccactgcagctgtttctctc

SEQ ID NO: 21137 - DNA, 60 bp, Homo sapiens
tgtgtcaccatcatccagagcttgggcaggtgattcagatttggacagcctgagccagga

SEQ ID NO: 21138 - DNA, 60 bp, Homo sapiens
ccaggtaatcgagagacctcaggaaataccatgcacacagtgtttcaccgtgacaagacc

SEQ ID NO: 21139 - DNA, 60 bp, Homo sapiens
gctgattgtactggttgttgcttgttgactgtactattcagatggctttatgcttttgtg

SEQ ID NO: 21140 - DNA, 60 bp, Homo sapiens
ccagagtaaagcaaacaactgagaaaagtaaccaagtgattacctatccaagtgctggag

SEQ ID NO: 21141 - DNA, 60 bp, Homo sapiens
gaattgcttcccagttcttatggacattgttagtaatgggctacttggaatggttaaacc

SEQ ID NO: 21142 - DNA, 60 bp, Homo sapiens
ccttagaagcggactgtggaagggctatgtagaatgtcaaagggcaacaagagcctgtgt

SEQ ID NO: 21143 - DNA, 60 bp, Homo sapiens
cccatccgtcgtcatccctaatctgatactggagtctaaatacatgctccataatcatgc

SEQ ID NO: 21144 - DNA, 60 bp, Homo sapiens
ctaggagtcccttaaagggaaattagcattccatgagccagtaaaatacctactctggta

SEQ ID NO: 21145 - DNA, 60 bp, Homo sapiens
agaaattgagtttactgttgcttgtatttggactcatttggggattgatgttactgcact

SEQ ID NO: 21146 - DNA, 60 bp, Homo sapiens
tcaaagccatcggccagacagagttgaatgcaagcaatccagaagaagtgttacagctgg

SEQ ID NO: 21147 - DNA, 60 bp, Homo sapiens
cctctttcctaccaatttcacattttgcagaaacttgttcacatttccaacaatatcaga

SEQ ID NO: 21148 - DNA, 60 bp, Homo sapiens
cccattgcagggtgttctgagcattttctccagaaattggccacgttagagttaaacctg

SEQ ID NO: 21149 - DNA, 60 bp, Homo sapiens
agaggttcagagagcagaacgtgcccaagacgtcactgccgtttgaatccagacaggctt

SEQ ID NO: 21150 - DNA, 60 bp, Homo sapiens
agaggtcaaagctaagagtccaaggcaaatggccacaaggcagaaagagccaaaccagag

SEQ ID NO: 21151 - DNA, 60 bp, Homo sapiens
tttatcatgtctcgctaataaccccagctattgtctgttgtgttcagctgagatgcaaaa

SEQ ID NO: 21152 - DNA, 60 bp, Homo sapiens
gtctgcacattccatgctctgtgaacgaatcgccatagccaaggaactgatcaagagagc

SEQ ID NO: 21153 - DNA, 60 bp, Homo sapiens
agcaaggaaggactttcagaaaagcagggatgtggtgaggaagagcaggcaatagagagc

SEQ ID NO: 21154 - DNA, 60 bp, Homo sapiens
tcctgcgtagcatccggaaacatgtggccctacatcaggaatttcatggcaagggtgagc

SEQ ID NO: 21155 - DNA, 60 bp, Homo sapiens
gaattgtatggcaaccagacagatccctggggtttgggagaaatagagcttgagatttga

SEQ ID NO: 21156 - DNA, 60 bp, Homo sapiens
accctgttcttgacagtaaggtacataatctgccttcatccctttagtccttaggaacag

SEQ ID NO: 21157 - DNA, 60 bp, Homo sapiens
ttgggacctgtgtcaggagagctaggtccatctccctcccagtctctcactaggcttatg

SEQ ID NO: 21158 - DNA, 60 bp, Homo sapiens
agcctactgaaatgtacacaccatgagtacaaagtacaaggtgctgttcagctgtaattt

SEQ ID NO: 21159 - DNA, 60 bp, Homo sapiens
gctgtcctatatactcctgtatacttcagaaatagctgatagcctatagtctctgagagc

SEQ ID NO: 21160 - DNA, 60 bp, Homo sapiens
gtgaagacataaggttgttggcaggcatctgtccctgggagcatccaagcagaaaagact

SEQ ID NO: 21161 - DNA, 60 bp, Homo sapiens
cccagctgtcccattccagatcaagggaaagcttatgtagtatacggagagcatcttcgg

SEQ ID NO: 21162 - DNA, 60 bp, Homo sapiens
caggtcccctcacctaccagaaagctaacagcaatctaatccattctgctaccgcatatc

SEQ ID NO: 21163 - DNA, 60 bp, Homo sapiens
ttagcaaagcaaccaccaactgcagctggaaggcctgtggatgcctcaccaagagtccca

SEQ ID NO: 21164 - DNA, 60 bp, Homo sapiens
gaagctatgttgctgcgcagaagtctgaagcagcatttccagaccatgtggacacacaac

SEQ ID NO: 21165 - DNA, 60 bp, Homo sapiens
ggaaacttcctaacctgttctcccatttccacttctgacttccatgctgcaatgagagtc

SEQ ID NO: 21166 - DNA, 60 bp, Homo sapiens
aaagcagtgctctgagtccaagaagctgggcagaaaggagttggtgccctgattccattt

SEQ ID NO: 21167 - DNA, 60 bp, Homo sapiens
tcattctctaggactattagtcgcgatctcccagtgagccatcacgatgcccttttcaaa

SEQ ID NO: 21168 - DNA, 60 bp, Homo sapiens
ctggagactctgggaataggatgtcatgtgttaagcatcagaatgtcccctccaacaagc

SEQ ID NO: 21169 - DNA, 60 bp, Homo sapiens
cagctgagtgctgagaatctggctggaaagagaaacgtggctcaagtgctggctcacctt

SEQ ID NO: 21170 - DNA, 60 bp, Homo sapiens
gaggaaatgagcgatatatgaacggcataaaaacagaaattacccagtaaaaaggatgtc

SEQ ID NO: 21171 - DNA, 60 bp, Homo sapiens
ctacccctggctctgtggctcagggaataggctgcacatactgattattccattaccctt

SEQ ID NO: 21172 - DNA, 60 bp, Homo sapiens
gtgtcttacctatttgagatgccagattccttggaagtagagaccgtgtctgaatcatca

SEQ ID NO: 21173 - DNA, 60 bp, Homo sapiens
aaaacccttctgcgaccctccattgcacttggactcaaacccaaactcctctctatggct

SEQ ID NO: 21174 - DNA, 60 bp, Homo sapiens
gccctccatttcgtgggggtagacagttatggtctaagagtatccttagctgtactcact

SEQ ID NO: 21175 - DNA, 60 bp, Homo sapiens
ggaatggcttacttgcggaaatgcaggctcattgttgtgtctagtaggtgctaggtgcat

SEQ ID NO: 21176 - DNA, 60 bp, Homo sapiens
tagtgcatcccctgcgattgcatgatgctcatgtggcttttagggaaaggcagaatgtgc

SEQ ID NO: 21177 - DNA, 60 bp, Homo sapiens
cctcctggggtaggagcataatctacatcactgggcagtcacaggacactctatagcaag

SEQ ID NO: 21178 - DNA, 60 bp, Homo sapiens
tgacaagcgggacccagagtttgtcttctacgaccagctgaagcaagtgatgaatgcgta

SEQ ID NO: 21179 - DNA, 60 bp, Homo sapiens
ccacattatcccaactggtttaaagccctgaggatagtagtcactttattggccactttt

SEQ ID NO: 21180 - DNA, 60 bp, Homo sapiens
tcaaatgaggagtagtcagtcctagcactgtagacgccgactttaccaaccaagatattg

SEQ ID NO: 21181 - DNA, 60 bp, Homo sapiens
cagggttcaaaggaagacactgacctttcccatcccggtagcttcagggaagatcatagt

SEQ ID NO: 21182 - DNA, 60 bp, Homo sapiens
aaaagtcaggagcctggaggctctgaaaggagcagggattccatagtgcgtgaagctgaa

SEQ ID NO: 21183 - DNA, 60 bp, Homo sapiens
ggctgagaactatccctcaagataaggctaaccccaggatgtactgttccacctcaactt

SEQ ID NO: 21184 - DNA, 60 bp, Homo sapiens
aagtgtgtgtgtgcggatatgtgtgctagatgttcttgctgtgttaggaggtgataaaca

SEQ ID NO: 21185 - DNA, 60 bp, Homo sapiens
ggaaaagggtgcgatcctttgctgtaaactggagagaccagtcccaaacagaggggaatt

SEQ ID NO: 21186 - DNA, 60 bp, Homo sapiens
tgtccagcagacctcaaggcagaagggtcacctaacccaggagtccacagactgatgtga

SEQ ID NO: 21187 - DNA, 60 bp, Homo sapiens
gcgtacctttcccatggcactctgacgtactggatgtttggtttctgaagttactggctg

SEQ ID NO: 21188 - DNA, 60 bp, Homo sapiens
cttaacagtctgtcaagttggtgatataaccccacagaagacttacttcaagtgacttga

SEQ ID NO: 21189 - DNA, 60 bp, Homo sapiens
gagtgccatgggatgctacaccttgaagctgacagtcatcaacaggggagctaaagttga

SEQ ID NO: 21190 - DNA, 60 bp, Homo sapiens
cctgttcaaacttcccacccattgtagacccacttgctgtgttattgcaggttaagcccc

SEQ ID NO: 21191 - DNA, 60 bp, Homo sapiens
ctctctcattccaggtctgtggtgcagatgggaagagtatagtcaaaacccattaaggcc

SEQ ID NO: 21192 - DNA, 60 bp, Homo sapiens
gagggaattttgggagagctaccacatcagtactttggcacgcattaactgttccacagg

SEQ ID NO: 21193 - DNA, 60 bp, Homo sapiens
cttcttagctctttggagacacgaagcccttggaaaatctgatgaaggttacggaccttc

SEQ ID NO: 21194 - DNA, 60 bp, Homo sapiens
aggctgaaggcagtgcagtatgaaccgacctgatttgaggaagtttgctctgggactcct

SEQ ID NO: 21195 - DNA, 60 bp, Homo sapiens
ccctcatgcttccatcccaaggcaaacatgtgtcttcatcggaatctatgggtgttgaag

SEQ ID NO: 21196 - DNA, 60 bp, Homo sapiens
gactaacaactgacttcacgtcagaaaccaaggaagctggaaagcgtgagatgacatagt

SEQ ID NO: 21197 - DNA, 60 bp, Homo sapiens
gtgcgctctgtaatgttgggcctttgacttcacagtactggagagctgttcacacagatg

SEQ ID NO: 21198 - DNA, 60 bp, Homo sapiens
cctagccaaatatctcagttacatttaccatacagtttcctttgtgaaagaacagtaggg

SEQ ID NO: 21199 - DNA, 60 bp, Homo sapiens
gcaagtcttgccttatctatggagctcgatggtgagaattgtgaccattgtctgatgtcc

SEQ ID NO: 21200 - DNA, 60 bp, Homo sapiens
ttccctagtcagacaggcccaattccattgtgatgtttacctttatagccaggtgagtgc

SEQ ID NO: 21201 - DNA, 60 bp, Homo sapiens
actgaccctcttgtctggctgctgcagtttgtctgtaatgccctgacatgttgcattctc

SEQ ID NO: 21202 - DNA, 60 bp, Homo sapiens
tcctgggatggggcttctgctcccgggctcactcaaggagactgcggcatgttgaccaca

SEQ ID NO: 21203 - DNA, 60 bp, Homo sapiens
ggcagtgcgtgttttccgagtagccacacacatctctttaattgcagaagcaagggcaaa

SEQ ID NO: 21204 - DNA, 60 bp, Homo sapiens
ggttaggacatctaggttccaattcattcacattcttggttccagataaaatcaactgtt

SEQ ID NO: 21205 - DNA, 60 bp, Homo sapiens
gctaccatggtcactctcagcttcacaataagcacgtgtatcttagggcatttgaacttc

SEQ ID NO: 21206 - DNA, 60 bp, Homo sapiens
ggtgctcccatctaccttgtagacacttagccatcaagaatcaaggcacaagaagtgcac

SEQ ID NO: 21207 - DNA, 60 bp, Homo sapiens
ccgcagtaaggctcccggtctcgctgctgtctctttaaatggtggggctacgagccgccc

SEQ ID NO: 21208 - DNA, 60 bp, Homo sapiens
agtgtgaaggaaccatcaggacagctcaagaagccgaaaccaagcaaatcagatggccca

SEQ ID NO: 21209 - DNA, 60 bp, Homo sapiens
gagttgtttgcatgcctacttaacccaagtaaaacgatgctgtttgctctggaatgttca

SEQ ID NO: 21210 - DNA, 60 bp, Homo sapiens
cattatgggcctggaagtactataggagtgcacacatcacccgtgacatggtcttgccaa

SEQ ID NO: 21211 - DNA, 60 bp, Homo sapiens
ctcccgctctctcaaaaggaacttgggaaacttgtgaaacccaggaaaacctttagtctt

SEQ ID NO: 21212 - DNA, 60 bp, Homo sapiens
tcccctctcaccgtggttaacgtgacgaaggcacgattcctgtaaatgtgtaaactaagg

SEQ ID NO: 21213 - DNA, 60 bp, Homo sapiens
ttatcaggagtggcctgtcccaaagcaaatgctgcatgagggtgagaggaaaacagccca

SEQ ID NO: 21214 - DNA, 60 bp, Homo sapiens
attctgaaaagcaaattgtcattggaaccgtagcctccaaaagaacaggctgtacacgcg

SEQ ID NO: 21215 - DNA, 60 bp, Homo sapiens
aatgtaactcactcttattccgtagtcacatgtttgcttgctcattggttcacattacat

SEQ ID NO: 21216 - DNA, 60 bp, Homo sapiens
tgcttgttgttgagtccgttttaaaccccaagaggacagatggggagcactggttgacca

SEQ ID NO: 21217 - DNA, 60 bp, Homo sapiens
gagagacatgcctttgtagacagcatgcagtgcctttttggtagagcaattggcccgcta

SEQ ID NO: 21218 - DNA, 60 bp, Homo sapiens
ttatgaatgccttagtagtactttggcttcttgaagaggagctaatgccataaccctttt

SEQ ID NO: 21219 - DNA, 60 bp, Homo sapiens
ctatctgttcgtctctggtgttagccacgttcctttactttccctcatttctgtggccac

SEQ ID NO: 21220 - DNA, 60 bp, Homo sapiens; identical to SEQ ID NO: 4855

SEQ ID NO: 21221 - DNA, 60 bp, Homo sapiens
agaatgagcatggccacactgtcagtgagtgttctttaggtggtaggactatggttgata

SEQ ID NO: 21222 - DNA, 60 bp, Homo sapiens
gatcacccttcctagccaccttccatcctgccctcttttgttgcaaaactcatctgcaga

SEQ ID NO: 21223 - DNA, 60 bp, Homo sapiens
aatatcccatgcaagagagtagtttcaagtgggcaactctgctctctatttaaaagcgtg

SEQ ID NO: 21224 - DNA, 60 bp, Homo sapiens
gtccccaaaggatcacacaggtgcctgtatcatgccatatgtcatgtgctatattcctgc

SEQ ID NO: 21225 - DNA, 60 bp, Homo sapiens
taggagtaaatccgaagcaacagaagcgttcgcactggctctgggtgcagcctgcatctt

SEQ ID NO: 21226 - DNA, 60 bp, Homo sapiens
tcccttgaggaggtcgtgacaggctcagcctggtggtctggaggggactcggaaataaat

SEQ ID NO: 21227 - DNA, 60 bp, Homo sapiens
gtgtttactgtgatgggcagaacagccttttgtatctaggagtccatttgagttctttcc

SEQ ID NO: 21228 - DNA, 60 bp, Homo sapiens
agcagctcatgcttggttctacccaatagtctgagtcccctcagtcactctgttttagcc

SEQ ID NO: 21229 - DNA, 60 bp, Homo sapiens
agatggagctgtcattctgtgtttcctttggcagtcccaacaccagcctcgttgcaccct

SEQ ID NO: 21230 - DNA, 60 bp, Homo sapiens
ccgcaagctgccagtcggctctttttcgcaaagccttccagaagttttctgtgcttatga

SEQ ID NO: 21231 - DNA, 60 bp, Homo sapiens
ttctcaggaaatgagattatcaaaccagggtcagacacttgacagcaaagtgggagtggg

SEQ ID NO: 21232 - DNA, 60 bp, Homo sapiens
tctcctcatggaaagagaggctccctcatctgaagcgtctctgaaatctacccttgcaag

SEQ ID NO: 21233 - DNA, 60 bp, Homo sapiens
tccatgaaccgagaattgggacagaaccgtgtcctcaggagctaacacctgggctccatc

SEQ ID NO: 21234 - DNA, 60 bp, Homo sapiens
agagaaacttgttcccatgacccttcccaaatctgctccagcaggactaaggtggctttc

SEQ ID NO: 21235 - DNA, 60 bp, Homo sapiens
tgggttctcagcatggacagctggatggcatcactggattccctcacctggatccggaga

SEQ ID NO: 21236 - DNA, 60 bp, Homo sapiens
gcttttgtttgctttagcttggtaacagcggtgaatagagtgtagtgtaagtggagaacc

SEQ ID NO: 21237 - DNA, 60 bp, Homo sapiens
ccgtaagtgatgtgttaaggtgcttcaaaggaactctgacctctgaagtacttgagctac

SEQ ID NO: 21238 - DNA, 60 bp, Homo sapiens
tgaggctgtggttgctacagggtcaccacgagcttggcttacttgtctcatccttccctt

SEQ ID NO: 21239 - DNA, 60 bp, Homo sapiens
agaattttcgcattcgagccaagcatctggcagccaactggaatcgcatcaggacctcca

SEQ ID NO: 21240 - DNA, 60 bp, Homo sapiens
agacctccagcttccattttcccctatacgtgtctgtgctgacatcctttccagcagtag

SEQ ID NO: 21241 - DNA, 60 bp, Homo sapiens
ttgcactccagcccatttcctgaacagtctcccttgcagttcccttgctgggtattttca

SEQ ID NO: 21242 - DNA, 60 bp, Homo sapiens
tagtttgagggaggtgaggtagagaaataggatgccagcaggtaggaggccgatgtcagt

SEQ ID NO: 21243 - DNA, 60 bp, Homo sapiens
gttccttggtccataactggtgagctatggagacccaggccaacaaattatccccagtga

SEQ ID NO: 21244 - DNA, 60 bp, Homo sapiens
gtccactaagctggagaagcagcctcatacagttgattttgtgtatgtggctagtcttat

SEQ ID NO: 21245 - DNA, 60 bp, Homo sapiens
aaggaatctggaaataaggccgtgagataggtatccctacccacaactgtgcctctctcc

SEQ ID NO: 21246 - DNA, 60 bp, Homo sapiens
ggactggagactcacatgaggtagtgtctgattgagagtcctggaggcagttagacttct

SEQ ID NO: 21247 - DNA, 60 bp, Homo sapiens
gggtttaagtctgtccattgtcatttgctgccttctaatattatctctttcttgctcaac

SEQ ID NO: 21248 - DNA, 60 bp, Homo sapiens
tgtgggatgacaaggcaggtccaaacctttgcctgctctcccatccattccttttgtgtt

SEQ ID NO: 21249 - DNA, 60 bp, Homo sapiens
cattagtgcttactcattgctctctcatcttgcctccagtcagatgttattggtatagtg

SEQ ID NO: 21250 - DNA, 60 bp, Homo sapiens
gcttgcttcttgctcagcctgcatatgagaagtcaaccaagcattctcttggatgcaaga

SEQ ID NO: 21251 - DNA, 60 bp, Homo sapiens
tgtcaccatgctccaactcccacacaaacgcttctaccccttccagaacttacccatcat

SEQ ID NO: 21252 - DNA, 60 bp, Homo sapiens
gtgggaccttgtacactggaggcaattcatactttgtagaccagttatgatggtaaatgg

SEQ ID NO: 21253 - DNA, 60 bp, Homo sapiens
atttcagcacatcacaatctctctgaagattaagaagtctctgtgaaggactgaatgtat

SEQ ID NO: 21254 - DNA, 60 bp, Homo sapiens
tccaacagcctcttaggagtacaccctgttctgctactaaaatactagactcatttccct

SEQ ID NO: 21255 - DNA, 60 bp, Homo sapiens
tctgggagcgtcagagcaacggaagtacgtacaggaggaccgagagcagcagggaagttt

SEQ ID NO: 21256 - DNA, 60 bp, Homo sapiens
ggcagcctgtgcctgtttatggatcctctctgcctttgtacttgaagagcgcattttaca

SEQ ID NO: 21257 - DNA, 60 bp, Homo sapiens
cagctggaaactcaacctcgcatctctgattccaaatcctactttcagcgtcattctgcc

SEQ ID NO: 21258 - DNA, 60 bp, Homo sapiens
gtgcgactggcagttcgtgtccgagtatttacttaccctgaatctgcatgtgctgtttgg

SEQ ID NO: 21259 - DNA, 60 bp, Homo sapiens
ggggctgagtaccaagaagtgtggtgacctgcccagggttgaaaacctttcttagttcaa

SEQ ID NO: 21260 - DNA, 60 bp, Homo sapiens
tccttaggtcagtaattgttgtgagccccttaggctccttgcatcccatccctaaccctt

SEQ ID NO: 21261 - DNA, 60 bp, Homo sapiens
gtcagctcttgtcaatcctcccgtgatttatgtcagcttttgttgctgattacaaggcgg

SEQ ID NO: 21262 - DNA, 60 bp, Homo sapiens
ccaggcatatagctgtgtggcttcttgcaggcaaaattcccaagtgattgactacatctc

SEQ ID NO: 21263 - DNA, 60 bp, Homo sapiens
gtgaggggagtgttggggtgaggaaacatgtgaacatgcctcagtctttggagaacttag

SEQ ID NO: 21264 - DNA, 60 bp, Homo sapiens
ctgaggtacctgcagaaaccatagctactcaccaaaatacacagattaggtgcatggtat

SEQ ID NO: 21265 - DNA, 60 bp, Homo sapiens
atctttggcagacttggagcaaaagattgaggtgcatttcatgcctccttttgagagtct

SEQ ID NO: 21266 - DNA, 60 bp, Homo sapiens
ggcagagacactttgtctagtgtattctcttcacagtgccaggaaagagtggtttctgcg

SEQ ID NO: 21267 - DNA, 60 bp, Homo sapiens
aggaatgtgggtccaggcccagaggaaaaggttgaagttatagccaggcctgtgggcgag

SEQ ID NO: 21268 - DNA, 60 bp, Homo sapiens
gagctagaagctcctcaggaaagccagttctccaagttcttaacctgtggcactgaaagg

SEQ ID NO: 21269 - DNA, 60 bp, Homo sapiens
ggtgcaaattaccctgatgttttctatgttatcctatcccatcccttgccactccactcc

SEQ ID NO: 21270 - DNA, 60 bp, Homo sapiens
tttatgccagacgagattcacagtgcattgactgttttcaagcctttttgcctgtgcact

SEQ ID NO: 21271 - DNA, 60 bp, Homo sapiens
ctacagtgaggaagtgatagaactgcttctggcacaccaaagaacagcacagaggtccaa

SEQ ID NO: 21272 - DNA, 60 bp, Homo sapiens
tcttacgcatggagagcagagctgcaggaaagcaggacacacgtgagtccagccaactca

SEQ ID NO: 21273 - DNA, 60 bp, Homo sapiens
tctgggccttcaaacctctcccaaggatgatagggttggggaggataagaggatagtaaa

SEQ ID NO: 21274 - DNA, 60 bp, Homo sapiens
gcagcttttggcaccttcagcctcagagtggaatcttttaaagacaggacccctatgtcc

SEQ ID NO: 21275 - DNA, 60 bp, Homo sapiens
aaggagttacaaggggaactaagaaccagaagtggctggcctctagcttttcaatacctg

SEQ ID NO: 21276 - DNA, 60 bp, Homo sapiens
gccagctaagatcagtataggccctcctccaacttatctgcaatgcactgggagaatata

SEQ ID NO: 21277 - DNA, 60 bp, Homo sapiens
acttggctaaccatctgccaataagagaaagtgagatgctaaatcagagaggcaggaaag

SEQ ID NO: 21278 - DNA, 60 bp, Homo sapiens
actaagtcaaacacagaccatgttcccacccaagtcagccttggttcccaagcacaagtc

SEQ ID NO: 21279 - DNA, 60 bp, Homo sapiens
agacctgcctaacatgccagcgcagccaacgcttcctcaatgatcccgggcatttactct

SEQ ID NO: 21280 - DNA, 60 bp, Homo sapiens
ctccttcccatctcatttcttactgccttacgctcatcctgaggtccaccttggtctcta

SEQ ID NO: 21281 - DNA, 60 bp, Homo sapiens
gatttgagagccattggaggatggatgataatggagcacatggaagcagatgtggccctt

SEQ ID NO: 21282 - DNA, 60 bp, Homo sapiens
ctcccacagtctcagacacagaggaagaagtgtactcacactgccccaacaccagtgagt

SEQ ID NO: 21283 - DNA, 60 bp, Homo sapiens
aaaggataagaggcagttggcctgggaaggtgaaaaggcaggaaaagagtgggaagtcag

SEQ ID NO: 21284 - DNA, 60 bp, Homo sapiens
ctcagcctggtaccgcagggactgctttttgcccaggtgaccttctgcgatcctgtcatt

SEQ ID NO: 21285 - DNA, 60 bp, Homo sapiens
tttggtcagcctaggtgagactcacctgtccttctggggtcttactcctcctcaaggagt

SEQ ID NO: 21286 - DNA, 60 bp, Homo sapiens
gggaatgcaggagaaattagctcgcttgaatttggagctctatggggagttagaggaact

SEQ ID NO: 21287 - DNA, 60 bp, Homo sapiens
caccaacccgctgccttcatgctgccttcaaagctagatcatgtttgccttgcttagaga

SEQ ID NO: 21288 - DNA, 60 bp, Homo sapiens
aacccacaagtcaatgaccaggtccctctgtgttggttgctgctctgggctctccgttag

SEQ ID NO: 21289 - DNA, 60 bp, Homo sapiens
gagttagccagtgacaatgatgcttaatgtgtttgttcctcatgaactcacatttctgag

SEQ ID NO: 21290 - DNA, 60 bp, Homo sapiens
atagaacttccttaatctgtccaaaggttatcaacagaacactccacagccaatattacg

SEQ ID NO: 21291 - DNA, 60 bp, Homo sapiens
aaaagatgagaactatgatcccaagaccgaggatggccaggcaagccagagtcgatacag

SEQ ID NO: 21292 - DNA, 60 bp, Homo sapiens
ggctaccaactagaaggaaagcagctctctgattggccatccttggctatgtagggttag

SEQ ID NO: 21293 - DNA, 60 bp, Homo sapiens
ggttggcttaatcctgtctaaaatcaaggtattggactagaacaatgaggtttgcagctt

SEQ ID NO: 21294 - DNA, 60 bp, Homo sapiens
ctgttgactccctgttgtcatacatgaggctttagctctcttttgtcagcaaccctcccc

SEQ ID NO: 21295 - DNA, 60 bp, Homo sapiens
tcctgttaggaatactctgaatgagcttaacccacttgccaaatatccttgtcccttcca

SEQ ID NO: 21296 - DNA, 60 bp, Homo sapiens
ccagctgttctttctactttataataccctccatacaaaacccactgtgccatcggaagg

SEQ ID NO: 21297 - DNA, 60 bp, Homo sapiens
ctttggattgtgtgtccatgctggagaaaagccttgttactgtgcccagtgtggtaaacg

SEQ ID NO: 21298 - DNA, 60 bp, Homo sapiens
gacagactctaaagacaactctttctctcacaacttttgattgcctctctgaaatggaag

SEQ ID NO: 21299 - DNA, 60 bp, Homo sapiens
ctcgttgtttgcatgtctgtttcttccccagtgagttgtaaattgcttaagggcaaacag

SEQ ID NO: 21300 - DNA, 60 bp, Homo sapiens
agagagacagaatcccatcagaaaagtgtcaggaagcctggaatccagggtgagctggat

SEQ ID NO: 21301 - DNA, 60 bp, Homo sapiens
acaattagtaagtggtttatacaggatttgtgcctaggtagtcactgtaggaatgctcac

SEQ ID NO: 21302 - DNA, 60 bp, Homo sapiens
attttgcagagcaacctaagcgggcagatgtacaaaccgtgtgttcgaaacccctgagtc

SEQ ID NO: 21303 - DNA, 60 bp, Homo sapiens
atcccaaatcctccctaccatagcaaagtaggatctccccttggtgaacgtcagctagag

SEQ ID NO: 21304 - DNA, 60 bp, Homo sapiens
tccctggcagtgatggggtgacaatgcaaagctgtaaaaactaggtgctagtgggcacct

SEQ ID NO: 21305 - DNA, 60 bp, Homo sapiens
ctcctgttgagactgtgtcttatgaacctctgaaacgtacaagccttcacaagtttaact

SEQ ID NO: 21306 - DNA, 60 bp, Homo sapiens
tcatgaccaaagtatcgcttactgaccatgcagctgtaaaccttctgtgcctatcaaaca

SEQ ID NO: 21307 - DNA, 60 bp, Homo sapiens
gaagtccttcctggggtctaatctctaccttttgcatgatgaggcagctgaggtggctcg

SEQ ID NO: 21308 - DNA, 60 bp, Homo sapiens
ttacatttcagtgtgctcttcccagtagagcggtaggttactctgggcacagggaatttt

SEQ ID NO: 21309 - DNA, 60 bp, Homo sapiens
tgtgagttccacccaagagggagttgttggacagtgtgtggagagcaagtgtctttcaca

SEQ ID NO: 21310 - DNA, 60 bp, Homo sapiens
cccagttgaggatgaagaagaggtaacgcatcagaaaagcagcagttcagattccaactc

SEQ ID NO: 21311 - DNA, 60 bp, Homo sapiens
ctttcatctcagggtctttgcgtttgctgttagctcagtctggaatgcctgttctgcaaa

SEQ ID NO: 21312 - DNA, 60 bp, Homo sapiens
gccgctacacctttcttaaatgactctaagactgtttacttacagtcctcagtttttagt

SEQ ID NO: 21313 - DNA, 60 bp, Homo sapiens
ttgttgctagctgttatgggtataagtgatcaagggaagaactgatgcattacctaatgc

SEQ ID NO: 21314 - DNA, 60 bp, Homo sapiens
gctaacactatgtggtttgccataccaacattgaggatcatcttgctcaaggtaagtctg

SEQ ID NO: 21315 - DNA, 60 bp, Homo sapiens
caagcaaacattcaccccatagactacaattcaggtaagaaagctgtctttagaacctga

SEQ ID NO: 21316 - DNA, 60 bp, Homo sapiens; identical to SEQ ID NO: 4855

SEQ ID NO: 21317 - DNA, 60 bp, Homo sapiens
ggatccgtgctgatatcagtctttccaactcagtctgaggtaaacaaaccctgcactggt

SEQ ID NO: 21318 - DNA, 60 bp, Homo sapiens
tccaagtcataagacgaagaggacttcctgctcactgtaagagtcagaacaccccacagg

SEQ ID NO: 21319 - DNA, 60 bp, Homo sapiens
agtgtctagcacactgaatcaagtaactatcagttaggctggggattggttctgttcccc

SEQ ID NO: 21320 - DNA, 60 bp, Homo sapiens
agggatcgaacaaagctgggtatgtgcttgaaggaattttgctgggacaaggatctgtag

SEQ ID NO: 21321 - DNA, 60 bp, Homo sapiens
cagccacttcaaccacagggctacgaacatgccaagagagccactaaccaagtttctcat

SEQ ID NO: 21322 - DNA, 60 bp, Homo sapiens
aagcattgcggttcactctttggatggaaccagtcccgttccgtatgctgtgatctatcc

SEQ ID NO: 21323 - DNA, 60 bp, Homo sapiens
agatcaagctgggtctcagggcagtgaggtggccatatccaccacatcgcatttcgtggg

SEQ ID NO: 21324 - DNA, 60 bp, Homo sapiens
aagaatggaatccagcaggcctcaaaggtcaaatcaggcagagaaccatgagtccaggtc

SEQ ID NO: 21325 - DNA, 60 bp, Homo sapiens
ccattagagatggagctttgaccctggattcctcaaaagagctgtcagtctcagaaagtc

SEQ ID NO: 21326 - DNA, 60 bp, Homo sapiens
gtatatgtgccagttattgccatttcttaagtccaaaatgtttttctggtcaaataaata

SEQ ID NO: 21327 - DNA, 60 bp, Homo sapiens
agacctactatatgtctggaactgttataggtttggagaaccagctaatagtaaacaaac

SEQ ID NO: 21328 - DNA, 60 bp, Homo sapiens
gggacccagtctgtgtgctatatgtctgcttcttcagtccacactcattacttccaggaa

SEQ ID NO: 21329 - DNA, 60 bp, Homo sapiens
cctgcaaacctactgctctaggctctatgagtgcatcaaacattcctgaaggcttgtgtc

SEQ ID NO: 21330 - DNA, 60 bp, Homo sapiens
cccaacagggtggtgtcaaagggactgtcatcccattggggataatgagctactaagctt

SEQ ID NO: 21331 - DNA, 60 bp, Homo sapiens
gggatgcagtataccagtgtgtctttgcgtaccatcaggatttcctagactttgatgata

SEQ ID NO: 21332 - DNA, 60 bp, Homo sapiens
taacgcaggtcgctccttgccgtgcctggaacattactgtaagtgctcagcaaactactt

SEQ ID NO: 21333 - DNA, 60 bp, Homo sapiens
aagcaaggatgatcctggtgaagtaatgcagctgtgaagctcacctgaccagctgtacag

SEQ ID NO: 21334 - DNA, 60 bp, Homo sapiens
gatgggcagtatcacaaaaggtcctggcattctaccatctaacactaggaactgtaaaat

SEQ ID NO: 21335 - DNA, 60 bp, Homo sapiens
gtgcgttggtggtcatacttagtgttctaggctgtgaaatcatggagttcttccacttcc

SEQ ID NO: 21336 - DNA, 60 bp, Homo sapiens
cttatttgcagctcaaaaaatatggacagtaattcagggaaaatgtgacaaaagtacatt

SEQ ID NO: 21337 - DNA, 60 bp, Homo sapiens
ccactctctgcagggtatgtggagatcatcaaatggcagtccctgtcaaggaactacaca

SEQ ID NO: 21338 - DNA, 60 bp, Homo sapiens
atatccaatggtatagttgtctgctgtgcaatgttgtagcactagccatgtggactacct

SEQ ID NO: 21339 - DNA, 60 bp, Homo sapiens
ggctcgtcccctcctcggcttcagtttgcctatctgtatgttggagcttctactccacat

SEQ ID NO: 21340 - DNA, 60 bp, Homo sapiens
cagaggaacaaaagaggttaactacaaagcaactgtaagtaggcatcagacttctcatct

SEQ ID NO: 21341 - DNA, 60 bp, Homo sapiens
aggaatgatggtgtatggtgactgcccatcttggtctaccccaggtagtccctattgtct

SEQ ID NO: 21342 - DNA, 60 bp, Homo sapiens
tgcccaagtcccaaacctgtaagtcagcctacttctcatcttggtgtcctcagcagctac

SEQ ID NO: 21343 - DNA, 60 bp, Homo sapiens
tgctcggaatctgagaagtgcataatgacgctgcgagtatcatcgtgattagagctgggc

SEQ ID NO: 21344 - DNA, 60 bp, Homo sapiens
ggctccatcaccaattactaactgatagaactaaaggcaatagaaacaccactgctttgc

SEQ ID NO: 21345 - DNA, 60 bp, Homo sapiens
cggtcacaaacacttcttcacccaggttttacagcagaagggaactggtactccgacaag

SEQ ID NO: 21346 - DNA, 60 bp, Homo sapiens
aatcatttgcagtgagcagtttgccccaaaagcctgaaccgctgggaactcgtcctccac

SEQ ID NO: 21347 - DNA, 60 bp, Homo sapiens
ggaccaggtttgaatctgagttcagctactcaccaaccataacctctctgatctttcaac

SEQ ID NO: 21348 - DNA, 60 bp, Homo sapiens
cgctccagaataaagtgggtctaaagcacctgctggaataagtggcattgcctgtgagtc

SEQ ID NO: 21349 - DNA, 60 bp, Homo sapiens
gaggtgggaatgtactcggtttggcgaaatagtctttcatgtccctaaacctgaagcctc

SEQ ID NO: 21350 - DNA, 60 bp, Homo sapiens
ccttgcaatgggaaggatagaggccggttcagttatctgactacactcatccagcacaac

SEQ ID NO: 21351 - DNA, 60 bp, Homo sapiens
aaacatcagaggccatgccacaagcaccgtaactgagggatatagtgtgactgtggtcca

SEQ ID NO: 21352 - DNA, 60 bp, Homo sapiens
ccacagcctctggagttgggagagcctggctttgtatcctgcctcttttagcttcaaaga

SEQ ID NO: 21353 - DNA, 60 bp, Homo sapiens
gcctgggattttctcaaactttgtcccaaacttcagctgtgggagtggaggaacaaacag

SEQ ID NO: 21354 - DNA, 60 bp, Homo sapiens
ggtttctctggttccatgtgcatttgtacatgaagttgtgcaatctccacataccagcag

SEQ ID NO: 21355 - DNA, 60 bp, Homo sapiens
taaacaaaagctctgggaggctctttgcagtcagggtgccatctctgaaggtgctcagag

SEQ ID NO: 21356 - DNA, 60 bp, Homo sapiens
aaagcgcccaacagatgagcattctgccgacccatttcagtccctggcttaactcagaaa

SEQ ID NO: 21357 - DNA, 60 bp, Homo sapiens
gagtgggcaagtgaggaccccttctctgttaccaaggtgaccccaaggaacacagtaaat

SEQ ID NO: 21358 - DNA, 60 bp, Homo sapiens
acatgaatgggagctgagttccctgcttaatagcatttgtgttcatttccagcgtggtgc

SEQ ID NO: 21359 - DNA, 60 bp, Homo sapiens
tctgtttggccacagttcccaaaagcacatcttccttgtcagagtaagccatgcactctg

SEQ ID NO: 21360 - DNA, 60 bp, Homo sapiens
ctagagaggcaaatgtctgccagggctgaataatatgtgtgaattggtgattgtcgcaca

SEQ ID NO: 21361 - DNA, 60 bp, Homo sapiens
tgctctaagaaggggtctcctttaccctaaaggcagctgggcagggacaggtgggagaat

SEQ ID NO: 21362 - DNA, 60 bp, Homo sapiens
attccagaagttgctctgagcttgcaatcagacctcaaagccccagatcccctcagctct

SEQ ID NO: 21363 - DNA, 60 bp, Homo sapiens
ccttgtttggactttggcctttaaaagtggccagttctactcttcttagactgattatgc

SEQ ID NO: 21364 - DNA, 60 bp, Homo sapiens
gaattctggataccctgcaaaacacctccaacctccctgcctttgaaccctgtgttaaca

SEQ ID NO: 21365 - DNA, 60 bp, Homo sapiens
tagttagctagctttaccatcatctcctgaatcagctgctgaggatgcctgtgcctctgc

SEQ ID NO: 21366 - DNA, 60 bp, Homo sapiens
ataggttatgcagaaacatgcagaaatgccacctgtccatacttacgtggctttacataa

SEQ ID NO: 21367 - DNA, 60 bp, Homo sapiens
caaacatttccatggtgctccagtccactgatcttgggtctggggtgatccaaataccac

SEQ ID NO: 21368 - DNA, 60 bp, Homo sapiens
ctcagagaggttaaatatcatttccaatgtcacagagctagtattgcacaactaatcaga

SEQ ID NO: 21369 - DNA, 60 bp, Homo sapiens
gggtgggagtgattgcagactagtaaggttagctagacttttaaacccttgctcttttct

SEQ ID NO: 21370 - DNA, 60 bp, Homo sapiens
ctgggtttgcctcccctgagagaccgtaaacttctaaagaacaagaactgtgttgtctcc

SEQ ID NO: 21371 - DNA, 60 bp, Homo sapiens
ctgccagattcaagtggccacacagctcacaagcagccacagtgaaggaaaccacatata

SEQ ID NO: 21372 - DNA, 60 bp, Homo sapiens
gtgacacaggtttgttggatgttcactgaagatgtgaatgaactcttactgtctcatact

SEQ ID NO: 21373 - DNA, 60 bp, Homo sapiens
tgaagccctagacttagggaaagacagtgggaggcatccaacttagcagcagaccaaagt

SEQ ID NO: 21374 - DNA, 60 bp, Homo sapiens
tcaggccagaaggagcagccgtgcaggaggcatttcaggcatcgttgaggggagtgtttt

SEQ ID NO: 21375 - DNA, 60 bp, Homo sapiens
ttggagtttctgacccaggcactggagaaggctgtacgagttcgaagaggcatcactaag

SEQ ID NO: 21376 - DNA, 60 bp, Homo sapiens
atgcattgtctgcaggactaggtgaatgtccatgtggcctagcaagagttagctggtagc

SEQ ID NO: 21377 - DNA, 60 bp, Homo sapiens
agaaacctgttctctccagatgcacttctgaggcatggatgagctgagcgtatggctaga

SEQ ID NO: 21378 - DNA, 60 bp, Homo sapiens
aatggcagcagatggaacattctggactggggaaggacagtctgtgatgtgaaacccttc

SEQ ID NO: 21379 - DNA, 60 bp, Homo sapiens
cactgaccctttcaaacgtttaccagctaatgggcaagcctcaaggccaactgagaaagg

SEQ ID NO: 21380 - DNA, 60 bp, Homo sapiens
cctagggccaagtcccatgtgcattttgtggctactagaccctcttcagaaatcaaacac

SEQ ID NO: 21381 - DNA, 60 bp, Homo sapiens
acacacaccgataaaaaggcctgggtatacaatcacataatcatgggtgtggaacatatt

SEQ ID NO: 21382 - DNA, 60 bp, Homo sapiens
gtagagcatcagcccacagatagcagcccagtgaaccaatgaacaggtggaagcaagaat

SEQ ID NO: 21383 - DNA, 60 bp, Homo sapiens
ccttgaggtgtggtgtcccaaataacctgggacataaactagcatagctggagcactaac

SEQ ID NO: 21384 - DNA, 60 bp, Homo sapiens
ctaaccccaaagtccgctcttaacagctacactaactgcctctcaagaggtcgtagagct

SEQ ID NO: 21385 - DNA, 60 bp, Homo sapiens
attgatgcacggatgcttttgaacagtagagcgaaatgctagacatggagaatctgctct

SEQ ID NO: 21386 - DNA, 60 bp, Homo sapiens
caaaagctgaggaactggaagtgataatgtggagaatgctcccgtctccgcaaccacaaa

SEQ ID NO: 21387 - DNA, 60 bp, Homo sapiens
gcagcatatcaagccgttaaccctgattcactcggttcccttgaaaccaggcctcagtta

SEQ ID NO: 21388 - DNA, 60 bp, Homo sapiens
cactcaaacctgacctcttacactagcgtgccatagagcctacatttcctacactcagcc

SEQ ID NO: 21389 - DNA, 60 bp, Homo sapiens
ttgcaagtccattccaggcatagcgatacgtggaacagtcactgtgagaaatgtggcagg

SEQ ID NO: 21390 - DNA, 60 bp, Homo sapiens
acaccaggtacaatgtgctaggtgctggggagagatcaggggataaagcagagcaaaatt

SEQ ID NO: 21391 - DNA, 60 bp, Homo sapiens
tgtaaccgatgagtattcacaaggacaggtgggtaatggaggatgaacattccctcccag

SEQ ID NO: 21392 - DNA, 60 bp, Homo sapiens
agccctcatactgttctccactagccttgtgctttgaggcttggtgtcaccctgttaaaa

SEQ ID NO: 21393 - DNA, 60 bp, Homo sapiens
tgggatcctgcccagctctctccataatcctctgtgtgtattatttggaaatgcctcttt

SEQ ID NO: 21394 - DNA, 60 bp, Homo sapiens
gaccctgaggatatgactgtgaggacaaagtcatgaacatgcatcagatgttctagttcc

SEQ ID NO: 21395 - DNA, 60 bp, Homo sapiens
caagaaggcagtgattaagagctcagtttctggagtctgacaggcctgatgatgaatcac

SEQ ID NO: 21396 - DNA, 60 bp, Homo sapiens
tgagtgagagccagacagaaatccaagcctaccgactcccagtctcatactcgggaaatg

SEQ ID NO: 21397 - DNA, 60 bp, Homo sapiens
acatgagctttagagtggatatgtgttttcagctctctgggatataaaagagtagaattg

SEQ ID NO: 21398 - DNA, 60 bp, Homo sapiens
tatagacctgcttgcattggctgatgctcctctaattccctgagtttgattcaaccaccc

SEQ ID NO: 21399 - DNA, 60 bp, Homo sapiens
gtcccatgaccagcattatgaaaatgcgagagtgggaaggacacagtgtgagacttccac

SEQ ID NO: 21400 - DNA, 60 bp, Homo sapiens
agaatgggaaggcagaacctggagcttgcagatgaagcagtggagagggatgtggatcga

SEQ ID NO: 21401 - DNA, 60 bp, Homo sapiens
aaatgccggtctcctactcttcatggcctttgtacctgacttggccaggaatgatctctg

SEQ ID NO: 21402 - DNA, 60 bp, Homo sapiens
gtcagggaggagtttcagaatgtagtcgtggccttggcttgggtgtggaagtaatagcaa

SEQ ID NO: 21403 - DNA, 60 bp, Homo sapiens
ccttgcggctgatgtgttaaggacagcagtgcctctgtcagcctacatccctgaatgact

SEQ ID NO: 21404 - DNA, 60 bp, Homo sapiens
aggtgaggaaccttaatctaacctgaccaggctgattgacagcagtggagagactgccat

SEQ ID NO: 21405 - DNA, 60 bp, Homo sapiens
tctagcaagtcctggaaaagagactagagcccaaatgccttcactctgccaagggagctt

SEQ ID NO: 21406 - DNA, 60 bp, Homo sapiens
ctagagagacataggtgttcggcctggctcaatcactagccttatagtctcacaggaaaa

SEQ ID NO: 21407 - DNA, 60 bp, Homo sapiens
tgccttctatggagcagtgttctatgaagggtggtgtgccctacagggtgcaaaagatga

SEQ ID NO: 21408 - DNA, 60 bp, Homo sapiens
ctttcatgtgctttcaggtgagattgggccaacagccatgatctaagggtagcgaggttg

SEQ ID NO: 21409 - DNA, 60 bp, Homo sapiens
ccattgcgtcttctggtttctctacaggacactctccatctaaatggcttcacagtgtgg

SEQ ID NO: 21410 - DNA, 60 bp, Homo sapiens
gaggtgattggtgtaagtgttcagtacctatgaagacctaactcttgagggagagactcc

SEQ ID NO: 21411 - DNA, 60 bp, Homo sapiens
acacccagcccagtcccttgaccagcaggagttggtaactgttgaataatgacacttctc

SEQ ID NO: 21412 - DNA, 60 bp, Homo sapiens; identical to SEQ ID NO: 4855

SEQ ID NO: 21413 - DNA, 60 bp, Homo sapiens
gttccccatgggttttgattgtgtctaagctatgatgaccttcatataatcagcataaac

SEQ ID NO: 21414 - DNA, 60 bp, Homo sapiens
gtgttagtaacatccatctgctgatcaaggaggcattggatctggtactagaaggtgaaa

SEQ ID NO: 21415 - DNA, 60 bp, Homo sapiens
cggaaaattaacctacttaacttgatttgcaacaaggctgagtccctctgtttgcctgag

SEQ ID NO: 21416 - DNA, 60 bp, Homo sapiens
ctcctgcaaatgatcgttctcacactcatattagctcatgttggaatttcccatcctgcc

SEQ ID NO: 21417 - DNA, 60 bp, Homo sapiens
tataacctctaaagagcagtgagcccatttcaggccctctgtgagaggtcacaaggacct

SEQ ID NO: 21418 - DNA, 60 bp, Homo sapiens
gtgcacaatgcctgttgctgcaaacccaactctctgtgaaaagcgctcgtctctaagctg

SEQ ID NO: 21419 - DNA, 60 bp, Homo sapiens
gcctggtcatcttcacttccacacagcccacaaacttctcacttgtatctctcctggtac

SEQ ID NO: 21420 - DNA, 60 bp, Homo sapiens
cccctcttactggacccaaaaggctctcaagtgtaacacctttctgtagtgctgtagatc

SEQ ID NO: 21421 - DNA, 60 bp, Homo sapiens
tggttaccctgtgctgtacccaactggattgtcatcttctgagaatgcaaactgcagacc

SEQ ID NO: 21422 - DNA, 60 bp, Homo sapiens
ttttcagatgtaatttacaaccatacagtttacctgctttgggtttacaactcaagattt

SEQ ID NO: 21423 - DNA, 60 bp, Homo sapiens
gaaaggtgtcagggacccatgcacaaatgtagcctttttgatgcttgagaaagaatgcct

SEQ ID NO: 21424 - DNA, 60 bp, Homo sapiens
aagggtagctataagtacacaggagagacatccagctaaacacatctcagttacctgagg

SEQ ID NO: 21425 - DNA, 60 bp, Homo sapiens
aacaattccaatcttctctccaggccaccaccaactccaccagacacctaaactagctga

SEQ ID NO: 21426 - DNA, 60 bp, Homo sapiens
atcttggagatccatatttccagttgattaatgagtagaagttaactgaagatttgcagc

SEQ ID NO: 21427 - DNA, 60 bp, Homo sapiens
gcctgtgacgtttaggaaacaagggaatgcaaggctcaccatggagggtagaagaatgtt

SEQ ID NO: 21428 - DNA, 60 bp, Homo sapiens
ctggataggaatgtgggatctggaattcaggagacatagactgcaatcctggctatcaaa

SEQ ID NO: 21429 - DNA, 60 bp, Homo sapiens
ccaaggaataatgcaaaggttttctagtgagcgttgaatctgatcaaagtaaaacggatg

SEQ ID NO: 21430 - DNA, 60 bp, Homo sapiens
ggcagctgttcagagttgctgttctctgctgtctgctttggtgttccagaagggtgtggc

SEQ ID NO: 21431 - DNA, 60 bp, Homo sapiens
caaaacaaagcaaattagctgcttgtaatgtgtacatttcctgaaagtacttttgaataa

SEQ ID NO: 21432 - DNA, 60 bp, Homo sapiens
gctgccttgaactatgagatggcatggaaatatagcaatcggacaaatccggcagtagga

SEQ ID NO: 21433 - DNA, 60 bp, Homo sapiens
agcccaaatcccctatctccccactgtcctaaccaaaagcttacacttcagaacccaagg

SEQ ID NO: 21434 - DNA, 60 bp, Homo sapiens
cactgattagccaaaggatggagaaacccaatacttctgctcgttcaccatgcctcacag

SEQ ID NO: 21435 - DNA, 60 bp, Homo sapiens
ccctgagcactaaaggcagactccaaggatcttgtctctgcaatcatcattctggccata

SEQ ID NO: 21436 - DNA, 60 bp, Homo sapiens
aaacctgctcttcccacatcttccccgtctcagtaggtggcagctctatttgtccggtta

SEQ ID NO: 21437 - DNA, 60 bp, Homo sapiens
ccccactcactgctcacgatgccagacacaccaaggctatttgcctatgagaatgttatc

SEQ ID NO: 21438 - DNA, 60 bp, Homo sapiens
ggttttgcatagtcctgactcactgcctacatacccctcttgttcctcagttcttatccc

SEQ ID NO: 21439 - DNA, 60 bp, Homo sapiens
ggagcctgctgtgccatgtcagtcaaatctgggctgtcttcatgattcaacttggtgatg

SEQ ID NO: 21440 - DNA, 60 bp, Homo sapiens
actgcacaaaagtggtgctaattcagtaaacagtgacacctgtgtgggttcaatctgtgg

SEQ ID NO: 21441 - DNA, 60 bp, Homo sapiens
gttgcagaggaagccagaaacctttgatggctcaaagaagtgtctcatcatcataacaca

SEQ ID NO: 21442 - DNA, 60 bp, Homo sapiens
agatctgaacctaacttttcttactccctgaggagtttcttgttggacccaatggggtcc

SEQ ID NO: 21443 - DNA, 60 bp, Homo sapiens
ggcaagatcagtacttcttggcatcacccaataccaggcatcagagccttcttgacactg

SEQ ID NO: 21444 - DNA, 60 bp, Homo sapiens
cttgctctacatgactatcatacgtgttatggattgaactgtctccactccccaaattca

SEQ ID NO: 21445 - DNA, 60 bp, Homo sapiens
actacacccaacttggtaagttctgctctctctcttatggcaaagggaaacactgatatc

SEQ ID NO: 21446 - DNA, 60 bp, Homo sapiens
ggcaaaagaaggtaatggaggcaaaagtgatggtacaattagtgccaacactggatgaaa

SEQ ID NO: 21447 - DNA, 60 bp, Homo sapiens
aggctctggttctcacatggcctttgctccctcaggcttcctagtgttcccatgatcttt

SEQ ID NO: 21448 - DNA, 60 bp, Homo sapiens
gagttccctctagccacctttcatgggaattgttggttcatcctctgaggctgcagtagt

SEQ ID NO: 21449 - DNA, 60 bp, Homo sapiens
ggctaattcgcctttactctcacctgcttccgtggaggaggtgaataaagcctgtatttc

SEQ ID NO: 21450 - DNA, 60 bp, Homo sapiens
gcagtatgtactttgcgttaaagtgtatcctgcatgtgttctatggaacaatatgtggac

SEQ ID NO: 21451 - DNA, 60 bp, Homo sapiens
taatgcagtgttttccgaatccctcgttcttacatcaaaacagaactgtggctgggtgtg

SEQ ID NO: 21452 - DNA, 60 bp, Homo sapiens
cttagccatagtcccaacttcagtggggaatggagcagcactaaaaggtcttgctcggct

SEQ ID NO: 21453 - DNA, 60 bp, Homo sapiens
gagtgaacgaacaatcaagatgagatggctgctgttgatgtgattctctaggttactacc

SEQ ID NO: 21454 - DNA, 60 bp, Homo sapiens
gttgccttcaaaaaccagattgggagaggaaatgtcccatacctgcaggatcatggattt

SEQ ID NO: 21455 - DNA, 60 bp, Homo sapiens
acaggggctatcgaggagacccagtgagaatgtagcattttgttcatccccagggtagct

SEQ ID NO: 21456 - DNA, 60 bp, Homo sapiens
aactgtgggaatacatctgtgcaccacggtgctcctctgcagttactcaagtccatgggt

SEQ ID NO: 21457 - DNA, 60 bp, Homo sapiens
ccctggcctcatattcctgttgtcatttactggcgtagtagacaattcataactgggaaa

SEQ ID NO: 21458 - DNA, 60 bp, Homo sapiens
ttggaatcttacctcctagcctccaaatgtccacagaatctgacaattcagaaaagcttt

SEQ ID NO: 21459 - DNA, 60 bp, Homo sapiens
caggtgctcgctggccatcacagttgcgattccatgagtagctgctttatgactgctttt

SEQ ID NO: 21460 - DNA, 60 bp, Homo sapiens
gccccattgggacagtgctattgggaatgtgaattgataccactttcctggagtctagtt

SEQ ID NO: 21461 - DNA, 60 bp, Homo sapiens
gatatccataggcagtaaaccaacaacttcaggacctaggactgagctaagaaggctcag

SEQ ID NO: 21462 - DNA, 60 bp, Homo sapiens
gccctgcatatgtgctcatttggggaaggacggaggacacagagcatcgacacaaattct

SEQ ID NO: 21463 - DNA, 60 bp, Homo sapiens
tttccaaagggaagaactgtgttgtgctcatcatcgtgttctcagctcctagtacagtgc

SEQ ID NO: 21464 - DNA, 60 bp, Homo sapiens
gtgacagaatttagtcctttatggaaagtcaaaccaaattgctagcagttttgagttgaa

SEQ ID NO: 21465 - DNA, 60 bp, Homo sapiens
agagcccaaccaccctctaataaggggtgctctccaccctatctgaggagcaattgggat

SEQ ID NO: 21466 - DNA, 60 bp, Homo sapiens
atacaaaactggaaacagatccattggaacaattatggctaagcacaacctattcaggtt

SEQ ID NO: 21467 - DNA, 60 bp, Homo sapiens
ccttgcaaagcctatctgactctaggcattcaagaacatgctctccaacacctcattttc

SEQ ID NO: 21468 - DNA, 60 bp, Homo sapiens
tagaaggagcccaggtaaggatgcctaatcctgtccagtttggctagaactccatagcca

SEQ ID NO: 21469 - DNA, 60 bp, Homo sapiens
tttatagaggctgctaaatcgacctgcgagagaggctaccacgacctgagtgtgaaactc

SEQ ID NO: 21470 - DNA, 60 bp, Homo sapiens
cgtcccaggtagagggcatgttgaaggccatcatcactggatgttctgttctactgtaca

SEQ ID NO: 21471 - DNA, 60 bp, Homo sapiens
tccttggcatacactatgacaaacaacttcattactctcccaccaggagctgctctcctg

SEQ ID NO: 21472 - DNA, 60 bp, Homo sapiens
agcctgtggccattgaactatggaaggctgttaaaagacataatctgactaaaagatggc

SEQ ID NO: 21473 - DNA, 60 bp, Homo sapiens
aaaatgaggactcccagcagaaagcctttagcctgcccctgtggagtgcagatgaccaaa

SEQ ID NO: 21474 - DNA, 60 bp, Homo sapiens
tagactccttgttccttaagttggttatgtgttaggtgaccttgctagttccctaatttt

SEQ ID NO: 21475 - DNA, 60 bp, Homo sapiens
cgtatgcagtcccacatctgacaggcttgcaaaaccttccacatttccatgagtaagcct

SEQ ID NO: 21476 - DNA, 60 bp, Homo sapiens
gaaccctggtagtcttgttcacagctttatccccacttagaacagttcttagtgtacatg

SEQ ID NO: 21477 - DNA, 60 bp, Homo sapiens
ggtggcctgatgaaaagaaattcttcaactttagtctctttcctgcattgtgttcatacc

SEQ ID NO: 21478 - DNA, 60 bp, Homo sapiens
gcctcagtgaaattgagcagcatcacgtcaccacgacttgtggtccagctgtttattgca

SEQ ID NO: 21479 - DNA, 60 bp, Homo sapiens
gaaggatggtgtttaaaggcactgtcgttagttatctcaacaggtggtagctggtaattg

SEQ ID NO: 21480 - DNA, 60 bp, Homo sapiens
ttcttaggcaggattatggggtgaccctttcactttctactttagatacttcagtatgaa

SEQ ID NO: 21481 - DNA, 60 bp, Homo sapiens
ccttgcatttagtcctatgatctttacccacccaagcacggaggtaacaaggtaactgtg

SEQ ID NO: 21482 - DNA, 60 bp, Homo sapiens
cttaccatctgttatctggaagtataattgattgtcaatgaatgtcatttcagacccata

SEQ ID NO: 21483 - DNA, 60 bp, Homo sapiens
ttattcccttggcaatgcacaactgaacttttatactcatctctatatacgtgtgtatag

SEQ ID NO: 21484 - DNA, 60 bp, Homo sapiens
ttaccaggaaaaccagaaagcccgtcacttgccttgcctgcaaaggcgagcctaaagaaa

SEQ ID NO: 21485 - DNA, 60 bp, Homo sapiens
ttcagtgctaatactgacctgatagtagagatttctttccctgagtcggatggtagcagg

SEQ ID NO: 21486 - DNA, 60 bp, Homo sapiens
tgccatctttgtcagcataacctttgctgccatagtgcactgcgtttgtgctggaaggct

SEQ ID NO: 21487 - DNA, 60 bp, Homo sapiens
aaggaaatcgaaagctgcaatgggcctcgttaggatgctgttagggtttaggagggtcct

SEQ ID NO: 21488 - DNA, 60 bp, Homo sapiens
tattgttaatgtatcagtggattgttcctccaaagtaccagtgccttaacacaacatatc

SEQ ID NO: 21489 - DNA, 60 bp, Homo sapiens
ggttgatcataggtcccagtttacccaggaaaattccagtttatacctgttgtacctgtg

SEQ ID NO: 21490 - DNA, 60 bp, Homo sapiens
gttgatggacatgccaaggtattgacctcttaagccagtagtggctggttagagcttggc

SEQ ID NO: 21491 - DNA, 60 bp, Homo sapiens
gggcagtattctgcatggacctccagaaagaatgagattgctctttgtgtcctgttgcgg

SEQ ID NO: 21492 - DNA, 60 bp, Homo sapiens
tttgctgcgtggagtctaccctcctgaaccattgtcacagtactcaaggaaggatgcttc

SEQ ID NO: 21493 - DNA, 60 bp, Homo sapiens
ttcctaagtttacaccagtgtgggcatccagtgaggggaactggcctgtgatgcggtggt

SEQ ID NO: 21494 - DNA, 60 bp, Homo sapiens
atgcgagacgtggccagatcccatccaacacacggtttaattttcatggggctctgggat

SEQ ID NO: 21495 - DNA, 60 bp, Homo sapiens
ctcagaaaatacactacactaggaatggggagtcagaaagcatagactagctatcatagc

SEQ ID NO: 21496 - DNA, 60 bp, Homo sapiens
cgtgaccagtgcctgccacacaaatcatgagtaactattgcaggtttcacaaatggctgg

SEQ ID NO: 21497 - DNA, 60 bp, Homo sapiens
ccccaggatattgtgactttgttaaaactgacaaatagaaagtctaagttggggaaagac

SEQ ID NO: 21498 - DNA, 60 bp, Homo sapiens
tcaaccatttgggacaccaactcttttagactgactacattaggaagactacagagtctt

SEQ ID NO: 21499 - DNA, 60 bp, Homo sapiens
aaaggcccctgccccacttctcccccacaaagcggggtctcaagccacactgccctgttt

SEQ ID NO: 21500 - DNA, 60 bp, Homo sapiens
gaaatctatgccagtatgatgtaatcagtagaatgttgcttaactgggagcctttggcat

SEQ ID NO: 21501 - DNA, 60 bp, Homo sapiens
gatctgagctagcatagtcagcacattcagcccacttcctattgtgaagcccctgtagag

SEQ ID NO: 21502 - DNA, 60 bp, Homo sapiens
gcatttggacttcctacttggggtgcctatctctcaataggcagaaagtgaggtagaatg

SEQ ID NO: 21503 - DNA, 60 bp, Homo sapiens
ttagtgtgtttcggtgaagctctccaagtgtgttgaatcagcgtgcctagcctcaagggt

SEQ ID NO: 21504 - DNA, 60 bp, Homo sapiens
gtagatctggtttccattcctggttcaccctcttgctgcaaccctgagaagttacttcac

SEQ ID NO: 21505 - DNA, 60 bp, Homo sapiens
cggctcctgcattctggcaccacttgaacacgagacctggaaagtcatcaccatggccat

SEQ ID NO: 21506 - DNA, 60 bp, Homo sapiens
ctcactcctttcttaaagcaacagccgatcattcgtggaatatttggaatctcattattc

SEQ ID NO: 21507 - DNA, 60 bp, Homo sapiens
gaaagccagatactttcctttctacaattgaagccatttactactttctggtagactacc

SEQ ID NO: 21508 - DNA, 60 bp, Homo sapiens; identical to SEQ ID NO: 4855

SEQ ID NO: 21509 - DNA, 60 bp, Homo sapiens
tactgcctaaatgtcactaaggtacacttctgagctggcctgcagctaacttcagatctg

SEQ ID NO: 21510 - DNA, 60 bp, Homo sapiens
attattccatgtgtgagtaccttgtgcatgcttggacattatcagcaaagccatgggatt

SEQ ID NO: 21511 - DNA, 60 bp, Homo sapiens
ctgcagccctaatgtctctgtattcctatatgcgtctgtgtagcttcctaaaactcaggg

SEQ ID NO: 21512 - DNA, 60 bp, Homo sapiens
ctgaacaatcactgctataatggcaccctattactctaccacaggaacaaaagctcccgg

SEQ ID NO: 21513 - DNA, 60 bp, Homo sapiens
cagagcctggcacttgtgaaaacaacgttctaaggcgtattttctgacaatttgggcgga

SEQ ID NO: 21514 - DNA, 60 bp, Homo sapiens
aagagatgtgagcattgagggtgtactgtttctagctcctggaggcagatagctgaggca

SEQ ID NO: 21515 - DNA, 60 bp, Homo sapiens
tgtggcaacccctcacacatggcaggtcctttgcaaccccaagtgcttcagatgctacca

SEQ ID NO: 21516 - DNA, 60 bp, Homo sapiens
gctactgttctgtccttcaatgcagacctggcctcaggagattgtaaggtgggtagaaac

SEQ ID NO: 21517 - DNA, 60 bp, Homo sapiens
agtggaccttctccggtaaaacgggggttaacaactccaaacttttccccacctaaaggg

SEQ ID NO: 21518 - DNA, 60 bp, Homo sapiens
cgcttctgtattgtggggctgcttgggcacggaaaggtcttcttgagcttgtcatctttt

SEQ ID NO: 21519 - DNA, 60 bp, Homo sapiens
ggggaactccagtttggaagagggtgggaagcaccaaagacccaactctagtcccctcaa

SEQ ID NO: 21520 - DNA, 60 bp, Homo sapiens
acctccgttgaacattctgtatggaaaagagccctggagcatcaggttccccagataggc

SEQ ID NO: 21521 - DNA, 60 bp, Homo sapiens
aattcacaccagccacgacgacttcccggctacttcacgttctctatgtttgcagctgtt

SEQ ID NO: 21522 - DNA, 60 bp, Homo sapiens
gagcagaggaatctgttaacttgcagaaggtcacatcggcaataaagggtaaagctccca

SEQ ID NO: 21523 - DNA, 60 bp, Homo sapiens
cttttccccatgaattgtgcaccctagctttttctccatcaattatagatttaggtgatc

SEQ ID NO: 21524 - DNA, 60 bp, Homo sapiens
caatattattacctcccagtggctactgtcagagttgagaagtagaaaacgaaacctagc

SEQ ID NO: 21525 - DNA, 60 bp, Homo sapiens
ttggttggaggaggacacacggctcacaagaatggatcagggagagcccacggtgaaccc

SEQ ID NO: 21526 - DNA, 60 bp, Homo sapiens
ggtgatgactgcattttaggcaaatgatgactttcttggttccattggtttgcaagtaaa

SEQ ID NO: 21527 - DNA, 60 bp, Homo sapiens
gaaatcagccaccaacatggctgtgtcactttggtgctcccacaacaacttgaagcattt

SEQ ID NO: 21528 - DNA, 60 bp, Homo sapiens
ccccaccatcttgagtccctcattctcattctccacatatagctacaccacaagttttgg

SEQ ID NO: 21529 - DNA, 60 bp, Homo sapiens
cttgggcctatggttacatcactgagctgctgcaccaagccttgcctgaagctcgtccta

SEQ ID NO: 21530 - DNA, 60 bp, Homo sapiens
ctggcttgaccactttggaacaggctgtctgtgggcaaaggattcaacctcactgaacct

SEQ ID NO: 21531 - DNA, 60 bp, Homo sapiens
ggaagtatactctacctcttaacggaagagtgaaaagaatgcattttagaatagtatgtg

SEQ ID NO: 21532 - DNA, 60 bp, Homo sapiens
ttatgagggcccagtcttgtgtctgccgggcaatgagcaaggctccttcctgtccaagct

SEQ ID NO: 21533 - DNA, 60 bp, Homo sapiens
cctggaaacctgcgggtgagtgtgcacatgtgtatctgttttgctcatgaaatgactttt

SEQ ID NO: 21534 - DNA, 60 bp, Homo sapiens
ttatttcccagttggcagtaccacttttacactttgaagatggaaacttggcaggaaaat

SEQ ID NO: 21535 - DNA, 60 bp, Homo sapiens
gcatatcaaaggttccttctagtgttttgattctaggacctctaaattcatgcaggctgc

SEQ ID NO: 21536 - DNA, 60 bp, Homo sapiens
cccattctactcactaggtagatagacggacagtttaactcccttaggagtacataccac

SEQ ID NO: 21537 - DNA, 60 bp, Homo sapiens
tgctataccctcttccttacgtgctatctgatattgcatttcattatgtatccttcttag

SEQ ID NO: 21538 - DNA, 60 bp, Homo sapiens
cttcagaatgctgcctgccaactctagatcaggaagacatcttaagaaaatgatagcaag

SEQ ID NO: 21539 - DNA, 60 bp, Homo sapiens
atctgggggctactgatttctcacccaaaagacttaccgttcctgtgggaatttccgggt

SEQ ID NO: 21540 - DNA, 60 bp, Homo sapiens
tgcactctgttttctgattgcctgagttgggacccagcaggggtttcagacacgtaatct

SEQ ID NO: 21541 - DNA, 60 bp, Homo sapiens
tgtttctccttctgaatgcattcttaccactttgattctttctgtttctactatccatat

SEQ ID NO: 21542 - DNA, 60 bp, Homo sapiens
ccctgtgtccagcagctcacatcttaatggtggaagggagatgaaggagaacagaccata

SEQ ID NO: 21543 - DNA, 60 bp, Homo sapiens
ttcccatctgaagctgaagggcacaactgtttggagattccctgagtgaggggacatact

SEQ ID NO: 21544 - DNA, 60 bp, Homo sapiens
gctcagacagtaatgagatctggagtgatgccataggcaccctgttctttgagtcgttgc

SEQ ID NO: 21545 - DNA, 60 bp, Homo sapiens
ctccccttcacttgagggtcctttgtggaaatgtgtgtcttgcgttggctactttgtgtg

SEQ ID NO: 21546 - DNA, 60 bp, Homo sapiens
gtttaggagaaaacagaatacttgctagccccaccgtcctcaagaacctagcaatgcatt

SEQ ID NO: 21547 - DNA, 60 bp, Homo sapiens
ccttctcaagggagccttgtctaatgttcctgagactatttcacactctccatgcttatg

SEQ ID NO: 21548 - DNA, 60 bp, Homo sapiens
cggatctagtccgtcttatctgcaccaaactgccattccagtcactcactgggatcatta

SEQ ID NO: 21549 - DNA, 60 bp, Homo sapiens
gatcccttggaaagactcaaaactaccttcactagtaggactcctaagcgctgacctatt

SEQ ID NO: 21550 - DNA, 60 bp, Homo sapiens
ggggattggattttgccctgacctggataaaaggacacttcatcacagcaacagcctgct

SEQ ID NO: 21551 - DNA, 60 bp, Homo sapiens
cgtggccctaagggagcaagtgggcactaagtatatgtaaaggtttgcaagtggtaagca

SEQ ID NO: 21552 - DNA, 60 bp, Homo sapiens
ggggccagttcaagaagctaccgtaagatgaagtctaggaatgctttctatatcggcccc

SEQ ID NO: 21553 - DNA, 60 bp, Homo sapiens
ataacagagtcttgctgttgaatgtggagttggcttggtcaccactgccacagggatctc

SEQ ID NO: 21554 - DNA, 60 bp, Homo sapiens
aattcaggatccacctctcctgagctgtgagcacatgggcaagtttcctcaccagtccaa

SEQ ID NO: 21555 - DNA, 60 bp, Homo sapiens
cagttaagtgtcattatctcatctcccagagccagacttgcttacttctctccctgagcc

SEQ ID NO: 21556 - DNA, 60 bp, Homo sapiens
ttctcaaacccagaaggatctggtgcccaggtcacctcagctggagaaatccagaatccg

SEQ ID NO: 21557 - DNA, 60 bp, Homo sapiens
agcaccatccaaaccctccacatccagtaacggcaggaactgatctcaggcctaatggtg

SEQ ID NO: 21558 - DNA, 60 bp, Homo sapiens
tgtttaggcacagctggaatgaggtctggggaaattaggcctcttctagggtggatgtga

SEQ ID NO: 21559 - DNA, 60 bp, Homo sapiens
tcacagtgaagtcttgccctctctgtgggatatcacatcagtggttccaagatttcaaag

SEQ ID NO: 21560 - DNA, 60 bp, Homo sapiens
ttccagtaccttgttgggtgatgtaccatggggcatagagaagtcacaagacagtgccct

SEQ ID NO: 21561 - DNA, 60 bp, Homo sapiens
agaacaggttaggtgccttctgcagccacttcacatttcccggagtaggacagataacaa

SEQ ID NO: 21562 - DNA, 60 bp, Homo sapiens
gcaaacctaatagagtacttctcctgccaatactggtattagagccagattgctggtatt

SEQ ID NO: 21563 - DNA, 60 bp, Homo sapiens
ggattgccacatttgtaggattgtcttctagtcaagaagagatacctacccatgtaccag

SEQ ID NO: 21564 - DNA, 60 bp, Homo sapiens
ctcagacctgtacaaccttcctctaggtgtggtctaaccagtaaaaactgcaggggaacc

SEQ ID NO: 21565 - DNA, 60 bp, Homo sapiens
gacaccatcactcagaaggtggaggagatcgatgcagccattctgcgatcacagcagttt

SEQ ID NO: 21566 - DNA, 60 bp, Homo sapiens
aaccccagactgcacattacctcaagttgagggtttcagagggcaagtggtatagaagaa

SEQ ID NO: 21567 - DNA, 60 bp, Homo sapiens
ggaagaaagacctggtttagagaggagggcgaggaagtggtttggaagtgtcactttgga

SEQ ID NO: 21568 - DNA, 60 bp, Homo sapiens
tttggcaggagagtgggttgttcccagaggagttatgcaaagggaagctggacaggcggt

SEQ ID NO: 21569 - DNA, 60 bp, Homo sapiens
cacatcggagacataaatctccctgtatgcttagtttgtgtcattgccactgtatcaatg

SEQ ID NO: 21570 - DNA, 60 bp, Homo sapiens
tccaccatatcttgccctggccgtgtccttgtgccagtggctgtagatgaggaaacctag

SEQ ID NO: 21571 - DNA, 60 bp, Homo sapiens
gggcctgagagtggctatggcacctggacacagtgtccctgcggaccagtcctgaggcct

SEQ ID NO: 21572 - DNA, 60 bp, Homo sapiens
gagtgtgtgtagctctgttgtttccgtttgagttgcacaaaatgaccaaataggaccttt

SEQ ID NO: 21573 - DNA, 60 bp, Homo sapiens
aggcagttataacgcactacacacctggtacctccatatgtgcacctgacaacaacctgg

SEQ ID NO: 21574 - DNA, 60 bp, Homo sapiens
gggtaagctaaggctagaaaggcaggctgggtcaacagaatggcaagctaaaacatggga

SEQ ID NO: 21575 - DNA, 60 bp, Homo sapiens
ggtagaagtcggaagtattttgctactgagcgttatggtcggttgcgttgtggctgttag

SEQ ID NO: 21576 - DNA, 60 bp, Homo sapiens
aattgtgaagtgttatgttagcataggaaggttaggggaactcagactggtatttgaaac

SEQ ID NO: 21577 - DNA, 60 bp, Homo sapiens
aataaacaccagcagacatctgcacgcaggtgcactcacgcgaggacttcagattgttca

SEQ ID NO: 21578 - DNA, 60 bp, Homo sapiens
acaaactcagcagcaaagcatcagccattaggtagctacagaagaatagattctaatgag

SEQ ID NO: 21579 - DNA, 60 bp, Homo sapiens
ggcattaccctcatatcaaagtcacagcaagactcacaggaaaagagtgccatacaccag

SEQ ID NO: 21580 - DNA, 60 bp, Homo sapiens
actagtgacaactggatggatcgcttccgaaatgcatatgtatgggtccagaatcctctc

SEQ ID NO: 21581 - DNA, 60 bp, Homo sapiens
aacaagtgactacccttgaagcacatccccttctggatctgaaaagagcccttggctcag

SEQ ID NO: 21582 - DNA, 60 bp, Homo sapiens
atggccacattggggtcaccatcctcaaggctccatctactaagggcatcttcaaagctt

SEQ ID NO: 21583 - DNA, 60 bp, Homo sapiens
ttatttccgtgatatcccagtcatgctgaagctggcttgtgcagatacctcagccctgga

SEQ ID NO: 21584 - DNA, 60 bp, Homo sapiens
acctacatcatctccaccaacctcaagattccgtcagcctctggctggaggaaatccttt

SEQ ID NO: 21585 - DNA, 60 bp, Homo sapiens
ccagagggtgagcttcaccagcgttggcctcatatctcttgtctgctttctgctaattct

SEQ ID NO: 21586 - DNA, 60 bp, Homo sapiens
ctgtggatcgaatcacatcaaccacttttactgtgatattcttcccttgtatagactctc

SEQ ID NO: 21587 - DNA, 60 bp, Homo sapiens
gtgcttgctcatcttttccctgctcgtcatctcctacatagtcatcctgagctccctgaa

SEQ ID NO: 21588 - DNA, 60 bp, Homo sapiens
tattctcatggatctcagggatcatggtggctactgtgcagaccacttgggtatttagtt

SEQ ID NO: 21589 - DNA, 60 bp, Homo sapiens
gaccaatggactgtgcatccggctattaatcttgtcatatgtaggtggtcttcttcatgc

SEQ ID NO: 21590 - DNA, 60 bp, Homo sapiens
cacagtaggggtggtggtcattaccctgccattcatgtgtatcctggtatcatatggcta

SEQ ID NO: 21591 - DNA, 60 bp, Homo sapiens
gatcatcctcacctcctacctgctaattctcaccactatcctgaagatacactctgcaga

SEQ ID NO: 21592 - DNA, 60 bp, Homo sapiens
atctcacacattcatgaattctgccatttctcatttttgctatatccatgacatgagttg

SEQ ID NO: 21593 - DNA, 60 bp, Homo sapiens
aattttcaaacgtttcacacgtgttaagcaacacttctttagctccacagggacaaaatc

SEQ ID NO: 21594 - DNA, 60 bp, Homo sapiens
gcctgtccctctgggactggacaattgcttcaagcattcttcaaccagcagatgctgttt

SEQ ID NO: 21595 - DNA, 60 bp, Homo sapiens
cacttgcacatgtgactctggtcaattcaaaagactcttatttcggctttaatcacagaa

SEQ ID NO: 21596 - DNA, 60 bp, Homo sapiens
tctgtgtcttaaatcttctacgtaggactggctctcaggaagctatgttcactcgcctgg

SEQ ID NO: 21597 - DNA, 60 bp, Homo sapiens
ttaagggagagcaccaagaagcagatcacagggcagaagagggatgagtgcctttcaaga

SEQ ID NO: 21598 - DNA, 60 bp, Homo sapiens
acatgacggtaaaccctgaaccatcagctaaaagaggtagatagcagtggttgcccctgg

SEQ ID NO: 21599 - DNA, 60 bp, Homo sapiens
ccacatgatgagagctgttgaagtcgttatcacggtatctgagtttgtcacctagatcac

SEQ ID NO: 21600 - DNA, 60 bp, Homo sapiens
tgcacgttacagatgagggagcaacacttgatggccttctcgtcccgaggcaccagccag

SEQ ID NO: 21601 - DNA, 60 bp, Homo sapiens
ttgctcatggcaaagacaagaaaacgcctcaacaaggttttaaggtgggatttactctca

SEQ ID NO: 21602 - DNA, 60 bp, Homo sapiens
catgctttctcctagtgctttaagccaccctgagatgtacagaccaatactggccatcac

SEQ ID NO: 21603 - DNA, 60 bp, Homo sapiens
tgctgctgggtctgttgctcttgtaagtccttcctctggggaagtgaagggtacaacaat

SEQ ID NO: 21604 - DNA, 60 bp, Homo sapiens; identical to SEQ ID NO: 4855

SEQ ID NO: 21605 - DNA, 60 bp, Homo sapiens
ggccagaagcaagcaagtggaataaacaggacaattgcagagtttatggaggattaggcc

SEQ ID NO: 21606 - DNA, 60 bp, Homo sapiens
gcagtactatgcaatacacagagacttacctaactgctgttcttggagggtctattaggc

SEQ ID NO: 21607 - DNA, 60 bp, Homo sapiens
aaggtctctttccatctgagcttactttccctaatttgggtttgtctcttaggtccaccg

SEQ ID NO: 21608 - DNA, 60 bp, Homo sapiens
gttgctgtagccgtttggcaagtctggggagactaacagacacactgaggatagcagaaa

SEQ ID NO: 21609 - DNA, 60 bp, Homo sapiens
ttgtccatcagagccacttgctgctctcagctggccttgctgttgaatggcataatctga

SEQ ID NO: 21610 - DNA, 60 bp, Homo sapiens
cacctaaaaggactgcaagcccacaattctctgttgagctcttactcagctgttacggtg

SEQ ID NO: 21611 - DNA, 60 bp, Homo sapiens
ctcggaaaattgagatagtatctcactttggaggaaaggccaggtttgtctaccttctag

SEQ ID NO: 21612 - DNA, 60 bp, Homo sapiens
ccccttatccaggcccatgtcaagttattcctgctccacaattggaaatggacccttgca

SEQ ID NO: 21613 - DNA, 60 bp, Homo sapiens
gctttggctttaatgtcacctgctctttgatgtcacctgcccttagaagtctttcctggc

SEQ ID NO: 21614 - DNA, 60 bp, Homo sapiens
gatttgtgtgtgccttgttaataggcctcaacgggctaaatacaacaggacaaccaatga

SEQ ID NO: 21615 - DNA, 60 bp, Homo sapiens
ggctggctctagcagccttgtcttacttgctccctgaactgctgcattgacctgcaccat

SEQ ID NO: 21616 - DNA, 60 bp, Homo sapiens
ctctgtagcattgctatccttttgtctctccatgtttcgtcatgatgttgtcttctaacc

SEQ ID NO: 21617 - DNA, 60 bp, Homo sapiens
tgctgaaatctgaatgcccagggagattggtggcccttgccaggaagtgtcttaacactt

SEQ ID NO: 21618 - DNA, 60 bp, Homo sapiens
ttaccgaggtctttactccacccctacaaaatgcaagtgggactttcagtgacattacaa

SEQ ID NO: 21619 - DNA, 60 bp, Homo sapiens
cgtccagtgaaacgaatgattggcaacattcacagagaggaataaactctgatcttatga

SEQ ID NO: 21620 - DNA, 60 bp, Homo sapiens
gcacttgggtttttatctttccagtctttctccccattatcactaacaatgggcattgaa

SEQ ID NO: 21621 - DNA, 60 bp, Homo sapiens
ttctactttcctagtctcctgcctttccgcaagtgtctccacccagctccgatagagtgg

SEQ ID NO: 21622 - DNA, 60 bp, Homo sapiens
ttcttgtgttagctaggtattgagcctttgtgccctctcaccagaggggaggatccttca

SEQ ID NO: 21623 - DNA, 60 bp, Homo sapiens
tagtgactttgctgatgtgtcaaggctagggctgagaggctgtgtccagcactgtcatct

SEQ ID NO: 21624 - DNA, 60 bp, Homo sapiens
ctaagtaaagttcgtttcaaaagaccacgtattgtgtgagtacactgacagaaaatgttc

SEQ ID NO: 21625 - DNA, 60 bp, Homo sapiens
ttttatttgtgctgaaatcacagtcatattcacttgcgtttctcatgtcggtcagaagtg

SEQ ID NO: 21626 - DNA, 60 bp, Homo sapiens
cccctacaatgtatacccctcctagggagcaaatgaacgtggctattacctctcttccca

SEQ ID NO: 21627 - DNA, 60 bp, Homo sapiens
ggagccatataccagctaaaagtcccagtatcttagaaggggaccagtatggggaccatg

SEQ ID NO: 21628 - DNA, 60 bp, Homo sapiens
ctctggttttgcctctggcttgcctgttgtgaagttctccctcaccaagttcttcttcag

SEQ ID NO: 21629 - DNA, 60 bp, Homo sapiens
tctggggcctgaaggacaaaccctcactggttgtatttcttggctggcaggcttataaca

SEQ ID NO: 21630 - DNA, 60 bp, Homo sapiens
ggggttatcaggtatactagttaacatgtttgacagcattctcaaaccttatatagcctg

SEQ ID NO: 21631 - DNA, 60 bp, Homo sapiens
gcctaagggaaataaagcgagaagtctgcttcaatcacagagacggtaaggtgtaaattc

SEQ ID NO: 21632 - DNA, 60 bp, Homo sapiens
ctacctgcttcgagcctcagaggacatctgtcattggctaatgggagtagaagtggctaa

SEQ ID NO: 21633 - DNA, 60 bp, Homo sapiens
cataggagtagtcacgggtcctaattctgcagtacgtggctatgcgggtatgaactcttc

SEQ ID NO: 21634 - DNA, 60 bp, Homo sapiens
acaaattcgctggattacagagagtcggtaatggagctcttcccagctggatcttcgaag

SEQ ID NO: 21635 - DNA, 60 bp, Homo sapiens
gacatagattcaagtcttagttctaccacagagacaaactgcttaaccttggcaaatagc

SEQ ID NO: 21636 - DNA, 60 bp, Homo sapiens
cggaaactcgcttcctatgggtcagtaaagtgtgtatgaggtggtgtggatgacagcaca

SEQ ID NO: 21637 - DNA, 60 bp, Homo sapiens
ttcgtcttggactggtttatactggaactcctgggaggtgtctgtgctgtctctcacaga

SEQ ID NO: 21638 - DNA, 60 bp, Homo sapiens
cattcctaacatggattcattcagaagcacccagatttcacaagaggaaatgatgaggcg

SEQ ID NO: 21639 - DNA, 60 bp, Homo sapiens
ctgaccactcaacatgatcactacactatgcttaccaggggtaatctctagaatccaggc

SEQ ID NO: 21640 - DNA, 60 bp, Homo sapiens
gagaacgtgaaggataacgaggaaaattgcctgaccagaaagctctgttaggaatgatgg

SEQ ID NO: 21641 - DNA, 60 bp, Homo sapiens
tctctcaaccccacagcaatggagtatctggagcgcaaggaggggttacagcttcttaat

SEQ ID NO: 21642 - DNA, 60 bp, Homo sapiens
acatagtgtcagctccagtggggaatgagacaggtgtgtggattcatcctccttgcactt

SEQ ID NO: 21643 - DNA, 60 bp, Homo sapiens
gaatttcaccttctctttggggttttctcactgtgaatcctgtagtaaccaggggttacc

SEQ ID NO: 21644 - DNA, 60 bp, Homo sapiens
gggtggtgaatctgagatctatgcacccaggaagcctgacacattattgtggtgtctcaa

SEQ ID NO: 21645 - DNA, 60 bp, Homo sapiens
ttgcccattgatgtgcatgaaacaagcacagttccctttccacatgaaagcctttaagat

SEQ ID NO: 21646 - DNA, 60 bp, Homo sapiens
ctgacagcaactctggctaatgcagttcccatttagtgagattttagcagtgccatgtct

SEQ ID NO: 21647 - DNA, 60 bp, Homo sapiens
cggactccttagtcaagaagggcatggttgaaaagtgctgaactggacactggaagacat

SEQ ID NO: 21648 - DNA, 60 bp, Homo sapiens
gagggtgtggtcttcctcacacttgtttcttcacacttgttgcctactatcatacctgac

SEQ ID NO: 21649 - DNA, 60 bp, Homo sapiens
aatcttgctgcagtagaatgacactgcagggattgtcacctggggatagtcttcaagaat

SEQ ID NO: 21650 - DNA, 60 bp, Homo sapiens
aattagtgaaggaggacagtggagaaggtgagtgactattaagagtgtgggctgggcacg

SEQ ID NO: 21651 - DNA, 60 bp, Homo sapiens
gaaaagcaagcaaggtgcgtggagcgtgtagaggccacagttttgggcaatctgcatatt

SEQ ID NO: 21652 - DNA, 60 bp, Homo sapiens
aatcacggccaatgcaacagtgctattgaaggaagtggtttattctccatagccgaggtg

SEQ ID NO: 21653 - DNA, 60 bp, Homo sapiens
tgtgagtgggcatggttgagttggtgtttatcagtcacaatcaagcagcattgtaaccat

SEQ ID NO: 21654 - DNA, 60 bp, Homo sapiens
gagacagagactgaggctaagaccacttggcctctccaaagatgaaatcgaggcttttct

SEQ ID NO: 21655 - DNA, 60 bp, Homo sapiens
aggtgtgcaccatcaccccaggtgtctcagatgtaggctccatgaatgcaggggcaagaa

SEQ ID NO: 21656 - DNA, 60 bp, Homo sapiens
gttgggttccttcaacagagtgcaatcactggtcctgtaaattcctagcatctgtcgtta

SEQ ID NO: 21657 - DNA, 60 bp, Homo sapiens
cctattaggctactcgaactcatcctactactactactcttttgcggggttaggggtagg

SEQ ID NO: 21658 - DNA, 60 bp, Homo sapiens
ggggacaagacatcgttctgctgcaacatgaagtaactagggctcatcagtatgaaggat

SEQ ID NO: 21659 - DNA, 60 bp, Homo sapiens
catcctggagaccagccttttgcttaatcacacttcctggcatcccacctacagagatga

SEQ ID NO: 21660 - DNA, 60 bp, Homo sapiens
atattcctagagtatctactgattacaaggcctgagccagacggaccttgttagggactc

SEQ ID NO: 21661 - DNA, 60 bp, Homo sapiens
ttgataggtctacttctagcatttgcagggcctaagctgagagtgctcatggagtctcag

SEQ ID NO: 21662 - DNA, 60 bp, Homo sapiens
cactcttgaggcagtgctctgatgatgactacaatgtgtgtctcatttacttctatcgta

SEQ ID NO: 21663 - DNA, 60 bp, Homo sapiens
tagcggttttcccataatagtagaaccatagggttagtttgcacccaaggaatggcaaac

SEQ ID NO: 21664 - DNA, 60 bp, Homo sapiens
tcttatcatggaacctggtgccttagcatggaaccttagcatggaaccctagcctggaac

SEQ ID NO: 21665 - DNA, 60 bp, Homo sapiens
ccggtgtcaagggagtgtgaaggtttcagagagtgattcatcctaaatcctgcttctccc

SEQ ID NO: 21666 - DNA, 60 bp, Homo sapiens
gtctgatggctctctcagcctccttcattctctccccatttctgccacattttccccaat

SEQ ID NO: 21667 - DNA, 60 bp, Homo sapiens
agacagtataggaagcaggatctgctcctgaagaaggggatggctcaagacagtgctgcc

SEQ ID NO: 21668 - DNA, 60 bp, Homo sapiens
ggcctttcctaaccagggatgaacaagaaactgaactaaactgccagaaaagacaatgag

SEQ ID NO: 21669 - DNA, 60 bp, Homo sapiens
cgaccacctgcttaaaactgtaccccttcccacctttccttaccacctttccctgctttt

SEQ ID NO: 21670 - DNA, 60 bp, Homo sapiens
ctttgcaatgttcattaatccacctctcaggacagccctgagaagtgcatactgttcctg

SEQ ID NO: 21671 - DNA, 60 bp, Homo sapiens
aagaggcaaagcaacagacataggatgtcagcgtgctgattaaggagaacagaggccgac

SEQ ID NO: 21672 - DNA, 60 bp, Homo sapiens
ctgtatggttcccaaaaccagtcaagaactgtaaaactcttactctacatacttgccagc

SEQ ID NO: 21673 - DNA, 60 bp, Homo sapiens
cagtggtttttgattgtcgaagaaagtgagggaacaggtagaaaacgaccacaatggtag

SEQ ID NO: 21674 - DNA, 60 bp, Homo sapiens
aatgtgaacaaatgccttcgcaggatgcatgggtttgggcaacagatggtcaggggaggt

SEQ ID NO: 21675 - DNA, 60 bp, Homo sapiens
tacccataaaggagcatgcagacacatgagtgcatcttggcttgccactaactgcctgtg

SEQ ID NO: 21676 - DNA, 60 bp, Homo sapiens
gccccatcaagtcactcatgactctatgttgactatgctttttcacgcttccagaaaagt

SEQ ID NO: 21677 - DNA, 60 bp, Homo sapiens
gtggacagaatttaggaatcatcacaagacgcaggaagcacactggagatgctgccttga

SEQ ID NO: 21678 - DNA, 60 bp, Homo sapiens
gagcttggacttcatcttgtcatcccagcagcaaggagtcgattttgcaggatggatgga

SEQ ID NO: 21679 - DNA, 60 bp, Homo sapiens
ctatttttggaaaagacctattagatccctgctaaggtcagttcttcaggataagactta

SEQ ID NO: 21680 - DNA, 60 bp, Homo sapiens
atgaacggcaggatgcctgaaactgtccaggcttgttatgatggagagacacactgcaca

SEQ ID NO: 21681 - DNA, 60 bp, Homo sapiens
acacttaacctagacttgtgaggaaaagctgagtttgggtatggcactgagaggcaccca

SEQ ID NO: 21682 - DNA, 60 bp, Homo sapiens
ccaatggttgggagagttgtgtctaggcctgttgaatgcactgctttgctctacctttgg

SEQ ID NO: 21683 - DNA, 60 bp, Homo sapiens
tggcatggcttcagcaaacatgactcaaagcctagaaggacatggccagatctcactgag

SEQ ID NO: 21684 - DNA, 60 bp, Homo sapiens
attgacacctcagtgaaccacaaattagcgtctacagctgctcgcagtaggactgcttag

SEQ ID NO: 21685 - DNA, 60 bp, Homo sapiens
attgaggaagcttgtacttgaatcctattccccacagttcccaccacagtgccaatgcac

SEQ ID NO: 21686 - DNA, 60 bp, Homo sapiens
acaatgagccaggtagtggtgagataacagtgaatacaacagatgtcatctctaccatca

SEQ ID NO: 21687 - DNA, 60 bp, Homo sapiens
cccaggttatctcaagttctctccaggaattagcttcacctctttgtgctttggctccac

SEQ ID NO: 21688 - DNA, 60 bp, Homo sapiens
agaaaccacagcctccaattcagcaccaaacgcatgaacagcagacacttgatcctccac

SEQ ID NO: 21689 - DNA, 60 bp, Homo sapiens
tgaagctgaatggcttaaggcggaatctccaaaatggacccaactgcttgcacctcaaaa

SEQ ID NO: 21690 - DNA, 60 bp, Homo sapiens
ggatgctgtattacaggaagacgccacttagagccatcgcagtcaatttgacctttgtgc

SEQ ID NO: 21691 - DNA, 60 bp, Homo sapiens
caaccatactgcgatacggtgtagcactggcatcatgggtaagattcgtccccttatgtg

SEQ ID NO: 21692 - DNA, 60 bp, Homo sapiens
cgccccagaactgtggaatggagttccaagacacagagaattggacaataagcagtgttg

SEQ ID NO: 21693 - DNA, 60 bp, Homo sapiens
cattttcttgctgcgctttctaacacccaacagaggaaatgcacagcataggtgtgtggg

SEQ ID NO: 21694 - DNA, 60 bp, Homo sapiens
ctgcagaaacttctgggtgtcaagagagagggtaggaattgggatagagagggtaatgtc

SEQ ID NO: 21695 - DNA, 60 bp, Homo sapiens
tgaaaataccgattccttggttcagtcccacacctatgttggagtggggtggttcctcac

SEQ ID NO: 21696 - DNA, 60 bp, Homo sapiens
agtgaggtctttgcccaaggagggtatgaaagctggggctttagtgggtgggtaggagtt

SEQ ID NO: 21697 - DNA, 60 bp, Homo sapiens
gacccgtgcacactaagcctcgtttggatggcctgtgttcattagacaacagaaaagcta

SEQ ID NO: 21698 - DNA, 60 bp, Homo sapiens
ttaacttcactctttaagctgagtgtggatgggaagccagggagcagctgcacacaggct

SEQ ID NO: 21699 - DNA, 60 bp, Homo sapiens
actggatggatggacggatctatggacagacagaggatggattccagatggagaaagtgg

SEQ ID NO: 21700 - DNA, 60 bp, Homo sapiens; identical to SEQ ID NO: 4855

SEQ ID NO: 21701 - DNA, 60 bp, Homo sapiens
cagtggaagaaaccccaaaggtaactggtccagtctcctgcatttggatggactagacag

SEQ ID NO: 21702 - DNA, 60 bp, Homo sapiens
tgatcttttctgccccttctgaagaggcaaagggactttcccaggaggtggtattttccc

SEQ ID NO: 21703 - DNA, 60 bp, Homo sapiens
atcagagtacagtcattgaagacctttcccaaccatctcctctcctacctacctgcccct

SEQ ID NO: 21704 - DNA, 60 bp, Homo sapiens
tgtgattacacgttggatacgtggctggcctttggcttgcctttgacttcgtttgttcta

SEQ ID NO: 21705 - DNA, 60 bp, Homo sapiens
ccacatccacttccacatctccaggtatgaggcagataaatagcagagagtgattacaca

SEQ ID NO: 21706 - DNA, 60 bp, Homo sapiens
gtgcagtttccagagccatatgtccagcatatcttcctacctctactgaggactgaggac

SEQ ID NO: 21707 - DNA, 60 bp, Homo sapiens
atcccaatgaggggtcaggacgggtcttggctgcacatcctggtttcctcttcatccatg

SEQ ID NO: 21708 - DNA, 60 bp, Homo sapiens
gtcccaagggtatctgaccttcacccacactcagcacttccatcagtctgcatcagtttt

SEQ ID NO: 21709 - DNA, 60 bp, Homo sapiens
agaaactcaggtccacaccaaagcttgaacaccaccgtccacagcctcaggattcataac

SEQ ID NO: 21710 - DNA, 60 bp, Homo sapiens
ttaggggttaggaatttggcagagaacaaaacagacaggtccctgcctgtgggaagcttc

SEQ ID NO: 21711 - DNA, 60 bp, Homo sapiens
cccctactctgtggaccaaagcccttgctctgtgcccttgcttgtatggggttgtctttt

SEQ ID NO: 21712 - DNA, 60 bp, Homo sapiens
ccttctacgggtctgcttagctttctcctaaccactgcttttgatttatccagttcatca

SEQ ID NO: 21713 - DNA, 60 bp, Homo sapiens
gtgattctcccagccttcacatctacttactcggatgctccattgactgctcaaagcctg

SEQ ID NO: 21714 - DNA, 60 bp, Homo sapiens
ggagctttgacatttgtggacctgctgcggtgtccttacactcattgagaaccattgatg

SEQ ID NO: 21715 - DNA, 60 bp, Homo sapiens
tagatagcctgtgagatcccttccaacactaacaaccttcgcggagacttcccaactgtg

SEQ ID NO: 21716 - DNA, 60 bp, Homo sapiens
ctaggacattgagagcacaaggtgtcaggagcttggcatggaacttagggctttacaatc

SEQ ID NO: 21717 - DNA, 60 bp, Homo sapiens
ggactagccatgtcagtcccaccttgaagacagagttccaggctggattgcattttctag

SEQ ID NO: 21718 - DNA, 60 bp, Homo sapiens
tagaaacacagtaccaacactctgccaccttgtggcttctggagtcattgcagcacatat

SEQ ID NO: 21719 - DNA, 60 bp, Homo sapiens
tggggaggtaagacaaagcagtctgcatggaaaggaactcaggggaaagaacactggctt

SEQ ID NO: 21720 - DNA, 60 bp, Homo sapiens
gcggatcacaggaaaacctgctcacgggaatcagttcactccaaggtatccccactaaat

SEQ ID NO: 21721 - DNA, 60 bp, Homo sapiens
ggtctccagcttcagctctcttcactcctattcttatcggaggttctacttccctgagga

SEQ ID NO: 21722 - DNA, 60 bp, Homo sapiens
gtgaggtaatgaaagctaactagttcccgcaaggtcacacaagtagagaccgagttaaaa

SEQ ID NO: 21723 - DNA, 60 bp, Homo sapiens
tagcacagcacaggagagcgtgcttgggtttggagtctgacagaactgagtgcaagtctt

SEQ ID NO: 21724 - DNA, 60 bp, Homo sapiens
ctacagagtccagatgcattaaggctgtgttcgagccatgatcttcctctgaagaagaaa

SEQ ID NO: 21725 - DNA, 60 bp, Homo sapiens
ggctaagctcaagacccaggtttggcaaatgagtacatcacagctgctctagcaagggaa

SEQ ID NO: 21726 - DNA, 60 bp, Homo sapiens
ccctgtccacacacttttgcttctaggacttctgtatgtctgttacacccactatactgc

SEQ ID NO: 21727 - DNA, 60 bp, Homo sapiens
tgtttctgtccattggatgagatctgaggttgctgttaagcctcggtgttagtaggggat

SEQ ID NO: 21728 - DNA, 60 bp, Homo sapiens
cagtcctcacagcagccatcatcactgtgtgattcttgaagctctggaaatctaggattt

SEQ ID NO: 21729 - DNA, 60 bp, Homo sapiens
caagatggtatcacacaagaaaactgtcctgatcccacacagctttcacatgtcctactg

SEQ ID NO: 21730 - DNA, 60 bp, Homo sapiens
aacagaaaattggagatgtagagcactgtatgcagctaaagtgtcattcaagagtcaggg

SEQ ID NO: 21731 - DNA, 60 bp, Homo sapiens
caaccaatgtggaagttaggaattggaatccccatttcacagactaagaagtggcgtgtt

SEQ ID NO: 21732 - DNA, 60 bp, Homo sapiens
cctgtagttcccctgcattcctattccttggttccatgagacaccccaagtccttacaac

SEQ ID NO: 21733 - DNA, 60 bp, Homo sapiens
tgctgagaccagcattaaaactcagctcatctggctgtagaacctgtactcttaagtact

SEQ ID NO: 21734 - DNA, 60 bp, Homo sapiens
gcttgaaactactgggtagaatcatagcaactggtgacattctgctttagtgtagggtct

SEQ ID NO: 21735 - DNA, 60 bp, Homo sapiens
ctcctggggatgttaactcatctgcacttccaggttgaagcaaagctgaatgccaggcac

SEQ ID NO: 21736 - DNA, 60 bp, Homo sapiens
ctctcaaggtgagactgatgtaccaagggagcaatgccttagaatggagttattctgcct

SEQ ID NO: 21737 - DNA, 60 bp, Homo sapiens
ctggtgaagcatcacctagaagctgctgccaaagcttgatatccagagtgctctaaaaca

SEQ ID NO: 21738 - DNA, 60 bp, Homo sapiens
tcaggggttcgctgtcttcgatgcccacctgatagacacggttttcgtagctgttgagcg

SEQ ID NO: 21739 - DNA, 60 bp, Homo sapiens
ccactcccaagtttccttggcgctaaaactgcttggaatagcctaagcctacggaagcaa

SEQ ID NO: 21740 - DNA, 60 bp, Homo sapiens
gacgtgatgtaccatgtttcaagcctgtttcacagcacaagacagcctcagctctgtggt

SEQ ID NO: 21741 - DNA, 60 bp, Homo sapiens
tgacctagtgatggttcctttgacaggtccctttgtatgcagctttactgcattctgtca

SEQ ID NO: 21742 - DNA, 60 bp, Homo sapiens
ccttggtgcaattgttttctgtccttctacactcattcctatggtgttttcttgtctagt

SEQ ID NO: 21743 - DNA, 60 bp, Homo sapiens
tacaaggtcatctttgtagcccaggtgttgactggcccctaagcctctgcacagagcacc

SEQ ID NO: 21744 - DNA, 60 bp, Homo sapiens
agactccagtgctgtggacatgggtctgaacgaattgatcacctaggggctactgagaac

SEQ ID NO: 21745 - DNA, 60 bp, Homo sapiens
gtggacctgttcttttgtctcttctgagtacagtctcctgaagattgttctgaccaaacc

SEQ ID NO: 21746 - DNA, 60 bp, Homo sapiens
gtggagaacagactcgaagaggatgctactggttgcagggaacaggaaagaaaaccaagg

SEQ ID NO: 21747 - DNA, 60 bp, Homo sapiens
aggggccatacccacacgcaggtttccagtgcaggcttcttgatatcactgaagataaag

SEQ ID NO: 21748 - DNA, 60 bp, Homo sapiens
gagggctaacttgcccagagtaatgcagctaagaagtagaagaatggagccagtagtctc

SEQ ID NO: 21749 - DNA, 60 bp, Homo sapiens
gggactgttagacatgtggctgaatgcagtggaggaagaaactcaggatgctgctcattc

SEQ ID NO: 21750 - DNA, 60 bp, Homo sapiens
ttctttgaggtgataccacagaaccactaaattagatacgctgtatgccacatagcatat

SEQ ID NO: 21751 - DNA, 60 bp, Homo sapiens
ctggccttaggtccaagcacatatgcagagagctcaagtagacggagcacacataactga

SEQ ID NO: 21752 - DNA, 60 bp, Homo sapiens
cctggaaaacactgaggtaagagtgagtttaacaggtcttctcctaatcctctactgtgc

SEQ ID NO: 21753 - DNA, 60 bp, Homo sapiens
gtttggatgcagtgtgatttggacttaggtgtgtgtatctgaacttcatcctttgtcatc

SEQ ID NO: 21754 - DNA, 60 bp, Homo sapiens
cccttctctgcctgtcactctcctgatccactgatttgctttctcttagaatagacgact

SEQ ID NO: 21755 - DNA, 60 bp, Homo sapiens
ctgtcagtttccaaaggccatggttcttttcatccatctatacccagtatcagtaaacct

SEQ ID NO: 21756 - DNA, 60 bp, Homo sapiens
cttttgcgggagcactgatgtattaacaaccttggggctttccactcagggacaccatac

SEQ ID NO: 21757 - DNA, 60 bp, Homo sapiens
agccacttctcaccattccaggtctgggttactatcctctctcctaggttaccgctatag

SEQ ID NO: 21758 - DNA, 60 bp, Homo sapiens
tatcacctgcctgctgtgcacctgtcgtgcttgatctagctcagacattttgtcacactc

SEQ ID NO: 21759 - DNA, 60 bp, Homo sapiens
cccactacaaagaatcccaagactcgttttcttcagcaacatgagatcctcgccaaacct

SEQ ID NO: 21760 - DNA, 60 bp, Homo sapiens
caaacagcaacccctgtagcttctgtagaggaagtgaggcctgctttgatgggaattctc

SEQ ID NO: 21761 - DNA, 60 bp, Homo sapiens
gccagaagtgggaacggggatgttatttgcgaatggtatgcattgtgaagcaggctcctt

SEQ ID NO: 21762 - DNA, 60 bp, Homo sapiens
ggcctgggaagattacacagcaaaaccatcagatcctacgtctgagaatgagaaggttgt

SEQ ID NO: 21763 - DNA, 60 bp, Homo sapiens
tgccacaaggaatacccacaagcatgacttacgttagttttcctgctcgactctaggaaa

SEQ ID NO: 21764 - DNA, 60 bp, Homo sapiens
agtttaatcccagaaccactcagccgagcctgtcaaacctcatgaatacctttctctaat

SEQ ID NO: 21765 - DNA, 60 bp, Homo sapiens
tcttcacgtggtagactcggggttctgagagggtgagaaaacacactgcaaagccttttg

SEQ ID NO: 21766 - DNA, 60 bp, Homo sapiens
ccttttcagtcaaggtacaacatccaggcggtaaaatgctcccatcagccacttactggc

SEQ ID NO: 21767 - DNA, 60 bp, Homo sapiens
caaaacgtcagcaatcagccctgaagtgtttggaatgcatactgaattgctacagggata

SEQ ID NO: 21768 - DNA, 60 bp, Homo sapiens
gtcacttgcgtttcagaaacatagcatccaaactgatgtgattatggtgacctgtcccac

SEQ ID NO: 21769 - DNA, 60 bp, Homo sapiens
acatccagagctcttgtggcacttgtatcaagcggtacagctatgcacactctctaaggc

SEQ ID NO: 21770 - DNA, 60 bp, Homo sapiens
gataaatctgggtgcatagcttgagccagtaatttgggctaaagtgtgtttcggacttag

SEQ ID NO: 21771 - DNA, 60 bp, Homo sapiens
gctgaacctcagattgtgtctttacaagggaatgtcattctttaaaggtacctcaaaggc

SEQ ID NO: 21772 - DNA, 60 bp, Homo sapiens
gaacctcagtcttttgtgttacccttgtacctagagctgcctggcatgtgataagcacct

SEQ ID NO: 21773 - DNA, 60 bp, Homo sapiens
aatgtgcttgaatcctgcacacactcctatccagtgagggacgctcaatggtgctgctgg

SEQ ID NO: 21774 - DNA, 60 bp, Homo sapiens
gtaccatcattagccaagcatcacaccatcctcagagatctgagcctcagctcctagtgt

SEQ ID NO: 21775 - DNA, 60 bp, Homo sapiens
gggctgttatgttcctttcttgttgttcacccactctggggacattcagaagcctcacat

SEQ ID NO: 21776 - DNA, 60 bp, Homo sapiens
gtagaagggctgtgtcatactaacttccataaccaagaggaatagaactggagtttgatc

SEQ ID NO: 21777 - DNA, 60 bp, Homo sapiens
aacttcccttgcctggcatctgggttcttgccttgtaatccagaagaccacatgctggat

SEQ ID NO: 21778 - DNA, 60 bp, Homo sapiens
ttcacagagagttacttgcctccagaggattacttgcctccagagagttacccgttccca

SEQ ID NO: 21779 - DNA, 60 bp, Homo sapiens
ctccagcagcagagccaaagagttgccacagagaacctgtgacccatgaagcctaaaata

SEQ ID NO: 21780 - DNA, 60 bp, Homo sapiens
ctggaatgggtaaccttgcttggcttgaatctccagttctgggaaagaacagtgctgtgc

SEQ ID NO: 21781 - DNA, 60 bp, Homo sapiens
cacctatccattggagggaagagcctcctgtgggtagaggatggccagctactcagcaaa

SEQ ID NO: 21782 - DNA, 60 bp, Homo sapiens
cagagctaactatctgtttcactgttgattgcagaggcatgagaaaacacatcctagagg

SEQ ID NO: 21783 - DNA, 60 bp, Homo sapiens
aggtctgcctgataaatcctggactcttaaccatgacataggagtgccctcttgactcct

SEQ ID NO: 21784 - DNA, 60 bp, Homo sapiens
aggagaggctgctggtaggaagagcaggaccgtgcagaatagatgggcctctgcctgcac

SEQ ID NO: 21785 - DNA, 60 bp, Homo sapiens
gtctgtcaactcagatgagtgaatcttacctcctctgtggatagaaacgagctcaatttc

SEQ ID NO: 21786 - DNA, 60 bp, Homo sapiens
gtagctaaccctgctgagccttgtccacacttggacctgacttaggtgatgagatctaga

SEQ ID NO: 21787 - DNA, 60 bp, Homo sapiens
ttactgagtccctacaaaggccttatgctatgatgggtgctaccgaagatacatccgtag

SEQ ID NO: 21788 - DNA, 60 bp, Homo sapiens
gtctcggggatctccagaggtccccagaccatacactgaggaccagcgatgcaaagtaat

SEQ ID NO: 21789 - DNA, 60 bp, Homo sapiens
agttcagttctggtcagctagagggccacatggtgcagaggttggataccagcctgtaca

SEQ ID NO: 21790 - DNA, 60 bp, Homo sapiens
gggtttcatatgtgtctgagtactgattctctcaggcctttgaggatgccaatcaaggcc

SEQ ID NO: 21791 - DNA, 60 bp, Homo sapiens
gacgatggtggtgccacttgtgtagatatctaggcaaggtaggagaccaggtttgggata

SEQ ID NO: 21792 - DNA, 60 bp, Homo sapiens
aaaggataaaagactggagaaagtgtcagagtagattctggaggtacttatattgctagg

SEQ ID NO: 21793 - DNA, 60 bp, Homo sapiens
cacatccaccaaactcctgcctgagaatgttaccagacttcaagatcctcttgccacatc

SEQ ID NO: 21794 - DNA, 60 bp, Homo sapiens
ttctctcccgggtgtcaggcagcagtgggaacagtggagctccttccatcagccccatca

SEQ ID NO: 21795 - DNA, 60 bp, Homo sapiens
gcaactgtgtatatccaaggttctaatagactctcactatgtataaacacaaaggcctac

SEQ ID NO: 21796 - DNA, 60 bp, Homo sapiens; identical to SEQ ID NO: 4855

SEQ ID NO: 21797 - DNA, 60 bp, Homo sapiens
atacgaaaatccagcctctatttcagcaatatctgccggactattggtcctacaggtatg

SEQ ID NO: 21798 - DNA, 60 bp, Homo sapiens
ccagtgcaacgagcaaagccccacagtttagtcctttggagttatgctgcgtatgaaagg

SEQ ID NO: 21799 - DNA, 60 bp, Homo sapiens
ccaagaactgcgtaagtgttgtgctcagtatcccaagggaagatctgtcgtctgttcagg

SEQ ID NO: 21800 - DNA, 60 bp, Homo sapiens
gctgtgctggggcagttgaagatggggccattcctgagtaagtccggtcccaaacccatc

SEQ ID NO: 21801 - DNA, 60 bp, Homo sapiens
ggggcagtgaaagacttaccaggattccttctggaactgactcgtcagctcattcatgtc

SEQ ID NO: 21802 - DNA, 60 bp, Homo sapiens
ttttggtttacctgttggtgggcattgaaaaacggcaaaagctgtgtgtttccagctttt

SEQ ID NO: 21803 - DNA, 60 bp, Homo sapiens
gcaaaccaggcttacgacccctgttaaggagatgattgtttaaagcactacagttcatgc

SEQ ID NO: 21804 - DNA, 60 bp, Homo sapiens
agtccatagtgatgcctttcctttcagtggctgattggcacgacctcttgagaatgcatg

SEQ ID NO: 21805 - DNA, 60 bp, Homo sapiens
cggtcctgacaattacaggtgggattcataggagatatattgacgtgacttttggattct

SEQ ID NO: 21806 - DNA, 60 bp, Homo sapiens
accacagaccagcagagcctggcagcctttggatttagtgctgttgaaccatacaggaaa

SEQ ID NO: 21807 - DNA, 60 bp, Homo sapiens
gcgtttcagtgcctacaagacccaggctccaaattgagggctttggggtgatggggatct

SEQ ID NO: 21808 - DNA, 60 bp, Homo sapiens
ttagagatgtttgtgctggactttgaggatggtgacctgtgggagtccatcaggggccag

SEQ ID NO: 21809 - DNA, 60 bp, Homo sapiens
aagctgctgacagttcagagcccaaagaggaggtcagaggaatcctggggttgatcctct

SEQ ID NO: 21810 - DNA, 60 bp, Homo sapiens
ggtgagtcaatcctgcactttctctacaaggcttgcaaaggtgagcaagaagattcccca

SEQ ID NO: 21811 - DNA, 60 bp, Homo sapiens
gtttccttgctgctaatcccaacccttaagcatcacttctatggagccttctatgaattt

SEQ ID NO: 21812 - DNA, 60 bp, Homo sapiens
ccctctcctaggctctgcagcacccaacacaggcacctgttaggacccttcacagaatat

SEQ ID NO: 21813 - DNA, 60 bp, Homo sapiens
gcgcatcagcagaacaatcagtgacagaatttggaccctagatccgcaaaatagaccaac

SEQ ID NO: 21814 - DNA, 60 bp, Homo sapiens
ttgatgtgcaccgggcctaccaaggccggttatatggcttacgttttgatctgaggagct

SEQ ID NO: 21815 - DNA, 60 bp, Homo sapiens
agtataaaatgacttagcgattcttctcctcaaaatgtgtcatttatgatccttttgtag

SEQ ID NO: 21816 - DNA, 60 bp, Homo sapiens
ttctcctgcttttccttttgtcacagccacacctgcccatgctgtctctagctccctgat

SEQ ID NO: 21817 - DNA, 60 bp, Homo sapiens
agagtgccagtcttccgaagagtccatggggtctaattccatgcgttctatcctggagga

SEQ ID NO: 21818 - DNA, 60 bp, Homo sapiens
cagatggatacactagacagaatgctaaatgcaatctacatgcagagaactctgcgttcc

SEQ ID NO: 21819 - DNA, 60 bp, Homo sapiens
gcgttcaagactctctaatatgattccacctgttgggctctttcttccatttgcctccgc

SEQ ID NO: 21820 - DNA, 60 bp, Homo sapiens
ggtagtaagtcaactaatacttccatgcaactcatggatcaaaggagaaattaaatgata

SEQ ID NO: 21821 - DNA, 60 bp, Homo sapiens
ggccagcatacagaactctatgtcatccctcaggatactaccagaaccacagcagtttct

SEQ ID NO: 21822 - DNA, 60 bp, Homo sapiens
acagaactgggagtgagggctcctcaggcagccacaaggcaggaaaactggcgcaaattt

SEQ ID NO: 21823 - DNA, 60 bp, Homo sapiens
gtgcctggctctaaggctataaaggctatcccagcttctgtcattgcttctcttgggtct

SEQ ID NO: 21824 - DNA, 60 bp, Homo sapiens
agatcttagtcgggactagccggccaaggatgaagcctcacttcagaaacacagtggagc

SEQ ID NO: 21825 - DNA, 60 bp, Homo sapiens
ggcacgaggaaatcctcttcggcacatcctgagtttcccatgccccgatcaccctcgacg

SEQ ID NO: 21826 - DNA, 60 bp, Homo sapiens
gtagcagttcttgtcggcagatttccttcaagtaattatggagctaagtctagtagagag

SEQ ID NO: 21827 - DNA, 60 bp, Homo sapiens
atgagagccaagagcaacttattcccttgtgacatgatgacacacctctggatagatgta

SEQ ID NO: 21828 - DNA, 60 bp, Homo sapiens
ttgtctgttgcagtttcatgtaggttaatctcatctgtctacctacccaatgagagacag

SEQ ID NO: 21829 - DNA, 60 bp, Homo sapiens
ccaggagcaggttgaaggtgcttcttctgaagccaaggatgcttgagatcgctttctaag

SEQ ID NO: 21830 - DNA, 60 bp, Homo sapiens
tcagagtaatcttgactgaatggagaaagtttctgtgctacccctacaaacccatgcctc

SEQ ID NO: 21831 - DNA, 60 bp, Homo sapiens
tctcttttgggagagactttcttgagagaggacactacaggactcagctacagagctctg

SEQ ID NO: 21832 - DNA, 60 bp, Homo sapiens
ctatatgccgggaaccattctaggccttggaaagaaagcagaaaaccagacagtttctgg

SEQ ID NO: 21833 - DNA, 60 bp, Homo sapiens
cagggactaaattgagccctgacaacctacaaaaggggacccacttcccacaaatgagta

SEQ ID NO: 21834 - DNA, 60 bp, Homo sapiens
agagtgctcagtgccaacccaagggattctttccagagacgtacccgttggataccaaaa

SEQ ID NO: 21835 - DNA, 60 bp, Homo sapiens
gccagttccttcagatcatgtaacccagtgtgtaattgaatctcctctgttgttcgaaaa

SEQ ID NO: 21836 - DNA, 60 bp, Homo sapiens
gtagacttctacaattacattcacagatttgtgcactacagtctcagaaacttaggaagc

SEQ ID NO: 21837 - DNA, 60 bp, Homo sapiens
tctctgtttgcctgtctagagtttccacaaccttccactgcacaaagtcctcgtcccaca

SEQ ID NO: 21838 - DNA, 60 bp, Homo sapiens
ccagtggtgagaggcacagttggtgagcagacctctatggaatgcaaacacgtatttgaa

SEQ ID NO: 21839 - DNA, 60 bp, Homo sapiens
tcatggcgtgacagactagaggatacgcatccctggaatgtgagtcaacaggaaagatgg

SEQ ID NO: 21840 - DNA, 60 bp, Homo sapiens
ctaaggcttaagcaagacttttgggggctaaccatggactctaaaactacttatattctt

SEQ ID NO: 21841 - DNA, 60 bp, Homo sapiens
ttaacacccggtgattgggactcaggcacaggtgcagggctgaaggacactcccagcctg

SEQ ID NO: 21842 - DNA, 60 bp, Homo sapiens
aattagggatggaaaagtttgcctataatgggaagctataggtaagaccttcactggagg

SEQ ID NO: 21843 - DNA, 60 bp, Homo sapiens
gactgcagagagcttagctcacatcggcatttgcatccaacagcacaacatggaaagcag

SEQ ID NO: 21844 - DNA, 60 bp, Homo sapiens
acactgctcacaaatcacatcacactgcctgtgcaccacactgatcgcaaatcacaccac

SEQ ID NO: 21845 - DNA, 60 bp, Homo sapiens
aatttgtattgtcttctgtttaacagtttgattactaccttccatggttctggaaaattg

SEQ ID NO: 21846 - DNA, 60 bp, Homo sapiens
ggatccattatggcttcttcacatggcttgagtcttgccaacgaggaccttacagcttag

SEQ ID NO: 21847 - DNA, 60 bp, Homo sapiens
tcagagtccaagtctgagctttgcgcacttaggcacagttgcaaaacgtaaggtcctagt

SEQ ID NO: 21848 - DNA, 60 bp, Homo sapiens
gagaacgtgttctgcctgatgcttacagtttggcagcataattgcggattcttatctgaa

SEQ ID NO: 21849 - DNA, 60 bp, Homo sapiens
ttgtgtcattccataggctggactccatttctttcctgcctcgtgaactcctagttgtta

SEQ ID NO: 21850 - DNA, 60 bp, Homo sapiens
gcagcagtgactactgcagctattggctggtaagaacaaagcaagcacaaatggactgaa

SEQ ID NO: 21851 - DNA, 60 bp, Homo sapiens
ttgcaatggggtacctccctcaactgtatggttcaaggcgctgtgtagttgatacaacgg

SEQ ID NO: 21852 - DNA, 60 bp, Homo sapiens
tagaatatggtcatttatggagaagtctgaagaatccatgtcatacctaatatattttcc

SEQ ID NO: 21853 - DNA, 60 bp, Homo sapiens
gtccatgtgttccttcactaaggtgtgatgagactccggggcatattccaccaggtgatt

SEQ ID NO: 21854 - DNA, 60 bp, Homo sapiens
tgacagacataccagccaatagctttccaactatcagttaacagaatgatgctatcttac

SEQ ID NO: 21855 - DNA, 60 bp, Homo sapiens
agtttggagcgcccccgatggaaatacactgtaagcacgacccgtttgcatccatgcata

SEQ ID NO: 21856 - DNA, 60 bp, Homo sapiens
atgcaacagcagttagtctgatacagattacttttaaatatgggagtgctgattatagga

SEQ ID NO: 21857 - DNA, 60 bp, Homo sapiens
taactccagttctagccaggacagattcagagccctcaggactcaggggcacacacaagc

SEQ ID NO: 21858 - DNA, 60 bp, Homo sapiens
taagcgcgtgtacccgcgacgtgcgtctgcgagtagaaagcccgtgtactgctccacaca

SEQ ID NO: 21859 - DNA, 60 bp, Homo sapiens
cctctgatctcttgtgccatgctcactatgctatgtgaaatttgctatgttagaccttga

SEQ ID NO: 21860 - DNA, 60 bp, Homo sapiens
ccctgactactaaggtactgggacgtcagcgtcttcaaggtctatcctctaatgaacctg

SEQ ID NO: 21861 - DNA, 60 bp, Homo sapiens
gaaaagtaccgtaaatgaatggtatcggataaacaataacgggagttcgaggtaatcccg

SEQ ID NO: 21862 - DNA, 60 bp, Homo sapiens
tctggggtgtctgaaggggtgaggcctgcaagattggacaaaagtgggagcaggaaccaa

SEQ ID NO: 21863 - DNA, 60 bp, Homo sapiens
ttaagtcccgtgcagttgttagtgcagggtaagaatgggctcctccagagagggtagcgc

SEQ ID NO: 21864 - DNA, 60 bp, Homo sapiens
acagacacctgaggaagagagcaagtggttaggaaaatccagcttgcacactgctcacca

SEQ ID NO: 21865 - DNA, 60 bp, Homo sapiens
gagctgcttgtcaaactggaccacgagggtgtcacgtcacccaaaagcaagaaggctaaa

SEQ ID NO: 21866 - DNA, 60 bp, Homo sapiens
cttataaagcaagccacagggttgtctgaaggagcctaactggcggtgactgagaagggg

SEQ ID NO: 21867 - DNA, 60 bp, Homo sapiens
catgttccttgcctgtcaaccgcacaccttctccttatctccccacaagacagaatctaa

SEQ ID NO: 21868 - DNA, 60 bp, Homo sapiens
ttatgacctggcagaatgtcctttaaggggccctaagcaatgctgtcaggactgagctga

SEQ ID NO: 21869 - DNA, 60 bp, Homo sapiens
ctccagctcctgcatgccgcatgctctctccagaaagtaaccacaactgggataccaatg

SEQ ID NO: 21870 - DNA, 60 bp, Homo sapiens
ataggagatcccactctctgctggacgctccattttagaaagacacacccaggcaaggag

SEQ ID NO: 21871 - DNA, 60 bp, Homo sapiens
tcaaggtccatcagagagagggggcgtcctatgtcatgaccctgctgagagctcacactg

SEQ ID NO: 21872 - DNA, 60 bp, Homo sapiens
gaagctgacacttccccgcagcctgttcctgcagtccctgccttggttcttagctggctt

SEQ ID NO: 21873 - DNA, 60 bp, Homo sapiens
ttgcttctgtgatgggagctgagcttagaggtgagagcaagtgtggcttctgcattaatg

SEQ ID NO: 21874 - DNA, 60 bp, Homo sapiens
aaagactaaggtcagggacctttgtctggtatggggacccccacacgtagctgggagttc

SEQ ID NO: 21875 - DNA, 60 bp, Homo sapiens
atcgtctacacactggcaggcaaaagaggttacttcctcccatctcaaggacttggaagt

SEQ ID NO: 21876 - DNA, 60 bp, Homo sapiens
tattaccttatgtctagacaattgcagtggtttcctaactggtctctagtataagaggtc

SEQ ID NO: 21877 - DNA, 60 bp, Homo sapiens
gcatctcaatttcctctgggagcattaccacctccccattgcctgtagccttattggaca

SEQ ID NO: 21878 - DNA, 60 bp, Homo sapiens
gatcctaggcaaagtctccactgagaaactactgatgatgtagcattggactaggccttc

SEQ ID NO: 21879 - DNA, 60 bp, Homo sapiens
ttaagtaaggggatgtgcggcaatggccaaacaacacggtaagcacccagataccgccct

SEQ ID NO: 21880 - DNA, 60 bp, Homo sapiens
acaccaggagacctattttaggaggtcatattgagccaaaaaatgaactgagcaagtgac

SEQ ID NO: 21881 - DNA, 60 bp, Homo sapiens
atattagaaggcgcacccaatgtatacagaagaggactccacaggtacttctcacagagg

SEQ ID NO: 21882 - DNA, 60 bp, Homo sapiens
gaacatctggtacccctcagccacatgattggaacatggatgagtaaggcccagtatttt

SEQ ID NO: 21883 - DNA, 60 bp, Homo sapiens
ttgatagagcagcagaagcaacagttcctgcgggagcaaggggagcagcaggaggagtag

SEQ ID NO: 21884 - DNA, 60 bp, Homo sapiens
gggaggacgcacaagatatgaactcttctgtccggtgtgtgacgcatatggatatttatg

SEQ ID NO: 21885 - DNA, 60 bp, Homo sapiens
tctatagcgcacggtctttctcacaccccaggagatgtgagtggggagggcctgatctct

SEQ ID NO: 21886 - DNA, 60 bp, Homo sapiens
caccgtgtgcatagattggtgtggcgctcaatagatatcgactccacttgtatgtaaggg

SEQ ID NO: 21887 - DNA, 60 bp, Homo sapiens
aaagagcttggtgtggcacagatggtctggggtaacaatctggctctgagggatgtggag

SEQ ID NO: 21888 - DNA, 60 bp, Homo sapiens
aatgtggacgaggaaggacctgcgagtgagggaacgagcgatcttatttgacgaaacgca

SEQ ID NO: 21889 - DNA, 60 bp, Homo sapiens
cagacctgggcaagattactgcatgctcagtgtgtagcaaactctctgatttaggtcagg

SEQ ID NO: 21890 - DNA, 60 bp, Homo sapiens
gtaaaaaatcttggtctggtctgctctggtttggcttcaaacattgggttttctcttctg

SEQ ID NO: 21891 - DNA, 60 bp, Homo sapiens
ctctttgctattcctttaggagcccaaatgaggattgaaagtgagaagaatgggacctgg

SEQ ID NO: 21892 - DNA, 60 bp, Homo sapiens; identical to SEQ ID NO: 4855

SEQ ID NO: 21893 - DNA, 60 bp, Homo sapiens
ttctaggaatagtcagttacctgggctagcgatacaggagctcggaatatctagcatccc

SEQ ID NO: 21894 - DNA, 60 bp, Homo sapiens
acataggttgttgtacccgttctacgtacgagagagagtcagtaggtgttggatagacac

SEQ ID NO: 21895 - DNA, 60 bp, Homo sapiens
tcgatattgttttattccgggtccatagcgaggacttctcatgctaagctaaaccctttt

SEQ ID NO: 21896 - DNA, 60 bp, Homo sapiens
ggactcgtcttggggctctatgtgctttctacaatgctgagttgcacagtgagtgaaggt

SEQ ID NO: 21897 - DNA, 60 bp, Homo sapiens
ccagcaagtattagggaaatgacaatgctgtagaaggtggaactcaggtaaggcaggcag

SEQ ID NO: 21898 - DNA, 60 bp, Homo sapiens
gtagaggaaactgtcataaatgaagcagctgaggaacagtgtggcgatagccttgccagg

SEQ ID NO: 21899 - DNA, 60 bp, Homo sapiens
gaactgacacacaatggagtaacatgcagctattcaaaagaatggggacagtatctatgt

SEQ ID NO: 21900 - DNA, 60 bp, Homo sapiens
ttaacagccattgaagaccatttgttatacgtactacttttcattgatcagctacatttt

SEQ ID NO: 21901 - DNA, 60 bp, Homo sapiens
gtgctatccttggtcttagggctttcggaacaggatgactttgccaatatccctgacctg

SEQ ID NO: 21902 - DNA, 60 bp, Homo sapiens
cagaactgaacaagtggtgtcagcaacacgatatgcaggaaggcttcatgctcacgtcgt

SEQ ID NO: 21903 - DNA, 60 bp, Homo sapiens
gtcttctgaagaatgctgtcagaaaatcattattctaggtccccaggtttacatccctct

SEQ ID NO: 21904 - DNA, 60 bp, Homo sapiens
gcccctctgtcttcgtctcttgctattccttgacatgtgtctttcattctggtcataact

SEQ ID NO: 21905 - DNA, 60 bp, Homo sapiens
ttggtccgcctaaggcctaggacgaattcctagttagtcaatttcaccttcgttaatcag

SEQ ID NO: 21906 - DNA, 60 bp, Homo sapiens
ccttgggccacatctatacttgcctagtactggcagagaactacaagagaacctattgac

SEQ ID NO: 21907 - DNA, 60 bp, Homo sapiens
ccgtctccagcagctcacttcccaactttgatcagatggtagtcaagactggccaactaa

SEQ ID NO: 21908 - DNA, 60 bp, Homo sapiens
aatgttccctccagggagataccttggagtgacatgctggtgtgagggatgcatatcata

SEQ ID NO: 21909 - DNA, 60 bp, Homo sapiens
ccacaactagcctagcccatccaccaactcaacacttgtacaggtgaagaaacaacttct

SEQ ID NO: 21910 - DNA, 60 bp, Homo sapiens
tacaattctgtcagcacttcaccttggctacctctttgccatacttgtcatctcagctga

SEQ ID NO: 21911 - DNA, 60 bp, Homo sapiens
tagagcagtggaaaatgggtatggtcgctctgctttcatagagcttctagtctagtatag

SEQ ID NO: 21912 - DNA, 60 bp, Homo sapiens
ctccctggtgtgtgatgtgagcaaatcatgttgccagagggcacattgctattgattaaa

SEQ ID NO: 21913 - DNA, 60 bp, Homo sapiens
attccttatgaaaatggtcccactaacccagacttcagctacatggtggcagagctcggg

SEQ ID NO: 21914 - DNA, 60 bp, Homo sapiens
acctgaatgttctccctgacctcctagtttcctagtcttgcacgttctattcttcccagg

SEQ ID NO: 21915 - DNA, 60 bp, Homo sapiens
ttggtgcactgctagagggctgctgtctctgacactgcagtagccacagtcgagcttgag

SEQ ID NO: 21916 - DNA, 60 bp, Homo sapiens
ctttgaccaaaggctacagttcccatcagatagctctctccacaccaactttcctctcta

SEQ ID NO: 21917 - DNA, 60 bp, Homo sapiens
tgtgcaagtgaagtacaagacttcagttcagataaaggccaacattgcgggtacatagtt

SEQ ID NO: 21918 - DNA, 60 bp, Homo sapiens
catacctgattttctcgacctcttttatgaaatatccccgccagactccctcgaccgtgc

SEQ ID NO: 21919 - DNA, 60 bp, Homo sapiens
aagtcaacttttctgtgggactcgcgtttatactcgaattcctcgggtgcccctcgttgt

SEQ ID NO: 21920 - DNA, 60 bp, Homo sapiens
aaggggttaagaagcagctgggcaagagcagaagatgctccagcagggacagaagcacga

SEQ ID NO: 21921 - DNA, 60 bp, Homo sapiens
ctattagaagagaaggtggagtgccttttattcgtattttctcagagatctatagcaagc

SEQ ID NO: 21922 - DNA, 60 bp, Homo sapiens
ggtgtgatgagattatgagcaactgctttgtgaaaagaagtggagcttggtgggtgctcc

SEQ ID NO: 21923 - DNA, 60 bp, Homo sapiens
acagacttggttttcgattctgactgccactcaccagcagagcatcttcacctcttggag

SEQ ID NO: 21924 - DNA, 60 bp, Homo sapiens
tggatgaatctagaaggtatggggtagagcttgacagggttcctgtgtacccactgggta

SEQ ID NO: 21925 - DNA, 60 bp, Homo sapiens
ctactttccagctgtgtctctgaggacaggcactcaataggtgttcttgcccttggttct

SEQ ID NO: 21926 - DNA, 60 bp, Homo sapiens
tcgccatgagcctcacctgcccttctccaaagctaaccacttgacttacaccatgaattc

SEQ ID NO: 21927 - DNA, 60 bp, Homo sapiens
cctgtaggtcagaggttaagttggcttgcttggttttctgctctggtttcacaatgttga

SEQ ID NO: 21928 - DNA, 60 bp, Homo sapiens
ctcaaacaccctcaggactcaaaccccaagttcaccctgtgtaaacattcccatttccta

SEQ ID NO: 21929 - DNA, 60 bp, Homo sapiens
cagatcagaccgaactactcagtcacccacacttgtcagactcattcttctcttgccctt

SEQ ID NO: 21930 - DNA, 60 bp, Homo sapiens
aatgcggcaatggcttgtgataagcggataggagccgagtcaacaacagccgacaatgat

SEQ ID NO: 21931 - DNA, 60 bp, Homo sapiens
cggtgaaggctcctctacaggcgtagagatagtgtcatgtttgacctgcaactgcgttat

SEQ ID NO: 21932 - DNA, 60 bp, Homo sapiens
tccaaggctctggtgctgaggcgtctcactgcctccaccatgtgctttggctttggctat

SEQ ID NO: 21933 - DNA, 60 bp, Homo sapiens
tgcacacaacatacagacccacagagacagcttggatttgctggacaaagcccgagcaaa

SEQ ID NO: 21934 - DNA, 60 bp, Homo sapiens
ggaaatcgatggctgtgatgtgaccaacacctgtgatgatagcaaagcccctcctttcac

SEQ ID NO: 21935 - DNA, 60 bp, Homo sapiens
taaaagtggtaactcagctatacgagcatgggctaccttcctgggctctcctgcagtcct

SEQ ID NO: 21936 - DNA, 60 bp, Homo sapiens
ctgccgtggaaggagatgaggctgggctgatacagtcagtgaagagtggaaatcttgcag

SEQ ID NO: 21937 - DNA, 60 bp, Homo sapiens
ttccagccaaggcacactcgaggtaagtgcccgtcacctcacggtgcagttcgggccata

SEQ ID NO: 21938 - DNA, 60 bp, Homo sapiens
tgcagactagctctgaaaggtcaagtcctttgcccaagctcacaggtaggtcacagacca

SEQ ID NO: 21939 - DNA, 60 bp, Homo sapiens
catgggggcctggtccaggggctaaatttgggttgattatggccctgttaccggtttggc

SEQ ID NO: 21940 - DNA, 60 bp, Homo sapiens
cagttacaaggatgtacaccagtgactgacatgacttggtgcaaatcttgggtagagacc

SEQ ID NO: 21941 - DNA, 60 bp, Homo sapiens
tgcaggataactggcccttgatgcagctcagcatcatgagtggttctgggcttaaagaga

SEQ ID NO: 21942 - DNA, 60 bp, Homo sapiens
gcgctgtcattgtctatcagctgtactccctaatgtcctctgaaaagtggcaccagacca

SEQ ID NO: 21943 - DNA, 60 bp, Homo sapiens
cactggtggctcattcagggaagctcatcaaagcccactttgttcgcagtgtagctgaaa

SEQ ID NO: 21944 - DNA, 60 bp, Homo sapiens
gctctgtccaagtggcgtaggggagcatagggctctgccccatgatgtacaagtcccttt

SEQ ID NO: 21945 - DNA, 60 bp, Homo sapiens
aaggtgatggggcacagggaaagcacagatgttctgcagcgccccaaagtgacccattgc

SEQ ID NO: 21946 - DNA, 60 bp, Homo sapiens
agcaggtggagccatggtgctctgtggtggcgcatgattcactgagcaaacagcacttta

SEQ ID NO: 21947 - DNA, 60 bp, Homo sapiens
cccatcaacattcggtggagggacagtgtttatgatcccggcttaaaaccactgaccatc

SEQ ID NO: 21948 - DNA, 60 bp, Homo sapiens
gggctgtacttcgtgcctgtgcttgagctaggatttgggttcttttcgtaaacacatccc

SEQ ID NO: 21949 - DNA, 60 bp, Homo sapiens
ccctcatactttgtaaataggagtctatcagagatacactgtgataagggcaagacaatt

SEQ ID NO: 21950 - DNA, 60 bp, Homo sapiens
acctggaagacaagggggatcaggaagtgagtcttgcagcttgtcactaggaagccttgt

SEQ ID NO: 21951 - DNA, 60 bp, Homo sapiens
aacagtctggcaagcctccctagagagccctttcaagtactctggagaaaacagcgatgc

SEQ ID NO: 21952 - DNA, 60 bp, Homo sapiens
gcaagatcaagaacacggaataaccacagaggtgcctctactgaagagcaaatggtagga

SEQ ID NO: 21953 - DNA, 60 bp, Homo sapiens
acatagatgtaagaagtcatgtaaacggttaacaagcttaccaaggttagcaaaactttc

SEQ ID NO: 21954 - DNA, 60 bp, Homo sapiens
cagccgaacacttctctccggaagcaggctggttcgactgtgaggtgtttgactaaactg

SEQ ID NO: 21955 - DNA, 60 bp, Homo sapiens
ttctaggtctagtccgggtgagaggctaaacacagcggagaactgccattctttcctggg

SEQ ID NO: 21956 - DNA, 60 bp, Homo sapiens
aatcataagctcagacctccgggaagccaccggaaccacccatttcctccccatgtttgt

SEQ ID NO: 21957 - DNA, 60 bp, Homo sapiens
aacattttggtcacgagatggagtccaggtgtcgtcctcactcccttgctgaccttctct

SEQ ID NO: 21958 - DNA, 60 bp, Homo sapiens
cctagcaactgaaattatcaacttccttctgtgggtgaatgtgatgctaagcttgagcat

SEQ ID NO: 21959 - DNA, 60 bp, Homo sapiens
acccttgaggtgacccaatgcagacctcctgtaccctatacatggtagagattcctgagg

SEQ ID NO: 21960 - DNA, 60 bp, Homo sapiens
tcaccacacatggggttaatacgcagaaggctcttagctcactagtagaggataattagc

SEQ ID NO: 21961 - DNA, 60 bp, Homo sapiens
ccggaactgttggcttcgggcatggttgataacatgaccaaacttgtgctagtaaatgcc

SEQ ID NO: 21962 - DNA, 60 bp, Homo sapiens
ttccgcaatgccttcattgtcgcttgcttaaagatctgtggaatgagaaacaatcagatt

SEQ ID NO: 21963 - DNA, 60 bp, Homo sapiens
gggttctgcctgatgctcagagggtaactggatgctgaaaactgtgagtctttcttcaac

SEQ ID NO: 21964 - DNA, 60 bp, Homo sapiens
ttgccacaccatatcctttccccagatccacctgtcctgacactctagtcctccaggata

SEQ ID NO: 21965 - DNA, 60 bp, Homo sapiens
tcttatctgtagttatgtctgagaagtcctttacaagctgtttataaggagagtagcttc

SEQ ID NO: 21966 - DNA, 60 bp, Homo sapiens
ttcctaagtcctcctgctttagtttctccttattccagtccattctgcagttaagactta

SEQ ID NO: 21967 - DNA, 60 bp, Homo sapiens
gtcaacctgaacccacccagtccagctgtctgtgggaatggtggtgttcttagggacaga

SEQ ID NO: 21968 - DNA, 60 bp, Homo sapiens
tgtagagttgtgaaaattctcacagtttacatcaagtacgtatggaagctgcttaacact

SEQ ID NO: 21969 - DNA, 60 bp, Homo sapiens
ctggggatatctgctcagccaatggaaaatctgggttcaaccagcccctgccatttctta

SEQ ID NO: 21970 - DNA, 60 bp, Homo sapiens
gagctgtgaatctaagcacagacagtgggtggcttgcatggattaggaccgtgaattgga

SEQ ID NO: 21971 - DNA, 60 bp, Homo sapiens
cctctgtggactccttagttcttccaggttgaatcctgggcagaaatcacatgaaagctg

SEQ ID NO: 21972 - DNA, 60 bp, Homo sapiens
aagtgagttgctttcaggtctcacagcgcaggagagagagctggggctccaagttagagc

SEQ ID NO: 21973 - DNA, 60 bp, Homo sapiens
cttccataagactgaagtgctggttaccaactttcctggttaacattcagcaaaagcatt

SEQ ID NO: 21974 - DNA, 60 bp, Homo sapiens
catctacaagggtagaagggctgaagcgaagggttgaccagccaggacaacaaaggttat

SEQ ID NO: 21975 - DNA, 60 bp, Homo sapiens
gcatacagcaatttcaggctttccacacactaagtttcccagagatgagcagagtttctc

SEQ ID NO: 21976 - DNA, 60 bp, Homo sapiens
ggctgttgtctgttatgggaaggtctgggaaaagatctcgactgcttaattggaagagtc

SEQ ID NO: 21977 - DNA, 60 bp, Homo sapiens
aaacacctgtcttccaccctcccaccatctgtgcaatcacttcacccttcagcctcacta

SEQ ID NO: 21978 - DNA, 60 bp, Homo sapiens
tatatggacgtgacagaggaatctttggtatagagtcttggcctgactacgaggacatct

SEQ ID NO: 21979 - DNA, 60 bp, Homo sapiens
tatggggtcaccatgtgggaggccttgtcctacggccagaagccctacaagaagatgaaa

SEQ ID NO: 21980 - DNA, 60 bp, Homo sapiens
tttctcgccatcagttaaaagtttgcggcagatgtagacctagcagaggtgtgcgaggag

SEQ ID NO: 21981 - DNA, 60 bp, Homo sapiens
ctcggtactaggataggaaaacacatcatgcaaaccttagcactctgttcagcctgaatc

SEQ ID NO: 21982 - DNA, 60 bp, Homo sapiens
tgttgacgagggtatttctagtgccactttggtatgctgctgacatttggtctcagctga

SEQ ID NO: 21983 - DNA, 60 bp, Homo sapiens
gtagattttcagcaacaaagggcccattagaatggaagcatactctgaagggttattagt

SEQ ID NO: 21984 - DNA, 60 bp, Homo sapiens
cttctttgctgcccttgttgccgcccatttgactcctgtcccaagtcagacaatcttgaa

SEQ ID NO: 21985 - DNA, 60 bp, Homo sapiens
tttcccagccacatcaaccactaccgctccactggcatcgtactctccagccttaatgaa

SEQ ID NO: 21986 - DNA, 60 bp, Homo sapiens
gttccaattttcggatgaagaaatggagagtaaatgggggagtaacttaaccaaactctc

SEQ ID NO: 21987 - DNA, 60 bp, Homo sapiens
aacttggactctgaattgccaagaaaggctccagccattgagaccctgaactggaagagg

SEQ ID NO: 21988 - DNA, 60 bp, Homo sapiens; identical to SEQ ID NO: 4855

SEQ ID NO: 21989 - DNA, 60 bp, Homo sapiens
agggatcagtgaaagacagtgagctgagcactaacatctacagttaccattacaggcttc

SEQ ID NO: 21990 - DNA, 60 bp, Homo sapiens
cagagctcatcatgaccctttcaacatctagcctaacgcactgttttgttttcaaagtcc

SEQ ID NO: 21991 - DNA, 60 bp, Homo sapiens
gaagccattactcagagacagcatcctatggcatggtgatccaaaacaagtacacctcta

SEQ ID NO: 21992 - DNA, 60 bp, Homo sapiens
cccatgtgttgcctctgtgatttaccttgcaatgtctctctatccctgcagcacagcaga

SEQ ID NO: 21993 - DNA, 60 bp, Homo sapiens
ctctgaccaacactacttgatggccacttgtagctactgtattctccccataccatccat

SEQ ID NO: 21994 - DNA, 60 bp, Homo sapiens
aagtaactatactgaggctgtgatcagtctctgagacccagttcctattgctaacagtac

SEQ ID NO: 21995 - DNA, 60 bp, Homo sapiens
ctgcattggctggattcacatcagggagcaagaaacgggaggcttgagcccagaaagtgt

SEQ ID NO: 21996 - DNA, 60 bp, Homo sapiens
tcacaacgcactgtgctgacttccttgtgaaacgggttgtttctgagtgtgcagggaagt

SEQ ID NO: 21997 - DNA, 60 bp, Homo sapiens
gtcggggccaattttaaagcgcagtcttttcctggcacctcgttccatctgtggccttta

SEQ ID NO: 21998 - DNA, 60 bp, Homo sapiens
acttgcttggtggccctggctttccgttgtgcttggaagaaagatcaaacaagagcttgt

SEQ ID NO: 21999 - DNA, 60 bp, Homo sapiens
atctcactcacgatgaagtgccatctatctgcccggcctcctctaactctcactcacgat

SEQ ID NO: 22000 - DNA, 60 bp, Homo sapiens
ctacttgtgcttttctccatcactgggtaacgctgagcgaatatgtctccctgactcagc

SEQ ID NO: 22001 - DNA, 60 bp, Homo sapiens
aactgatgagcctcgatccagggcttgaaagaagccagggtgtaatcttgttcatgcatg

SEQ ID NO: 22002 - DNA, 60 bp, Homo sapiens
atccccttgccaccactttgcatcacctgggaccacagatttggacaggaagggctctga

SEQ ID NO: 22003 - DNA, 60 bp, Homo sapiens
acatgtcaagtgcagttgtgaggactgtgtgggtgaacgaaaatgtgtctgtcaagttca

SEQ ID NO: 22004 - DNA, 60 bp, Homo sapiens
acttggcaaggtctccacttcaggggcaaacatctccatcatcagcaactccaaacccca

SEQ ID NO: 22005 - DNA, 60 bp, Homo sapiens
ggggcaaatacacacactagccaaggaagttggtccagcacatctctgaggtttctcccc

SEQ ID NO: 22006 - DNA, 60 bp, Homo sapiens
aaaagctcttgtgcatggaatccctgtctgttagccacaggcctctttagctctatacat

SEQ ID NO: 22007 - DNA, 60 bp, Homo sapiens
gcccgcgtgggggatcccctttcccacatccgtgctgtgtcattgttgctctgcttcctt

SEQ ID NO: 22008 - DNA, 60 bp, Homo sapiens
ttatagactgatgtctctttggccggagccagatctgcccctcagtgcattcgtgtgctc

SEQ ID NO: 22009 - DNA, 60 bp, Homo sapiens
ctgccctttcgagaacaccctgtggcagttcagagacacgcttttcctacactgcatgca

SEQ ID NO: 22010 - DNA, 60 bp, Homo sapiens
cagccctgttctcattcatttggatgccctccagaaatctggggagccatacacctttag

SEQ ID NO: 22011 - DNA, 60 bp, Homo sapiens
cactggagagattctctgaatgccttaagaatttggttaatatggagacccttcccaggg

SEQ ID NO: 22012 - DNA, 60 bp, Homo sapiens
ctgaacatacctgctgagagactctgtcccctggtttccaggacagttgtcacaagctga

SEQ ID NO: 22013 - DNA, 60 bp, Homo sapiens
ctccttccatcagacttggctactgttttcttctggtacgatttggtttggaagagcctc

SEQ ID NO: 22014 - DNA, 60 bp, Homo sapiens
actacatcacagccaagtacatcgagaggagatacgcaaggaagaagcacgcggataacg

SEQ ID NO: 22015 - DNA, 60 bp, Homo sapiens
cattgttgccctccctaaagcaaccaagtagcctttatttcccacagtgaaagaaaacgc

SEQ ID NO: 22016 - DNA, 60 bp, Homo sapiens
ccagcatgtacatctcacttttctcttggcaaggaagctggtgttaacgttgggtttagg

SEQ ID NO: 22017 - DNA, 60 bp, Homo sapiens
cctaggtcgtctcagacagcctcatctcccacacatgcacagacttagagagaaaccaat

SEQ ID NO: 22018 - DNA, 60 bp, Homo sapiens
ggtggaatgggccctagatatttcagttcagcagctgagaaatgcctttggatttcctcc

SEQ ID NO: 22019 - DNA, 60 bp, Homo sapiens
aggaatcctttgagtgtatgccattggtgagccgatgagcatggaccatagaagggctca

SEQ ID NO: 22020 - DNA, 60 bp, Homo sapiens
ttttctgttgaggaatctgttgactaactccaggctcactcaggctcaccgtcctgctct

SEQ ID NO: 22021 - DNA, 60 bp, Homo sapiens
tggactcatactcctttcagagctgctgcctcttccattgcccatgcaaacaactcaggt

SEQ ID NO: 22022 - DNA, 60 bp, Homo sapiens
ccgaagtgcagcccttgggatggcattccgttgtgtgccttattcctggagaatctgtat

SEQ ID NO: 22023 - DNA, 60 bp, Homo sapiens
agtttcctgctatctgccgctcctatctagaggcaacacttaagcagtaattgctgttgc

SEQ ID NO: 22024 - DNA, 60 bp, Homo sapiens
caggccttaatgttgcattagctagcatgttttccctctgatgtatatagtcactgttgt

SEQ ID NO: 22025 - DNA, 60 bp, Homo sapiens
atggaagtttcgcccaggactagacttgtgctgggaatcgccctctcttgcctatgtata

SEQ ID NO: 22026 - DNA, 60 bp, Homo sapiens
taagtaagcagagacagtgttaaggacgagttggtgtctgtggtagcttttaggctgctc

SEQ ID NO: 22027 - DNA, 60 bp, Homo sapiens
aggagtgagggatggctgggaagaatctccaggtctgtggcccttgtgttgagtgattat

SEQ ID NO: 22028 - DNA, 60 bp, Homo sapiens
tcttgtccccttgagctcagtgaattcccaccaggtgcccacagctcctggacttcaaat

SEQ ID NO: 22029 - DNA, 60 bp, Homo sapiens
aaatccccagccacatagtgcgcctcaagcccagctgctctacagactcgtcgttcaccc

SEQ ID NO: 22030 - DNA, 60 bp, Homo sapiens
atgaggatatagggagatggctcaggagtctagaagacctggcaagtatggtgtggatgg

SEQ ID NO: 22031 - DNA, 60 bp, Homo sapiens
agtggtgtcctgacggactcagcactcccgcctgatgtattggatcataggagagcactt

SEQ ID NO: 22032 - DNA, 60 bp, Homo sapiens
gagcactgcagggagaacgcccacgacaagatccggcccatctccagcattggacaggtg

SEQ ID NO: 22033 - DNA, 60 bp, Homo sapiens
tgaccatgtgacgtgtcaacagactcaaggagacaaccacctcaactgggtcatgtggca

SEQ ID NO: 22034 - DNA, 60 bp, Homo sapiens
gagtcctttgctacccaagcacctggtttcaccatgcgatcactgacttctctacagtga

SEQ ID NO: 22035 - DNA, 60 bp, Homo sapiens
tgaatattaaactggctttgcatccctagaatatacctcaccaggtcactgtgtactagg

SEQ ID NO: 22036 - DNA, 60 bp, Homo sapiens
acaatggagacaccggatcccaccttcactgtgtggttactgccatcatcaagagcagaa

SEQ ID NO: 22037 - DNA, 60 bp, Homo sapiens
gcagccgagataactgacttcaaggacatatactggacttatagcagagcctgttgagtc

SEQ ID NO: 22038 - DNA, 60 bp, Homo sapiens
acactacggagagtgtacgattttgtgggactgttggtgagccccgaaatggagcagttt

SEQ ID NO: 22039 - DNA, 60 bp, Homo sapiens
ttctggcatctaagctaaagtcggaaatcaagaagtcatcgggtgtctctggaggtaaac

SEQ ID NO: 22040 - DNA, 60 bp, Homo sapiens
cccggcagccttccatgtgaattccaaagctgtttcaacactggctgataggcagacaaa

SEQ ID NO: 22041 - DNA, 60 bp, Homo sapiens
tgtaccatcctggtggatcctcatttccttccactgcctatcctagctatggagttcccc

SEQ ID NO: 22042 - DNA, 60 bp, Homo sapiens
atttgcatcttgaggagtaaggggtggtgaaatgggaatgctggtctggctcagctggtc

SEQ ID NO: 22043 - DNA, 60 bp, Homo sapiens
tagtgtgaattgagacactgagataaagacatcgtgcagagataaatggggatacagtta

SEQ ID NO: 22044 - DNA, 60 bp, Homo sapiens
ttctctaccggcttgcttggagtttggacagaagcatttcacctctgatctcagcttccc

SEQ ID NO: 22045 - DNA, 60 bp, Homo sapiens
ggtcagttttgaagagcaaagggtgctgaaatgacttgtacggttggctggtgctttctc

SEQ ID NO: 22046 - DNA, 60 bp, Homo sapiens
gggaaagtttcatgatggtatctatagtcaagacgaacatgtagcatggtgcctatgtag

SEQ ID NO: 22047 - DNA, 60 bp, Homo sapiens
ttacagtgactcgaaccttacccaaacaagtgggagagccaggagccaaactatcaggct

SEQ ID NO: 22048 - DNA, 60 bp, Homo sapiens
ggcgctggtgctgagttgcttagaccagaagactattcagaccgtgagcctgtttttgat

SEQ ID NO: 22049 - DNA, 60 bp, Homo sapiens
cgcactttataccacctgcgattactggttcaggataagtttgaggtgctgaattacaca

SEQ ID NO: 22050 - DNA, 60 bp, Homo sapiens
aggaagcattccacctttgtgcaaatgcgaaccacatctcaccaagttcaggccaaggct

SEQ ID NO: 22051 - DNA, 60 bp, Homo sapiens
ctgcttcgttcctgggagtcagtagaaacagcagttgtatgtggttatgttagtctcaag

SEQ ID NO: 22052 - DNA, 60 bp, Homo sapiens
caggatgctagggtcaaagaaagaaaccaagtggtacataagcccagcttttctgctggg

SEQ ID NO: 22053 - DNA, 60 bp, Homo sapiens
ctgaaacccttcctgtctagggagaattgctgctagtaaggtcagtttgcaatgttcagc

SEQ ID NO: 22054 - DNA, 60 bp, Homo sapiens
agcagagaaggagcttggagcgggccaggacagaggactatctcaaacggaagattcgtt

SEQ ID NO: 22055 - DNA, 60 bp, Homo sapiens
cccttgtcaaccagattgagttgctatagcttgatgcagggacccagtgaagtttctccg

SEQ ID NO: 22056 - DNA, 60 bp, Homo sapiens
cgagaccgctgactgtgaatgacaaatcaaaagtcagggttgcagaatcagccggacttt

SEQ ID NO: 22057 - DNA, 60 bp, Homo sapiens
tcattttctgaccctgctgtaaactactgcaaccctcacatcctcaaagggacttttatg

SEQ ID NO: 22058 - DNA, 60 bp, Homo sapiens
ggtcttggtttcctctcctactcccttccttaggctcctgaactcgtttgctcctaaatc

SEQ ID NO: 22059 - DNA, 60 bp, Homo sapiens
agtgtgaagacactgatattgccttcattttggcaaaacaaccatgtagtgaaatactag

SEQ ID NO: 22060 - DNA, 60 bp, Homo sapiens
gccattggggtacttcagtttatgggatgtttttggaaacttctgctttgggagggatga

SEQ ID NO: 22061 - DNA, 60 bp, Homo sapiens
aatgctcgtctccttagcgtccagggtggggattctgctggaataaagagcttcctcagt

SEQ ID NO: 22062 - DNA, 60 bp, Homo sapiens
gcttagttcagaagcaacgctcctacaggacttgacatttgctagttagaatatccctac

SEQ ID NO: 22063 - DNA, 60 bp, Homo sapiens
ggagacgggttctcatgtgagatcaaagctcctccaaagcctgttcaagctctaagcgat

SEQ ID NO: 22064 - DNA, 60 bp, Homo sapiens
ccgtcggagaccagatgacctgttagatggctagtcctgtataactcgactctgtatgtt

SEQ ID NO: 22065 - DNA, 60 bp, Homo sapiens
ccccagatagagttgacgtttcagctttgggctgtcaaaagggtatgtcatggaccaaag

SEQ ID NO: 22066 - DNA, 60 bp, Homo sapiens
cacctatgcaacttaacgtggctcttctaagcaggtgaggacttcctcctcaatgctctc

SEQ ID NO: 22067 - DNA, 60 bp, Homo sapiens
gatcccatcattgcagcttgtatcctttagatccaatcggaaacttctggagtcttacat

SEQ ID NO: 22068 - DNA, 60 bp, Homo sapiens
gccagagatgccaacacaaaatacgcccaagattacaatcctttctggtgttataagggg

SEQ ID NO: 22069 - DNA, 60 bp, Homo sapiens
agagcttcccgttcctctcgcaacaccagctgaacgcctctactccacagaacctccctc

SEQ ID NO: 22070 - DNA, 60 bp, Homo sapiens
ccctgaacctgtacccttcagcttaccactacagtacttctgtagtagagcgagtatggg

SEQ ID NO: 22071 - DNA, 60 bp, Homo sapiens
agttaggagttcctgaattttagtccatgtctgctaccatacattgtgaatatgaacagg

SEQ ID NO: 22072 - DNA, 60 bp, Homo sapiens
tgcaactctcataaggcaggctatcatggagtcatctgacaggcagttaacacttaatga

SEQ ID NO: 22073 - DNA, 60 bp, Homo sapiens
ctatgtcttagggacacagatgagggaaacattgtctcagcctgaaagagccatgtctgc

SEQ ID NO: 22074 - DNA, 60 bp, Homo sapiens
tgtgtgacatgcctgaggtcagggaacttgcccaaatgatctgaggggatgttttgtgct

SEQ ID NO: 22075 - DNA, 60 bp, Homo sapiens
ttcagtagcctaaagaccacgctttgagaaactcgtaaaggtttgtcatagaggttttaa

SEQ ID NO: 22076 - DNA, 60 bp, Homo sapiens
gacctttctggatagatatctgctggatataagagtgaggcatccttgggagttccttaa

SEQ ID NO: 22077 - DNA, 60 bp, Homo sapiens
aaagatacagagcaggaggatgacatcttgcgcgatgaggatggggtactccaggtaggt

SEQ ID NO: 22078 - DNA, 60 bp, Homo sapiens
aacatgtctctgctagctcattggttgagggaagatgagagataggagagtgagggccac

SEQ ID NO: 22079 - DNA, 60 bp, Homo sapiens
tacatctgtcatattcctctccctggagactgcgaaatgtccagactttttcagactagt

SEQ ID NO: 22080 - DNA, 60 bp, Homo sapiens
tagtccttgagatgagatggcaagttacagcggcttctccggcctgctggagattcgcta

SEQ ID NO: 22081 - DNA, 60 bp, Homo sapiens
tacttaaagacagacttctgctacggtaattgccagtattcatggcttcctttctgtgtc

SEQ ID NO: 22082 - DNA, 60 bp, Homo sapiens
catcaggcacaatctggttgttttccgaggaggtgaaggggctttgcaggttttacctcc

SEQ ID NO: 22083 - DNA, 60 bp, Homo sapiens
cttcagagcagctctgcttgagttcacagatgactgccaagcttcagacaccctacagaa

SEQ ID NO: 22084 - DNA, 60 bp, Homo sapiens; identical to SEQ ID NO: 4855

SEQ ID NO: 22085 - DNA, 60 bp, Homo sapiens
gcaggtgggagtaacatctcagaagactatgaagctaattcctgcctcaagacacagagc

SEQ ID NO: 22086 - DNA, 60 bp, Homo sapiens
gatgagtgaagcttcaggtattcagcaagaagacagctaccctaaaggatcaaagaacat

SEQ ID NO: 22087 - DNA, 60 bp, Homo sapiens
gggaagttgcctatttgtcagtagatgtggttaagtgagtcctctggtgcagtgacatcc

SEQ ID NO: 22088 - DNA, 60 bp, Homo sapiens
ctcagcctttagatctacatttgtgtgagtccagttgcgtgaaatactgtgatcaaaaca

SEQ ID NO: 22089 - DNA, 60 bp, Homo sapiens
gcagctttggtgtgagctctgagggagcaagtcctctttgaggttctctgaaagaagatc

SEQ ID NO: 22090 - DNA, 60 bp, Homo sapiens
cccagtgaagaaatcaaagctgaataaaagcgactcctagttgttactctcaagggcagg

SEQ ID NO: 22091 - DNA, 60 bp, Homo sapiens
ctatacgctggctggaggcaaggcctgggacgagcaggagagagacgcttatgcagacag

SEQ ID NO: 22092 - DNA, 60 bp, Homo sapiens
tttctgtgaagagcagccttggttttggatgccatgaaaggtttattatattgcacctac

SEQ ID NO: 22093 - DNA, 60 bp, Homo sapiens
gagatacaaagtagaaatgtgactgccagaagctgggtggtagggggatagggagttagt

SEQ ID NO: 22094 - DNA, 60 bp, Homo sapiens
ttgaacgtcggttctgcactactgctgaaagatgtactgcagtcagcttcagggcagctt

SEQ ID NO: 22095 - DNA, 60 bp, Homo sapiens
tcggcttgatcatctgagtcagtgggctcattgtggaaacatatggaatcctttatgctt

SEQ ID NO: 22096 - DNA, 60 bp, Homo sapiens
ggatgaggagacaaggaaacaggacctgagaaaggacactatccaaaatctgatgctctc

SEQ ID NO: 22097 - DNA, 60 bp, Homo sapiens
tgttacgtcagggatatgaggaaggcctggtggatgaggccatggagatgttccagttct

SEQ ID NO: 22098 - DNA, 60 bp, Homo sapiens
catcctttttgttattgttgaatcatggatggtgatgtaacgttttccagctttggctag

SEQ ID NO: 22099 - DNA, 60 bp, Homo sapiens
ctattgcccaaattatgggcccaattgcagcactgttacaagatctgatttcaaattgcc

SEQ ID NO: 22100 - DNA, 60 bp, Homo sapiens
cctacagtttcatgggggagacaagtccataaacagagcccaatctgaaggtcattcccc

SEQ ID NO: 22101 - DNA, 60 bp, Homo sapiens
tgtgactgctgaggaccaaggtggcatcctagggcaggatgaactggctctgagcaccct

SEQ ID NO: 22102 - DNA, 60 bp, Homo sapiens
gatggaaagttaagcgtgaaatttggggtcctcttccgtgatgataaatgtgccaacctc

SEQ ID NO: 22103 - DNA, 60 bp, Homo sapiens
atgactgtcaggaggctgcatcatggggagccattttacaagcagcaccatgggtgttat

SEQ ID NO: 22104 - DNA, 60 bp, Homo sapiens
gaccagccttttacctcggggttttgaggccaacagggacgacagagacagtttctagtt

SEQ ID NO: 22105 - DNA, 60 bp, Homo sapiens
gaagactcatctgtagctgtttgctgactcctatgagcccataagggttctgtgcttagc

SEQ ID NO: 22106 - DNA, 60 bp, Homo sapiens
ttgtgtccagtgtttaggaaccacccgcatccactccgtaatccactgtctcttctgtac

SEQ ID NO: 22107 - DNA, 60 bp, Homo sapiens
ccactcgctggtatttccaggcttgctaagtactaaccaactcatccccagtaacactgc

SEQ ID NO: 22108 - DNA, 60 bp, Homo sapiens
actcagtagttttacatgagagtgctacaacatcctcactaagtagtatttgggttcatc

SEQ ID NO: 22109 - DNA, 60 bp, Homo sapiens
tttctaaggggcttatgcattcggctccaactcaactcgtctatgtgctgccagtaatta

SEQ ID NO: 22110 - DNA, 60 bp, Homo sapiens
gaaggagtagttcccgaaggaccttgtgggtgatatagaggacttcgcttttgctctgag

SEQ ID NO: 22111 - DNA, 60 bp, Homo sapiens
cctgccacagggttgtgctactgtaatgtctccatgcgtcacttggactaaatctctcta

SEQ ID NO: 22112 - DNA, 60 bp, Homo sapiens
cacctgttgtgtgagtcacttagacgtgctttgtttcttggtcacagttgatccctcaac

SEQ ID NO: 22113 - DNA, 60 bp, Homo sapiens
gtaaggcaaggcaaaaccagagggtggctgcagggataactgctggtagagccaacatct

SEQ ID NO: 22114 - DNA, 60 bp, Homo sapiens
gccagagaattgatcaacgtgactattccaacaatacagagaagacaaccaaagatgagc

SEQ ID NO: 22115 - DNA, 60 bp, Homo sapiens
tcttggtccacaaagtcactcatgttctctgacaatcagacagtcacctaatctgggccc

SEQ ID NO: 22116 - DNA, 60 bp, Homo sapiens
gttcaacaactgcacgaacgacatgttcttgttcaaggagtcccgcatcacaagggccct

SEQ ID NO: 22117 - DNA, 60 bp, Homo sapiens
cccatcttacatgtctttgggtggtgaggaaaatctcgatgatgtccatcaccgacagag

SEQ ID NO: 22118 - DNA, 60 bp, Homo sapiens
cgcttaacaaacagactaaaagctgtgtgcagaagaaagggctgaatgagtaccgcctcc

SEQ ID NO: 22119 - DNA, 60 bp, Homo sapiens
ctattctaaggccgagaatgccagatggggagaacgccatgagcttttgagcttgtgtat

SEQ ID NO: 22120 - DNA, 60 bp, Homo sapiens
gctttgttgcacgcctgggcaatttcagccaggacattaggaccacttgttgtacatctg

SEQ ID NO: 22121 - DNA, 60 bp, Homo sapiens
atcagttccaaaggagctgatttacggcccacctcttctagtttgtattctgtccagctc

SEQ ID NO: 22122 - DNA, 60 bp, Homo sapiens
tctcactcccctacctccccacttgctcgttttgcttttcagcatccttaagtaagccct

SEQ ID NO: 22123 - DNA, 60 bp, Homo sapiens
ggtacatttcagattacttaaatgtcatcaggccacacagcataccaggtaacagaaagc

SEQ ID NO: 22124 - DNA, 60 bp, Homo sapiens
aggatccatagtccagtatgaattctagtttgtaaatctgcccacttcaggaaggaaaat

SEQ ID NO: 22125 - DNA, 60 bp, Homo sapiens
aaaggaaacttatccttggatcacggaaggcagaggcatttggtgagatggaaacaagga

SEQ ID NO: 22126 - DNA, 60 bp, Homo sapiens
caagttgcgtcagcctccatcaagttggagaaccctctgccctactcggtgaccttctcc

SEQ ID NO: 22127 - DNA, 60 bp, Homo sapiens
ggtacccttgcctgcagtagttctgtttcctgtagaaaagtggataaagagtcccagaag

SEQ ID NO: 22128 - DNA, 60 bp, Homo sapiens
ctaggtctgacactgactagtgtagggcctttgggaagtttctcaacactctaggtcatc

SEQ ID NO: 22129 - DNA, 60 bp, Homo sapiens
ggattagcaacttgctcaggactccacagaaagagcagcaactggatggcacagaatgag

SEQ ID NO: 22130 - DNA, 60 bp, Homo sapiens
ccctccctggtggttatcaagactccacaaatatccagtgcctcttgcgctttaggatat

SEQ ID NO: 22131 - DNA, 60 bp, Homo sapiens
ctctacagttctctaagagtacatctgagtccaaagtgtatctgaatgtgtgctctgacc

SEQ ID NO: 22132 - DNA, 60 bp, Homo sapiens
gtaaagtcgatcttgcagtacacggagaacctggtggcttacaccagttacgaaaagaac

SEQ ID NO: 22133 - DNA, 60 bp, Homo sapiens
tgcattgagggttttcttttgcactgagaactcaagtcccactttcacccttggacctgg

SEQ ID NO: 22134 - DNA, 60 bp, Homo sapiens
ccccttaatgttgggatggggttcaggatgaaagggaggtgggattctaattcatgtgcc

SEQ ID NO: 22135 - DNA, 60 bp, Homo sapiens
gcatgtaagatccacaaaatgagacaatgcatgtaaatccatgctcatgttctaaacatg

SEQ ID NO: 22136 - DNA, 60 bp, Homo sapiens
agaaagatagagtgatgtgaatgataggaagcccacctgtaaccacttagctgacatgtc

SEQ ID NO: 22137 - DNA, 60 bp, Homo sapiens
atgatgattgtgaacctcctgaatgcctgagactctagcagaaatggcctgtttgtacat

SEQ ID NO: 22138 - DNA, 60 bp, Homo sapiens
ggtaggactgacacattccctcataaattttactagctagatgttgaaagttgaccaaca

SEQ ID NO: 22139 - DNA, 60 bp, Homo sapiens
caagatcaaagtcaaaagccaacggggagaaagtatgtccaagaaacatcaccaaggact

SEQ ID NO: 22140 - DNA, 60 bp, Homo sapiens
aacatatcgaaaagagccctggggaagattttgctgagcacgctggacgctttcagggac

SEQ ID NO: 22141 - DNA, 60 bp, Homo sapiens
gcatcaagcatgccattggtcatgagcatgaggtcctgctgagagacttgcttctagaga

SEQ ID NO: 22142 - DNA, 60 bp, Homo sapiens
gaaattcaagctgtgagccaggcaggagctcagtatggcaaaggttcttgagaatcagcc

SEQ ID NO: 22143 - DNA, 60 bp, Homo sapiens
gtagaatggatgaagcaatgcctgagattatagatgggcttggggacaatggagttttat

SEQ ID NO: 22144 - DNA, 60 bp, Homo sapiens
ccatccacagttaagtccttattgcttgttaatcttgggtgcctgcactacacttgattt

SEQ ID NO: 22145 - DNA, 60 bp, Homo sapiens
gtatcaaacagccttttatgactttctagtaatggtttatctgacacactggaatttctt

SEQ ID NO: 22146 - DNA, 60 bp, Homo sapiens
actgaatcggatctattccccactgacctttagttacgatcactctgccctgaccagctg

SEQ ID NO: 22147 - DNA, 60 bp, Homo sapiens
ttggaagagaacctagttccttaccgatcctttcgtgcctcagtccacccagaccaattc

SEQ ID NO: 22148 - DNA, 60 bp, Homo sapiens
cagcgtccctgtcactaattgcgagaatgatggaattctgcctgaagggtcttgatacct

SEQ ID NO: 22149 - DNA, 60 bp, Homo sapiens
tttctgtctgtctgttcgtctgtctacccacaagacccctagatttcctggaccccaatg

SEQ ID NO: 22150 - DNA, 60 bp, Homo sapiens
cctctgtcgtatgctggtatttatattctagcatctcaacagtgctgatggtcactcatc

SEQ ID NO: 22151 - DNA, 60 bp, Homo sapiens
attgccctcagaattgatgggtgaagacactgaagagtcatgagcaggctccattaaagc

SEQ ID NO: 22152 - DNA, 60 bp, Homo sapiens
aaacctttagctgttgctttctggacctttgtattgcctaagggatgcaaacttcttgga

SEQ ID NO: 22153 - DNA, 60 bp, Homo sapiens
gagttccaagaccaagaagcccaactctcaccagcgggggcagatggggagctagggaag

SEQ ID NO: 22154 - DNA, 60 bp, Homo sapiens
cagttggtgacttatcgccagttggtgacttacttacctacccctgcctctcaaatcttg

SEQ ID NO: 22155 - DNA, 60 bp, Homo sapiens
ttgtgctctctgagtggtggctggacaaacttgggcagctaacctttacaatcctacgtg

SEQ ID NO: 22156 - DNA, 60 bp, Homo sapiens
cgctgaatggcccttcatgatgctcttgtcaatgtattctcctacaatgcggagagtgcc

SEQ ID NO: 22157 - DNA, 60 bp, Homo sapiens
acttgtgggatgtgactaactctggggtgggggaaatctataatcgtaaacacatgtatt

SEQ ID NO: 22158 - DNA, 60 bp, Homo sapiens
ctgaatgcccgggtttgaattccacatctgttgctttttggctctgagagctctggcaag

SEQ ID NO: 22159 - DNA, 60 bp, Homo sapiens
ggcctggtttcgcctggtcgtgtctttatgagcaccatgtaagcctccttgtattgagat

SEQ ID NO: 22160 - DNA, 60 bp, Homo sapiens
cttctttggacatgttttggcagccttcagcctatggttggctgagatctgactacttgt

SEQ ID NO: 22161 - DNA, 60 bp, Homo sapiens
taagatagaaatgaaagacactagtgaaagcataccacaagcagaattccttgagtttcc

SEQ ID NO: 22162 - DNA, 60 bp, Homo sapiens
tgggtccctctgtctgtctgctaaaagtcctcatgggtccgtctgtctgtgttctaaatg

SEQ ID NO: 22163 - DNA, 60 bp, Homo sapiens
gataaagcgaaacgatggcagaatatgctgagacatttgctcaggggttaaaagacaggg

SEQ ID NO: 22164 - DNA, 60 bp, Homo sapiens
ctgaggaccatatttgcgtgtttccaaagtgaggggttctgcgtcctatcaaggagatgt

SEQ ID NO: 22165 - DNA, 60 bp, Homo sapiens
gccgaaaacctgaaaaggactctagcattcaataaacagtacatttctccctcattgggg

SEQ ID NO: 22166 - DNA, 60 bp, Homo sapiens
tgcgagcactgaccacaagggctgccttaggaaggaaatgtgtgctttcaggagttctta

SEQ ID NO: 22167 - DNA, 60 bp, Homo sapiens
ctgagattgactactaatgtctgccatggaagtgagaggagcagttatggtacgagtgtc

SEQ ID NO: 22168 - DNA, 60 bp, Homo sapiens
aaaagaacgaaagaaggtgggtggaggacttcagtaacatcaggtggcagcctcaatttt

SEQ ID NO: 22169 - DNA, 60 bp, Homo sapiens
gggatagagatgtgtctgaatgtacgttacggtggtgagagtgagaaaggagacctctcc

SEQ ID NO: 22170 - DNA, 60 bp, Homo sapiens
gcatgcctcccagtggaagcagaggtggaatccaaagttttcagttcatgttgctgattc

SEQ ID NO: 22171 - DNA, 60 bp, Homo sapiens
gctgcattcttctgtaagtagcccctgctcgtattttagatgatcactatggagtcatgg

SEQ ID NO: 22172 - DNA, 60 bp, Homo sapiens
tgggaactatccagcccttctagtgatgaggaaatatgaattaaagactgtagggtcccg

SEQ ID NO: 22173 - DNA, 60 bp, Homo sapiens
aattgactcctgacttgactataggaagttttatgtcacacagaaattttcactacaata

SEQ ID NO: 22174 - DNA, 60 bp, Homo sapiens
tgaaataagccccttcgtgatcacctgactccagttctccgtgtgctccattggctgcgg

SEQ ID NO: 22175 - DNA, 60 bp, Homo sapiens
gtacctgttatgtgggatttccagcactcacaaatggttgctgaccttttaccttcctgg

SEQ ID NO: 22176 - DNA, 60 bp, Homo sapiens
ctcagagctcacctcgtaagttcttgtcctctctggttctactctggccacattggcatt

SEQ ID NO: 22177 - DNA, 60 bp, Homo sapiens
atgctgtcagcctcgcatcctacaggaaaggaaccatcgccaaaagacgctgaggaacat

SEQ ID NO: 22178 - DNA, 60 bp, Homo sapiens
gagatacggtgattcctgttcttggctttgtagattcatctggtataaacagcactcctg

SEQ ID NO: 22179 - DNA, 60 bp, Homo sapiens
agtgaagggaagttaccagtagcatggagctctctaagctctccccatgaatcactgtgg

SEQ ID NO: 22180 - DNA, 60 bp, Homo sapiens; identical to SEQ ID NO: 4855

SEQ ID NO: 22181 - DNA, 60 bp, Homo sapiens
cgtgaaggttaatccacagttaggagttgcttaactcaagcctcagaaagcgtacactgc

SEQ ID NO: 22182 - DNA, 60 bp, Homo sapiens
ataaggccccagttcaacagcgtcctctgtgtcaatcagatactcccaggaatgagtgag

SEQ ID NO: 22183 - DNA, 60 bp, Homo sapiens
gactctttttcagcatgcattggtgcccaagtaaaaaccaaagaccaatgtgctttgtat

SEQ ID NO: 22184 - DNA, 60 bp, Homo sapiens
gccgaaggattttgcagtcctctgtcagtaacttccattgattaggcagacatattcagg

SEQ ID NO: 22185 - DNA, 60 bp, Homo sapiens
caagaatgagcttgacatggcatctgccctccacaactcactgtttagtcatcagactaa

SEQ ID NO: 22186 - DNA, 60 bp, Homo sapiens
taactgcctgcaaatgtccagcactactgcataggatgccagagccaccgaaggaaaaca

SEQ ID NO: 22187 - DNA, 60 bp, Homo sapiens
gctctggctctgtgggtatgtctgctggcatttgccagttgaaacctgaaggattggaaa

SEQ ID NO: 22188 - DNA, 60 bp, Homo sapiens
caaaactgtgaaggattgtggtcacctggaacaggtctccaatctatgttagcactatgt

SEQ ID NO: 22189 - DNA, 60 bp, Homo sapiens
cttccttcagagagtatccactctttcttctgccagacagattcagggctgcttgcctca

SEQ ID NO: 22190 - DNA, 60 bp, Homo sapiens
tatcagacacttagggtcctggtctggcaattttggcctgatgtgatgccacaagaccca

SEQ ID NO: 22191 - DNA, 60 bp, Homo sapiens
ggtggcagttacaaagagcatctggctggagatgagtttagtgttcgcatatacccctac

SEQ ID NO: 22192 - DNA, 60 bp, Homo sapiens
ctatttgatccagccgttccagtacaactcctatacttgccatctttccaagcccaaagg

SEQ ID NO: 22193 - DNA, 60 bp, Homo sapiens
catgggaactcaaggaacactgtagtctgggtattccaatgatagcaatttgctggtacc

SEQ ID NO: 22194 - DNA, 60 bp, Homo sapiens
atctgatgggttaggaagtcacgaaatgaggagttcttgccacatttgcagagtccctcc

SEQ ID NO: 22195 - DNA, 60 bp, Homo sapiens
gggtgctttctgcttgaagttaccaccaaagatccttcccttgtggtagcaggagaagct

SEQ ID NO: 22196 - DNA, 60 bp, Homo sapiens
gctttctttgctgcttgactacagttttccactcccatggcagttggaagtgctggggaa

SEQ ID NO: 22197 - DNA, 60 bp, Homo sapiens
gggaatctgtctatgcttccgctggagaaagaacactagggccaatcccaagagaatgag

SEQ ID NO: 22198 - DNA, 60 bp, Homo sapiens
aatgccttctgctgtagcgaatctcctgcagggtccacacgttagtggctctgtacgcta

SEQ ID NO: 22199 - DNA, 60 bp, Homo sapiens
ggatcttgacgtggcactataatctggctcccagtccatgaaactgaagtccagaagcag

SEQ ID NO: 22200 - DNA, 60 bp, Homo sapiens
tttgttgcatcttcaagcaacctgctgctctccagactgttacagtgcatgagtgataat

SEQ ID NO: 22201 - DNA, 60 bp, Homo sapiens
caagcctggactttgctctacaacagggttttgcatagggagtggtatgaccagatccct

SEQ ID NO: 22202 - DNA, 60 bp, Homo sapiens
gggatcttccttcaccagataagggctctcaaccaaatacttcatgcagatctcacactg

SEQ ID NO: 22203 - DNA, 60 bp, Homo sapiens
tcaggtctggtttgcctggacagtgctcaacatggaatccatctttgaagaggactccca

SEQ ID NO: 22204 - DNA, 60 bp, Homo sapiens
cataagaggctttgaccactgtcctccactgaatagcccattacagctagcacctaatag

SEQ ID NO: 22205 - DNA, 60 bp, Homo sapiens
accaatgactgctctcagaaaggtactgtgaccaccacttgcttggctctccaacttcct

SEQ ID NO: 22206 - DNA, 60 bp, Homo sapiens
agtgctagctttgaaatctgttcgcccaaaacaccgtgcaaatctctctgcagcagcctg

SEQ ID NO: 22207 - DNA, 60 bp, Homo sapiens
gatccgagtggagccgaaagtcgagatagagcgcagttgggccttgggttcgaaaagact

SEQ ID NO: 22208 - DNA, 60 bp, Homo sapiens
cctgcttcagtctgggatccgtaggagtatgtgagaacttctgaaacgtctccaactctt

SEQ ID NO: 22209 - DNA, 60 bp, Homo sapiens
gcagctatgagtaccatcactgtgctaagaggaatgtgggttcgaatttcagcactagca

SEQ ID NO: 22210 - DNA, 60 bp, Homo sapiens
ggatatggatctgttcggtttcagagccctgctttcctttcactggaatgtgctcttcgc

SEQ ID NO: 22211 - DNA, 60 bp, Homo sapiens
aggccggaagcagattacgtggagtgacggtcatgctgcggcgtggacacttggcattca

SEQ ID NO: 22212 - DNA, 60 bp, Homo sapiens
tatgacactcctatggggcatctctgtgtctaccgccgttactcattctgtgcatatatg

SEQ ID NO: 22213 - DNA, 60 bp, Homo sapiens
ggatcaggaggattagggaatgtggatgaggagcccacttcagtcactggtcgaaaagat

SEQ ID NO: 22214 - DNA, 60 bp, Homo sapiens
gtgaagcactggccgttgggcacagtggatgtgtgaaaaggtgccattcagagttgttat

SEQ ID NO: 22215 - DNA, 60 bp, Homo sapiens
gccaaatgacagagtgcttgtatttgccacaaagcatgtagttccttgtaaatccttgag

SEQ ID NO: 22216 - DNA, 60 bp, Homo sapiens
gcatgatggaaaactgggttatgggcaggactgcaagtactggttaggcagatacctgta

SEQ ID NO: 22217 - DNA, 60 bp, Homo sapiens
ggttaggcacctgtcaatctttcatatcagcccacgtgagatagccagggtttggtgaaa

SEQ ID NO: 22218 - DNA, 60 bp, Homo sapiens
cccactaatgccttctcagtcaaactctcttatgccctggcaagccaatgaggataccct

SEQ ID NO: 22219 - DNA, 60 bp, Homo sapiens
taacacattctccatatgcagcctgcccagcactgcacacaatagacctgttacttcccc

SEQ ID NO: 22220 - DNA, 60 bp, Homo sapiens
ccccactttctgtatgcacattggaaggtgaatttgttcagctcacattaatttatagga

SEQ ID NO: 22221 - DNA, 60 bp, Homo sapiens
aaaaactagactctaaacaccccttcctgctgtgaggatagtgggtgtgacaatggaagg

SEQ ID NO: 22222 - DNA, 60 bp, Homo sapiens
cgtaactcactgccttttagatgcaaagactaatagacacgttctcctatctcgactatc

SEQ ID NO: 22223 - DNA, 60 bp, Homo sapiens
attggctctgtggcaatggcttcatacccaggtcacaggtgcaaatttggtgcagcaaag

SEQ ID NO: 22224 - DNA, 60 bp, Homo sapiens
gagtgttactgatctcctatgttacatgagcctcctgtaatcattgtgcattgatgttcc

SEQ ID NO: 22225 - DNA, 60 bp, Homo sapiens
tgacagtgtttggctgagccgagactggagcatctacacctgaggacaagacgctgccca

SEQ ID NO: 22226 - DNA, 60 bp, Homo sapiens
ggacggcacacagaatggagaaaactggatagctggtaactcatttagctcttggcactc

SEQ ID NO: 22227 - DNA, 60 bp, Homo sapiens
gtgttgactgtaaatatacccaatgacagtaattctactctgaaatatacgcccaagagt

SEQ ID NO: 22228 - DNA, 60 bp, Homo sapiens
gtctgaagcagtcagggtgttggattcctctgttgttgtcatcaattcctgctgaggggt

SEQ ID NO: 22229 - DNA, 60 bp, Homo sapiens
tttcatagtccaccaaacggtcacggttcacacttggagacacccaatgcaggtctctgc

SEQ ID NO: 22230 - DNA, 60 bp, Homo sapiens
agctccaaatacgttgaatctcatgacgcgatgcatgtcgaaggtccaagggcatgtgga

SEQ ID NO: 22231 - DNA, 60 bp, Homo sapiens
cctgcccacatcttcacggttcttaagttgttgctctaacgccacctcctctgcgaggcc

SEQ ID NO: 22232 - DNA, 60 bp, Homo sapiens
cctgtgtgtttgaagaccaactctcagatgagcggttccagagaagtaatgctccttcag

SEQ ID NO: 22233 - DNA, 60 bp, Homo sapiens
gagtttgtcaagtaaggaagtctcaagcccaaagagcagcgtcctgaccatggtggtttc

SEQ ID NO: 22234 - DNA, 60 bp, Homo sapiens
gtagtctgttggataggtgtttccaaagtgtgtcttctcaagtgaaaacgcaactctagg

SEQ ID NO: 22235 - DNA, 60 bp, Homo sapiens
atcaggtgatgactcatgggatctgatcacatgttactgtcgaaagccctttgcagggcg

SEQ ID NO: 22236 - DNA, 60 bp, Homo sapiens
ccccacatcccggaaaacccactttcctttcacgacccacatctcaatcctgaacatcta

SEQ ID NO: 22237 - DNA, 60 bp, Homo sapiens
tgacactggcctcagtcttactcagatatggctcctcaattgggatggggaagcatctga

SEQ ID NO: 22238 - DNA, 60 bp, Homo sapiens
tgatcagggtgtctaggctgaaggagttggagaccttgtgctaggtaggtgaaccagaaa

SEQ ID NO: 22239 - DNA, 60 bp, Homo sapiens
agccagtggacgacctctgcgatgggcaacaactttcacagaacaggatagttgcaatga

SEQ ID NO: 22240 - DNA, 60 bp, Homo sapiens
ttcctaagtctgcgctgggtatgtggcatattaaatgagataggacttccctttaagtac

SEQ ID NO: 22241 - DNA, 60 bp, Homo sapiens
ggccaatgagagctcttgaccagtgaatcaccagccgatacgaacgtcttgccaacaaaa

SEQ ID NO: 22242 - DNA, 60 bp, Homo sapiens
gaaatcttcccaccttatgactggggaatgtcaggtctagtagcaaagcaaagagacccc

SEQ ID NO: 22243 - DNA, 60 bp, Homo sapiens
catttggacctatttctgggatctccttttactgatttctctgtatattcatgagcaacc

SEQ ID NO: 22244 - DNA, 60 bp, Homo sapiens
gcccctttcataggctgctagggagttttcctggttctactttcaggtggtgggatcaat

SEQ ID NO: 22245 - DNA, 60 bp, Homo sapiens
caaaaccaattagcacaggggcctatgaaacctgacaatttgctcatatggagaattagg

SEQ ID NO: 22246 - DNA, 60 bp, Homo sapiens
gctggactcgacacgaagtgtgaacagagttcttggaggattctgaggtagagagtagca

SEQ ID NO: 22247 - DNA, 60 bp, Homo sapiens
ccttcctggccagaatatgcagagtaattcctgctggcttcacctttgaaagtccctcga

SEQ ID NO: 22248 - DNA, 60 bp, Homo sapiens
gaggctctggagtcccaattgtctgtgttagtcagtgaccaggttccagggaaaatgatg

SEQ ID NO: 22249 - DNA, 60 bp, Homo sapiens
attcacctataacctctgtgaactgcgagtgctcggcagaagcagccctgtgtcttacat

SEQ ID NO: 22250 - DNA, 60 bp, Homo sapiens
ccttggaccctgacacaatgcaagccttagagaagagcaatgatgagctacttttacctc

SEQ ID NO: 22251 - DNA, 60 bp, Homo sapiens
gtactcacatttccagggacttgataacctctggacttttgacggtgcagtttccttgcc

SEQ ID NO: 22252 - DNA, 60 bp, Homo sapiens
gatcactgacactactttgctgttcaatctggaatcaactgacctggctctgccattgag

SEQ ID NO: 22253 - DNA, 60 bp, Homo sapiens
tttgtgggggagaaatcatagcttttgtctttgaggttcatcagttatagttacccctgg

SEQ ID NO: 22254 - DNA, 60 bp, Homo sapiens
ttggaaaccctcacctgctatgagactttgagcaagaccaacccttctgtcagctccttg

SEQ ID NO: 22255 - DNA, 60 bp, Homo sapiens
atcccagggaagaatggtcactggcctagcctaggtcatgtgtttgtgacagttctaagg

SEQ ID NO: 22256 - DNA, 60 bp, Homo sapiens
actaatttggggcttctgggctgtgagtgatcctttgatacttcaccaaggggaacgtgg

SEQ ID NO: 22257 - DNA, 60 bp, Homo sapiens
caggcaagaaggactaccctgcactgctttccttggatgagaatgaactcgaagagcagt

SEQ ID NO: 22258 - DNA, 60 bp, Homo sapiens
ggcagcccttggagcacacagtggtgaagacattcctgaatatgtctcaggctgtagaaa

SEQ ID NO: 22259 - DNA, 60 bp, Homo sapiens
tttgaaactgcaggacttaagaagcttttctccgaatttgtacttgctctggtaaaatga

SEQ ID NO: 22260 - DNA, 60 bp, Homo sapiens
cagtgagccagtcttgggcagaggctgtcacatttaggcagattggaagttggtatgttc

SEQ ID NO: 22261 - DNA, 60 bp, Homo sapiens
tgcagaatgagacttacagtgcgctgagccctggcaaaagtgaggacgttgtgcttcgat

SEQ ID NO: 22262 - DNA, 60 bp, Homo sapiens
gttcaggggtgggaatgccatatattggtgttaatcacttggcactttcttgggcaccaa

SEQ ID NO: 22263 - DNA, 60 bp, Homo sapiens
ccttatctcttgactcttgtttgatggcaacaggaaatagtagcatttcaggaagggtgg

SEQ ID NO: 22264 - DNA, 60 bp, Homo sapiens
ctgacttatgttcacagaaccgtatcagcgaccaagaaaataggactgtcagaagctgcc

SEQ ID NO: 22265 - DNA, 60 bp, Homo sapiens
cacgtgcgtgtggcttacatgatcctgagacaccaggagaaaatgaagggtgactcccac

SEQ ID NO: 22266 - DNA, 60 bp, Homo sapiens
gcttttgccgttctccagcgctttacaggggttatcgcacttaagcctcggaacaacttt

SEQ ID NO: 22267 - DNA, 60 bp, Homo sapiens
ctttggaacggagctttgctattctctgaagatacacaaaatcctccactgctcacgtca

SEQ ID NO: 22268 - DNA, 60 bp, Homo sapiens
agagtgttgcagtatgtctggtggctcccttttcaggactagggctttctcatggagtac

SEQ ID NO: 22269 - DNA, 60 bp, Homo sapiens
agaaagtctgcccaggtccacatccaagccttcatcgtttgtcctccgggttctgggatc

SEQ ID NO: 22270 - DNA, 60 bp, Homo sapiens
cctcataagggatattgtgaggatggaaagcgaaagtgtgagaaaatacctcccaagtgc

SEQ ID NO: 22271 - DNA, 60 bp, Homo sapiens
gatgatgccaagatcattgatgggctgactggagaaaaagccatctacaaacgtcggggt

SEQ ID NO: 22272 - DNA, 60 bp, Homo sapiens
cttcccatctataccaggaccatgtctggagccatccgatactgtgacagatgccaactt

SEQ ID NO: 22273 - DNA, 60 bp, Homo sapiens
acgtgctgtttctggacaaggggaatggcactcccttctcagcgaccggctactcctgtt

SEQ ID NO: 22274 - DNA, 60 bp, Homo sapiens
caactgatgtcaaaaccagatgagatcttacagggagagagattgggtgcaatttgcctc

SEQ ID NO: 22275 - DNA, 60 bp, Homo sapiens
gtgtagggtgggaaagagataagaagatgggagaaagtggatggggagctgatgataact

SEQ ID NO: 22276 - DNA, 60 bp, Homo sapiens; identical to SEQ ID NO: 4855

SEQ ID NO: 22277 - DNA, 60 bp, Homo sapiens
ccaccaagtccctggcaatggacaaggtggctcacttctcctacccattcacgtttgaag

SEQ ID NO: 22278 - DNA, 60 bp, Homo sapiens
gtttcctgcaactaatcactcatacatctgtatctaaagcactccacctgggtcatgtac

SEQ ID NO: 22279 - DNA, 60 bp, Homo sapiens
atgaccacgaagagaacatgcatgatcttcagtaccatacccactacgcccagaaccgca

SEQ ID NO: 22280 - DNA, 60 bp, Homo sapiens
tgagcagccttccttcccactcacagacttaaccactgcaattctccaggtttctgagtg

SEQ ID NO: 22281 - DNA, 60 bp, Homo sapiens
gcccagatgacatcaattgggaatttgaggcatgacctataaagatcagttgcttgcaag

SEQ ID NO: 22282 - DNA, 60 bp, Homo sapiens
gcctggctatcccagtattactccccgtactttgctgcatctgctcaatgctgcatttca

SEQ ID NO: 22283 - DNA, 60 bp, Homo sapiens
caggtgatacttagcctgaagaaatgcaggtataaggtgaaggtactgccctcacttttc

SEQ ID NO: 22284 - DNA, 60 bp, Homo sapiens
cactatcagcatgaagagccgagaagcagatcctgaggtgtgtcggacagtgttttaggt

SEQ ID NO: 22285 - DNA, 60 bp, Homo sapiens
cacaccctcctcagttccgtctaaatgtgtttcttctgcttcaattacaccagttctggg

SEQ ID NO: 22286 - DNA, 60 bp, Homo sapiens
agctcttaactgctatgctgcactgcctcattcagagatagatgcctgcatgggtcctgg

SEQ ID NO: 22287 - DNA, 60 bp, Homo sapiens
ccagatattggtggtcagttagcatcatgtgccaggaccaggtagtgtttaatcttagaa

SEQ ID NO: 22288 - DNA, 60 bp, Homo sapiens
atcctgaaagaaggacaatgaccacctgcaaaggacgatttcaagtggagcctggaggag

SEQ ID NO: 22289 - DNA, 60 bp, Homo sapiens
ccacttcccagcatggttgtttcttaatagataagcatacaaactgatgctttgtaaggg

SEQ ID NO: 22290 - DNA, 60 bp, Homo sapiens
gtgctgagaatgaatggcaaacaactccagggacagctgaatctaagctatgcctttgtg

SEQ ID NO: 22291 - DNA, 60 bp, Homo sapiens
gaccaacacatgatgagccctgtaggtggtggacaaagactatgagcaagccatttaggc

SEQ ID NO: 22292 - DNA, 60 bp, Homo sapiens
ggccaggtattttaggatgtgagaaggaagatcatggcttgttaaagttgctttggtgca

SEQ ID NO: 22293 - DNA, 60 bp, Homo sapiens
gtgctgtgtccctgaggcacacctatgtgtgttatctctctggcatactttccaacaagg

SEQ ID NO: 22294 - DNA, 60 bp, Homo sapiens
atcatcatctgctggaagtgaggctggtagtgactggatggacacattgctgtgggtagt

SEQ ID NO: 22295 - DNA, 60 bp, Homo sapiens
ggacacatgtaaatccttgaagacacatcctggaattcataccccacaaggacagtgtgt

SEQ ID NO: 22296 - DNA, 60 bp, Homo sapiens
tcagagcaccccggatccactgttcaatctgcacaagattcggggtccagacatgggaga

SEQ ID NO: 22297 - DNA, 60 bp, Homo sapiens
gctcattcatcagtcttatcatggaaccatggacacagtttctctcagtgggactattcc

SEQ ID NO: 22298 - DNA, 60 bp, Homo sapiens
tgccaagaagccatgtgagatatcatctctgtctgtcatgttttcagaacagagtgtggc

SEQ ID NO: 22299 - DNA, 60 bp, Homo sapiens
cccaaaagccaagtctgtcattgggctaaagtgccattcctactaatcctttgcctcacc

SEQ ID NO: 22300 - DNA, 60 bp, Homo sapiens
ctccgggtttccatcatgtcaaggtcacaggcatccatgtgtgcaaaccatctgccccag

SEQ ID NO: 22301 - DNA, 60 bp, Homo sapiens
attgtgacttatggtccagccaatagtctatcatggggactgttcaggtacatgaaaaga

SEQ ID NO: 22302 - DNA, 60 bp, Homo sapiens
gtcaaatccccaatgtatcaactcagctttatctccaaaacctaccacttcccagagaac

SEQ ID NO: 22303 - DNA, 60 bp, Homo sapiens
actataccctccaggataacccagctagtaagggcagagccaggatgattcagacccaga

SEQ ID NO: 22304 - DNA, 60 bp, Homo sapiens
agttgttctctcaagctagggcagaagaggggtgtcaagctcctcaataaacttgtctcc

SEQ ID NO: 22305 - DNA, 60 bp, Homo sapiens
gggccctcttgtatggggcggttttatgttgcagtcctctgatactttctgagttcaaag

SEQ ID NO: 22306 - DNA, 60 bp, Homo sapiens
aaggactgaacccccactatcataatccatacattcatttccatgttgtttgactagcag

SEQ ID NO: 22307 - DNA, 60 bp, Homo sapiens
gccctggctaaaggaatgtctgagtaacttgtgaaactggaagcctctgcctctgaatgc

SEQ ID NO: 22308 - DNA, 60 bp, Homo sapiens
ctattcgaccagaagagacagcctggaacacaggaacactgaggaatggtcctagcaaag

SEQ ID NO: 22309 - DNA, 60 bp, Homo sapiens
ccagctccttactgccctgcagacaagcgtgccgtgcgtgcttgtggccaagggaaggaa

SEQ ID NO: 22310 - DNA, 60 bp, Homo sapiens
ggggctgcaagactgcctctcctgcaaggcagctcatacttgtactgtatgttcagaaat

SEQ ID NO: 22311 - DNA, 60 bp, Homo sapiens
tttccagccatgaaagccctctttccactgcatactgatgggctgactcagcttccttca

SEQ ID NO: 22312 - DNA, 60 bp, Homo sapiens
gcagttgcaagtggccatttctgatgaaaatactggttgctaaaacttagtctagttctg

SEQ ID NO: 22313 - DNA, 60 bp, Homo sapiens
ctgtgagtcatgaaaaggagggtgcaggtgataggcaaagggacccattagccagtttac

SEQ ID NO: 22314 - DNA, 60 bp, Homo sapiens
gggtcacgaaggtatgccaccagttaacaaagacactctcaaaacaggaaggatggcaag

SEQ ID NO: 22315 - DNA, 60 bp, Homo sapiens
agttcatcatgcttccatgagccctcaggactgggatttgagccttcctggctctttatc

SEQ ID NO: 22316 - DNA, 60 bp, Homo sapiens
tgtgcagtcacactttcctaccaacccccttcttaccatctctagctgccatttgtgggg

SEQ ID NO: 22317 - DNA, 60 bp, Homo sapiens
atgatatctacctcattagggctgtcgggctcacgaccttttcagatgattaatgttccc

SEQ ID NO: 22318 - DNA, 60 bp, Homo sapiens
tccaacaggtgctcccctgtgctgttactccttctgccaactggaagcagatggtgacca

SEQ ID NO: 22319 - DNA, 60 bp, Homo sapiens
ccaagcgcaagcacttggcccctaacctgagcctgagggaacctgattctactctgcctc

SEQ ID NO: 22320 - DNA, 60 bp, Homo sapiens
ctgtttgtaaacgtgaattgaggagccaagaaaccccagaaaagccccggtcttcagtgg

SEQ ID NO: 22321 - DNA, 60 bp, Homo sapiens
gcatagtgcctggcacatggtgtgtgcttagcgcaaatggcagctctcatcatgaatgat

SEQ ID NO: 22322 - DNA, 60 bp, Homo sapiens
gaggtgaccagaaagatctccatcggttgcccaaggctgtaagtagtgatggttttagcg

SEQ ID NO: 22323 - DNA, 60 bp, Homo sapiens
tcagtgttgtggtgactcagggccttcaccatacagacttgacagcatagtctagaggct

SEQ ID NO: 22324 - DNA, 60 bp, Homo sapiens
gacagtcagatgcagtcaatattcactgacattggaaaagttgatttcacagatccttgc

SEQ ID NO: 22325 - DNA, 60 bp, Homo sapiens
gagttggtcttgatccacacctacccagttggtgaagacagccttgtatctgatcgttct

SEQ ID NO: 22326 - DNA, 60 bp, Homo sapiens
gggagatggcttactcagaagcatactccacttaacataccatggcctgagctaagtacc

SEQ ID NO: 22327 - DNA, 60 bp, Homo sapiens
gtatcttcttccaattgcctgagccagccagactttcatgtttgagcattcagattgggc

SEQ ID NO: 22328 - DNA, 60 bp, Homo sapiens
ccccgatggtgatcccagctcctgcggaaccgatctcaagcacaaggacaagcaggaaaa

SEQ ID NO: 22329 - DNA, 60 bp, Homo sapiens
cccagcctcagttctgctgctgtctttactgctctcaacttcacttctcaacttcctgct

SEQ ID NO: 22330 - DNA, 60 bp, Homo sapiens
gacatctgaggccatccagggcaaggaactgtctttctggttcaatagactgccccgaca

SEQ ID NO: 22331 - DNA, 60 bp, Homo sapiens
ggcactcccttcatagtcaccctctaaccacgtgacattccgttccatgctaagcagtat

SEQ ID NO: 22332 - DNA, 60 bp, Homo sapiens
ctggagtatgatgtactcacacctgcaaatctgagcatcgcgaggttaaacgttccacct

SEQ ID NO: 22333 - DNA, 60 bp, Homo sapiens
gtatccaaagaggcttcaaatgatgccttacagaaaacgatgctccagatgggcacttct

SEQ ID NO: 22334 - DNA, 60 bp, Homo sapiens
gtcaagctgtgaaagaaaatggctggaggtgtgctttgtgtgaaaggtgagcaataaagt

SEQ ID NO: 22335 - DNA, 60 bp, Homo sapiens
ggcctcagtgtccatgttctgtgtcgtacacgcttgaaagagtatgaacagtgcatagac

SEQ ID NO: 22336 - DNA, 60 bp, Homo sapiens
gtcacccttccatgacgcctcctctgtgcatttgagttcactgtttatgctcaacactga

SEQ ID NO: 22337 - DNA, 60 bp, Homo sapiens
tcacatggcagtcgaaagtctctaggttccattgcattatacccttcttagaggctccag

SEQ ID NO: 22338 - DNA, 60 bp, Homo sapiens
gcgcaaggaggagatagaagcgcagatcaaggccaactatgacgtgctggaaagccaaaa

SEQ ID NO: 22339 - DNA, 60 bp, Homo sapiens
ccgaaccgtggcaggatggagatgtttgtgtaaggtagactcaagtttgcaagactcaag

SEQ ID NO: 22340 - DNA, 60 bp, Homo sapiens
gggagacaaggattaggagccatacctcccagagcaaggtatctttctagagcaaatttc

SEQ ID NO: 22341 - DNA, 60 bp, Homo sapiens
gccacttctgggtacttcagtatcagagatcagttctcgtggtttagacagttcctatct

SEQ ID NO: 22342 - DNA, 60 bp, Homo sapiens
tgcatgactgagctctgtcactcaatggttgggaaatttgtgatcatctctacgccttgc

SEQ ID NO: 22343 - DNA, 60 bp, Homo sapiens
aaccttttcaagcatttttgtcgattggattgtagcactcaaaagtaaggtctgttttac

SEQ ID NO: 22344 - DNA, 60 bp, Homo sapiens
gctctggctgtgtggcttcagaggcacatttccagttaatcagtacaaccaaagtcaacc

SEQ ID NO: 22345 - DNA, 60 bp, Homo sapiens
actccacaggccagacctcaacctagaaagatggccacaggacttgcaactcagggtggt

SEQ ID NO: 22346 - DNA, 60 bp, Homo sapiens
gatctgttgagtcggctacagtctggctaagtaagaagcatttgcatactgattccatca

SEQ ID NO: 22347 - DNA, 60 bp, Homo sapiens
ttcttattttccacagacaccacaagctcaggaggctgcatcagcgtttcttattggagg

SEQ ID NO: 22348 - DNA, 60 bp, Homo sapiens
gaaataggatctactggcactgcagaagttccccttactgtggatttcaatcccatccac

SEQ ID NO: 22349 - DNA, 60 bp, Homo sapiens
cctccctgaactccagcctctgtcttctcaactacatgaaaccaccatgctttgtttggg

SEQ ID NO: 22350 - DNA, 60 bp, Homo sapiens
taactggttggttaactgagctaagaataggctgtgggtctcctcacttgtggcccagtg

SEQ ID NO: 22351 - DNA, 60 bp, Homo sapiens
cgcgctgctgttagacactccgccattcctggttctctccgaaccgttctttgtacagta

SEQ ID NO: 22352 - DNA, 60 bp, Homo sapiens
ggccagcctagtttgtatcagcagaacagtagtggactcgactcaggtcgtaagccttat

SEQ ID NO: 22353 - DNA, 60 bp, Homo sapiens
ggtaagttaggtaagggtgaaactgctttggggcccagactgcgctggaatgtactgttt

SEQ ID NO: 22354 - DNA, 60 bp, Homo sapiens
gctgagtaccagatggctgagaagccactataccagccctagtttcgagtttacactgct

SEQ ID NO: 22355 - DNA, 60 bp, Homo sapiens
ggatcttatgcaactgttggaaagaatgaagcgatgctgcactgtggtcatgcagtgatc

SEQ ID NO: 22356 - DNA, 60 bp, Homo sapiens
atgctaaatgctcaggaagagacagagacacaccagcttcaaggatagtggtggcctgtg

SEQ ID NO: 22357 - DNA, 60 bp, Homo sapiens
ccattttgatgcaggagggtaacaagacttatggttcgtcttgtgcctttgtagcctttg

SEQ ID NO: 22358 - DNA, 60 bp, Homo sapiens
gacactttctcagaggttctcctgcctggaatcaagtgatgcgtgtccagaaggcaagag

SEQ ID NO: 22359 - DNA, 60 bp, Homo sapiens
acgagatgaatgaggattctgctgccctgagggagttcattggaaacctgcgttctccta

SEQ ID NO: 22360 - DNA, 60 bp, Homo sapiens
ttccgactatgcggaaatgaattcacatcatcatggcaggttttgactatgagggaattc

SEQ ID NO: 22361 - DNA, 60 bp, Homo sapiens
ggaggactctccagctggcagcatcagtgcccttctttgccatctccctgatatcctggt

SEQ ID NO: 22362 - DNA, 60 bp, Homo sapiens
cctcatgaagttgcctcccagcaacccactacctctggtacctgtaaaggtcaaacaaga

SEQ ID NO: 22363 - DNA, 60 bp, Homo sapiens
gttaacagaagattgtttggaacgagagtgcagtggcttctttactagcaaagagaagtg

SEQ ID NO: 22364 - DNA, 60 bp, Homo sapiens
gatgggcgctgcataaacagcctgcagggaacgtctgggagaaccagcttcacaacagat

SEQ ID NO: 22365 - DNA, 60 bp, Homo sapiens
cagtgttgaatcgtaaatagtctgaagcaggccagtgttccttttggctgccagtcttgg

SEQ ID NO: 22366 - DNA, 60 bp, Homo sapiens
aagagcctctcaactgagcagtaaaggtaaggagagctcaatctgcacagagccagtttt

SEQ ID NO: 22367 - DNA, 60 bp, Homo sapiens
gaggaggttggtgcatgggtccaatatacaagcatcttctgtcctgaatacagtatctcc

SEQ ID NO: 22368 - DNA, 60 bp, Homo sapiens
gtgtatgtcacatcctcacttactccttaagccctttctcatggtcttggccctaaaaca

SEQ ID NO: 22369 - DNA, 60 bp, Homo sapiens
gttttcttagactagctggggtctccaggacaaaggttgtattcactagggtagaacaaa

SEQ ID NO: 22370 - DNA, 60 bp, Homo sapiens
ttttgtacagttagtggacagtattcagcaacgcctgatagcttctttggccttatgtta

SEQ ID NO: 22371 - DNA, 60 bp, Homo sapiens
cctttctattggctgatgtgtggcatgagagtcgttattgcaactgttagttggaccaag

SEQ ID NO: 22372 - DNA, 60 bp, Homo sapiens; identical to SEQ ID NO: 4855

SEQ ID NO: 22373 - DNA, 60 bp, Homo sapiens
tataccctgtaggggtgagctttcaccttaggtgtggttatatcctagcagtgtatcaag

SEQ ID NO: 22374 - DNA, 60 bp, Homo sapiens
ggatgtacagttagagcctggaacttcaaccattattcactccccatgccctgtttcccc

SEQ ID NO: 22375 - DNA, 60 bp, Homo sapiens
acaaattgcaaaatagcgataatggcatgggagaggccagatgcaggactctggtaaatt

SEQ ID NO: 22376 - DNA, 60 bp, Homo sapiens
ttttcggtgacctcatccaaggccatgatgtcaagggccatgtccccaagcagaggtgga

SEQ ID NO: 22377 - DNA, 60 bp, Homo sapiens
taagtgacaagatacggggctgaaatgcttgctgcttacatgatcagtagcctggagaag

SEQ ID NO: 22378 - DNA, 60 bp, Homo sapiens
agagacaggacagaggtgggaaagaacatggtcaccaggagtcgggacagcactcttcca

SEQ ID NO: 22379 - DNA, 60 bp, Homo sapiens
ggaaaccattggcttctggttagagttctaagaagggaaactggcgtgtgagtaggcagc

SEQ ID NO: 22380 - DNA, 60 bp, Homo sapiens
ctgttcttggtgttaagctatcttttgtaggaaatagtggggcacactactcagagacat

SEQ ID NO: 22381 - DNA, 60 bp, Homo sapiens
ctggttgatttccttctccagcctatcccctacagggaaaagctgatacttcccctatag

SEQ ID NO: 22382 - DNA, 60 bp, Homo sapiens
catctgaccagtgagctctgaaatggtttccctacacagagtgggttttggcaagggttg

SEQ ID NO: 22383 - DNA, 60 bp, Homo sapiens
ctatgaggggcacaacaaggcagcagtcaaagtctctggttcggacatgattcacctgta

SEQ ID NO: 22384 - DNA, 60 bp, Homo sapiens
tcagcctgaattagagcttgggaacgagactgggtgtgctcatcttacttgtgagggaga

SEQ ID NO: 22385 - DNA, 60 bp, Homo sapiens
aacctccctacggagtaccaagcatagtgccaccagctgtttcattagcacctggagtct

SEQ ID NO: 22386 - DNA, 60 bp, Homo sapiens
cagagaagttggtagaactgtacagggaacgccaatttgccctccacccagagtctgtaa

SEQ ID NO: 22387 - DNA, 60 bp, Homo sapiens
aacttcaaaccaagccggattacctcgaagtcctggagaagacaacatacaggttctaac

SEQ ID NO: 22388 - DNA, 60 bp, Homo sapiens
ccctccacctttgtggatccctcttggtttgtgaccagtgtgtctgtttgttgaggttgt

SEQ ID NO: 22389 - DNA, 60 bp, Homo sapiens
ggtgccttattctctgaggaaagatggagggttcataaagcaatgccttatccacagcag

SEQ ID NO: 22390 - DNA, 60 bp, Homo sapiens
actggtacttcctgcttgactctctgacctgtgggatgcacattcttcctcagcgctttt

SEQ ID NO: 22391 - DNA, 60 bp, Homo sapiens
caaacactatcatgctggcagctgttttgtccacatcaattcccttgatttaatgctctg

SEQ ID NO: 22392 - DNA, 60 bp, Homo sapiens
ggttaattgctggcctcagattgtccttatgttcctgagttatgatccttgagtaatgct

SEQ ID NO: 22393 - DNA, 60 bp, Homo sapiens
gcccttgacatgatgaacatcacttatttcagcacttggattgtctggcaatgattactg

SEQ ID NO: 22394 - DNA, 60 bp, Homo sapiens
acccttgttgaaggcactccacagctcaataactgaccattgctcactactctcttggcc

SEQ ID NO: 22395 - DNA, 60 bp, Homo sapiens
gcacaatgcatcgcattctccatgcaacctaacagagcggtctgggatagagcctgaact

SEQ ID NO: 22396 - DNA, 60 bp, Homo sapiens
aaagtcatcgacggtgagcgtgtgattgggcgtggtagtgagttctaccagctgtgccga

SEQ ID NO: 22397 - DNA, 60 bp, Homo sapiens
ctccctgagaaatgtacagatgcgaggatgggcatgaagaactctatgcatttgcttggg

SEQ ID NO: 22398 - DNA, 60 bp, Homo sapiens
ggactatttcactagaaaccacgtagaataggactaactgatctcttttgaaaggggctg

SEQ ID NO: 22399 - DNA, 60 bp, Homo sapiens
acctcacctgattggctatcttggggccatgtccccttcttgctgccacaggatgaataa

SEQ ID NO: 22400 - DNA, 60 bp, Homo sapiens
ctcgtggtggggatatggcagacaggtgcttgtttgtttgagagaagtagcagaagagat

SEQ ID NO: 22401 - DNA, 60 bp, Homo sapiens
aattggtcaagaagtggaccaggtgggaatggttacttaatcctagcagaggaataaagt

SEQ ID NO: 22402 - DNA, 60 bp, Homo sapiens
cccgtgttcattcagctgcatcaggaatcaggccattccgctcctagtattagcagcaat

SEQ ID NO: 22403 - DNA, 60 bp, Homo sapiens
tcttacactgaagctgctgtgttgtctgaacagagcctcaattaagaagtgactgaagct

SEQ ID NO: 22404 - DNA, 60 bp, Homo sapiens
taaccaaagggacagattttgacagcagtcttcattgttgttccatatgagtgttttcta

SEQ ID NO: 22405 - DNA, 60 bp, Homo sapiens
gagatgcagtcactgtaatgtgataacaagatgtgttgtgcaggtagaaagcatggagag

SEQ ID NO: 22406 - DNA, 60 bp, Homo sapiens
ggttcctgacgcacactgttaggtcattattttgttgtaccaaagttctagtggcttcag

SEQ ID NO: 22407 - DNA, 60 bp, Homo sapiens
cagggtggcactgtatgcagagaagagtcaaggaatggtttggagaagatagggaaggct

SEQ ID NO: 22408 - DNA, 60 bp, Homo sapiens
ctttaagaagaccaccacatagaataccccttcctatcagctcgctctgatttagcctta

SEQ ID NO: 22409 - DNA, 60 bp, Homo sapiens
cagaagtctccttgagcccactgggtcatatgcgtgtcaccacacgtgaactagtgtggt

SEQ ID NO: 22410 - DNA, 60 bp, Homo sapiens
ctgttggttcaattgttgctttggacagaggaggacaaacttgccacagtgaagaaatca

SEQ ID NO: 22411 - DNA, 60 bp, Homo sapiens
agacaaccatgtacccatgcaagtaggtgaacattccacagtggctgggtgaccacagca

SEQ ID NO: 22412 - DNA, 60 bp, Homo sapiens
agcacgttcatcacgcatgctctctgttgcgttccccatttcagatgtccagtaatggtg

SEQ ID NO: 22413 - DNA, 60 bp, Homo sapiens
aaaagcacaatccatggaagcatagtgcaaggaataatgatatagacaaatggaggaggg

SEQ ID NO: 22414 - DNA, 60 bp, Homo sapiens
cctgccgttgaacccgatctcctaagaagtgtgctgcaacagcgtttgattgcattagga

SEQ ID NO: 22415 - DNA, 60 bp, Homo sapiens
cacatgcattgactctaaagaggtgggttcctggatagcagaagtagataggaaggcatc

SEQ ID NO: 22416 - DNA, 60 bp, Homo sapiens
caccaatcagacaccagggcaatgatcagatatggcagttctgtaccaatgtgaccgttg

SEQ ID NO: 22417 - DNA, 60 bp, Homo sapiens
gcagcacagaaagacagagctggaaaatatgagatgggatgagacaagaagatggagagt

SEQ ID NO: 22418 - DNA, 60 bp, Homo sapiens
gtgttcctatcctagaaaaccttaactgggacaagctactctcaagcatcttcacttgag

SEQ ID NO: 22419 - DNA, 60 bp, Homo sapiens
gggaagtcttcctgagggaagctgtacaaaactgaggtggtcaggttcatctcttcaaag

SEQ ID NO: 22420 - DNA, 60 bp, Homo sapiens
ctctccctgagtgcctgtgtagctggggatggggattcctaggggcagatgaaggacaag

SEQ ID NO: 22421 - DNA, 60 bp, Homo sapiens
taggaaggaaccaggccctcacttaggtttggaggggcagataagagcactgctgaccat

SEQ ID NO: 22422 - DNA, 60 bp, Homo sapiens
ctggcatgagcttggacagtctggaccgccaccctccctgaaccagggagacagcctctg

SEQ ID NO: 22423 - DNA, 60 bp, Homo sapiens
tgttatgtcggtcatatgtctgtacgtgtcgtgggccaacctcgttctgcctccagcttt

SEQ ID NO: 22424 - DNA, 60 bp, Homo sapiens
cagacaccatagagctgctaacaatgagaatcaaggaagatgcttgcacttagatttcgt

SEQ ID NO: 22425 - DNA, 60 bp, Homo sapiens
ttgatctaagcctcccagagagaccctagaacgtttccctcaaggacctttctgcctgga

SEQ ID NO: 22426 - DNA, 60 bp, Homo sapiens
aatggacaagagaagctggaccacagaaccagcaggtatccatggtggcatctgctacgg

SEQ ID NO: 22427 - DNA, 60 bp, Homo sapiens
gtatgtgtctcccgtgaaagaacattgagctatttccctggaatggatggggaagaaatg

SEQ ID NO: 22428 - DNA, 60 bp, Homo sapiens
gtccggaaaggaagtggagcaattctgaatactgtaaagaccaaagcaaatccggccatg

SEQ ID NO: 22429 - DNA, 60 bp, Homo sapiens
gcctacacagaatatcacgaaatgtcctataatggaggcttaacccctggcatcaatgct

SEQ ID NO: 22430 - DNA, 60 bp, Homo sapiens
ggcttcgagccagctctcctggttttccagccattggtttaccgtcatgatatccctgta

SEQ ID NO: 22431 - DNA, 60 bp, Homo sapiens
cttcataatcctcggttccccagactcaccggacaccatctcctatgccttggagacctt

SEQ ID NO: 22432 - DNA, 60 bp, Homo sapiens
ttagtgtcctttgtggaggggtgagttcccatgagagctggttagagagtcagccttcct

SEQ ID NO: 22433 - DNA, 60 bp, Homo sapiens
cctttatcccacctttgacactaccctccaatcttgcaacactatcctgtttctcagaac

SEQ ID NO: 22434 - DNA, 60 bp, Homo sapiens
attgaggaacaaagtgttgtggagcagaagaaggagtccctcaccctaggtgtgagatgg

SEQ ID NO: 22435 - DNA, 60 bp, Homo sapiens
acctgggagcccgaagcttagcctgtaggtggccaagccagtccctactcttgggctgcg

SEQ ID NO: 22436 - DNA, 60 bp, Homo sapiens
gcttcaagactgctgaaagcaatccagttgctcctgtgctagatggtagccagagaattt

SEQ ID NO: 22437 - DNA, 60 bp, Homo sapiens
ctgatcatgcactcaatggttggaaaaggcactccagtgctaagaaaataaccagaagcc

SEQ ID NO: 22438 - DNA, 60 bp, Homo sapiens
gcttgttgtatgagttccactgccagatttatgggatgcctggatcattcagaaggatgc

SEQ ID NO: 22439 - DNA, 60 bp, Homo sapiens
ctattttttgtgtctggcagatgagtatgtcaaggattgagatgaacacataagtcttgg

SEQ ID NO: 22440 - DNA, 60 bp, Homo sapiens
ggctcagttctggtccttcaagcctgtatggtttggattttcagtaggggacagttgatg

SEQ ID NO: 22441 - DNA, 60 bp, Homo sapiens
ataagagatatgccagcctctacttctgctgcgccatcgagggccaagacaatgagctca

SEQ ID NO: 22442 - DNA, 60 bp, Homo sapiens
caacgaagacacttcagccctggtagccaggctagacgagatggagaggggcttatttca

SEQ ID NO: 22443 - DNA, 60 bp, Homo sapiens
aaatgatcgcctacaagcggttctcttggctcaaaacgcctctttcagggctcttatgct

SEQ ID NO: 22444 - DNA, 60 bp, Homo sapiens
aacacttggatgcattcttgctctcacagaattggtgacatgctttgagagttttgtcac

SEQ ID NO: 22445 - DNA, 60 bp, Homo sapiens
gcaaattttagggtcctgagccaagtatggatggttcagaatttgtttctttcctggagg

SEQ ID NO: 22446 - DNA, 60 bp, Homo sapiens
aagttccccttgcgcatgaaagacaacgacctccttgtcagcgagctctatcgggaccca

SEQ ID NO: 22447 - DNA, 60 bp, Homo sapiens
tccctgagcatccctggatccttcaaataggccctgagatgtgaggtctgctgcttcact

SEQ ID NO: 22448 - DNA, 60 bp, Homo sapiens
gctgatggtcctgtccaaaggctattaggcaggaagaattctcttagggcagagttagct

SEQ ID NO: 22449 - DNA, 60 bp, Homo sapiens
ccagacccaccgggacgcactgaccatgtcggaggacagacccatgctgcagttcctcct

SEQ ID NO: 22450 - DNA, 60 bp, Homo sapiens
ttatttggtgtcctgtttgaacctcgcttgccgtgctcccagatttcctgtttctcctgg

SEQ ID NO: 22451 - DNA, 60 bp, Homo sapiens
gttgaacagaataattctttcctggaagtctggcattttgcctggggagaaggtcattaa

SEQ ID NO: 22452 - DNA, 60 bp, Homo sapiens
caagggcaatgtgtcagtattccctgaagcccccttcaactcgtaaaatctactctgatg

SEQ ID NO: 22453 - DNA, 60 bp, Homo sapiens
ggaaacaagaccgaggcctgtagaaggaaagcggaaggatgtaagagctgttcatgggaa

SEQ ID NO: 22454 - DNA, 60 bp, Homo sapiens
aggcctggttgtggatagcggcctgtgtggagaggagctgcttgtgggcagtgaggaggc

SEQ ID NO: 22455 - DNA, 60 bp, Homo sapiens
gccttcagagcatttcactagacctctgtctgtgtcggtccagtgtctttagccaagctt

SEQ ID NO: 22456 - DNA, 60 bp, Homo sapiens
cgaaagagaactgaaggcagaagctagtctaatggaccagatgagtagttgtgatagttc

SEQ ID NO: 22457 - DNA, 60 bp, Homo sapiens
acccacgtccttgcacacgactttgggaaacgcgagaaagtaaactctgcctagcacggc

SEQ ID NO: 22458 - DNA, 60 bp, Homo sapiens
ctacatggttgcagctgccacatgaagaacccaagctcctgtcaaagttgtgaatgcgac

SEQ ID NO: 22459 - DNA, 60 bp, Homo sapiens
cctgccctctgatggttccacttaggacttactgacttcactgatggatgaggaagcgat

SEQ ID NO: 22460 - DNA, 60 bp, Homo sapiens
atgtggctgagaccttaaacttgaggcaacccatctgaggtggcatccagaggagactgg

SEQ ID NO: 22461 - DNA, 60 bp, Homo sapiens
cctccagtgcctccactactcgccacagtgatcatctctatacacacactgcagtcattt

SEQ ID NO: 22462 - DNA, 60 bp, Homo sapiens
gtcgacttgcagaggcacagtctacaaagcctaggatgttgccactcaatggtttacatt

SEQ ID NO: 22463 - DNA, 60 bp, Homo sapiens
tgtctaagctcagagcagttcctgcaagtctacctccaggcaagggaatctaccgaggtg

SEQ ID NO: 22464 - DNA, 60 bp, Homo sapiens
ggcaagataaaccaatgtcataacaggcattgccaacctcactgacacagggtcatagtg

SEQ ID NO: 22465 - DNA, 60 bp, Homo sapiens
ccctaccctgggatattggcctctgatgaaagcaccactaaacctcaccttctctcctaa

SEQ ID NO: 22466 - DNA, 60 bp, Homo sapiens
cacctcttccccatcactctatctcatcactgttactgtctgtgtagccctgtcatgagc

SEQ ID NO: 22467 - DNA, 60 bp, Homo sapiens
cagttacagtgaggcaaggcaatctggcagtaactccatagagaggaatgacaggctggg

SEQ ID NO: 22468 - DNA, 60 bp, Homo sapiens; identical to SEQ ID NO: 4855

SEQ ID NO: 22469 - DNA, 60 bp, Homo sapiens
atactgagagctacatagccaggccagatggggactgtgcatcttcccttaatggtggaa

SEQ ID NO: 22470 - DNA, 60 bp, Homo sapiens
ctgcatacccaacagtaacttggacaaggctccagtccagcttctgatgcatagacctga

SEQ ID NO: 22471 - DNA, 60 bp, Homo sapiens
ccaccagaccagagaagggctacatatggactcatgttgggcctactcctgcaataacaa

SEQ ID NO: 22472 - DNA, 60 bp, Homo sapiens
gtgaccctcagcgatatcccaagtattttcctgttctcatctatactatggcaaaggggc

SEQ ID NO: 22473 - DNA, 60 bp, Homo sapiens
ggctgggttgattgcatgtatagcaccttctactgtagtacccttttcatggcatttact

SEQ ID NO: 22474 - DNA, 60 bp, Homo sapiens
ggaagtagtacagatagtgtagagttcccacacaccctagacccagtcttctctgttatt

SEQ ID NO: 22475 - DNA, 60 bp, Homo sapiens
ccagctaccccaactacatgtcttcagcagcacatcctctcaccattgtcatgttgcttc

SEQ ID NO: 22476 - DNA, 60 bp, Homo sapiens
cctttgacgtatcctaggagttaggtattctcagccccatttccagaaagcaaaccaagg

SEQ ID NO: 22477 - DNA, 60 bp, Homo sapiens
tataagttggtggggagtgtaaagagtagttggctggaagataagtgacccgcacattca

SEQ ID NO: 22478 - DNA, 60 bp, Homo sapiens
gtggaattgcattcaaaccagaacagtgccttagaatggatgtgcccaactgctctgtat

SEQ ID NO: 22479 - DNA, 60 bp, Homo sapiens
cagataatttctagatgtaagagggttcgccaactatagctagcaagtcaaatcctgctg

SEQ ID NO: 22480 - DNA, 60 bp, Homo sapiens
atcccctccagtatgtgtatccggttgtctcatctttttcacactgctctactgttctac

SEQ ID NO: 22481 - DNA, 60 bp, Homo sapiens
tgttcctcagtatacatgattacccttccacagaatgatctgcttaggccctcagaatat

SEQ ID NO: 22482 - DNA, 60 bp, Homo sapiens
tgatatttggcaatttaaaatctatgtgctacccacctgggcttgtctcaatccgtggac

SEQ ID NO: 22483 - DNA, 60 bp, Homo sapiens
cattgagctgtgcacgaccacaccgctgatgaagacaaggactcacagtggctgcaaggt

SEQ ID NO: 22484 - DNA, 60 bp, Homo sapiens
gtgcattatcactagcagccagtaacctctcctgtgcctctacctagctcccatctattc

SEQ ID NO: 22485 - DNA, 60 bp, Homo sapiens
gcttcatatcctcagtgcttgtagaatgatgagcttagaggtaccaggtcattgcagttg

SEQ ID NO: 22486 - DNA, 60 bp, Homo sapiens
gccgaagactggattactacacgcctagacgtgacactacacccatagatctcatgcatc

SEQ ID NO: 22487 - DNA, 60 bp, Homo sapiens
ggcgggaaatgcactaattgtgctcttccttataaatggtacatattactgacacagaca

SEQ ID NO: 22488 - DNA, 60 bp, Homo sapiens
ccctttcagatcgccaaactttggcatcagagcaaggtccacacttatcactgaaaattt

SEQ ID NO: 22489 - DNA, 60 bp, Homo sapiens
tgagctatatccgttcctccagccatcaacaccttccacatttgtggcacatcctttcag

SEQ ID NO: 22490 - DNA, 60 bp, Homo sapiens
atgcagcaggtgctcagcaatatggaaatgggaccaaacagagggagtctccacagctcc

SEQ ID NO: 22491 - DNA, 60 bp, Homo sapiens
aaccaagtgttcctcttattatcttgcttagctcattttgggtaaaatgcatcaaacggc

SEQ ID NO: 22492 - DNA, 60 bp, Homo sapiens
gggccttgagggccgatcatccaatccagttgcagtacttttcgatacacttcttcatcc

SEQ ID NO: 22493 - DNA, 60 bp, Homo sapiens
cctgagtcagacctgtgctttttcacctctacggaagatgtcagagcgtttccctagcaa

SEQ ID NO: 22494 - DNA, 60 bp, Homo sapiens
agaggacttctaagccataagagacccaagtgccttgaggagccacatacttttccctgc

SEQ ID NO: 22495 - DNA, 60 bp, Homo sapiens
ggagtggtgtatagaagagagcatggagtttaaggggttattatggctgagatccagacc

SEQ ID NO: 22496 - DNA, 60 bp, Homo sapiens
ttcattccttctgccccttcctatcaatggagccactcgcttcccccagtcaactactgt

SEQ ID NO: 22497 - DNA, 60 bp, Homo sapiens
ttgctgctttctgcgctcatgtgtcggaactagatctttctgacaacaaactcgaagact

SEQ ID NO: 22498 - DNA, 60 bp, Homo sapiens
aagtactgtccagttgaaacctcctgactcatgtactactacacaaactagaaaatgccc

SEQ ID NO: 22499 - DNA, 60 bp, Homo sapiens
ctgttgcccgtccacactcgtctcctctctgcactaagtcctccctgttttcttctgtaa

SEQ ID NO: 22500 - DNA, 60 bp, Homo sapiens
ttttccaggtcagtgccagcttggctgtcccaggccgtgcacagtgcccattgctatagc

SEQ ID NO: 22501 - DNA, 60 bp, Homo sapiens
gattagccccattctagtcgcctcaggcacactgaacacttaaccagctggtcaaagttc

SEQ ID NO: 22502 - DNA, 60 bp, Homo sapiens
atatactgctgaggcacacacagtcttgcatagggaacaccaccagtcctgactatcaaa

SEQ ID NO: 22503 - DNA, 60 bp, Homo sapiens
accatatagaatactagtgctttcatttaacaggggtttcagggtgcaattttgctgaat

SEQ ID NO: 22504 - DNA, 60 bp, Homo sapiens
ggttatagagaggtgtaactgtttgttaactattacatggatttcatactaggcagtgac

SEQ ID NO: 22505 - DNA, 60 bp, Homo sapiens
tggatcttctgacgctgccaacatccatgtaaggaaacttgaaggtgcctcagctccagc

SEQ ID NO: 22506 - DNA, 60 bp, Homo sapiens
cctggtctcgtaacttacttgctgtgttactgtaggcaaatcgctgaactcttccaggcc

SEQ ID NO: 22507 - DNA, 60 bp, Homo sapiens
gccaccagagagttcattgagatgtggagattgcttggcagagaagtaccagaacacatc

SEQ ID NO: 22508 - DNA, 60 bp, Homo sapiens
gccagactagatcatccgaatcagctcttgaccagctcaagattgagaattcaggctggg

SEQ ID NO: 22509 - DNA, 60 bp, Homo sapiens
tttcatcttcccttcacgggatctgggaaagggcatgagatctggagccagacaaaccta

SEQ ID NO: 22510 - DNA, 60 bp, Homo sapiens
ccatcctgggtttacaacagtttcagatcaaaggtcaagcagacaacttgagatcccttg

SEQ ID NO: 22511 - DNA, 60 bp, Homo sapiens
ttttggaatctctagttcttcctacaggaacgagtggtgaccccaccaactcactcacgc

SEQ ID NO: 22512 - DNA, 60 bp, Homo sapiens
aaactggacagacggcctcctgcccattcggggacatggcctgggtagactggatcttgg

SEQ ID NO: 22513 - DNA, 60 bp, Homo sapiens
ggacacttgatgggctgaggttcccaccccttcacagtgttgattgctattagcatgata

SEQ ID NO: 22514 - DNA, 60 bp, Homo sapiens
tcagtggagcccagttgggcagttggaactgaggcaaagaactgaggtgtctgtattaga

SEQ ID NO: 22515 - DNA, 60 bp, Homo sapiens
ctggagactctaaggatatccgccttactcttatggaagaagtattgcttctgggactaa

SEQ ID NO: 22516 - DNA, 60 bp, Homo sapiens
ggagcctagctgtgcttgatgctgaatgcctgttttgagagtgtgagtgggatcatctac

SEQ ID NO: 22517 - DNA, 60 bp, Homo sapiens
ctgaggaggaagtcacaccatcattgccatccatgttgtgatagtcaacagaaggagtaa

SEQ ID NO: 22518 - DNA, 60 bp, Homo sapiens
aaaaccgatttcaaatcctgcctggagggaacctgctcaggaggtcctggaaggtggagg

SEQ ID NO: 22519 - DNA, 60 bp, Homo sapiens
tatagctctgttcctagcacttctcatcatccttccagcccagaatcagcggtcattctg

SEQ ID NO: 22520 - DNA, 60 bp, Homo sapiens
ttagcagattcatggttccttaggagccctcactaccctgtcttttgtactctgggcagg

SEQ ID NO: 22521 - DNA, 60 bp, Homo sapiens
aataggtaaataggactttgtcagcctttttaacttaggaaatgtctttctctagggacc

SEQ ID NO: 22522 - DNA, 60 bp, Homo sapiens
gtgctgtccctatcttgttcttggctttgttatgtcctttcccctagactgtatcccgac

SEQ ID NO: 22523 - DNA, 60 bp, Homo sapiens
gctttgtggcagcatttaagtgtggtggctccatagaagtcactatagcatggacgagcc

SEQ ID NO: 22524 - DNA, 60 bp, Homo sapiens
ttttagtacgagcagagcttcataattgtggtcactagaactgtacttaccatggacagt

SEQ ID NO: 22525 - DNA, 60 bp, Homo sapiens
agacaagcgcctggtggaggagaaagtgaaccaactgaaggaggaagttcggctgcagta

SEQ ID NO: 22526 - DNA, 60 bp, Homo sapiens
agctttgacaatccccaaggggcagtgttaccttactccttcactgcttcttagaaggta

SEQ ID NO: 22527 - DNA, 60 bp, Homo sapiens
tgttgagggcaagcttcattgttgatagtgcaaagtgtcgctgttgtgatgtgtgtttat

SEQ ID NO: 22528 - DNA, 60 bp, Homo sapiens
gtttgcgtataaggaactactggtaatagccaagaaaatttggaggtgcagagaacatgc

SEQ ID NO: 22529 - DNA, 60 bp, Homo sapiens
taacatagagctgccattttccttttaccatgcatcatctctttacagtaggcctggcag

SEQ ID NO: 22530 - DNA, 60 bp, Homo sapiens
cctggctcagctctttatggacacaggttatgaagaagtggtaaacgagtatgtgtttcg

SEQ ID NO: 22531 - DNA, 60 bp, Homo sapiens
gcaaaaggaagcatcaatagtggacccagaggcagtgcataaaaccttaggatagattcc

SEQ ID NO: 22532 - DNA, 60 bp, Homo sapiens
attcttgtcccgccaagcctgactgtgagctgttgtgacgttgccactttgctcggaaag

SEQ ID NO: 22533 - DNA, 60 bp, Homo sapiens
gagcttataggcagctgtggccagtgaaaatatggggttgtacagttagttcctagaatg

SEQ ID NO: 22534 - DNA, 60 bp, Homo sapiens
cctccctaccagtgactaaaggaggcagaataggagtatctatgcaagcttttaacactg

SEQ ID NO: 22535 - DNA, 60 bp, Homo sapiens
cctagtaggattgtgctttcaatcagagactctgccttcaatctgagtgacatcagactc

SEQ ID NO: 22536 - DNA, 60 bp, Homo sapiens
ctacatgcagctcatcattgctgtcctcttcccatgctacaggtgagaccagacacaaag

SEQ ID NO: 22537 - DNA, 60 bp, Homo sapiens
ccatatgggttttaatgataatggtgtatgactgctttacatgagtccttatgcatccag

SEQ ID NO: 22538 - DNA, 60 bp, Homo sapiens
tgagacaggaacactcccaccacagtgacctgcctctgcacacagccagaatgtagctga

SEQ ID NO: 22539 - DNA, 60 bp, Homo sapiens
ttgtgcgacctgctccacctccaagtcaaaagaagtcatgttcaggtaaaactcgttctc

SEQ ID NO: 22540 - DNA, 60 bp, Homo sapiens
gccctattcccagctgtgagaggcaattctccaggtttctaagctttagacctatgccct

SEQ ID NO: 22541 - DNA, 60 bp, Homo sapiens
tgctggcccagtatgagtccattcagttcatgccgtgacaattttcttggaactcctttt

SEQ ID NO: 22542 - DNA, 60 bp, Homo sapiens
ggtgcaaaacttcagattagaagacacttgtcagactcagaggctcatccaactccacgg

SEQ ID NO: 22543 - DNA, 60 bp, Homo sapiens
gcctatcctgtaagtgctgtgaatgtacagaatggagagatccttgtgaactggagggtc

SEQ ID NO: 22544 - DNA, 60 bp, Homo sapiens
gttggggccttcctacatactcttgcgaccattaggctcttcttgggtgagttgcaagtt

SEQ ID NO: 22545 - DNA, 60 bp, Homo sapiens
gacgcccagacttaggatgtacgcgacttgtgtgtcaacagagaagttggatgctagaat

SEQ ID NO: 22546 - DNA, 60 bp, Homo sapiens
cctccaaattccaagcttcctgtgtgcgagtgaggctagcaaaccacattgagtaggaca

SEQ ID NO: 22547 - DNA, 60 bp, Homo sapiens
catgctttctcacaggctgtgttgtgacagggcatccaccactctacctttaatctgacc

SEQ ID NO: 22548 - DNA, 60 bp, Homo sapiens
ttccatgaggtgcttggaacatttggagtgctctgtgcgagggacatacagtgatatagg

SEQ ID NO: 22549 - DNA, 60 bp, Homo sapiens
gcgctatacttgaggaaatggcactcagttcttcaataaaacaactcatcattccgttgt

SEQ ID NO: 22550 - DNA, 60 bp, Homo sapiens
ctgtttttgattgtcagtcctatggggcttaagtcctggaacatcccattgacctccagg

SEQ ID NO: 22551 - DNA, 60 bp, Homo sapiens
cacttgctaacctccatgaagccctgggacttgggcagctgaaggtgcagaaaagatgcc

SEQ ID NO: 22552 - DNA, 60 bp, Homo sapiens
ccaggctttatgacaactaattcctgctggagagaagagtcctgatgatgggctgtctcc

SEQ ID NO: 22553 - DNA, 60 bp, Homo sapiens
cttctggaagcatgttgctcatgttcaacacggccatgaggttgttgacatcactgttga

SEQ ID NO: 22554 - DNA, 60 bp, Homo sapiens
ggctcacgctggctgcacttgcttgaaggaggctgatttaagggttctaataggaagaca

SEQ ID NO: 22555 - DNA, 60 bp, Homo sapiens
aacactctggatcctctgtgcccactcagaaagtttagggagaaaagctgaaaaggcctt

SEQ ID NO: 22556 - DNA, 60 bp, Homo sapiens
cctaagcagacaggaagctacaagaaacaccagtctgaagcagtgcctcaggatctcaga

SEQ ID NO: 22557 - DNA, 60 bp, Homo sapiens
ctcagtagcagagatactaatatgcatcctaccagtgttgttggataagtgtaaaagtgc

SEQ ID NO: 22558 - DNA, 60 bp, Homo sapiens
ctgagtttagatcatacccatttactagacattctcatacatctctccagtgtggttttc

SEQ ID NO: 22559 - DNA, 60 bp, Homo sapiens
agagaagggacaagtcattgccatccctcagcagcagcttcaaggtcattcgtaagtgag

SEQ ID NO: 22560 - DNA, 60 bp, Homo sapiens
aagcttactgggctagatacccacctcagcacccagcttgataacaggaggaaacagctg

SEQ ID NO: 22561 - DNA, 60 bp, Homo sapiens
ctcctcagatgaaaccatacttgagatactcagaacatactacactatactcaactgggg

SEQ ID NO: 22562 - DNA, 60 bp, Homo sapiens
ccacacaacttgggactcatggtcagcctcaccttccacattggctaaaactctacagga

SEQ ID NO: 22563 - DNA, 60 bp, Homo sapiens
cttcagtgagcttcaaaatcacctgctgagcttgtttgaccacagacttgtgggctccac

SEQ ID NO: 22564 - DNA, 60 bp, Homo sapiens; identical to SEQ ID NO: 4855

SEQ ID NO: 22565 - DNA, 60 bp, Homo sapiens
gctggctccaatagggactgcttagacctgtttacacagttacacttttggctaacctgg

SEQ ID NO: 22566 - DNA, 60 bp, Homo sapiens
gaaatgtgtacctagcagcagatctcttgcaggaagaagtctgagcagtttggcacatag

SEQ ID NO: 22567 - DNA, 60 bp, Homo sapiens
cctaagctgtccagaaccctatgactgagtcagctggtaattcctggtaagaacttggcg

SEQ ID NO: 22568 - DNA, 60 bp, Homo sapiens
gtaaaacacagttcctggttggattaaggaaggcacacggtgacaggatttggcagccca

SEQ ID NO: 22569 - DNA, 60 bp, Homo sapiens
tgttcaaccttgtggccatcatcagcaacctggggctgtgcaccttcctggtgtttggac

SEQ ID NO: 22570 - DNA, 60 bp, Homo sapiens
ataggctctgatttccggggcagcctttcagatgcggcagacatacaacacctgtacttt

SEQ ID NO: 22571 - DNA, 60 bp, Homo sapiens
ggaagtggcctttgtcaggaccctgtgaggtcttgagtggatctgcttttcccaagatat

SEQ ID NO: 22572 - DNA, 60 bp, Homo sapiens
ccgggttgctaggagattgtggcagcagctgtttgctctgaatcagacagaaaagttgtc

SEQ ID NO: 22573 - DNA, 60 bp, Homo sapiens
ctctggcagtgtctggtcaagaagaggatgtcaacgtggcagcctgtatgcatttgtctt

SEQ ID NO: 22574 - DNA, 60 bp, Homo sapiens
tccagagtctaagacctccaccatctgctccattaggcactggatttcagtagcactact

SEQ ID NO: 22575 - DNA, 60 bp, Homo sapiens
tggccccaagaaagtgagagtgagtgtctttgtttatgttgctatgaaaggacacctgga

SEQ ID NO: 22576 - DNA, 60 bp, Homo sapiens
aactggaggaagcgaagcatcaaggccagaggaggccacatgctgaccagcctgatgagg

SEQ ID NO: 22577 - DNA, 60 bp, Homo sapiens
tggaattctttaccattcagaaaccagcctcccctctgaagaatcccaaggcccagctgg

SEQ ID NO: 22578 - DNA, 60 bp, Homo sapiens
gtgactctagaaagctgtggaagagactgataacaatgctgttggggtaggtagattatg

SEQ ID NO: 22579 - DNA, 60 bp, Homo sapiens
gcatcgcatttgtactctggaacaagttactctgcttgctcttcctgcagttagggaatg

SEQ ID NO: 22580 - DNA, 60 bp, Homo sapiens
ctgcaatggctgttggaataagtacacagagtccccaaagactagtgaggccaagatgtg

SEQ ID NO: 22581 - DNA, 60 bp, Homo sapiens
atagaatgctagacgtgggttttctggttccacccttgtgcattggaaggagcagactat

SEQ ID NO: 22582 - DNA, 60 bp, Homo sapiens
agatccctggtgtctggagctgagtggccgggcatcggtcccaagcatcaaagcctttgg

SEQ ID NO: 22583 - DNA, 60 bp, Homo sapiens
tctgacctcagcagggtcatactggctggaggtgtagaaggaactggtgggtagttcatt

SEQ ID NO: 22584 - DNA, 60 bp, Homo sapiens
gtgtctagggcatgcattagcagccctcagatgcttgcgcattatgggatgtttcttgct

SEQ ID NO: 22585 - DNA, 60 bp, Homo sapiens
ttcagaatggggatcttggtgatctggcttgtctggacatctacgacaaatagctacaag

SEQ ID NO: 22586 - DNA, 60 bp, Homo sapiens
atatgacacgtggcaccagctgtacactgcccttctggttagtgttgttcttggtcaagg

SEQ ID NO: 22587 - DNA, 60 bp, Homo sapiens
gaatgtggatgagtttcttagttcagaattgctcaggaattgggacattatgtaggtaag

SEQ ID NO: 22588 - DNA, 60 bp, Homo sapiens
tgggctactgagatacctggcacagtcagtgactttgtctattcctacaggatctaattg

SEQ ID NO: 22589 - DNA, 60 bp, Homo sapiens
gtttcttaacccagtgcttggcatataacaagaactcaaaacctcttcctaaagttaaag

SEQ ID NO: 22590 - DNA, 60 bp, Homo sapiens
tactgctgagatcatcaccgtatatgcccctgaaggagtggagtacagtggttgagttgg

SEQ ID NO: 22591 - DNA, 60 bp, Homo sapiens
tagtgggtgacctgaacacttggctacttgccattgcgattgccaaatctgccattccct

SEQ ID NO: 22592 - DNA, 60 bp, Homo sapiens
gtaagcttcagtgattggtcttttctctggacacccttatttggaggttggcctaaagat

SEQ ID NO: 22593 - DNA, 60 bp, Homo sapiens
ccgctttgtgccacaggtcatgattgtggatgagtttactcttaacttcaaagggactat

SEQ ID NO: 22594 - DNA, 60 bp, Homo sapiens
gccccacagaaacagctcaggggtccatgaacagaaggatagctacataaactgtcatgc

SEQ ID NO: 22595 - DNA, 60 bp, Homo sapiens
gacttctcccagcaaagcagagtccgtatcctagtgtgttgctatggaaagaatggcaac

SEQ ID NO: 22596 - DNA, 60 bp, Homo sapiens
gtagctctgtagactggtcctatcatgaggatacccaggggacccacccttagtaatcat

SEQ ID NO: 22597 - DNA, 60 bp, Homo sapiens
aagcccatgatgttagcccggatcagtcctgtttctcaaggtctctcctacctgagatgt

SEQ ID NO: 22598 - DNA, 60 bp, Homo sapiens
ctggtggagtgtgaaagtcaacacatcttttgtgcatagagaaacacattaatttcctgc

SEQ ID NO: 22599 - DNA, 60 bp, Homo sapiens
gtcaggaatcagtgtcttgtgttggaaagccaggaggaagaccagagtggctgaagcatt

SEQ ID NO: 22600 - DNA, 60 bp, Homo sapiens
cttcaggaaatgtgtacgctggatattgtatgacagtgcggaattattcatttaggcatg

SEQ ID NO: 22601 - DNA, 60 bp, Homo sapiens
ccatgtgacgtttgtgacagctaggatccccttttcactggcttagcgatctgaaagtcc

SEQ ID NO: 22602 - DNA, 60 bp, Homo sapiens
atagtccctctctgaaagcttgtgcatcatacaaaacagtgcagataatggtaaatgctt

SEQ ID NO: 22603 - DNA, 60 bp, Homo sapiens
cttctaacccagcccccgctttgactgcgtgttgtgcagctgagcgcgaggccaacgttg

SEQ ID NO: 22604 - DNA, 60 bp, Homo sapiens
tgtgcatcctcttcctcggcttccgcccctttccggcggagtggagatcctattcagagg

SEQ ID NO: 22605 - DNA, 60 bp, Homo sapiens
ctctaatgtctgcaaagcacttgcgtatgtaatgatgctcagtgtcataggagcaggcag

SEQ ID NO: 22606 - DNA, 60 bp, Homo sapiens
gtccctgggtggcacgggaggatggactgacttccaggacctgttgtgtgacaggagcta

SEQ ID NO: 22607 - DNA, 60 bp, Homo sapiens
caaaccactataatcggtattatctcccgtgagatgcgtctcgccactctctgcattaat

SEQ ID NO: 22608 - DNA, 60 bp, Homo sapiens
ggaggctgtattaaccctgggaggtacagctgcaaacacagacttgttcaggctaagttc

SEQ ID NO: 22609 - DNA, 60 bp, Homo sapiens
tacaatgatgcatggcagtgacagctgacctcaacgtggggaagacacaggggttgttga

SEQ ID NO: 22610 - DNA, 60 bp, Homo sapiens
gcaagagaacccgataaagatcattgctagagacgtttaatgttacctgtagcggtacac

SEQ ID NO: 22611 - DNA, 60 bp, Homo sapiens
ggatgggatgggttccagaggtattcctctcttaaatgcaagtgcctagattaggtagac

SEQ ID NO: 22612 - DNA, 60 bp, Homo sapiens
cagagtggatatagggaggtggtaggaagtgagaggagatgaagtgcacacgacagtttc

SEQ ID NO: 22613 - DNA, 60 bp, Homo sapiens
cagactgcttgacgatggttggctcttttgggttctcaagatgggaatactatgcccatg

SEQ ID NO: 22614 - DNA, 60 bp, Homo sapiens
aagcagctgacttacaacagcagttcgtacatttcctggactgttgggatgtatcatcta

SEQ ID NO: 22615 - DNA, 60 bp, Homo sapiens
gtctccggtcatctccggcgcttctagggttggttcccgtcatctccgggagccgtggag

SEQ ID NO: 22616 - DNA, 60 bp, Homo sapiens
gtgatcggctgggagaggccatattaccctgactcctgaagttctggaacagctcttcct

SEQ ID NO: 22617 - DNA, 60 bp, Homo sapiens
cgcttagttggcagtgggttgcatgcggaattgttggcatcttcagccatttatcgggaa

SEQ ID NO: 22618 - DNA, 60 bp, Homo sapiens
tctcttcaacgaggagaccaagattgaggtgctggtggatgtcctggagaaaaccgaact

SEQ ID NO: 22619 - DNA, 60 bp, Homo sapiens
tacaattccaacagatcactctcactagccaatatgagacacagtcaatttccctaactc

SEQ ID NO: 22620 - DNA, 60 bp, Homo sapiens
ctgtggctctgtgcgtggagtagagtgggaagacgagagggatgacaaatgtccaggcaa

SEQ ID NO: 22621 - DNA, 60 bp, Homo sapiens
ctgcatgcctggtcatcaggaggttgagaaaagccttgaaagttgtgaagcactgagcag

SEQ ID NO: 22622 - DNA, 60 bp, Homo sapiens
aggcagctttgagtggcagcgtggtgctagcagcttcagcggaacagggtgagagttaat

SEQ ID NO: 22623 - DNA, 60 bp, Homo sapiens
cacttacaggagtccctaactgtgccacccttggaatgggttagtgtacaggctcagaat

SEQ ID NO: 22624 - DNA, 60 bp, Homo sapiens
tgacaccatgtcaccctcaccaggactcgtctctccattcccgtcagagtttgctttgat

SEQ ID NO: 22625 - DNA, 60 bp, Homo sapiens
gctagcattgtcagacttcaatctcctcatggctctggccgtcctgttttaagcatgata

SEQ ID NO: 22626 - DNA, 60 bp, Homo sapiens
cactgcctgcctcttgcggaactgggttacaccctggcactgttctgatccaagcatatt

SEQ ID NO: 22627 - DNA, 60 bp, Homo sapiens
ccagtcttttgtggccatgaacacttctaaccaaggcaaggtgagcagtaacccagcaga

SEQ ID NO: 22628 - DNA, 60 bp, Homo sapiens
ggcaaaccctgatgatgtaacacctgcgatgagacatcggactctccggaactttctcat

SEQ ID NO: 22629 - DNA, 60 bp, Homo sapiens
ttgtagccaatgtgttcaaatgcatgggaggacgtaaacacttcataatttcctggaaat

SEQ ID NO: 22630 - DNA, 60 bp, Homo sapiens
ctgatagattgtgctgatgaacctggttgtgggcaattgaattcttgtcttcccactacc

SEQ ID NO: 22631 - DNA, 60 bp, Homo sapiens
ggtcctacagcactgtgtaggctgcatctgtttcgtgctggtcctgttgacttgtatgat

SEQ ID NO: 22632 - DNA, 60 bp, Homo sapiens
catgtttggcgggcatgtgagtgcacaagatggaaagagcgattggagcatcctggtata

SEQ ID NO: 22633 - DNA, 60 bp, Homo sapiens
cattttcaccatccatttcgaaggctcaacctggtgctccaccttcctcactgatgggaa

SEQ ID NO: 22634 - DNA, 60 bp, Homo sapiens
aaagacacaccaagaaaaggcagagaggccaggatggtggaagagggccagacaaagaag

SEQ ID NO: 22635 - DNA, 60 bp, Homo sapiens
cagctactcttcgaggaaggactgtcagatggctctgaagcgagtggactatgcccgcct

SEQ ID NO: 22636 - DNA, 60 bp, Homo sapiens
actaatatgccggcgtttaagcctgtgcccctctgctgggtgtaactgcgctgaaataaa

SEQ ID NO: 22637 - DNA, 60 bp, Homo sapiens
ctgttgctctcttatacaccaagggatgggattggtgatgtaaattggcagggactgcag

SEQ ID NO: 22638 - DNA, 60 bp, Homo sapiens
gtttttgagggtattcccaacttgtgatcttctaccactttagagacattcaagtaatag

SEQ ID NO: 22639 - DNA, 60 bp, Homo sapiens
attccgcagtgctttcagtcttccatgtgagctcgtgctgctgtgacctgctatatgtag

SEQ ID NO: 22640 - DNA, 60 bp, Homo sapiens
gctgcataattgcgcataacttccatctcccttactggcttgtaggcagaggaaactgta

SEQ ID NO: 22641 - DNA, 60 bp, Homo sapiens
aactactgtctcccctggacgagtcccgtgccagcatcacctcggtcaccagcttctctc

SEQ ID NO: 22642 - DNA, 60 bp, Homo sapiens
actggcaggggtctttgagtcacatagagaagccgttgaaggaggtagggcaggttatct

SEQ ID NO: 22643 - DNA, 60 bp, Homo sapiens
gtggaaaagacccagctgtaattagacctccactgtgtacttagctggaagaacatgtta

SEQ ID NO: 22644 - DNA, 60 bp, Homo sapiens
cctaacgctacctctgactcaacctgactttgtaggaaagcctacacgtagccttgtttg

SEQ ID NO: 22645 - DNA, 60 bp, Homo sapiens
ggaatcacggcagacttggagtgtttcttcaaggcaggcatctgcttatgagcaaggtca

SEQ ID NO: 22646 - DNA, 60 bp, Homo sapiens
cccacattcactgtaactaggggcatagtccattctgttaggattatatcctctccttag

SEQ ID NO: 22647 - DNA, 60 bp, Homo sapiens
ttttctggaatgttctctgtgcttacccctctgtgtgcccctccattgctcctctacaag

SEQ ID NO: 22648 - DNA, 60 bp, Homo sapiens
gtagtgtgttggtgaaatgcatgcaggaaaatgctgttaccataaagaacggtaaaccac

SEQ ID NO: 22649 - DNA, 60 bp, Homo sapiens
atgtagcagtaacaacagagggtaactacactgcaagacttaaatggtttgagcatgtga

SEQ ID NO: 22650 - DNA, 60 bp, Homo sapiens
tacagtgtaacctctggctgcagaccacacaggacaaccctaacagcctagtcttgtatg

SEQ ID NO: 22651 - DNA, 60 bp, Homo sapiens
gtttactgtcatgagtctcggctggttggcgcatgtgacctttgaaggatgaagatggag

SEQ ID NO: 22652 - DNA, 60 bp, Homo sapiens
cctgtgtctggattgtgtcactaaacatgcaacatggattgccatctcttctccatcccc

SEQ ID NO: 22653 - DNA, 60 bp, Homo sapiens
tttgtttgccaatgccccagtcctagagacttgtcctgacagtgccgcacacctactttt

SEQ ID NO: 22654 - DNA, 60 bp, Homo sapiens
gatcactaacaggtgatgggctttgtgcccactccagagatattgtgggagacaaattct

SEQ ID NO: 22655 - DNA, 60 bp, Homo sapiens
taacgacagtagacgttacatagccttgactctgtacagacctcatcctgcatccttacg

SEQ ID NO: 22656 - DNA, 60 bp, Homo sapiens
gtggcagctataactgggactacctgctgagctggtgccctcagttccaaccactggcca

SEQ ID NO: 22657 - DNA, 60 bp, Homo sapiens
tggtggaatttgcagtcagacccaagctggtttgggccaatacacttgaccttcttatga

SEQ ID NO: 22658 - DNA, 60 bp, Homo sapiens
gcagaagactgttacactagggggctcagcaaattcaatcccacccttaccaattgagcc

SEQ ID NO: 22659 - DNA, 60 bp, Homo sapiens
aatgcttcttttggaaccctggtccagtccctcgtctaagcaggagtgcccttatatgct

SEQ ID NO: 22660 - DNA, 60 bp, Homo sapiens; identical to SEQ ID NO: 4855

SEQ ID NO: 22661 - DNA, 60 bp, Homo sapiens
gagctgtcgagccacagtgcagttctcttctcaccaaagctcaaatgagaatcagcttcc

SEQ ID NO: 22662 - DNA, 60 bp, Homo sapiens
cgccacctgtcccaggaagagttctaccaagtctttggcatgaccatctctgagtttgac

SEQ ID NO: 22663 - DNA, 60 bp, Homo sapiens
ggagcctgaaataacctgtagtttcgaatgcaggccctgatttactggcgttgtcagttt

SEQ ID NO: 22664 - DNA, 60 bp, Homo sapiens
aatcgggcttcagttctatagccaagaagagatcagctgctgaaaccaccagtgggtacc

SEQ ID NO: 22665 - DNA, 60 bp, Homo sapiens
attggcagcaggtgagcaatttcacccagtgtcttctgcctccctctgcgttggtatctg

SEQ ID NO: 22666 - DNA, 60 bp, Homo sapiens
gaaacaccttaatctgtggttactaatccagcaaattcaaggaaccaggctatgactaag

SEQ ID NO: 22667 - DNA, 60 bp, Homo sapiens
tatacctgacacactcatcgtatgggctctgcaaagggatattccccaacctgtccttcc

SEQ ID NO: 22668 - DNA, 60 bp, Homo sapiens
ttcctccggattcgcgttcgtggccagcgagcctctcgccttcaagcccctgtccttgtt

SEQ ID NO: 22669 - DNA, 60 bp, Homo sapiens
actttaagacagcctagagttctggacgagcgtgtttggtagcagggatgaaagctaggg

SEQ ID NO: 22670 - DNA, 60 bp, Homo sapiens
ggccttactctgaaattaggaaactaaagaagtgaccagaatggagactaggtagagaca

SEQ ID NO: 22671 - DNA, 60 bp, Homo sapiens
ggagcttcatctgcatctcaggccaggatgtagtcacatgttcacctctgagtttggaag

SEQ ID NO: 22672 - DNA, 60 bp, Homo sapiens
aggtcatcattgtcatctacctgtccgtggtgggtgccctgttgctctacatggccttcc

SEQ ID NO: 22673 - DNA, 60 bp, Homo sapiens
gtggaagccaccccatgaggaggtgttaatagcagcatggtttcacttttggtaatcagg

SEQ ID NO: 22674 - DNA, 60 bp, Homo sapiens
aattttgtggcatcttcctctagtccttcccacctccagtcatcagccccactctgtctt

SEQ ID NO: 22675 - DNA, 60 bp, Homo sapiens
tctggtgtcagagcggctggagctctcggtcctatacaaggagtatgctgaagatgacaa

SEQ ID NO: 22676 - DNA, 60 bp, Homo sapiens
gtctgagtaccattcactggagttgctgcttaggtctgggacgtgtgtgtgactcttaac

SEQ ID NO: 22677 - DNA, 60 bp, Homo sapiens
tttaacagtgtatgccagggaacacacattctctttcgagaattcagcttcgtccaagcc

SEQ ID NO: 22678 - DNA, 60 bp, Homo sapiens
ttcaagttgcatgcttgtcaacatggggactgacctggcttccacgtcaccatcgctaca

SEQ ID NO: 22679 - DNA, 60 bp, Homo sapiens
agcccacacatgacatcctgcagatgctcagtgacctccaggagtctgtggccagctctc

SEQ ID NO: 22680 - DNA, 60 bp, Homo sapiens
atgagtgcgggtaggagccgtgaggtgcttctctgctgtgacaaacgaccctgtctgtcc

SEQ ID NO: 22681 - DNA, 60 bp, Homo sapiens
tcccctgagtccatgattctgctgggctccatcgagcgttcacaggtggtggcattgttg

SEQ ID NO: 22682 - DNA, 60 bp, Homo sapiens
ctcaggctcgttctagggactcattcatgttcactcactgtacactcatctctggaaatg

SEQ ID NO: 22683 - DNA, 60 bp, Homo sapiens
cggtggcatctctgcccgtgaatttctgtatgtgtgtgctgttacctcacctgcagacat

SEQ ID NO: 22684 - DNA, 60 bp, Homo sapiens
cccttaggacagaaaattgcatgtgaggtgggataatcgagtttcagtgacccacgtcag

SEQ ID NO: 22685 - DNA, 60 bp, Homo sapiens
cagttttccgacagctcaacacggccatcgccgtatcccagatgtcctcaggccagtgcc

SEQ ID NO: 22686 - DNA, 60 bp, Homo sapiens
ctacctcaccaacctcgctcatcatttggcccttatccttccttgtacacctaccttcag

SEQ ID NO: 22687 - DNA, 60 bp, Homo sapiens
cctgtacatctgttcacgtgcttgtgtccaggtgtgacttgtaaactgtctagtgtttgc

SEQ ID NO: 22688 - DNA, 60 bp, Homo sapiens
ggatctggaaggctgtcttcgctctgcttcccagctaacaaacagatgtgttcccagaag

SEQ ID NO: 22689 - DNA, 60 bp, Homo sapiens
tcttactgattcttcactgagctttgctagtataagcagagttccaagtctcccctaggg

SEQ ID NO: 22690 - DNA, 60 bp, Homo sapiens
agccctgacacacaaaggcattttgtggctgcagaggaaatgggttggctctgaacaaag

SEQ ID NO: 22691 - DNA, 60 bp, Homo sapiens
agcttgagtttggctgaactgtcctttctcaacagaagcgcttttgcaattgatcccggg

SEQ ID NO: 22692 - DNA, 60 bp, Homo sapiens
attcaaactgttggagtgagccaagtggacagaccctccatgagtgcactttcttccaag

SEQ ID NO: 22693 - DNA, 60 bp, Homo sapiens
ctcagagtgcagatccatgcaaattgtcgcatccgacgggtttacttctcagacagactc

SEQ ID NO: 22694 - DNA, 60 bp, Homo sapiens
aaccatcacgagagtctgcagcacaacttttaacaaagctagaacagttttggcttctta

SEQ ID NO: 22695 - DNA, 60 bp, Homo sapiens
gcacgctccaccttgcactcaacttggccttttgattgcacaagcctttgttttcagtcc

SEQ ID NO: 22696 - DNA, 60 bp, Homo sapiens
tagttgtacagccactctggccaattccatttcctgtccctctgtggttctgactggaga

SEQ ID NO: 22697 - DNA, 60 bp, Homo sapiens
ggagcagtctgttgccagtaatgttccttgtgtgccattaaaccacctccagatgagtgg

SEQ ID NO: 22698 - DNA, 60 bp, Homo sapiens
ctcaagatcataggcctcagactccaactggtgttatcccagggttccgtttgctgaagt

SEQ ID NO: 22699 - DNA, 60 bp, Homo sapiens
cagtagcaacgatgggttacatggagccatgaaacctccttctggcctcccttgtgatta

SEQ ID NO: 22700 - DNA, 60 bp, Homo sapiens
ttcctgccacagtcaccccaactgaaattgcctttctcttcggccagtgttagcctctga

SEQ ID NO: 22701 - DNA, 60 bp, Homo sapiens
ctggcatactgtgtgtatagcactgccgattggctaggccactgtgtctctgctacaaat

SEQ ID NO: 22702 - DNA, 60 bp, Homo sapiens
cttaacgctgttctcagttggaaaatgtcagccctccacacctgtttggatgtgaagtgc

SEQ ID NO: 22703 - DNA, 60 bp, Homo sapiens
tagcagcctgctccttttcaatggcgaaactgtcggcattagcagttttgggtaagctgg

SEQ ID NO: 22704 - DNA, 60 bp, Homo sapiens
agagtgcagatccgtcacagactaaggagatggcaggcattgacagcttcactccatgaa

SEQ ID NO: 22705 - DNA, 60 bp, Homo sapiens
aatgagcaagaggcttgtgtcctcccaagaacatgagggagttcagaagggagctatagc

SEQ ID NO: 22706 - DNA, 60 bp, Homo sapiens
ccaggttcctgtgactttgaaaggactgaggaagcagagagcatttggggacttcactga

SEQ ID NO: 22707 - DNA, 60 bp, Homo sapiens
gcagcagctctcctccccactcacaggccctgcagtgctcatttggaattcctcccaaga

SEQ ID NO: 22708 - DNA, 60 bp, Homo sapiens
gtaagagaaggtcctggaacagagactaaatcccacgaaactgacattgttaaacacact

SEQ ID NO: 22709 - DNA, 60 bp, Homo sapiens
aagcatctccagaggcccagtagacatgcaccacctgcttgaacgttcgctgagtgaatt

SEQ ID NO: 22710 - DNA, 60 bp, Homo sapiens
gccgcctcctaggtcttggcaaagaggcaagctgacgatagacatctacctatattgtta

SEQ ID NO: 22711 - DNA, 60 bp, Homo sapiens
ccctcaaagtccacctacctagaaaccaagcccacggtcttggccgtgaccctgataata

SEQ ID NO: 22712 - DNA, 60 bp, Homo sapiens
tagctcgtgactgcacggtttacgccacaaaagtgctcttgacatccgtgacaccgtttt

SEQ ID NO: 22713 - DNA, 60 bp, Homo sapiens
cagctgttttatcatcctacatgctaccaagctgtaggtgtcccattaagtcctgctatt

SEQ ID NO: 22714 - DNA, 60 bp, Homo sapiens
cctggaaccataactgtaagttcctagctggctagggattgaagtcctggacagtgacag

SEQ ID NO: 22715 - DNA, 60 bp, Homo sapiens
agcagagaaaacccactgaaagatcgtagagtggcacatgcttacagggcattggtgcca

SEQ ID NO: 22716 - DNA, 60 bp, Homo sapiens
gctggaaatctgtgacggtaggctttctagtgtcacgaggtggtggtgactgaaggaaaa

SEQ ID NO: 22717 - DNA, 60 bp, Homo sapiens
catctagtcctgggatgaaatacgatgactcatgcaaattcagggagcacactggctgac

SEQ ID NO: 22718 - DNA, 60 bp, Homo sapiens
gggcatgaagttgccccaaagttcagcacttggttaagcctgatccctctggtttatcac

SEQ ID NO: 22719 - DNA, 60 bp, Homo sapiens
ctcagaaaaggtgtgtaaaatcctcagaagggggagcagttgattcagtaagactgcgac

SEQ ID NO: 22720 - DNA, 60 bp, Homo sapiens
catttcctgtaattgtgtataaatggactcatatagcatgtactctttggtcgggagggg

SEQ ID NO: 22721 - DNA, 60 bp, Homo sapiens
tgcaacaagttggctcttgagaatggcagtaaactgagggccctaagagtgtggtctgca

SEQ ID NO: 22722 - DNA, 60 bp, Homo sapiens
ccttttggtggagacatcctgtggtaggtacagataatccaacaagagtccccatttctt

SEQ ID NO: 22723 - DNA, 60 bp, Homo sapiens
attcctagtgttgctgatagccagtcaggccagatgagatctgatagtgacctccacgga

SEQ ID NO: 22724 - DNA, 60 bp, Homo sapiens
cttctttcagaatgggaatatatgtgtgcctcccaacatttactgttaaagtgtgttatc

SEQ ID NO: 22725 - DNA, 60 bp, Homo sapiens
tgagagcttttcttcatccagaattgccctctgggctcctttggtaacagatggagctcc

SEQ ID NO: 22726 - DNA, 60 bp, Homo sapiens
aacacaggctactgtgagagccagcatccaaccccacgcttgcagtgactcagaatgata

SEQ ID NO: 22727 - DNA, 60 bp, Homo sapiens
gtaactgtgtcccagtgaccaaattgcactcgactcgatcagctgttcatccatttcgtg

SEQ ID NO: 22728 - DNA, 60 bp, Homo sapiens
ccaagccaaatgcagccttagtgatgagagatttaattctccattgtcaccttttagctt

SEQ ID NO: 22729 - DNA, 60 bp, Homo sapiens
cagtcctagcagatgttgcatgtaaattggtagcaagtaatgattacaacccagaggatt

SEQ ID NO: 22730 - DNA, 60 bp, Homo sapiens
gcagagagggatggtgtccagagatacatcacactttacatcctatcttactgtcctctg

SEQ ID NO: 22731 - DNA, 60 bp, Homo sapiens
aagcagtcgaagcaagttgccaccttgaagttgagggatacactttgcttcatcagtatt

SEQ ID NO: 22732 - DNA, 60 bp, Homo sapiens
gtcctccgttactgtgtaatcaggacaaagaaaccttgactctgctcattcaggtgcctc

SEQ ID NO: 22733 - DNA, 60 bp, Homo sapiens
cattattgtcacatctaatgctaggcaccagaaaccatttgagccaggagtgtgaatgaa

SEQ ID NO: 22734 - DNA, 60 bp, Homo sapiens
ggcatcattaagtagaccaggtaattactgcttgtctctcaaggctgctgtctttatcag

SEQ ID NO: 22735 - DNA, 60 bp, Homo sapiens
gagtcctgaactgtgggtagaaaacacgacctggctttgtagaaaggacacagggctgtt

SEQ ID NO: 22736 - DNA, 60 bp, Homo sapiens
agatgccttgtgttttctgttatctacttctgctcgtgcagtttacttacaccttcaccc

SEQ ID NO: 22737 - DNA, 60 bp, Homo sapiens
gcatctagcccaggtatttctgagtctgacgatcatggagtgaaggccgaagaatgtgga

SEQ ID NO: 22738 - DNA, 60 bp, Homo sapiens
ctcgtttctcggacatcattgaacaaaagctacagctacagcagaagtcactgtaagctg

SEQ ID NO: 22739 - DNA, 60 bp, Homo sapiens
gacaagctctactgtgtgactggcagttcagttcagcagataggtttccagcactaatct

SEQ ID NO: 22740 - DNA, 60 bp, Homo sapiens
cccctaccagcaggactgagttgagtacccatttcctcacatccttgccagtacttcatt

SEQ ID NO: 22741 - DNA, 60 bp, Homo sapiens
caaggttggcacctctcctaacctgccacacgacagctctcacctctctaggaattgggg

SEQ ID NO: 22742 - DNA, 60 bp, Homo sapiens
caacgtggtgaccaaggacatgaggaaactgggctatgacactgggccttctgatacaca

SEQ ID NO: 22743 - DNA, 60 bp, Homo sapiens
gaaaatataagggaaagttgagaggcgtggaggttacagaggagagttctagcaaaagat

SEQ ID NO: 22744 - DNA, 60 bp, Homo sapiens
gggctaagcaggttgatgtgggttaatgtgggttatgtgggctaagcaggttgatgtggt

SEQ ID NO: 22745 - DNA, 60 bp, Homo sapiens
agtgccactacaccttctggggctggacttgtttcagcagctttggttgcactgaatttg

SEQ ID NO: 22746 - DNA, 60 bp, Homo sapiens
ttggttgtggagactgatttgctgggagaaatctgtcctgttactttctggtcatcccag

SEQ ID NO: 22747 - DNA, 60 bp, Homo sapiens
cttcctgtgaattagccagtagggtctgacacaactagtcaactaacaaggttcctgact

SEQ ID NO: 22748 - DNA, 60 bp, Homo sapiens
agtgcgcgacatggaaggtgatctgcaagagctgcatcagtcaaacaccggggataaatc

SEQ ID NO: 22749 - DNA, 60 bp, Homo sapiens
gtgatgtgagacaggtgacattatgtaaccgctgggtcttcctgacttcctctccagttt

SEQ ID NO: 22750 - DNA, 60 bp, Homo sapiens
tgtgccataactgcatagacagcacgtcttcagggtgtggtttctaagcagaaaatagca

SEQ ID NO: 22751 - DNA, 60 bp, Homo sapiens
cagggactgctggtattgatcgctacattgatgtggcagccttgaatcatcttcttgagc

SEQ ID NO: 22752 - DNA, 60 bp, Homo sapiens
ggaagcaaacgtctatggtgtggctatatcaggttatgaaggaagagcaggaatggcttc

SEQ ID NO: 22753 - DNA, 60 bp, Homo sapiens
ttgcctagtactttaccagcagaccacagttttgccctggctagaccaaccctcagaaca

SEQ ID NO: 22754 - DNA, 60 bp, Homo sapiens
gcagcagcagcatttccaatgtatgggcgagtccactgtataacaggagctttgcagaag

SEQ ID NO: 22755 - DNA, 60 bp, Homo sapiens
caagggatgaggctgtacagcaagttaaagtggaatcagaacccaactgtagtccattat

SEQ ID NO: 22756 - DNA, 60 bp, Homo sapiens; identical to SEQ ID NO: 4855

SEQ ID NO: 22757 - DNA, 60 bp, Homo sapiens
ctgtggagacaaatgtaggatttagagagagagatgcaaaaggggaagtaagagggttta

SEQ ID NO: 22758 - DNA, 60 bp, Homo sapiens
ccattcatgttcaagaaccacaggagccttcattacaggatgccagcctgaagccaaaag

SEQ ID NO: 22759 - DNA, 60 bp, Homo sapiens
cggaggcatagcatccaccctaagtaaggatttagccaggaatgacagctttccactgag

SEQ ID NO: 22760 - DNA, 60 bp, Homo sapiens
gtggagttttgatccaacttatggtggaagagccccataggaagactgttttgagtggcc

SEQ ID NO: 22761 - DNA, 60 bp, Homo sapiens
ggagaggagtgagaacgtgcagggcctgcctagcttgcgtgcttgaggaaggtggcattc

SEQ ID NO: 22762 - DNA, 60 bp, Homo sapiens
cccttcttgtctctctggcaatcttgcccttaatatccctggagttcctcatcagtgtca

SEQ ID NO: 22763 - DNA, 60 bp, Homo sapiens
ctgtgcccactgtgtctctggtgttaaacactgtcacttggtctctgaaataaggaaggc

SEQ ID NO: 22764 - DNA, 60 bp, Homo sapiens
cccgagctatggcttaagccgagaggtgcaggagaagatcgagcagaagtatgatgcgga

SEQ ID NO: 22765 - DNA, 60 bp, Homo sapiens
aatgtgtgtgcttcctcgtcccaatttccattccctggcagtgaggagcccatcgtgcca

SEQ ID NO: 22766 - DNA, 60 bp, Homo sapiens
cagcaccaaaccctgggagtccctgaagcctaacagaacaggtagaacttgcaaaaggaa

SEQ ID NO: 22767 - DNA, 60 bp, Homo sapiens
gatgacgcggcatggcaagaactgcaccgcaggggccgtctacacctaccacgagaagaa

SEQ ID NO: 22768 - DNA, 60 bp, Homo sapiens
atggatggttccgtggaaggaacagaaacaagcacttgggcgtgggttgtgactgctttt

SEQ ID NO: 22769 - DNA, 60 bp, Homo sapiens
gccaacaatatggaagtaccaatacaaggtcaaatcattcctggattcatctggagttgc

SEQ ID NO: 22770 - DNA, 60 bp, Homo sapiens
gctgatggtccaacagattgacctgcgttacgaagctcagaatctagaacacttccaggt

SEQ ID NO: 22771 - DNA, 60 bp, Homo sapiens
accttctcctcgggtcagccagatagtctggatctatggtgtgactcaagctcctcctta

SEQ ID NO: 22772 - DNA, 60 bp, Homo sapiens
aggcggtttgtgcaggaaagcacagtgccgtgttgtttacagcttttctagagcagctgt

SEQ ID NO: 22773 - DNA, 60 bp, Homo sapiens
ctatgtttgttcttcactatgatttactgtgtgccaaaggagttttgacagggtacagag

SEQ ID NO: 22774 - DNA, 60 bp, Homo sapiens
ggtggtttagctggattactaggatcaattgtggactcatacttaggggctacaatgcag

SEQ ID NO: 22775 - DNA, 60 bp, Homo sapiens
aactgcaactctgttgtcaaggtactgtgctttggttcctatagcaacactgggtgtggc

SEQ ID NO: 22776 - DNA, 60 bp, Homo sapiens
ggtcctggcagctgaacataggaggtcactggaacaagtgatagtgcagattggctttca

SEQ ID NO: 22777 - DNA, 60 bp, Homo sapiens
gaagggcttcgaccctcttttagtggaagaggctctggaaatgcaccagtgttcagaaga

SEQ ID NO: 22778 - DNA, 60 bp, Homo sapiens
gtgtcggctgagattatcaggaagatgcagcaataacatgctggtcataactgtgccaag

SEQ ID NO: 22779 - DNA, 60 bp, Homo sapiens
gtgtgtaaggggaggctgcctcactttgaaggaatggtgttggctaacaggatccatgaa

SEQ ID NO: 22780 - DNA, 60 bp, Homo sapiens
atgatgccaattcctacgagaatgtgctcatttgcaagcagaaaaccacagagacaggtg

SEQ ID NO: 22781 - DNA, 60 bp, Homo sapiens
tgtaggatccaacctcaccagcaaccttgccagcctggtctcccagggtatgattcagct

SEQ ID NO: 22782 - DNA, 60 bp, Homo sapiens
catccctggctatctcaccctagcagcttctcaagcctgttggctttagaccactgtata

SEQ ID NO: 22783 - DNA, 60 bp, Homo sapiens
ccagcgcctttgaaaagcaaggtttgtgctgcgcttccagttccgaaaagcagatgttta

SEQ ID NO: 22784 - DNA, 60 bp, Homo sapiens
ttccgtggctttactcagctccagactctgatactgccacaacatgtcaactgtcctgga

SEQ ID NO: 22785 - DNA, 60 bp, Homo sapiens
catactcactggagcatggtgggatgtaccgccctagttgaagaaatcgtgatgtaacat

SEQ ID NO: 22786 - DNA, 60 bp, Homo sapiens
ctctctcatttcagaaacggactttctcatcatgctttcctatggtgggtatgaggggcc

SEQ ID NO: 22787 - DNA, 60 bp, Homo sapiens
ccccacatggtggtctcaggataacattccaagaacgtgagagttgaagctcccaacatc

SEQ ID NO: 22788 - DNA, 60 bp, Homo sapiens
atgatttcatctccattagcctgctgtctctggctatgttggtgggatgttacgtggccg

SEQ ID NO: 22789 - DNA, 60 bp, Homo sapiens
ggatgaaaagcttgcgattgcttcccacaagaatgggcaatagtgacggctgcaaggtac

SEQ ID NO: 22790 - DNA, 60 bp, Homo sapiens
atgtcatgatgtcgacttgctaggtggggttcgctggggacgataaccagtggaattgtt

SEQ ID NO: 22791 - DNA, 60 bp, Homo sapiens
tgccacatgccatgaagcagtcctgctttgcagtctgaatcatgcgtatgatctgagctg

SEQ ID NO: 22792 - DNA, 60 bp, Homo sapiens
cattgggtatcttgtgcccaaggcctgtatttgtggagctgatgttctagtgagagacag

SEQ ID NO: 22793 - DNA, 60 bp, Homo sapiens
gtggggaagttggaaaatgcaggattcttccagtgagccagcatttcccatagctaaccc

SEQ ID NO: 22794 - DNA, 60 bp, Homo sapiens
actgtcccagcatctctaatggagcctgtgccggtgtgaggaccaggatgtcttttccca

SEQ ID NO: 22795 - DNA, 60 bp, Homo sapiens
cgtgcttggagaaccatggaagctacacccctacaggtgcatactgttctgcttttccaa

SEQ ID NO: 22796 - DNA, 60 bp, Homo sapiens
tggtttccaatcctcagtactacgttactactaagtatttaggtgccatgggaagaatca

SEQ ID NO: 22797 - DNA, 60 bp, Homo sapiens
gctatgatcaaggactcaggtccaccactttcttcacgaagtcacagaaatagccttgct

SEQ ID NO: 22798 - DNA, 60 bp, Homo sapiens
gaagcttgagagtacagtccgctatctaggcattgaagtagaagatgcgttagcgctcgc

SEQ ID NO: 22799 - DNA, 60 bp, Homo sapiens
ggtaagatgggtgccagggaaacctagtagaagctttagaagtcatccatgcaagaatag

SEQ ID NO: 22800 - DNA, 60 bp, Homo sapiens
aagtggtcccttcactctgagagagaaaatcgtggcgtgcatcccaaaccctaggccacg

SEQ ID NO: 22801 - DNA, 60 bp, Homo sapiens
aaacattctttggtggtcacaagatgtatagctgcctctgtatgtttggcgcatggaaaa

SEQ ID NO: 22802 - DNA, 60 bp, Homo sapiens
cttaatggacaatgttcaagccaggtacccatgcttgatctgtcttcacaccagacctcc

SEQ ID NO: 22803 - DNA, 60 bp, Homo sapiens
tcttgcatcttctttgcagagtcagcaaaagagtaacacaccagcaccccactcgactct

SEQ ID NO: 22804 - DNA, 60 bp, Homo sapiens
atggtttaccagctgttcacttactggatttaaggttacttgttggggaaagagcagagt

SEQ ID NO: 22805 - DNA, 60 bp, Homo sapiens
tatttaggcctcatgtgctttgaagaagctttgagagccaatgtgtcttccacgggtctc

SEQ ID NO: 22806 - DNA, 60 bp, Homo sapiens
gattcagaggctaacagttagttacttgttaatgctagtcacagccaggaggtcagaagg

SEQ ID NO: 22807 - DNA, 60 bp, Homo sapiens
gtgtgcagcaaacaacttcctccttgtaacctgagtaaagaggacctgttacagaaccca

SEQ ID NO: 22808 - DNA, 60 bp, Homo sapiens
tgctgcttttaatctacgtggtctgagaatttgtgaaaccagtgttgttagaagtgtata

SEQ ID NO: 22809 - DNA, 60 bp, Homo sapiens
ggcccgaagacacaacacagcatccacacggtgacctgtaaatcacctcggcagaaagaa

SEQ ID NO: 22810 - DNA, 60 bp, Homo sapiens
gccggggtaactggcagcaggtaggaaactatgtgaaagaatctcctgatgtcataattt

SEQ ID NO: 22811 - DNA, 60 bp, Homo sapiens
gggactcactgccggatgtgaaatccaggcgtcagctgtttcctaggcaagggcaggaaa

SEQ ID NO: 22812 - DNA, 60 bp, Homo sapiens
acccctagaaggggagttgtagccccatgaactagtttcttgtctgggtcaggaacaagg

SEQ ID NO: 22813 - DNA, 60 bp, Homo sapiens
tgactctcggaaattcactagactatctgtttctgctgttacctgattatgccatctagt

SEQ ID NO: 22814 - DNA, 60 bp, Homo sapiens
caacatctcatgggcttgcctccagttctctgcactttccaaagtgatagctgactaatc

SEQ ID NO: 22815 - DNA, 60 bp, Homo sapiens
gactgagcagtgaacttccattggttagcaccaaatagagcaagcctgagtaagctgctt

SEQ ID NO: 22816 - DNA, 60 bp, Homo sapiens
ctgtagcaagtaccatgctcttgacaggcagcatgagagcgtgactcccatgacccacct

SEQ ID NO: 22817 - DNA, 60 bp, Homo sapiens
gcagaggcacaggcatcctcagcagctgattcaggagatgatggtaaagctagctaacta

SEQ ID NO: 22818 - DNA, 60 bp, Homo sapiens
ggacactttatctacctgcacaggtggaagatatgtgggtctggaactccggtaaacaaa

SEQ ID NO: 22819 - DNA, 60 bp, Homo sapiens
gctaagatccactctgccttcgcctctgagaactaagacccttccttccaaacacttgct

SEQ ID NO: 22820 - DNA, 60 bp, Homo sapiens
acctgccaggagtgtccagcaggctcgagtgaccttgggcatgcagtgttgctcttaatt

SEQ ID NO: 22821 - DNA, 60 bp, Homo sapiens
atacacaacccatttcccctggtgagccacttggcagcatatgtaggtaccagctcaacc

SEQ ID NO: 22822 - DNA, 60 bp, Homo sapiens
gcaagaagcagaaactgactctaacacatagaggaaagggttgatcgaaaagatgttgag

SEQ ID NO: 22823 - DNA, 60 bp, Homo sapiens
gcttggaaaacttatccaacagcctgggcaagctacctctcgcatgggaaattgataaat

SEQ ID NO: 22824 - DNA, 60 bp, Homo sapiens
gagcatcatttgttgggtatggagttgcagaagttgggttgagggacactggcttctaga

SEQ ID NO: 22825 - DNA, 60 bp, Homo sapiens
cagctgtgtgatcttgggcaaggaatcctcacctcactgagccttggtttctacttccat

SEQ ID NO: 22826 - DNA, 60 bp, Homo sapiens
ctggtggatgattacgtggcctctgagggtgcagtacagcgagttctggtccctgcttat

SEQ ID NO: 22827 - DNA, 60 bp, Homo sapiens
ccattttgcagctgatgtacccatctaatagtatccaaagtaggtgcaaggtagctgttc

SEQ ID NO: 22828 - DNA, 60 bp, Homo sapiens
atcacctataagtatgagaaaggtttccatgtctcctacccctcactgcacttaggaaaa

SEQ ID NO: 22829 - DNA, 60 bp, Homo sapiens
gctgagtttttcagggcatatcacaacggcaaagtgttcagcagtgggatatcaatgctt

SEQ ID NO: 22830 - DNA, 60 bp, Homo sapiens
gcagggaggtaagtgcctgcatcccaaatcggttctaggtcaactggcctcaaactgatt

SEQ ID NO: 22831 - DNA, 60 bp, Homo sapiens
tggtttattcagatggatgtaatgctactctctgggtgttcaaggtctgcctaggtgtgg

SEQ ID NO: 22832 - DNA, 60 bp, Homo sapiens
gcactcgggatatagaaaagttgtgcagcttgactcaaagcagacagtaattgggtagcc

SEQ ID NO: 22833 - DNA, 60 bp, Homo sapiens
ctatgataaggtgataaacatggatggcttgatcttggagccaccaaactacattgagct

SEQ ID NO: 22834 - DNA, 60 bp, Homo sapiens
gatcatccttacaataggattgcggtttagcggtaatggtacacatgcaatgccagtacg

SEQ ID NO: 22835 - DNA, 60 bp, Homo sapiens
cttaacagaggcatcacgtgacaatgtcctaagcagagggtaagaaagatgatagcaaaa

SEQ ID NO: 22836 - DNA, 60 bp, Homo sapiens
ttctgaagtgatcaggccactggaggacaagttgagggctgggtcacaaaagtgagttca

SEQ ID NO: 22837 - DNA, 60 bp, Homo sapiens
gtgcatatatgaacagacatgtacaccaactgcacacatgctcacaatcttgtaggccag

SEQ ID NO: 22838 - DNA, 60 bp, Homo sapiens
cgtgtcgggtgtcacttcaccttctgtttggccgctcgatgaggtctcgtgttgagatat

SEQ ID NO: 22839 - DNA, 60 bp, Homo sapiens
tagaatgacctcagactttcaacagcaatgttgaatgccagcaaacaatgaagaagtgcc

SEQ ID NO: 22840 - DNA, 60 bp, Homo sapiens
aactcacttccatccccacattgtggaaacgtctggcagtgcttctgatttcttctgggc

SEQ ID NO: 22841 - DNA, 60 bp, Homo sapiens
aatgctatgggctatgtacgaatgataagatctggtggtcttcattgtagcagcaatgcc

SEQ ID NO: 22842 - DNA, 60 bp, Homo sapiens
caagctgagagagacttaagcataggcagaaagagggttgaagaaggcagtgtagccaaa

SEQ ID NO: 22843 - DNA, 60 bp, Homo sapiens
cctcatccaacaggattcgtctttctgagaagagacgcaaggggctcgcctgctctcccc

SEQ ID NO: 22844 - DNA, 60 bp, Homo sapiens
attttgctgtcctgaaagttggaatgaaagagaccctataagagcactgacatgtttcag

SEQ ID NO: 22845 - DNA, 60 bp, Homo sapiens
actatcagatctgcaagaacgatcgggaggaactgtacgcagtgacgtgacactggcctg

SEQ ID NO: 22846 - DNA, 60 bp, Homo sapiens
ggtgtccgcagctcagcgtccctctcccatgcactttctgaactttggtcttttaaccag

SEQ ID NO: 22847 - DNA, 60 bp, Homo sapiens
agggagcttgaagagggaatgtttgacagtcacagaaggttcctgcagcagatgcctctt

SEQ ID NO: 22848 - DNA, 60 bp, Homo sapiens
ggtgcaggaaaccatccagaatgctgcttcccgccatctgtgagatcttcgttttctcta

SEQ ID NO: 22849 - DNA, 60 bp, Homo sapiens
taaaacaaattcttaaaccggtattaccaagtcaaagaatgagcattttcacatctcgat

SEQ ID NO: 22850 - DNA, 60 bp, Homo sapiens
atgaattctatggacaggcacatccagcagaccaatgaccgactgcagtgcatcaagcag

SEQ ID NO: 22851 - DNA, 60 bp, Homo sapiens
cagtctgacctctccagtctgtggtgctttgctacaaaactgtctggattgtgtcaccct

SEQ ID NO: 22852 - DNA, 60 bp, Homo sapiens; identical to SEQ ID NO: 4855

SEQ ID NO: 22853 - DNA, 60 bp, Homo sapiens
cccagaagaagggctgatcagttcctttcaacacagcatggatgaaaacccaggttagcg

SEQ ID NO: 22854 - DNA, 60 bp, Homo sapiens
gttgatagtatcaggttccagcctgccctgctaggtcaacgtggacccagggctttaaag

SEQ ID NO: 22855 - DNA, 60 bp, Homo sapiens
ggggatacgtaatctggacttctcaaatggatgatttctaaatacgcgtcagatgaagtg

SEQ ID NO: 22856 - DNA, 60 bp, Homo sapiens
tccacctatgattcgtgtttacctggtattaggagctcagaatggaatgcataaagcttc

SEQ ID NO: 22857 - DNA, 60 bp, Homo sapiens
cccagtaatgacttggtgtgtttgctgaggtagttcggtaggactgctagagctagccat

SEQ ID NO: 22858 - DNA, 60 bp, Homo sapiens
tgcacgtttacccgcaagccgaagaagcccaactcagccaatcgcaagtgctgtcgagtg

SEQ ID NO: 22859 - DNA, 60 bp, Homo sapiens
catagtgtccactagtagcaggtaacaagtcctgcttggatactactctaagtacaggac

SEQ ID NO: 22860 - DNA, 60 bp, Homo sapiens
gtacaatctacagggacctgcacatgaagacctttgcatacatgccaggaagttggactt

SEQ ID NO: 22861 - DNA, 60 bp, Homo sapiens
tataggtgccatccacctggtaaagagagagctgtagcgcaggaatgaggttgcacatgt

SEQ ID NO: 22862 - DNA, 60 bp, Homo sapiens
ctccgagattagggagcacctgtcaggatatgttgttctatcagggttacttctgttgac

SEQ ID NO: 22863 - DNA, 60 bp, Homo sapiens
tgtcagtgagtacctggaccatcacttaactgatgctccggggtaggactgcaggtttca

SEQ ID NO: 22864 - DNA, 60 bp, Homo sapiens
gggagctggtggacagttgagagttcagccgaaacatccagagggttaggagtccgtttt

SEQ ID NO: 22865 - DNA, 60 bp, Homo sapiens
aacagccctgtccttagcactctattcccaaaccagtgcctggactggaccaacctcaaa

SEQ ID NO: 22866 - DNA, 60 bp, Homo sapiens
tgggtttcaggagaggaggtggcctctagggtgaggctagggattaagtggagaaacaaa

SEQ ID NO: 22867 - DNA, 60 bp, Homo sapiens
ggctatgaaagtgcacgttaaacctgagcgcctttacctttagatgagtgctttggcccc

SEQ ID NO: 22868 - DNA, 60 bp, Homo sapiens
ttagcaaccaagggacactgggtcaaagacgaggaatcaggacgtcggtgcctagtgact

SEQ ID NO: 22869 - DNA, 60 bp, Homo sapiens
ccacaccatgtctgtcacattagtgaaccctgctattgtattgcaagatgagccgtggac

SEQ ID NO: 22870 - DNA, 60 bp, Homo sapiens
ggaactgcagcaaatgggagaagtatgcatggatttcacaggtaacaggattacgtgggc

SEQ ID NO: 22871 - DNA, 60 bp, Homo sapiens
gaggctatccatcattatgctggctagatgcgcttctgaagaagccggattctgatgttc

SEQ ID NO: 22872 - DNA, 60 bp, Homo sapiens
ccttcctctgcatcccatggtatattagcaaagtagtttacagccctgtacagccttaca

SEQ ID NO: 22873 - DNA, 60 bp, Homo sapiens
ccttgatgctggtctctgcacacatatgcttggttacttgcatgcattcattggttgttc

SEQ ID NO: 22874 - DNA, 60 bp, Homo sapiens
cttgttttattccacatccgtccatccctctatctatccagcaatccatcagcattcatt

SEQ ID NO: 22875 - DNA, 60 bp, Homo sapiens
aactgctcagtgagagggagcctccctgctaccccagtggatggtagtgtgaaggataaa

SEQ ID NO: 22876 - DNA, 60 bp, Homo sapiens
cggaaaacagaagtcaaccttcctctgtcagtccaaattacctctatgcctcaagccaac

SEQ ID NO: 22877 - DNA, 60 bp, Homo sapiens
tgaggttggggatgaaaatgccggtaccgtcagtgcacagccctgttccagacagtgctg

SEQ ID NO: 22878 - DNA, 60 bp, Homo sapiens
caagagagggctcaaaacccaggttcatggaaggcaaaagacacagatggggatattaat

SEQ ID NO: 22879 - DNA, 60 bp, Homo sapiens
ctactctagcagcacagtgaagagtgatgaagcttgcctgagggtgtggagctgggtctt

SEQ ID NO: 22880 - DNA, 60 bp, Homo sapiens
caaatacagaggagacacaagccaggctgctgatgattcagcttcaaccactggaagcag

SEQ ID NO: 22881 - DNA, 60 bp, Homo sapiens
gccatgacatttcatctgggtggtctgaatattaaagctcttcatttctggagatggggc

SEQ ID NO: 22882 - DNA, 60 bp, Homo sapiens
tgtgcaggcaaagttgagagccactggctttgctaatgagcaatgctgtattggcagcat

SEQ ID NO: 22883 - DNA, 60 bp, Homo sapiens
gtgcctctggagtcagaactctggtggtatttccctcaatgaagtggagtaagctctctc

SEQ ID NO: 22884 - DNA, 60 bp, Homo sapiens
acacatttacacaagacccaatacatgctctctacataaaacccaccttaatgtaattac

SEQ ID NO: 22885 - DNA, 60 bp, Homo sapiens
cattgatgggaggtgcagtcatctcaaaggctgtctgttgatgctgtctgtttgccagga

SEQ ID NO: 22886 - DNA, 60 bp, Homo sapiens
catttcgtttgtcaactagcaggcttcatagtggggtgaatgggctttgattgtacttgg

SEQ ID NO: 22887 - DNA, 60 bp, Homo sapiens
tcatgtaggtatgttctgcaaatgtggtatccaaaggtcaggccatatctgtatcttggg

SEQ ID NO: 22888 - DNA, 60 bp, Homo sapiens
gtttctgttttctatggacagacctgataaactggagaccctaaagcaggaatacccaaa

SEQ ID NO: 22889 - DNA, 60 bp, Homo sapiens
cccatgcccattctgagcagaaagctgtactcttcacatgtccttgcttcaagaaactgg

SEQ ID NO: 22890 - DNA, 60 bp, Homo sapiens
ttcttccctcaagacttttagaagtcaggagcaccagggtgaggagcagtagcaaggagc

SEQ ID NO: 22891 - DNA, 60 bp, Homo sapiens
caagctgatacaatacaatcccacactccttcaactaactccaacatggcagcagtaggg

SEQ ID NO: 22892 - DNA, 60 bp, Homo sapiens
acaggaaaccccatggagggagatgtgccacagagatcctcatccgtggacttggtgctc

SEQ ID NO: 22893 - DNA, 60 bp, Homo sapiens
gctccattgactgccatctctagtcttgcagtgggtggtattaacccatagaaagcaagc

SEQ ID NO: 22894 - DNA, 60 bp, Homo sapiens
gctccgtagttcagtcttgttgaacatgacacaggtgtttactttcctgttcttgcatct

SEQ ID NO: 22895 - DNA, 60 bp, Homo sapiens
gaaggtgggaaccaggatacccattcatttccaaccgagacacagagaagtgagtcacag

SEQ ID NO: 22896 - DNA, 60 bp, Homo sapiens
agaagtgagttcggcaaagagaaggccacggagaatgaccccattttggagaggggtttc

SEQ ID NO: 22897 - DNA, 60 bp, Homo sapiens
gagacccgtttcctttcagggatgtggacagggtaagggcagcaagcatggttctgttaa

SEQ ID NO: 22898 - DNA, 60 bp, Homo sapiens
cggatgaccgttacagcaaagtggattttgcgtccaaagtgataagccaaatatcaggat

SEQ ID NO: 22899 - DNA, 60 bp, Homo sapiens
gaagtgacaagaatcacatccggttgtgtcctgtgggagggtcagaggcagaatctactt

SEQ ID NO: 22900 - DNA, 60 bp, Homo sapiens
cagccagcactgaatgtatccatcaggacatgcgtcttcaggtgcctgatctttgtagtc

SEQ ID NO: 22901 - DNA, 60 bp, Homo sapiens
caattctactgcacaattcattgattgtaaggtatcctgtaacaagcaatgtttgtctcc

SEQ ID NO: 22902 - DNA, 60 bp, Homo sapiens
cactcccttcactttacagcaagggtcagtagagtcccaaggatttgtagactttagggg

SEQ ID NO: 22903 - DNA, 60 bp, Homo sapiens
gacagtaatgagtataacattgagcaagagaagaatccctgagtacacagtgatgcgaac

SEQ ID NO: 22904 - DNA, 60 bp, Homo sapiens
ctcaactcaggtgcaaggaagcagagtttgactacttttgtgggtactgaagacctagct

SEQ ID NO: 22905 - DNA, 60 bp, Homo sapiens
ctatgtctagtcttccataggaaatcctcactgtttaaccatgtgaggagcctaagtcat

SEQ ID NO: 22906 - DNA, 60 bp, Homo sapiens
cctgtgcggatcactgggcggcaccagattgttacgatgagcaatgatgtttctgaggag

SEQ ID NO: 22907 - DNA, 60 bp, Homo sapiens
tgaagtgatgactggagctcagcaaccactttgcaccatgaggcagcactgagcacggta

SEQ ID NO: 22908 - DNA, 60 bp, Homo sapiens
ccagtgatgaaaaccacagtgtctgagatgacggatacacaggatgagatcgagggtaga

SEQ ID NO: 22909 - DNA, 60 bp, Homo sapiens
cccataagggatgttttctaggcttaaacagtggcctgtatgtgtctttctccttatttc

SEQ ID NO: 22910 - DNA, 60 bp, Homo sapiens
atattttgccacggagatcatcttctggcagtgaatgacctgaaaccccagagcctggag

SEQ ID NO: 22911 - DNA, 60 bp, Homo sapiens
catcagcacttgttagcaggatttccttttttacctttgccttgtttctttagcccacaa

SEQ ID NO: 22912 - DNA, 60 bp, Homo sapiens
gcacatgtagaaaactgccctgaaaggggctgaaatgaagccattaagaccgaagtgtac

SEQ ID NO: 22913 - DNA, 60 bp, Homo sapiens
gttataaggtgtagaaaacgttgccaggacaacatcacgcccgttgatacgaatcacatc

SEQ ID NO: 22914 - DNA, 60 bp, Homo sapiens
ggccccagtttgaagcattctgtccaaatgtcctgagctctccagcagtcaagtagtgaa

SEQ ID NO: 22915 - DNA, 60 bp, Homo sapiens
aacaacttggttcagccggtggttttgcttctcctttgtgttcctgtgagtaggctgtgc

SEQ ID NO: 22916 - DNA, 60 bp, Homo sapiens
tgaacccctcaatatcagggatcagagtgcctctcttcatgggtagtgagaaaggcagtg

SEQ ID NO: 22917 - DNA, 60 bp, Homo sapiens
tctccctaatagtattctgcgataagagatccttggagatgttaagaggtgacaagaaaa

SEQ ID NO: 22918 - DNA, 60 bp, Homo sapiens
tatgacatacacggcccagcccattgccctccctgcatctctgtgctgctttgccatttc

SEQ ID NO: 22919 - DNA, 60 bp, Homo sapiens
tgagctccctacttcctgcctcatttcatgcagtcttttctgaacagcctatgctgctgc

SEQ ID NO: 22920 - DNA, 60 bp, Homo sapiens
ctgctccttggaacagttgagtgtggcctcaaaccattctcctgggtagctcagtcataa

SEQ ID NO: 22921 - DNA, 60 bp, Homo sapiens
gcaaattggtctccacacctaaaatcgtctgcctgtgtactttgtagatgtgaatggtac

SEQ ID NO: 22922 - DNA, 60 bp, Homo sapiens
tactgggctcaactgcaattgaggctccttcatctacatgtgttgctcgtgccatcacga

SEQ ID NO: 22923 - DNA, 60 bp, Homo sapiens
agtgcagcctcgtgttctatatcttgagccccttgaacctgaacagcatcccagacattg

SEQ ID NO: 22924 - DNA, 60 bp, Homo sapiens
tggtatactgcatgacaacattttggccaaagataagaccacatgtattttgggagtccc

SEQ ID NO: 22925 - DNA, 60 bp, Homo sapiens
gggcacaggtggccttcaagaagatggtccagggcgtcctccagtttgctgtgtgtgaca

SEQ ID NO: 22926 - DNA, 60 bp, Homo sapiens
ttgaaggcgcttgtcaagaaatctgcactgtgtggggagcaagtgcatatcctgggctgt

SEQ ID NO: 22927 - DNA, 60 bp, Homo sapiens
gactactgatcactggggcaaatcaaagcatccccggacacctggtctacagccattgat

SEQ ID NO: 22928 - DNA, 60 bp, Homo sapiens
tatttcaccatggctgaatgaagcgagtggcacaccgaggatccccagttcttggctgag

SEQ ID NO: 22929 - DNA, 60 bp, Homo sapiens
aagggcggacatagagacaggatgaagacatgcttgaggagccacggagtttgggggcca

SEQ ID NO: 22930 - DNA, 60 bp, Homo sapiens
cagcacagatgtttgtgacagtgactatgctcctagtcggagaatgacctcagtggcaac

SEQ ID NO: 22931 - DNA, 60 bp, Homo sapiens
gagctaaggccactgaggaaagagccatagcttaagtctctctgtagacagggatccatt

SEQ ID NO: 22932 - DNA, 60 bp, Homo sapiens
cctgggcatctcaggatctctcttggcaatgacattttggccagctgttcgtgaggataa

SEQ ID NO: 22933 - DNA, 60 bp, Homo sapiens
tagccatgccttatagtccacagtggagcatacatttcctgagagcgtaaatcagcattc

SEQ ID NO: 22934 - DNA, 60 bp, Homo sapiens
ttcctccctcaaggactccccatccagctgggagacagacaactaactacactgcaccct

SEQ ID NO: 22935 - DNA, 60 bp, Homo sapiens
aggggagaatcagaggtcaaagctcagggctttaaggctgcccttgtaatagacgtcacg

SEQ ID NO: 22936 - DNA, 60 bp, Homo sapiens
ccccatggcacaaggggaaacactcttggataaccttcaacaatgaggctttgctaagtg

SEQ ID NO: 22937 - DNA, 60 bp, Homo sapiens
ttccaaagtaggaactgccacacaggccccagcatcctctctccaacttcatacctctct

SEQ ID NO: 22938 - DNA, 60 bp, Homo sapiens
ctgtctgtctcccatagtctctggctatgaggcttgagtgacttggacatgacatttctc

SEQ ID NO: 22939 - DNA, 60 bp, Homo sapiens
gtgcgtcttcagtagttccaagctaaagcaatttggcattctcccactgtgatttgtgac

SEQ ID NO: 22940 - DNA, 60 bp, Homo sapiens
taacacctggttgggaaccagctgagttagagccatctagtccctgggaactctcaaaac

SEQ ID NO: 22941 - DNA, 60 bp, Homo sapiens
caaactcttgcttggtggccatttgggtaatcagaccatttgaatgcctgagagcatgtt

SEQ ID NO: 22942 - DNA, 60 bp, Homo sapiens
ctacagtggagggttctctttggaaacaaacagccctgcttggtttcagtttgaggccac

SEQ ID NO: 22943 - DNA, 60 bp, Homo sapiens
gatttgtttccaccacttctcctgggaacctcagcacattttctttccactgacagttat

SEQ ID NO: 22944 - DNA, 60 bp, Homo sapiens
cccgcagagttgtccttgcagcatcctgaaacacagatccatgcagaatgagccctgcga

SEQ ID NO: 22945 - DNA, 60 bp, Homo sapiens
attttacccaagtgacttctacactgttgaactctgcttacccattcataggaccctttt

SEQ ID NO: 22946 - DNA, 60 bp, Homo sapiens
ccttttatctgtctctgcttatgatggcaatgtatctgtaccaggtgatctctggaagtg

SEQ ID NO: 22947 - DNA, 60 bp, Homo sapiens
cgtcatttggatagaccagtgttcttacggttttgggaaacattggacaggtacatggta

SEQ ID NO: 22948 - DNA, 60 bp, Homo sapiens; identical to SEQ ID NO: 4855

SEQ ID NO: 22949 - DNA, 60 bp, Homo sapiens
catcattactgccttcacctgcatagtcactcttttgatgctggggaaccaaaatggtga

SEQ ID NO: 22950 - DNA, 60 bp, Homo sapiens
aagcaaagctggcctcatgctcttcagggtcagttcctatctggagttgaccaggcctac

SEQ ID NO: 22951 - DNA, 60 bp, Homo sapiens
ccactttcgtaaactactgacctagcttgttgccaattgttgattgaacttcccataact

SEQ ID NO: 22952 - DNA, 60 bp, Homo sapiens
ccattctctgggtagaggaatgaagactcagaggagactggggttcgctttgtgtgatac

SEQ ID NO: 22953 - DNA, 60 bp, Homo sapiens
ctctgtgttctgtgcttacttgttcctccaaagcattctccccagcatgtctcttccagc

SEQ ID NO: 22954 - DNA, 60 bp, Homo sapiens
accattgaagaaactgaggtcctgtgactttcccgaggtcatcggaatctgccttgcaca

SEQ ID NO: 22955 - DNA, 60 bp, Homo sapiens
ttcctgaccactgtgaaaagtgccatccttgatcctaggcttcctgtccttaatggccat

SEQ ID NO: 22956 - DNA, 60 bp, Homo sapiens
cacccacatggacacaaggaatgttgctgcagagactgaatgacatgcaacaggtgaagg

SEQ ID NO: 22957 - DNA, 60 bp, Homo sapiens
cattcccttgactcatgtcttgccaggatggttagatacacagcatgttgatttggtcac

SEQ ID NO: 22958 - DNA, 60 bp, Homo sapiens
ccttcagtggattttactgaatgtatcctaatgggatcatgtacaccttttctgtcccct

SEQ ID NO: 22959 - DNA, 60 bp, Homo sapiens
taacaattggcatatatacttggcattcctgtccaccaaggattgtaatccaagcctggg

SEQ ID NO: 22960 - DNA, 60 bp, Homo sapiens
gagtcattgtgtctgaaaactgcaaagtgaacttaactgagatccagcaaacaggttctg

SEQ ID NO: 22961 - DNA, 60 bp, Homo sapiens
ttctaaatcccctttggcaaataaagctgaagttatctagtgtcagcatactgtgatttg

SEQ ID NO: 22962 - DNA, 60 bp, Homo sapiens
ttcctttccaagtcttctgaggttgtttcctagtaagtgagctggaggctatggggcctg

SEQ ID NO: 22963 - DNA, 60 bp, Homo sapiens
gtcacacagctcctctgtatgagaccagtgggcgccatttaaaagaacaggatgagaatc

SEQ ID NO: 22964 - DNA, 60 bp, Homo sapiens
gtggctcaccagagtacccagaagaatcagtatggaattagaggacagtggcctacccta

SEQ ID NO: 22965 - DNA, 60 bp, Homo sapiens
agggaaagcatcacccgaaagtgagaatgcctagaggcaggaatcatggaggcttcctta

SEQ ID NO: 22966 - DNA, 60 bp, Homo sapiens
cagtgcagatagctaccctgagcaagaggaaaccaccaaagaagagtggtcccaagactt

SEQ ID NO: 22967 - DNA, 60 bp, Homo sapiens
ggacaaaggaaagggtttgtgactttgagctctcttcttaccctgggcaacctctctctc

SEQ ID NO: 22968 - DNA, 60 bp, Homo sapiens
tttgccaacggcatcttccagctgtggtttcacttcaagcgctaccgctatcggcggtga

SEQ ID NO: 22969 - DNA, 60 bp, Homo sapiens
tatgcacaagtgacttaaagcagagtcctcctctagcccaggacactcttcagtctggct

SEQ ID NO: 22970 - DNA, 60 bp, Homo sapiens
tcgcgggtacatgtcccccgagaagccgagcctcatctgcccgttgaccacgttaggcga

SEQ ID NO: 22971 - DNA, 60 bp, Homo sapiens
ggtggtgtgaccctaggaacataggcccctaaaccgtttccctgatcttttcccagtaat

SEQ ID NO: 22972 - DNA, 60 bp, Homo sapiens
cccatgtgtctcagtggtggtccctgttttcaggaaagagtgtctgtgaatgtccatgtg

SEQ ID NO: 22973 - DNA, 60 bp, Homo sapiens
cgccctagaagcagacactttcccagatgaaattcatcaccctaagatgactgtggagcc

SEQ ID NO: 22974 - DNA, 60 bp, Homo sapiens
ctttggtgcaagccgggagtttgggacagagttcacagaccattacatcgaggtggtgaa

SEQ ID NO: 22975 - DNA, 60 bp, Homo sapiens
gtcagatcggaaggtggtgaatctttccagagcagctgaaaatctcagcatggagacagt

SEQ ID NO: 22976 - DNA, 60 bp, Homo sapiens
cttccagattcgcctcttcccacaaaactgactctccacttggacatctaacaggcatct

SEQ ID NO: 22977 - DNA, 60 bp, Homo sapiens
tgggacataatagcctgagtgcttgggttaccatggagactggagtgtgtgaggccacag

SEQ ID NO: 22978 - DNA, 60 bp, Homo sapiens
caattcagtgtccattctcaggagatgctaagtagcactggtcatagactcttgcctgaa

SEQ ID NO: 22979 - DNA, 60 bp, Homo sapiens
ttgtacttctgtgaaaaggctgcagagacgtggtgactggccatgagtcagcccaggact

SEQ ID NO: 22980 - DNA, 60 bp, Homo sapiens
agtttgcatacctgacagcaggtcagcctggaagcaccatgaactctgtgccaacaccgt

SEQ ID NO: 22981 - DNA, 60 bp, Homo sapiens
tgtggccatggtgtaggcagtgcaatgtcttcgagtgagagtgaaggtggtaactcattg

SEQ ID NO: 22982 - DNA, 60 bp, Homo sapiens
ccaacgtgaatctacctcgtgctagagtctgagtagcctagtctatcacccaacacagat

SEQ ID NO: 22983 - DNA, 60 bp, Homo sapiens
agtttgctgactgaatacgcgaagaaggacctgatgggctcatatgcaccactgccatca

SEQ ID NO: 22984 - DNA, 60 bp, Homo sapiens
tcctgctccgtcgattcagcagacctatgctgcagaaggtaactgcggaagctctctttt

SEQ ID NO: 22985 - DNA, 60 bp, Homo sapiens
caggttggggtggcttctttgtttgcctacctgttatcagtccccttcattccagtcttt

SEQ ID NO: 22986 - DNA, 60 bp, Homo sapiens
acatacggactggcctctctactgtactgggtgccatctcccaccatactctggcatttt

SEQ ID NO: 22987 - DNA, 60 bp, Homo sapiens
cagtaaggcttaataagtagttcattgaccctgtaagataggagcactcagctctgtcac

SEQ ID NO: 22988 - DNA, 60 bp, Homo sapiens
gtctctgtactgtatgtatctggttatcaagatgcctctgtgcagaaagtatgcctcccg

SEQ ID NO: 22989 - DNA, 60 bp, Homo sapiens
ggcaaggatcaaatgagtcaaataagatgcttgtgaaagtgaggacaggatctatcctca

SEQ ID NO: 22990 - DNA, 60 bp, Homo sapiens
ccctaagtgcaggggatctggaggcaaaacatgagggtcaaagcctcactgtaccacttt

SEQ ID NO: 22991 - DNA, 60 bp, Homo sapiens
taaacacttgaatgaagagaatggtggcagaatgagtgagcaagcagattgccccagagg

SEQ ID NO: 22992 - DNA, 60 bp, Homo sapiens
ccacctgccacttggagagctacaatgtgggaaagacataagacttgtcctatggactca

SEQ ID NO: 22993 - DNA, 60 bp, Homo sapiens
taaacgtggcacagagaggcattcagtaaatggtagttctgggagaggaatggggaggca

SEQ ID NO: 22994 - DNA, 60 bp, Homo sapiens
ccaaagccaagttcatccccaagccacagccagtcaacccactgttccaggacagtcctg

SEQ ID NO: 22995 - DNA, 60 bp, Homo sapiens
gcatgtctctgtgagtgtcaaagctgccatgaccatctcggtaacctactcttactccac

SEQ ID NO: 22996 - DNA, 60 bp, Homo sapiens
gtggagccagaggatgtgtgggaggggtttctctaacactgacttctattccatgagctt

SEQ ID NO: 22997 - DNA, 60 bp, Homo sapiens
atcaggtgtcttggccggttcatgccccacgatgaaagggccagaggttttcatatgagt

SEQ ID NO: 22998 - DNA, 60 bp, Homo sapiens
ccccttgcagctacacttactttctccctgactaccaaatggagtgacggttgaagaatc

SEQ ID NO: 22999 - DNA, 60 bp, Homo sapiens
caggcgtcttcttaactcctctgtcctctatattcagcatgttccttgtcagctgctggg

SEQ ID NO: 23000 - DNA, 60 bp, Homo sapiens
ctgtacctcattgctgctcacacatatatgtttcttaccttagcctgaaccttctcaggc

SEQ ID NO: 23001 - DNA, 60 bp, Homo sapiens
acgtcaaagcacagcatcaagttcgtttggacatccggcaaggcctcttaccaaatgagg

SEQ ID NO: 23002 - DNA, 60 bp, Homo sapiens
tgagatggaggaacctgctaaaatcgatggagatgcttctagcctcccagtaggaggccc

SEQ ID NO: 23003 - DNA, 60 bp, Homo sapiens
tggaataagatttgtaagctcacaaagccttcttccaaagttgcttgagccaagtgctta

SEQ ID NO: 23004 - DNA, 60 bp, Homo sapiens
tgcagcctgacgtggtggtcgtggagctctgccaatatcgtgtgtccatgctgaagatgg

SEQ ID NO: 23005 - DNA, 60 bp, Homo sapiens
ccggcacttggattctggtgttagtgctcccgattcaagctttccccaaacctggaggaa

SEQ ID NO: 23006 - DNA, 60 bp, Homo sapiens
cccaagatggcatgtgaagtctgtttaagaggctaccattggcattgtcaccatgaccac

SEQ ID NO: 23007 - DNA, 60 bp, Homo sapiens
gagagattgagttgcttagccgaggtcactgcagcaagtcaagtccttcaaggtaaactc

SEQ ID NO: 23008 - DNA, 60 bp, Homo sapiens
ccttggcttcaagagctcagcattgaacctgaaattccctacagccccacaagaatgagc

SEQ ID NO: 23009 - DNA, 60 bp, Homo sapiens
gccttagttacagctccctttctgtttcttgttccaaggattctgtagtatgtagtgtgt

SEQ ID NO: 23010 - DNA, 60 bp, Homo sapiens
gaagtcagtacagcagaatggtaacaagtgagcatctccctaatgggaatgggacattcc

SEQ ID NO: 23011 - DNA, 60 bp, Homo sapiens
agtagaactggctaagcggtcttaagcacaatctatgaccagtgattttatgctgacccg

SEQ ID NO: 23012 - DNA, 60 bp, Homo sapiens
gtcaaactagacaagagggaagtctccatgaagtgtggaaaacaagctccttgattgtgg

SEQ ID NO: 23013 - DNA, 60 bp, Homo sapiens
ccgcggcctcacacatctcccagctcacactctactaatgcacagagtcattagatccaa

SEQ ID NO: 23014 - DNA, 60 bp, Homo sapiens
gattggattggagcaagaaagtgtgggtatcgtgtgttgtgactgtgtcttctccggggt

SEQ ID NO: 23015 - DNA, 60 bp, Homo sapiens
cacagtgacaatctcaagtgacccgcagtgtgatgggaccactaatgaaactgacaccac

SEQ ID NO: 23016 - DNA, 60 bp, Homo sapiens
gaccgtgaccctctatttcaacccgatggctgctgcctccattcagactttgctcatttt

SEQ ID NO: 23017 - DNA, 60 bp, Homo sapiens
ctgggagggacactgctccattcagaggcagcaaagcacattactgtatctcctatagag

SEQ ID NO: 23018 - DNA, 60 bp, Homo sapiens
catctcttcaggctcgaactgcaaaacacacgtcgagaggtgacaatgttgggactgtca

SEQ ID NO: 23019 - DNA, 60 bp, Homo sapiens
cgcaatgcctacacacggttttaaccatggaatgaatgcactgcagactctcaagagatc

SEQ ID NO: 23020 - DNA, 60 bp, Homo sapiens
gccctaaactttacataagagttccggcaaggctgtgacttcaacttgtgttgtaactgc

SEQ ID NO: 23021 - DNA, 60 bp, Homo sapiens
acctggaggtgctggcagaaatcgcttcctcccccgcaggccagacggatgacccaggcc

SEQ ID NO: 23022 - DNA, 60 bp, Homo sapiens
atggggtggttagaagggttgaatgagaatgatgcccatgcagtgccttggctggggtct

SEQ ID NO: 23023 - DNA, 60 bp, Homo sapiens
aagaagcgctgaagccttgattgatagttctgccccttgttgccctggggcttatctgat

SEQ ID NO: 23024 - DNA, 60 bp, Homo sapiens
gcagcatgcagggcataatcgcctcaattcttggtatctggcacaatgttcagttggcag

SEQ ID NO: 23025 - DNA, 60 bp, Homo sapiens
ctccagttgcttaagccatagagaaggcccctttgcagtgggagtcactgaagacagaaa

SEQ ID NO: 23026 - DNA, 60 bp, Homo sapiens
agcacctgttttctgactttctagtgccctgagtgggaaccacttcactgggctcttgtt

SEQ ID NO: 23027 - DNA, 60 bp, Homo sapiens
gcccataaggagatggaagatatctgagacaattaaggctttagcttctaggcaagagaa

SEQ ID NO: 23028 - DNA, 60 bp, Homo sapiens
tagccatctggctttcccatctttaccccatgcactctttccttcactgctttccccaca

SEQ ID NO: 23029 - DNA, 60 bp, Homo sapiens
catttacagtattgagtcgtgtgccactgctgtacctgatgtatccaatctggattaaac

SEQ ID NO: 23030 - DNA, 60 bp, Homo sapiens
gcacactccagaacctagtccaaccccagacgctgcctgaggcttccctccagctcccct

SEQ ID NO: 23031 - DNA, 60 bp, Homo sapiens
tgattttctgaggcttatgtctggtgaaattttccagaagttcacgctctgcaaggcctt

SEQ ID NO: 23032 - DNA, 60 bp, Homo sapiens
aagcaggaaaaggaacagctcctcatacacccatgctcacagcattattcaccagagccg

SEQ ID NO: 23033 - DNA, 60 bp, Homo sapiens
cggtgtgtttgtcctgatcctacataaaggtaggcaggtatgtgggagagtccagggcag

SEQ ID NO: 23034 - DNA, 60 bp, Homo sapiens
atgtaatctccgcggttctttctttgttctaccctcctgcacctgttgtcgatgtaatca

SEQ ID NO: 23035 - DNA, 60 bp, Homo sapiens
attcctgtggccttcgtgtctgagaaatggtttgaaatctcctgctgactggccgaagtc

SEQ ID NO: 23036 - DNA, 60 bp, Homo sapiens
agacatgactgtgggaacagcctccagctatctgctcatcagaggtgctttcctcaacct

SEQ ID NO: 23037 - DNA, 60 bp, Homo sapiens
gcttctcatggtcctagttctcatgctgatctttctacttggcaaaattcaccaagggtg

SEQ ID NO: 23038 - DNA, 60 bp, Homo sapiens
tggagaacatctagaaaaccttcagccagcctccagtgctgtcgagagaccaccttcccc

SEQ ID NO: 23039 - DNA, 60 bp, Homo sapiens
caggtggaagccccaggatcagtccatgtttggttaatgcctttctggaatttgcaacca

SEQ ID NO: 23040 - DNA, 60 bp, Homo sapiens
cagactgtagctgcctatgcttggaatttgtcctagataaggataaagtagctaatccat

SEQ ID NO: 23041 - DNA, 60 bp, Homo sapiens
cctcactggggaaagaagtgtgactgagctaattggtgaatttgggagcaataaacaggg

SEQ ID NO: 23042 - DNA, 60 bp, Homo sapiens
tgcaacccctcattatccaccacgcacagatggtacagctggggctgaacaaccacatgt

SEQ ID NO: 23043 - DNA, 60 bp, Homo sapiens
tgcagtgcaaagattgcaaagagtacaaaaccagctgaaaagcatgcgccaagctgcagc

SEQ ID NO: 23044 - DNA, 60 bp, Homo sapiens; identical to SEQ ID NO: 4855

SEQ ID NO: 23045 - DNA, 60 bp, Homo sapiens
cagggcaaggtgaggagaagcagctggtacagactgatgacgaaggagaggaccagaaaa

SEQ ID NO: 23046 - DNA, 60 bp, Homo sapiens
attgtatctccatccagatggtggagtaccgcgcagacattaaaagtcatgtaaaagaac

SEQ ID NO: 23047 - DNA, 60 bp, Homo sapiens
gaccgtggtctgttctgtgatggattgtcgggagaaacgggagcgtgtgaggaattgaaa

SEQ ID NO: 23048 - DNA, 60 bp, Homo sapiens
gaatctggtgctgatctgcagcatacttgacaacacagggaataccgtggatgttccacg

SEQ ID NO: 23049 - DNA, 60 bp, Homo sapiens
ttgtactatcatgagccctggggaaatggagaagcacctgctgctcctctccgagctgct

SEQ ID NO: 23050 - DNA, 60 bp, Homo sapiens
ctccccagcaatttgcagggtgagattttgtgtgactgctggaaggcacattccaaaaca

SEQ ID NO: 23051 - DNA, 60 bp, Homo sapiens
actttgtagctcagcagtcttggaatcactagactctaagccccatgtagtcagagactg

SEQ ID NO: 23052 - DNA, 60 bp, Homo sapiens
ttgcttaggaagttgtacgtgccttgaaatgtccactacctgaggacgcagcatctggtg

SEQ ID NO: 23053 - DNA, 60 bp, Homo sapiens
ttctaaagtgcaaattcactgacctactttctgtgcttctggaaatgctgaatcgaataa

SEQ ID NO: 23054 - DNA, 60 bp, Homo sapiens
ggggtactcagtgccactcagttgtcattgatcctgggctcttgcaatgcacaaaatgga

SEQ ID NO: 23055 - DNA, 60 bp, Homo sapiens
gggagggacttgtttacaagcagttctgaccaccttagtggtgtactgttttctaggcaa

SEQ ID NO: 23056 - DNA, 60 bp, Homo sapiens
gctgttatggcttatctggttgcctgttatgacttacctggttcctatggctgtaaaagg

SEQ ID NO: 23057 - DNA, 60 bp, Homo sapiens
gtgtatgtgaacatgtggctcttgttcccagttgtgtaatggatgcattcccttaaagtt

SEQ ID NO: 23058 - DNA, 60 bp, Homo sapiens
gatcagttgcaggagaggaattcaaagggctcattcaggatcattgaagagaggctgttt

SEQ ID NO: 23059 - DNA, 60 bp, Homo sapiens
gaaaattgttcctgcccaatctacatctccacctcaccccatcttttcttaagcactatg

SEQ ID NO: 23060 - DNA, 60 bp, Homo sapiens
aaagccatttccaggataaatgcaggctctgagagcgagtgccacggacgactcctccat

SEQ ID NO: 23061 - DNA, 60 bp, Homo sapiens
ctcattgcctctaggttcttgtgttcattctcgctggacacatttccatcagtgcaccct

SEQ ID NO: 23062 - DNA, 60 bp, Homo sapiens
ctgagcttaagccattgtcatgtgaccaccttgaccatgagctactgctctaaaacactg

SEQ ID NO: 23063 - DNA, 60 bp, Homo sapiens
cccatcacagtcctgcccttcaccctcaagcacggtcctaaacttgtctgcactttagaa

SEQ ID NO: 23064 - DNA, 60 bp, Homo sapiens
aagcgggctgtgaccgaaatgctacaactgtgcggccgcttcgtgcaaaagctcggggac

SEQ ID NO: 23065 - DNA, 60 bp, Homo sapiens
gatagatggtcatggcaagcgcacagcaccagacttactggctcaccaagatgatggaaa

SEQ ID NO: 23066 - DNA, 60 bp, Homo sapiens
ttgtctgtagtccaaccgctgttaacacccagagaaaactctggcagttggtctgcaaaa

SEQ ID NO: 23067 - DNA, 60 bp, Homo sapiens
gtccatcctcaggtccagcctgaacttcttcttgggcaataaagtacctgctggtgctga

SEQ ID NO: 23068 - DNA, 60 bp, Homo sapiens
aaagctgtttcgtagacactgcaaacaagaaaggcctaggaaggtcaggacgtggatggc

SEQ ID NO: 23069 - DNA, 60 bp, Homo sapiens
cgtgccgattcttttacctgagaaatgctacgaccaacttttcgttcagtgggacttgct

SEQ ID NO: 23070 - DNA, 60 bp, Homo sapiens
gcatatgacttgagtgtcttgggcgtggatcagtcttctccaaaatacgagcagtgtatg

SEQ ID NO: 23071 - DNA, 60 bp, Homo sapiens
cctctttatactcacactgtcctcccaatatgacccatggtagccactgatcccattacc

SEQ ID NO: 23072 - DNA, 60 bp, Homo sapiens
ataacccaacaggaggtggtggggtctgacgtgtccaagtgctggcagacaccctggtca

SEQ ID NO: 23073 - DNA, 60 bp, Homo sapiens
ctatacatacacatctcaagtgcatctattcccactctcattaatccatcatgttcctaa

SEQ ID NO: 23074 - DNA, 60 bp, Homo sapiens
gcacagagcctttgagtctagagggagacacagacttactgacaggctgggttgtgtaat

SEQ ID NO: 23075 - DNA, 60 bp, Homo sapiens
ttcccgttgtagctgctggagactgactgtgtctgaaaggagggtctcttgatgctgaca

SEQ ID NO: 23076 - DNA, 60 bp, Homo sapiens
aggagactgtagtgccagaccatactgtcaacttttagatgtgtggtgtgacccagagag

SEQ ID NO: 23077 - DNA, 60 bp, Homo sapiens
ggctgcctttactgtagctcacccagcatctcttttaccaaccagagagtgtgaaactag

SEQ ID NO: 23078 - DNA, 60 bp, Homo sapiens
gggccaggaaccagtggagatttccatccttgccagcacgtctgtacttctgttcattaa

SEQ ID NO: 23079 - DNA, 60 bp, Homo sapiens
agaattgtcccatgcaggatcaaggaaactgggatgtctgtctcccaattactgcccttt

SEQ ID NO: 23080 - DNA, 60 bp, Homo sapiens
tcgttcttagagcaaactaaagccaactgagggtgcacacacagccatgagcccacctgc

SEQ ID NO: 23081 - DNA, 60 bp, Homo sapiens
tgaactctggctttttatcctctgagaaaacagcccacaggactgggtcctccttatccg

SEQ ID NO: 23082 - DNA, 60 bp, Homo sapiens
taattgcttgaatgcataacccaactttgaggtgagcctgcaggagctgctgaggcacac

SEQ ID NO: 23083 - DNA, 60 bp, Homo sapiens
cagaggaggtgagtggcttgttgggaggaagctcagttccagaacttacctcagtgcact

SEQ ID NO: 23084 - DNA, 60 bp, Homo sapiens
ctccatcaacctgagacaggactcagtatatggttcttgggtatgccctaccaggtggaa

SEQ ID NO: 23085 - DNA, 60 bp, Homo sapiens
aattttggggaccttccttcctgtttcttcccaccctgtcttctcccctaggtggttcct

SEQ ID NO: 23086 - DNA, 60 bp, Homo sapiens
ggaaatggttctgtctgtgctgtccagcatagcagccacaagccacatgtaactgagtct

SEQ ID NO: 23087 - DNA, 60 bp, Homo sapiens
caatttggagagggaatgctgagcagatagcccccattgttaatccagtatccttatggg

SEQ ID NO: 23088 - DNA, 60 bp, Homo sapiens
caggaaccgaaccgggtttggatacagacccagtcacaccatccatgaaaagctgtttct

SEQ ID NO: 23089 - DNA, 60 bp, Homo sapiens
tctgttgttcatctagaagactgttttcccttgaagactcagccctagcatcacctcttc

SEQ ID NO: 23090 - DNA, 60 bp, Homo sapiens
gacatgctgaattccacgggcgaactggagttttcgaacgaagaagatcccgagatcatc

SEQ ID NO: 23091 - DNA, 60 bp, Homo sapiens
atttaaggcaaactgaaatctccttcatcagcagtcttcctgctggtgtagccacagcag

SEQ ID NO: 23092 - DNA, 60 bp, Homo sapiens
ttcccttatatttccacctgtaatgtcagtggcaacaacatcatacttcacttacttgtt

SEQ ID NO: 23093 - DNA, 60 bp, Homo sapiens
atcttgttctagcaacaatgatggtagcagctctctccctgaccttgccccatgtgctct

SEQ ID NO: 23094 - DNA, 60 bp, Homo sapiens
ctggtgtggcattgataccttctgtggaggcaattgggcatgacctgtcactgtttctga

SEQ ID NO: 23095 - DNA, 60 bp, Homo sapiens
ggccatgactggaacagggatgcaacctctttctacacaagcacagttagttgggtgaag

SEQ ID NO: 23096 - DNA, 60 bp, Homo sapiens
tgctgttgcaactcggctgttctggactctgatgtgtgtggagggatggggaatagaaca

SEQ ID NO: 23097 - DNA, 60 bp, Homo sapiens
aaacggtccaccgtggcctgtgccaatgctactatcatgtgctcctgactgtggcctgta

SEQ ID NO: 23098 - DNA, 60 bp, Homo sapiens
gcatcaaatcccaaaattctgtctttgtgtcctgagatcaaatggcacttcattggccac

SEQ ID NO: 23099 - DNA, 60 bp, Homo sapiens
gggtgttacaaaagcagacctagacgagctgttcacttaactggtacctgttggtcagaa

SEQ ID NO: 23100 - DNA, 60 bp, Homo sapiens
ggaaggttccagctacctgttacccttttgctaaacacagttgcagtgttgcagtgtatt

SEQ ID NO: 23101 - DNA, 60 bp, Homo sapiens
gcctcccattaaagaggagttagagctgggccttgaggctcttcacttctttcaacagat

SEQ ID NO: 23102 - DNA, 60 bp, Homo sapiens
taatgcttcacagtatatggcctggtctcatccttgcgtgttccacttgaggccctttgg

SEQ ID NO: 23103 - DNA, 60 bp, Homo sapiens
tctgctcatccttattgagggcagtgtcgtcttctatcagctctattccttgctgcggtc

SEQ ID NO: 23104 - DNA, 60 bp, Homo sapiens
ctagtttgctaacacaaaaagatgatagttgggttgaaccttattcaggttggacacctc

SEQ ID NO: 23105 - DNA, 60 bp, Homo sapiens
ggtacctagtgtgtgtctgatgccggttggtgtcaaagatagagggcttcttgaaggaac

SEQ ID NO: 23106 - DNA, 60 bp, Homo sapiens
tatgcacgtgttctgtctatgaggcgcttctccacccactgtgtccttcaaccttgccat

SEQ ID NO: 23107 - DNA, 60 bp, Homo sapiens
ggttgactgagaaaacacagataatgggcttcctaaccctgctcacctggcactaacact

SEQ ID NO: 23108 - DNA, 60 bp, Homo sapiens
atacagattcagttttacctcccaaaaggcagaaaagcggttcccaggaggacctcggct

SEQ ID NO: 23109 - DNA, 60 bp, Homo sapiens
ttgacacccagtagaaaacccagatgcctgcattcacctggcggtaacaagatggtggca

SEQ ID NO: 23110 - DNA, 60 bp, Homo sapiens
gcttgtcattcaaacagatgaaggcaagagtattgctattcgactaattggtgaagctct

SEQ ID NO: 23111 - DNA, 60 bp, Homo sapiens
ggggaagctgctgtgatgagactagatgagccttcaacacactcagaaaatgcaacagca

SEQ ID NO: 23112 - DNA, 60 bp, Homo sapiens
gcaaatggcatcctacttcttgactacacttgcacctgaggatacaaaaggacaaggtgt

SEQ ID NO: 23113 - DNA, 60 bp, Homo sapiens
agctttgaccacacccgtgtttgttcctagtctgttcccagccataagcatctccacaag

SEQ ID NO: 23114 - DNA, 60 bp, Homo sapiens
tccccttacacgtgagcctgcagcttcattcacagcccctgtgtagaaagataggcacat

SEQ ID NO: 23115 - DNA, 60 bp, Homo sapiens
tcatagagcagataaatggagccagagcccaaatttctgtactcaaagcttgtatacctc

SEQ ID NO: 23116 - DNA, 60 bp, Homo sapiens
gccgcaccctctacggtttcggtggttgagcgtccttttctaccaataaaaggccctttt

SEQ ID NO: 23117 - DNA, 60 bp, Homo sapiens
acctcccagctatatgcatggcctcttcttgaaactgtgttctcagaagtgctgacaaga

SEQ ID NO: 23118 - DNA, 60 bp, Homo sapiens
taacacccatgcaacgagtctgcgaggccgaatggaagccagctggtgcaaggggagaga

SEQ ID NO: 23119 - DNA, 60 bp, Homo sapiens
gttataaaggagtgtgcaccgtctcttgctcttctgccctctgacctgggatgatgtaaa

SEQ ID NO: 23120 - DNA, 60 bp, Homo sapiens
gctgtcctctctgcctctatcacaccaaatacaagcgcaacatgattgaccacatcgtgc

SEQ ID NO: 23121 - DNA, 60 bp, Homo sapiens
gcttcctgcttctgacatgttcttggttggcagtgttgctgtgtcatgtccaagtgaaac

SEQ ID NO: 23122 - DNA, 60 bp, Homo sapiens
actcccctagcagggtgcctgacgtgtggggaaccctcagtaaatagtggtgcatttgta

SEQ ID NO: 23123 - DNA, 60 bp, Homo sapiens
cacaagggcagagcagcattctgagagacgcacaggagaccaagccagaccaataaacag

SEQ ID NO: 23124 - DNA, 60 bp, Homo sapiens
gcttggaagtgcaccaagcactatataggtactgcctcattacatattcacaaaactcta

SEQ ID NO: 23125 - DNA, 60 bp, Homo sapiens
agtcctcacctggccacttcgttgtgtcacctgtttggttcggttcttgaaggcacttcc

SEQ ID NO: 23126 - DNA, 60 bp, Homo sapiens
tcatctgtacaccgacagggttgatgcctccctcacagggttgagaacaagagccagttg

SEQ ID NO: 23127 - DNA, 60 bp, Homo sapiens
ctgcttacctggacttgttgctggggaactgctatctgatgcccctcaatacttctattg

SEQ ID NO: 23128 - DNA, 60 bp, Homo sapiens
cccggccttttctcatgctgtttgtctgctggaattaccactagtgccaggccatttgaa

SEQ ID NO: 23129 - DNA, 60 bp, Homo sapiens
gacctgtaagacctggatatcattgggtttccatgcacaggccagcacctcagtaatgtg

SEQ ID NO: 23130 - DNA, 60 bp, Homo sapiens
ttgctgtaggtggaatcgggcctgtatgtgagttaccagggttgcagaggacactgtggt

SEQ ID NO: 23131 - DNA, 60 bp, Homo sapiens
tttctttggcatcgctgaacacgggtgataacgagagtgtacattcaggcaagaggacgc

SEQ ID NO: 23132 - DNA, 60 bp, Homo sapiens
ggtataccagatacagatggttgcaaggaaaccttttcccccactagaatagtctattag

SEQ ID NO: 23133 - DNA, 60 bp, Homo sapiens
gatgttgaggcagtgagagcgattgatagactgctacccagcattggagagatgactctc

SEQ ID NO: 23134 - DNA, 60 bp, Homo sapiens
tacctggagccagatggctgtggagttgaggaagtccctgaacatagcactttgttcctg

SEQ ID NO: 23135 - DNA, 60 bp, Homo sapiens
actcctcacgtttggtctgttgccatttccggcttggttggaatagggtaggagcctttt

SEQ ID NO: 23136 - DNA, 60 bp, Homo sapiens
gagtcagctcagagaaagcaagcataagggaaaatgtcacgtaaactagatcagggaaca

SEQ ID NO: 23137 - DNA, 60 bp, Homo sapiens
gtcatgccgcagacttttcacactgtgtccgaagctgagccttgatctgttcctgaactt

SEQ ID NO: 23138 - DNA, 60 bp, Homo sapiens
tgttttaagctttggcctctatccaggttattctgacaatgaagaaatgggagttgtcag

SEQ ID NO: 23139 - DNA, 60 bp, Homo sapiens
gggaactagtagagactgagaaagggttgtgaatagcttaggtttggtaaacttaggaaa

SEQ ID NO: 23140 - DNA, 60 bp, Homo sapiens; identical to SEQ ID NO: 4855

SEQ ID NO: 23141 - DNA, 60 bp, Homo sapiens
gggctcccttgtgtcttctatggtcacccttgttttctgcatcccacttgttcctctttc

SEQ ID NO: 23142 - DNA, 60 bp, Homo sapiens
gcatatggtcattaggggccatcttagtcactactgttcgtggattgttctccagcttcc

SEQ ID NO: 23143 - DNA, 60 bp, Homo sapiens
tcagcagccctgaaggcggacgatgattacaaggactatggagtcaactgtgacaagatg

SEQ ID NO: 23144 - DNA, 60 bp, Homo sapiens
aaccactgtttatcctcacatcccttccctaactgtatccccatttcttggctataattc

SEQ ID NO: 23145 - DNA, 60 bp, Homo sapiens
atctctctcgtaagccacctgccacagcacagctggaggctgttctctggtgttctcagc

SEQ ID NO: 23146 - DNA, 60 bp, Homo sapiens
aacccctcagcttgagactcaggagccccatagtccccacagcaataagaagcaccagct

SEQ ID NO: 23147 - DNA, 60 bp, Homo sapiens
tttgagaatcagatgagactgtgctggcgaaggccctgtgggaatgaggaacgctgtagt

SEQ ID NO: 23148 - DNA, 60 bp, Homo sapiens
tagtcatcctcttcagcggtcctcccagagctgtcctcagcatggcagcctccacagccc

SEQ ID NO: 23149 - DNA, 60 bp, Homo sapiens
cccctgctgacgatcacgtctgatttttggcatgcatcaagtccagcatatggggaactg

SEQ ID NO: 23150 - DNA, 60 bp, Homo sapiens
atgttaagctcttcttggaacaagccccaccttgctttccttgtgtagggcaaacccgct

SEQ ID NO: 23151 - DNA, 60 bp, Homo sapiens
cacctagaccaccctagttttcctctctgttagtgtcctgagctcttttgcaacaaaatg

SEQ ID NO: 23152 - DNA, 60 bp, Homo sapiens
gaaggaggcagagaagatcatcaagaacctcatcaagacagtcatcaagctggccattct

SEQ ID NO: 23153 - DNA, 60 bp, Homo sapiens
atgtcaccacactgtcgcctcatagctgcaagagagaggcaccagctgaagttcccctga

SEQ ID NO: 23154 - DNA, 60 bp, Homo sapiens
ggcccaatttctctcacttctgcatgaagtcaccaaatgccagtgattctgcttctaaca

SEQ ID NO: 23155 - DNA, 60 bp, Homo sapiens
gcagaataagagtaaacaggccttctctagccatgtttgatgcaagatggcccacagctg

SEQ ID NO: 23156 - DNA, 60 bp, Homo sapiens
ctgtattgatgcctatacaaccataaccccagaagtactctcatactgtgaaagtcattg

SEQ ID NO: 23157 - DNA, 60 bp, Homo sapiens
acgaggacttaagccagtaatcgtttttgttcagatagaggtgtggaggtagagccagcc

SEQ ID NO: 23158 - DNA, 60 bp, Homo sapiens
cctcacaccagagacagtcgtttcttctcttaactcttaagccctcctcagtcactcgga

SEQ ID NO: 23159 - DNA, 60 bp, Homo sapiens
atatctctcccaccatcagcacttcccacagtctgagccgtcctgactactggtccagta

SEQ ID NO: 23160 - DNA, 60 bp, Homo sapiens
caagaaagaatgcaatgcttttgagcctctggtctcctggttcaacaacaggcttatatg

SEQ ID NO: 23161 - DNA, 60 bp, Homo sapiens
gtccttctgtcactctgagacatacactggtaacatctgtgcaagcccctttccaggatt

SEQ ID NO: 23162 - DNA, 60 bp, Homo sapiens
gctaatgtaatctagcttgagctcaaaggacaccagagctaaagcaagatatgtcccttt

SEQ ID NO: 23163 - DNA, 60 bp, Homo sapiens
tccccaaaggtagatgaccagtgtggaaattccagtagcatcccctttcttagtccaaac

SEQ ID NO: 23164 - DNA, 60 bp, Homo sapiens
tgtaaaacctcactggctctgaggctcccagcatctgctgcactacactccctgtagagt

SEQ ID NO: 23165 - DNA, 60 bp, Homo sapiens
ggagagttgatggcaagtctcagtcaaggcactcagctcaaatacacacacctgttgcca

SEQ ID NO: 23166 - DNA, 60 bp, Homo sapiens
gaagcccatcctccatggcccagagagaaaacccaggacaaaaccttggagaagactatt

SEQ ID NO: 23167 - DNA, 60 bp, Homo sapiens
tttgtcttcctgtagacttacaaggtaccactagggttcctttggagaactcaggagtcc

SEQ ID NO: 23168 - DNA, 60 bp, Homo sapiens
cctgctccactgcttatcatcagttttcccaatagcaccagctgatcacacatcaactcc

SEQ ID NO: 23169 - DNA, 60 bp, Homo sapiens
gcaatggaatggacattggcagaagggttaatggattgtccagccctttctctgtgtggc

SEQ ID NO: 23170 - DNA, 60 bp, Homo sapiens
tttgttgcacttgtctgtggctgaaacacttacctgcagtggaaagccgagcaaggagga

SEQ ID NO: 23171 - DNA, 60 bp, Homo sapiens
gcatgtggaaggtaatctgcaaaacaaattcattgtgttagtgtagcgggatatggaatg

SEQ ID NO: 23172 - DNA, 60 bp, Homo sapiens
cctccagagatcaggaccagtagtgttttgctctctcttgcaatctcagtggttggcagg

SEQ ID NO: 23173 - DNA, 60 bp, Homo sapiens
ttaccctaagagaaatgactatcatcctgtcagcagatttatcaccaacagttgtgacag

SEQ ID NO: 23174 - DNA, 60 bp, Homo sapiens
aaatggaaagaattgggagccttcctaccgctggtgaaatctaggagtggcagttgaggg

SEQ ID NO: 23175 - DNA, 60 bp, Homo sapiens
gtgctactctattccctattattccaggaccatttccaaaaccaaagctaccagaacagc

SEQ ID NO: 23176 - DNA, 60 bp, Homo sapiens
atttgtcttttagagcagtgctggagcatcctctcctaggctgggaggttgctaatgtaa

SEQ ID NO: 23177 - DNA, 60 bp, Homo sapiens
gcagagggatcttagtttggttgccttccaggtctatctgtaggtaggcaggttatccat

SEQ ID NO: 23178 - DNA, 60 bp, Homo sapiens
cgtagacttgtccctgttacaggcactaggaacacagcagggaacaatcaaaaagtccct

SEQ ID NO: 23179 - DNA, 60 bp, Homo sapiens
cttatcgtttgtgccatggatacggaggattatccttgctcgattaacttctcattcact

SEQ ID NO: 23180 - DNA, 60 bp, Homo sapiens
cactggctgcacatcactctgtaaagcagcaagagatgcaggtgtgactggttctgacac

SEQ ID NO: 23181 - DNA, 60 bp, Homo sapiens
gccatcaggccagcatctcccttcccattttccttgtgaccactgtttaggcattgagat

SEQ ID NO: 23182 - DNA, 60 bp, Homo sapiens
gtatgtaaggacatcattttgcagatgaggatacaaggccaaagatgtcttgctcaaagt

SEQ ID NO: 23183 - DNA, 60 bp, Homo sapiens
catgtgttgtcagagaaactcttgctggaagggtcaggttcctaggctacccacaaagga

SEQ ID NO: 23184 - DNA, 60 bp, Homo sapiens
aactcggcctgtgtgggttctgcataccgagcttttcatggtcttgcaggtggaacagat

SEQ ID NO: 23185 - DNA, 60 bp, Homo sapiens
ctcactcaagatgtgacaaagcataaagagtcattttggtccagaaatccctgttggtac

SEQ ID NO: 23186 - DNA, 60 bp, Homo sapiens
tcctagcttggctcagtccccactggctgtgtggcctttagcatcacctagattctacaa

SEQ ID NO: 23187 - DNA, 60 bp, Homo sapiens
cccagccttggggagctcattgagtcacagagaaagtttgaatgtttcagaggaatcatc

SEQ ID NO: 23188 - DNA, 60 bp, Homo sapiens
cggtagtgtgtcttaaccttctgacagctgctgtgacgaagctagaaagcttaatgagac

SEQ ID NO: 23189 - DNA, 60 bp, Homo sapiens
ccttgctgggatcatgtggtctacagcacaaggttgctaaagcatcttctgccagaattc

SEQ ID NO: 23190 - DNA, 60 bp, Homo sapiens
gcctctccaattccacattccaagtctataacagctttggaaatgagtaacaatgacctc

SEQ ID NO: 23191 - DNA, 60 bp, Homo sapiens
tctcaggccatagctcctaccattgaacagattgaccagtcttttggcgcaacccatcct

SEQ ID NO: 23192 - DNA, 60 bp, Homo sapiens
gacgcatgacatgtacttagatagcttatcttagagccacactgagattggaacccgcaa

SEQ ID NO: 23193 - DNA, 60 bp, Homo sapiens
ctcctggtgttctgtggtcatgtccaagggactaaagcagcagtaaagctccatagtcag

SEQ ID NO: 23194 - DNA, 60 bp, Homo sapiens
tcttatcagaccctagatgccatttgagccccttacttctttgggcagtgggtgaaatgg

SEQ ID NO: 23195 - DNA, 60 bp, Homo sapiens
gttgttttctaggcattttcagtgttactgatatcccaggaactgtcagatcaccacccg

SEQ ID NO: 23196 - DNA, 60 bp, Homo sapiens
gggatgcagcatctgtgtcttcttgaaggaactgcggcatcttggcaagttcagtcattg

SEQ ID NO: 23197 - DNA, 60 bp, Homo sapiens
gtttggccatttgtgtataaggttggtaacattagaggctgtgagcttgtgttacatggt

SEQ ID NO: 23198 - DNA, 60 bp, Homo sapiens
gggagtttggagaagaccagatctatgaagcccaccaacaaggccgaggggctctggagg

SEQ ID NO: 23199 - DNA, 60 bp, Homo sapiens
aacagcgatgtggttgtctgcttagccacatgcctgtatagttccttccagaagaaatgt

SEQ ID NO: 23200 - DNA, 60 bp, Homo sapiens
ttccgtgttctttctgaactccatgccctcaaccactttgccactttgcctgtgtgtcac

SEQ ID NO: 23201 - DNA, 60 bp, Homo sapiens
gtcgggtaatgcgtgtggctgaatgggcataaccactgtggcttcttgtgctgcagaagc

SEQ ID NO: 23202 - DNA, 60 bp, Homo sapiens
cccgaacctcattccagacggagatacagaggcagctaaaagatcactgcacaatactgc

SEQ ID NO: 23203 - DNA, 60 bp, Homo sapiens
gagacagacgccaccactcctttggcagctgacttgtacgtttcctctaggctattgtta

SEQ ID NO: 23204 - DNA, 60 bp, Homo sapiens
atgtttgcatcacccatgtgcgttccttcacccgacttctggggccattcttatctgcaa

SEQ ID NO: 23205 - DNA, 60 bp, Homo sapiens
aggaagtgtgaggtgaccttgcaggtcccagagttgattgaagaccccatccagaaagaa

SEQ ID NO: 23206 - DNA, 60 bp, Homo sapiens
ctcaccagctgtgtccaagatcaaccctgaccctgttactccaatgcctttgtaggagta

SEQ ID NO: 23207 - DNA, 60 bp, Homo sapiens
ctgtatcaagcaggaacaagctcgtaaatcccaagagttacagagtcagattagtcaatg

SEQ ID NO: 23208 - DNA, 60 bp, Homo sapiens
ccaagctagacctccctggagcctgtggagaagccaaggtagaaaagggttggaaaagaa

SEQ ID NO: 23209 - DNA, 60 bp, Homo sapiens
ccaatgcaagtgaacacgggctttccttatagtggtcatatctctgcttttgaactagca

SEQ ID NO: 23210 - DNA, 60 bp, Homo sapiens
ttcaggcactagttcagtcccaaatctgcctccccactttcaggcactagctgcaggtca

SEQ ID NO: 23211 - DNA, 60 bp, Homo sapiens
caatgcagattagtgaacgtggattcctgctgagggagtgcatcccataatatggcaata

SEQ ID NO: 23212 - DNA, 60 bp, Homo sapiens
tggtagttgcacctgcaaatctggttaccaaggcaacagatgccagaaagatggcctctg

SEQ ID NO: 23213 - DNA, 60 bp, Homo sapiens
tggccacggagtacgtgttctcggatttcttgctgaaggagcccacggagcccaagttca

SEQ ID NO: 23214 - DNA, 60 bp, Homo sapiens
ggaagatgtgcaaaggcaacggcacagcgttctccatctcaaatccttcaaagtgctgtc

SEQ ID NO: 23215 - DNA, 60 bp, Homo sapiens
tatgttgatgattatcggtgactgctcaccacacagcatccctcaggccgagtcagttgg

SEQ ID NO: 23216 - DNA, 60 bp, Homo sapiens
ttaatcgtgctcctttcctggcataacaactcactgcacccatgcctcaccaccacgaag

SEQ ID NO: 23217 - DNA, 60 bp, Homo sapiens
gcctccgttttctctgtggaaaagtccagatcccgacttatactgtctctgtcttacgga

SEQ ID NO: 23218 - DNA, 60 bp, Homo sapiens
tttctacctctgcctcattttcctgcattccgtaaatccccagtcagaagacagcagggc

SEQ ID NO: 23219 - DNA, 60 bp, Homo sapiens
agtgacagccacttgtgtagacaagagagagctggacaaggccgagctatctgcattgaa

SEQ ID NO: 23220 - DNA, 60 bp, Homo sapiens
ttgcccagaaaggaaccaataggcaagacaacgaggcagtgagcggtaggagctcatcac

SEQ ID NO: 23221 - DNA, 60 bp, Homo sapiens
gctcttgacaactcttagagcactatttcacagctttcacatagcacagataactcgcca

SEQ ID NO: 23222 - DNA, 60 bp, Homo sapiens
ttccaacatgtgtcagcatcagcggattcacctccgggaggacttctccatgtaacagtg

SEQ ID NO: 23223 - DNA, 60 bp, Homo sapiens
ggtgcttgctgaatcagtccatgaaaagctacagcccgctctttgggaatgctacatacc

SEQ ID NO: 23224 - DNA, 60 bp, Homo sapiens
atagctttccatacaggtaaaaccgaaaaccgaattttccaaaaatgcaccccgacggcg

SEQ ID NO: 23225 - DNA, 60 bp, Homo sapiens
gacataggcactgacatgaaagaacccccaatgaccaaagctgcaaaattggagcaaccc

SEQ ID NO: 23226 - DNA, 60 bp, Homo sapiens
ccaggacatagggctctgtcagcaataactgtcatctttgtatttgcagagatgtaaata

SEQ ID NO: 23227 - DNA, 60 bp, Homo sapiens
tcgcccactgaatcatcatgcactgaccgaaatgccacctgtatgagtgctaaaatcatt

SEQ ID NO: 23228 - DNA, 60 bp, Homo sapiens
tgtctttcagaggctggcagaggaaggagcaacagcatggattgtgtgcagcaggtgttt

SEQ ID NO: 23229 - DNA, 60 bp, Homo sapiens
aacaaatcccaagttgcagtctgcccaggtaattcatgtctatcaagtgtctacaatacc

SEQ ID NO: 23230 - DNA, 60 bp, Homo sapiens
ggcctagttagtccatcattcctaactttgacatttctgaacgactggcattttctgaca

SEQ ID NO: 23231 - DNA, 60 bp, Homo sapiens
ctctaggttatgtactgaggaccaccttatctgggtcaggtacactacacagagtgctac

SEQ ID NO: 23232 - DNA, 60 bp, Homo sapiens
gtactattcagtaaagagcctgaaactgcttcagtccaagctgattttgaatgcataaag

SEQ ID NO: 23233 - DNA, 60 bp, Homo sapiens
ttaaagaccgcctcttactggccaggagtggacttggttagggctaccttctcattggtt

SEQ ID NO: 23234 - DNA, 60 bp, Homo sapiens
gaaaagagcaaagcttgttgagatgcaagggcaggtgaccagatagtttcactcactgct

SEQ ID NO: 23235 - DNA, 60 bp, Homo sapiens
tcgtgccataactcggcatttgacctgaagtatcacccaaggaaaatgtcatacatgtgt

SEQ ID NO: 23236 - DNA, 60 bp, Homo sapiens; identical to SEQ ID NO: 4855

SEQ ID NO: 23237 - DNA, 60 bp, Homo sapiens
agctactgatgctgtgacctcacctctctggctttgggcggcaggtccctgcacctagga

SEQ ID NO: 23238 - DNA, 60 bp, Homo sapiens
aaatctcttggctgaagaatgaccagcctgtcaccttccttgaccgataccgcatggaag

SEQ ID NO: 23239 - DNA, 60 bp, Homo sapiens
gggactgaatgccaaaggactccctttaggcatccaggttgtggctggaccctttaatga

SEQ ID NO: 23240 - DNA, 60 bp, Homo sapiens
atgtcctctcatttcctggtgaagtgacattaggtaggactgtttgggtgcctgtgcagg

SEQ ID NO: 23241 - DNA, 60 bp, Homo sapiens
gattctctggaagataaatctctacgctaaggtggataggactccatagtattcagtgac

SEQ ID NO: 23242 - DNA, 60 bp, Homo sapiens
ttgccccgtaaagcgaattgcactttgatgttcagaaacccactttgttctcagccacgc

SEQ ID NO: 23243 - DNA, 60 bp, Homo sapiens
aacttgccagcaaagggctgggaagaccccaagtgtctcttgtcagggaagctttataga

SEQ ID NO: 23244 - DNA, 60 bp, Homo sapiens
taatcccagagtcggaagtgggtgtcaacaagccaaagcaacatcctttcagctctgctg

SEQ ID NO: 23245 - DNA, 60 bp, Homo sapiens
aactctcctgtggtcagctgtctgctttccttgctcagcacggtgttgggatggggtttg

SEQ ID NO: 23246 - DNA, 60 bp, Homo sapiens
cctgagacctctctgtaccagatcctcttatacccaggttctccttaatcccaatcaact

SEQ ID NO: 23247 - DNA, 60 bp, Homo sapiens
gcccagaggtgggttaaactgtaagggacagctgagattgagtgtcagtattgctaagcg

SEQ ID NO: 23248 - DNA, 60 bp, Homo sapiens
cctatatctgccaagtgagaccacagtgcctctacccggattcatgaggaaggtctatct

SEQ ID NO: 23249 - DNA, 60 bp, Homo sapiens
cctatcactgtcatagctgtcttactgccatagagcaatgcattacgcaggtgtctgtgg

SEQ ID NO: 23250 - DNA, 60 bp, Homo sapiens
atgtagcctctacagaaagatagccgacttcttacatgcaagctcagagttcccaagaag

SEQ ID NO: 23251 - DNA, 60 bp, Homo sapiens
gctcccactcctgtgctcatctctactcctgaactacagtgccatcttgtcatttgtctg

SEQ ID NO: 23252 - DNA, 60 bp, Homo sapiens
ggaacttgtgctctctggtgcttgcagctatgttccctggctttcatcgtcttggctttt

SEQ ID NO: 23253 - DNA, 60 bp, Homo sapiens
gtttctctaggaaacacattcactgtctcagctggctgttactctctcagaccatatggc

SEQ ID NO: 23254 - DNA, 60 bp, Homo sapiens
atgcagctcctggtggtccatctgagcgggtcgtttgaggtcatctctggacgcttactc

SEQ ID NO: 23255 - DNA, 60 bp, Homo sapiens
ctcctggtccagaggcctccgtgaccatccatgatgccactctgtcccctcagcaagctg

SEQ ID NO: 23256 - DNA, 60 bp, Homo sapiens
cactttgttctggcaagagcagaaaactgagaagccgtgttacctaccactacctgggat

SEQ ID NO: 23257 - DNA, 60 bp, Homo sapiens
gatggacctcagatactaccagcagaaagcagaagagctaggatttcaacttaggatgtc

SEQ ID NO: 23258 - DNA, 60 bp, Homo sapiens
tccatcagtagccacagagctgctgcctgaaggggattttgagcgcgtcacactttcctc

SEQ ID NO: 23259 - DNA, 60 bp, Homo sapiens
gggagaaagccagtcacatacaacagctagatcaggttttggggaagctatcgcttagca

SEQ ID NO: 23260 - DNA, 60 bp, Homo sapiens
tgaggttgtgagccacagggttatcttgaagaagagcattccaaggacaggggaaacttc

SEQ ID NO: 23261 - DNA, 60 bp, Homo sapiens
gctgagattagaatccagattcctagtctagtatccttcccactgtaccacattatctct

SEQ ID NO: 23262 - DNA, 60 bp, Homo sapiens
ggggaacgtcagattcttagggagtgttactccaactaatgctacactcagggcgacttc

SEQ ID NO: 23263 - DNA, 60 bp, Homo sapiens
gtgaaatacagacttggcatttagcttgtcaaatgtaaacatgttttctgctttctttgc

SEQ ID NO: 23264 - DNA, 60 bp, Homo sapiens
ctatggcttgtgggccagattaagcctatgactagtttttctacagcctgtcacctaaga

SEQ ID NO: 23265 - DNA, 60 bp, Homo sapiens
cctgcctgcttttcaggttgtttcccatgttcagcgtggactgcagaagtggctcacgct

SEQ ID NO: 23266 - DNA, 60 bp, Homo sapiens
cacaactgcaccctacagaactgacactgttttctgcttccttagaaaatgtacctcaac

SEQ ID NO: 23267 - DNA, 60 bp, Homo sapiens
accttggctcctacctccatgttagggcccaggtgactagctgtctccctcccaacagaa

SEQ ID NO: 23268 - DNA, 60 bp, Homo sapiens
ggataagcagtgacccatggccaatttcctatgtcatacacttgccattagtgacgtaag

SEQ ID NO: 23269 - DNA, 60 bp, Homo sapiens
tgtgactggaagggtggatatgggagacacattctctacctgctccgagcctggtcctct

SEQ ID NO: 23270 - DNA, 60 bp, Homo sapiens
gcttcttttgcaagtttgagaatttcacagtaacttctggttaccctgggttgtgtcttg

SEQ ID NO: 23271 - DNA, 60 bp, Homo sapiens
atttggacttggaggaccctgggtgtccctggagctggttcttgaatgcatgggttcaga

SEQ ID NO: 23272 - DNA, 60 bp, Homo sapiens
cccttagggactgactgttcaggggaccctctgtcatttgagctcttcgagtgaagatta

SEQ ID NO: 23273 - DNA, 60 bp, Homo sapiens
agtaacgtctgtaaaaccccttcctggacagcgtaaggcctccacatctaagttcctgtc

SEQ ID NO: 23274 - DNA, 60 bp, Homo sapiens
tcaggagaagggacatggccttactcagtgtctgccacatcgtgagctcagtaaacaaca

SEQ ID NO: 23275 - DNA, 60 bp, Homo sapiens
tgaagtaaccatagcacctctgcactggaccggaaaagcgaatgtcttcaaggaaggcca

SEQ ID NO: 23276 - DNA, 60 bp, Homo sapiens
catcttctgggtggagcagtgcaatgactatgtacgacacttggccttaacagaaaatgt

SEQ ID NO: 23277 - DNA, 60 bp, Homo sapiens
gcatggccagatttgacgctagaagagctggataaagactctagattaagaagggctttg

SEQ ID NO: 23278 - DNA, 60 bp, Homo sapiens
tatttcgttaatactatcataggtttctaggttacaggttgctcgcttctgtaatctcag

SEQ ID NO: 23279 - DNA, 60 bp, Homo sapiens
ggactgggaatatgaagaggtgggtattattgggagtcctgtcagaagctgcctgctaca

SEQ ID NO: 23280 - DNA, 60 bp, Homo sapiens
ttttagccctagacttcctagattttctgtggcattctgtaggacattgtattgcttgga

SEQ ID NO: 23281 - DNA, 60 bp, Homo sapiens
aagaaactacttgccagaagccaggaccaatttggcagagtctactcaaaacagtgagtt

SEQ ID NO: 23282 - DNA, 60 bp, Homo sapiens
gatagctgggtggtgacctcttagcgggtggatttccctgacccaattcagagattcttt

SEQ ID NO: 23283 - DNA, 60 bp, Homo sapiens
ccaagaagaaattggtatactttgtgcaaatctgccataagctcaaggctgtgactgggg

SEQ ID NO: 23284 - DNA, 60 bp, Homo sapiens
gatagctgactcattcttttggattgctacgtaatctcacttaatacagatgtatcatga

SEQ ID NO: 23285 - DNA, 60 bp, Homo sapiens
tctggtctctggagagtattgaaggtagaaaagacaaggagaagatgctgcagaacaccc

SEQ ID NO: 23286 - DNA, 60 bp, Homo sapiens
acgagatctaccccatcgtcatccacgtggaggtgactgagaagaatgtccgggaagtca

SEQ ID NO: 23287 - DNA, 60 bp, Homo sapiens
taggtcacatgacgctccaaagcctcttcaaaaccgcatgactcagagtgaggcagaagt

SEQ ID NO: 23288 - DNA, 60 bp, Homo sapiens
aacgaggaggctacaaggtgtagtggagcaagcactggatgggcaatgcagcaatttact

SEQ ID NO: 23289 - DNA, 60 bp, Homo sapiens
tgagggccactctgagctggaggcgggtcaaggcaaaaggagtaatgcaacgcctgtgaa

SEQ ID NO: 23290 - DNA, 60 bp, Homo sapiens
ataaggtagctctcttccatctcagaacccatgacctccatggtgaatcatgtagcctcc

SEQ ID NO: 23291 - DNA, 60 bp, Homo sapiens
acaggagctgtgatctttgtgttctgaaggcttcactcaggtgtggctgtgactgagggg

SEQ ID NO: 23292 - DNA, 60 bp, Homo sapiens
caacgttcagtacttaaaggagatcctgagttttagctagaaatgttttcagttttatgt

SEQ ID NO: 23293 - DNA, 60 bp, Homo sapiens
tacctatattcgtatcacttggtgaccacctacacttcatggccagaaaagcttagtgcc

SEQ ID NO: 23294 - DNA, 60 bp, Homo sapiens
aaagtcttgagcaaagaaccggaggatgcaagtgctgcagagaacagaccccatactgtg

SEQ ID NO: 23295 - DNA, 60 bp, Homo sapiens
tctgagacaaacctgggtcacaggaaccatagggaagatgtctgcagtagaaggggacct

SEQ ID NO: 23296 - DNA, 60 bp, Homo sapiens
gggatactcttccccaagacatctagggaactcaaactcactcctttaggcccttgttca

SEQ ID NO: 23297 - DNA, 60 bp, Homo sapiens
agtcacacctagcctatctcatccttatcatgcagcctcctacaagggcaggcactcctg

SEQ ID NO: 23298 - DNA, 60 bp, Homo sapiens
tttgctgacctgctgtcttaagtcagtgctgtgattcctgcaaaagacggcagagtcagg

SEQ ID NO: 23299 - DNA, 60 bp, Homo sapiens
accacactgtcatcaggcatctttaaatagcagtacactccagtggttaagcttggtttc

SEQ ID NO: 23300 - DNA, 60 bp, Homo sapiens
gttcctagcaacttagcaactatctccaggcctcacatgtttagccctttcccaaaagtg

SEQ ID NO: 23301 - DNA, 60 bp, Homo sapiens
ctgaagaacaactttatggtggacaccttcgtctccatctggtgagtccagcacaagcag

SEQ ID NO: 23302 - DNA, 60 bp, Homo sapiens
cccgcttgtggcttgtttctgtcctagctggaggtgtaaaatgcacaatgtgtagcaggt

SEQ ID NO: 23303 - DNA, 60 bp, Homo sapiens
gtccaggaaaatgcaacatgaacctcgattgttctgtggaccattcctccctctatgaaa

SEQ ID NO: 23304 - DNA, 60 bp, Homo sapiens
gcagtcggcagacagcaatgttgactgtcatgaaaagtgatccctgtttgcccctaaacg

SEQ ID NO: 23305 - DNA, 60 bp, Homo sapiens
acacttcctctggtgtactgggcactgtgctgggtagtataggagttataaacaagaaat

SEQ ID NO: 23306 - DNA, 60 bp, Homo sapiens
ctagtgaaaggaaaattgcgcctctccctcaaccctgctccagacaactgaatggtgact

SEQ ID NO: 23307 - DNA, 60 bp, Homo sapiens
cgaggggacaacttgagaaagtcaggcaaagtaagttgccattgacagatggtgttcagc

SEQ ID NO: 23308 - DNA, 60 bp, Homo sapiens
agacagtcagctcacagagaaaaatgacaaggtgggtctgcaaacaacggaagcactggc

SEQ ID NO: 23309 - DNA, 60 bp, Homo sapiens
tatagacaggagaatgcctcagacacgtttccacaagatgactatcattgctggccatag

SEQ ID NO: 23310 - DNA, 60 bp, Homo sapiens
ctggatgaggctttacaccattgtgtgtttgccaccgtgtttgtacacaggaagggctca

SEQ ID NO: 23311 - DNA, 60 bp, Homo sapiens
gttccttccagtctaagactatggaactcagaatctagcaggtgtgttcctttggatagc

SEQ ID NO: 23312 - DNA, 60 bp, Homo sapiens
gaaagaatccagtctcccgcaaaagagattcaccccttagcattgccggaaggagaatct

SEQ ID NO: 23313 - DNA, 60 bp, Homo sapiens
cagaaccaggagtgaaagcatcagatcactgcaaagtgtgagaagatcggaagttcgcat

SEQ ID NO: 23314 - DNA, 60 bp, Homo sapiens
tgaatgaggctgagagcaacttgtagtcctgggttgaatcttcaaagctgtcccagctgc

SEQ ID NO: 23315 - DNA, 60 bp, Homo sapiens
cccttacccctcccttagtcttgggttaagtcccagaatccttgaatttgccgttcctga

SEQ ID NO: 23316 - DNA, 60 bp, Homo sapiens
gacatcatctttgccaaacaatgtgcagtgaaatgagagaccaccttccttatggcatgt

SEQ ID NO: 23317 - DNA, 60 bp, Homo sapiens
actatggaaaggaaagttgtacggcgaacgactgaaggagccaaacgaggtggatctgga

SEQ ID NO: 23318 - DNA, 60 bp, Homo sapiens
cagcagtggcagaggtcccatgtaatggtgcaaggtgtggaggctttgcttagcagtttt

SEQ ID NO: 23319 - DNA, 60 bp, Homo sapiens
tacatgtcttggactccaaggctactggttttccctgtgaaccaccttgagattaggtgg

SEQ ID NO: 23320 - DNA, 60 bp, Homo sapiens
gttcagttgccatcttctgcctactcctgagctttcatccaagagaaatcagtgtttgct

SEQ ID NO: 23321 - DNA, 60 bp, Homo sapiens
gggccagattggaatgcttcagattcatgcttcctgtccttcctgaaaactggcagtgtg

SEQ ID NO: 23322 - DNA, 60 bp, Homo sapiens
ggtagttctgagaatgtggtcattgaagttggatctaagaggaaagtggttatcggttgc

SEQ ID NO: 23323 - DNA, 60 bp, Homo sapiens
cctttgctttggcctggaagaccgaacatattaggctcaattttcttcgtgtagcagcgg

SEQ ID NO: 23324 - DNA, 60 bp, Homo sapiens
ccaagcacaatgtaagcacagttctaggctgtgtttgtcttgtgagtccttcctggctcc

SEQ ID NO: 23325 - DNA, 60 bp, Homo sapiens
ttttatgggaagagagttcatcagggactgattacgtaggagagacgatgcaggggaaat

SEQ ID NO: 23326 - DNA, 60 bp, Homo sapiens
ttataggaggcataagcagatcccgcgatggcttgtcattgtcccctgtcctggaacaat

SEQ ID NO: 23327 - DNA, 60 bp, Homo sapiens
gactgaccctgtacagaaagtttgctgctcttagaggaatgtgtgtttctagtgtcagca

SEQ ID NO: 23328 - DNA, 60 bp, Homo sapiens
gcagatactggcaagggctccaccacccagggaggaattcatgataatggcataaagcat

SEQ ID NO: 23329 - DNA, 60 bp, Homo sapiens
ccctgcttctgcttagctctgggcataagactgactccagtacagtcacagttatgtctc

SEQ ID NO: 23330 - DNA, 60 bp, Homo sapiens
gggctgggaatcctctttagagcacttaatcctatttatcccctggaatgtgcgtgctgg

SEQ ID NO: 23331 - DNA, 60 bp, Homo sapiens
tgccacccctttggaactaccatgcattcatgtcaatgccacatatctctggagtcgccc

SEQ ID NO: 23332 - DNA, 60 bp, Homo sapiens; identical to SEQ ID NO: 4855

SEQ ID NO: 23333 - DNA, 60 bp, Homo sapiens
tgcttatctctgaatcagttcctgaggctaagggcatggaatatgctgcttggccagcct

SEQ ID NO: 23334 - DNA, 60 bp, Homo sapiens
tattatcaagccctcctacaggaacaagaagaacattatcagaccagggcaaccagtctg

SEQ ID NO: 23335 - DNA, 60 bp, Homo sapiens
ttgagaagcaggggactcctgtggtacaagggtccttggagctagagagggtcatgagtt

SEQ ID NO: 23336 - DNA, 60 bp, Homo sapiens
ccattgcctatgcatcttacctgtggctcaagattaccttggcactaaatccaattagcc

SEQ ID NO: 23337 - DNA, 60 bp, Homo sapiens
cccataacacacataccattctcacaggaggccacatggtgcagtagagtcagactttga

SEQ ID NO: 23338 - DNA, 60 bp, Homo sapiens
ccccaacacaggaacgctcatggacacctgcacactccacagaagacgttggcatgtgag

SEQ ID NO: 23339 - DNA, 60 bp, Homo sapiens
gcccatttctgtacctctcccctcagactgttagccacagacccttagtcattgcaaagt

SEQ ID NO: 23340 - DNA, 60 bp, Homo sapiens
taaataccacatacgcactgaagacaccaacctagactgctccccagactcaatatttcc

SEQ ID NO: 23341 - DNA, 60 bp, Homo sapiens
ccccaacgttgagaattcagttctgagccatcccaacttcttaggattgttgtgcggtgg

SEQ ID NO: 23342 - DNA, 60 bp, Homo sapiens
atgagtgtgtcagagtatcagggaagctcaagaatctggccagagctgtcatttagagag

SEQ ID NO: 23343 - DNA, 60 bp, Homo sapiens
aggagtcacccagcatagaagcatgagtgaatgacatcccagagatctgcaaaggatcct

SEQ ID NO: 23344 - DNA, 60 bp, Homo sapiens
caatgggaatggttgggaggaggtaaagagtagaagacagtatcaagaatccagagccca

SEQ ID NO: 23345 - DNA, 60 bp, Homo sapiens
gcccaaacgacgctgaatcggcagcagaatgcaggactttggcctataatcaatgcaaaa

SEQ ID NO: 23346 - DNA, 60 bp, Homo sapiens
ggcttcagagcttacactctcctacttttatggagtacactaaattaggaaccagataaa

SEQ ID NO: 23347 - DNA, 60 bp, Homo sapiens
aatccaccaaagtcaacaacaagaatgaacagagggtgtcttcctgaactccagcctctg

SEQ ID NO: 23348 - DNA, 60 bp, Homo sapiens
cttactggttctcaggcgctttcagtgaaattcccgttccctcaccgtccacatctgtaa

SEQ ID NO: 23349 - DNA, 60 bp, Homo sapiens
tagataaagtgatgtttgcacactttgtatgttcacagagtactaaaacccattgaacta

SEQ ID NO: 23350 - DNA, 60 bp, Homo sapiens
gtcctgctcattgtcttgagtttctaaccatgtgcagatgcaagcgttcgggagtaggaa

SEQ ID NO: 23351 - DNA, 60 bp, Homo sapiens
aactcccttcagctgcgtgcctaagagcctcacctgagccctgtctcaatacggcatctg

SEQ ID NO: 23352 - DNA, 60 bp, Homo sapiens
ccacaactgccaagggatgaaacagtggagaatcctcatctccagaagcacattttggaa

SEQ ID NO: 23353 - DNA, 60 bp, Homo sapiens
ggtcctgggtccaaacgtcaaaagcagtcatcttgccatcctacacacttggctctgatt

SEQ ID NO: 23354 - DNA, 60 bp, Homo sapiens
tttgacagtcttcttagagtctccgctctgccacttcatgtgaggtgtggtctcttcctc

SEQ ID NO: 23355 - DNA, 60 bp, Homo sapiens
gtcattaatggtgtgtttgaattgaagagataccaggagatagaggtgaagtgcagtact

SEQ ID NO: 23356 - DNA, 60 bp, Homo sapiens
tgtttccttggttgtctcacgccactggaacattgaacccagacagaccctaggatgtga

SEQ ID NO: 23357 - DNA, 60 bp, Homo sapiens
ctagctccaagtataggacaagtccaagtccgtctgtgcttgctccagtccagctacttt

SEQ ID NO: 23358 - DNA, 60 bp, Homo sapiens
gtgacctctgtccctgctctcttctctgctggcttaagggtctattctccatgtgtctat

SEQ ID NO: 23359 - DNA, 60 bp, Homo sapiens
tatatggatcatcctcctggagagggttcttaagcctctgagaccgggtttggggctgag

SEQ ID NO: 23360 - DNA, 60 bp, Homo sapiens
attccagatgtgcggacagcccatgaccgaggtgcacacagtgccctcttgaataggaag

SEQ ID NO: 23361 - DNA, 60 bp, Homo sapiens
gcaggcccacatctaacccccacaagtcactgcctcactgcacctgccaaggctgccctg

SEQ ID NO: 23362 - DNA, 60 bp, Homo sapiens
acgctgagccgacctctccgttaggctgaagattgcacaaaccatgctaatggccagcat

SEQ ID NO: 23363 - DNA, 60 bp, Homo sapiens
tgcaagaaactgttcacagtgcacagtgttgccttccaggagtggggaactatatggagg

SEQ ID NO: 23364 - DNA, 60 bp, Homo sapiens
cccacgtcctccaggctgctgacttaaaatgggaagctgtttgggcagctcatttctgtt

SEQ ID NO: 23365 - DNA, 60 bp, Homo sapiens
taactcaggtttgatcaggcagttggtgaagaccgtccctctatgggtgtccctagtagt

SEQ ID NO: 23366 - DNA, 60 bp, Homo sapiens
tccaatttagcattgctctatcgggaggttggacagcacacagtcactctcaatatgcat

SEQ ID NO: 23367 - DNA, 60 bp, Homo sapiens
ctctgccttcctagtactggaattggactgtttctattcctacttaaagccagcctctcc

SEQ ID NO: 23368 - DNA, 60 bp, Homo sapiens
gactaagtgtcacccgcttccaccttctctaatcaaggaaatggtgacgatcaggttact

SEQ ID NO: 23369 - DNA, 60 bp, Homo sapiens
gatctggttaagtgttagttcttgagctgaattgcactggttagtgtcctggattttgaa

SEQ ID NO: 23370 - DNA, 60 bp, Homo sapiens
cctggatgtgatgaatggtttccaagttgtgagcagagtcgaaatcttggtggacaccac

SEQ ID NO: 23371 - DNA, 60 bp, Homo sapiens
caggagggcacttgttttgcacaacagttttacaaactagctgtctataagaggcagttc

SEQ ID NO: 23372 - DNA, 60 bp, Homo sapiens
cctggaaacggatggcctctacgctgttccatcacagtctccaactaaggcttatggtat

SEQ ID NO: 23373 - DNA, 60 bp, Homo sapiens
ctgtgactctctccctgagggctttctctgacatcatctgcacatggacagcttagactg

SEQ ID NO: 23374 - DNA, 60 bp, Homo sapiens
tgtcagggagatggcactaacacgacacaagctcactcccagaaccgcagctgatgttta

SEQ ID NO: 23375 - DNA, 60 bp, Homo sapiens
ccagcagtgtacctgtgctataaggtgggcctggcgaaggccaacacgctggtgtacgag

SEQ ID NO: 23376 - DNA, 60 bp, Homo sapiens
cagctgaaatcatcggtccccaggatgacaccacagcatctgcccctgctatatgtgggg

SEQ ID NO: 23377 - DNA, 60 bp, Homo sapiens
taggtgcacagacaattcaggtccatggcccagatggtacttgctgtcttctgcaaacct

SEQ ID NO: 23378 - DNA, 60 bp, Homo sapiens
ggcagatggacttcttcagtgtccttcacggcactggatcccatcaaagaaccttgaaga

SEQ ID NO: 23379 - DNA, 60 bp, Homo sapiens
cccatacaaatgcacagtaaagggaagaacagcggtatttttcctagccaactgactcta

SEQ ID NO: 23380 - DNA, 60 bp, Homo sapiens
gccatgacttaaagagcacagttgatatcccaaaggttttgatgctaagaagctacagtt

SEQ ID NO: 23381 - DNA, 60 bp, Homo sapiens
gagtcgatcttcagaacagggatctaccatgcaggagcttcttgtgctcacacaaatctg

SEQ ID NO: 23382 - DNA, 60 bp, Homo sapiens
cggctcttcccagcagactggtatctggctgtaacgtttgacgtcttcatattgccagtc

SEQ ID NO: 23383 - DNA, 60 bp, Homo sapiens
ggtaagacatctctgacgaagagccatggatgctttccacaaaatgtcacctcgctgcac

SEQ ID NO: 23384 - DNA, 60 bp, Homo sapiens
tccctaaaaagcagaatatgtaaaaatcacatgtatgcgtttggtttaggaatgtgcttt

SEQ ID NO: 23385 - DNA, 60 bp, Homo sapiens
ctgtatttcccatttcttttgcgtgcagtctttgattcgtacaatagaaggaacacgtag

SEQ ID NO: 23386 - DNA, 60 bp, Homo sapiens
ttaggttgtgaggtatgttgaagaagtagaagccaggggtatgctttcagcatttattgc

SEQ ID NO: 23387 - DNA, 60 bp, Homo sapiens
acagttgtctctacagtcatgcaactcgaagtagaaaagagtgctggacataggaagggg

SEQ ID NO: 23388 - DNA, 60 bp, Homo sapiens
actgcacagatatcacacagctgcacccccatttggtgacacaaagcatacccttctgtg

SEQ ID NO: 23389 - DNA, 60 bp, Homo sapiens
ttctacttgtgaatctgagctgtagcagcccagagggagctaggcaaactattccagacc

SEQ ID NO: 23390 - DNA, 60 bp, Homo sapiens
agtcttgcccttgacttctgctctggattcactcttccctgtcggccgcgcatgtgctca

SEQ ID NO: 23391 - DNA, 60 bp, Homo sapiens
gagatctggtagttcgtctcccaaggctgctaactggaagtctggaacccgtgaaagaaa

SEQ ID NO: 23392 - DNA, 60 bp, Homo sapiens
aaaaggctgacccatgtggctttgcagtgctgttcgtccagaagcatggcacacgatgct

SEQ ID NO: 23393 - DNA, 60 bp, Homo sapiens
aagtggcagaacacacccagagttactactggacccactcctttcagcaccatgccaaac

SEQ ID NO: 23394 - DNA, 60 bp, Homo sapiens
ttcggttgaatcatcctggctgtcctggtgatgcttcttatgtgcagctaggctggagaa

SEQ ID NO: 23395 - DNA, 60 bp, Homo sapiens
ggtggctctagttctcttcacaattaacctccaggttcactttcttagtctcacacctgg

SEQ ID NO: 23396 - DNA, 60 bp, Homo sapiens
ctcttgaggaaacaagtgcaaaggaggatgtcttggcaagtttaagctacttctgcagtg

SEQ ID NO: 23397 - DNA, 60 bp, Homo sapiens
tgacacacttcatgtcatagctgaaccctactctactggattcaaggccagtaaatgcaa

SEQ ID NO: 23398 - DNA, 60 bp, Homo sapiens
atttgtgtagccagagaggtttggtacccaacacagatggtcagacttttgagattgcaa

SEQ ID NO: 23399 - DNA, 60 bp, Homo sapiens
ggagaggagtgactaaatctcacaagaacagactcaatattaccacacagtaccgagggg

SEQ ID NO: 23400 - DNA, 60 bp, Homo sapiens
caaaccttaagccatgtagatgaagttagtgcatcaacgggatacagttccatattgcct

SEQ ID NO: 23401 - DNA, 60 bp, Homo sapiens
atccctggttttggacgacagtaaacgtaggagcactgttgaagtcctggaagggagatc

SEQ ID NO: 23402 - DNA, 60 bp, Homo sapiens
tggttattgccaggatggagcccctctaccccagtctgctgtagggaataccctaattag

SEQ ID NO: 23403 - DNA, 60 bp, Homo sapiens
ggagaagagtggccgcacctttctgcacaccgtctgcttctactgagcccagcgcccgca

SEQ ID NO: 23404 - DNA, 60 bp, Homo sapiens
gagacaggtcctaatcagcactgaattcttcaataggaggctgtgttacaggagctacag

SEQ ID NO: 23405 - DNA, 60 bp, Homo sapiens
aagttcccggaacaattagggaagacgtatggtctgaatttatccaggcagtgggtctgc

SEQ ID NO: 23406 - DNA, 60 bp, Homo sapiens
cagttgtctttggacttgtagacctcttggattccaggtgtgatggagtaaagtgtggga

SEQ ID NO: 23407 - DNA, 60 bp, Homo sapiens
aaaaggcttgagacagatccctggccttgaggacgtgcttcgcatgcagcctgcaaccca

SEQ ID NO: 23408 - DNA, 60 bp, Homo sapiens
gaggctctagtggaggtggatgtccttctctgccaggcttggcacatgatgtgaagaata

SEQ ID NO: 23409 - DNA, 60 bp, Homo sapiens
agtttctcaagcgaccgatgttgaggtgggaactgaccttgtcccttctgtcacggtgaa

SEQ ID NO: 23410 - DNA, 60 bp, Homo sapiens
ccaggccaagagggagcccgcagaaagtttacgtggaagaaacgctaagggtttgctccc

SEQ ID NO: 23411 - DNA, 60 bp, Homo sapiens
aggacgtcagctgtcagatacgaaaggtagatatcaggtaagaatctggacttaggaaat

SEQ ID NO: 23412 - DNA, 60 bp, Homo sapiens
cactcagagcaaaagaaacgcaaactcattctgcccaaacgtctcaagtccagtaccagt

SEQ ID NO: 23413 - DNA, 60 bp, Homo sapiens
cacagtgaggtatgtggctgttctcgtggtagttcattcggcctaaatagacctggcatt

SEQ ID NO: 23414 - DNA, 60 bp, Homo sapiens
aattctgtagagttgatccgtgagcgattgactgtgtctgaggatggaccaggagtcagg

SEQ ID NO: 23415 - DNA, 60 bp, Homo sapiens
caagacagccagcaacatcattgatgtgtctgctgcagactcacagggcatggagcagca

SEQ ID NO: 23416 - DNA, 60 bp, Homo sapiens
gttgccactgaaaagctagacctttgcctattatctgctaatctacccagtctcacattc

SEQ ID NO: 23417 - DNA, 60 bp, Homo sapiens
aagcccgtttcatgttcagttgcttttgtagaggaagcaagggctgggatggggacagct

SEQ ID NO: 23418 - DNA, 60 bp, Homo sapiens
gcacacacacgctgcatatctgctccctaagttgattcctcttggggaaggatgaaaagg

SEQ ID NO: 23419 - DNA, 60 bp, Homo sapiens
ctgaaattggtagcatgggttcacttggctacaactgagcaaaatagatgcaactttctt

SEQ ID NO: 23420 - DNA, 60 bp, Homo sapiens
agatggacatttactgactccccttctgtgtggcttcggtctccctggctaacaccacac

SEQ ID NO: 23421 - DNA, 60 bp, Homo sapiens
ccggtgcaagagcataatctacagatcatgggcaaaatctagccacagtcctgagagtcc

SEQ ID NO: 23422 - DNA, 60 bp, Homo sapiens
gagggaactgttgcaaagccatttcatcgagaaggggacagaaggagaaatacacacatg

SEQ ID NO: 23423 - DNA, 60 bp, Homo sapiens
gagatggcagcgtggtgccagtgtcagacatcctgtgtgtgatgatatgcactgatcaca

SEQ ID NO: 23424 - DNA, 60 bp, Homo sapiens
caatgtgcaattctgtttgagtctctacagtcctatcccttttggaatgaacagctacac

SEQ ID NO: 23425 - DNA, 60 bp, Homo sapiens
aaaccatatcagcgggaacaagattggctgggagaagacgggaagccactcagagcctca

SEQ ID NO: 23426 - DNA, 60 bp, Homo sapiens
taatgcagtagcatttctgtcatcatttgttatgaattcaggagtctgggaggaagttgg

SEQ ID NO: 23427 - DNA, 60 bp, Homo sapiens
gtccgttaggtggcctttccttatctgaggtgtagtggtctaacatttaggaagccttgc

SEQ ID NO: 23428 - DNA, 60 bp, Homo sapiens; identical to SEQ ID NO: 4855

SEQ ID NO: 23429 - DNA, 60 bp, Homo sapiens
tccacccatgaggctggtgacactgacgctggcttggctaagttggctcaagccgggtct

SEQ ID NO: 23430 - DNA, 60 bp, Homo sapiens
cctgggaagcatcaaggcaccctcacaactgtgtttccccagagagttttagccagaaaa

SEQ ID NO: 23431 - DNA, 60 bp, Homo sapiens
gggcggcatttacactgtgcaagtattgagaagagtgcataaagacagggaactactctc

SEQ ID NO: 23432 - DNA, 60 bp, Homo sapiens
ataagtcagaggtcaggtgtcctagggtaaggggagtccctggagcaaagtcttctctgt

SEQ ID NO: 23433 - DNA, 60 bp, Homo sapiens
ttagattctgatgctaactgcaaatcaggttggtctctgctgggtctctcctgcttttat

SEQ ID NO: 23434 - DNA, 60 bp, Homo sapiens
ataaaaccagaagtaggtactaccagccatacgagattccagctgtcaatggcaggaggc

SEQ ID NO: 23435 - DNA, 60 bp, Homo sapiens
catgtcagtgtcgatgccactggaccaacagagcattttgtggctatagggtgcctgata

SEQ ID NO: 23436 - DNA, 60 bp, Homo sapiens
gtccctctctgcttaatgcagttatgggtcctttcgtttatggcaaatgacttacctgac

SEQ ID NO: 23437 - DNA, 60 bp, Homo sapiens
ttctgtttagagctacaaggttaaagtgcctgctttccagtaatggagattgagtcacta

SEQ ID NO: 23438 - DNA, 60 bp, Homo sapiens
aattgttaaccatgcttttgctccaagatgtgtgaggccattcaggggctgtagggccct

SEQ ID NO: 23439 - DNA, 60 bp, Homo sapiens
gagttgagtggataaacagtcttccagcttgtaaatgccattgacttctgacctgacatt

SEQ ID NO: 23440 - DNA, 60 bp, Homo sapiens
gtagtctaggtttccttaatgcttggaaaagtttgcattgaagcagtgagagtagggctg

SEQ ID NO: 23441 - DNA, 60 bp, Homo sapiens
caactgtaggtgacgagtagtcagttattgcttgctagctacacaccagggttgatccat

SEQ ID NO: 23442 - DNA, 60 bp, Homo sapiens
actgtaagtggagaagagatccctaatatgcctcctgaaatgcagcttaaggtcctgcat

SEQ ID NO: 23443 - DNA, 60 bp, Homo sapiens
gtccaccagctagttgcacagagaatcatgtgtacctaactaaggatgatctaggataag

SEQ ID NO: 23444 - DNA, 60 bp, Homo sapiens
ctgtacgcgctcagggaagcttagcttcttggtgcccatctacgtgcactggatgatttt

SEQ ID NO: 23445 - DNA, 60 bp, Homo sapiens
ctctagtgaagtggtttgagcactaaccttgtacacattgttaagaggcttagattggta

SEQ ID NO: 23446 - DNA, 60 bp, Homo sapiens
ccttcatcccgctcagtgccatgtcctcttttgtgatcttccagaaagctccaggattca

SEQ ID NO: 23447 - DNA, 60 bp, Homo sapiens
cttggtatgtccttttttagataactccagcaggaaactgtaactgctatgtctttagga

SEQ ID NO: 23448 - DNA, 60 bp, Homo sapiens
ttacctgtgccaacagacctatttcactgcctcagcgtacaccagacccttcagaaacct

SEQ ID NO: 23449 - DNA, 60 bp, Homo sapiens
cctcagggtgggacctctcacatctctgtcagcttttcacagacaccaacctgttatgat

SEQ ID NO: 23450 - DNA, 60 bp, Homo sapiens
ctttatcccaactccactggaaaccgaggagccaatcgacgatgaagaacaggatgatga

SEQ ID NO: 23451 - DNA, 60 bp, Homo sapiens
ctcgccgtcttgcagttgaagagctacatacgtagtcagtttcgatttgttacagacgtt

SEQ ID NO: 23452 - DNA, 60 bp, Homo sapiens
cagaagctgctgaaattcctgaataagcactacaatctggagaccacagtcccacaggtg

SEQ ID NO: 23453 - DNA, 60 bp, Homo sapiens
ccttagagactttgagacccttaagagacaagattgagaaagagccatgtggcttggctc

SEQ ID NO: 23454 - DNA, 60 bp, Homo sapiens
caggagggtaaacagtagctgtggttttgctgagagattttggctgtgagtgacaagcct

SEQ ID NO: 23455 - DNA, 60 bp, Homo sapiens
gtgtcagatgatggtatggaatttgttcccttgctttcccccactgttactgcttcagtt

SEQ ID NO: 23456 - DNA, 60 bp, Homo sapiens
gtggggccttttgcttttgcctggatataggggtgctcttctactgtaattgggtgtgga

SEQ ID NO: 23457 - DNA, 60 bp, Homo sapiens
caacaacaaggtatgagagtgcctgtttcctcatatcctttgtgacaccggattttatca

SEQ ID NO: 23458 - DNA, 60 bp, Homo sapiens
ccttcaaggatactctcagaaggagccaatggacactgagtgtagacatgtgaaatgcca

SEQ ID NO: 23459 - DNA, 60 bp, Homo sapiens
ttgtgcgaaaatccatgttggggcgatcaatgatgtgtggcacttgtcttcatttctgat

SEQ ID NO: 23460 - DNA, 60 bp, Homo sapiens
cccatccaaacattcagatgaactgagcgtcttacacacgcagtacagaggagcacacat

SEQ ID NO: 23461 - DNA, 60 bp, Homo sapiens
aaacagactgatgggtctggtagccaacaacttggcaacttccactccttctcacctcgt

SEQ ID NO: 23462 - DNA, 60 bp, Homo sapiens
ctagactcccctaccttagactggtaccctcaaacacaggactgaagcttaattgggaat

SEQ ID NO: 23463 - DNA, 60 bp, Homo sapiens
gataacttccgagtggtggtctgtacgcatactagcaaaggtaatggtgatctagcaaac

SEQ ID NO: 23464 - DNA, 60 bp, Homo sapiens
ttgagtttagctagggtggctctcagaactggggtgcctggcattctcagcatttctcag

SEQ ID NO: 23465 - DNA, 60 bp, Homo sapiens
ctggcctcaggcctgcagtggatgattgtgggctgtgtggcctttgcctttaggggtcgt

SEQ ID NO: 23466 - DNA, 60 bp, Homo sapiens
aaacctgactttccccctgtaccttcagcccctgtgcaggtagtaacctcttgagacctc

SEQ ID NO: 23467 - DNA, 60 bp, Homo sapiens
cctaagacatgtggcgaaattccatccagttctaagtgaaagagtttcagaaggcaggag

SEQ ID NO: 23468 - DNA, 60 bp, Homo sapiens
actgatctggagcagctgacagggtgggtctcccttaccaaagagaagaaccactctctg

SEQ ID NO: 23469 - DNA, 60 bp, Homo sapiens
gagatgtccttccatcagttcccacagcaccctgtgcatgtatctgttgtgcacttacca

SEQ ID NO: 23470 - DNA, 60 bp, Homo sapiens
tgactgtgaattacgacttctcttgcccttcttctagcagtctgtgcctcctctctgacc

SEQ ID NO: 23471 - DNA, 60 bp, Homo sapiens
gctggccaattatggtgacccgtaagttaggggaagggttcaagtctttagagccaggat

SEQ ID NO: 23472 - DNA, 60 bp, Homo sapiens
cccggacacttggtaatgccaaacaagtacgtgtggctactcattggtctatgaggacga

SEQ ID NO: 23473 - DNA, 60 bp, Homo sapiens
tcttggtcaccatttcctgctacaccagaggtggccgaatcatctccacttcttcgcgtt

SEQ ID NO: 23474 - DNA, 60 bp, Homo sapiens
ctttgcttactatcaagaagtgtcaaataggttcagcttgctgccaaaatatggatcatt

SEQ ID NO: 23475 - DNA, 60 bp, Homo sapiens
attcgcatctgagcatcctcctactcttctcctgggaactctgttggggagggttgctca

SEQ ID NO: 23476 - DNA, 60 bp, Homo sapiens
atgtgaaaactggggtgctgtgataaaaggtaactaggatcttagcagtgcaatctgcag

SEQ ID NO: 23477 - DNA, 60 bp, Homo sapiens
ggatacaagcaatggttgagtttgaatcagtcctttgtgcccagaaagctaaagcagcac

SEQ ID NO: 23478 - DNA, 60 bp, Homo sapiens
gaggcagtaggggacacattagaagaactgtggatctcctacaattttattgagaagttg

SEQ ID NO: 23479 - DNA, 60 bp, Homo sapiens
acactgataggaagctatgggtaattatgatgtgttccttttagtgtgattctttgttgc

SEQ ID NO: 23480 - DNA, 60 bp, Homo sapiens
atatgacacagaaggtgtgaccccaacgaagagtggagaacggcaacccatccagatcac

SEQ ID NO: 23481 - DNA, 60 bp, Homo sapiens
cctctcattcccacttctgcttggcaatgctctccatctcccttatgtggactcttgttc

SEQ ID NO: 23482 - DNA, 60 bp, Homo sapiens
acatttgttgtaatctccctttgacgggattcaggttgggatagatgtcgaagcagctgc

SEQ ID NO: 23483 - DNA, 60 bp, Homo sapiens
gtaagaatgtgtcatttcttggggagtagccatccatcaacaaatatcctgactgctact

SEQ ID NO: 23484 - DNA, 60 bp, Homo sapiens
aactcttcacatgtaaatacccagccaccaagttcagttgatatccccctgcaaaattga

SEQ ID NO: 23485 - DNA, 60 bp, Homo sapiens
ccagttcccctcaacccctgtgcactccataggaaggacaaacttacctgtctgcttcct

SEQ ID NO: 23486 - DNA, 60 bp, Homo sapiens
gatgaacaagctatggaaattgcacttgagagctataatcacgggaagcattgccgagcc

SEQ ID NO: 23487 - DNA, 60 bp, Homo sapiens
ggcaattatagaatgcgaactgctttgcctcattccatactgatcatcccagctgaacaa

SEQ ID NO: 23488 - DNA, 60 bp, Homo sapiens
tcagggttgttggaacatctgacctgtgcatccaggagccgaggagtcaggttgtaatac

SEQ ID NO: 23489 - DNA, 60 bp, Homo sapiens
ccccgactcagcactgcttggccaggcctacttcacagctaccccatggctctcaggcct

SEQ ID NO: 23490 - DNA, 60 bp, Homo sapiens
gaagtagcctaacagtcctccctggtcatactcgtttcaaacaggtctgcctgtctagac

SEQ ID NO: 23491 - DNA, 60 bp, Homo sapiens
ggggctactgaaaagaggaatgtgttgaatgtcgcgtttgctgtccactcgtcctagaag

SEQ ID NO: 23492 - DNA, 60 bp, Homo sapiens
gtgcacatctgacatggttactagttgtgtgatttctgtctgcctttgcagtggacacac

SEQ ID NO: 23493 - DNA, 60 bp, Homo sapiens
acattatgtggatcacttaggctgtgggtgtcaggagcggtacttggagcctctctcggt

SEQ ID NO: 23494 - DNA, 60 bp, Homo sapiens
catgtagtggtcagattccctcccactctaggaggctgactggtcactacaaaatgtgac

SEQ ID NO: 23495 - DNA, 60 bp, Homo sapiens
cattgagctttaaagtaccttggagaaactttggggcacgttttcctactctaattcaac

SEQ ID NO: 23496 - DNA, 60 bp, Homo sapiens
aaacaggctcacagattgtgtgtcggctgcagcagtgattccaacaagcagctattgggg

SEQ ID NO: 23497 - DNA, 60 bp, Homo sapiens
aaagagggcagcagtagtatgctggagcttccctgggataccagccacatggtttctttt

SEQ ID NO: 23498 - DNA, 60 bp, Homo sapiens
actagaatactgctagtctcccaagtcctgttccttgtaattctcccactgttctcagtg

SEQ ID NO: 23499 - DNA, 60 bp, Homo sapiens
gctgctgagtgactgcatgatgagatacaacttctgaatgctgcacattcttccaaaatg

SEQ ID NO: 23500 - DNA, 60 bp, Homo sapiens
tataactgcctcacccgatctcacgcacagtgcgagagctgaaggtaagccccggatgtt

SEQ ID NO: 23501 - DNA, 60 bp, Homo sapiens
gggaacatgtcaaagcacacattgagaagtcccatgagtgaaagagatgttggaaagccc

SEQ ID NO: 23502 - DNA, 60 bp, Homo sapiens
agaccataagaattggatcaatgtaaatcctcacctgccctttgaagagccaataagggc

SEQ ID NO: 23503 - DNA, 60 bp, Homo sapiens
ctctgtacttcagagcttgtctccaggttgagaattacctgttttccactctgaggggat

SEQ ID NO: 23504 - DNA, 60 bp, Homo sapiens
ctatgtgcagggcaatgcaatgaagttgaaaacccttgtaaataggagaggttgcaaacc

SEQ ID NO: 23505 - DNA, 60 bp, Homo sapiens
gctggtgatgctgagaaacaataattggcccaaatgcagacatcaagaagcaggcaggaa

SEQ ID NO: 23506 - DNA, 60 bp, Homo sapiens
tttgtagatgagctacacttggcacgctacttttacgcgatctcagacataaaggtgcga

SEQ ID NO: 23507 - DNA, 60 bp, Homo sapiens
ctgtagaggtgtctaaagggaggcttgcaagctgccccttgaaggacgagcagaaaattg

SEQ ID NO: 23508 - DNA, 60 bp, Homo sapiens
cctttgcatgttcttctgaaactgtacttcttccctattctgtctacccacactctgcga

SEQ ID NO: 23509 - DNA, 60 bp, Homo sapiens
gcacaatctatcatctgtcctacagtccctgatctttcatggctgagctgcaatctaaca

SEQ ID NO: 23510 - DNA, 60 bp, Homo sapiens
tattaggagccgcgttccagcctcacaccccacggtgctgttttcgacttcagaaaggat

SEQ ID NO: 23511 - DNA, 60 bp, Homo sapiens
gcaggacgtgagttatgtctggtcccaaaacccttgagtaaactagctgagccattgcaa

SEQ ID NO: 23512 - DNA, 60 bp, Homo sapiens
actgttgtgctccatagagcagtgcacatctgacccagagggtgggtgttcataactgct

SEQ ID NO: 23513 - DNA, 60 bp, Homo sapiens
ggcagacgagaggcactttatccagtcccagaaagaatctctaaccgtgtgactgagaag

SEQ ID NO: 23514 - DNA, 60 bp, Homo sapiens
gaaaagactggcacagttaaagaatcgtgagctggagaagttccgcacagaactagactc

SEQ ID NO: 23515 - DNA, 60 bp, Homo sapiens
ggttatgatgctgctcgttgtcttgagttgcatgtaacgacagtagctctgaagggtgtc

SEQ ID NO: 23516 - DNA, 60 bp, Homo sapiens
gcacaactctgttgggtattaaggcttcatcttagtatttccctgcgttgctctttgaaa

SEQ ID NO: 23517 - DNA, 60 bp, Homo sapiens
caaacctacactccgtgacatccagcctcacagcttacatcacagcttaatgtcctggca

SEQ ID NO: 23518 - DNA, 60 bp, Homo sapiens
gtttctgttggtaaggagatcgacgccttagcacttgattcactgactcctgtatttagg

SEQ ID NO: 23519 - DNA, 60 bp, Homo sapiens
tttgactaacggagatgagcccacccaatgctcccggcatctgtgctgtctgcaagcctt

SEQ ID NO: 23520 - DNA, 60 bp, Homo sapiens
catatggtgtttatgtactactctatagaactcttggcttgcacttctacagctctgtac

SEQ ID NO: 23521 - DNA, 60 bp, Homo sapiens
cctcagcccatttgcaactctgcctctgttctcttgcattctgtttggttgccctttagt

SEQ ID NO: 23522 - DNA, 60 bp, Homo sapiens
gtatctacacactccacattctttactgtgtcctactactgtatcttggctccctgctgt

SEQ ID NO: 23523 - DNA, 60 bp, Homo sapiens
gccgtcatacctccggtgttcagtttgttactcaaaagttcccagttcttaggctgaaaa

SEQ ID NO: 23524 - DNA, 60 bp, Homo sapiens; identical to SEQ ID NO: 4855

SEQ ID NO: 23525 - DNA, 60 bp, Homo sapiens
cgtaccaaccattatccagaggcaccatggagagttagtcatggaataaagcactgtcct

SEQ ID NO: 23526 - DNA, 60 bp, Homo sapiens
gcgggttaagctcagcagttttcacagtagagcagaagtccccaggaaacaaagggttag

SEQ ID NO: 23527 - DNA, 60 bp, Homo sapiens
gggcatttgagtgataacagacaacctaaggacaatgagcactttgcagatctctacaat

SEQ ID NO: 23528 - DNA, 60 bp, Homo sapiens
cccgaggcccataccaagactctgttcctgccctaggcccagtctcaaaggaagccacaa

SEQ ID NO: 23529 - DNA, 60 bp, Homo sapiens
gagctctccttttgctcggggaaatgtatttggtgagcctccaactgaacttcagattaa

SEQ ID NO: 23530 - DNA, 60 bp, Homo sapiens
gtgtgtcaaccaaaggtggcagtggctacatctgcctgttggactggtacaggttacaat

SEQ ID NO: 23531 - DNA, 60 bp, Homo sapiens
gtgaacaactctgaaaacatactggtcgatgaggtttatagctagagtctaaaatgccac

SEQ ID NO: 23532 - DNA, 60 bp, Homo sapiens
caccgcatacctccttttacaggtacagagtaagtggtctggctactgagggaaagagtc

SEQ ID NO: 23533 - DNA, 60 bp, Homo sapiens
cacccagatggtactcaagactccaagcctgtcaatggggtggaaactttctggcatttt

SEQ ID NO: 23534 - DNA, 60 bp, Homo sapiens
aataagaccattccagtatccttaccttacagaaatgacagcaacaacagcaaatatgag

SEQ ID NO: 23535 - DNA, 60 bp, Homo sapiens
tggagaggatggtccttggaccccatgtgtccatcacctagctgcatcacttatcagcta

SEQ ID NO: 23536 - DNA, 60 bp, Homo sapiens
cctgttctctcctgcccatcatgtttggcccactagatgaagctgtactcagcaatttag

SEQ ID NO: 23537 - DNA, 60 bp, Homo sapiens
gctggtgtttaagaggtcaggaggcctgctgatctttcaaaggacacccatgatgtctac

SEQ ID NO: 23538 - DNA, 60 bp, Homo sapiens
agctcaggaggaactcttacctggaaattgggaactgtatggagactccaaactgacttc

SEQ ID NO: 23539 - DNA, 60 bp, Homo sapiens
tcagcgtcctggtagcatggatccagtctgaaaggtgaggacaacgtggaaactcatgag

SEQ ID NO: 23540 - DNA, 60 bp, Homo sapiens
cactgccaccagcaagctcaccatcatcttcaagaacttccaggagtgtgtggaccagaa

SEQ ID NO: 23541 - DNA, 60 bp, Homo sapiens
gggtggtccttacctcttgtccttgaaatccatgccatgctgaagcaaggcaatactgtg

SEQ ID NO: 23542 - DNA, 60 bp, Homo sapiens
tcaagaatccagaattcatcacgaaatactgcacgacggagattgagaagtgagagctct

SEQ ID NO: 23543 - DNA, 60 bp, Homo sapiens
caaaatgggagcaaggccttctctccagactatcgtaacctggtgccttaccaagttgtg

SEQ ID NO: 23544 - DNA, 60 bp, Homo sapiens
atgggaagaagtcagaggaaccagaatgtatcagacgatgtggagttgggtgcctgagct

SEQ ID NO: 23545 - DNA, 60 bp, Homo sapiens
aagtgtgaatgagattctaggactggcagagtctagcccaaacgaacccaaagcagccac

SEQ ID NO: 23546 - DNA, 60 bp, Homo sapiens
tgcagttctcacctccatttagtcccccatcagaacagaggtcaggaatttagctgggga

SEQ ID NO: 23547 - DNA, 60 bp, Homo sapiens
atctcccctctgcatgtcccttgcttaggacctcccatggtgtacttggagttgggacct

SEQ ID NO: 23548 - DNA, 60 bp, Homo sapiens
ttcaggaacacagaatattaggaagaatcttgaaagagtttgaatgacccacccttcctg

SEQ ID NO: 23549 - DNA, 60 bp, Homo sapiens
ggctgcctgccagtggatctatccagctgcttccttgtagccaagaatgagttcaatgaa

SEQ ID NO: 23550 - DNA, 60 bp, Homo sapiens
tatgtacttcccgtcctcccacctccactctgtgctctaatgtgagactgcttcagcagt

SEQ ID NO: 23551 - DNA, 60 bp, Homo sapiens
aaggagcagaaggcttgccttcctgggagcaggttgtttgagctgttttagagcagtgag

SEQ ID NO: 23552 - DNA, 60 bp, Homo sapiens
ttttaagagccccatagaccagtgcaatcctgttcatgcgagggaacggttgaggaacat

SEQ ID NO: 23553 - DNA, 60 bp, Homo sapiens
tccagaagcatgggagaacagatttcccttgtttgaaggcacccagtctgtggtccttca

SEQ ID NO: 23554 - DNA, 60 bp, Homo sapiens
gaactccctggacactagcagaatatcatacactaaggataagggatgagaggaggctgg

SEQ ID NO: 23555 - DNA, 60 bp, Homo sapiens
tccggctgaggagaaagccccagtctcatatccaaacacacttcccgaaagcttcactaa

SEQ ID NO: 23556 - DNA, 60 bp, Homo sapiens
gtaaatgggctgagatcagagcttggctcacaacactcagtaatgatcactgccaatttt

SEQ ID NO: 23557 - DNA, 60 bp, Homo sapiens
gcaacagccttctgatggccatgaaaggacaagtatggagatgaaagctatcacactgag

SEQ ID NO: 23558 - DNA, 60 bp, Homo sapiens
gctggagttgtccgctgtgtttctgacatttctgactctcctcctactcttgttcgtctg

SEQ ID NO: 23559 - DNA, 60 bp, Homo sapiens
tgttatttgcctaagctgtacatctgagctttctgattcagtgtgcgtggaaggggccca

SEQ ID NO: 23560 - DNA, 60 bp, Homo sapiens
aaatgcgctttctgccatggtgttggattgaagattgtgctgagcgctgagcttgcgctc

SEQ ID NO: 23561 - DNA, 60 bp, Homo sapiens
ttttctctggggtcctctttcaaggatgtccacggtaccttcctcctgaaacttgaggaa

SEQ ID NO: 23562 - DNA, 60 bp, Homo sapiens
aagtaccacatgaccaaacacaaggctgagactgagctggactttgcctgtgaccagtgt

SEQ ID NO: 23563 - DNA, 60 bp, Homo sapiens
agatgctttgcaatacttgctccagtttgccaggaagcctgtcgaggcggaaagcgtaga

SEQ ID NO: 23564 - DNA, 60 bp, Homo sapiens
ctggtgcccaaaggttcttgcaaaaccatgaatcttgcttttagcagtaaagggccagac

SEQ ID NO: 23565 - DNA, 60 bp, Homo sapiens
gttaggaaacgacgctgagaggatgacgacaacgtgcaacagcagaaagatgcttgcaag

SEQ ID NO: 23566 - DNA, 60 bp, Homo sapiens
tcagaaatgttgcttctacttttgaggcgcttccctgaaacggtggtgcagcatggggtt

SEQ ID NO: 23567 - DNA, 60 bp, Homo sapiens
tgcttgggttccgtatgccaagattctgatgttggtctggaatatgagctggtcataagg

SEQ ID NO: 23568 - DNA, 60 bp, Homo sapiens
gtgtctggcgaagtattcagggtttgatggactgctttactttcgtttggaagtgatagc

SEQ ID NO: 23569 - DNA, 60 bp, Homo sapiens
gttagaaaacactactttcagacatttaaatgcatataggcaatgcttaagtacctaaaa

SEQ ID NO: 23570 - DNA, 60 bp, Homo sapiens
aagacagaggccagctatttaggaccatacgcacctgtgacaagggctgtgttgaccaca

SEQ ID NO: 23571 - DNA, 60 bp, Homo sapiens
gggtcctggatgcccatgccatctggcacatcagcaccatccctgtccacgtcctctttt

SEQ ID NO: 23572 - DNA, 60 bp, Homo sapiens
gaagaacggaaatgctgtcttgtgagcatgaagtgaacgggctgttttgctccagccact

SEQ ID NO: 23573 - DNA, 60 bp, Homo sapiens
gtcttagctgacctgtcgtctttctcttgaaggaggattgctgtagacttctctagcttg

SEQ ID NO: 23574 - DNA, 60 bp, Homo sapiens
cggctaaagcaatcgttcagagagacagagtggatgaagaggccttgaatttcccctacg

SEQ ID NO: 23575 - DNA, 60 bp, Homo sapiens
ctgcatgctgaccctcgcttggaatggaatgccagaaatgcatggcagcagctaataagt

SEQ ID NO: 23576 - DNA, 60 bp, Homo sapiens
agttctggaaagaagtactggatggactgaagtccaggacaacgtcccaaagaaaggcag

SEQ ID NO: 23577 - DNA, 60 bp, Homo sapiens
cataagtggcatttaggtgaatgtcccagctaatcactagcatgtctgggtattggctgg

SEQ ID NO: 23578 - DNA, 60 bp, Homo sapiens
gtagatggcatggcttgatatctgcagtgtccttgctgtgtagctcttcagatgagacca

SEQ ID NO: 23579 - DNA, 60 bp, Homo sapiens
gaaggcactgttctcactatggccagatgaatgggagtattctgtacatgaatcatgctg

SEQ ID NO: 23580 - DNA, 60 bp, Homo sapiens
ctcctgatagccaatagcagatagaagcttgcaatcaagagggtaggacatgtgttcttc

SEQ ID NO: 23581 - DNA, 60 bp, Homo sapiens
cattaagggtcgtaaactggtgggaaacaggaacttcagtggagaggcttaaatgcctct

SEQ ID NO: 23582 - DNA, 60 bp, Homo sapiens
taaaagccagagcaagtgccagtgtggatggtcctcaccctgcaagaagctggaaaactc

SEQ ID NO: 23583 - DNA, 60 bp, Homo sapiens
taggaacagaatgattgcatgttgtccccagaacactgccaccttgctatgcgaatgatg

SEQ ID NO: 23584 - DNA, 60 bp, Homo sapiens
ttagatccagccattgtggccaccaggctctgtggacccatctcagtggagaattcgttt

SEQ ID NO: 23585 - DNA, 60 bp, Homo sapiens
tacttagtctctcaaggacgattccccttggtgaacctgaccgatatgctgagcgttgct

SEQ ID NO: 23586 - DNA, 60 bp, Homo sapiens
tttgctccactgagtggttcatttgaggccaaccctcccttctgcgaggagctcatggat

SEQ ID NO: 23587 - DNA, 60 bp, Homo sapiens
ggtagaacaatgattggtgctcagtccaattctgtctcccccatgcctagctgttaagta

SEQ ID NO: 23588 - DNA, 60 bp, Homo sapiens
catggtgtgcctaggaggagctgaaatcattggcactttaatccatattgtaaagatcag

SEQ ID NO: 23589 - DNA, 60 bp, Homo sapiens
ccaggctcaggctgcctcttcgttttagcaacaagaagactgctcttgactgataacagc

SEQ ID NO: 23590 - DNA, 60 bp, Homo sapiens
gaacaagccacacagtccttgagaggttcgctgagttctaatgatgttcctctaccagat

SEQ ID NO: 23591 - DNA, 60 bp, Homo sapiens
ctgaaagggtgatgctcttatgcctgagtcttggctcctgtggtcctgcagagaccctgt

SEQ ID NO: 23592 - DNA, 60 bp, Homo sapiens
gctgagttgaagtttgtcaccaagaacgatggatatgtacacattcacccttcatcagtg

SEQ ID NO: 23593 - DNA, 60 bp, Homo sapiens
gcacatctgcgttttggcatctgaggctcccatctgagtggaggagaaagtgttgtgttt

SEQ ID NO: 23594 - DNA, 60 bp, Homo sapiens
aactgagtaggtgaggagattaaaagggagccatatagcactgtcaccccttatttgagg

SEQ ID NO: 23595 - DNA, 60 bp, Homo sapiens
cacacgctgcactgcgctgctcttgtttactctgttctttcagagcctttgtactttgcc

SEQ ID NO: 23596 - DNA, 60 bp, Homo sapiens
tgtcagcaaactcaagtcccatccctttttcagtaccatccaatggagcaagctggtggg

SEQ ID NO: 23597 - DNA, 60 bp, Homo sapiens
cctccatgcagccagctatagttggctttccaaaacaacagaaatccttcaccaatagag

SEQ ID NO: 23598 - DNA, 60 bp, Homo sapiens
gaacctgcacaaaagaatgggcagtacaaatatgaggttcatgtggactatggcactctg

SEQ ID NO: 23599 - DNA, 60 bp, Homo sapiens
ccaaagcgtgtgcttatccaaggggttcagctattcctgacttcacggcttgcatgtttg

SEQ ID NO: 23600 - DNA, 60 bp, Homo sapiens
aacagccctttctgtttctggagtcctacaagtggaggcccaaatccgttcccatgttga

SEQ ID NO: 23601 - DNA, 60 bp, Homo sapiens
ccggagacaccaggcttggaagtgaccactggccaagagctgacataaaagccaacttcc

SEQ ID NO: 23602 - DNA, 60 bp, Homo sapiens
agtcctggggtttggactcggctcctccacctccactcagcacctgcctttccgcttcta

SEQ ID NO: 23603 - DNA, 60 bp, Homo sapiens
gcacgcttctctgcctcgctcctgactcagcactttgttcactggctcagcagttatgtt

SEQ ID NO: 23604 - DNA, 60 bp, Homo sapiens
cctgtgaaagacatacattagccctttaagatggccaggagctaagcttgagtctccttt

SEQ ID NO: 23605 - DNA, 60 bp, Homo sapiens
taagcaacctgctcagggtcacgtctccaacaggcagtagagtcaaggtataaaccaggt

SEQ ID NO: 23606 - DNA, 60 bp, Homo sapiens
gcacccaaccagcagaattcttccagggtggaggaactaatcagcttgttctccaacagt

SEQ ID NO: 23607 - DNA, 60 bp, Homo sapiens
tgcacatggccagcacatgccaaacagaagtagacaaaggtctcactctgtaagtgggac

SEQ ID NO: 23608 - DNA, 60 bp, Homo sapiens
aataagctgtttggaggaaggtgtctgtctgggaggatggggcagtaaatgaggttggca

SEQ ID NO: 23609 - DNA, 60 bp, Homo sapiens
ataaggtcttattcttgtgcactttatcttgggaccaaaactgcctacccaccccttccc

SEQ ID NO: 23610 - DNA, 60 bp, Homo sapiens
aaagttcatgatgcaggacagaggaaacaagtggacaagacaagtggagcccagctctgt

SEQ ID NO: 23611 - DNA, 60 bp, Homo sapiens
cagaggctatcaggctatcttctcatagacccatcatttgtccagcagaaagagactaaa

SEQ ID NO: 23612 - DNA, 60 bp, Homo sapiens
gttgtcatagcttctgcctcctccgtgtggagagagggcataaagacagagctgagatat

SEQ ID NO: 23613 - DNA, 60 bp, Homo sapiens
gccccttttatgaggatgtgatagttgctgcaaatgaggggttacagatgcatatgtcca

SEQ ID NO: 23614 - DNA, 60 bp, Homo sapiens
tctaaagagtcatgctgacctggtgtgcaaattcccttccacccatccctctacctcctc

SEQ ID NO: 23615 - DNA, 60 bp, Homo sapiens
gtggtttccattgtcttaacacctgtcttaaaacgggtatgttgtttgcactgaaccctc

SEQ ID NO: 23616 - DNA, 60 bp, Homo sapiens
cacaggactcttctgctcagcagcatctcttttctcagatgtggccatgttacagtagag

SEQ ID NO: 23617 - DNA, 60 bp, Homo sapiens
cacattgcaaagcattctctgggaggttcagcctccttgtgtgtactgtactgtgcagac

SEQ ID NO: 23618 - DNA, 60 bp, Homo sapiens
ccctctactgtccagcctgtggtttgcagtaagctcactcttctgttcagaatgaccaca

SEQ ID NO: 23619 - DNA, 60 bp, Homo sapiens
actcagtattagcgtggccttgaccttcccatctgccatgatggcctcctattacctgct

SEQ ID NO: 23620 - DNA, 60 bp, Homo sapiens; identical to SEQ ID NO: 4855

SEQ ID NO: 23621 - DNA, 60 bp, Homo sapiens
ccagtcaatacatgcagaccagtaaaatctgatttgtgcagagttctccatctgactctc

SEQ ID NO: 23622 - DNA, 60 bp, Homo sapiens
gttgggctctgtcgtgttctgcaatcttccccattcccctcatgatctctggcttatctt

SEQ ID NO: 23623 - DNA, 60 bp, Homo sapiens
gagtactaatctcctaacttgcttatctttggatgtagacgaacaccaatgaactgagca

SEQ ID NO: 23624 - DNA, 60 bp, Homo sapiens
cagattgctaggactttgaacagaggtccctgagacctagggagggagcccaaataacct

SEQ ID NO: 23625 - DNA, 60 bp, Homo sapiens
tcatcctgaacgacatcaccgaggagtgtaggcccccatcgtccctcattactcgggttt

SEQ ID NO: 23626 - DNA, 60 bp, Homo sapiens
ccccaaaggtcatgtgaatcagaattcaggagaaagttggaggaaacaatggcagattcc

SEQ ID NO: 23627 - DNA, 60 bp, Homo sapiens
gtctaggttgggcttgtgacttcttagtggcctagccttcttgatggcaccttgaaagtg

SEQ ID NO: 23628 - DNA, 60 bp, Homo sapiens
ctgtcgtgggatgtgctcactgatttgtggctatgttgaaggtatcacttgtcttgaggg

SEQ ID NO: 23629 - DNA, 60 bp, Homo sapiens
cacccctgaaacactgtactgtactatcttgctctgagtagtatcaactggatcgtctca

SEQ ID NO: 23630 - DNA, 60 bp, Homo sapiens
acatagatatgctttgctgagaagttaggtctgtggtagaccagaaaccacaaattgact

SEQ ID NO: 23631 - DNA, 60 bp, Homo sapiens
ttataaccccttgaaacaagtctctcacctgagcctgtctaaactttcggagggagttta

SEQ ID NO: 23632 - DNA, 60 bp, Homo sapiens
ggatcctgttggtgatcctcattccagtttccaaagcgagaggagccttctgagcagaag

SEQ ID NO: 23633 - DNA, 60 bp, Homo sapiens
gagctgcaaaattgtgcagtggttcaacctgaccaaagtggtattatgctgctgggaagt

SEQ ID NO: 23634 - DNA, 60 bp, Homo sapiens
tcttgacttctggaacaattgccatttgggacttacttctcggtcagtgtactgccctcc

SEQ ID NO: 23635 - DNA, 60 bp, Homo sapiens
atggtgaccaaactctggagtccgaggtaacaagaacacctgtcccctaggcttttcttg

SEQ ID NO: 23636 - DNA, 60 bp, Homo sapiens
cttgcccccttctaaccatttcatgcccattctagtgtgggcttctgagtgctcatttgg

SEQ ID NO: 23637 - DNA, 60 bp, Homo sapiens
gctttgtaaggtgggagacaccgagtacaggcgagggactttattaggtcagggatttaa

SEQ ID NO: 23638 - DNA, 60 bp, Homo sapiens
caactccaagtatgtctgtgcacggacaatgagacgaaagcatgctcaatgcgaaagcac

SEQ ID NO: 23639 - DNA, 60 bp, Homo sapiens
tatctgagatcggccaagatgactgaggtgatgatgaacacccagcccatggaggagatc

SEQ ID NO: 23640 - DNA, 60 bp, Homo sapiens
gggccctcaggaggggaacgtggtaaaacccaagacattaaatctgccatctcaggcctg

SEQ ID NO: 23641 - DNA, 60 bp, Homo sapiens
gaaagtataggacagatatcagtgggaaacgtcggcgttctgagcaacacaggataaatg

SEQ ID NO: 23642 - DNA, 60 bp, Homo sapiens
acctgcggatcctggaacatcagggtcaatgcttcttgtgatatgtcactgaatttgggg

SEQ ID NO: 23643 - DNA, 60 bp, Homo sapiens
tctttaccatcagaccctggaggccctgcagacactgctcaaagccctctttatcgagga

SEQ ID NO: 23644 - DNA, 60 bp, Homo sapiens
gcaggcagcttgactgcagagtctaatcactgcactgttgcttgtggaatctagcatgtt

SEQ ID NO: 23645 - DNA, 60 bp, Homo sapiens
cagtagtggctacaggtgctaagcaaaagtcaggtacactggacagagccatgcgattga

SEQ ID NO: 23646 - DNA, 60 bp, Homo sapiens
gacagaggtcgacaaactatgctctgagtggcactgttctgcagcaaagtggttttaccc

SEQ ID NO: 23647 - DNA, 60 bp, Homo sapiens
cccctgacaagtttccattgtgttttgccgatcttctggctaatcgtggtatcctccatg

SEQ ID NO: 23648 - DNA, 60 bp, Homo sapiens
ccacctactgtcccctttggaacagttcaactgcagaaaggtcggattgaggttttgtgc

SEQ ID NO: 23649 - DNA, 60 bp, Homo sapiens
tctggtcttaactctgattgtagcaaaagttctgagaggagctgagccctgttgtggccc

SEQ ID NO: 23650 - DNA, 60 bp, Homo sapiens
ccagtcttaagctctgtccaccttcaagtcaattcataaccaagtttttgaacgctgcta

SEQ ID NO: 23651 - DNA, 60 bp, Homo sapiens
gcgcagtggagaagtaaaagaagccgcttgtctctgtgagcacagctatatacagtgtag

SEQ ID NO: 23652 - DNA, 60 bp, Homo sapiens
gaccaaatgacctgcaaagtgtcacttgattccattctctccatcccttccatcccaggc

SEQ ID NO: 23653 - DNA, 60 bp, Homo sapiens
cttgtagccctatagttctgtgacttcatttgctatacgctttaaatgtgttgagcagcc

SEQ ID NO: 23654 - DNA, 60 bp, Homo sapiens
aaggctctggatttaagcgggtggtcacctgtgagaccaggtctaccttgggactgttat

SEQ ID NO: 23655 - DNA, 60 bp, Homo sapiens
cgtgacagattagtcctaaagggaacggggttgttagttcaattggctaccggaaaaaac

SEQ ID NO: 23656 - DNA, 60 bp, Homo sapiens
cgacctggctgaattattgccagtgaaaacaacctgtacgaagcctttgctcaggttcta

SEQ ID NO: 23657 - DNA, 60 bp, Homo sapiens
acctgcctgttaggagaagctgcatccagaggcaaacggaggcaaagctggctcaccttc

SEQ ID NO: 23658 - DNA, 60 bp, Homo sapiens
gcttacagcccctcaatatctctctgctaacaccagtgtctctttctagttaggcctcta

SEQ ID NO: 23659 - DNA, 60 bp, Homo sapiens
cctttcaccttcatgttaacgtcccttctgatggtctcactcttcacaggtagttcacac

SEQ ID NO: 23660 - DNA, 60 bp, Homo sapiens
tggtgctcctttcaccaagccttgtaccacaagcctagtgctgtatccatccagagacaa

SEQ ID NO: 23661 - DNA, 60 bp, Homo sapiens
ggtgctactggccttgagcatatcactgtgggacagttccccaattgtcaagtgtttaga

SEQ ID NO: 23662 - DNA, 60 bp, Homo sapiens
gcctctggagcttacattgcctagtgtgcacttgggagagtgagcaaagtatctgggtat

SEQ ID NO: 23663 - DNA, 60 bp, Homo sapiens
ggccgtgaagctgcagtatgcggtgagcggcctggaaccgctggcttggtccgaggacca

SEQ ID NO: 23664 - DNA, 60 bp, Homo sapiens
agttacttactaatgagcaagatcagcacctgcatttcagcttggctctgtcattttcta

SEQ ID NO: 23665 - DNA, 60 bp, Homo sapiens
tttcctagttactgcacctgggagcgactgccagtactaccacatcatttcggtagtgga

SEQ ID NO: 23666 - DNA, 60 bp, Homo sapiens
ctctgctgttttccttactaactggcatgtcagtacaagagtgattgtgaagctgctccg

SEQ ID NO: 23667 - DNA, 60 bp, Homo sapiens
tgagctttggacatgagataaccgtgcctgttcagagtgtctacagtaagagctggacaa

SEQ ID NO: 23668 - DNA, 60 bp, Homo sapiens
ttctaacagggtatgaaagtgcccatttctagccaacattagataccctcagtctcatac

SEQ ID NO: 23669 - DNA, 60 bp, Homo sapiens
ccaatcacattccacttaccacagtttaacatacatcctctagtcacctttccgtacgaa

SEQ ID NO: 23670 - DNA, 60 bp, Homo sapiens
gccaacctaggagatgtaccatagcagtatgagcagaattcctcaggaggaacaattagc

SEQ ID NO: 23671 - DNA, 60 bp, Homo sapiens
gagccggtagctgtgtttgttgaccacattctttggcagttcctcccagaagatcaaagg

SEQ ID NO: 23672 - DNA, 60 bp, Homo sapiens
ggccacctaaggaggattctgtgaaactcaatgtctaaacccctgagaaaggcattcaga

SEQ ID NO: 23673 - DNA, 60 bp, Homo sapiens
ccagaccccaaccctgtctcttgtccatgccctttgtgatttcagtcttggtagacttgt

SEQ ID NO: 23674 - DNA, 60 bp, Homo sapiens
caccctggttagggcagaatgttaaagaccatcttggcagagttccagccacgctcttta

SEQ ID NO: 23675 - DNA, 60 bp, Homo sapiens
ctctgatttgaaccatgaattccacctactctgcgttgaagccctccagtagactgatag

SEQ ID NO: 23676 - DNA, 60 bp, Homo sapiens
gtgcataggagaatggcccactccaaatacgaagtgagatcctgagtctttgggtgcttc

SEQ ID NO: 23677 - DNA, 60 bp, Homo sapiens
gctgttgtcttgtgctgtggaaatggaagaaaccatcttcacagactgtaggagaattca

SEQ ID NO: 23678 - DNA, 60 bp, Homo sapiens
gagcctttcactggatgtgagctacttgagagcagggtttatgccttcatcagcgtgacc

SEQ ID NO: 23679 - DNA, 60 bp, Homo sapiens
ccagaactccatgaaaagcctgactttgccaaacactgtgctggaaaagctaagcccctt

SEQ ID NO: 23680 - DNA, 60 bp, Homo sapiens
agagcccaacaggagaggattagctgtgccaaggaacacgccactgctgcctgtctactg

SEQ ID NO: 23681 - DNA, 60 bp, Homo sapiens
aagcactccccagtcgtgggcgtaagtgaggcctttaatgagctcttctttgccacaggg

SEQ ID NO: 23682 - DNA, 60 bp, Homo sapiens
gaaggagcactggacttgggttcttgagacctgggttcatgttcagttctgccactgatt

SEQ ID NO: 23683 - DNA, 60 bp, Homo sapiens
ggctgcaagtaacttcaaaaggatggggaagtgcgatcttggcatgtgtcagaagaaatg

SEQ ID NO: 23684 - DNA, 60 bp, Homo sapiens
tttgaaaacccaacggcctggagtattctggtggcactggagccagcactagctttttgg

SEQ ID NO: 23685 - DNA, 60 bp, Homo sapiens
ttgcacctacagaccctcccagagaaagccctggctttgcaaccagctgtcttctcatga

SEQ ID NO: 23686 - DNA, 60 bp, Homo sapiens
gagcagatggacagtccttttcacccttgcttaatagccagagctgtttcatgcctgggg

SEQ ID NO: 23687 - DNA, 60 bp, Homo sapiens
tgcctgagcagccagccagtcagtgaggctcttcaccttacttccatttctctgattcca

SEQ ID NO: 23688 - DNA, 60 bp, Homo sapiens
agaggaggatcacgagacacccaaactacatgatctcagaaagtggggaagagtggcttc

SEQ ID NO: 23689 - DNA, 60 bp, Homo sapiens
cattaagatgtcatgttgtatgtcacacagtttctagattgatttctcttgtgtataagt

SEQ ID NO: 23690 - DNA, 60 bp, Homo sapiens
gacaatgcctgcctgtgtaaatgtatggcttactgtcaaagcttcattcttggctgcatg

SEQ ID NO: 23691 - DNA, 60 bp, Homo sapiens
cttaagagacaacacacatccccttctatgcctcttccacccaaaatacagaacacccat

SEQ ID NO: 23692 - DNA, 60 bp, Homo sapiens
tcttaacataatggaagaggcaggaggtattcccacctacaactcaggattcctatgtcc

SEQ ID NO: 23693 - DNA, 60 bp, Homo sapiens
taatgtctgttatgttcagggcacaagggtgagctcttcgcaggggctgatgcactgggt

SEQ ID NO: 23694 - DNA, 60 bp, Homo sapiens
cccgatttcatgcacagccctgcagtaaggagcccagaaggaacatgtgtttcctgttaa

SEQ ID NO: 23695 - DNA, 60 bp, Homo sapiens
atgtatacccacactctggacttcatcccactctagtggatggtggacaataccgcaagg

SEQ ID NO: 23696 - DNA, 60 bp, Homo sapiens
tgcaggaccttcagcagcctctatacactgggtgcccaacaacagccccttctaggagaa

SEQ ID NO: 23697 - DNA, 60 bp, Homo sapiens
aggtgcttgacagagtcaccccatggtggtatggctgaacaaggagcggcagacaactca

SEQ ID NO: 23698 - DNA, 60 bp, Homo sapiens
ctgtgcctcagctcctgccatgtggaaacagaggcccaccattgccaggttcccaatttt

SEQ ID NO: 23699 - DNA, 60 bp, Homo sapiens
cctcactcaagataaggtcaacattgaaggtggaggtggaagatgcagtttatgtagggg

SEQ ID NO: 23700 - DNA, 60 bp, Homo sapiens
gaaacgtcagtagagtcacactttgtgtacagggatgtcttagtgcccagatgacaagtg

SEQ ID NO: 23701 - DNA, 60 bp, Homo sapiens
ggagagaccgagactataatagccaccaaaactactgatgtagaaggaagactgtcagca

SEQ ID NO: 23702 - DNA, 60 bp, Homo sapiens
ttgaacgagaagttctccgaagggtggaggaagccaaacgcatcatggaaaagcagttgc

SEQ ID NO: 23703 - DNA, 60 bp, Homo sapiens
ccagatggccttgggtttaatcctggctcagtgcctcacagattgtgtgactttaggcaa

SEQ ID NO: 23704 - DNA, 60 bp, Homo sapiens
ggaataagcaggctctaggcttcaaagcaccaaactcttccacacagaagctccatcacc

SEQ ID NO: 23705 - DNA, 60 bp, Homo sapiens
gagcgagcacgtggctactccctgttgcatgtcaaatccacacagatgtcagcggcagct

SEQ ID NO: 23706 - DNA, 60 bp, Homo sapiens
cttcactccttaaatagtggtcgtttttggtaggcttacctgaccacctcacatgccaac

SEQ ID NO: 23707 - DNA, 60 bp, Homo sapiens
accaatcaggtgttttctgtgctactagttgtcacgttgcattcatgttcacctcctgat

SEQ ID NO: 23708 - DNA, 60 bp, Homo sapiens
actaaagaaggtgaagacagcccacagcaacgatggggactgcaagacccagtagttggc

SEQ ID NO: 23709 - DNA, 60 bp, Homo sapiens
ctgctgtgctagagtcagtattttgcttctggcaggagagctgcaaactgtgtatcctca

SEQ ID NO: 23710 - DNA, 60 bp, Homo sapiens
ccacactcaactccatgccctaccaacacagacagggacacagaaatacaggctggtctc

SEQ ID NO: 23711 - DNA, 60 bp, Homo sapiens
gagtcctccagtgtcttggcaaaatgttctagtatagctggatacatacagtggagttct

SEQ ID NO: 23712 - DNA, 60 bp, Homo sapiens
ctattgctaacagatcccaggtttatgtcctttgtcaatcccctttctggcagacggtcc

SEQ ID NO: 23713 - DNA, 60 bp, Homo sapiens
ccctccttgctattcgcagctacatacaacgtggccaaccccagtaggctgatcctatat

SEQ ID NO: 23714 - DNA, 60 bp, Homo sapiens
aacttttcaatctcactgttgggcccagtgaatgtgccgaagaactggcacccatcgtcc

SEQ ID NO: 23715 - DNA, 60 bp, Homo sapiens
aaaggactggactgccttgattgacatggggaagggggttagtagactatgtggattgcg

SEQ ID NO: 23716 - DNA, 65 bp, Mus musculus
tcctggtatgacaatgaatacggctacagcaacagggtggtggacctcatggcctacatggcctc

SEQ ID NO: 23717 - DNA, 65 bp, Mus musculus
cagccctaaaatgacaaagccttcttaaagccttatttttaaaatcccccattcttgctcagatt

SEQ ID NO: 23718 - DNA, 65 bp, Mus musculus
gtaacaaccatgtccgtcttccaagagccttggctggttcatgccgactgtggagcctgacccta

SEQ ID NO: 23719 - DNA, 65 bp, Mus musculus
cagacaattccctgccatctccaagcagtttgtggtccgcttcccatcctgcatccagtaagaaa

SEQ ID NO: 23720 - DNA, 65 bp, Mus musculus
acaagatagaccggatcggatccgtcagtcgtttgggctgtaacgcactgaagttgttgtaggaa

SEQ ID NO: 23721 - DNA, 65 bp, Mus musculus
gtggcatccgagtcttgatggaaagccgtgtgaagtgactactgtaagccaagtcatcctgaggt

SEQ ID NO: 23722 - DNA, 65 bp, Mus musculus
cgctgccagtgttccaggccctaaagatttggggttagtacatcgagatcaaagtcattgcaaaa

SEQ ID NO: 23723 - DNA, 65 bp, Mus musculus
caacgaatggctgggaatcaagaacgagactgaggaccagtattcactgatggaggatgaggacg

SEQ ID NO: 23724 - DNA, 65 bp, Mus musculus
ttaccagagccacatggccttgaagaccagtgaccacaagcctgtcagctcagtgtttgacattg

SEQ ID NO: 23725 - DNA, 65 bp, Mus musculus
gactaacctgtcgctccatgctagatacactatactaaggaatcttcgagaagccaggatgagca

SEQ ID NO: 23726 - DNA, 65 bp, Mus musculus
ccatgagcatctctgttgtggacacgcctgtgaatgaccctgtcactttacccttaactacagca

SEQ ID NO: 23727 - DNA, 65 bp, Mus musculus
ccttacaagcttgggctgttcctgcttacacagtcaacatttgtcccttcccttagcctaagttg

SEQ ID NO: 23728 - DNA, 65 bp, Mus musculus
aacaagcctgaggttcaatgtgaggaccctgaggcagtacaagaaccggagtcctgctctgaaca

SEQ ID NO: 23729 - DNA, 65 bp, Mus musculus
ggggaaatcttgtttgttactgtcattcccattcttttcgtttagaatcagaataaagttgtatt

SEQ ID NO: 23730 - DNA, 65 bp, Mus musculus
gcggtcacagagcttggaggactcagaagaggcaaagtacagcttagtgtgttggacaaaaggaa

SEQ ID NO: 23731 - DNA, 65 bp, Mus musculus
gacctgtgccagggatgggttgaatgctgaaggccttttgaggcagcctgatgctggtaacattt

SEQ ID NO: 23732 - DNA, 65 bp, Mus musculus
ttcacagcctaccacggaaaccaccatcagcactgagtttcacagttccacctctgcaaacacac

SEQ ID NO: 23733 - DNA, 65 bp, Mus musculus
ccgccactcagactccctctacacatatccagtagccactgaatgtcactgtggcaagtgtgaca

SEQ ID NO: 23734 - DNA, 65 bp, Mus musculus
gaatgctcagcaacgggcagacaagtgtacattcagtcacagtcctatagaactcaggacaacta

SEQ ID NO: 23735 - DNA, 65 bp, Mus musculus
gcaggagaagcagatagctgtcctaaacgtcaagagacagactcggaaggggagctcaaagaaga

SEQ ID NO: 23736 - DNA, 65 bp, Mus musculus
tggcagaaggagtgccagctagcaaatgatactgcagacacagaggtaattgtggcattggctgt

SEQ ID NO: 23737 - DNA, 65 bp, Mus musculus
ccacacctttccaaatcttcgatgtctcaccatctaagtctctcactgcccaccttggcgaggag

SEQ ID NO: 23738 - DNA, 65 bp, Mus musculus
aagaccaagtgcttcaagttcatctagggccttgcagttctgaggagacaatgagcagagcgagg

SEQ ID NO: 23739 - DNA, 65 bp, Mus musculus
cagtcacagttatgattggtggagagccatacactcttgggctttttgatactgcagggcaagag

SEQ ID NO: 23740 - DNA, 65 bp, Mus musculus
ggtggacgctgtctcgcccctctttctaggatgcactctatatgtgactgtgactttcaagggta

SEQ ID NO: 23741 - DNA, 65 bp, Mus musculus
tgacctccaggagtccacaggcattgcctctgacagctccagcgactcttctagctcctctagtt

SEQ ID NO: 23742 - DNA, 65 bp, Mus musculus
gtgagtggcctgtgttagtcttgtgaggacctcgaggaacctaaaagctcagatgcacttacagt

SEQ ID NO: 23743 - DNA, 65 bp, Mus musculus
gtgccagatggcttgcttctctttccgtcagctatctgtggggacctcgtttattccagagagaa

SEQ ID NO: 23744 - DNA, 65 bp, Mus musculus
gtgtttcactcacctataaacccaaggggaaatggtattgcccaaagtgtaggggagacaatgag

SEQ ID NO: 23745 - DNA, 65 bp, Mus musculus
aaagagaacgtggactcaccgcttctcaagttctgagcagcgcacagccctctgctgttgattct

SEQ ID NO: 23746 - DNA, 65 bp, Mus musculus
gcctgaggagcttcttgactctgtagaccaacaagcttcggttcagcaactttcaagcgagtatc

SEQ ID NO: 23747 - DNA, 65 bp, Mus musculus
caaagagagatcgtaaataaacacaatgagctgaggagatcagttaaccctactggcagcgacat

SEQ ID NO: 23748 - DNA, 65 bp, Mus musculus
tgcaaatctgaagtgctcattatactgggagagctggggattctaactccctaatgggcaatccc

SEQ ID NO: 23749 - DNA, 65 bp, Mus musculus
ttatgcatgataccttctactcagaagaagctctgcagccaggatccccacacacagcagaccag

SEQ ID NO: 23750 - DNA, 65 bp, Mus musculus
ctgcagtcttactgcctcagtttcccaagtgttagagttacaggtgtgagccacaatgcctgact

SEQ ID NO: 23751 - DNA, 65 bp, Mus musculus
tttgccatggccaagctgcctagcgagatgagccccgacttgcaccgcaaggtatctgtgcagta

SEQ ID NO: 23752 - DNA, 65 bp, Mus musculus
ctggtgattgtgtccagaagggctcctgaagacctgaagaaagacaatctcattgctgtggaaaa

SEQ ID NO: 23753 - DNA, 65 bp, Mus musculus
actctgacatgaccagtcattctcagcacagtactgcaactcgtcagccctcagtgactctccaa

SEQ ID NO: 23754 - DNA, 65 bp, Mus musculus
aaagtcttcgtgctcggtgatgtgacaattctgctgcagagctgcggacactggggatatattcc

SEQ ID NO: 23755 - DNA, 65 bp, Mus musculus
gggatactccaagttccataacaacagtttctcagagccatcatactacaagcatggagaccagc

SEQ ID NO: 23756 - DNA, 65 bp, Mus musculus
tatgcaaggcggatcaggaccagaggttgtccctagagaaacagaaatcagactccgacatcctg

SEQ ID NO: 23757 - DNA, 65 bp, Mus musculus
tctgaagacatgcgttaaggcaaagaagagacaggacctggagaaccatgagcagaggggtgaga

SEQ ID NO: 23758 - DNA, 65 bp, Mus musculus
gttcgccatgttgggataccttcttccctgaaccaaagggagagatgtggaaatctgctcctctg

SEQ ID NO: 23759 - DNA, 65 bp, Mus musculus
ttaacccttcaaccaagcagagaaggtgccaccctgagcatcgatcagctgcaagcctttctatt

SEQ ID NO: 23760 - DNA, 65 bp, Mus musculus
ttcaacaagacttcccagagttggttgccagtagagggtgatgctgacatctgtgattgctgcag

SEQ ID NO: 23761 - DNA, 65 bp, Mus musculus
aaagtgtactgctgtgacctcaccacgcttgtcaaagctcacaacactcagagacccatggtggt

SEQ ID NO: 23762 - DNA, 65 bp, Mus musculus
atgaaagatgtgtacctaaagaaccctcagatgggagacccagccagcctggaccagaagctcac

SEQ ID NO: 23763 - DNA, 65 bp, Mus musculus
gaatgcacgtgtatgtctggagggatctgcatctgcggagataattgcaaatgcacaacctgcag

SEQ ID NO: 23764 - DNA, 65 bp, Mus musculus
accaaggagacggaatacagggctttcgattcagcgctcactgctcttgtgacagcaaagataac

SEQ ID NO: 23765 - DNA, 65 bp, Mus musculus
acgtcactgatgatggtcttcgccaaaggggccttcccagagagctacagtcccacagtgtttga

SEQ ID NO: 23766 - DNA, 65 bp, Mus musculus
tttgaccctccgttactggccactccattactgaccacttcaaacgtgccaacacactcttggtc

SEQ ID NO: 23767 - DNA, 65 bp, Mus musculus
aaagctaggtttgagctccacagtgtttcagccttttctgcgtcagtgtgagtcatgtggcgggt

SEQ ID NO: 23768 - DNA, 65 bp, Mus musculus
aatgagttctgcccagtctgcatcaccttcaccaccagcatctgtgccggctactgtcctagcat

SEQ ID NO: 23769 - DNA, 65 bp, Mus musculus
acacactatgcggcgcaagacccatgtggacacaagcttctcgtttacaccagcaagcgtatcat

SEQ ID NO: 23770 - DNA, 65 bp, Mus musculus
agcccatgaaccccatggaagccaaccccaactgaagctgagataatcagaccaggaagtgaaaa

SEQ ID NO: 23771 - DNA, 65 bp, Mus musculus
atcatcaagaacgtgcgtctggaggatgagggtcggtaccgctgcgagctcatcaatggcattga

SEQ ID NO: 23772 - DNA, 65 bp, Mus musculus
gctgttggacctttccagacacacaccttcaggatccattactcggtgcccatgagagtttctta

SEQ ID NO: 23773 - DNA, 65 bp, Mus musculus
ccgagagggaggcttccttctggaacatttctttctgctagctttgagaatcactgtggtaaaga

SEQ ID NO: 23774 - DNA, 65 bp, Mus musculus
taggaggaaagacacgaggacgaagaagcagctcatctccaggccaccacttagaggattacaga

SEQ ID NO: 23775 - DNA, 65 bp, Mus musculus
ttgtccggcagaacaagcgcctggatgctgtgagacatgcaagaaagcacttcagtcaggctgaa

SEQ ID NO: 23776 - DNA, 65 bp, Mus musculus
tagccttgttatttgacttaacttggtggggacatgaataaaggtcaaaggttgcaccgtgaaaa

SEQ ID NO: 23777 - DNA, 65 bp, Mus musculus
gctgtcaagcagatactgagaatagtccttcctcagcgcttcactgtcccagatgctcagaagga

SEQ ID NO: 23778 - DNA, 65 bp, Mus musculus
ccatggtggctgtggcttcccttacggctagtgaagattcaggcttgttccccctgtttacagat

SEQ ID NO: 23779 - DNA, 65 bp, Mus musculus
agtgacaacggtgtatatcaacaacgggtctgtcctccagggaagttctgtggcgaccatatatg

SEQ ID NO: 23780 - DNA, 65 bp, Mus musculus
atgtcaccaccacgccatcatcgtcaccgttgacagaacagtccttaatccagaaagcctgacat

SEQ ID NO: 23781 - DNA, 65 bp, Mus musculus
tggcatgaccagggacagtggagtgatgtgccctgcaactaccatctatcctacacctgcaagat

SEQ ID NO: 23782 - DNA, 65 bp, Mus musculus
tgggatttaactccagtgaaggtcattcagctgggaaccttagtggataacttgaccgttgatcc

SEQ ID NO: 23783 - DNA, 65 bp, Mus musculus
taagatcacacaggagacgaggtcagctttccaaaaccactctgtttccgtcacttgcggtaggc

SEQ ID NO: 23784 - DNA, 65 bp, Mus musculus
gatcgtggtcctagtctcaacccagtgcttgattatgaccatggaagtcgttctcaagaatctgg

SEQ ID NO: 23785 - DNA, 65 bp, Mus musculus
ccgcagaagcagcaacagatccaagctatggatgaaatggacatcttgcagtatatccgggacca

SEQ ID NO: 23786 - DNA, 65 bp, Mus musculus
tgcttctctgtcgtaaacccagcctcttaccacaacgttcaggaggagtgggtcccggaactgaa

SEQ ID NO: 23787 - DNA, 65 bp, Mus musculus
ggtgctaatgcagtgctgaatggctcctactggacctctcgatagaacactctacaaagtacgag

SEQ ID NO: 23788 - DNA, 65 bp, Mus musculus
tgagttatgggtgccagtttctgcaggagactttgggagtaagagctgcctctgttcctaagagg

SEQ ID NO: 23789 - DNA, 65 bp, Mus musculus
tgtaaagctggcatcagcagggagaaggtcgtccctctttatgggcgagggagccagaagccaca

SEQ ID NO: 23790 - DNA, 65 bp, Mus musculus
agaagtccagccttacctgtgagagagctcctggcatctaagagaactctgcttcctcatcatcc

SEQ ID NO: 23791 - DNA, 65 bp, Mus musculus
ggctcgtagatctcaggtgatgcagagcagaaatccaaggtgaaaggtctgtgcagcatctatct

SEQ ID NO: 23792 - DNA, 65 bp, Mus musculus
gcacccaaatctacgagcatttggcattgtggaatgtgtactatgcacttgtaatgtcaccaagc

SEQ ID NO: 23793 - DNA, 65 bp, Mus musculus
actcccagtgactctctcttcacaagcagatgaagggaaggctcagaagggcatctcctgtagct

SEQ ID NO: 23794 - DNA, 65 bp, Mus musculus
ctttcttgatcctagtcaggaactcttacgaagcacacatatagccaagcttataggtctttggc

SEQ ID NO: 23795 - DNA, 65 bp, Mus musculus
catcacaagcctcgcaaggagcacagaaaacacaagagacacccagcggaagactgggagaaaga

SEQ ID NO: 23796 - DNA, 65 bp, Mus musculus
gaactcttccccagtcagcactgaggctgtgagagaagctggagtaagactcctggcctttctct

SEQ ID NO: 23797 - DNA, 65 bp, Mus musculus
tttgccagacagaagccaactgtgtaggagggtcaagttccaggtggacttcaacctgattggct

SEQ ID NO: 23798 - DNA, 65 bp, Mus musculus
ctccgctgactctcttggacacctcctgggaggaaaatgctccctgtctgccatcgtttttgcga

SEQ ID NO: 23799 - DNA, 65 bp, Mus musculus
aacttctgccaccgtcatcagctgttcatcaacttccaggacctgggttggcacaagtgggtcat

SEQ ID NO: 23800 - DNA, 65 bp, Mus musculus
gagagcagagcttgcctgtggagtttgcccttcagcctagaagtttatgcttcaccctttgcaaa

SEQ ID NO: 23801 - DNA, 65 bp, Mus musculus
ttagagtgcctgggcagagagcttcctgtgaccagtctctccgtgctgctcagtgcacactgtgt

SEQ ID NO: 23802 - DNA, 65 bp, Mus musculus
gcattttccgttgttcacacagtaaggacaatgtctctgcattgatctgaggctcactggtggcc

SEQ ID NO: 23803 - DNA, 65 bp, Mus musculus
tattttaggcaactgtcctgtgatgccagccagcggtgcagtgtgtgtgccaccttatttagcta

SEQ ID NO: 23804 - DNA, 65 bp, Mus musculus
ttggcttccccttctaaagtctctaagggacaggagggtgatgcaacctccaagtccccagttgg

SEQ ID NO: 23805 - DNA, 65 bp, Mus musculus
cggcccatgtcgtctccagaaatgaaatctgctccaaagaagtctaaggctgatggtcagtgagg

SEQ ID NO: 23806 - DNA, 65 bp, Mus musculus
tgctttccgtctatggtgcctcttcaacttcctgtctgaggacaagtacccgctgatcatggttc

SEQ ID NO: 23807 - DNA, 65 bp, Mus musculus
gaagccaaagagcaagaggagaatgaagaggccaagagtggagaagactagaaggctgccagcca

SEQ ID NO: 23808 - DNA, 65 bp, Mus musculus
gctggtcacagataaggccattgctagtgacttttggacatgatggaaaaggacatccgctccac

SEQ ID NO: 23809 - DNA, 65 bp, Mus musculus
gatgtgacaccagaaacgccgaaaacagtcgacgttacgtcagaaacaccaaaggcaacaccagt

SEQ ID NO: 23810 - DNA, 65 bp, Mus musculus
ctgctttccaggggttgtatcttccttcttacctgttcatcaaccagccctctcattgctgctgc

SEQ ID NO: 23811 - DNA, 65 bp, Mus musculus
aggaataagggttagggtcctcaaatacacccatggcttttggagtctatgaccaaggccaggct

SEQ ID NO: 23812 - DNA, 65 bp, Mus musculus; identical to SEQ ID NO: 23716

SEQ ID NO: 23813 - DNA, 65 bp, Mus musculus
ttgctgtcaaaccacctgctgcaggacctgcttccagccatgctgtgtgagcagctgctgccgca

SEQ ID NO: 23814 - DNA, 65 bp, Mus musculus
tccccacatcaacgacaccacaaagagttcaagttcaacctatcccagattcctgagggtgaggc

SEQ ID NO: 23815 - DNA, 65 bp, Mus musculus
cgactgaagcattgtgatccaggactgtcctttagtgaagaagtatgccgctgtgtcccatcgta

SEQ ID NO: 23816 - DNA, 65 bp, Mus musculus
ccccggttttgtaagggcaaagatctgaaaccagcaagggccttctgcttacgaaacctcgagcc

SEQ ID NO: 23817 - DNA, 65 bp, Mus musculus
cctgtgtgggttccgtctctctgggttctgatgtgtaaagtgtgccttgtaatgtctaatggact

SEQ ID NO: 23818 - DNA, 65 bp, Mus musculus
aaccgcagctttgagacctgcagaaccctcaatggcatccactctaacatctccgtgtcttacct

SEQ ID NO: 23819 - DNA, 65 bp, Mus musculus
gacccctgactcgcgacctcatcaacgttggtgctactgcttggtggagaatgtaaaccttctat

SEQ ID NO: 23820 - DNA, 65 bp, Mus musculus
tccaccttgccgtgccagcttcagtcactggagatgatgtttgtagacctggagaacctcaccct

SEQ ID NO: 23821 - DNA, 65 bp, Mus musculus
gctcttccatggcgtacaagtgctcagttccaatgtgcccagtcatgaccttttctcaaagctgt

SEQ ID NO: 23822 - DNA, 65 bp, Mus musculus
aacgagaagactatgaagactgcctcccaggagacagagctgcagaatccagatgatggagccaa

SEQ ID NO: 23823 - DNA, 65 bp, Mus musculus
gaccgactaggtaagaagagcacgtcagcaaacaaagactcaatagcaagccactaccatcttag

SEQ ID NO: 23824 - DNA, 65 bp, Mus musculus
agcagcagaaagagccactcatctacgagagtgaccgagatggggccatcgaggacatcatcaca

SEQ ID NO: 23825 - DNA, 65 bp, Mus musculus
gcagagtcattcagcgtatcttagagcactgcacggcagagcagaccttacccatcttagaagaa

SEQ ID NO: 23826 - DNA, 65 bp, Mus musculus
agcggaaatgccctcctgtcctggaggcaccatgccagcagaaatgtccatccaaaagcaagtaa

SEQ ID NO: 23827 - DNA, 65 bp, Mus musculus
tgatcagggctacaccaagatacctgaccagggatcctctaaggtaccagagccatgccagtcca

SEQ ID NO: 23828 - DNA, 65 bp, Mus musculus
ctggaggatgcagatgttccagagcctaccttcaaagccaccgagttctgagctgtcctcaaaca

SEQ ID NO: 23829 - DNA, 65 bp, Mus musculus
ttttggtagtgatgctgattcagaagatgatgctgactctgatgatgaggacagagggcaggccc

SEQ ID NO: 23830 - DNA, 65 bp, Mus musculus
tacagagagcgagagcctcgtttggttctacttacaaggaaggctttgtgtctgtctgtccttcc

SEQ ID NO: 23831 - DNA, 65 bp, Mus musculus
atgcatggcactctggctctatcaccctgtcaaggtttatgttggctgtcaataagtgtctgaaa

SEQ ID NO: 23832 - DNA, 65 bp, Mus musculus
agtcctctgtgtgtatgcctgtgagctgccggcctgtctgtgtgacctcctcctgtcagtcatct

SEQ ID NO: 23833 - DNA, 65 bp, Mus musculus
tacgatggctggacagagcccttcgccttccacatgcggaagtccctgtatggtttcttctggaa

SEQ ID NO: 23834 - DNA, 65 bp, Mus musculus
aaaccagaactcctgtcagaaacggctgtgtcagtgcgataaagccgccgctgaatgtttcgccc

SEQ ID NO: 23835 - DNA, 65 bp, Mus musculus
aggcggtcacagaccccacagcagagtacagtacaatccacagtccttccacacccattaaagag

SEQ ID NO: 23836 - DNA, 65 bp, Mus musculus
tatgtaggaacggacagtgctaggctggggtctctggacagctgcctcaactatgtggacctgga

SEQ ID NO: 23837 - DNA, 65 bp, Mus musculus
gggagagctgtctcctccttgaatcacctttgtgcctggtgactttctgccacgagatgttcatt

SEQ ID NO: 23838 - DNA, 65 bp, Mus musculus
gactaagcagacaagtagaagagattgagatgggagtaagcagaagagccttgccccaagcatgt

SEQ ID NO: 23839 - DNA, 65 bp, Mus musculus
agttgctctccctgcttgctatcaccgcgtctgtgtccggtggtctcattagctgtctactaacg

SEQ ID NO: 23840 - DNA, 65 bp, Mus musculus
gctatcagagaaagtagttgatgctcggaagagtacctggcacatctttccagtgtccagcagca

SEQ ID NO: 23841 - DNA, 65 bp, Mus musculus
tggataggagagagtgtgcctactgcctgaccatcaacaccaccatctgtgctgggtattgtatg

SEQ ID NO: 23842 - DNA, 65 bp, Mus musculus
ctttggagaatcagaggttccacagtagcaaagcctggagttggagggttacataggatttctcc

SEQ ID NO: 23843 - DNA, 65 bp, Mus musculus
acgctgtagacgaagccaaacctaaggaaagtgcccgacaggatgagggtaaagaagaccccgag

SEQ ID NO: 23844 - DNA, 65 bp, Mus musculus
ggaggagaactttgacttctcgagtctggactatgagtccgaaggggatgttcttgaagaggatg

SEQ ID NO: 23845 - DNA, 65 bp, Mus musculus
ctcttccagagaagcctccaatgaaacccttcatcctcactcggaacaaggcacaagccaaagta

SEQ ID NO: 23846 - DNA, 65 bp, Mus musculus
actagtccatcacaatgtgacacggtgggaaactttcgatgtgagccctgcagtccttcgctgga

SEQ ID NO: 23847 - DNA, 65 bp, Mus musculus
ggagcacctcacacctacaaaacacgcaattattcaggccttggtccacctcaagaattcccaga

SEQ ID NO: 23848 - DNA, 65 bp, Mus musculus
tatgaggacgaggtgtccttcctggacgtgcacagccgctaccacacgctgcaagagctgtcggc

SEQ ID NO: 23849 - DNA, 65 bp, Mus musculus
ttctaggcaacaaggccgatgtaagcagcgaaagggtgatccgttctgaagatggagagacactg

SEQ ID NO: 23850 - DNA, 65 bp, Mus musculus
tgcttaacccaacaccgataaagcgtgggcggtcctgcatcctcttgtgaccctggcactcagct

SEQ ID NO: 23851 - DNA, 65 bp, Mus musculus
acttgagagctacacctgtcagaagtggtagcaaccctcagatggacaaacggaagtgcaacacg

SEQ ID NO: 23852 - DNA, 65 bp, Mus musculus
ggcaccacgtgtccacctcccgtatctattgagcatgctgacatccgggtcaagaattacagtgt

SEQ ID NO: 23853 - DNA, 65 bp, Mus musculus
agctgattcctgctcttgcaaaagtcctgctctacagcctaggaggtgctttccccattgagaac

SEQ ID NO: 23854 - DNA, 65 bp, Mus musculus
attgtccagagccatgcctgaagacctgatcaccagatgctgaggctgctgtctatcctgcttat

SEQ ID NO: 23855 - DNA, 65 bp, Mus musculus
gcgaccacactacctgtcctccatataccaggctcatccatctttgaagcatgagttcacatcag

SEQ ID NO: 23856 - DNA, 65 bp, Mus musculus
aagcatgaactggacttggccatctttccacaccctggggaagacatttgcaactgacttggggt

SEQ ID NO: 23857 - DNA, 65 bp, Mus musculus
acacctgtaccagcccattacagggaaatccactccccatgggtgaggcaggcaatcctataaaa

SEQ ID NO: 23858 - DNA, 65 bp, Mus musculus
gagccaggctgaactcgatcccaaacaggtgtttaccaaggaggaagccaaacaatccgcagaaa

SEQ ID NO: 23859 - DNA, 65 bp, Mus musculus
tagaggtcattccacgacggtagtctctgatcctagccctactcctcagcctagacctaagcata

SEQ ID NO: 23860 - DNA, 65 bp, Mus musculus
tgccaagttattggtggctattgaggcaggtggatacaaccaggaggcatgtacccaactcgtga

SEQ ID NO: 23861 - DNA, 65 bp, Mus musculus
tttgagagtgtcagtcacctgatcagctaccacatggacaatcacttgcccatcatctctgcggg

SEQ ID NO: 23862 - DNA, 65 bp, Mus musculus
gccagctctttgggaagtcttcagttaagatggtacagacaccctatggcatcatcccagacgtt

SEQ ID NO: 23863 - DNA, 65 bp, Mus musculus
agttcgggctcggttcggtgtctggggtatgaaggtcctgcaaacccgaggcttcgtctcggact

SEQ ID NO: 23864 - DNA, 65 bp, Mus musculus
ggtggaatacaaagtgactgacctgtgaactagggccacagtgattacctgagacctgccaactt

SEQ ID NO: 23865 - DNA, 65 bp, Mus musculus
cattaaggaagcatccaggtttaagaaacgaatgctaatagaacaactggagaacttcttggatg

SEQ ID NO: 23866 - DNA, 65 bp, Mus musculus
tgtcacacatgagcagggtactgtgctggccaagcaagtgggagctgtgtcctacgttgaatgtt

SEQ ID NO: 23867 - DNA, 65 bp, Mus musculus; identical to SEQ ID NO: 116

SEQ ID NO: 23868 - DNA, 65 bp, Mus musculus
atcggtgcaatgtgtttcctccaagactgagaggagagacctggccaatgccgaattgttcccaa

SEQ ID NO: 23869 - DNA, 65 bp, Mus musculus
taaaggagagtcagggtaaggggccagatgtaggattggggaccacagtctgggaactgtattgg

SEQ ID NO: 23870 - DNA, 65 bp, Mus musculus
aacaaggatgtgcacgcttgcccaagctcacagatcttcatgtacaacctgaccacttgccagca

SEQ ID NO: 23871 - DNA, 65 bp, Mus musculus
gtgggtatgtccatctcatccattgtggcttgagaccggccttcaggagtccgctctccatttaa

SEQ ID NO: 23872 - DNA, 65 bp, Mus musculus
tgcttcaggggaagaaatctccactcgtccattccagctggtgacaggacgcacatggaaaggca

SEQ ID NO: 23873 - DNA, 65 bp, Mus musculus
gctgtcttcactaatgacatcaacaaggctctcatggtatcctccgcaatgcaagctgggacagt

SEQ ID NO: 23874 - DNA, 65 bp, Mus musculus
taacccccaaacttacactgaccctagagcttagctactcctctcacccccatgattctgggaca

SEQ ID NO: 23875 - DNA, 65 bp, Mus musculus
aagcattcggactgtcctgacattttgagttccagagacctgggtgttctgagctgggctaccgt

SEQ ID NO: 23876 - DNA, 65 bp, Mus musculus
acgacataggcccatctaaggcagacaacgtgtcacctttgccactgagggctcatgttagaact

SEQ ID NO: 23877 - DNA, 65 bp, Mus musculus
tggctaactttacccagcccaactcccccttccacacggttttcaagccagaagcagcttacctg

SEQ ID NO: 23878 - DNA, 65 bp, Mus musculus
ggtggatgaaactcagtttaagaagatcctcggctacatcaaatcgggacaacaagaaggggcga

SEQ ID NO: 23879 - DNA, 65 bp, Mus musculus
gttttctctgctcagcctcattccatgccaaagtgctgctgctataggcctctttgtgttgcaca

SEQ ID NO: 23880 - DNA, 65 bp, Mus musculus
aagtggatttctgctctgctgctgctgcagataagttgctgcttcagatctgtgaaatgtgggaa

SEQ ID NO: 23881 - DNA, 65 bp, Mus musculus
aggagacacgcatgcctttgtgtgttctactgtgattgccagagagtggggctgacttatgaaga

SEQ ID NO: 23882 - DNA, 65 bp, Mus musculus
ctttctttgcttcaagttgccacatttaagggctggatggatatcatgtatgctgcagttgattc

SEQ ID NO: 23883 - DNA, 65 bp, Mus musculus
cagcaactctgtccccctctgaggtgaaacgggaaacacactgtacatgttgtgaacaagctttc

SEQ ID NO: 23884 - DNA, 65 bp, Mus musculus
aagaagaatgttagctacctagcgtgttagaaaagactacacaggttcacagtgcttagcaatta

SEQ ID NO: 23885 - DNA, 65 bp, Mus musculus
tgaatgtgttcaagatggacaaagtaggtagggcctgtccgatgatgtcagccatgggcactagg

SEQ ID NO: 23886 - DNA, 65 bp, Mus musculus
caaatgtatccataacagaaatcacccagtccaatgctgaccaactaatgacttgttgtatcttc

SEQ ID NO: 23887 - DNA, 65 bp, Mus musculus
ctggtgacatgatcatactactggtggtcatgttgatgtgtgctaggaaatacccagcattggct

SEQ ID NO: 23888 - DNA, 65 bp, Mus musculus
gcccacttggagagctataaaaagagctccgcagcatgaagttgcacatccctgagagatttcat

SEQ ID NO: 23889 - DNA, 65 bp, Mus musculus
tgaacacaggcatgtccaaacagtctctcaatgggtcctacatgagaaggtagacagcctggcag

SEQ ID NO: 23890 - DNA, 65 bp, Mus musculus
caaaggcaatggtcgtgttaaacacgaaaagaaggtgagatgatccgacagcccaggtgaagggg

SEQ ID NO: 23891 - DNA, 65 bp, Mus musculus
gttgctgtttgactgacaggatggatccaggttgtgaaacatctgtagcaatttccctgaaccac

SEQ ID NO: 23892 - DNA, 65 bp, Mus musculus
gaagtactgttatcagaccctgtatttccttgtggtgacatcgtggctttaaaactgggaattcc

SEQ ID NO: 23893 - DNA, 65 bp, Mus musculus
atacactgatgtggacacaggtttggggacagatctgagcatgaccacccaatcgggtgacctgc

SEQ ID NO: 23894 - DNA, 65 bp, Mus musculus
ggtttaaacaaatcctctgggaactagattctgttcgtgaaatcttccaaaatggccatgtcagg

SEQ ID NO: 23895 - DNA, 65 bp, Mus musculus
ggtttcgggttgctctgaagacttttgagctgaatggataccagatccccaagggctggaatgtt

SEQ ID NO: 23896 - DNA, 65 bp, Mus musculus
tctgggaagagtcctgccaaagtccaggacagcattggggctaaggcagaggcttttctctagag

SEQ ID NO: 23897 - DNA, 65 bp, Mus musculus
cccatctttgtggtcaccagcaatggcatgaaatggtgtttggagaacattgacacatcccatgg

SEQ ID NO: 23898 - DNA, 65 bp, Mus musculus
gagcctttgaggctaacgataatgaggagtaaataggggacatggtgcatttttgctggatcctg

SEQ ID NO: 23899 - DNA, 65 bp, Mus musculus
gatttcatctcacccagtcaccgagtggaaagcaagccgaggtgtaaactgctgtacatagcttg

SEQ ID NO: 23900 - DNA, 65 bp, Mus musculus
cacagagctactgccacaatcctttcttagggtgtcaggctctgaatctctccaaatgtgctgtc

SEQ ID NO: 23901 - DNA, 65 bp, Mus musculus
ttcctcaaaggagctgaagtacatcgactctccaacgagaaggttcccttcgctaccaagggcaa

SEQ ID NO: 23902 - DNA, 65 bp, Mus musculus
cgtggaggctctagaaagtcactgcagagtgaacggaggctactcaggcttacgggatgtttaca

SEQ ID NO: 23903 - DNA, 65 bp, Mus musculus
ctgcagaatcctttgcttacggatctctgagatcgagccgccttgcttccctcccgttcacgtga

SEQ ID NO: 23904 - DNA, 65 bp, Mus musculus
actgtttcagaaaggaaaaccacattgaggtttgggaacggccactctccaacctagcctgggct

SEQ ID NO: 23905 - DNA, 65 bp, Mus musculus
tcgagaaacctatggacttccagatgcgatgcctgcctcctggcacaacctggtctaccgcatga

SEQ ID NO: 23906 - DNA, 65 bp, Mus musculus
gttttctgagaacttagtccgtccgtacccagctaacctctctcccatgctggatgaagaagttc

SEQ ID NO: 23907 - DNA, 65 bp, Mus musculus
gcgagatactgtctaagggaaagctgcacactctaccttgtgagtacaaagaggttcgttcaagt

SEQ ID NO: 23908 - DNA, 65 bp, Mus musculus; identical to SEQ ID NO: 23716

SEQ ID NO: 23909 - DNA, 65 bp, Mus musculus
ttcctgcccagacaggccttccccgctggctccctgcaagcttccatgtaataaagtcaagctga

SEQ ID NO: 23910 - DNA, 65 bp, Mus musculus
ctactttgaacaaagcccttggcatatccactgaaggttgcacagctcctgacgtgccttccgag

SEQ ID NO: 23911 - DNA, 65 bp, Mus musculus
tcctacccaggtcctttccaacggcatccctgtctccaatttcacctacagccctgacaacaaga

SEQ ID NO: 23912 - DNA, 65 bp, Mus musculus
tgtgcgccttgatgagctgtgccaaacacaaggattaccccttccacgccgaagtctgaagctgt

SEQ ID NO: 23913 - DNA, 65 bp, Mus musculus
gactctgagtgcggtctctgcagcctgcttcacacacaggacatctgaggagctgtgcatcctca

SEQ ID NO: 23914 - DNA, 65 bp, Mus musculus
aattacaggcggttcaaatgtcctcaccaaacgcggcaagaacagacatgcagcagagtgccaag

SEQ ID NO: 23915 - DNA, 65 bp, Mus musculus
tacaatgcccaggagtactacgaccgaattcctgagcttcggcagatcatcgaacagctaagcag

SEQ ID NO: 23916 - DNA, 65 bp, Mus musculus
gtggttgtacacttggggatctacacacctgcatccacacactcacagctgaaaatgtttcccct

SEQ ID NO: 23917 - DNA, 65 bp, Mus musculus
cgataaaccgcgatgaatgagcagaagcatctgggtagggaagcgttgacttcacttgtattcct

SEQ ID NO: 23918 - DNA, 65 bp, Mus musculus
catccagaacgagcacagccgtaagggcaatcaccaccgcttcatcaccgagaagagggtcttct

SEQ ID NO: 23919 - DNA, 65 bp, Mus musculus
tccagctgccattgaagaaatgtgcggtggtgggaaacggtgggattctgaagatgagtggctgt

SEQ ID NO: 23920 - DNA, 65 bp, Mus musculus
tcttgcccagagaccaaagattacatgttagggttttcaaagctgttcttcatgtttaagcctgg

SEQ ID NO: 23921 - DNA, 65 bp, Mus musculus
ctagacattgccctcttacctgggataacgtggtacttcagggtagccagtgtctgtctgatact

SEQ ID NO: 23922 - DNA, 65 bp, Mus musculus
tggatctcaaggttgtacttcgaggactagggtctgtagtggctgtggaggaacgctcactcaca

SEQ ID NO: 23923 - DNA, 65 bp, Mus musculus
gctgggagcataggaagattgacattctgtgtgacttgtgaggctcagatgctgataccagtaac

SEQ ID NO: 23924 - DNA, 65 bp, Mus musculus
ggtttggtagctgtggctctcacctggaccttatgagggatctctccccctggatatcagtccag

SEQ ID NO: 23925 - DNA, 65 bp, Mus musculus
ttgttgacactccggtcatttcctgacctgacttgaccatcggtggccattttccaagccagtct

SEQ ID NO: 23926 - DNA, 65 bp, Mus musculus
aggctgctactcacttccacaggagcaggaatcattgacgtaatcaagtctgggtacaagatccc

SEQ ID NO: 23927 - DNA, 65 bp, Mus musculus
tcattcacttacctcacacaagctacccagccactgagggttgcccagcaagaagagacaagcaa

SEQ ID NO: 23928 - DNA, 65 bp, Mus musculus
aggcttcgagcacgagccagtggccaggctcaacctgtgtgtccccttccaaggctttgcattct

SEQ ID NO: 23929 - DNA, 65 bp, Mus musculus
gatggcagagtcagacctcatctcagacagagggtcatccttcaagtcaccccactccacagact

SEQ ID NO: 23930 - DNA, 65 bp, Mus musculus
gagggcggaaactgaatcctgatacctaaagtatcctatcgggtaccaaatatagctcagacttc

SEQ ID NO: 23931 - DNA, 65 bp, Mus musculus
ttaccgcggactgagcgagcgcgaggttcagcatataaagctgctaagagcagattcgagtgggt

SEQ ID NO: 23932 - DNA, 65 bp, Mus musculus
ccaggacacaagctttgacttcttcaactatgcgggactgcatcgatctgtggtcctctatacca

SEQ ID NO: 23933 - DNA, 65 bp, Mus musculus
ctggccttctggatcttgcacttgagaaagattatgttcgaaccaaggtggctgactatatgaac

SEQ ID NO: 23934 - DNA, 65 bp, Mus musculus
cagggagtcaaaggatgatggcacacagagccacacaccacgcacatctgttctgggtctgccat

SEQ ID NO: 23935 - DNA, 65 bp, Mus musculus
agggaagctactctttgtctcatgtctatacaccaaacgatgtccggatggtgctggagtacgcc

SEQ ID NO: 23936 - DNA, 65 bp, Mus musculus
agctttgcagtgcacatcacctctttctgggatgagcaatggtgccggacatgccaagctgtgca

SEQ ID NO: 23937 - DNA, 65 bp, Mus musculus
tttgaagtgccaagcaaggagaagttggtgtgctgggttgtgagtaactggaaccctgagcatgc

SEQ ID NO: 23938 - DNA, 65 bp, Mus musculus
ccaagaggctgaaaggttctggagtgacaacatactctgtacaccctggcacagtccattctgaa

SEQ ID NO: 23939 - DNA, 65 bp, Mus musculus
gacagggaaagaccatggaggctgtggctgcttccaagttgttaggaatagctgagtgcaaagaa

SEQ ID NO: 23940 - DNA, 65 bp, Mus musculus
gacctcgactcattcagcttgatgatgtcacttatcatggcttcccaaacctccatgccctggct

SEQ ID NO: 23941 - DNA, 65 bp, Mus musculus
agaagacggaacgatttttcaccctcacacaagactgtgtcttagtgcttaccggacagccgagg

SEQ ID NO: 23942 - DNA, 65 bp, Mus musculus
ggggacagtgtgagtgtcctggtcacaccacctggctgagctcaaaagacttcagggatatctaa

SEQ ID NO: 23943 - DNA, 65 bp, Mus musculus
caaaggcaaaacatagcaatgtcccttgagtagggtcaggtccttcactcattacctcacacgtg

SEQ ID NO: 23944 - DNA, 65 bp, Mus musculus
tggaaaggtcagagggtcttagacaggaccaaaggtcattgtaaggctcccagaaggtctcagga

SEQ ID NO: 23945 - DNA, 65 bp, Mus musculus
ggacggacagacttccaacaaggctgtgctaagactttgtaccactctgtgcacgagaagatctt

SEQ ID NO: 23946 - DNA, 65 bp, Mus musculus
gcagacgaccctgaatccatacatagtcaatgttaccctagcagccaaaatgtgcagccaaacac

SEQ ID NO: 23947 - DNA, 65 bp, Mus musculus
tcattgccagcatccgacgcttttaccctacggtcaccatagtcatcgctgacgacagtgacaaa

SEQ ID NO: 23948 - DNA, 65 bp, Mus musculus
tggcctggtatccacacagaaacttgggtctctgaacagtgagccaacactgccctccacaagtt

SEQ ID NO: 23949 - DNA, 65 bp, Mus musculus
gtcaccatgctcaaatgccaccacctaaaaggcaaccagctctgggagtatgacccagtgaaatt

SEQ ID NO: 23950 - DNA, 65 bp, Mus musculus
gcagtgattcatacccactctaaagctgctgtgatggctacccttctgtttccaggacaggagtt

SEQ ID NO: 23951 - DNA, 65 bp, Mus musculus
ctatgaggagatcagagatacctaccctgaggagtacgcactgcgtgaacaggacaagtactact

SEQ ID NO: 23952 - DNA, 65 bp, Mus musculus
gctcctgtatgaatgcaatcctgtggcctatatcatcgagcaagcaggaggtatggcaaccacag

SEQ ID NO: 23953 - DNA, 65 bp, Mus musculus
tacagcaccattgtctctggggaaatgggattcagcagctgcaaggatcagcaagcaggaagcct

SEQ ID NO: 23954 - DNA, 65 bp, Mus musculus
ttggagctgagcactgtcagcaacttcttcatgaatgccagaaggaggagtctggacaagtggca

SEQ ID NO: 23955 - DNA, 65 bp, Mus musculus
aacctttacgtttctgtgtctccactgtctctctgaacctccatggtgctgcaagttaccagtgg

SEQ ID NO: 23956 - DNA, 65 bp, Mus musculus
ctcctagtccctgcctctaaagagccgaaaatgcatggatgttgtagagatccagttgctctaag

SEQ ID NO: 23957 - DNA, 65 bp, Mus musculus
aagtgggtgaaccctcacaagctctgagccctggaagttacaccatctatactctgcctcttctg

SEQ ID NO: 23958 - DNA, 65 bp, Mus musculus
tttggcagtgggtaaatgcgaagagccgcacggatgccgtcgaacagtgcgccttgaatgggatt

SEQ ID NO: 23959 - DNA, 65 bp, Mus musculus
gcgtgtcctagagagtatcaatgtacaaatggacgaaaacacactgcatgaaattctctgcgaag

SEQ ID NO: 23960 - DNA, 65 bp, Mus musculus
accagcatattcgctacaacccgctccaggacgagtgggtgttagtgtcggctcatcgcatgaag

SEQ ID NO: 23961 - DNA, 65 bp, Mus musculus
tggcatcatggaccaactcatcgcgctgctggggcagaaaggctatgcactactcattgactgca

SEQ ID NO: 23962 - DNA, 65 bp, Mus musculus
acactgatgatggcagggctgctgcctagggacactgtgccagagcctccgtgcctctcatctct

SEQ ID NO: 23963 - DNA, 65 bp, Mus musculus
tcaacacaggaggacagaagagagtggagcacaggaccataggggttccagaaaactgtcacaga

SEQ ID NO: 23964 - DNA, 65 bp, Mus musculus
tcttcaccaacatcacagtggacattggacagcccatgtcgtggctcactcaaggctgacactaa

SEQ ID NO: 23965 - DNA, 65 bp, Mus musculus
caaagtcaagaatcagatgccacaaacacgaccgtaaagagctggctaaggacagagtgtggagt

SEQ ID NO: 23966 - DNA, 65 bp, Mus musculus
ctggatgtgagaaagtttgctccccttgtctaatgttgagagcttagctttcagttgtcattgtc

SEQ ID NO: 23967 - DNA, 65 bp, Mus musculus
tcaacagttgccataccatcgtctgaggaggacagaaaggtctgttcctgacactctagccctgt

SEQ ID NO: 23968 - DNA, 65 bp, Mus musculus
gacctggggaaggactttgctttagtcggtgatgttcgtacttggtgacaaattgagactgctgc

SEQ ID NO: 23969 - DNA, 65 bp, Mus musculus
atcttccagctgcccttcaaacacgtgcgtgactttcgcttacgccatctggtgcccttctttat

SEQ ID NO: 23970 - DNA, 65 bp, Mus musculus
gctggcctctgagcaagcggagccaaaatgtccccggagtctaaaaagcttttcaacatcgttat

SEQ ID NO: 23971 - DNA, 65 bp, Mus musculus
acaacagaactcacttcagaccatctcggccaagcagaagacgcagactaacacgtggttcattg

SEQ ID NO: 23972 - DNA, 65 bp, Mus musculus
tgtgtctatgcaaccttccaagtgtggagtgtcaaccaactggacgggagagtactgctcctatg

SEQ ID NO: 23973 - DNA, 65 bp, Mus musculus
aactcttctgagcagtttgagaagtggcgcttcagcatgcctttcaagctggcacaggtggtaca

SEQ ID NO: 23974 - DNA, 65 bp, Mus musculus
ggagagtggagaacttgacctcctatcgatgagttaggcaatctacacactgcccttgtctgatc

SEQ ID NO: 23975 - DNA, 65 bp, Mus musculus
ccaaacaggagatcatcaccaagcttcagggtcgttatggttgctgtcgttttctgcgagatgga

SEQ ID NO: 23976 - DNA, 65 bp, Mus musculus
aggggaaagcagacagagggacttgtgagaagaggatgccccaagtagccttctgcaaaggaata

SEQ ID NO: 23977 - DNA, 65 bp, Mus musculus
cagccagaagcaggcttcctgcagtagtatttgtggagtggaatacaatggtggatggtgtgaga

SEQ ID NO: 23978 - DNA, 65 bp, Mus musculus
acccagtgtggtccatagcctaacctctgtttcagacactccagcccttgagctccaatcttgga

SEQ ID NO: 23979 - DNA, 65 bp, Mus musculus
ctgtgtgcatcccacagatgttagagtctttatctatgaacagcagctctgcaatcaggatgggg

SEQ ID NO: 23980 - DNA, 65 bp, Mus musculus
gatcaagtcccgaagtgtaatctgcaggtgtgtggtctgatccgtgagctagttctctattctca

SEQ ID NO: 23981 - DNA, 65 bp, Mus musculus
tgtgcttgcattcctgtatggtagtggtgactgtctctcacaccaccttctctatcacgtcacag

SEQ ID NO: 23982 - DNA, 65 bp, Mus musculus
cctgcaatagaagcactgccattttcctgtggacacacccatgtcttaggcacgtttccatacat

SEQ ID NO: 23983 - DNA, 65 bp, Mus musculus
tcacaccatgatgaccaaaggtcctgctccacccacagacatgtttagtctgctttccaagtggc

SEQ ID NO: 23984 - DNA, 65 bp, Mus musculus
cctcagggaagttctccagtgaccgaacaattaaggagtatgccaaggacatctggaacatggag

SEQ ID NO: 23985 - DNA, 65 bp, Mus musculus
gagacctcagtgctgatattgcgtaaacctggtgtcagcgtggcatccgactggagtattcatct

SEQ ID NO: 23986 - DNA, 65 bp, Mus musculus
cccgcatcttgggcatggtgtaaatccagttcatctatcaggactgccaagcaagaatcgatatg

SEQ ID NO: 23987 - DNA, 65 bp, Mus musculus
ttgacctatgaacctgggaggtgaggaagagggtcctgggaaggggtaagaagaccatattcagt

SEQ ID NO: 23988 - DNA, 65 bp, Mus musculus
gtctgttttgggatgaactacttctgaaatccaagagccaaaccagactcaccagaaattgcagc

SEQ ID NO: 23989 - DNA, 65 bp, Mus musculus
aagttgggccatgatgaggacctctggctttatgtgacttcatttggacccatgcttcccctctg

SEQ ID NO: 23990 - DNA, 65 bp, Mus musculus
tgatcagaatccacggtgtatcctggctttaggggaaccaggttcaagcaggaaagggatggaca

SEQ ID NO: 23991 - DNA, 65 bp, Mus musculus
tgacgactatgacattgtgatcagactgaactcagcacctgtgaagggctttgagagggacgtgg

SEQ ID NO: 23992 - DNA, 65 bp, Mus musculus
tcaacaagtacgacgtggtcatcagattgaacaatgctcctgtggctggctacgagggagatgtg

SEQ ID NO: 23993 - DNA, 65 bp, Mus musculus
acacaggcacttgctgtcaacgttttgagtcagtgcatttcaaggaacagccctcaactcacacg

SEQ ID NO: 23994 - DNA, 65 bp, Mus musculus
tccctaactactagactgaagtacactgtggtgtgccagtgtgtagtaacctgggaggatgctgg

SEQ ID NO: 23995 - DNA, 65 bp, Mus musculus
cccggccctgcttggcgcagccagcatggttctggactacacaacgcgcaggatccactaggtct

SEQ ID NO: 23996 - DNA, 65 bp, Mus musculus
cagaagctccaggccctgaaggacacagccaatcgcctgcgcatcagctccatccaggccaccac

SEQ ID NO: 23997 - DNA, 65 bp, Mus musculus
acttgtggctgacttcatggctaagaagtttccgttggacccgttaattacccatgttttacctt

SEQ ID NO: 23998 - DNA, 65 bp, Mus musculus
ccactatttggactctggatttgtttatgtgccccttgttgcatgtatctccaagaagacctgag

SEQ ID NO: 23999 - DNA, 65 bp, Mus musculus
acaatgtcttgtggtacctgtgtgggatttcagccttcctcatgcagaaggattttgtctccccg

SEQ ID NO: 24000 - DNA, 65 bp, Mus musculus
ggggatgtgctaagagaaacagaacaggcttagaaacagcagtgctactgaccaagatcaacaat

SEQ ID NO: 24001 - DNA, 65 bp, Mus musculus
aaaaggtccaagaggctgttgaagaaaatagagctctttttgggaccattgattcatggcttatt

SEQ ID NO: 24002 - DNA, 65 bp, Mus musculus
ctcattgacccttttgacctggatgtcttcacaccgcatctcaacagcaacctcaaccgcctggt

SEQ ID NO: 24003 - DNA, 65 bp, Mus musculus
aagcacctgacagggaggtgtggccaacatccttaggcttctcactggcactttagcaagggcct

SEQ ID NO: 24004 - DNA, 65 bp, Mus musculus; identical to SEQ ID NO: 23716

SEQ ID NO: 24005 - DNA, 65 bp, Mus musculus
cgggccaacaccaattctgtgatccaattcaaggttgcactccagtacttcaagaaccatctcta

SEQ ID NO: 24006 - DNA, 65 bp, Mus musculus
cgatctggacttactggtgacccatgccctacctttcgagagcataaatgatgccattgacctga

SEQ ID NO: 24007 - DNA, 65 bp, Mus musculus
ggccaacttcctcacacaaggacaggtctgctgcaatgggactagagtctttgtgcaaaaggaaa

SEQ ID NO: 24008 - DNA, 65 bp, Mus musculus
tgacaaggtgatcaagaaaatgatcgcagagacatcaagcggtggagtgacagccaatgacgtca

SEQ ID NO: 24009 - DNA, 65 bp, Mus musculus
atggatgcttcagagaggggccgcctgctgaacaagctggctgacttaatggagagagatcgtct

SEQ ID NO: 24010 - DNA, 65 bp, Mus musculus
cagggcagtgactttcacagcaggactttgactcccacattggttgatcacacaaaactgtcagc

SEQ ID NO: 24011 - DNA, 65 bp, Mus musculus
cctaggcaacaactacgatgcggccagcggcaagtttacatgcaacattcctggcacctactttt

SEQ ID NO: 24012 - DNA, 65 bp, Mus musculus
taaggaaatgtcactgagccatcactgagctgtgcttctgctcctgatttccctggagttctgca

SEQ ID NO: 24013 - DNA, 65 bp, Mus musculus
ctctcatcccgagatgttccaccaagtttgggcagctctgctctctctctatggccttctcttta

SEQ ID NO: 24014 - DNA, 65 bp, Mus musculus
cctaaatctctagatctgagtcctgggatggctcaggatcataaagacattggcttcttgggagg

SEQ ID NO: 24015 - DNA, 65 bp, Mus musculus
agactatgctttccccacttacgctgatcggcgtgactaccccttgcctgatgtggcccatgtca

SEQ ID NO: 24016 - DNA, 65 bp, Mus musculus
ctgactgcaactacccatagcccatacaccaggagaatcatggaacagtcgacacactttcagct

SEQ ID NO: 24017 - DNA, 65 bp, Mus musculus
ttggtacaggggcaacagtagccacattggctgatgcttcagaactgccaaccacagtcactgtt

SEQ ID NO: 24018 - DNA, 65 bp, Mus musculus
tagtcagcttatggacacgtgagagggacttcctttgagacccagagctggggtagagctataaa

SEQ ID NO: 24019 - DNA, 65 bp, Mus musculus
gctaagcggcaaagcctgaaggtctccactgaggactgtgagcgagagcagctgaacctgctgga

SEQ ID NO: 24020 - DNA, 65 bp, Mus musculus
aatgccaagttcacgatggactgcgcagcgcccacgatccacgtgtacgagcagcacgagaacag

SEQ ID NO: 24021 - DNA, 65 bp, Mus musculus
tattgatgtgtattaactgctgccaataaagcaatccttaaccattttgtgtttcccttttcact

SEQ ID NO: 24022 - DNA, 65 bp, Mus musculus
cggcctcactcagatcgaaactctcttcaagtccaagaactatgagttcatgtggaatcctcacc

SEQ ID NO: 24023 - DNA, 65 bp, Mus musculus
agagcctctcgactgggtgaaggagacagagaaggacagtgccattcctagcctccctttgacaa

SEQ ID NO: 24024 - DNA, 65 bp, Mus musculus
ggatgctaagctcgtgtctcctttcctcagatggcgaccattactctgatcttccatcccttctg

SEQ ID NO: 24025 - DNA, 65 bp, Mus musculus
gatgtgtagatgggtggatgtgcagagctgtgagcgagcttccgcattttgctgggaaatacttg

SEQ ID NO: 24026 - DNA, 65 bp, Mus musculus
gtgcaggttctcggaccacatcgagggacagctccctgtaccaggagagttgagagatagtaact

SEQ ID NO: 24027 - DNA, 65 bp, Mus musculus
caaagagtttgcgcaggtcatcaaaattgggcgaactcacacgcaggatgctgtccctcttactc

SEQ ID NO: 24028 - DNA, 65 bp, Mus musculus
gatatctgctcacgggaatagcagtagagctctcctgaaacatctggaaggtatctcagacgagg

SEQ ID NO: 24029 - DNA, 65 bp, Mus musculus
tactttccaatgacctggtgatcaatatgctgaagtcgtcctacgctacctgtgttcttgtgtct

SEQ ID NO: 24030 - DNA, 65 bp, Mus musculus
ggcagcttctgcttaccaaatgactagagcacacacacaagcactttgtcacaagagggaccacc

SEQ ID NO: 24031 - DNA, 65 bp, Mus musculus
aggagatcgacaggtatctggaggaccaggtcaacaccgacctcccttacgaaattgagagggag

SEQ ID NO: 24032 - DNA, 65 bp, Mus musculus
agggcagctctgctgtgacctcccatgattcctccactaacggactgatcagcttcatcaagcaa

SEQ ID NO: 24033 - DNA, 65 bp, Mus musculus
tcccacccttttgctccacccatttgcttcttgaagccaactgcaaacatggaaatctcggttgg

SEQ ID NO: 24034 - DNA, 65 bp, Mus musculus
acagccttccattcttccactatgtgctgactgtgctcagactgaggagtggctctccatctcct

SEQ ID NO: 24035 - DNA, 65 bp, Mus musculus
atggttcgccacggtgagagcttatggaaccaagagaaccgtttctgtggctggtttgatgcaga

SEQ ID NO: 24036 - DNA, 65 bp, Mus musculus
attcaggcaagctggagtccttgcagcaccatgaagaactatgagccatctcatcaagtctgcca

SEQ ID NO: 24037 - DNA, 65 bp, Mus musculus
ggtagccacctatagatgtgtgcagcactagagggtagccacggagtacaaatggattctgacta

SEQ ID NO: 24038 - DNA, 65 bp, Mus musculus
agctatcaccattcccctttgacctcctgctgaaagaggcacagaagtatcccaatgctgagctg

SEQ ID NO: 24039 - DNA, 65 bp, Mus musculus
cgcgctagcagaatgactcacctcgtggggcggccaatagatacagacacgccaacttatattga

SEQ ID NO: 24040 - DNA, 65 bp, Mus musculus
tacagagttcccaagcactgcaggttctggagaattccctaaggaagcacctccctgagtcctta

SEQ ID NO: 24041 - DNA, 65 bp, Mus musculus
tatccatagaaggggccaggacaaagcggcaagattcttgtacaaggggccatgaggaaagatat

SEQ ID NO: 24042 - DNA, 65 bp, Mus musculus
ccagctgtggaagatatagccaattacctctaccaccaagatccaccttttgaagtccgtggtgc

SEQ ID NO: 24043 - DNA, 65 bp, Mus musculus
ttgctctaggggacctgaaggggagcgcctcactctgcactgttagcaggatggcagcttcaaca

SEQ ID NO: 24044 - DNA, 65 bp, Mus musculus
atggggtactggaaccagggccagatgtgcatgaatatggaatggggtgcctttggtgacgacgg

SEQ ID NO: 24045 - DNA, 65 bp, Mus musculus
cttataagcctgctgctttgctgtcgtgcacaccctcaccaaacatcctaggccgatgagttcct

SEQ ID NO: 24046 - DNA, 65 bp, Mus musculus
attggcctctctgtggcagacttggctgagagcataatgaagaaccttaggcgggtgcatcccat

SEQ ID NO: 24047 - DNA, 65 bp, Mus musculus
tagaacagccgcatcttcttgtgcagtgccagcctcgtcccgtagacaaaatggtgaaggtcggt

SEQ ID NO: 24048 - DNA, 65 bp, Mus musculus
aatccctacgtggtggagtgtacaggcgtctatctgtccatcgaggcagcttcggcacatatttc

SEQ ID NO: 24049 - DNA, 65 bp, Mus musculus
taagagagtgcatcctgttaccacgctggttaagggcttccatgggataaaggaagaggtcttcc

SEQ ID NO: 24050 - DNA, 65 bp, Mus musculus
tgtggccgataaagattactctgtgacagccaactctaagattgtggtggtgacggcaggagtcc

SEQ ID NO: 24051 - DNA, 65 bp, Mus musculus
ggtgatacaccaacatgagcagcggtgtacattatgagagcagcaccctatacgtagtggcggga

SEQ ID NO: 24052 - DNA, 65 bp, Mus musculus
gtaactcttgtgtgctctgatcttcgatccagcggaaacccgggcctggttttcaaaagcggtcg

SEQ ID NO: 24053 - DNA, 65 bp, Mus musculus
atgcatagaactggagtttggggagtgctggatgtgtggtcatgcttggttgaggctttagtgta

SEQ ID NO: 24054 - DNA, 65 bp, Mus musculus
ggctgacactttccgttcagagtggagcgacttgctgaatgatctccagaaagacgggaagatca

SEQ ID NO: 24055 - DNA, 65 bp, Mus musculus
gcacatctctgtatgatgaagaaggagccaagattgtcaaagatctcatgtccaaagctgagaaa

SEQ ID NO: 24056 - DNA, 65 bp, Mus musculus
gattgaagctgctggttacaagccaggtcaagatatcgctattgctgtcgacgttgcctcatcag

SEQ ID NO: 24057 - DNA, 65 bp, Mus musculus
ggcagccggttacccggacaaggtggtgatcggcatggatgtagctgcgtctgaattctaccgca

SEQ ID NO: 24058 - DNA, 65 bp, Mus musculus
gaacctagaggctccaatatctcgagtttgcggatatgacaccccgtttcctcacatctttgagc

SEQ ID NO: 24059 - DNA, 65 bp, Mus musculus
cttttcataggaggaaacaggcttcaaagagaggctgagaggctatttaggattcgaacagcagg

SEQ ID NO: 24060 - DNA, 65 bp, Mus musculus
ttggcatcgaaagtggaaagcttcgtggcttcctccgagttggtgatctggtgattgtggtgaca

SEQ ID NO: 24061 - DNA, 65 bp, Mus musculus
caggggaaaacctccattgatcgactctccgtgctcatctcaggaagaatcagagtgacagtcga

SEQ ID NO: 24062 - DNA, 65 bp, Mus musculus
gccgcaccttgagcatagacaagggtttctgagcttactgtcactactgttcctgcgttcccgga

SEQ ID NO: 24063 - DNA, 65 bp, Mus musculus
atgtacttgcttcctgtttcctgcgcacaggaccagaaccaactcaacctaacctatatctcaac

SEQ ID NO: 24064 - DNA, 65 bp, Mus musculus
tcaggccaaactttaaggtcaaacctgggcttagaatgagtctttgcggtaactaggtccacagg

SEQ ID NO: 24065 - DNA, 65 bp, Mus musculus
acttgttggacagcctgaccctggagcttcaggatgtcatcactcatgccatgattaccattgcc

SEQ ID NO: 24066 - DNA, 65 bp, Mus musculus
cttcgcgcacagctgcttccagtactctatccagaagaaatggccgctctacttgagcaccaaga

SEQ ID NO: 24067 - DNA, 65 bp, Mus musculus
ttgagccccctgaaccctctagaacattgattgctctagaacgccagaacgtcgaaacaccggga

SEQ ID NO: 24068 - DNA, 65 bp, Mus musculus
tgcgcatggacgaggctagagacaatgcgtgcaacgatatgggcaagatgctgcaatttgtgctg

SEQ ID NO: 24069 - DNA, 65 bp, Mus musculus
catggcttgtgacgaatgaatcttgcattttttagtgatcggagaagggatggatcataggattc

SEQ ID NO: 24070 - DNA, 65 bp, Mus musculus
tgagcagctagtgtcagcgcaaaggacaagaaagcaccttctgtcttggtcacagcagcagcaaa

SEQ ID NO: 24071 - DNA, 65 bp, Mus musculus
tggtgaacggattggggattcttgggtggggagttggtggcattgagacagaggcagttatgctt

SEQ ID NO: 24072 - DNA, 65 bp, Mus musculus
tagacaaggaaccacacggccgagcctgtctcgcgagattggctcaagcttcttgcgcttctctc

SEQ ID NO: 24073 - DNA, 65 bp, Mus musculus
tcagttaaggtcattgttgtgggaaacccagccaatacgaactgcctgacagcctccaagtcagc

SEQ ID NO: 24074 - DNA, 65 bp, Mus musculus
aagaggtgcatgtaagctccaacgctgatgaggaggacatccgcaatgccatcatggccatccgc

SEQ ID NO: 24075 - DNA, 65 bp, Mus musculus
ctctctcagagcaaggattgtatatggacacctggatgacccagtacacccaggcgatcgagtgg

SEQ ID NO: 24076 - DNA, 65 bp, Mus musculus
gcaccttcctcctgcaacagaatgggatacgacacgggtcttacacagcctctcggaaacatatc

SEQ ID NO: 24077 - DNA, 65 bp, Mus musculus
aaggtgccactggtagtccggcttgaaggaactaatgtgcaggaggctcagaatatcctcaagag

SEQ ID NO: 24078 - DNA, 65 bp, Mus musculus
cctgttgtggtgcggttacaaggtacacgagttgatgatgctaaggcactaatagcagacagtgg

SEQ ID NO: 24079 - DNA, 65 bp, Mus musculus
tcttcgggaacccaggcatctctatacctgtctgggatatccatagacagcaatggacttcccta

SEQ ID NO: 24080 - DNA, 65 bp, Mus musculus
cccgctaagaggatgtatgacatctcactcactgtgcttgctggggtcctaatgtgcaataaagc

SEQ ID NO: 24081 - DNA, 65 bp, Mus musculus
ctcctgaaggacctgatgcagacacccaactttcgcatcactgtggtacaagaggtggacacagt

SEQ ID NO: 24082 - DNA, 65 bp, Mus musculus
catttggtaagttcacaggcctcagtcaacacaattactctcaggaaatcctccttggtgaccgc

SEQ ID NO: 24083 - DNA, 65 bp, Mus musculus
caccccgattctgccgtctcctttaggtacaaagcaaaatcttggagaagctgaaagtgtggcag

SEQ ID NO: 24084 - DNA, 65 bp, Mus musculus
aactggagcatgagtctccctcaaggagttcttctgagttcttcagaaaggcagtgtctaagaac

SEQ ID NO: 24085 - DNA, 65 bp, Mus musculus
tagtccctgatttgagtaacttctacgcacaatacaaatccattgagccttatctgaagaagaag

SEQ ID NO: 24086 - DNA, 65 bp, Mus musculus
aactctgtgggcgtggaaggctttgacatggtcccagaatccctgtcctcttctgagtgcacaaa

SEQ ID NO: 24087 - DNA, 65 bp, Mus musculus
ctgctgtataatctcacccctgatggtatgcgcttccgtaaggcctgcaacgtggtgcatgaatt

SEQ ID NO: 24088 - DNA, 65 bp, Mus musculus
ggtggaacagagacaacatcctcaacactgcgatgggctttgctctacatgagtagctatccaga

SEQ ID NO: 24089 - DNA, 65 bp, Mus musculus
gggtgtcgtttcttactctcaatttgtgctcccaggagtgtagttagactgtagtaggtatagat

SEQ ID NO: 24090 - DNA, 65 bp, Mus musculus
ctctgtgacaagtattccaatgtggtgttccttgaagtggatgtggatgactgccaggatgttgc

SEQ ID NO: 24091 - DNA, 65 bp, Mus musculus
tccggagcttgtctgacatccctgggccctctacactcagcttcctggctgaactcttctgcaaa

SEQ ID NO: 24092 - DNA, 65 bp, Mus musculus
agtgaaaatcacagtgcgacaagcatggaaggatgcacaggttgaggttagcacctagaggccga

SEQ ID NO: 24093 - DNA, 65 bp, Mus musculus
agtgcggagctatgtcctgaaatgtagtcacagcttcgagggatgcaccgcaagtgtaagaagct

SEQ ID NO: 24094 - DNA, 65 bp, Mus musculus
cacagagcaaatgtacaactctctcatgaagatcagccaacgttatggtcctgtattcaccatct

SEQ ID NO: 24095 - DNA, 65 bp, Mus musculus
atggtctgttatgatgttgtatcctgtggaccagaaaccaattcatattgtgaatgaatccagag

SEQ ID NO: 24096 - DNA, 65 bp, Mus musculus
acacaaagccttcctcaccgatcaagaaagaacccttgctgtgattttgtttgagtgtgggttgc

SEQ ID NO: 24097 - DNA, 65 bp, Mus musculus
tatccatctggaaacagatctatagaagttggaacctgcccccaggacctttcccaattcctttc

SEQ ID NO: 24098 - DNA, 65 bp, Mus musculus
cctgagaggttgttctctgcttttgactcctgagctggttgtgtagaaatgcaggttggcgtttt

SEQ ID NO: 24099 - DNA, 65 bp, Mus musculus
tggaaagccacaagggtcttcacagtcaataccttgaggaacttgggcatgggaaaaaggaccat

SEQ ID NO: 24100 - DNA, 65 bp, Mus musculus; identical to SEQ ID NO: 23716

SEQ ID NO: 24101 - DNA, 65 bp, Mus musculus
cacagagggacttcttttgctgctcaccatgttcctcagagtatctacttcagatcagtgcggca

SEQ ID NO: 24102 - DNA, 65 bp, Mus musculus
agctggggttagcatcctttggcccagatccctgacttcattggcctctacattgtcctagttgg

SEQ ID NO: 24103 - DNA, 65 bp, Mus musculus
ttaggtggtacggccatttcttccgccttccgtgtctgcggccctcgcagaacttccagcagcga

SEQ ID NO: 24104 - DNA, 65 bp, Mus musculus
tgtactttgtgcagtggctcgtgggtttcagcttcttcctgttccctggagcttcattctctctg

SEQ ID NO: 24105 - DNA, 65 bp, Mus musculus
aaggggtaagggtccagactccagcagtcaccgagtcactgggcaagattgacagtcatcctcac

SEQ ID NO: 24106 - DNA, 65 bp, Mus musculus
tctccggctatgacatccctaaggatatggtcatcatccccaacatccaaggcgccaacctggat

SEQ ID NO: 24107 - DNA, 65 bp, Mus musculus
ctccttgaagagaggtcactctcactgttgttctgagaccatgggtcaagagaggtgtctggata

SEQ ID NO: 24108 - DNA, 65 bp, Mus musculus
caggctctggtccggtcttttagctcatctaccagaagccacttagaaaaccgtgtggcagagaa

SEQ ID NO: 24109 - DNA, 65 bp, Mus musculus
tttaaaagcagggctgacattggatgagcagcagggctccagcatgccccaggagagggagctat

SEQ ID NO: 24110 - DNA, 65 bp, Mus musculus
aacaaccaagactgaggaagcaacacccccagcaggaaggacgccttgaaacactcagaacaggc

SEQ ID NO: 24111 - DNA, 65 bp, Mus musculus
cgggccaagtacgtgatggatgtagaagagatcaccccagccattgtggagacttttgtgaatga

SEQ ID NO: 24112 - DNA, 65 bp, Mus musculus
acagggaggtatcaatgctgctctggggaacatggaagaggacaactggagatggcatttctatg

SEQ ID NO: 24113 - DNA, 65 bp, Mus musculus
actcgggacacacctttccggggcttcctgatacccaagggcacagatgtcatcacactccttaa

SEQ ID NO: 24114 - DNA, 65 bp, Mus musculus
ggattctcataaactggaagacttcatgatacagaaagtgaagcagaaccagagtaccctggacc

SEQ ID NO: 24115 - DNA, 65 bp, Mus musculus
gaaggagatccaaagtctcctaggagatgggacttctatcacctggaatgacctggacaagatgc

SEQ ID NO: 24116 - DNA, 65 bp, Mus musculus
ttagcaatggaaacagatggaaagagatgagacgatttacactcatgaccctgcgaaatttgggc

SEQ ID NO: 24117 - DNA, 65 bp, Mus musculus
ggccctgggtctggaaagtaggtcttaggagagcaaggatatggagtcattgtggatccctgcct

SEQ ID NO: 24118 - DNA, 65 bp, Mus musculus
caatgaaagcagcctctgaagaagtgaatggagcattacagagtgctggccaagagctcagctct

SEQ ID NO: 24119 - DNA, 65 bp, Mus musculus
taagaggagtccttgggcacagcagttgcaccttaaatcttggcctccctgcatcagtggaccaa

SEQ ID NO: 24120 - DNA, 65 bp, Mus musculus
gtgcaccacagcaagtgacacagaaggacgatgagacaaaaagcgggggcggctagaattacatc

SEQ ID NO: 24121 - DNA, 65 bp, Mus musculus
ttgagtatcaaaccatgtaatagtaacttggactttaataaagggaaatgagtttgaactgaaaa

SEQ ID NO: 24122 - DNA, 65 bp, Mus musculus
gcgagacgctaacgaccaaggggaaaattggcgactctctgctagatgttgtgattgagaacaac

SEQ ID NO: 24123 - DNA, 65 bp, Mus musculus
gtgtttcagtttgtgttcactggcctctttcaggtcatggctaaccaccaggaggcaactgtcta

SEQ ID NO: 24124 - DNA, 65 bp, Mus musculus
caatatctaccttactggctgggatgaatctcaggccaatcactttgctgtgcaccatgatgagg

SEQ ID NO: 24125 - DNA, 65 bp, Mus musculus
ctcactcccaaggagagtggtattggaaaaatacctccaacgtaccagatctgcttcttggcccg

SEQ ID NO: 24126 - DNA, 65 bp, Mus musculus
gaagaaggtggcctgaactgacttgtgaacagtacctgttgaatactcagcccactcgtgttgag

SEQ ID NO: 24127 - DNA, 65 bp, Mus musculus
ggggcaaggaaaaacgagttgctcgtgttcagtaccagtggtatctgatggaacgcgatagacgt

SEQ ID NO: 24128 - DNA, 65 bp, Mus musculus
ctacgaaatcagagcacttagagtttaccaatgtgagtgcctggaatcagctgcagcctaggtgg

SEQ ID NO: 24129 - DNA, 65 bp, Mus musculus
gcaggcagagaagtctgtgcgggtctttgagaggtctgtgtacagtgacaggtatatctttgcaa

SEQ ID NO: 24130 - DNA, 65 bp, Mus musculus
ggaccgtgagactggaaagtcatggtttgccaacaaagacaatttaagccttgctgctcttgaca

SEQ ID NO: 24131 - DNA, 65 bp, Mus musculus
tagcgattctgtggatggggcccagagggagatcgagctgtggtttcagagcagcgaactgttga

SEQ ID NO: 24132 - DNA, 65 bp, Mus musculus
acatatgaactctgccggtgtcctggctgcactgaggaactacgagtactatgcaagccatgttc

SEQ ID NO: 24133 - DNA, 65 bp, Mus musculus
gcttgtgtccttattggtcccttaccctttctgtgtccattgctggccatggtcactgaacttga

SEQ ID NO: 24134 - DNA, 65 bp, Mus musculus
caccagactgtggacttcgtcagcaggaagcgcatccagtatggaagcttctcttacaagaagat

SEQ ID NO: 24135 - DNA, 65 bp, Mus musculus
ccaagaaagacatgggcttcactgaggaggagttcaagcgactgaacatcaacgcagcgaagtca

SEQ ID NO: 24136 - DNA, 65 bp, Mus musculus
gacgggacgtctgcgtgaagactcactggagattcctttcaaatgccatctttctgtacactaga

SEQ ID NO: 24137 - DNA, 65 bp, Mus musculus
gtccctggaatcttgacccagaagtttggtctagatgagtatttctccatcgtccaccctcaagt

SEQ ID NO: 24138 - DNA, 65 bp, Mus musculus
gagttatctggtgcttcagccgatgatcacagctagttaagagactcttggagtaggagcattcc

SEQ ID NO: 24139 - DNA, 65 bp, Mus musculus
agactccgtggtttccgccagcagagagattgcagccttcttccctgacttcagtgaacagcgct

SEQ ID NO: 24140 - DNA, 65 bp, Mus musculus
ggaagatggaaacgccaacttcttaggcaaagcgtcaggggtagattagtgagccacatgctctt

SEQ ID NO: 24141 - DNA, 65 bp, Mus musculus
catccccaagtcctgtggagtagatttccatgacccagcttgtctctcagttctattgggctttg

SEQ ID NO: 24142 - DNA, 65 bp, Mus musculus
gtgatgcttggagagaccaaccccgcagactctaagcctgggaccatacgaggagacttctgcat

SEQ ID NO: 24143 - DNA, 65 bp, Mus musculus
agggctccacctgtgccttcaccgaacggatcctgcggaattacggcctgaagaccggcttcttt

SEQ ID NO: 24144 - DNA, 65 bp, Mus musculus
acgctccaacatcacgtctctttcctagacttggggtcttggcaagctggtgctgtccccactgg

SEQ ID NO: 24145 - DNA, 65 bp, Mus musculus
gcccactgcaattcaggaagatgttttctggcctgaagggatgtggtattagaagacactgtcta

SEQ ID NO: 24146 - DNA, 65 bp, Mus musculus
attgtgggtagggatcccgcaggaatgccccatcctgagacaaagaaagacctatatgaacccac

SEQ ID NO: 24147 - DNA, 65 bp, Mus musculus
aaacaggagagagagccgacttgttgcctaactctggggaatcgtactccacagctagcagagaa

SEQ ID NO: 24148 - DNA, 65 bp, Mus musculus
ctgcttgctcccttctcaggctattcagtctcatgatggcttctgcatttacccctcgaatttcc

SEQ ID NO: 24149 - DNA, 65 bp, Mus musculus
ggaaacagcacatcgtcgttttgggggaagtctacaactactcctgtgaaccagatccaagaaac

SEQ ID NO: 24150 - DNA, 65 bp, Mus musculus
aagacatcccctgccaagcagcaggcaccacctgttcggaacctgcaccagtctggattcagctt

SEQ ID NO: 24151 - DNA, 65 bp, Mus musculus
agtcagaccagggactcctcagggagtgaaatgtgcttcaggacacacaggactcgagccaagct

SEQ ID NO: 24152 - DNA, 65 bp, Mus musculus
acagacccaagcccaccctttcatagcctgtgtgctcacccaggagcttctagatgggaggctta

SEQ ID NO: 24153 - DNA, 65 bp, Mus musculus
aatggctttcttctagatggcttccctcggactgtgaggcaggctgaaatgcttgatgacctcat

SEQ ID NO: 24154 - DNA, 65 bp, Mus musculus
ggcgtgcccttcaacattgccagctatgctctgctcacctacatgattgcacatatcacaggcct

SEQ ID NO: 24155 - DNA, 65 bp, Mus musculus
tctccatgcaacagactggggagctgatgactcggctgaagcagattggagctctgcagttataa

SEQ ID NO: 24156 - DNA, 65 bp, Mus musculus
ctgggatccagatgccttgaagattgtctctgccaagaaccaccagtcggttgccgaatacaaca

SEQ ID NO: 24157 - DNA, 65 bp, Mus musculus
ttcaggagtgccccaaaagagacacgattataggctgcgacctgtcacggattgaaacgcggcct

SEQ ID NO: 24158 - DNA, 65 bp, Mus musculus
cttgaaatcgaacctgaagttaaaggctgagggaaaaatggcccattaccatgacaactacggaa

SEQ ID NO: 24159 - DNA, 65 bp, Mus musculus
acagactctgatgttaggctgtctcgaagagttctccgggatgtgcaacgaggaagggacctgga

SEQ ID NO: 24160 - DNA, 65 bp, Mus musculus
aagaagatggtggtgatgcacccaatgccccgtgtcaatgagataagtgtggaggtggactcgga

SEQ ID NO: 24161 - DNA, 65 bp, Mus musculus
cttactgagcaaagcaccaccaccctagtttctgccctccacacatcatcagtggtaccttaagt

SEQ ID NO: 24162 - DNA, 65 bp, Mus musculus
agaatgggatgaaggttggccttgccatcaaaccaggaactacagttgaatatttggccccatgg

SEQ ID NO: 24163 - DNA, 65 bp, Mus musculus
agccaagaactacttcaagaaaagcctgcgagacatgggctatgggaattggatcagcaaacccc

SEQ ID NO: 24164 - DNA, 65 bp, Mus musculus
tcgccaaggctctgggaatgacgacagccaaagaagtgaacccactcctgtattccatgagaaat

SEQ ID NO: 24165 - DNA, 65 bp, Mus musculus
gaccaagagcttgctcaaaagggacattagctttctgtctgctcggtgtgagaggtcatctggaa

SEQ ID NO: 24166 - DNA, 65 bp, Mus musculus
aaagattagggacctaaccagcgcagtcatcagatgtgacctctgagagaggatggagatggtgg

SEQ ID NO: 24167 - DNA, 65 bp, Mus musculus
acggagctgaagggcaagggtattgaggacacgtactggcttgtgggcagacttggcttcaacaa

SEQ ID NO: 24168 - DNA, 65 bp, Mus musculus
gctccaccatagccatcctgaagagaacggattgtcagttcctgtatgaagtgaggggagaaaca

SEQ ID NO: 24169 - DNA, 65 bp, Mus musculus
agagccaggtggccctgagcaagccacccacttcatcagagccaacgggcgcattgtgtatatct

SEQ ID NO: 24170 - DNA, 65 bp, Mus musculus
aattgttggggacctgacctctgcaggagtacgatgctttggccccacagcacaagcagctcaat

SEQ ID NO: 24171 - DNA, 65 bp, Mus musculus
gtgaaagcagagctgtgtctgtagagtaggagagctgaggagaacccggttacagtgattagagc

SEQ ID NO: 24172 - DNA, 65 bp, Mus musculus
cagtgcgagttctccaaacaggagttcatggatggcatgacagagttaggatgtgacagcataga

SEQ ID NO: 24173 - DNA, 65 bp, Mus musculus
cgtctgctctaactaagaagattacactaaagaccccattggtttcctcacccatggacactgtc

SEQ ID NO: 24174 - DNA, 65 bp, Mus musculus
cctaagtgctcataacagaggccttcactgactgattgtcacatggtatgtgttcagttggagcc

SEQ ID NO: 24175 - DNA, 65 bp, Mus musculus
gaagtatatggagttgtgaaagcttacaccactagagttggtattggtgcctttcccacagagca

SEQ ID NO: 24176 - DNA, 65 bp, Mus musculus
ggaatgcatcggaacaggtgaagatgctgcagcggatagaggagcacaatgccaagcagcctctg

SEQ ID NO: 24177 - DNA, 65 bp, Mus musculus
ttcgtacctgcttctggtgggttccacaagcccctcttgaactagtgtctctggtgtatcaatgt

SEQ ID NO: 24178 - DNA, 65 bp, Mus musculus
ggctcagtggttgattcaggagccacacaaagcagcaacattctttggatgcattgggatagata

SEQ ID NO: 24179 - DNA, 65 bp, Mus musculus
aaatccagaaagatgccttggaacccgggcagagagtggtcattgtggatgacctcctggccaca

SEQ ID NO: 24180 - DNA, 65 bp, Mus musculus
attcatcccaggggaactcagtgtatcagatcgccatggtgcactatatcaagcagaagtacccc

SEQ ID NO: 24181 - DNA, 65 bp, Mus musculus
cccaacccttatcctcggcgttaagacaagagcatgcagattaaggagtgtgagctgccatagac

SEQ ID NO: 24182 - DNA, 65 bp, Mus musculus
acgcctacggtctggctctgaaacacgccaactcgaagccattcgaagtgcccttcctcaaattt

SEQ ID NO: 24183 - DNA, 65 bp, Mus musculus
attggtgtccagttccatcctgagttttcctctaggccaatgaagccttcccctccgtacctggg

SEQ ID NO: 24184 - DNA, 65 bp, Mus musculus
acagctgagcactgggaccttcaaagagctctgaccaggcctgaagatagaaccattgggtgcca

SEQ ID NO: 24185 - DNA, 65 bp, Mus musculus
tgtgaagcccactgaagggacagcaccatacctcacttctcagtctggtcactttaaccctcagt

SEQ ID NO: 24186 - DNA, 65 bp, Mus musculus
atccggagggatggtcgagctccaggcttttcacgtagctgagaggtgggacgagtcttgtcttc

SEQ ID NO: 24187 - DNA, 65 bp, Mus musculus
gaacagagtggtccaattagaagttctctgcaccaagtgtcgagtgcccatctatgagcctcttg

SEQ ID NO: 24188 - DNA, 65 bp, Mus musculus
acctcaaccagaatgcctggaacaaccttgagaggtacagccgcagcttgacgcgaacttaccaa

SEQ ID NO: 24189 - DNA, 65 bp, Mus musculus
gctacagactacgtgcacaaggacccaaagcagaagacgatctatgacctgttccagcagtcctt

SEQ ID NO: 24190 - DNA, 65 bp, Mus musculus
ctggtctgcactttgcttgtgtggaatgtggtatgtgggtgtctgtgcagagactgagtaagatg

SEQ ID NO: 24191 - DNA, 65 bp, Mus musculus
aatgccctgaaggaggatatgagcaagtacaccatctatgacacgtccacagacaggctgctgtg

SEQ ID NO: 24192 - DNA, 65 bp, Mus musculus
ccatcttgtaagcccaggaaccttccctgcgtctctgatttgccacgaaacaatgtcttactcac

SEQ ID NO: 24193 - DNA, 65 bp, Mus musculus
tgatgaaggatttgggctatggcaaagggtacaagtacaaccccatgtacagtgagcctgtggac

SEQ ID NO: 24194 - DNA, 65 bp, Mus musculus
tccttaagaaccccaagaggttcaatgttgctgtgacccgagccaaggctttgctcatcgtagtg

SEQ ID NO: 24195 - DNA, 65 bp, Mus musculus
tttatttgccataatgaaccgtccagcccctgtggagatctcttatgagaacatgcgttttctga

SEQ ID NO: 24196 - DNA, 65 bp, Mus musculus; identical to SEQ ID NO: 23716

SEQ ID NO: 24197 - DNA, 65 bp, Mus musculus
cctcctcacctgaatcctcaggatactctgaagaactacgtaccttcttatgacccatccagtcc

SEQ ID NO: 24198 - DNA, 65 bp, Mus musculus
gatttgagcatagataggatagtgggtttgcttggttatcagcagctctgcttggacgtgcctgc

SEQ ID NO: 24199 - DNA, 65 bp, Mus musculus
taccttctgggaaggctggtttcctagcacagagactgtagctcagcagcatcagtgggcagcag

SEQ ID NO: 24200 - DNA, 65 bp, Mus musculus
ccatccatggtgtattccttcagtcatttcaaacactgcagggcttctctcgttatctgcctgct

SEQ ID NO: 24201 - DNA, 65 bp, Mus musculus
gcaactgttgcattggctgccgctccgtaatcgaccatcaaggagccgtgtgtaagttctgtcag

SEQ ID NO: 24202 - DNA, 65 bp, Mus musculus
aatagtgggcaatgaagacactgtgagcaggctggaggtctttgcaagagaaggcaatgtgccca

SEQ ID NO: 24203 - DNA, 65 bp, Mus musculus
ttttctaaagaccgctgtcttgctatagctactaacggggcattgtgaggaactgtgcaaagaca

SEQ ID NO: 24204 - DNA, 65 bp, Mus musculus
catccggtgtgaaaaaggcaatacttgatcgactgtgtaagcagttagaaaagattgggcagcag

SEQ ID NO: 24205 - DNA, 65 bp, Mus musculus
cagacggggaagaagatgacacagaagaagcaaagaccttaattgtggagcctcatgttattcct

SEQ ID NO: 24206 - DNA, 65 bp, Mus musculus
ggagtcaatcacttactgaagagccctttcagtgttcatcccaagacaggtcggatttctgtgcc

SEQ ID NO: 24207 - DNA, 65 bp, Mus musculus
gtacagtgtacagagtcaccttctatcgtgtattccaggggttcaactctggtcatcaggcttat

SEQ ID NO: 24208 - DNA, 65 bp, Mus musculus
aatggagggactgccatacccaaccatgtcagagaccatggctgtgtgctcacgtctgggttctt

SEQ ID NO: 24209 - DNA, 65 bp, Mus musculus
agaaggactctacccagcacctcctccagtgggagcaagcggcacaagtcgggctcgatggaaga

SEQ ID NO: 24210 - DNA, 65 bp, Mus musculus
ccaatgaccaaccaattgcctatgtgatgctaggaacaaaagcccacagtgtgctgagtggccac

SEQ ID NO: 24211 - DNA, 65 bp, Mus musculus
cccatttacttaggactgtgttttgctctatgaactatcccctgcgctttgaacgtgccagcagc

SEQ ID NO: 24212 - DNA, 65 bp, Mus musculus
ttcagaagatgctaagcagccttgcaaatcagctcaccggaaggaagcctgttcctcacccaagg

SEQ ID NO: 24213 - DNA, 65 bp, Mus musculus
ccattcattacaacaaggacagcagcctacaagtctccacactactgtggcctgacaccagaact

SEQ ID NO: 24214 - DNA, 65 bp, Mus musculus
cctttccaagaagtggatttgcattcaaagttttttacccttccagtaaaacagtagaagacagc

SEQ ID NO: 24215 - DNA, 65 bp, Mus musculus
ccagctctacaaagcgcctcaagtctgtggaggatgaaatggacagtcctggtgaagaaccattt

SEQ ID NO: 24216 - DNA, 65 bp, Mus musculus
gcctacttgatgaagcacacacggatgaccatgactgacgcttacaaattcgtcaaaggcaaacg

SEQ ID NO: 24217 - DNA, 65 bp, Mus musculus
atgtgacagagctggtgagagtatcacagactccagttgcgactgcatcagggcccaacttctca

SEQ ID NO: 24218 - DNA, 65 bp, Mus musculus
ggaggcacagcatatgtgtagcttggattctaaggcgaatattgtacatggtctgtcagtcttgg

SEQ ID NO: 24219 - DNA, 65 bp, Mus musculus
ccgcttggaatggtttccacatacccttgtgcatgtgcaccgccttatattttcctccactcatg

SEQ ID NO: 24220 - DNA, 65 bp, Mus musculus
gttgcaaggcttacatggggaggctgttaaacagcaagagagtgaagacaagaagagttccatgt

SEQ ID NO: 24221 - DNA, 65 bp, Mus musculus
ataaaccaggatgcagccatggttcacaggtcttgggccatctggcctactgttgcatagaattc

SEQ ID NO: 24222 - DNA, 65 bp, Mus musculus
ctcaggaggcttcggctccaccgggaagaattagaactttgctggaagtatctcgctgtttcaac

SEQ ID NO: 24223 - DNA, 65 bp, Mus musculus
ggacaaggccaggcagatcaatattcacaacctctctgccttctacgacagcgacctcttcaaat

SEQ ID NO: 24224 - DNA, 65 bp, Mus musculus
ttgctcaaaccacgggtacgattggtccttgaggagaggtgggtggatcagcgctgtggcgtcat

SEQ ID NO: 24225 - DNA, 65 bp, Mus musculus
atcaaactgaaaggcaccattgatgtgtcaaagctggtcacaggaacggtcttggccgtgttggg

SEQ ID NO: 24226 - DNA, 65 bp, Mus musculus
tggctctctggtggccaaactgttggagtacctgacaaggatctggccacagggacaggactgta

SEQ ID NO: 24227 - DNA, 65 bp, Mus musculus
gccaagtactacagcatgtcatatctccaggagaccatagaatggctgttacagacaagccctgt

SEQ ID NO: 24228 - DNA, 65 bp, Mus musculus
ggacacagctgacaggatccagtgcttgctagatttcatcagttcttcagaatagtgtctctttg

SEQ ID NO: 24229 - DNA, 65 bp, Mus musculus
gcttattagcagagacgagggtttacactgtgactttgcctgcctgatgttcaagcacctggtac

SEQ ID NO: 24230 - DNA, 65 bp, Mus musculus
agcaaaccagcttctctggcagcgtggaggtcatcgaagtatcgtgacccttcagaagtccctgt

SEQ ID NO: 24231 - DNA, 65 bp, Mus musculus
ctgagtatcttcctgcacatgaagacagaacttgtgggtcaccagtacagtctctattggacctt

SEQ ID NO: 24232 - DNA, 65 bp, Mus musculus
gtcaactcccctttgagctttcctcaagttagttatgttgtaggagtgtacttaagcagcaagca

SEQ ID NO: 24233 - DNA, 65 bp, Mus musculus
ggtagccaaggagcagtgaacagcagctactacagtaatggaagccgagcatctatgggcgtgaa

SEQ ID NO: 24234 - DNA, 65 bp, Mus musculus
ttttctgtagcaggacctgcccaggaaagtcctcctaacggaaggcacaattcagtgcgttcaga

SEQ ID NO: 24235 - DNA, 65 bp, Mus musculus
gaagttgtctgttgagagagtgtaccagaagaagacccaactggagcacattctccttcgtcctg

SEQ ID NO: 24236 - DNA, 65 bp, Mus musculus
tcagttgtgcatggaggatcccatggcgactgtggtagaggtcagatctaagccaaagagcaagt

SEQ ID NO: 24237 - DNA, 65 bp, Mus musculus
gccgtttcaggccttggagtggttggaagagacaaatatggggtgttccctcttagaggaaagat

SEQ ID NO: 24238 - DNA, 65 bp, Mus musculus
gcgtggacgtggtgcccaccttctgctgtcccagtggcttgcccgcctgcggttaagtgagcaaa

SEQ ID NO: 24239 - DNA, 65 bp, Mus musculus
acccggatcatcacacaacccaggtggatcccactgctcatttgacctttaaccttcacttatcc

SEQ ID NO: 24240 - DNA, 65 bp, Mus musculus
gagaagtttgcttgggccattgatatgactgatgaggactacgagttttgaccagtctcggcagg

SEQ ID NO: 24241 - DNA, 65 bp, Mus musculus
tttgagagccagcgcatcctaactggtggcaaagatatcaagaaggaaatcagtcagccagaaac

SEQ ID NO: 24242 - DNA, 65 bp, Mus musculus
tcatcgagttccgcgacgcgctcgccaagctcatcgacgactacgggggcgacgaggacgagctg

SEQ ID NO: 24243 - DNA, 65 bp, Mus musculus
ctggacattactggcgatgttttctggtttgccaggagcatccacatttctgcatttctgttctg

SEQ ID NO: 24244 - DNA, 65 bp, Mus musculus
ccagtagttatcagggtgccaaaactgatgggttactcagtcatgagtgtatgctccgtgcctgt

SEQ ID NO: 24245 - DNA, 65 bp, Mus musculus
aacgcagagattgtgcggactcgggatcctgaaaagttggcttcgtgtgacatcgtggtggatgt

SEQ ID NO: 24246 - DNA, 65 bp, Mus musculus
gttgatgtgggatcaaaacccagccctttgacagtcccatcacaggaactgcatcctggcatttt

SEQ ID NO: 24247 - DNA, 65 bp, Mus musculus
aatactgaagtgtattccttaccgtcaaagaagctagtggtgcttcagttaaggtccatctttat

SEQ ID NO: 24248 - DNA, 65 bp, Mus musculus
tgtacatcgacagctacagtagcagaggcttcactatctgcggaaatcgcgtgtttggcccttgc

SEQ ID NO: 24249 - DNA, 65 bp, Mus musculus
aattctccctcatcctggaaaacaaccctctggtggactttgtggagcttcccgataaccactcg

SEQ ID NO: 24250 - DNA, 65 bp, Mus musculus
tatctggtgatgagggccaagaggaaattgggtgaccatctgccttccagactgtctgagcaggt

SEQ ID NO: 24251 - DNA, 65 bp, Mus musculus
ggatcacactgttagacatagtgatagccaagctagtgggtgaggagcagctgacaaaggatgac

SEQ ID NO: 24252 - DNA, 65 bp, Mus musculus
acctttgcccaggtgctaaaagacgacaccaccacgaaacgctggcttgcacaactggtgaagaa

SEQ ID NO: 24253 - DNA, 65 bp, Mus musculus
tgctacacgcacacccctcacacaggacccagcctccatcacagacaacctgctgcagctccctg

SEQ ID NO: 24254 - DNA, 65 bp, Mus musculus
ccctaacaatcctaaagatggagctggattgccgagctggctcagtagtgagagggaacaagatt

SEQ ID NO: 24255 - DNA, 65 bp, Mus musculus
cgctgaggccaagtctgtgactgaagaagagttagaagaaggtttaaccgggctactatcaacaa

SEQ ID NO: 24256 - DNA, 65 bp, Mus musculus
gaaaaggagaaggcagataaaaatgaggaaaaggaccatgttagaaaggtaaagaaaatagtacc

SEQ ID NO: 24257 - DNA, 65 bp, Mus musculus
tgctcgggagatccattgatctcaaccgtctgattacacagcgcgtttcagcagccatgtacaaa

SEQ ID NO: 24258 - DNA, 65 bp, Mus musculus
ggattgtggttttctgtgatatctccgctgaagaggacctatttacaggtgagggtgactaccag

SEQ ID NO: 24259 - DNA, 65 bp, Mus musculus
acatattgacgcagtggacctcagtggcttggctcagtcctttgccaatggagtaaaggctttaa

SEQ ID NO: 24260 - DNA, 65 bp, Mus musculus
aagaccatgggaccatctgctccatacaccttgcaggtggtagacatggtagctagtcaatggct

SEQ ID NO: 24261 - DNA, 65 bp, Mus musculus
gaagaccttgctcaaagagtggatcactactatctcagatccgatggaagaagacatcctgcagg

SEQ ID NO: 24262 - DNA, 65 bp, Mus musculus
gaaagctcgagaagtactgacagacttcagaaggcttcaggaaggaccaaaaggccaggaacgaa

SEQ ID NO: 24263 - DNA, 65 bp, Mus musculus
gcggttgttaaagaacttgctgaaaccataaagtgtcgaacactgttttctacacactatcattc

SEQ ID NO: 24264 - DNA, 65 bp, Mus musculus
agccgaggtggtcgcaaagaacaacagcttcgtaaacgagatcatttcacggataaaggctccgg

SEQ ID NO: 24265 - DNA, 65 bp, Mus musculus
ggccacgaaagaccatagggatactgtgacctttgtctagtgctgattgcatgtgactcatgaaa

SEQ ID NO: 24266 - DNA, 65 bp, Mus musculus
attcgtgcacaagagccagagagtgggctttcagaagagactcaagtgaagtgcttggtggacca

SEQ ID NO: 24267 - DNA, 65 bp, Mus musculus
tatcaggattccagaactggtagaaaggatagagagatgccacatagacgatttggactttgcag

SEQ ID NO: 24268 - DNA, 65 bp, Mus musculus
aacagacatcagtgttagtcattggtaacgtccgagcttactgtcccgtgactggccttcgcttc

SEQ ID NO: 24269 - DNA, 65 bp, Mus musculus
gggaaccatgttgaatgaactgactcatgtagccatctcccaccctcttagctgtgcctcgcttt

SEQ ID NO: 24270 - DNA, 65 bp, Mus musculus
gctaatatggtaacaaaccagtgggatgttggtgtccatggtgtgacattaaagaccaggaagcc

SEQ ID NO: 24271 - DNA, 65 bp, Mus musculus
agagctgtttactctggatgaagcaagcctcagtgacacacatgacagattgcattgccgccgtt

SEQ ID NO: 24272 - DNA, 65 bp, Mus musculus
gaatgttgcacgtagaccggcgcatcttgcagaatgctgtgcgcaacgtccttgatggggaactg

SEQ ID NO: 24273 - DNA, 65 bp, Mus musculus
ggtgcagagagaatgaggagaatgagtgtgttcaggattgggatgggaaaggacaagacaggcaa

SEQ ID NO: 24274 - DNA, 65 bp, Mus musculus
agtgatccacagttccccattcttgcagagttggctccaacagttggtgccttcttctttggatc

SEQ ID NO: 24275 - DNA, 65 bp, Mus musculus
gcgagagaagtacctttaccaaaagatcatgtttggcaagcggcgcaaaatccgagaggccaaca

SEQ ID NO: 24276 - DNA, 65 bp, Mus musculus
ctgctggaagaaagtggtctgagcgtggatacactgcacaaggtaggccacatctcgtttgaatt

SEQ ID NO: 24277 - DNA, 65 bp, Mus musculus
tcagaaaagcgaagtaagaggagtagcaaggatgcctcgaggaactgttcagcctccagatccca

SEQ ID NO: 24278 - DNA, 65 bp, Mus musculus
tttctatgagcttccagaagaggtccaaaaggaactgatggcggaatgggagagagctggagctg

SEQ ID NO: 24279 - DNA, 65 bp, Mus musculus
ccatcaccctgtgttccagcaagattcattcaccagacaggtgttatggaagctgctgaaggttg

SEQ ID NO: 24280 - DNA, 65 bp, Mus musculus
ccttctaactaccagcagattgatatgagaggaatgtatcagtcagtggctggtggtatgcagcc

SEQ ID NO: 24281 - DNA, 65 bp, Mus musculus
caaagggtacaaggtgggagttgtgaagcaaactgaaactgccgcattaaaggccatcggagaca

SEQ ID NO: 24282 - DNA, 65 bp, Mus musculus
cctgtactggcaagcaccgacagactcacatactgctgaaggtgatgttctaaccctgctcagca

SEQ ID NO: 24283 - DNA, 65 bp, Mus musculus
ggggatgccaaggagtaggtggggaattggtacagactgcttcttgctgcttattaggggctgga

SEQ ID NO: 24284 - DNA, 65 bp, Mus musculus
cagtctcctgcctctaaaacaggaagatcagtattgaacaccctctgccaatcatgaactccccg

SEQ ID NO: 24285 - DNA, 65 bp, Mus musculus
gctgaacacagaagtacgcctgaacacacctggagtagtcggaagacatgacagaagctcatgag

SEQ ID NO: 24286 - DNA, 65 bp, Mus musculus
ttgtgttcatgcagttaattctttatccgggtcaggaaactgggttacccagtatgtatggcaac

SEQ ID NO: 24287 - DNA, 65 bp, Mus musculus
acttcacccttgtttagcccctattaaggtcgctttggatgtggggaaaggcccaacggtagaac

SEQ ID NO: 24288 - DNA, 65 bp, Mus musculus
gaagctctggacgtcatcctagcagacaacttgggaatgagtcactccaggtctctacagagtga

SEQ ID NO: 24289 - DNA, 65 bp, Mus musculus
ttcggccagtcaaagaggtgggaatgtacgggaagattgcagtcatggagctcttcaggcccaag

SEQ ID NO: 24290 - DNA, 65 bp, Mus musculus
gggtcctatgggaacagagggtctatttcgaagagcatgtgaagttacactgagactgatgaggg

SEQ ID NO: 24291 - DNA, 65 bp, Mus musculus
cagggtatggttcccagacatgatgcctacttggtaagggactgcatgacacaggacataatgag

SEQ ID NO: 24292 - DNA, 65 bp, Mus musculus; identical to SEQ ID NO: 23716

SEQ ID NO: 24293 - DNA, 65 bp, Mus musculus
gacagtgattggaatcctcagtctgatctccaggctcaagatagatgtcatagaattggtcagac

SEQ ID NO: 24294 - DNA, 65 bp, Mus musculus
ctgaagggcagaccaatgagagactaccccagattgacttcctttaagcaaacagtgctgtaaaa

SEQ ID NO: 24295 - DNA, 65 bp, Mus musculus
tcagcgcttctgtacgcagtacatcgtctacgaagacctgtttaactgtcacccagagagggttc

SEQ ID NO: 24296 - DNA, 65 bp, Mus musculus
cctgtacatgtgtaggacgtggtggcctttccaagggatctcagtgcattttctcgttgctacat

SEQ ID NO: 24297 - DNA, 65 bp, Mus musculus
ccttagttacctgactgtgcttcagaaagtagctaaccatgttgcactgctgcaggctgctagca

SEQ ID NO: 24298 - DNA, 65 bp, Mus musculus
cagctctctgaatctctgtctgaactggatcataaacgacaggtgtgtggaggtcattgcaaagg

SEQ ID NO: 24299 - DNA, 65 bp, Mus musculus
gacttcagtagacccagctccagctgccatcaagtcaggatctccatctttaccccaggcagttg

SEQ ID NO: 24300 - DNA, 65 bp, Mus musculus
agtgaagagcttcaggctatatgcaagctgggaactggattcagcgatgaggagctggaggaaca

SEQ ID NO: 24301 - DNA, 65 bp, Mus musculus
tccataggtcatctctctggagatccacatcttcaaatgccacctaccatccaccaagcagtccc

SEQ ID NO: 24302 - DNA, 65 bp, Mus musculus
ggtgaagctccctcagtggatgagatgctgtttctgaggcaagaacaagtgagagtggttgaaca

SEQ ID NO: 24303 - DNA, 65 bp, Mus musculus
ccgcttgctcattgtatcaacgtcaccctacagtgagaaggataccaagcagattctgcgcatcc

SEQ ID NO: 24304 - DNA, 65 bp, Mus musculus
ctgtggactaagtgagcctcgtgaaagagctgattggaatttgtacctttgtggctgctcatgca

SEQ ID NO: 24305 - DNA, 65 bp, Mus musculus
tggctgaagccacagaaaatcatccccactgtcaatgtcggcagctttcggtctaggaacacgat

SEQ ID NO: 24306 - DNA, 65 bp, Mus musculus
tgttgagacacacctacttctcagaccagcggacacaccttcggtcccgtgtgctgctctggtgt

SEQ ID NO: 24307 - DNA, 65 bp, Mus musculus
aatacctcagtgcccaaaacagtgcttctccaacatgacagagctgctggctggtcgaggagact

SEQ ID NO: 24308 - DNA, 65 bp, Mus musculus
ttctaatgggaatccctggagatagagaaagtcaggctgtggttgaccctcctcctcaggctgtg

SEQ ID NO: 24309 - DNA, 65 bp, Mus musculus
acattgagcggaaagcttttctggatcgagtggaccacaggcagtttgaaattgagcgagatctc

SEQ ID NO: 24310 - DNA, 65 bp, Mus musculus
gtgctagtagagtatccgctgtctaagcaccacgtgtgtagctcatgtgtattcggtgttgcaga

SEQ ID NO: 24311 - DNA, 65 bp, Mus musculus
tctgtattacggctttggggacatattcaggatcagctcgatggtggtcatggagaacgtggggc

SEQ ID NO: 24312 - DNA, 65 bp, Mus musculus
gaggactatgacagcgaggagacatagagaacagcctgccaatcaggttgctccttgagagataa

SEQ ID NO: 24313 - DNA, 65 bp, Mus musculus
ctctccctcagacttgagcctttacactcaggagggtttgctccaagcatgagctcttgtattct

SEQ ID NO: 24314 - DNA, 65 bp, Mus musculus
gcaaggacagactaacagctgcgaagtgaagggcactgcaactttgtctcagacttgcaacttgt

SEQ ID NO: 24315 - DNA, 65 bp, Mus musculus
tgcagagcctggggaagaacttcgcccttcgtgtgctgctggttcaagtggatgtgaaagatccc

SEQ ID NO: 24316 - DNA, 65 bp, Mus musculus
tcagtcgggaggaactctgtccggcactgatgtatagagtctcagctgggctgttcttgcagggt

SEQ ID NO: 24317 - DNA, 65 bp, Mus musculus
gtcaggctcaaaccacttctcaggttaatggacactgtagtcattgttctgtgcaactgcgagca

SEQ ID NO: 24318 - DNA, 65 bp, Mus musculus
ccaaacttctgccactcgaaccttcaacaaccaggacagcgtcccacatatccattgccatcaga

SEQ ID NO: 24319 - DNA, 65 bp, Mus musculus
ggggagtgtctccagagtccttgccttaaaggaaccaagtgaagtgtggtagaggaatagatgac

SEQ ID NO: 24320 - DNA, 65 bp, Mus musculus
ctgacagcttccggcatctctaccccaacactgcttacgcttacactttctggacttacatgatg

SEQ ID NO: 24321 - DNA, 65 bp, Mus musculus
gcgagaggaagacgcagcttccacattagtgactggctctgaatatgagacgatgctgactgaga

SEQ ID NO: 24322 - DNA, 65 bp, Mus musculus
aaccagcctcctggaagcagggtctgctgggaagaagcaggcaactcttctcaaaggtagcttct

SEQ ID NO: 24323 - DNA, 65 bp, Mus musculus
tgtggcccacaatggcttcgattatgacttcccactgctgtgcacggagctacaacgtctgggtg

SEQ ID NO: 24324 - DNA, 65 bp, Mus musculus
tgagaagtgtgactccctggttccagtgtgggacatgccagaacacacggactaccattttgcat

SEQ ID NO: 24325 - DNA, 65 bp, Mus musculus
agcagtggacacacatgtgcacagaatagccaacagactgaggtggaccaagaagatgaccaaga

SEQ ID NO: 24326 - DNA, 65 bp, Mus musculus
aacccagcaaattattggttttgaagcagagaagagcgatctcgtgcttctagagagtgaaatag

SEQ ID NO: 24327 - DNA, 65 bp, Mus musculus
gtgaagaagaacccacgccattcacagtggggcgatatgaagctctacctaaagctacaggtggt

SEQ ID NO: 24328 - DNA, 65 bp, Mus musculus
ctgtggtggatgactccaggggatcgttcctgtggggcaagcctgatgtggacaagattagagaa

SEQ ID NO: 24329 - DNA, 65 bp, Mus musculus
tctttccgtttgagaagctgtgaagccagtgtcctccagccagagaaggcagacagcaagcagat

SEQ ID NO: 24330 - DNA, 65 bp, Mus musculus
ccccagttgagctctgtttctggagctggcatgtcttctagaaatcctcgattcagtttcactcc

SEQ ID NO: 24331 - DNA, 65 bp, Mus musculus
tacttttcaggctggtaaaagcactgcaccatggtcctaacactggctgcacagggcttggtagg

SEQ ID NO: 24332 - DNA, 65 bp, Mus musculus
actggggttgcacctcctcctaaaggttgggcttcttgcctctgctgccaccatcctgtctgcgc

SEQ ID NO: 24333 - DNA, 65 bp, Mus musculus
ctgacccactcattgctcgtggcaaagaggtctcagacttgatccgcagtgggaaacccatcaag

SEQ ID NO: 24334 - DNA, 65 bp, Mus musculus
tggcttttcctggtatgtaccgtgctccagtgactaagctgagaaaggacctgggtaggaaggat

SEQ ID NO: 24335 - DNA, 65 bp, Mus musculus
atcgtctgtgatacccttggctctcagttcctcttgaaccctattcaggtaggttgggtccggat

SEQ ID NO: 24336 - DNA, 65 bp, Mus musculus
catgaggcacgttgccaatctggatgtcatctctcagaactgacacaccccttgtagcatagagt

SEQ ID NO: 24337 - DNA, 65 bp, Mus musculus
gcttccacacatcatcggaggatcagacttagtaggccaccatgctcgaaagaataccgagttag

SEQ ID NO: 24338 - DNA, 65 bp, Mus musculus
tgctgtcacatgaatccatgcacacgacctgtctgagtctaggtctcccctgaaaccacagtcat

SEQ ID NO: 24339 - DNA, 65 bp, Mus musculus
cacattttcgggatggtcctcatgaacgactggagcgcacgagacatccagcaatgggagtacgt

SEQ ID NO: 24340 - DNA, 65 bp, Mus musculus
cttcagagttgtcctggtgagatgccttgccatccttgagtgtgtgtccagtgactttcacgtga

SEQ ID NO: 24341 - DNA, 65 bp, Mus musculus
tacgtgaccgctttcaatggcgagctcgaggactatatgaatgagcgggtccagttcgtcatcac

SEQ ID NO: 24342 - DNA, 65 bp, Mus musculus
ggaagttctggatgccgggaaagcagctgcacagacattggaaaggtttgtctccattcttatgg

SEQ ID NO: 24343 - DNA, 65 bp, Mus musculus
aaatgacaacttgtgcaaataggaaatgctgttcctccgttactagcaaaagcaattggatttgc

SEQ ID NO: 24344 - DNA, 65 bp, Mus musculus
cttggcaatagcctcaacgtgcatgtggtagcaaaactcctcacagtcctgtgtgaaggatttgg

SEQ ID NO: 24345 - DNA, 65 bp, Mus musculus
gcttaagagaagaaactgaaccacaggtacagaagtttagagtcacctgcaacagagcaggagag

SEQ ID NO: 24346 - DNA, 65 bp, Mus musculus
catcccgacttcataatggtgctttcaaaacagcgagatgagcaaagacatcagcttccgcctgg

SEQ ID NO: 24347 - DNA, 65 bp, Mus musculus
agcgcatcagctgcagttaaagcaaaagaggaggctgctaccaaggactagtgctctcacccaga

SEQ ID NO: 24348 - DNA, 65 bp, Mus musculus
ttgctttcaggccttcgggtttctctcctgtttgattgccaggatgcctctgtgcagctcacttt

SEQ ID NO: 24349 - DNA, 65 bp, Mus musculus
tggtttgcagatccattggtttctcagtccaggacccaagaacgagctccaccaaagagcaggaa

SEQ ID NO: 24350 - DNA, 65 bp, Mus musculus
cagagagctttctgtgtttgcagttggctcctgaggagactgtcgaaccttagaagcagctaagg

SEQ ID NO: 24351 - DNA, 65 bp, Mus musculus
tactgctgtcaaggacttcgtgattgtccccttgcacacaactcccgagacctccgttaaagaga

SEQ ID NO: 24352 - DNA, 65 bp, Mus musculus
aatacttccaagccctggcaaaagataccatgttcatggtcctgctgaaggggcagaagtggaag

SEQ ID NO: 24353 - DNA, 65 bp, Mus musculus
aaatctgccacagagcagtcaggaactggtatccgttcggagagtgagacagagtcagaagcttc

SEQ ID NO: 24354 - DNA, 65 bp, Mus musculus
aggtgaactgggagtacttctacagcctgctcttcactgccgagaacctgaagctggtgcacatc

SEQ ID NO: 24355 - DNA, 65 bp, Mus musculus
tgcagaggtctcaggctcatcagaagacaagcctcagtcccctcagcttcattgtgtgagatctc

SEQ ID NO: 24356 - DNA, 65 bp, Mus musculus
gattcttgagtggctgattcatgagctccttcagaaacagtgttgggctaggcaaagctggggac

SEQ ID NO: 24357 - DNA, 65 bp, Mus musculus
tcaacgctgcagaagtgctctcagctcctagagcggcttgtcactgagtaccgcttgctgctttt

SEQ ID NO: 24358 - DNA, 65 bp, Mus musculus
ctcagcccctctgtctttggcagcctctggattgggatacagggattgatatggagacttatcaa

SEQ ID NO: 24359 - DNA, 65 bp, Mus musculus
tcactgctgaatatgtggagtttgaagtgaagcgagccttggagtggctgggtgctgaccgaaat

SEQ ID NO: 24360 - DNA, 65 bp, Mus musculus
accagcttacacatctcaaaaattccagcagttctgccgtcagatggacgtgacccacctgactg

SEQ ID NO: 24361 - DNA, 65 bp, Mus musculus
ccacgcggtattcgacctctacaggtctggcaaatggatgttacacatgtttcttcctttggaaa

SEQ ID NO: 24362 - DNA, 65 bp, Mus musculus
gaaatagcaggtgtggggcagtcttttgtcttcaggagaagtaaactggaaagatccgagtactc

SEQ ID NO: 24363 - DNA, 65 bp, Mus musculus
agcccgagtgtgtacgcgctcagagagcaatatttcactaagtgcagaccgttgcctacaagaaa

SEQ ID NO: 24364 - DNA, 65 bp, Mus musculus
gatctggctgatgccatcactgtccaaacttctgctagtaccaagttaaagggagggctgatgat

SEQ ID NO: 24365 - DNA, 65 bp, Mus musculus
gaagccaggaaattgcttcctagtgacaacagtcacccttcatatgcccagattggaaccctaat

SEQ ID NO: 24366 - DNA, 65 bp, Mus musculus
gcgaccagttggtgagactgttctgagtgtgcatctgagtttattgtggcttctgtagacgttcc

SEQ ID NO: 24367 - DNA, 65 bp, Mus musculus
ggccaatgaaaacgctcaactggcaatcaccacgaaaagtctttcagaaacatgcggtgttcgga

SEQ ID NO: 24368 - DNA, 65 bp, Mus musculus
gctctttactgtgatctgtgacaagccagctgcacgcacgtcatcgaaagtgaggccattatttc

SEQ ID NO: 24369 - DNA, 65 bp, Mus musculus
cggtgaagccaaagatgattcacagcgacatgggaagccaatacacttctagcctgttcgaagga

SEQ ID NO: 24370 - DNA, 65 bp, Mus musculus
gactggaatgcctagtttttgctcgatttcgttatattttgcaaattctcgcccacgatcaacag

SEQ ID NO: 24371 - DNA, 65 bp, Mus musculus
tgactctctgcggagaagaaatggggttctaaggcagcagataccctaagcctagaggctacctt

SEQ ID NO: 24372 - DNA, 65 bp, Mus musculus
gcctgatataaatctgactaactctctggttgcaggcctcagcaaatcaaggtgaaggcacccac

SEQ ID NO: 24373 - DNA, 65 bp, Mus musculus
gctggagcacaggctaagctagaagacacaaacctaacatagacttatggaccaagggactcgca

SEQ ID NO: 24374 - DNA, 65 bp, Mus musculus
ataggcctggcataaagccccctgagctgtagctgtcctgttcacttctaagggccctgttttga

SEQ ID NO: 24375 - DNA, 65 bp, Mus musculus
gtaattggccaggcattcttgtaccatcaagttcggtgtatgatggctatcctcttcctgattgg

SEQ ID NO: 24376 - DNA, 65 bp, Mus musculus
tgctgcataccgtgccaagggcaaaagtgaagcaggaaagaagggtcctggtaggccaacaggct

SEQ ID NO: 24377 - DNA, 65 bp, Mus musculus
atgaaaaggcactctcgcgtcctcctcactcagtgcactttgctgttggtgtgacaaggcatttg

SEQ ID NO: 24378 - DNA, 65 bp, Mus musculus
ataagtgttcgcttgtgcaaaagggaatagtgccgtggaagtgtgtgtccatggcagtttggaca

SEQ ID NO: 24379 - DNA, 65 bp, Mus musculus
atgacccacctactttcatcttcagtcctgctaacaggcgacgaggaagacctcccaaacgaata

SEQ ID NO: 24380 - DNA, 65 bp, Mus musculus
ctgcaagctgtaacaacctttggtgctccagctgaagtctttgactccgaagaggctgaggtgtt

SEQ ID NO: 24381 - DNA, 65 bp, Mus musculus
ttctcaatgcccatggtgggaacttggtgtccacttgtatctcaggctctgtgagtgaccagaag

SEQ ID NO: 24382 - DNA, 65 bp, Mus musculus
tttatgagcagtttgccaactgagaaggacgagcgactgagctgggtctttgaagcacagtgcag

SEQ ID NO: 24383 - DNA, 65 bp, Mus musculus
agaacaaatcggatctcaaggccgacagtggtgttcactaggagagatgctgttcacactagccc

SEQ ID NO: 24384 - DNA, 65 bp, Mus musculus
atgaaatctcaaccgcatccctttagcttcgaaccccatcccaggttgcagagaccgggagacct

SEQ ID NO: 24385 - DNA, 65 bp, Mus musculus
acacacacactcagtaacacgcacacagcccttacactggggtctgaccctcttctgcctcataa

SEQ ID NO: 24386 - DNA, 65 bp, Mus musculus
cgctaggtgcaaagtttgtcgaaagaaaggtgaggatgacaagctgatcctgtgtgacgagtgta

SEQ ID NO: 24387 - DNA, 65 bp, Mus musculus
tactggaaagtgaacaaacccatggaactttattatgcacccaccaaggagcacaaatgagcttt

SEQ ID NO: 24388 - DNA, 65 bp, Mus musculus; identical to SEQ ID NO: 23716

SEQ ID NO: 24389 - DNA, 65 bp, Mus musculus
ggggaaggatcatgtgtcagtaacaaaatctctcccaagctggattgaggacagaaaacctcttt

SEQ ID NO: 24390 - DNA, 65 bp, Mus musculus
gtatccatcagacaacagtctatggcttctggaagagtttgttcgatgacagttgttttctgtag

SEQ ID NO: 24391 - DNA, 65 bp, Mus musculus
tctgcccgcttcttcacatcctgccagcaccaatgagcccattgtcctggaggattgagcatctt

SEQ ID NO: 24392 - DNA, 65 bp, Mus musculus
tatgccttcagtgagaacccacttcccacagtggagattgccatccgaaataccggagatgctga

SEQ ID NO: 24393 - DNA, 65 bp, Mus musculus
ttgcagcagagacccaagtacaaggtcccacatcgacaagacagtgcttctcgttcagatcgatg

SEQ ID NO: 24394 - DNA, 65 bp, Mus musculus
ggtggggagtcttgtcattaaggtgtgtgtaatttagtccagttggtatttcctgactagactgc

SEQ ID NO: 24395 - DNA, 65 bp, Mus musculus
gtgcaggtgctccgagctcagggtctgggtaaacaggtgtgttttgatgtacttggaattctcaa

SEQ ID NO: 24396 - DNA, 65 bp, Mus musculus
gacaaggccatgaactggcaaagcaagagattcgagtaagagtagaaaaggatccagaacttgga

SEQ ID NO: 24397 - DNA, 65 bp, Mus musculus
tcgcaaggagagaggttcttatgagtcctccatgtctccagggatgccaagtccccacttaaaag

SEQ ID NO: 24398 - DNA, 65 bp, Mus musculus
tgccatgaagcgctatctgctctacaaatgacccagtagtacagggtgtgctggcaccctaccgt

SEQ ID NO: 24399 - DNA, 65 bp, Mus musculus
tctatgagcaggagagcaatgctgtgcatcaccatggcgacagacctccccacatcatccacgtt

SEQ ID NO: 24400 - DNA, 65 bp, Mus musculus
ggagaacacaagggacaatagcagccatatttggggctctggaatcatgtggtccgaggtgtaaa

SEQ ID NO: 24401 - DNA, 65 bp, Mus musculus
ccatatgcatgcctggttccctaggagaccagaagagggtcttatatcctctgggataggagtga

SEQ ID NO: 24402 - DNA, 65 bp, Mus musculus
ggcactcccatctacgaatgcaactcaaggtgtcgatgtggacctgaatgtcccaataggattgt

SEQ ID NO: 24403 - DNA, 65 bp, Mus musculus
cagattgtcattgccttctacgaggagcggctgacttggcattcttgtcctgaagatgaagcaca

SEQ ID NO: 24404 - DNA, 65 bp, Mus musculus
agctcccgacaacggcaacagcagccaaagtccaacagccatgcagctatcgactggggcaagat

SEQ ID NO: 24405 - DNA, 65 bp, Mus musculus
gtgcctgccacagcttcatgactatagatggacactgtaggctcaatcttgtgccctagtctttt

SEQ ID NO: 24406 - DNA, 65 bp, Mus musculus
tgcccttcactaccgtatcagaactggtgaaagtgtctgctatgtccagtcccaaggttgttctg

SEQ ID NO: 24407 - DNA, 65 bp, Mus musculus
cacagatgcagagtcagcgtggcacagtgagaatgaggaggaggacaagttggctggagatatga

SEQ ID NO: 24408 - DNA, 65 bp, Mus musculus
gcgagctcctaaaaaggttcttttcagagccacccactgaatcagataaagagttgtgtcacggt

SEQ ID NO: 24409 - DNA, 65 bp, Mus musculus
agttccctgtgggccgtattcatcgacacctgaaatctaggacaaccagccacggacgtgtgggc

SEQ ID NO: 24410 - DNA, 65 bp, Mus musculus
cagggcagcaaaccccaattctgggaaggcaaagatggtcatgcagaagaccgatctgaggaagg

SEQ ID NO: 24411 - DNA, 65 bp, Mus musculus
aagaagcagaaacacaaggggcgtgggacagttcgtactgtgactaaaacagtttccaatgattc

SEQ ID NO: 24412 - DNA, 65 bp, Mus musculus
acacaggccaccaacgttgctcacatcatctcttacagtgcacgcttccggactctgttacatag

SEQ ID NO: 24413 - DNA, 65 bp, Mus musculus
gtggccaaatcctctttactgttaacataaggaagagcactcatgaagggagaattaggaccttg

SEQ ID NO: 24414 - DNA, 65 bp, Mus musculus
agctgtccttcccctactaccctagcccaggagttctatttccgaagaaagaatccggtggctct

SEQ ID NO: 24415 - DNA, 65 bp, Mus musculus
tgaagtcaaagcttgcatgctacgatccccacccttataggggaactgccattgagtacgccact

SEQ ID NO: 24416 - DNA, 65 bp, Mus musculus
aacatccagggcatcaccaagcccgccatccgccgcctggcccggcgcggaggagtgaagcgcat

SEQ ID NO: 24417 - DNA, 65 bp, Mus musculus
atcacattgtttcttcggtgtcaccgttgctggcctcataccagttgaccctgtcgccattcgta

SEQ ID NO: 24418 - DNA, 65 bp, Mus musculus
ccaaatttttgggtaacaacatttgtcaaccatccacaagtgtctgcactgcttggggaggagga

SEQ ID NO: 24419 - DNA, 65 bp, Mus musculus
gtgaaatcggcagggtggtggctagccaaggtcaccagcaggcagtggctcaggagcttgaagtt

SEQ ID NO: 24420 - DNA, 65 bp, Mus musculus
tacggaagctgcaacataaatagaggcttgtctgagtggagaccgaagtgtgaactaccctccac

SEQ ID NO: 24421 - DNA, 65 bp, Mus musculus
ggactgagacgattgcttctcgtactttcggtttgtttgccacagcgatggagttgtgggttgaa

SEQ ID NO: 24422 - DNA, 65 bp, Mus musculus
tcatggctctgcaggaggcgagcgaggcctaccttgtgggtctgtttgaggacaccaacctgtgc

SEQ ID NO: 24423 - DNA, 65 bp, Mus musculus
cgctgcgataagatcgaggccaagtttgacaaggaattccaggctctggagaagaagtacaacga

SEQ ID NO: 24424 - DNA, 65 bp, Mus musculus
ttcccgaagcagacagcggcccagctcattctgaaggccatctccagctactttgtctccacgat

SEQ ID NO: 24425 - DNA, 65 bp, Mus musculus
acaagcctatggagtccatgcacgagaagggcatgcctgatgacccacgatacaaccagatgaaa

SEQ ID NO: 24426 - DNA, 65 bp, Mus musculus
atccgagaccaggtatgctgccaggtagccgaatgacacctcagggaccttccatgggacctcct

SEQ ID NO: 24427 - DNA, 65 bp, Mus musculus
acagagccccatggaccagcacagccaaggttatatgtcaccacatccgtctcctctgggagccc

SEQ ID NO: 24428 - DNA, 65 bp, Mus musculus
tcacggcgaactgccttacagtcactttcaaggaatacgtgacggtgtagtgggaaggagtcgcg

SEQ ID NO: 24429 - DNA, 65 bp, Mus musculus
tgaagacagctccaacacgtttacaaacatgaaccagaccacaacatgtggcctggacagtggtc

SEQ ID NO: 24430 - DNA, 65 bp, Mus musculus
ccaggtgtgagcagtgtcagagtgtggtaaagcctgatatcgtgtttttcggtgagaaccttcca

SEQ ID NO: 24431 - DNA, 65 bp, Mus musculus
caaccagaaagtacactgttgcctgttgaggatttggtgtaatgtatcccaaggtgttagccttg

SEQ ID NO: 24432 - DNA, 65 bp, Mus musculus
tatcaacacagtaccctctgctaacgttctttctcaccattcctgactgcagccatcggaggctg

SEQ ID NO: 24433 - DNA, 65 bp, Mus musculus
tttcccacctgcaaagtcatcagggaacccagcttccaggcattgtagggagacatcagacaggc

SEQ ID NO: 24434 - DNA, 65 bp, Mus musculus
gatttacagactcagttaagccatgagatccagagtgacgtgctcaccataaactagccacggct

SEQ ID NO: 24435 - DNA, 65 bp, Mus musculus
atgggaactgtgatgtggaatgctcgtgttccagtaaggggatgttgttgaactgcacatatttg

SEQ ID NO: 24436 - DNA, 65 bp, Mus musculus
aagacacagcagagagccagcagaatggtgaagaaggcacgtctactcctgaggacaaggagagt

SEQ ID NO: 24437 - DNA, 65 bp, Mus musculus
acgaaggacccaaaatgatgtcacaaggggacagctggaacatggggaccacagggtgtctctgt

SEQ ID NO: 24438 - DNA, 65 bp, Mus musculus
tctgtatggctctgtagctgcttgctgttttgaggcagattcagttggtgctgttcgcactcctg

SEQ ID NO: 24439 - DNA, 65 bp, Mus musculus
agatgcagtgactggttactacctgaaccgcgctggctttgaagcttcagacccacgcataattc

SEQ ID NO: 24440 - DNA, 65 bp, Mus musculus
gtcagtctagttgtgttgaagccaagtgcagttgtggatgttgctggggtaataaaggcaagcgg

SEQ ID NO: 24441 - DNA, 65 bp, Mus musculus
acgattcgcccgagaacccctttcgggacaagtccccgaaggaacgttgaaaacccgcaaaatct

SEQ ID NO: 24442 - DNA, 65 bp, Mus musculus
attctgccagtcccggactctcgctgtccacaagacgctacactcacaagtgaaggagctcaaaa

SEQ ID NO: 24443 - DNA, 65 bp, Mus musculus
gctgaacacctgatagctcagcatagtgccatcaagatgctgcacagccgtgtgaagctcatttt

SEQ ID NO: 24444 - DNA, 65 bp, Mus musculus
agctacagtgccactcacactgcagggttatctgttactgtggggaactgacgaggagtgctcaa

SEQ ID NO: 24445 - DNA, 65 bp, Mus musculus
ttctccctcggaaccgggactgcagggtagacctgggttcagaggtatacaggatgttaagggag

SEQ ID NO: 24446 - DNA, 65 bp, Mus musculus
gcccaacacttgagcttggacccttgtgaacttttgagaccacaccaccttttggacctgtaact

SEQ ID NO: 24447 - DNA, 65 bp, Mus musculus
aagcccgaaaagatgctgaagaaggctacctatgacaaggcttacacggatgagctggtggagct

SEQ ID NO: 24448 - DNA, 65 bp, Mus musculus
atcatcagaaccctagtcagtgctgacgccttcatttggctctgcagtcaactttccaaggcacg

SEQ ID NO: 24449 - DNA, 65 bp, Mus musculus
gccaagtctgaaagtcttaggggcggaaaccaaaactagtttgctggggaaagaacaggagctgt

SEQ ID NO: 24450 - DNA, 65 bp, Mus musculus
agaggtggtctcgctcaagagattcatagccacacaaccgatctcggcttcggactccaggtaaa

SEQ ID NO: 24451 - DNA, 65 bp, Mus musculus
ttagaactgagagagggcttgaccaggatgagtatggacctggagtacaacttgctggggtcact

SEQ ID NO: 24452 - DNA, 65 bp, Mus musculus
caaccctgtacccttttcacttgcaggtccagggctcaaactgggatgtaatgggatagttgtct

SEQ ID NO: 24453 - DNA, 65 bp, Mus musculus
tgtcctgctgacatctgaaactgtgcctatgaatgtgatttgaacacaggagccccttcctcaca

SEQ ID NO: 24454 - DNA, 65 bp, Mus musculus
gagaaacgatatcgctcctccatcaatgacaaaatcatcgaattgaaagacctggtcatggggac

SEQ ID NO: 24455 - DNA, 65 bp, Mus musculus
tccgtctccaaggatgggacatggaagctatgggacacagatgtggagtacaagaagcagcagga

SEQ ID NO: 24456 - DNA, 65 bp, Mus musculus
ttgagccactgagaacttcggggatatcgcctcttcctcaagatggggagctcactcctcgcacg

SEQ ID NO: 24457 - DNA, 65 bp, Mus musculus
accataaagtctacaccaggcatatgacatgggtccccttgggaaatcaggctgatgtcttccca

SEQ ID NO: 24458 - DNA, 65 bp, Mus musculus
tgaagctgtttgtggtactagagcatatgtctccagtgcgctcatttcagtgggacccacagcag

SEQ ID NO: 24459 - DNA, 65 bp, Mus musculus
agacagggcaaagcgccaggaagatctcattatgaaggtagaaaacctggctctcaagaacaggt

SEQ ID NO: 24460 - DNA, 65 bp, Mus musculus
ggattgaggaacactgtgagccacagactctacgagagattgtgatcggtgtccttcatcagttg

SEQ ID NO: 24461 - DNA, 65 bp, Mus musculus
gatatgcttcagtacaaggagcagatgagccacctctggaggaacatgcgcagtcagcaaatgaa

SEQ ID NO: 24462 - DNA, 65 bp, Mus musculus
ggcctctgcgtcagagggattggcttcaaatggggaaatatcaatgctaatggcaatgaccatta

SEQ ID NO: 24463 - DNA, 65 bp, Mus musculus
cccaagaatctcagaggacgatgagggagcagtggttaagtctgctgatggggaggacgaacaac

SEQ ID NO: 24464 - DNA, 65 bp, Mus musculus
cccagtgttaaagtccaagtgtgtgggctgtatgtgaattgtgtggataatctgcccctgcactg

SEQ ID NO: 24465 - DNA, 65 bp, Mus musculus
tcaaggtggactgcgtggagcacacctctaagtacgtgtacttcaccatcgtcaccaactattac

SEQ ID NO: 24466 - DNA, 65 bp, Mus musculus
tgtcagcagcaagcgctttggaaagttgagagcagctcgtggccccagaacaaagcttgagaaaa

SEQ ID NO: 24467 - DNA, 65 bp, Mus musculus
aggcggcagtccagcctaacctgtgtctgcgaagtcctatggaaacctgagggttgattaaggca

SEQ ID NO: 24468 - DNA, 65 bp, Mus musculus
ttgtttttggcccctgactttgatcgctggctggatgaatctgatgcggaaatggagctgagagc

SEQ ID NO: 24469 - DNA, 65 bp, Mus musculus
aggacactaaggttcccaacgcctgcttgttcaccatcaacaaagaagaccacactctggggaac

SEQ ID NO: 24470 - DNA, 65 bp, Mus musculus
gacccttacctgaaccagcctggtccactgggaactcaaaagcccacgtcaggaccacagacccc

SEQ ID NO: 24471 - DNA, 65 bp, Mus musculus
gttcatcagctgagtcccacatccaggtgactctgtgtgaggctggtaaacccagaggaggatag

SEQ ID NO: 24472 - DNA, 65 bp, Mus musculus
atcgtgtgcagctcccgttcgacacgcagagtggtggatcaagtgctcaatcgaaggctggttct

SEQ ID NO: 24473 - DNA, 65 bp, Mus musculus
tctgtttacctcacctccccatgttcgcttttgcatctagtgaccgccatctgtggccttgcata

SEQ ID NO: 24474 - DNA, 65 bp, Mus musculus
tgggcctcctagtctggaaaacaccagggacccaaagggattatactaatccaacctaaggattt

SEQ ID NO: 24475 - DNA, 65 bp, Mus musculus
ttcctcacaacttcctgctttggataaagggtaccatccttagttcctgagcagagaggcagagc

SEQ ID NO: 24476 - DNA, 65 bp, Mus musculus
tgaaagagctccagacgatggttgaacatcacctagggcaacagaagcaaggggaagaacctgag

SEQ ID NO: 24477 - DNA, 65 bp, Mus musculus
ggccactccaaggcaagtccctagccttcaacatatatgtcgcatgtcaatccgaagagtgatgt

SEQ ID NO: 24478 - DNA, 65 bp, Mus musculus
aaggaaacattcccaggggttcctgaagatccagaaagggcatgaaacctgctccatgtgcctgt

SEQ ID NO: 24479 - DNA, 65 bp, Mus musculus
caggggtctcttaggctaggggatgtggagagaattcagggacttgtgcttggaggcacatttta

SEQ ID NO: 24480 - DNA, 65 bp, Mus musculus
atgggcatggactgacttccactcaaaggttttcacaccagacactgcagcagacacccatgatg

SEQ ID NO: 24481 - DNA, 65 bp, Mus musculus
gttcctgacttctgtacgcactgtctactcaacattatccatatgattcttacctgatccatgca

SEQ ID NO: 24482 - DNA, 65 bp, Mus musculus
aagatcaagtcggccagctacaacctgagcctcactctacagaagtccaagcggcctattcccat

SEQ ID NO: 24483 - DNA, 65 bp, Mus musculus
cggtaaaccgtagcattcttcagcagctagatgaaaggtgtggccagataatcaccaaggaggac

SEQ ID NO: 24484 - DNA, 65 bp, Mus musculus; identical to SEQ ID NO: 23716

SEQ ID NO: 24485 - DNA, 65 bp, Mus musculus
gagatgggagcagcatcctaagcccttccgtggcgacatgtaatacatttgagggatggaaagat

SEQ ID NO: 24486 - DNA, 65 bp, Mus musculus
aaacacaaggaaaactggaccaacagtgaccgaggacagactcggactcacagctgcagtgtaag

SEQ ID NO: 24487 - DNA, 65 bp, Mus musculus
ggttggccctttaccatttcatgcttattccagaatgaagaggcccagttcgtgggcagtaacca

SEQ ID NO: 24488 - DNA, 65 bp, Mus musculus
aaagggttggagctgctggaaattaagcctcccaagcggtccccaagactagaacctggaagctt

SEQ ID NO: 24489 - DNA, 65 bp, Mus musculus
tccaacccttttgaaaccagccaacctaattacccgtactgtggaaatgagcatgacccctgacc

SEQ ID NO: 24490 - DNA, 65 bp, Mus musculus
tttgtgcctgtggtggtgaaccggtcagtactacgctccatgagccgaagagatgttctcatcaa

SEQ ID NO: 24491 - DNA, 65 bp, Mus musculus
tacccggttcaggtgcagtctgtgattctgatggggactagctgatctgtgcctctgtctcttag

SEQ ID NO: 24492 - DNA, 65 bp, Mus musculus
ataacttccggtgggataaccttccgtgatcagatatggcataaagagtgttttctgtgcagcgg

SEQ ID NO: 24493 - DNA, 65 bp, Mus musculus
acagtcttgatgactcggagaccatctctgagagacttgatagcacacaccatggaggagctgtc

SEQ ID NO: 24494 - DNA, 65 bp, Mus musculus
gaaattgccgacactgaccttaagcaggaagaaccgccgtctgacttagccagtgcttatgttac

SEQ ID NO: 24495 - DNA, 65 bp, Mus musculus
atgaggctgaagatctccaaacaaaaggtgtccctggcagatggcagggaagagagtcacagact

SEQ ID NO: 24496 - DNA, 65 bp, Mus musculus
ttagagcaactgaggcagcagatgcccctgggagttgactgtacccgatacactacactaagcct

SEQ ID NO: 24497 - DNA, 65 bp, Mus musculus
cagcccaggacaggcagctaacactaagtggcatctacgcccacatcaccaaacattacccttac

SEQ ID NO: 24498 - DNA, 65 bp, Mus musculus
gcatcaaacggtcgttactcattttcaggtgttctgggttttcaggcgttctgggctgtaagaga

SEQ ID NO: 24499 - DNA, 65 bp, Mus musculus
aagtttactgttccttctcgggacacaagaaaccaaatggagctgttgcttccagggagtctgcg

SEQ ID NO: 24500 - DNA, 65 bp, Mus musculus
gtcctcccgaagaattggcatgtgacagtgacaaagagtccagtatggaatggaagtccagctca

SEQ ID NO: 24501 - DNA, 65 bp, Mus musculus
actgtgatgatgatgccacgacagaaaatggagcactggctcccaagcaggagatggcttcagct

SEQ ID NO: 24502 - DNA, 65 bp, Mus musculus
tattctcctggcatctatgaactcaggcgaatgcccgctgagactgggtaccagggagagactga

SEQ ID NO: 24503 - DNA, 65 bp, Mus musculus
gcagtaattgagagtgacagagtgagaactgagtacttgactgggaaccactcatcttatcactg

SEQ ID NO: 24504 - DNA, 65 bp, Mus musculus
cacactaacaagctcgctcataaccgagcccttaggaactctggttgacacaagttgcaccttca

SEQ ID NO: 24505 - DNA, 65 bp, Mus musculus
atcctcgcccttcgccacatccatccgtcctctggacaccttccgtgcgctttcacatccttatt

SEQ ID NO: 24506 - DNA, 65 bp, Mus musculus
gcttctcatcgagggtcataccattggcattggggactccattgcagattcaaagacttaccagg

SEQ ID NO: 24507 - DNA, 65 bp, Mus musculus
catcggcacgaagcaggccaacggggaggaccatgatgtcacctcccatgacttggggaacaatc

SEQ ID NO: 24508 - DNA, 65 bp, Mus musculus
cggaaaggaagcagctggctcacagtctcagtcttacggaaactcaggtaaaagtatggtttcag

SEQ ID NO: 24509 - DNA, 65 bp, Mus musculus
tagaagtttgtccatttgtaaactcccggattgcgctccctcccgcctttctcccatttcccttc

SEQ ID NO: 24510 - DNA, 65 bp, Mus musculus
aaagcagaattgtgcaccgtgaacagacacctttgccaaacagactgtggtcccgagcagggtcg

SEQ ID NO: 24511 - DNA, 65 bp, Mus musculus
gaataatgctgtcccctggtgacgtgagactttcagatggaagctcttctgctcgagtttactca

SEQ ID NO: 24512 - DNA, 65 bp, Mus musculus
aatgctggagctagtggcactgaccggaaccgtggtctacagcatcaccaacaacttccccttca

SEQ ID NO: 24513 - DNA, 65 bp, Mus musculus
tagacggtacattgtttattactgtccatgtccagtaaagtgactttgtgtcaacagcctctcac

SEQ ID NO: 24514 - DNA, 65 bp, Mus musculus
ctccagatggatctgatcttggccctaggagagtgagcctgaatcttggatgttttgcttcttaa

SEQ ID NO: 24515 - DNA, 65 bp, Mus musculus
aaggcagccagtgctaggtgctttcagtgcaagcaggagaggctgagccagaatcccagaacttt

SEQ ID NO: 24516 - DNA, 65 bp, Mus musculus
ggggattgacaggcagcatattcctgatacatacctatgtgaacgttgtcagcccaggagtttgg

SEQ ID NO: 24517 - DNA, 65 bp, Mus musculus
cgcgtcaggttccctttgctacactttgtaccttgcctcaatctaagtactcctgttggcccctg

SEQ ID NO: 24518 - DNA, 65 bp, Mus musculus
aggtagaagccatccaggacaccattctgcgggctctagaattccatctgcaggtcaaccaccct

SEQ ID NO: 24519 - DNA, 65 bp, Mus musculus
gcttcccaagagatcttgcccctctttaattcgttccagttctcgttcctgttgttgctgttgtg

SEQ ID NO: 24520 - DNA, 65 bp, Mus musculus; identical to SEQ ID NO: 849

SEQ ID NO: 24521 - DNA, 65 bp, Mus musculus
aatgaacatctcagggctgaggggacatctcgagtcccaggtagctttgagtgcatccactgcca

SEQ ID NO: 24522 - DNA, 65 bp, Mus musculus
aggacactggattccttgcagccgtagttaaggtatctgtgagcggagctcacacagggaacatt

SEQ ID NO: 24523 - DNA, 65 bp, Mus musculus
cttcgtggcagctttggaaacaggttgtccgttctgctgcaggattcaagtgaggatccaggaga

SEQ ID NO: 24524 - DNA, 65 bp, Mus musculus
cagtgtagacaggcataaatgcgtggtatgtagagaagcgttccctaatgctgttgcccttaggg

SEQ ID NO: 24525 - DNA, 65 bp, Mus musculus
cccttactctgagttctaagtctttggtagccattccattctctgcttggagttcagcttttctt

SEQ ID NO: 24526 - DNA, 65 bp, Mus musculus
atggcattgtccagatccctaattctggagccaacggccagttccttaatgggagcattggattc

SEQ ID NO: 24527 - DNA, 65 bp, Mus musculus
agtggggaatcggattttgtaggacaccaggtcctcagcctggacacgtgggtttcttagcctgc

SEQ ID NO: 24528 - DNA, 65 bp, Mus musculus
aagtcgtatgtgtgtgtgaagtgcgggctagccttcgtgcaaagggcacacttggatgcacacca

SEQ ID NO: 24529 - DNA, 65 bp, Mus musculus
cctgaggccttatgagtgtgtggagtgtggaaagacattcaagaccaagtcatcccttatctgtt

SEQ ID NO: 24530 - DNA, 65 bp, Mus musculus
atctaaggatggacagctgaccctaccattggcagggattatgcagcatgatgccacgaagctgt

SEQ ID NO: 24531 - DNA, 65 bp, Mus musculus
gcctttccttcacattcagaaagcagcatccggaagaggctaaagctctgtgctgacttcaaacg

SEQ ID NO: 24532 - DNA, 65 bp, Mus musculus
ccgtgcccaccctagagctgtgccacgacgaactcttcgccgacctcttcaacagcaaccacaaa

SEQ ID NO: 24533 - DNA, 65 bp, Mus musculus
tttcaagaaagccttctctagttccctggctcagtaggacatttcttccacccactcccagtccc

SEQ ID NO: 24534 - DNA, 65 bp, Mus musculus
ggagtacaaaccttacaagacatcagaggactcatacatgagaaatgctctggtcaactccttca

SEQ ID NO: 24535 - DNA, 65 bp, Mus musculus
cagcttcctccctggcccaatggcagactgcagcaaaggcagtagccttgtctgtctctgtcctc

SEQ ID NO: 24536 - DNA, 65 bp, Mus musculus
aaaacggacccagtgaccagaaggaagctctgcccacgggagtgaccgtcaaacaggaacagaac

SEQ ID NO: 24537 - DNA, 65 bp, Mus musculus
gcgcctgcttggggcagaccctgtgcccgcagacacgcagacgggttgcatcccctcgcttcgag

SEQ ID NO: 24538 - DNA, 65 bp, Mus musculus
cctaaccccttcctagtggtggacttttataaccagaaccgggcctgtttgctccaggagaaggg

SEQ ID NO: 24539 - DNA, 65 bp, Mus musculus
cctctcttcgcactgacgcccaccgagccctcccgctcccgggcccgatgtactgaagcatgaga

SEQ ID NO: 24540 - DNA, 65 bp, Mus musculus
ggctcagcagatgaacatgaaccacaacaccatgccttcacaattccgagacatcttgagacgac

SEQ ID NO: 24541 - DNA, 65 bp, Mus musculus
ctgtgtgattctggacctgtagtaatgtgtgtccaccctggagcactggtccttcagtgaagcct

SEQ ID NO: 24542 - DNA, 65 bp, Mus musculus
gcactctatgaagggtggtatccctaggagtaagcaaatcctaagactgattttctgcccctagg

SEQ ID NO: 24543 - DNA, 65 bp, Mus musculus
gtgagaatcctgggagttggtgatgtcagactggttgggtcatttgaaggttagcagcccgggaa

SEQ ID NO: 24544 - DNA, 65 bp, Mus musculus
atgatgaggaagatcgctgtggctgcagcctccaagccagcagtcgagatcaaacaggagaatga

SEQ ID NO: 24545 - DNA, 65 bp, Mus musculus
atcctggccctaattcacattgtccttttctcgggagggatcttgcaggaacccagacatcaggg

SEQ ID NO: 24546 - DNA, 65 bp, Mus musculus
aattgagttggtaccgaggacgaaggccaagaaccgctttcacccagaaccaggtcgaagtattg

SEQ ID NO: 24547 - DNA, 65 bp, Mus musculus
tctactaacgttgtataccatctgaagaccttgttgacccaaccaaataaactagccaggagagc

SEQ ID NO: 24548 - DNA, 65 bp, Mus musculus
cacaccttctgcaagtactccgaggagatgaagaagattcaagagaaacagagggagaagcgggc

SEQ ID NO: 24549 - DNA, 65 bp, Mus musculus
cccacctcctgggggccttgttactagtgcaagccatgccaatttgttctcaggatcagagtatt

SEQ ID NO: 24550 - DNA, 65 bp, Mus musculus
tgtgctgtgtgattgtggccttgggagaacctgtttgtcaggcaggactgaggtggcatttctat

SEQ ID NO: 24551 - DNA, 65 bp, Mus musculus
accacaggcttcaaacatccgttcgccatagagaacatcatcgggcgggactacaagggcgtgct

SEQ ID NO: 24552 - DNA, 65 bp, Mus musculus
tgaaagttgtcttcggtccctctagggcaccagagaaaacaggggctaatccaagccaagcggtc

SEQ ID NO: 24553 - DNA, 65 bp, Mus musculus
ctctgtctcacgtgtggagctgctgaccattgggacagtaaaaatgtatcctgtaagaactgtag

SEQ ID NO: 24554 - DNA, 65 bp, Mus musculus
accgggaagaggtcctggagtgggaattctgaagctggggttgagggacatagccccagaggtca

SEQ ID NO: 24555 - DNA, 65 bp, Mus musculus
aactgcagaacgagaaccacgtgtccagtgattaggacctggtgccctggtgtcccctgtctctg

SEQ ID NO: 24556 - DNA, 65 bp, Mus musculus
tcagggccagtgtgacaggtcaaagatcacccctccaaacctcatcccaatccccatgtgctcta

SEQ ID NO: 24557 - DNA, 65 bp, Mus musculus
agccccatctccaactctcagggctacatgagcgcgtcgccttcgggctacggcggcatccctta

SEQ ID NO: 24558 - DNA, 65 bp, Mus musculus
aaagaaatcgtctcacaggggcaagtcgaggagcgccacagaactgcggatgggccatttcaaac

SEQ ID NO: 24559 - DNA, 65 bp, Mus musculus
tttctggtaccccgtggaaccaaaatggaggctacagattgagctggtctagagagtggacactg

SEQ ID NO: 24560 - DNA, 65 bp, Mus musculus
gaacacctgtaaaagctagttgtctgttcctaggcgagtcgagtaagtgacacgatgcctgccag

SEQ ID NO: 24561 - DNA, 65 bp, Mus musculus
tctctgtgcaagtgcccaagatcctttctgggaaagtcaagcccatctatttccacacacagtga

SEQ ID NO: 24562 - DNA, 65 bp, Mus musculus
aaatggcttattctgcctacgtaccccaggatgggacgatgctgactgcgctgcactcatacatg

SEQ ID NO: 24563 - DNA, 65 bp, Mus musculus
cggcaagagagaacctaactgtatctttgaggcgatagtagaacacagaggccagtaacgggtcg

SEQ ID NO: 24564 - DNA, 65 bp, Mus musculus
gatgaccatgagggcattggagtcaatgagagggaaatgtctacaatgacctgaagagcagctca

SEQ ID NO: 24565 - DNA, 65 bp, Mus musculus
agggcctcgttttcgcttcttcacacccaacgctgaaggcagcagccgaatatcatctttatctg

SEQ ID NO: 24566 - DNA, 65 bp, Mus musculus
caccgggtttcgggacttgatgcaatccggatcaaacgtggctgagcgcgtgtggacacgggact

SEQ ID NO: 24567 - DNA, 65 bp, Mus musculus
aggacaacttctccaagtttggtctttccaccttcagtgatgtggctcagctcagcctggaagac

SEQ ID NO: 24568 - DNA, 65 bp, Mus musculus
acggcataacgccgaaaacacactggtgggaacgaaacaccccacaagacggcagagagacaacg

SEQ ID NO: 24569 - DNA, 65 bp, Mus musculus
ttcaaaggaatgtccccaagtgtctacgtctttcgctaagagtattcccaacagttggaggacgc

SEQ ID NO: 24570 - DNA, 65 bp, Mus musculus
gagctgctccaccgaagcggaattctccattcccgagcggtctgtggggaagacgacagcagtga

SEQ ID NO: 24571 - DNA, 65 bp, Mus musculus
ttacttcgagggctctgttctttaccgtgtctggctaataagggttcccaggatggagaccagag

SEQ ID NO: 24572 - DNA, 65 bp, Mus musculus
tacaagtcttgcttggtcttgtccgcttcggttgtggcttccacggttttcccgacttacatact

SEQ ID NO: 24573 - DNA, 65 bp, Mus musculus
ggctccccaaaaggttccaagtcaaagagtttcagcatcgacagcattttggccggagaccgacg

SEQ ID NO: 24574 - DNA, 65 bp, Mus musculus
cgcgcgcttgcggtatatgggggtgttgactcgccaattactctacggccgtggtgtttgttgtt

SEQ ID NO: 24575 - DNA, 65 bp, Mus musculus
acaggaaactgggtcgtagttgagttaccccaggaggattccaaagtccgagccatcgcctgcct

SEQ ID NO: 24576 - DNA, 65 bp, Mus musculus
actcgcgcctactcttcgaaagaggccaaacggaaattcagcctcgctgtcagagggacaaactg

SEQ ID NO: 24577 - DNA, 65 bp, Mus musculus
tatgcgggttgtcccctggagtcctgtgttacccagcactgccagacagcacttcaagccctgac

SEQ ID NO: 24578 - DNA, 65 bp, Mus musculus
ttgggtgtgaagaagcgaaaacgaggccctaagaagcagaaggaaaacaagccaggcaaacctag

SEQ ID NO: 24579 - DNA, 65 bp, Mus musculus
tcttgatagactgatggatgcctgtgtgtccagagtgcagaattggtttaagatcaggagggctg

SEQ ID NO: 24580 - DNA, 65 bp, Mus musculus; identical to SEQ ID NO: 23716

SEQ ID NO: 24581 - DNA, 65 bp, Mus musculus
caggatatgttcgattcatgaacgagcgtagagaacagcttcgagcaaagagaccagaggttcca

SEQ ID NO: 24582 - DNA, 65 bp, Mus musculus
tatcagagtaaggaactgtgctaggtatgggagagccagagattaaagtcataggccctaacccc

SEQ ID NO: 24583 - DNA, 65 bp, Mus musculus
aacctgcagttcacactggtagaaacgctgtggaagaccttctggagatacaaccttagccagcc

SEQ ID NO: 24584 - DNA, 65 bp, Mus musculus
acaccctggatacatgctaacggcatctcatctcatcctggacaggtccaagccccaaagagata

SEQ ID NO: 24585 - DNA, 65 bp, Mus musculus
tatgcagaaagtggatggggttgcagatggtttcacaggaagtggccaacagacaggcacatctg

SEQ ID NO: 24586 - DNA, 65 bp, Mus musculus
ccttgagatgtactatgcagacactcagtatgacagataggctttgactaaggagagccccacac

SEQ ID NO: 24587 - DNA, 65 bp, Mus musculus
atccagtccacctggtttgattcagcaacgctcaggtagcatcgctgtttgatctggagctgcca

SEQ ID NO: 24588 - DNA, 65 bp, Mus musculus
tgctaaccagagtctgcgggaaagacagtggaggcaggccaaatctaaaggcagtagctgaagtt

SEQ ID NO: 24589 - DNA, 65 bp, Mus musculus
gcctagctgcggatgtgttgtgaagccagcgtgctaatgcagagcctctatctaccttttaggat

SEQ ID NO: 24590 - DNA, 65 bp, Mus musculus
cagctgaagagactggtggataccctcccacaagagaccaggataaacatcatgaagctcacgga

SEQ ID NO: 24591 - DNA, 65 bp, Mus musculus
catcacctgcacaagggaggctacaaaccttccagcctgacttgaggctaagagcatcaggaaga

SEQ ID NO: 24592 - DNA, 65 bp, Mus musculus
catgactgatgtgcatatctgatgcttttccccagtcttccgtaaaggtgctgagaacttgctct

SEQ ID NO: 24593 - DNA, 65 bp, Mus musculus
gattctgaggatattccttcgccttacgtgcatggtcttgtctggcattctgtgtactcttatgt

SEQ ID NO: 24594 - DNA, 65 bp, Mus musculus
agagcagctacaagctacaggccataccttacaacctgaaaagctaaggaccacggtgaccttcc

SEQ ID NO: 24595 - DNA, 65 bp, Mus musculus
atacgatgacaagctggcatacgccgaggactatatcatggatgaggaacactctcgcctggtag

SEQ ID NO: 24596 - DNA, 65 bp, Mus musculus
ctttgccatttcattcaaacctgacaagtctatctcaacaggctgccagatttccatgtgtgcag

SEQ ID NO: 24597 - DNA, 65 bp, Mus musculus
tacccaccagtcaaacctcatcgttcaccagagagcgcacatggagaagaagccatatggatgca

SEQ ID NO: 24598 - DNA, 65 bp, Mus musculus
attgagagggtaccatgccggtggaacggatgcgaatgcgcccgtggctggaggagcagataaat

SEQ ID NO: 24599 - DNA, 65 bp, Mus musculus
atttaaccacagaagaactgcgagacaggagctacgaacccttccgggacaagcgagttgcagaa

SEQ ID NO: 24600 - DNA, 65 bp, Mus musculus
cattccttgtgcaccatagtttgggtctctgacccgttcttgccctcctgagtgagttaggcctt

SEQ ID NO: 24601 - DNA, 65 bp, Mus musculus
gccatcctctgttccagactggacatccactgtctttcctgctttcgcgtcagatttacagctta

SEQ ID NO: 24602 - DNA, 65 bp, Mus musculus
ggtagtgcttctggagatgtgaaaacttggagcgtcctgcggcccttcgtgtgtgctcgtgctaa

SEQ ID NO: 24603 - DNA, 65 bp, Mus musculus
cacagtttggctagttagcatccccttgtcttgtcctaggcagacaggtgctcaattccttcttc

SEQ ID NO: 24604 - DNA, 65 bp, Mus musculus
accgtcagcttgtcctacatggtgggcatgatagccagcttttacaacacggaggcagtcatcat

SEQ ID NO: 24605 - DNA, 65 bp, Mus musculus
cagggctcagtgctggcaagagcgatgtctactacttcagtccaagtggtaagaagttcagaagt

SEQ ID NO: 24606 - DNA, 65 bp, Mus musculus
ttttccgagagaagagctttgaccaactaaagtccatctcagcagaggaggttctgaccctcttc

SEQ ID NO: 24607 - DNA, 65 bp, Mus musculus
cacctaaactgtctttcttactggcagacacctagaagttagaaccatggctgtaacgtggcggt

SEQ ID NO: 24608 - DNA, 65 bp, Mus musculus
tgggtacccttggtcatggtcagtgtgaacgcgcccctcggggctccagtggcgagtccttatga

SEQ ID NO: 24609 - DNA, 65 bp, Mus musculus
tgcaccacgcactgcacgaggacggccacgaggcacagctggagccgtcgccaccaccgcacctg

SEQ ID NO: 24610 - DNA, 65 bp, Mus musculus
taagggaactgttgaaaccccgcagcatcagctgggagcctaatgaggagaacgctgttccatct

SEQ ID NO: 24611 - DNA, 65 bp, Mus musculus
ctgcttcagaggtgaatctaggaacaggcttcccagatggcagtctacacagttgatgagcatca

SEQ ID NO: 24612 - DNA, 65 bp, Mus musculus
cagagactccatactggcgagcagctttgccagtgtttgcaatgtgggagaacctttacacgtgt

SEQ ID NO: 24613 - DNA, 65 bp, Mus musculus
agatacccttctgtaagggagatagcgccttggatctgattgcccaggcttgggtgatagctgca

SEQ ID NO: 24614 - DNA, 65 bp, Mus musculus
aagctcagacaggagaaagtagcctttccagcccatgactggtgagtatggtggcaagtctgccc

SEQ ID NO: 24615 - DNA, 65 bp, Mus musculus
ttgctccccagtcgttgaataccgcgttgctgcagaccttgacgcacttgggcgacatctcaaca

SEQ ID NO: 24616 - DNA, 65 bp, Mus musculus
cacagccctagaagaagatgatgaggtccagattacatctgtctcaacatcagtaccccgatcag

SEQ ID NO: 24617 - DNA, 65 bp, Mus musculus
tgataaacacctcacgcctcactcttcacagtgcgcaggacagacagacggacgaggtctgggct

SEQ ID NO: 24618 - DNA, 65 bp, Mus musculus
tatgaatgtggtaaaggatttgcacattactctactcttcggaaacatggttctacacatactgg

SEQ ID NO: 24619 - DNA, 65 bp, Mus musculus
atggatatgcactgcaaagcagaccccttctccgcgatgcaccggcacgggggtgtgaaccagct

SEQ ID NO: 24620 - DNA, 65 bp, Mus musculus
ttacacctcttcccactgcagaccggaggcccccttaccatgcaccttccctcagagtgatccca

SEQ ID NO: 24621 - DNA, 65 bp, Mus musculus
agagaaggctctaggaggcactgacaagagcagtggtggcagtggctcgggtggactggctgagg

SEQ ID NO: 24622 - DNA, 65 bp, Mus musculus
tgaatgtgaggactgcctcccattgaagtgaacacctcatagcacgcgacacaatcagttctggc

SEQ ID NO: 24623 - DNA, 65 bp, Mus musculus
accatgtggaggggttcgcatagtagagagatggcatgtcccagaagctgagggaactcgagatt

SEQ ID NO: 24624 - DNA, 65 bp, Mus musculus
ctcggtatcactcacagtcgcccagcatgtgtgacagaaaggagtttgtcttctctttcaatgcc

SEQ ID NO: 24625 - DNA, 65 bp, Mus musculus
ctgccccacacaactacttactctgagtgccataaatcagccgctccctgtaaggctgctgctgt

SEQ ID NO: 24626 - DNA, 65 bp, Mus musculus
tctgtgtgtccttgttactgcaagaaacccacctggtactccaagtgtgctaccattcctggagt

SEQ ID NO: 24627 - DNA, 65 bp, Mus musculus
tatatgcggaaagtccttctcggattcgtcatgctacactgtgcactacagaggtcattccgaag

SEQ ID NO: 24628 - DNA, 65 bp, Mus musculus
ggatcccagctgtccactacaccaatgggacatggcggggagaagccagtgttcggagaagatgc

SEQ ID NO: 24629 - DNA, 65 bp, Mus musculus
tctgtattgccaagtgccaaatggaaagaccacttagagcaccactagactgagggattaacttc

SEQ ID NO: 24630 - DNA, 65 bp, Mus musculus
taattcacagcctctccggacaggggtcgcctagactggcttgccctcgtcccagggtctgaaag

SEQ ID NO: 24631 - DNA, 65 bp, Mus musculus
cccacgactctccatccttaacacctaacaagttcacctgcacacattgttggaagcccagaaag

SEQ ID NO: 24632 - DNA, 65 bp, Mus musculus
tcaggttgtacgggatcaaatgcgccaagtgcagcataggcttcagcaagaacgacttcgtgatg

SEQ ID NO: 24633 - DNA, 65 bp, Mus musculus
aacaacctgctgacctggacaactttgccaggattggacacctgtaagaaagcactggccatcga

SEQ ID NO: 24634 - DNA, 65 bp, Mus musculus
caactccaagctggagaaggccgacatcctggagatggccgtcagctacctgaaacacagcaaag

SEQ ID NO: 24635 - DNA, 65 bp, Mus musculus
attgtctcgcatttgttggtggctgaaccagagaagatctatgccatgcctgaccctactgtccc

SEQ ID NO: 24636 - DNA, 65 bp, Mus musculus
agtcctggagcccctctctgactaacctggagaaagtggtcgttacagatgtgacctcaaacttt

SEQ ID NO: 24637 - DNA, 65 bp, Mus musculus
tgaccagtgtccctatgcttgtgcccagagtagcaagctcaaccgccaccgtcgcacccatggtc

SEQ ID NO: 24638 - DNA, 65 bp, Mus musculus
agtgacgtgggtacaaactccaggtgagcgagaatgcaccttctcttggatcctggcttggcttt

SEQ ID NO: 24639 - DNA, 65 bp, Mus musculus
gctctccccaagagaaagcagtatctctgagaacatagtacaccggagaaaacagtctttacagc

SEQ ID NO: 24640 - DNA, 65 bp, Mus musculus
gacaaatatttgagacttgtgtaaaggacaaacgtgacggcagcgtcagtgattctcacacatcg

SEQ ID NO: 24641 - DNA, 65 bp, Mus musculus
tttccaaagcctcctgcttccaggtctcagtgcagggagcccctgtggaccttgaactcacttgt

SEQ ID NO: 24642 - DNA, 65 bp, Mus musculus
ctgtggtaaagatgactgactctggagacaggctgaaactggaccagactcatttagagacagtc

SEQ ID NO: 24643 - DNA, 65 bp, Mus musculus
gtgccctgagcactcctaagggacagaccttgcctttggacttcatagaacactttctggccctg

SEQ ID NO: 24644 - DNA, 65 bp, Mus musculus
tatctgtagctatccagaccagccaggactggaaacctacccgcagtctcatcgaacacgtcttt

SEQ ID NO: 24645 - DNA, 65 bp, Mus musculus
agcacacgagcaggaacataacacaccagacataaagcacaaccagccgcacacacgacaagaat

SEQ ID NO: 24646 - DNA, 65 bp, Mus musculus
atcgctacaagttctgtgacaacaaatggatggtcgcagggaaggctgagcccatgccaggaaga

SEQ ID NO: 24647 - DNA, 65 bp, Mus musculus
aggacagtgcccgctatgcccaggaaaacttcaagtcctttgtcttcacggagacccagtttaca

SEQ ID NO: 24648 - DNA, 65 bp, Mus musculus
ggaggtacaagaacaatgaagcagccaagaggtcgagagatgcaagaagactcaaggagaaccag

SEQ ID NO: 24649 - DNA, 65 bp, Mus musculus
ggagcacagccaaatttaccactgtaccaagaggaaagatgaggaatgttccagcacggagcacc

SEQ ID NO: 24650 - DNA, 65 bp, Mus musculus
gtcttcgaagcctcggagaacaaagcttgcctttggaagacaagaatttatccagcaggcccatt

SEQ ID NO: 24651 - DNA, 65 bp, Mus musculus
gttccggagattggcagaaccccgaaacttctcgaaaacaattcaggcagttgcgctaccaggaa

SEQ ID NO: 24652 - DNA, 65 bp, Mus musculus
ctggggctccctggactgacaccctacccctgagttaataaaagttgaatttgacagctcaaaaa

SEQ ID NO: 24653 - DNA, 65 bp, Mus musculus
atctcctacatgccttcctaccatgcccatcaacagaaggtgaactttgtcccgtctcacccatc

SEQ ID NO: 24654 - DNA, 65 bp, Mus musculus
tctggggaagacccaactagggataagagcacaccaaaaggccaagtccgagttccatttctaga

SEQ ID NO: 24655 - DNA, 65 bp, Mus musculus
tgtccccacgtcacagcgcttctaccaactcacaaaacttctcgacagcttgcatgatcttgtga

SEQ ID NO: 24656 - DNA, 65 bp, Mus musculus
acgcctcacttgctcattacaggttctcctttgggaatgtcagcattgctccttgactgctggct

SEQ ID NO: 24657 - DNA, 65 bp, Mus musculus
ttgaggaaaaggacaacttcaatcatccaatgcaggcttccctccactgggaggaagtggtcctt

SEQ ID NO: 24658 - DNA, 65 bp, Mus musculus
gagggatacctggcattgacctctcagaccctaagcaactggcagaatttgccagaatgaagcca

SEQ ID NO: 24659 - DNA, 65 bp, Mus musculus
agctgatccagtttgggctgatgaagaaccttatccggagactacagaaatatccagtccgagtg

SEQ ID NO: 24660 - DNA, 65 bp, Mus musculus
ctttaggagaagggcgatgactccggggatgggaaagctcccactatgccctgtccctcggattt

SEQ ID NO: 24661 - DNA, 65 bp, Mus musculus
tgggactcaacatacagaaacatagagacattgtgcccaaagacagaggacatatagccctaggg

SEQ ID NO: 24662 - DNA, 65 bp, Mus musculus
accagcagagctcaactacaacttcctatgacctgagcaaccagatgctgtccccatttggatgg

SEQ ID NO: 24663 - DNA, 65 bp, Mus musculus
gaagaactagattccatggcaaagcacgaatccaaggaagatcacatattccaaaagtttaaatc

SEQ ID NO: 24664 - DNA, 65 bp, Mus musculus
ttttcagcaccagtcacccactgttcctaactgcttgtcaacaatgggccagaactgtggagctg

SEQ ID NO: 24665 - DNA, 65 bp, Mus musculus
ctaagtggctctcttattgggagattcgtggcagctgtgttccaagcggtgcagttacccagcct

SEQ ID NO: 24666 - DNA, 65 bp, Mus musculus
gttatgcggaagaactgactgacggaatacgcattcaccacgttcctaaccaaagctctcaagag

SEQ ID NO: 24667 - DNA, 65 bp, Mus musculus
ccctccaaatcgaacaagcagtctgatagagccacattgactcgctactccaaaactaaccaccg

SEQ ID NO: 24668 - DNA, 65 bp, Mus musculus
tcaaaaggtgacagggacacatgctgaccacgcagagacctggcatcctcagccacctgccactt

SEQ ID NO: 24669 - DNA, 65 bp, Mus musculus
atcatggaggagatggagcgcagatccaagactgaggcccgtctgaccaaaggcactcagctcaa

SEQ ID NO: 24670 - DNA, 65 bp, Mus musculus
ctgcatgtgcatggcagagacacaaggatatgtgagggcctgtttctgtttgtacaaggcaagac

SEQ ID NO: 24671 - DNA, 65 bp, Mus musculus
aaggaacactgacagcaaccttaccctgaggtcactgctagcgctgacccgaagacacagtcact

SEQ ID NO: 24672 - DNA, 65 bp, Mus musculus
catggacctagaggaccagcagatcaagattctaaacctccgcttcctagggaagctcctggaag

SEQ ID NO: 24673 - DNA, 65 bp, Mus musculus
cacatacacctacatgttgaagggcctaaccagctttgggagtactgactggtctcttatctctt

SEQ ID NO: 24674 - DNA, 65 bp, Mus musculus
gcatcatgtaagctgagaccctgtctttcttcgtgttcttccaccccttccgtttgacttgagtc

SEQ ID NO: 24675 - DNA, 65 bp, Mus musculus
gtgcacaggtgtctccagtgtgtcagccacttcttcctgttcatcccagacaatagcaactaaag

SEQ ID NO: 24676 - DNA, 65 bp, Mus musculus; identical to SEQ ID NO: 23716

SEQ ID NO: 24677 - DNA, 65 bp, Mus musculus
gtaatgaccgaggtaccgatttctgctaagttttcccaacaacatgaaactgcctattcacgccg

SEQ ID NO: 24678 - DNA, 65 bp, Mus musculus
gctcagcattcatgagaatgttcacacctcggcagtatgagaaaggacccattgaggacacgtct

SEQ ID NO: 24679 - DNA, 65 bp, Mus musculus
cgggcctgaagaagcattagctgaacagaccgtcttcctttagttcttctctgtccatgtgggat

SEQ ID NO: 24680 - DNA, 65 bp, Mus musculus
caggctcaagacatcaaccaggaagcaactctctgctggtgctactcaattgtgatctgcctttc

SEQ ID NO: 24681 - DNA, 65 bp, Mus musculus
ttaagtgacttggccacagtcacaagctggggaggaccagggaaagcctagagagagctggctct

SEQ ID NO: 24682 - DNA, 65 bp, Mus musculus
gaagctggaaggccataatgaaccagtggtgttgcaggtatttgtgggcaatgattctggtcgag

SEQ ID NO: 24683 - DNA, 65 bp, Mus musculus
gaggagatcccacctgactggaggatagagaagacgtacctctacctgtgttatgtgtgaagggg

SEQ ID NO: 24684 - DNA, 65 bp, Mus musculus
tggctcatcctatgtacagaacggcacagggaatgcatatgaagaggaagccagcaagcagtcat

SEQ ID NO: 24685 - DNA, 65 bp, Mus musculus
cagaaggattccaagaccctgtcacaatgggagttgcataggaacccagtaaagcctcggtacct

SEQ ID NO: 24686 - DNA, 65 bp, Mus musculus
ggatgctgtaacactttatacaaaggtcatcccatgatgtagtgcctctctcatccactagtgca

SEQ ID NO: 24687 - DNA, 65 bp, Mus musculus
gactcaagcaagaggaacctggcctgatccctgactttggggaacccagatctttcctttgattt

SEQ ID NO: 24688 - DNA, 65 bp, Mus musculus
tctctattcctcccacttcttgttgccaaacttcgccgattctcaccactgctccctacttctgg

SEQ ID NO: 24689 - DNA, 65 bp, Mus musculus
caccggacacgcttcaccccagcacagctcaacgaattggagaggagcttcgccaagactcacta

SEQ ID NO: 24690 - DNA, 65 bp, Mus musculus
tgcagaaggtacctgcaccccctggatctccctgtcgacaacaggactctgccctgacccccacg

SEQ ID NO: 24691 - DNA, 65 bp, Mus musculus
cttcaagaggtacacaccaatactgaagtagattgctgtcaaaagtggggagaagtgtcttgcca

SEQ ID NO: 24692 - DNA, 65 bp, Mus musculus
gactggatctcagctgcagtgttttgaaagggataggatcaaatctctctccttacactttccag

SEQ ID NO: 24693 - DNA, 65 bp, Mus musculus
tgtgatgctgtacgaaacaaatgccgagagatgctgactttggccctgcaaactgaccacgacca

SEQ ID NO: 24694 - DNA, 65 bp, Mus musculus
cccggccctcgtctgagaagatcgccgccatcgccgagaaactggacctcaaaaagaacgtggtg

SEQ ID NO: 24695 - DNA, 65 bp, Mus musculus
tatgacattgtcagcctgtagctgatcttgcccctaactgtgaattgtcccagcatgacctaaaa

SEQ ID NO: 24696 - DNA, 65 bp, Mus musculus
cggacagaaggagagaaggacacacagaggagcaggagagaagcagccaagcgaagagcagagac

SEQ ID NO: 24697 - DNA, 65 bp, Mus musculus
ggggatgtgtctgggaagaagaacgagaaacctgtaaaagctgtgggaaaagatgcttcaaaaga

SEQ ID NO: 24698 - DNA, 65 bp, Mus musculus
ttggacatgattgcacatgagcgtgccttctgtagttttgtccctggacacatccttgggaaggc

SEQ ID NO: 24699 - DNA, 65 bp, Mus musculus
tgaattcttctggtgtagggaaagaccacacactgggaactccactcatgctagatgtccaggcg

SEQ ID NO: 24700 - DNA, 65 bp, Mus musculus
accacactaggatactgctttcttgggaagagacaggagagcagcctcatctctaccacagcaca

SEQ ID NO: 24701 - DNA, 65 bp, Mus musculus
aggagtgaacaagcgaaggcagacaaagtgccaagacggcggcgaaccatggcagaccctgactt

SEQ ID NO: 24702 - DNA, 65 bp, Mus musculus
ttaaggcaaagcagatgcttgtgggctgcgtaattggcacaactctatctaaggtgtttactagt

SEQ ID NO: 24703 - DNA, 65 bp, Mus musculus
aacacagcagcagaccagggcatacacactcgaccaagggacacacagacagacgaccaatacaa

SEQ ID NO: 24704 - DNA, 65 bp, Mus musculus
tggcatccagcagcagacgccggacgatgtctactcgcaggtgggtaccgtgagcgctgacacac

SEQ ID NO: 24705 - DNA, 65 bp, Mus musculus
aagcttctctcgctctgaccaccttgccctacacaggaaacgccacatgctagtctgaaaacctg

SEQ ID NO: 24706 - DNA, 65 bp, Mus musculus
cccgactacgagaagatccccttcatcaaagaagcagagagacttcggctaaagcacatggccga

SEQ ID NO: 24707 - DNA, 65 bp, Mus musculus
ggtctgccttttgtttgcccttgaagaggggtaagagtttgggagactacacttaagggagctcg

SEQ ID NO: 24708 - DNA, 65 bp, Mus musculus
ccataggaacatcctttcagcctcgagtacatacttccatcagctcttctcagttgctgggcaag

SEQ ID NO: 24709 - DNA, 65 bp, Mus musculus
ggaaatgggctggtcaagtggattacagagtaggaaatcacgtttgtatccttggcatctttaag

SEQ ID NO: 24710 - DNA, 65 bp, Mus musculus
acccagcaatatagaccaccagataaatcaactcaaatggacccctagaccagaggagtgaccct

SEQ ID NO: 24711 - DNA, 65 bp, Mus musculus
ggcttatggagtgaagagtaggttttctccaatgacgatcgatggaatgaccagtctggctggaa

SEQ ID NO: 24712 - DNA, 65 bp, Mus musculus
agccaactaacactgcatccttggacgaacggtgcccaagttcattttgctgtcctcttgactgg

SEQ ID NO: 24713 - DNA, 65 bp, Mus musculus
aaaccttctccagaatgtcgcttctgcataaacatgaggagtctggctgctgtgtggcacactga

SEQ ID NO: 24714 - DNA, 65 bp, Mus musculus
agtgcccaagtgtttggcaggggacagagacccaggttcacatcctcctcagatacccaggggat

SEQ ID NO: 24715 - DNA, 65 bp, Mus musculus
ccaggcgcttctggcgtaggccacactagttcatgatataccatgtaccgatctgtatctacgta

SEQ ID NO: 24716 - DNA, 65 bp, Mus musculus
ggcttatctctcagccagatatgcccaacactccttaatgtacctccagagccatcagcatggtt

SEQ ID NO: 24717 - DNA, 65 bp, Mus musculus
ctccccattccccaacctgtccaagaaggatctggacttaatgctcctagatgactccctgctcc

SEQ ID NO: 24718 - DNA, 65 bp, Mus musculus
taaagtaacactggcaactttgaaaatgtctgtacaaccaacagtttccctagggggctttgaaa

SEQ ID NO: 24719 - DNA, 65 bp, Mus musculus
tcaaagggtgtaggactccatactcagtgacagggcaggaagagccaaagataaccacagccaca

SEQ ID NO: 24720 - DNA, 65 bp, Mus musculus
tacttgacctgaaccaaaccccgagaaaaggactgtgtctgctctgttggtcgaattccccagtg

SEQ ID NO: 24721 - DNA, 65 bp, Mus musculus
cccgggaatggactagaaccaaggaccttgcgtacagaaggcacggtatcagttggaacaaatct

SEQ ID NO: 24722 - DNA, 65 bp, Mus musculus
aagcttgtcaaagactagccagccctcgacctccacaggatgcaaggcggacatcctccacacac

SEQ ID NO: 24723 - DNA, 65 bp, Mus musculus
aggtataaacgcgtccagcagaaacatcacctggagaacgagaagacgcagctcattcagcaggt

SEQ ID NO: 24724 - DNA, 65 bp, Mus musculus
caacgaaatcatctgtttcatcagcgaacacaatcaactcaaacacatcccatgatcccgtacga

SEQ ID NO: 24725 - DNA, 65 bp, Mus musculus
tgtacgacctgctgctggagatgctgaatgctcacacgcttcgagggtacaagtcctcaatctcg

SEQ ID NO: 24726 - DNA, 65 bp, Mus musculus
gcccttgcgaccacacccattctcactgtgaatctccctgctggggtcggagcattgggcacagt

SEQ ID NO: 24727 - DNA, 65 bp, Mus musculus
caagaaacacccggattttccaaagaaacctctcaccccttacttccgcttcttcatggagaagc

SEQ ID NO: 24728 - DNA, 65 bp, Mus musculus
tgaaggacccggagtgagacctccctcacgcctcagcgcactccagacagtttgggacttttgag

SEQ ID NO: 24729 - DNA, 65 bp, Mus musculus
gagctaggcagtgaagttgatatctctgaaggagacaggaagcctgactctgctgcttacattac

SEQ ID NO: 24730 - DNA, 65 bp, Mus musculus
gttgtttcatgtcctgtcaagaattcgtatagtacgagcctggatctacgtgtcaaactgttcca

SEQ ID NO: 24731 - DNA, 65 bp, Mus musculus
atccagtttgtcatcaagagacccgaactgctcactgacggtgtcaaagaacctgttctggacac

SEQ ID NO: 24732 - DNA, 65 bp, Mus musculus
gtattgttccgtgtcccttgttgctgaccactgtggtagcgttagaccataccaaagccggagga

SEQ ID NO: 24733 - DNA, 65 bp, Mus musculus
tcagtgtcaggggtgtcaagataggcgtcaaagctgatgatgctctggaggccaagggaaataaa

SEQ ID NO: 24734 - DNA, 65 bp, Mus musculus
ttataggacagagactcctgaatgaaggtggtccctgtggccaacagctggggacaggtgagaaa

SEQ ID NO: 24735 - DNA, 65 bp, Mus musculus
cctgaccagggctcggcgagtggaagttgccgctattctcgagctcaacgaaactcaagtgaaaa

SEQ ID NO: 24736 - DNA, 65 bp, Mus musculus
attcatgatcgaccgataccttcagcgacacgtgaagctcatccacacagaggtccgcaattaca

SEQ ID NO: 24737 - DNA, 65 bp, Mus musculus
gaacaggccactgtgacaatggtgtcatcagaggacatagagatccttgagcacggaggagagct

SEQ ID NO: 24738 - DNA, 65 bp, Mus musculus
tccaggcctcagctccagtccgcttcggttattgacctcctgggtcctactccaccctatcacct

SEQ ID NO: 24739 - DNA, 65 bp, Mus musculus
agtgggacctcctccaggcctttcagaatctgagcagagaggaccagatacgggcattaggtaca

SEQ ID NO: 24740 - DNA, 65 bp, Mus musculus
gtatcgccgctaaggatgctttggagagacactttagagagcacagcaaaccttcttcgcaggaa

SEQ ID NO: 24741 - DNA, 65 bp, Mus musculus
taagatcgcagcgcaaggcaggaggaggaagaaacggacttctatcgaagtagctgtcaaatggt

SEQ ID NO: 24742 - DNA, 65 bp, Mus musculus
cttaaagggattcaggaagaccacatagttgtctgccatgttctcctgccttccctatccacgtg

SEQ ID NO: 24743 - DNA, 65 bp, Mus musculus
agcagcaggcaatgcgacctccaatgccacctcatggtcagtatggtggtcatcatcaaggcatg

SEQ ID NO: 24744 - DNA, 65 bp, Mus musculus
agcgccatggctacttattctgccacatgtgccaacaatagccctgcacagggtatcaacatggc

SEQ ID NO: 24745 - DNA, 65 bp, Mus musculus
agtctattacctgggaaatgtgccagttgctaaacctgttggggtagacgtgattaatggggccc

SEQ ID NO: 24746 - DNA, 65 bp, Mus musculus
gaccttgttcccacaaatccattctgcagataagcacttttcaccctcgttgagtgggcaaacgc

SEQ ID NO: 24747 - DNA, 65 bp, Mus musculus
aaggctctggcgtttaaatggttaatctctgcaggtcactaccagccaccgagaccaaccgagtc

SEQ ID NO: 24748 - DNA, 65 bp, Mus musculus
tatgaccagtcttacccctcctatctgagccagttgacatccccatccatccactccaccacgcc

SEQ ID NO: 24749 - DNA, 65 bp, Mus musculus
gcaaggatatactgaatgctggcctcaatgtacaaattctgaatatggacttgtgccttgatctc

SEQ ID NO: 24750 - DNA, 65 bp, Mus musculus
agcctgtacaggaggacaacagcaaaacatctcccagatcccacagaagtgacggagagttttcc

SEQ ID NO: 24751 - DNA, 65 bp, Mus musculus
gctctgtgatgtgtcacatgtgctgacctcctctcttgtgcagattcctacacactcaaacaacc

SEQ ID NO: 24752 - DNA, 65 bp, Mus musculus
ccactgctctagaattcagccatgatagactggcttgtacttggtagtgaataggtcaggctgcc

SEQ ID NO: 24753 - DNA, 65 bp, Mus musculus
accctgtactcctctgcagcacctgggcctttgaatagctacctcgagggttaccgagcctgtct

SEQ ID NO: 24754 - DNA, 65 bp, Mus musculus
acgtgtcactggagcagctgaggtctcttctggagagacactactcacatcagatacggaaacga

SEQ ID NO: 24755 - DNA, 65 bp, Mus musculus
gctctcgcttcttcagctgctgctgtgatctcttgtgtagttgctctttgtgtcttagggttcag

SEQ ID NO: 24756 - DNA, 65 bp, Mus musculus
ttggatagtgatgacacatctctcagtaacctgggagactgcttcctggcaacctcagaagctgg

SEQ ID NO: 24757 - DNA, 65 bp, Mus musculus
tggtaccctagacctgaccttgattcgtgctcgcctccaagagaagctgtcacctccttatagct

SEQ ID NO: 24758 - DNA, 65 bp, Mus musculus
ataggtaatgcccagagacgaggatgccttgcctgaggtcacatgacagccaaatttcagcgttg

SEQ ID NO: 24759 - DNA, 65 bp, Mus musculus
atgctcatttgttgtagtgggcactctgccatctctcgcatcagcactcatcctttaccagtgcc

SEQ ID NO: 24760 - DNA, 65 bp, Mus musculus
tggtgggaaaacagcctcaggcaacagtctccttggaagagacccctgtgtgcctcagtattaga

SEQ ID NO: 24761 - DNA, 65 bp, Mus musculus
cgcgtgccttacactaaggtgcagttgaaagaactcgaacgggaatacgctacgaacaaattcat

SEQ ID NO: 24762 - DNA, 65 bp, Mus musculus
actttattcgaaccacatggttccagtttgtggcagcggtctctccgctcggctagaggagacac

SEQ ID NO: 24763 - DNA, 65 bp, Mus musculus
ccttgtgggagttccattctgtggcatgcaactgagcagggttagggaaacaggtgtcaagaatg

SEQ ID NO: 24764 - DNA, 65 bp, Mus musculus
gacttcagtccttgcagcttccagtccaaggcggcggtgtttggtgcctcgtggaacccagtgca

SEQ ID NO: 24765 - DNA, 65 bp, Mus musculus
agaccatggcactacccctccctgcgaagccgaggcattgtgaaatcctatttctcactttctct

SEQ ID NO: 24766 - DNA, 65 bp, Mus musculus
cctgccaaagcagtagcagaatttctcaaccgacaacattccgatcccaatgagcaagtggcaag

SEQ ID NO: 24767 - DNA, 65 bp, Mus musculus
tacaaaccccagatgtggaaacccggaccacattttgtgccactgtataagaggatgcacactgc

SEQ ID NO: 24768 - DNA, 65 bp, Mus musculus
gcagagagagtaccagatcagatccgctgaactgaacagtgcccttttcctgctgagattcatca

SEQ ID NO: 24769 - DNA, 65 bp, Mus musculus
ggaaactcttacactttgacactcactgtgtgcgactcatagcatgccgctctgcagtcttctgt

SEQ ID NO: 24770 - DNA, 65 bp, Mus musculus
gcctaggggacaggaaggggtgattgtagttggtaactaggggtcattttagctctgtgagagaa

SEQ ID NO: 24771 - DNA, 65 bp, Mus musculus
cttcctgatttgcaaggaactacctccacacttccaaaggaacgaacttgcagcctatatcactc

SEQ ID NO: 24772 - DNA, 65 bp, Mus musculus; identical to SEQ ID NO: 23716

SEQ ID NO: 24773 - DNA, 65 bp, Mus musculus
gtgcactgttgagaaaatagccagagtccatgctgggcttgatgtggctttaggggaccaatcat

SEQ ID NO: 24774 - DNA, 65 bp, Mus musculus
gtagaggtggtattgctgcctcttacgtgcttcaggtggatggcagatttggattctgtatggag

SEQ ID NO: 24775 - DNA, 65 bp, Mus musculus
tgtccactaaagatgtgatggtcaggagccagtgcctactgacggtacttcccggacacttacct

SEQ ID NO: 24776 - DNA, 65 bp, Mus musculus
accccagaaccacatccaacagcccaatgggtctcctccagaaagtagtgaagactccagaaaca

SEQ ID NO: 24777 - DNA, 65 bp, Mus musculus
acctcgagtctcaagtgctggatgaacaaacgtaccaagaggatgaacctaccatagcctcaccg

SEQ ID NO: 24778 - DNA, 65 bp, Mus musculus
ctggatggggtatgaattgccttttgaccgccatgactggatcatcaatcgttgtggcacagaag

SEQ ID NO: 24779 - DNA, 65 bp, Mus musculus
tccaagccacgtccaggaaaactgctgtcccgtgaccttcactggtccatcagctccaaagtaaa

SEQ ID NO: 24780 - DNA, 65 bp, Mus musculus
cctcccctacgtcctctctcttggctgctccatccaggagctacttacactcgccggatgtacat

SEQ ID NO: 24781 - DNA, 65 bp, Mus musculus
tgagcagcgatggttttccttcttgtcgctacacttcctacctagagggaaggcgttgctccctt

SEQ ID NO: 24782 - DNA, 65 bp, Mus musculus
aaccgctgcatccacgaggagaacccctactccacggctggcttattggccacccggagatgtcc

SEQ ID NO: 24783 - DNA, 65 bp, Mus musculus
gcctctgctcacacactttgcagatatcaacacgtttatggtgcaacagatcatcaagttcacca

SEQ ID NO: 24784 - DNA, 65 bp, Mus musculus
ttgtgaggcaggcatctcccaacaggccccagtaaagcctgggcttcaggaggtgctcaataaac

SEQ ID NO: 24785 - DNA, 65 bp, Mus musculus
cagccgtcagaaacaccttttccagtcatccaacctctcaggcttggacccatggagcccgcggt

SEQ ID NO: 24786 - DNA, 65 bp, Mus musculus
actctaatctggtaatggtgtccctaaggtaagtcctcgacccatccgtggcgagtcctgaagag

SEQ ID NO: 24787 - DNA, 65 bp, Mus musculus
agccttgtttgcactgtggagcctccttgggtgtcagtcttcatgatctagtctcagactccagg

SEQ ID NO: 24788 - DNA, 65 bp, Mus musculus
gcctagtttgctgttctagatctaccaaggcctaccttcttcagaccccatccctacctcttatg

SEQ ID NO: 24789 - DNA, 65 bp, Mus musculus
ttgccaaagtttctaggggtgcctgtgttcatccctgtcctgttctaactggctccctctacagt

SEQ ID NO: 24790 - DNA, 65 bp, Mus musculus
ccagtgagcagcatgttcagcagacacaagcacaagcacctagccagcctgaggtctttcaagaa

SEQ ID NO: 24791 - DNA, 65 bp, Mus musculus
cagccacctccactacagaaactccggcttctccagctcacacaactcctcagacccaaaataca

SEQ ID NO: 24792 - DNA, 65 bp, Mus musculus
tgcagaggaagggtttgaagggtgcacatttcaccaggcgaggtcactttgaaccggtgtgtaca

SEQ ID NO: 24793 - DNA, 65 bp, Mus musculus
gccgagagtctctcacaggttacagtcaaagaagagctacttcccgctgcagaaactaaagcttc

SEQ ID NO: 24794 - DNA, 65 bp, Mus musculus
agcaccattgtgatggcaaaccttaccgaacatcgtttacatggcagatgtctgtggcagtgtgg

SEQ ID NO: 24795 - DNA, 65 bp, Mus musculus
ggagctggactccaagagcccggacgagatcattctggaagagagcgactcggaggaaggcaaaa

SEQ ID NO: 24796 - DNA, 65 bp, Mus musculus
gatagtgtatcatccttatagacctttgctccagtatgtgcaggacatgggccaggaagacgtgc

SEQ ID NO: 24797 - DNA, 65 bp, Mus musculus
ttaatttcgggtgatgttggccagaggtatctgggagaacctaccctttctaggagtggctcctg

SEQ ID NO: 24798 - DNA, 65 bp, Mus musculus
tctcattgcccttttctccgaaatgctctatcgattccccaacatggtggtggcacaagtgaccc

SEQ ID NO: 24799 - DNA, 65 bp, Mus musculus
ctgccaccaaaggtggtttccaggttcccatgatccctgactatctgtttccacaacaacaggga

SEQ ID NO: 24800 - DNA, 65 bp, Mus musculus
gttaccctcaactaagtctctaatatggcaagaatggctagacacccattttcacatcccacctg

SEQ ID NO: 24801 - DNA, 65 bp, Mus musculus
tcctgaatgcgagccttgcattgtcaccctaagcgacagggccacttgatacagagtgaatttgt

SEQ ID NO: 24802 - DNA, 65 bp, Mus musculus
cgcaggatgatgccaaggactctgaaagtgccaacgtctcagataaggaaggtggtagtaatgag

SEQ ID NO: 24803 - DNA, 65 bp, Mus musculus
ctaaatgggcttcctgactgtcaaattgccttcccttgtcctgcacttcatatctcttgagggaa

SEQ ID NO: 24804 - DNA, 65 bp, Mus musculus
tgtccctcaggtagacttttcccgaaggaggaactatgtttgcagcttcccaggttgccggaaga

SEQ ID NO: 24805 - DNA, 65 bp, Mus musculus
aatgctcagaggacgacgacgaattgcccatgtctccatcttcctccgggaaggatgacagagat

SEQ ID NO: 24806 - DNA, 65 bp, Mus musculus
aatcacccagagtcctctcagctgttcgccaaggtgctccagaagatgacagacctcaggcagat

SEQ ID NO: 24807 - DNA, 65 bp, Mus musculus
aaacaagtggaaactcggacagcagatggtcggaggagaatcacgcctctttgcatagcacagct

SEQ ID NO: 24808 - DNA, 65 bp, Mus musculus
ggacattagggttcctagtggatgtgggtgaaggagcctaaagtgctggggtttggacacattta

SEQ ID NO: 24809 - DNA, 65 bp, Mus musculus
cctagctcagctccttctcattctttcccatatccggcacatgagtaacaaaggcatggagcatc

SEQ ID NO: 24810 - DNA, 65 bp, Mus musculus
ctggaaaagcctgcgttcttacagagaagcccaccttggctgcaagcacagcacagtgaggcaga

SEQ ID NO: 24811 - DNA, 65 bp, Mus musculus
atttccctagtcctggtgcttgggcatggttgaacctgcctctccaaggcccagaagcccttctt

SEQ ID NO: 24812 - DNA, 65 bp, Mus musculus
cagagcaaggaatgtgacttccagaccaagtttgcactcagcctgtctccaggtgtccaacagaa

SEQ ID NO: 24813 - DNA, 65 bp, Mus musculus
catgttacgtgatgaggatggaaagccttactctcccagtgaatactctctgcagcaaaccagag

SEQ ID NO: 24814 - DNA, 65 bp, Mus musculus
ctctggcttcttcaaagccacaccatttctagtccagctgtgcagaaacttcagatgaaaacagc

SEQ ID NO: 24815 - DNA, 65 bp, Mus musculus
ctccagtgaccacattcagtttctttcagtagcttcctctcctgagagggcagttacagcaggct

SEQ ID NO: 24816 - DNA, 65 bp, Mus musculus
aaggtcacctcactcagcaccactcaagaccaaatggaaacagaggaccagctcactcccaagaa

SEQ ID NO: 24817 - DNA, 65 bp, Mus musculus
agcgtgatcgccccactcagttcttgaaggtacacagaatagccttgaccttgtggcagaggaga

SEQ ID NO: 24818 - DNA, 65 bp, Mus musculus
ctgtcgccgtctagtaggagctgttttcagggtccttactcaatcggcttgttgtgatgcgtatc

SEQ ID NO: 24819 - DNA, 65 bp, Mus musculus
ccgaatcgggaatcgtggcggatttcgaagtcggggaggagtttcacgaagaacccaaaacctat

SEQ ID NO: 24820 - DNA, 65 bp, Mus musculus
tagaacctgttgtggctgcgtttcctggtggcagtgacaactgtgtaaccagaatagctgcatgg

SEQ ID NO: 24821 - DNA, 65 bp, Mus musculus
ctgtaagaagtgtaacaagactttccgacagcaggggacttggaagcgacacatgaaaacccacc

SEQ ID NO: 24822 - DNA, 65 bp, Mus musculus
cagccagatctcacagctggagcagcaactgaatgccaagaatagcacactcaaacaactggaag

SEQ ID NO: 24823 - DNA, 65 bp, Mus musculus
tgtgcctccagcttcaaggaagacaccaaaggcccgctcaacttgaacatggcagtgcaagtggc

SEQ ID NO: 24824 - DNA, 65 bp, Mus musculus
gccaagttgacagaggtgaaggatgagttagaacccttgttacagttggtggagaaaggggtcat

SEQ ID NO: 24825 - DNA, 65 bp, Mus musculus
ctgccgactggagggacgtgtcggagcttctcaagcctcttggtctctacgatctccgtgcaaaa

SEQ ID NO: 24826 - DNA, 65 bp, Mus musculus
cgcaagaggtctctccggataaggtgccttctgtaaacgagtgcggatttgtaaccaggctattt

SEQ ID NO: 24827 - DNA, 65 bp, Mus musculus
atatccgcctctcgcacccaggggactcactcctgtcttcagggccctcgtttgccagcaaagtc

SEQ ID NO: 24828 - DNA, 65 bp, Mus musculus
aaggatgcctctccacacttgtcctctctacccacctacgctggaaatccagttcttcaggaact

SEQ ID NO: 24829 - DNA, 65 bp, Mus musculus
agggaaatgagaggctgagtggagactttgggagagctttgaggaaaagtagccaccacacttca

SEQ ID NO: 24830 - DNA, 65 bp, Mus musculus
caggaaagtgcacaactggagcacgggcatttgtcatttagctccttccatccttggttgactag

SEQ ID NO: 24831 - DNA, 65 bp, Mus musculus
atcctaagcccatctctcccgacagcgtctcttacaccagcactcttttcacagactcccatctt

SEQ ID NO: 24832 - DNA, 65 bp, Mus musculus
gccaagaaaaccagaggggcccacgatagcacccccgtgattggaagggccaagagagcggaaaa

SEQ ID NO: 24833 - DNA, 65 bp, Mus musculus
cgtgaacgcagagaaggctgattttcctggacccattttcagtgctttgaggaacatgagtccag

SEQ ID NO: 24834 - DNA, 65 bp, Mus musculus
gccctgtgaagtgagaatgtctcttggaattaggcatttacagtagtcaaagggctatgcagctt

SEQ ID NO: 24835 - DNA, 65 bp, Mus musculus
cagggatgggttcagtaatgcccaggagaagatgtcatccagaggagagagcacactgcactcct

SEQ ID NO: 24836 - DNA, 65 bp, Mus musculus
ccctcggactagagtcactcactgttgttattgctgcaaaaggagtctgaaaggcagtattccac

SEQ ID NO: 24837 - DNA, 65 bp, Mus musculus
tggaagtccctacagccaccctcagtattcttcctacaatgattcttggaggttccccaacccag

SEQ ID NO: 24838 - DNA, 65 bp, Mus musculus
aggagagaaaacttctgtctaaattgtgggaccaagaagactagattctagtaggattgcagaga

SEQ ID NO: 24839 - DNA, 65 bp, Mus musculus
actgacagtgaaactaagtaggaccaggtgttaggaggcattgacatctctaggagttgcaagac

SEQ ID NO: 24840 - DNA, 65 bp, Mus musculus
agacctgacatgtacgacaactctggatctcacggacggtaccatcacctttaccaacaacctcg

SEQ ID NO: 24841 - DNA, 65 bp, Mus musculus
cagaagctttgagttgggagtagccacctcatcagctactgtcatctgtcctctaaggggcatta

SEQ ID NO: 24842 - DNA, 65 bp, Mus musculus
cttccgtgtgttactgaaagccgggaggaatttctccctttgaggtggacaggattctaagggga

SEQ ID NO: 24843 - DNA, 65 bp, Mus musculus
ttcccaagattcagagggctcaacgagctgtcaagacaagattgaggcttcaccgtctcctccaa

SEQ ID NO: 24844 - DNA, 65 bp, Mus musculus
ccaacttgaacatgcccggacttacaaaatgccaaggggtgactggaagtttgtggatatcaggg

SEQ ID NO: 24845 - DNA, 65 bp, Mus musculus
agctggcccttcagcacgtcctacagaagaaccaccgagaagatggaattctaaccaagctaata

SEQ ID NO: 24846 - DNA, 65 bp, Mus musculus
gtgaacgtagcagattagtgcgaggtggcatgcatataaggttaactgagtggggtacgctaatt

SEQ ID NO: 24847 - DNA, 65 bp, Mus musculus
ggagaagatgatgacggggtgtctgaggcccaggagactccagatcacgctattttccgctggct

SEQ ID NO: 24848 - DNA, 65 bp, Mus musculus
agatggtgttggcagacagcagacaagggccaagcaagtgtgcaatatggagacggggcttcaga

SEQ ID NO: 24849 - DNA, 65 bp, Mus musculus
acgcccacgatgagccacaccatgcagaccaccacccgcatccgcactctcacccacaccagcaa

SEQ ID NO: 24850 - DNA, 65 bp, Mus musculus
tgacacctggggactatgtggtgacagccagtgctgagggttaccatacagtcagacaacactgt

SEQ ID NO: 24851 - DNA, 65 bp, Mus musculus
cataccaaggtctgagtaagctcttagggagcccttctcagtgtctttgacaagcacagctggtg

SEQ ID NO: 24852 - DNA, 65 bp, Mus musculus
gaggttggattctgctacgaaagttatctgacatgagtcccagagtggaacttttaactcaggcc

SEQ ID NO: 24853 - DNA, 65 bp, Mus musculus
agtctcctctttattccccgcagaacaacatccctggaatccaaggaagcacttcttcaccccag

SEQ ID NO: 24854 - DNA, 65 bp, Mus musculus
atcttcaccgatgagcagctcgaagccctggagaacctcttccaggagacgaagtacccagacgt

SEQ ID NO: 24855 - DNA, 65 bp, Mus musculus
cgaccacagaacacaagtcatcaccctgaatgcacgggctctggtgcaagatctaattgctgtac

SEQ ID NO: 24856 - DNA, 65 bp, Mus musculus
gcgctcctacctcttcgtgtgcctgggtgaagaaacacaatcactgtttagttagtagcggaaca

SEQ ID NO: 24857 - DNA, 65 bp, Mus musculus
gccaaagtcctggaactaagtggtgataaggcaccctctctccataaccctcttgaaacacgaga

SEQ ID NO: 24858 - DNA, 65 bp, Mus musculus
gccgcagactacatttctagtgttagagaaacctgctttttgaggctattgtcctttgttccttc

SEQ ID NO: 24859 - DNA, 65 bp, Mus musculus
tcacctacagctgggatgtacctggagagatggggagtggttctccctcctgcccaggctggaat

SEQ ID NO: 24860 - DNA, 65 bp, Mus musculus
aatgctgaaggtagtcaaacacccctggatgccttccagcttccagctattgtgtctcaggagga

SEQ ID NO: 24861 - DNA, 65 bp, Mus musculus
aagaaattcgcgcggagtgaccacctctccaaacacatcaaagtgcatcgcttcccacgaagcag

SEQ ID NO: 24862 - DNA, 65 bp, Mus musculus
ttaccgtaccggtttttgtcaaggggccaatgggcgattaaacaggccggcgggtaaaggccggt

SEQ ID NO: 24863 - DNA, 65 bp, Mus musculus
tcacctttccctggatggagagtaaccgcagatacacaaaggacaggttcacaggtcacccctat

SEQ ID NO: 24864 - DNA, 65 bp, Mus musculus
tgtaagcactgtggtacagcttttagcagacttactcacttgcgattacatgagaaagttcatac

SEQ ID NO: 24865 - DNA, 65 bp, Mus musculus
tttcggcaaaggccaccagaatgcctacgcgctgccttccaactaccagccccctcttaagggtt

SEQ ID NO: 24866 - DNA, 65 bp, Mus musculus
gacagtgaaggctgtcctcagggacttctatgagtccatgtttcccataccttcccagtttgagc

SEQ ID NO: 24867 - DNA, 65 bp, Mus musculus
aggcaggcaatggccttcttcatatccatgcccccaaagatggagggggaaatgctcttggagat

SEQ ID NO: 24868 - DNA, 65 bp, Mus musculus; identical to SEQ ID NO: 23716

SEQ ID NO: 24869 - DNA, 65 bp, Mus musculus
cgacctggaccctagcaaccccgtggccaactggatccacgcccgttccacaaggaagaagcgct

SEQ ID NO: 24870 - DNA, 65 bp, Mus musculus
tgctgaagaggactgccaagaacagtgtggatctggaggactacgaggagcaggatcacctggat

SEQ ID NO: 24871 - DNA, 65 bp, Mus musculus
gagaaactctatgtttgtaacctgtgtaataaagctgtcactactcgtacttcccttcgaaatca

SEQ ID NO: 24872 - DNA, 65 bp, Mus musculus
ggagcatcagccagtgaacctgtttggattttccatcctgtagagtgcaaaacttgtgccagtgg

SEQ ID NO: 24873 - DNA, 65 bp, Mus musculus
gttcatccgtttgggcgtttttctgacttggaagaacattctctgtaggtttctaagtgtacaga

SEQ ID NO: 24874 - DNA, 65 bp, Mus musculus
ctctgtaactggctggcagcagcagcacctacataacatgccgccatctgccctcagtcagttgg

SEQ ID NO: 24875 - DNA, 65 bp, Mus musculus
agagctgagagtctgttttgaggatcctgagtgggagcagctgattacccaactcttgggaaagg

SEQ ID NO: 24876 - DNA, 65 bp, Mus musculus
cacagagtcaactcggcttcctctctacctccctcagacgctagtgtcctttcctgattctatca

SEQ ID NO: 24877 - DNA, 65 bp, Mus musculus
cacatcaatccctctctaagcaaaagcagctgtgagatggggcttccttctgaatagcactgcat

SEQ ID NO: 24878 - DNA, 65 bp, Mus musculus
cctccctcacctctgtttggtggactttgtgactctgaacttttctgctttggcaagaagacctg

SEQ ID NO: 24879 - DNA, 65 bp, Mus musculus
acagacacttcaagtacaacccaccggcctttgtgtcggtacaagggcggcccaacaaatagagg

SEQ ID NO: 24880 - DNA, 65 bp, Mus musculus
ccagagacatgaggattgcttgactccatgagtttgaagcagcctcagcaaacctagggaggttt

SEQ ID NO: 24881 - DNA, 65 bp, Mus musculus
ctaagatgaagatcttgctgctacagaggtgaaaacaagacctgtctggggtttgaccgtgtgcg

SEQ ID NO: 24882 - DNA, 65 bp, Mus musculus
taaacaccaccgagttcacgcccggaataaactgcaggaaagctaaacaatgggatggggaggag

SEQ ID NO: 24883 - DNA, 65 bp, Mus musculus
cttttccgttcaagtgctacaggccaagtaggctcaaactgtgggtttgtcttgggcatccacag

SEQ ID NO: 24884 - DNA, 65 bp, Mus musculus
acgtgtgagaaaacttctggatgccggtggtctagacagtgaagatgagatgaaggcacagatgg

SEQ ID NO: 24885 - DNA, 65 bp, Mus musculus
gctgtaatgtagcttcctgatgcttgactaattgaggtgttaattctgacttgagaatctttttc

SEQ ID NO: 24886 - DNA, 65 bp, Mus musculus
tcggaggactcctcaagctgccagaagatgctctggtgaaggccgaaagccccgagaaactagat

SEQ ID NO: 24887 - DNA, 65 bp, Mus musculus
ttcattctccctaaaggaggggtgcattctctgttcctccaactctccctgttcccacaccttgg

SEQ ID NO: 24888 - DNA, 65 bp, Mus musculus
gttccgctgcaaactctgctctttcaagtcctcctacaacagccggttgaagacacacatcctca

SEQ ID NO: 24889 - DNA, 65 bp, Mus musculus
acaagaatctcagagacaggcagcctaacagccttggttgctaggcacagaacacctggcttgct

SEQ ID NO: 24890 - DNA, 65 bp, Mus musculus
agaatcagaacccctgttaatgtggagtgtggtagatgctcggtgctgtggtgctctgaagacag

SEQ ID NO: 24891 - DNA, 65 bp, Mus musculus
ctttctgaatgggcacttctaagactacctgctaccgaaatgggggtgatcggaggctaatagga

SEQ ID NO: 24892 - DNA, 65 bp, Mus musculus
atctctgaagctagcctccacggaactggagcgcttgatcgtccccaacagcaacggcgtgatca

SEQ ID NO: 24893 - DNA, 65 bp, Mus musculus
gtgcggacgttttggctaaagacccgaaaatgttgcggagccagtctcagctagacctgtgcaaa

SEQ ID NO: 24894 - DNA, 65 bp, Mus musculus
tgcacattccagtcagttcagagcacccaagaatccttagcccaagcaagtgtcacctctcagca

SEQ ID NO: 24895 - DNA, 65 bp, Mus musculus
ataccacgctacacaggtcctctctgaatagcctgcaaacgaaactctggcccactgcagatcat

SEQ ID NO: 24896 - DNA, 65 bp, Mus musculus
ggagaatgctgaaggggaaggtagcagggcaaacaccccagactcagatgtaactgagaaaacag

SEQ ID NO: 24897 - DNA, 65 bp, Mus musculus
cgtcatttccacacctccatcttctccagaagtgaacagggaatcttctcaactatggggctgtg

SEQ ID NO: 24898 - DNA, 65 bp, Mus musculus
ccaagcctccgttaagctcctccactatgacatcacgcatcttgctacgccagcaactcatgcgt

SEQ ID NO: 24899 - DNA, 65 bp, Mus musculus
ggcttgctgtgaagtttacagtgcgtactgaagcatgtttcgcgagtaggtcaattggtgttggc

SEQ ID NO: 24900 - DNA, 65 bp, Mus musculus
ccctgtgatcccaggcttctgttctgctgtggctggctgaatccttcaaggtacagttgtacata

SEQ ID NO: 24901 - DNA, 65 bp, Mus musculus
gcagcctccacactttctggtcccctgacctctaccctcctctccaggttatttggcatggacca

SEQ ID NO: 24902 - DNA, 65 bp, Mus musculus
tgccactcagtcagatacaagagcagcagagtgtcgtctccaaagccctcaccaacaagactctg

SEQ ID NO: 24903 - DNA, 65 bp, Mus musculus
gctctgacagacagtgcctgttttcctcatgaaagtgccagtgcaagagttgtgagggaactagt

SEQ ID NO: 24904 - DNA, 65 bp, Mus musculus
gagaaatggaggagtctgctgcgcctggttttcagctttggtgaagatggatccaggcttcatct

SEQ ID NO: 24905 - DNA, 65 bp, Mus musculus
tgtgagcgaacggagccaaaaaagctgtcagttgaagaagtctctggaagcggcgggagactgta

SEQ ID NO: 24906 - DNA, 65 bp, Mus musculus
aaacagcaaacccttttacctccataacctgggtggttctggaagcttggaagaggagctgggac

SEQ ID NO: 24907 - DNA, 65 bp, Mus musculus
atcttcgctccaaagacccaacggtgccaaagccgccttagtgaagagcagtatgttctgatctg

SEQ ID NO: 24908 - DNA, 65 bp, Mus musculus
gtccgcacctgtcctacccggtggagactctgctagcttgacaggagctctgtgctcagcagaag

SEQ ID NO: 24909 - DNA, 65 bp, Mus musculus
gtgtctggtgccagaactggtttggaagctgttaacatggctgttttgcttgctgcacaattcgg

SEQ ID NO: 24910 - DNA, 65 bp, Mus musculus
accccaagatgcacaattctgagatctcgaagcgcttgggcgctcagtggaagctgctggacgat

SEQ ID NO: 24911 - DNA, 65 bp, Mus musculus
atttcctccgtggtgtccgacgctagctcagcggtctactattgcaactaccccgacatttgacg

SEQ ID NO: 24912 - DNA, 65 bp, Mus musculus
aagtatgtcgcagcagaagacagagttcctactgacttgtcactagcctggtgctgatgtcgtgt

SEQ ID NO: 24913 - DNA, 65 bp, Mus musculus
tgcatctcaggctagacactgtccttgccctccaccgcttctgcatgtggccaagtggcagagtt

SEQ ID NO: 24914 - DNA, 65 bp, Mus musculus
gaggtgcgcgacgaggtggccgagaaatgccagaagctgttcctagacttcctggaagagttcca

SEQ ID NO: 24915 - DNA, 65 bp, Mus musculus
tcttgaaaaggctccaggcttcggcttggaaaacccaaccgccaaaattgagcccagcagctgga

SEQ ID NO: 24916 - DNA, 65 bp, Mus musculus
ctgctaatactgaggacagagaaagcccttctgtaaaacgcatgaggatggacacatgggtgacc

SEQ ID NO: 24917 - DNA, 65 bp, Mus musculus
gcggcggatctcagctgccacgaacctttcggagagacaagtaaccatttggtttcagaatcgaa

SEQ ID NO: 24918 - DNA, 65 bp, Mus musculus
gagagcaagtactggcaagaccgttttcgtggtcttgtttaaggcaaacgttctagattgtacta

SEQ ID NO: 24919 - DNA, 65 bp, Mus musculus
tagaagaccatatctatcaagaactcaagagcacagacatgaagtaccggaaccgtgtgcgcagc

SEQ ID NO: 24920 - DNA, 65 bp, Mus musculus
ttttcgtctcctgagcatcggagcttggaactcagcagtttcacgtggtttccccaagagcgccg

SEQ ID NO: 24921 - DNA, 65 bp, Mus musculus
ttgccaggccaacctggaacatcccacgatgtgaaacctttctctcaaaacacctaccctgtcca

SEQ ID NO: 24922 - DNA, 65 bp, Mus musculus
gagacagtcactaaggatccggatccagcatcacaagctggagagtcattgtacctgaaagagaa

SEQ ID NO: 24923 - DNA, 65 bp, Mus musculus
aaaggtggaactgcacagccactcagatgtccctttccagatgctagacagcaatagcggtctga

SEQ ID NO: 24924 - DNA, 65 bp, Mus musculus
cctgaaccggaaagaagtgttgcggttagctgctgacaatagcaaggacccttatgaccctcata

SEQ ID NO: 24925 - DNA, 65 bp, Mus musculus
tatgaatgtcgcgtttcggactacagcgatgatgacactcaggagcacaaggcccaggcattgct

SEQ ID NO: 24926 - DNA, 65 bp, Mus musculus
ttcaacgtgtagtggctagtggctctgtgacgaaaactgtgactccaagcggtgtgtccctgcgt

SEQ ID NO: 24927 - DNA, 65 bp, Mus musculus
gaactttcagttcagagaggcagtctgtaggtagatgctccccctaccctcatcgtggttattgt

SEQ ID NO: 24928 - DNA, 65 bp, Mus musculus
tcacactggtattcctcaccacaccaggacaccatgcagagaccacagatgatgtgacttctctg

SEQ ID NO: 24929 - DNA, 65 bp, Mus musculus
tacgccaagatgatccagaagctggctgacctgcgaagcctcaatgaggagcactccaaacagta

SEQ ID NO: 24930 - DNA, 65 bp, Mus musculus
ttgcaggtttatagactggaccgagggcatagcgtgcagcttcctctacactggctggactttgt

SEQ ID NO: 24931 - DNA, 65 bp, Mus musculus
tctgtgtgacttgtgctttcctgttttacctgcatagtccacacttaagggcttgctttagccct

SEQ ID NO: 24932 - DNA, 65 bp, Mus musculus; identical to SEQ ID NO: 723

SEQ ID NO: 24933 - DNA, 65 bp, Mus musculus
gagagaatcgaatccgagaactgaccgccaacctcaccttttcttaggtctgaggcccatgtgag

SEQ ID NO: 24934 - DNA, 65 bp, Mus musculus
accaccttcaccaaccctctgttgcccctcatgtctgagcagttcaaggccaagtttccttttgg

SEQ ID NO: 24935 - DNA, 65 bp, Mus musculus
agtgcctttgctcgctctcggaatcccgtggcttcccccacgcagcccaatggctcagacaaaga

SEQ ID NO: 24936 - DNA, 65 bp, Mus musculus
cagggaatcccaatgcccactttcggaggcctctttccctacccgtacacttacatggcagcagc

SEQ ID NO: 24937 - DNA, 65 bp, Mus musculus
catcacgaagtcaggaaggcgaatgttccctccgtttaaagtgaggtgctctggactggataaaa

SEQ ID NO: 24938 - DNA, 65 bp, Mus musculus
tactgccctacctacaggggtctagcccaattcctgttacaccctaaggagttttgcgttgtagc

SEQ ID NO: 24939 - DNA, 65 bp, Mus musculus
taccctatgccactgctagagccttcaagatcatccgtgaggcgtacaagaagtacatcactgcc

SEQ ID NO: 24940 - DNA, 65 bp, Mus musculus
cgccgtctaacgctggcagccatctaccgcttcatcaccgagcgcttcgccttctaccgcgacag

SEQ ID NO: 24941 - DNA, 65 bp, Mus musculus
gggttgggctcatgtggtttgtgccctctatattccagaggtacaatttgccaatgtttctacaa

SEQ ID NO: 24942 - DNA, 65 bp, Mus musculus
ttaagttctctcctgttacggtggagaatggactggcttggccacaaccagaaagacaagtaaac

SEQ ID NO: 24943 - DNA, 65 bp, Mus musculus
agaatagacaagaaagagcttgtactgaactggctcgctcagggtgagtttgatcagggcgaagg

SEQ ID NO: 24944 - DNA, 65 bp, Mus musculus
atggcttgtttgagttctgtcagttgtccacgggaggctctgtcgcaagtgctgtgaagcttaat

SEQ ID NO: 24945 - DNA, 65 bp, Mus musculus
aagtctgtctcgctcagaccacttccaacatgtctccactctcaatgactctgatctccggtctg

SEQ ID NO: 24946 - DNA, 65 bp, Mus musculus
ggcagcttccagttaaccaaactgtaagaccctgtcaagcacgctcacagtcaatgccatcatct

SEQ ID NO: 24947 - DNA, 65 bp, Mus musculus
agtagattctggtggtcctaaagtcagaggtcaggtctgcatgcttgagcaggtggaggatttgc

SEQ ID NO: 24948 - DNA, 65 bp, Mus musculus
catcgccacatgagaaccattcgagaagtccgtacactcgtcacccgcgtcatcacagatgttta

SEQ ID NO: 24949 - DNA, 65 bp, Mus musculus
gcctgctagttttggaaccaccattaaagcctaagacatctcccttcagtcagccacctttcttc

SEQ ID NO: 24950 - DNA, 65 bp, Mus musculus
tatggctcgggctagtgatagtcaccttccaggacatacatggaaactggggccttgtggggacc

SEQ ID NO: 24951 - DNA, 65 bp, Mus musculus
atttgaccactctggactgttctgtaaagtgactggtaacagcagtgccttaccactgtagatat

SEQ ID NO: 24952 - DNA, 65 bp, Mus musculus
taatgttctcacctgagactagacagatggggttaccgcccatctccagagtaagggcctgttct

SEQ ID NO: 24953 - DNA, 65 bp, Mus musculus
gagaacctcgtgttcctggcacagaaactgttcaacatcagcagcaaccacctcgaggactacaa

SEQ ID NO: 24954 - DNA, 65 bp, Mus musculus
aggaagagtgggtacggcatttacagcggcacatcctggagatgaacttctccaaagcagaccct

SEQ ID NO: 24955 - DNA, 65 bp, Mus musculus
ttggatacagtgcagcagaactgaaccgtctggtcatagagtgtgaacagaagaaactggcacgg

SEQ ID NO: 24956 - DNA, 65 bp, Mus musculus
cctctacgtcagtattagctacgttagctgccttagctgaagcttctgccccattgtccaattct

SEQ ID NO: 24957 - DNA, 65 bp, Mus musculus
atttccagttgctgtgcatttacaagcaccccttagcctctcaaccagtggctacccctttggca

SEQ ID NO: 24958 - DNA, 65 bp, Mus musculus
aaccatcaacttcttccttacattcccacaactcgctggctggaacgcaaccccagcctctgtct

SEQ ID NO: 24959 - DNA, 65 bp, Mus musculus
ataacatgcaaacttgtgggaactatggatcggcctcagaggtgcaggcatccaggtactgctac

SEQ ID NO: 24960 - DNA, 65 bp, Mus musculus
gggacgtgaagagacaagcagcagccgctgtgcacccaggaaaaaccgtcaacaaatgtaaagat

SEQ ID NO: 24961 - DNA, 65 bp, Mus musculus
gctcagggatctacagacaagagaaggcaggaagattgcaagagccaaagggtgtcttcaaggaa

SEQ ID NO: 24962 - DNA, 65 bp, Mus musculus
actgggagctctcactttgcctgtgacaaacacacagaaccatcctagctgtatcttgcacgcag

SEQ ID NO: 24963 - DNA, 65 bp, Mus musculus
ctggctgggtttgcagggcagcaagagcactgcttaaaagttttccgatcgaagctttaatggag

SEQ ID NO: 24964 - DNA, 65 bp, Mus musculus; identical to SEQ ID NO: 23716

SEQ ID NO: 24965 - DNA, 65 bp, Mus musculus
agccagtctcctacaaaggggaatggaagatcctggcctctaagtcatagaccaaagtctgctgt

SEQ ID NO: 24966 - DNA, 65 bp, Mus musculus
gaagtcatacaagcaccacacttcacttaacgctatgtgcatgccctctgttcgcaagtccctgg

SEQ ID NO: 24967 - DNA, 65 bp, Mus musculus
agaggatgatctagtccagggctgacaagaatgagcattcttctcaaagtcccgacgaaatgaaa

SEQ ID NO: 24968 - DNA, 65 bp, Mus musculus
agccccacatcaaggaagagatccaggctgaggacatcaacggagagatttacgaggagtacgat

SEQ ID NO: 24969 - DNA, 65 bp, Mus musculus
tggaagcctatgacgactacgaagatgatcccaaatcagactatagcagcgagaatgaggcccca

SEQ ID NO: 24970 - DNA, 65 bp, Mus musculus
acctcctttgaaggaacataccaaacactgagctaacagactcttgtctgcccttggacacgtgt

SEQ ID NO: 24971 - DNA, 65 bp, Mus musculus
ggtagatctcttcttccgccctatcatgggagacgttgacatcactgaactccttgaagacatgc

SEQ ID NO: 24972 - DNA, 65 bp, Mus musculus
agaccctaggcaagctgtggcgcttgctgagtgaaagcgagaagaggccgtttgtggaggaggcc

SEQ ID NO: 24973 - DNA, 65 bp, Mus musculus
ccgaagaggcacggaacagactcacatctctcctaatgctatcttcaaggcgctgcaagccgact

SEQ ID NO: 24974 - DNA, 65 bp, Mus musculus
tccgaccccttctacttgcgtttttcgcaggagcagtatcatgaagcccgaaagcgacagatctg

SEQ ID NO: 24975 - DNA, 65 bp, Mus musculus
ctgcatcagtatccctaccactacttagcttgtatctaggtgtctacacaatggcctgaaccact

SEQ ID NO: 24976 - DNA, 65 bp, Mus musculus
actgatagccaacaacgccctctgactgcagctggttagcatttctcaggaaaagacatgggagc

SEQ ID NO: 24977 - DNA, 65 bp, Mus musculus
ctgtttatggggtcaaaaactcaggcttccagagcgtcgtgacatcttccccaatctgtccagaa

SEQ ID NO: 24978 - DNA, 65 bp, Mus musculus
cacatgggattgctcagacgaagcttcctgttactaagatgtcttcagtggaatagagtcattcc

SEQ ID NO: 24979 - DNA, 65 bp, Mus musculus
ctgcttctgtgatggttcttatcaccgtgtgttatccagcatggccaagagaaagtgcaagggtg

SEQ ID NO: 24980 - DNA, 65 bp, Mus musculus
gggtgtttctgtctaattgcaccttgtctgttgctgttagggaaaggacaatggtgggccttgat

SEQ ID NO: 24981 - DNA, 65 bp, Mus musculus
cccatctgcaatggtggtcacagataccagtagcatcaacactctcaccagcatgtcttccagta

SEQ ID NO: 24982 - DNA, 65 bp, Mus musculus
agaagttcgatggggacattaagcaagagcctggaatgtaccgggaaggacccacgtaccagagg

SEQ ID NO: 24983 - DNA, 65 bp, Mus musculus
cctccttgcagtcctgtatgctttgttcatgtccttgaagtgataagcagacaccatctgtgacc

SEQ ID NO: 24984 - DNA, 65 bp, Mus musculus
tctcagtccctcctgtccacagcaccatgcctggaacagtaacgtcatcctgttcccctgggaac

SEQ ID NO: 24985 - DNA, 65 bp, Mus musculus
tccagcctaggcggcctcaatttcccctggatggagagcagtcgccgctttgtaaaggaccgctt

SEQ ID NO: 24986 - DNA, 65 bp, Mus musculus
tgctccgtctgcccagcaaagtttgaccaaatcgagcagttcaacgaccacatgaggatgcatgt

SEQ ID NO: 24987 - DNA, 65 bp, Mus musculus
ggtgaagtgctataggtgtggtgaaactggtcatgtagccatcaattgcagcaagacaagtgaag

SEQ ID NO: 24988 - DNA, 65 bp, Mus musculus
taacctagtcatggcaaagaagatgtgacacgagggaccagtcccagagcagctacagaaagggt

SEQ ID NO: 24989 - DNA, 65 bp, Mus musculus
ctcttgtaaggaatgcgggaagtctttcagattgcgtcagaaacttgctctccaccagagtattc

SEQ ID NO: 24990 - DNA, 65 bp, Mus musculus
aaaagatccaagaagggcctccaacaggcaaattcagggagaggatggtttcagggaatatcagt

SEQ ID NO: 24991 - DNA, 65 bp, Mus musculus
gaaaggaaagcgcaagactctcaatgccagtgacgtgctgtcagccatggaagagatggaattcc

SEQ ID NO: 24992 - DNA, 65 bp, Mus musculus
atggctgtggatcccttatccagcaaagccctgaaggtcaagcgcgagttgagcgagaacacgcc

SEQ ID NO: 24993 - DNA, 65 bp, Mus musculus
ggaagacgtgcagtcagttgaagatgccaataacagcggcatgaacctattggaccagtcagtca

SEQ ID NO: 24994 - DNA, 65 bp, Mus musculus
tctggggacagtcctctcggtccacccacagagcaggcacttccttgggactgaagaaagtgttt

SEQ ID NO: 24995 - DNA, 65 bp, Mus musculus
gcacaccccaagtctggatgaggacgggatcaacttagaagagatccgggagtttgctaagaatt

SEQ ID NO: 24996 - DNA, 65 bp, Mus musculus
aacactgaccaacagcggcctccatcccctcactcacctaagctggcggagcaaactcaacccgt

SEQ ID NO: 24997 - DNA, 65 bp, Mus musculus
tctctatttccaaggaacatctagagtgcagataaggctggcgtgtgatagccatgtgtggtagc

SEQ ID NO: 24998 - DNA, 65 bp, Mus musculus
ggaacttgaaccccaaattgcttcagcaaaaccaaatgcagagtgaaggcagtgagagcctgagg

SEQ ID NO: 24999 - DNA, 65 bp, Mus musculus
ctttccagcttctcagcacccctacctgaaggtctgatgttgtcacctgcagctgtgccagtctg

SEQ ID NO: 25000 - DNA, 65 bp, Mus musculus
gagcccggaaagctgaagaccaacagtcagccgtttagactggatcccaaatcggctcatcgcaa

SEQ ID NO: 25001 - DNA, 65 bp, Mus musculus
ctgctggacgtgagtctggtcatccctacccaccctgctccatcctgcccacaagccagccctga

SEQ ID NO: 25002 - DNA, 65 bp, Mus musculus
agtctttacttgtagatcagcacttaatgtcccacgtgaaagtgcacacgagggagagaccttac

SEQ ID NO: 25003 - DNA, 65 bp, Mus musculus
ttgtgatagatgtgggcagagatttgcccaggccagcacgctgacctatcatgtccgcagacaca

SEQ ID NO: 25004 - DNA, 65 bp, Mus musculus
gtgaaaaaccttatgaatgtaaggaatgcggaaatgcctttagtcagagttcccaacttattaaa

SEQ ID NO: 25005 - DNA, 65 bp, Mus musculus
gtagtaatagaccactcacaggtttcacactagagaatcatgaacatgagaaacttgagaacagc

SEQ ID NO: 25006 - DNA, 65 bp, Mus musculus
tgtggcaaagccttcagcatgagcacacagctcaccagccatcagaggactcacacaggcgaaaa

SEQ ID NO: 25007 - DNA, 65 bp, Mus musculus
gagaaaaaccgtacatatgcagtgactgtgggaaagcaatgtcttcaaaagccaatctcaaagag

SEQ ID NO: 25008 - DNA, 65 bp, Mus musculus
gtgtgggaaatcatttaactttccatgtgaactaaaggtgcattatcagaatcacaccggagaaa

SEQ ID NO: 25009 - DNA, 65 bp, Mus musculus
caatgcagtaaagcctttgcatgtcatattcttctccacgtacacaaaatacagcatactggcga

SEQ ID NO: 25010 - DNA, 65 bp, Mus musculus
gtaaggagtgtgggaaggcttttattcgaggctcactacttatgcaacatcaaaggattcacact

SEQ ID NO: 25011 - DNA, 65 bp, Mus musculus
gagagaaaccttacaaatgtcaccactgcgggaaagcctttatctactcttcatcccttaaccaa

SEQ ID NO: 25012 - DNA, 65 bp, Mus musculus
cggtgtatgacacggtgtaaacactccttccgtgactacttgttctcagcaacaggatccatatc

SEQ ID NO: 25013 - DNA, 65 bp, Mus musculus
atgtcgtccagtggcaccctcagcaactactacgtggactcgctcataggccatgagggcgacga

SEQ ID NO: 25014 - DNA, 65 bp, Mus musculus
tgtgacatgtcctttctgtggatttcaaatcttagaacacatcaaaaaattcacaccggcgagaa

SEQ ID NO: 25015 - DNA, 65 bp, Mus musculus
ccttacgtgtgccaggaatgtgggaaatccttcggccagaagtccaatctcattgatcacgaaaa

SEQ ID NO: 25016 - DNA, 65 bp, Mus musculus
gtgaaaagccgtatgaatgtcaccaatgtggtaaagcatttgtatgttacagtcatctccaaata

SEQ ID NO: 25017 - DNA, 65 bp, Mus musculus
ccagtgtgataaatccttctatcagaagccacacctcacagagcaccagaaaacacatactggcg

SEQ ID NO: 25018 - DNA, 65 bp, Mus musculus
gagaaaagccgtataagtgtgatgagtgtggcaaggccttcagtcagagctcagatcttatgata

SEQ ID NO: 25019 - DNA, 65 bp, Mus musculus
tgactgtgggaagtcatttaattacccatcccaactgaaggtgcattgccatagtcacaccggtg

SEQ ID NO: 25020 - DNA, 65 bp, Mus musculus
tctcgctcaagcaggactcgtcccccgatcacgagaagagctaccactactctatgcactactcg

SEQ ID NO: 25021 - DNA, 65 bp, Mus musculus
agcctcattggtggcaaccactccaagccttgtgacaagcagtacggcaactaccctcacagtca

SEQ ID NO: 25022 - DNA, 65 bp, Mus musculus
agggagtcccagcttagtaacctcgcctctcttcttgaaccacaccggtctgccgctgctcagtg

SEQ ID NO: 25023 - DNA, 65 bp, Mus musculus
tgtgggaaagcttacagacagggtgcaaacctgactcagcaccaacgggtccacacaggtgaaaa

SEQ ID NO: 25024 - DNA, 65 bp, Mus musculus
gaaagaagccgtataaatgtgatcaatgtggtaaagactttggaagacacagtcgtcttaaaatg

SEQ ID NO: 25025 - DNA, 65 bp, Mus musculus
ttctatagccttcatgatcatgaaactattcatagaggagtgaatctctgtgaatgcaagcaatg

SEQ ID NO: 25026 - DNA, 65 bp, Mus musculus
tgcagtgtgggaaactattcactttccccagatcccttcacatacacgagcgatctcatagtgga

SEQ ID NO: 25027 - DNA, 65 bp, Mus musculus
gaatgtggcatgtcttttaccaagaaatacaatcttagaagccattcaagatttcacactggaga

SEQ ID NO: 25028 - DNA, 65 bp, Mus musculus
tgggcctaatctaggctagaggaagatgttgctggtctggtttactccctgtctgtagtacctgc

SEQ ID NO: 25029 - DNA, 65 bp, Mus musculus
caggggttcctccagatctagtgccgaatgactatgtccagattggtggtgatgggtgttgtcgc

SEQ ID NO: 25030 - DNA, 65 bp, Mus musculus
aagtcaccccagatttgttctgaccatcctggagctgagtgttcggccaagtgagttgaagggta

SEQ ID NO: 25031 - DNA, 65 bp, Mus musculus
cgtggtaaagcctttgctatatccagtcatctacaatgtcataaaagaacccatactggagcgaa

SEQ ID NO: 25032 - DNA, 65 bp, Mus musculus
acaatgcatactggagagaaaccctttcaatgtaaccaatgtgataaagcctttgtttataacaa

SEQ ID NO: 25033 - DNA, 65 bp, Mus musculus
aatcaatgtggtaaagcctttgcaacgcccagtcatctccaatgtcataaaagaacccatactgg

SEQ ID NO: 25034 - DNA, 65 bp, Mus musculus
gtgggaaaacctttattcaaccctcacgtcttacagagcatatgagaagtcatacgggagagaag

SEQ ID NO: 25035 - DNA, 65 bp, Mus musculus
agatttgcagcaaagccttcgtttatccctccttacttaaattgcatgagagatctcacactggg

SEQ ID NO: 25036 - DNA, 65 bp, Mus musculus
aaaagaagcaagactcggatgccgagaagctgaaggtgggtggctcagacgcggaggacgatgac

SEQ ID NO: 25037 - DNA, 65 bp, Mus musculus
cgattcaagtgttacctacctgtgtagccgaagtagtgtgcagtgaccgagacgtttctgaatac

SEQ ID NO: 25038 - DNA, 65 bp, Mus musculus
tgtggcaaggccttccattttccgtcagtactttggaaacacaagataagtcatacaggcgagaa

SEQ ID NO: 25039 - DNA, 65 bp, Mus musculus
gaaaccttacaaatgtaatcagtgtggtaaaggctttgcctatcatagaactttccaagtacata

SEQ ID NO: 25040 - DNA, 65 bp, Mus musculus
tgtgacaaatcttttactaggtgctcctaccttagagcacatcagaaaattcacactggtgaaaa

SEQ ID NO: 25041 - DNA, 65 bp, Mus musculus
caatgtgggaaaacctttcgaaaccagtccatcctgaaaacacacatgaactctcacacaggtga

SEQ ID NO: 25042 - DNA, 65 bp, Mus musculus
tcaatttaagccatcaaagtctctggggaacctctatgggcaatggaccttctgggcctctagag

SEQ ID NO: 25043 - DNA, 65 bp, Mus musculus
aagcgaactagcattgagaaccgtgtgaggtggagtctggagaccatgtttctgaagtgcccgaa

SEQ ID NO: 25044 - DNA, 65 bp, Mus musculus
tgtggcaaagccttcagtgtgtactcaagtttgactactcatcaggcaatccacacaggagaaaa

SEQ ID NO: 25045 - DNA, 65 bp, Mus musculus
ctgaggactgaggagaaagtggtagccgaaatggaagaacaccagcatcaggtccacaatgtgga

SEQ ID NO: 25046 - DNA, 65 bp, Mus musculus
gtgtaaaaaacccttcagcaatctttcagccctcagtagacacaaagtagttcataccggcgaaa

SEQ ID NO: 25047 - DNA, 65 bp, Mus musculus
aggaatgtggcaaagccttttatactctctcctaccttactcagcacaaattaggtcacaccggc

SEQ ID NO: 25048 - DNA, 65 bp, Mus musculus
ccccttgaccccaacaggttttcccaactgtctcatgcttttgtgaatctgtctgctttgatctg

SEQ ID NO: 25049 - DNA, 65 bp, Mus musculus
tgagtgtaaagaatgccgaatggcctttacccagagttcacatctttcccagcatcagagacttc

SEQ ID NO: 25050 - DNA, 65 bp, Mus musculus
cagaagaaaatccttacaagtgtgaagtatgtggcaaggcctttgattatccatcaaggctttcc

SEQ ID NO: 25051 - DNA, 65 bp, Mus musculus
ggcttgctgactaacgcacaactcctctttgggccttcagtccgcctaccagacctcatcatctt

SEQ ID NO: 25052 - DNA, 65 bp, Mus musculus
catacgaaggacaacctgccaggatactgttggccagaacgtcgtcgtgggagtgtggtagcctc

SEQ ID NO: 25053 - DNA, 65 bp, Mus musculus
ttctcagcagccaaccagtcaagcccaaattgtgcaaggtattacaccacagacaatccatggcg

SEQ ID NO: 25054 - DNA, 65 bp, Mus musculus
ggagaaaccttatgaatgtaatcaatgtggtaaagccttttcctgtcacaatagtctcatatatc

SEQ ID NO: 25055 - DNA, 65 bp, Mus musculus
atgtggtaaagcctttggaagacccgctcatctccaccgtcataaaagaacccatactggagaaa

SEQ ID NO: 25056 - DNA, 65 bp, Mus musculus
tggaaaggcattcagccatagcgcctatctcattgtacatcaaaggattcatactggtgagaaac

SEQ ID NO: 25057 - DNA, 65 bp, Mus musculus
gtgaaaagccgtaccaatgtaatgaatgtaataaagcctttttacagctcaggtatcttcgatta

SEQ ID NO: 25058 - DNA, 65 bp, Mus musculus
gtgagaaaccataccagtgtgaagtgtgtggcaaggacttccatgtttcatcatcactatctaaa

SEQ ID NO: 25059 - DNA, 65 bp, Mus musculus
tcacggtagtggtgtggctggggatagggtaggtcctgaggggacagggagcagtcagtgcctgt

SEQ ID NO: 25060 - DNA, 65 bp, Mus musculus; identical to SEQ ID NO: 23716

SEQ ID NO: 25061 - DNA, 65 bp, Mus musculus
tcacccatttcgcttccaagaccatttgtagtgagcgggtggatgctgtgctacgtgtgaaatct

SEQ ID NO: 25062 - DNA, 65 bp, Mus musculus
ggaacctcgaaaagtgagacgattctgggataagaaaccttccctgtttgaggacattggcttca

SEQ ID NO: 25063 - DNA, 65 bp, Mus musculus
ctgtacagaaaactactcatatggaagtggactgaatcctatgtagaaacatacactgaacattg

SEQ ID NO: 25064 - DNA, 65 bp, Mus musculus
tcagtcttcagaagagtttaaggttcttgaggtagcctgctcagggatggtttcctatgaaatcc

SEQ ID NO: 25065 - DNA, 65 bp, Mus musculus
cgcactctggacctgccctcttggagtctttgtgacttttccatttaaccctggacatgctatcc

SEQ ID NO: 25066 - DNA, 65 bp, Mus musculus
aacgactccatcttccacgatattgatagtgatacctccctcaccagcctcagcgactgcttcct

SEQ ID NO: 25067 - DNA, 65 bp, Mus musculus
ccacgttttacagcaagagcagtgtggatgagaagcgggtggactttcagagcagcaaggaatta

SEQ ID NO: 25068 - DNA, 65 bp, Mus musculus
tctcacatcgccagaggagagcacagagccatgttgaagtgagcatctgtcctcaatgcgagggt

SEQ ID NO: 25069 - DNA, 65 bp, Mus musculus
caccacctaacattgctaccatggcagtaccaactagcatatatcagactagcacggggcaatac

SEQ ID NO: 25070 - DNA, 65 bp, Mus musculus
gagtctatgctaatcatcgtggagaaaggacatcaagacgttgttcatcaaaccaagcagggcag

SEQ ID NO: 25071 - DNA, 65 bp, Mus musculus
ccgtacaggagcgcatgaggaaaagaatttccgggggccgaagcttttcccctatgggagaggta

SEQ ID NO: 25072 - DNA, 65 bp, Mus musculus
ggagttcctactgaggtcaagttcttgtctggggcttgggaatactgcctgtgtttggccattaa

SEQ ID NO: 25073 - DNA, 65 bp, Mus musculus
tagaaaatggtaggaagttggaagctctcttctcacttggtgccactcccagcaaggagcgctgt

SEQ ID NO: 25074 - DNA, 65 bp, Mus musculus
ccgatggagcttgacgaccctaagcgaactggatacatcaagactgagttgatttctgtgtctga

SEQ ID NO: 25075 - DNA, 65 bp, Mus musculus
ctacccacagaaagttgttcagatgagtctgacagtgagctgagccagaagctacaagacttaga

SEQ ID NO: 25076 - DNA, 65 bp, Mus musculus
caggagctctaagtttcccaatgctcccattcactctccagctgtcttcttcctgccttcatttg

SEQ ID NO: 25077 - DNA, 65 bp, Mus musculus
agccatacaccaagcagcagctgaacaacatgtcatttgctgaaatcatcatgggctataagatc

SEQ ID NO: 25078 - DNA, 65 bp, Mus musculus
accttacgaatgcaaagagtgcaggaaaggtttttcctccaagtcagagctcacttcacatcata

SEQ ID NO: 25079 - DNA, 65 bp, Mus musculus
gctccagtgactacaaggcatcacagagtagtagcatctactttgattctcccagactgcctgtg

SEQ ID NO: 25080 - DNA, 65 bp, Mus musculus
tgacgatactcaccctgtatgtcaagaagaacttgaatgtttgctcctcaccaagaatctgggag

SEQ ID NO: 25081 - DNA, 65 bp, Mus musculus
tcagcaacagctccaacttcatcacacaccagaggacgcacctgaaagagaagctttactgaagt

SEQ ID NO: 25082 - DNA, 65 bp, Mus musculus
aaggtgacacctgcacccttgtcccctccaccatcggcacccgctgctttaaagatgtacccgtc

SEQ ID NO: 25083 - DNA, 65 bp, Mus musculus
tgtaccctcagctgccttgcctgtgctggaaccattgagtccttccttctgtcagctatgctgtg

SEQ ID NO: 25084 - DNA, 65 bp, Mus musculus
ctccaccacagagttcacacgggagaaagaccatatgcgtgtacacagtgccctagaagtttcag

SEQ ID NO: 25085 - DNA, 65 bp, Mus musculus
cctgcagcatgactgggtgtcattgcattccacctgtagcattctgttgttgtttcttcgtttct

SEQ ID NO: 25086 - DNA, 65 bp, Mus musculus
tgatgtctcctggaagcagagcagaatgctcatgtccttgtcgagtctcatttcgtccatgtccc

SEQ ID NO: 25087 - DNA, 65 bp, Mus musculus
agcacaaatctggtaagtcacatagaagagatgctgcagacagcctacaacaagctccacgcgtg

SEQ ID NO: 25088 - DNA, 65 bp, Mus musculus
tgctggcaagtgaagtgggtgtgacgagccatgaggaccaggaagtgcccattagtcactcggtg

SEQ ID NO: 25089 - DNA, 65 bp, Mus musculus
agttctttgctgacctcccttgcagaagaaagcaagttccttgcagttatgcagtaggcggtagg

SEQ ID NO: 25090 - DNA, 65 bp, Mus musculus
cctcctacccctcagtattcatgaggtgtagcctctggacacagctgcttcgagccatagaacta

SEQ ID NO: 25091 - DNA, 65 bp, Mus musculus
tctacagtgacagctccaatggcagcttccagtccctgactcaaggttgtcccacatacttccca

SEQ ID NO: 25092 - DNA, 65 bp, Mus musculus
ggaggcagcatgactgtacttgcacttggaaacctactgaccaaggattaagcctgagaactgtg

SEQ ID NO: 25093 - DNA, 65 bp, Mus musculus
ctatgatatgggagctactcggtgtgacttcaccctcacaaagaccaacctggctaggataagag

SEQ ID NO: 25094 - DNA, 65 bp, Mus musculus
aaaacgcattccctatagcaaggggcagttgcgggagttggagcgggagtatgcagccaacaagt

SEQ ID NO: 25095 - DNA, 65 bp, Mus musculus
ttcagcatcagcgggttcatacgggtgccagacatcgcaattgacagatatgagagactttgttt

SEQ ID NO: 25096 - DNA, 65 bp, Mus musculus
ggaagattgtgcaaatgtaggtgggaataaagcagcagcctgccatggtagacataagcaatgtc

SEQ ID NO: 25097 - DNA, 65 bp, Mus musculus
agcgcaccaccttcacgcgctcacagctggacgtgctcgaggcgctgttcgcaaagactcgctac

SEQ ID NO: 25098 - DNA, 65 bp, Mus musculus
gcatgcagaggtcctatcccatgacctatactcaggcttcaggttatagtcaaggctatgctggc

SEQ ID NO: 25099 - DNA, 65 bp, Mus musculus
accccaagacacccatggagatgctctaccaccacgtgcaccgactcaacatgtcaggaccattt

SEQ ID NO: 25100 - DNA, 65 bp, Mus musculus
ttcgacaacatagagaacgaaccaccctttgagtttgtgtcctgagacagctcacatcgggtcgg

SEQ ID NO: 25101 - DNA, 65 bp, Mus musculus
aagcgctgagtcagcatctcgagtcggccttgcacaaacacagaacaatcacgagagcagcaaga

SEQ ID NO: 25102 - DNA, 65 bp, Mus musculus
atcaataagtgccacccctccgaaagccggcaagtgctgctgctgcagatgccactgaggcctgg

SEQ ID NO: 25103 - DNA, 65 bp, Mus musculus
atgtgctgtctccttgctggacactggacacactgaatctgggcttgcgtgtgctcgcttggagt

SEQ ID NO: 25104 - DNA, 65 bp, Mus musculus
ggggataaaatgctcttcttccatgcgacacttcctttcccatgaacacttgcagttgctaaggg

SEQ ID NO: 25105 - DNA, 65 bp, Mus musculus
acaatcagtgtcactcagcactttctgtctcctgagacctctgccctctctgctcagctctacca

SEQ ID NO: 25106 - DNA, 65 bp, Mus musculus
gctctccatcaccagggattgtgaactataccgagccctcaacatgcactacaacaaagcaaatg

SEQ ID NO: 25107 - DNA, 65 bp, Mus musculus
cgggacgctttattagatgggctactttctcttgctcagttttgggactacagtgttgtgctggt

SEQ ID NO: 25108 - DNA, 65 bp, Mus musculus
gctcgaaaccaaatgttcagcgttccagcaggaatttctgaggggtaacatatccagtagaatgc

SEQ ID NO: 25109 - DNA, 65 bp, Mus musculus
ggttgtgaggcaaagaaaaccatgtccagattcggaaactaaggatgagaccaaccaggtgttct

SEQ ID NO: 25110 - DNA, 65 bp, Mus musculus
cagaggatgacatttctgtcaagctcgatcatggcatcacgaggggaaggctgatagaggatgat

SEQ ID NO: 25111 - DNA, 65 bp, Mus musculus
ttagaactgatcgcaagcagacctgtgagtacacgagcctcctccaaaggcagattcctggcttt

SEQ ID NO: 25112 - DNA, 65 bp, Mus musculus
aaaaggatgcgttggacagtttggacacttcctgtgagcagggtcaagacttgcccagtgaacag

SEQ ID NO: 25113 - DNA, 65 bp, Mus musculus
tgtgacgtagcaatcttggttgctggaaaggctgtcagtatcagtagcaacatttaccaccaccc

SEQ ID NO: 25114 - DNA, 65 bp, Mus musculus
agctaccttgggaccctggaacatcaagccatcctctgcaccctaccagttcagctcagtatact

SEQ ID NO: 25115 - DNA, 65 bp, Mus musculus
cgtgccggttataaaccctatggatgtagcctgtgtgggaaggcattttaccgcaagtcacacct

SEQ ID NO: 25116 - DNA, 65 bp, Mus musculus
cgtgcagacccctgctgccttccaccagcatgttattgcatctctattccctaagcatttgtatg

SEQ ID NO: 25117 - DNA, 65 bp, Mus musculus
gatggctatggctacctggcgccacccaagtacctgcaatcggggttcctcaacaactcctggcc

SEQ ID NO: 25118 - DNA, 65 bp, Mus musculus
ctgccctcttcctgtgttagcccaaactgtgagttccattttctgttcggtgcagtagggagatt

SEQ ID NO: 25119 - DNA, 65 bp, Mus musculus
gcatgcattctcaagaggtcttgccaatcagccactgacaggaaaggcatccctgtggactggct

SEQ ID NO: 25120 - DNA, 65 bp, Mus musculus
atcaaggagatgagacccaaggtcagcagccacctcaacgtcggtatcgccgaaacttcaattac

SEQ ID NO: 25121 - DNA, 65 bp, Mus musculus
tcagaaccggatctactcgactcccttttattcgccacaggagaatgtcgtgttcagttccagcc

SEQ ID NO: 25122 - DNA, 65 bp, Mus musculus
ggtagggtgtggggtaaggttaaagtcacattaagtgaccagcttcaggatgtcttctgccagcc

SEQ ID NO: 25123 - DNA, 65 bp, Mus musculus
gaagagggcaagaccccaaaccagaaaatgcaattcaagctcttaaccaggctccttctagtcgc

SEQ ID NO: 25124 - DNA, 65 bp, Mus musculus
aaaatccttcgcctacagctcctgcctcatccggcatcggaagcgtcatccgaggaagaagcact

SEQ ID NO: 25125 - DNA, 65 bp, Mus musculus
taccgtttcgtatgtgacctgcagaacttgctgggcttcactccggaggaactgcatgccatcct

SEQ ID NO: 25126 - DNA, 65 bp, Mus musculus
cctagtgtcctagcctcagtttccccttctgtgattagagaggtgtctgtgagcacatccgtaat

SEQ ID NO: 25127 - DNA, 65 bp, Mus musculus
tatgagagcatggagcaattctctgtgagcgtggagcacgtggccgaaatgttgcgaaccatcga

SEQ ID NO: 25128 - DNA, 65 bp, Mus musculus
ttaggacggagaggagccttcctgctcagctattcactctgaacactagcactgggctcttaaga

SEQ ID NO: 25129 - DNA, 65 bp, Mus musculus
ttttatctgcttgagcacactgatcaaccactgacctgccttcttgcattgtcctgcagtgacgt

SEQ ID NO: 25130 - DNA, 65 bp, Mus musculus
gtgcatagtaacacagcaacagagcatattccaagccctgctaagaaagtgccaagactccctgc

SEQ ID NO: 25131 - DNA, 65 bp, Mus musculus
actccattccgaagccaaccttgatcagtcttccagcttcctcatcctgaatcggacatctgcag

SEQ ID NO: 25132 - DNA, 65 bp, Mus musculus
ggcgagaagaagttcagctgccccatctgtgagaagcgcttcatgcggagcgaccacctgacgaa

SEQ ID NO: 25133 - DNA, 65 bp, Mus musculus
cagggcactgagcatcaaggaacagcttcagcgggaacatcgcttcctaaagagacgtttggagc

SEQ ID NO: 25134 - DNA, 65 bp, Mus musculus
aaagacccgcctgccagatgaggatgacagaactctactgaatgactaccgagttccttcccctg

SEQ ID NO: 25135 - DNA, 65 bp, Mus musculus
agaacagtgacctcaagtattcaggtcaagacggcctctacataggtgtcagtctgtcctcccct

SEQ ID NO: 25136 - DNA, 65 bp, Mus musculus
ctggacacgtacacgcacgtgaacggctgggccaacggcgcctactcgctcgtgcaggagcagct

SEQ ID NO: 25137 - DNA, 65 bp, Mus musculus
tacgagttggagaaacgctttctataccagaagtacctgtccccggcagatcgcgaccaaattgc

SEQ ID NO: 25138 - DNA, 65 bp, Mus musculus
gcctacattggcacctgttgtacctaaattgggcaactctggagctccatcaagttcatcaggga

SEQ ID NO: 25139 - DNA, 65 bp, Mus musculus
gacagcgccagcccagcgagtgggccaaggcctgaaagaggtccagcacttccaggaacaccccg

SEQ ID NO: 25140 - DNA, 65 bp, Mus musculus
gcttctgatgccaagctaatggccagatctgcctctgaggactctttcctgggaccaatttagac

SEQ ID NO: 25141 - DNA, 65 bp, Mus musculus
gttctccccaatcaccattgacgggatgacaagtcttgtgggaatgaacatccctggtcacacag

SEQ ID NO: 25142 - DNA, 65 bp, Mus musculus
ccaccagcgtcatcacaatagtaaagtccaagacggatgctcggtcatagggacacgtgcagttg

SEQ ID NO: 25143 - DNA, 65 bp, Mus musculus
tcactggtaaaatgtatgaagatttgctagattcctgtagatcgctggtccctgtggacaaagtg

SEQ ID NO: 25144 - DNA, 65 bp, Mus musculus
tggagtcctgcgtccctggtaacctctaaccagcattcccagacaccagaggcagatagacaggt

SEQ ID NO: 25145 - DNA, 65 bp, Mus musculus
agctgccacctctgtctccggcacttgaaggaaaaggcctctgcttacatcaccctgacctaggc

SEQ ID NO: 25146 - DNA, 65 bp, Mus musculus
ggtcccctatcctcagcctccccatggttatctctcaacagaacccaggcttggcctcaatttca

SEQ ID NO: 25147 - DNA, 65 bp, Mus musculus
aagaagaactccatccccacgagcgagcagctcacggagcaagagcgtgccaaggagacagagaa

SEQ ID NO: 25148 - DNA, 65 bp, Mus musculus
aggcggtggaatgacgaccctgaagccagggagctcaacaaaacgggcaagttcctctggaatgg

SEQ ID NO: 25149 - DNA, 65 bp, Mus musculus
attttcaacaagttgcttttgagatcctttggaggccagagaccgagtcttgaactaggcaaggg

SEQ ID NO: 25150 - DNA, 65 bp, Mus musculus
catcgcggtaagaactgccttaggacctcttcggaactgaaatccagtaatgtccaagtgatggg

SEQ ID NO: 25151 - DNA, 65 bp, Mus musculus
tgagaagtgcctcagcgtagcctgcctagacaagaacgagctaagtgatcacctggatgccatgg

SEQ ID NO: 25152 - DNA, 65 bp, Mus musculus
accttttgcttttctcactaaccatactctcacatagctttcagatgctactcgactgcctaggc

SEQ ID NO: 25153 - DNA, 65 bp, Mus musculus
catcagtttggtcaaccagatatgtggcaaagtgtctggcaaacacggtggcatcgagaactgtc

SEQ ID NO: 25154 - DNA, 65 bp, Mus musculus
gtattaaggaagtaaccttgtgccttggatactcaaaactcgctccttttcctaccgagtagggg

SEQ ID NO: 25155 - DNA, 65 bp, Mus musculus
caccttggccctcccccaagtcaccccacatttagattgtgaggttccttcgttgtgttgatttc

SEQ ID NO: 25156 - DNA, 65 bp, Mus musculus; identical to SEQ ID NO: 23716

SEQ ID NO: 25157 - DNA, 65 bp, Mus musculus
tatcccatctgaactcctcgggctcggactatggcgccatgtcttgttctaccttgctttatggt

SEQ ID NO: 25158 - DNA, 65 bp, Mus musculus
agtcgagcccactcactcagccccagactcccaacgaatcaggtgatcggctcttagagacattg

SEQ ID NO: 25159 - DNA, 65 bp, Mus musculus
atgaaagttcatggtcgctcaccgccacccagctctggctacgactcggctataacgtctgctct

SEQ ID NO: 25160 - DNA, 65 bp, Mus musculus
tgcaggccaagacctcgcccagcccatgtttattcagtcagccaatcagccctctgatgggcaga

SEQ ID NO: 25161 - DNA, 65 bp, Mus musculus
aatgccttctgcctgcaaaggagtggcactgtccatactgatggcatgtcttcagatgtccctgt

SEQ ID NO: 25162 - DNA, 65 bp, Mus musculus
cccctctcctgccctgagaactccatccagggctattgattgaactgatggtatgtttgagttgt

SEQ ID NO: 25163 - DNA, 65 bp, Mus musculus
tgtcctctgtgccttgtgtgatgtgggcagtgttaacagggtctgcatgtgtacaggatgcctta

SEQ ID NO: 25164 - DNA, 65 bp, Mus musculus
cacatcactttgttccctacataccaaagacggagtccatggcttaatgggcaccattcttgcct

SEQ ID NO: 25165 - DNA, 65 bp, Mus musculus
cccccataaagtgtgaggacattaacactgaagagtacagtaaagacacctccaaaggcatgggg

SEQ ID NO: 25166 - DNA, 65 bp, Mus musculus
gcctgaaagggaccaagcagctcactacactatcacgttacactaagagttggaacactaacacc

SEQ ID NO: 25167 - DNA, 65 bp, Mus musculus
agaaatgctgaaggtggagacagattgtcctcaggctgggtagtcttaatgacagaggcactggg

SEQ ID NO: 25168 - DNA, 65 bp, Mus musculus
gctcttgtgagtatgaacgttttctttgagctaatggtgatgtggtatgcagaggtaccaggggc

SEQ ID NO: 25169 - DNA, 65 bp, Mus musculus
tcctaacgcagtgtcaccttccagtggctcctcgctcacttcggactccatgtggagaccgtggc

SEQ ID NO: 25170 - DNA, 65 bp, Mus musculus
ccggccatgatgaatggacaggggagcacgactgcttcaagcaaacacattgcctataactgttg

SEQ ID NO: 25171 - DNA, 65 bp, Mus musculus
gtgttttgctgtctcctagtgctttgctcctgaagtggatgtgtctttgggaactggcccattgt

SEQ ID NO: 25172 - DNA, 65 bp, Mus musculus
ctagaagcatgtgaagatgcccaagagcctggagacattgccatccttcctacagaaactgtttc

SEQ ID NO: 25173 - DNA, 65 bp, Mus musculus
aagaaactttatagatgtgaggtgtgtgacaaatggtttactctgtcctcaagtctcagcagaca

SEQ ID NO: 25174 - DNA, 65 bp, Mus musculus
ctgaagaagagtctcatgcagacggactcaaaagaaccgtcatccccatgattcctgccaataag

SEQ ID NO: 25175 - DNA, 65 bp, Mus musculus
ccctttcttgctaggctttcttaggaacagggatcaaattacacctgtccctcactcagtgccca

SEQ ID NO: 25176 - DNA, 65 bp, Mus musculus
agaaaatccaggacggacaagttttcgagggaatagtggtgacgagtgaagccagcgaatgtccg

SEQ ID NO: 25177 - DNA, 65 bp, Mus musculus
tcagccacttgtgtgaagtctttgatattggccctcaccttgctcagccagtaggaaggcccaca

SEQ ID NO: 25178 - DNA, 65 bp, Mus musculus
tatgatccactttccaagcgctggtctccacttcctcctatgggaaccagaagagcgtatcttgg

SEQ ID NO: 25179 - DNA, 65 bp, Mus musculus
acgtgtggcaagttgccctcaacagtgaaacatcaaaggagttggctggaatagggaatacttgc

SEQ ID NO: 25180 - DNA, 65 bp, Mus musculus
tggagatgattggaaatgcaagggactccttgagacaaaacggggaatctacagagggaatattt

SEQ ID NO: 25181 - DNA, 65 bp, Mus musculus
gaaagtagagttgacagtaatagagcaaggaattctccaagaatgggaaatgcaccttaagacaa

SEQ ID NO: 25182 - DNA, 65 bp, Mus musculus
aaagaattcatactggcgagaaaccctacaaaatgtggaagtgtgtggcaaagctttttaacctg

SEQ ID NO: 25183 - DNA, 65 bp, Mus musculus
tgtcgaggcaataggaacttctctttcagctcccgctgccctaaaatgtctcacgacgttcacag

SEQ ID NO: 25184 - DNA, 65 bp, Mus musculus
ccatttatgctcccaggaggaaaatgctatacgtgcacagagtgtggcaaaatctttgagtggaa

SEQ ID NO: 25185 - DNA, 65 bp, Mus musculus
aaagacaacagtcttgggatgtgaaacaacaagcaacagtggctacatacccaggaacaaaaccc

SEQ ID NO: 25186 - DNA, 65 bp, Mus musculus
tggacagaggagaagattccagaagcccaaaccactcctgcgttgtgtaaggaccggaggacaat

SEQ ID NO: 25187 - DNA, 65 bp, Mus musculus
accgagacagtatgccgcagtcagcatcacaactaatcaggctgctccatcaccagttatgacaa

SEQ ID NO: 25188 - DNA, 65 bp, Mus musculus
tgactcatcagccgcagatagacacaaaagtatgcacaccggagaagacacttgccaatctaaag

SEQ ID NO: 25189 - DNA, 65 bp, Mus musculus
atgaccagagagaccacctgagctcaaaactgattcggcgtcaaagcgttcctaccggagagaac

SEQ ID NO: 25190 - DNA, 65 bp, Mus musculus
attcatgacatcaaaacatcggcttttcccttgagactcaggagggccaaagcaccagcctttgg

SEQ ID NO: 25191 - DNA, 65 bp, Mus musculus
catcagggctctgagggccaaagaagcaatgggagtcctgagctagtatagctgtgtcacttatt

SEQ ID NO: 25192 - DNA, 65 bp, Mus musculus
ccttccacgaagagcactccagactcagaactcagaagttgtgaaagatgatgaaggcaaagaag

SEQ ID NO: 25193 - DNA, 65 bp, Mus musculus
tgtgccttcagtacttcgtggagcctatgatgctcgactgcggccacaacatctgttgcgcgtgc

SEQ ID NO: 25194 - DNA, 65 bp, Mus musculus
gcacaccatgtccacaacaacgagtttgagaacttccctgagaaccacttcacagagctgcagag

SEQ ID NO: 25195 - DNA, 65 bp, Mus musculus
tgctacccatcaggaaacccatcacaaggagaaacccttcactcaaagtggtcctattcagcagc

SEQ ID NO: 25196 - DNA, 65 bp, Mus musculus
atctgatgacctctcacagtgctcagtgagccttttgcccaccacggactgctcagcctgcttct

SEQ ID NO: 25197 - DNA, 65 bp, Mus musculus
aaatgtgaggcagcttttgctacgaaggatcgcctccgagcgcacacagtccgacacgaggagaa

SEQ ID NO: 25198 - DNA, 65 bp, Mus musculus
ggtgaggcctgacccaatgctacttctcttcgcattgcttttcctgaaggatctggctgcaaaga

SEQ ID NO: 25199 - DNA, 65 bp, Mus musculus
ggacttcgccagcaagccgtcgttcctctcgcagccgtcctcgtgccagatgactttcccctact

SEQ ID NO: 25200 - DNA, 65 bp, Mus musculus
ccattgtacacttcagcgacgtgagcagcgatgatgacgaggacaggcttgtcatagcaacctaa

SEQ ID NO: 25201 - DNA, 65 bp, Mus musculus
gtgcaaagtaagggagttcaaatgcttgtgccatggccactacattaccagagcttctcatcttc

SEQ ID NO: 25202 - DNA, 65 bp, Mus musculus
cgttttgggcaaacagctaattgagagtgcagatgaagttcccagaaaatctctggtcctgaagt

SEQ ID NO: 25203 - DNA, 65 bp, Mus musculus
agccttgcacctaattggtccctgctggtccttgggcttcaggacttcacctccaaagctcccac

SEQ ID NO: 25204 - DNA, 65 bp, Mus musculus
tgcagtgtgttcagggttagcgcccatgaaaggggaccgagtgtatgacaatctgcgttgatcat

SEQ ID NO: 25205 - DNA, 65 bp, Mus musculus
ggaactctgtcatctccatacatttggggttagagttttttcttgtaatttagctttgttggaat

SEQ ID NO: 25206 - DNA, 65 bp, Mus musculus
tacagcagactgaggaccaaatcccgtccaaccttgaaggaccttttgtgaacttactgcctccc

SEQ ID NO: 25207 - DNA, 65 bp, Mus musculus
acactcaatgtcctactctatgagacccctcgagtccctgacaattccttactggaggccacaag

SEQ ID NO: 25208 - DNA, 65 bp, Mus musculus
tgaaaacactaaagtactggaaaatgctgcaaatatcaagaaatgttctgataggaccttgaccg

SEQ ID NO: 25209 - DNA, 65 bp, Mus musculus
tgtcagtcactaagtccgtccttcagtgcacgtctgaacagcctgtccctcctactcttacatag

SEQ ID NO: 25210 - DNA, 65 bp, Mus musculus
tcttcaagatcacacaaagccacctaagctggtacttcagcccagagacagaagaactccagcgg

SEQ ID NO: 25211 - DNA, 65 bp, Mus musculus
gaagacgatggacagtgtggagaacccttgccttttctggtggaaggtgaagagggcttcttaat

SEQ ID NO: 25212 - DNA, 65 bp, Mus musculus
agcttcccactcacgtccacccgtacagctgatccatcacaaggcaaaactgggtcctctataaa

SEQ ID NO: 25213 - DNA, 65 bp, Mus musculus
aaatgaccctctatcccaggacctgagagtcctgctcagtccttcagggaggcaggaagggttag

SEQ ID NO: 25214 - DNA, 65 bp, Mus musculus
tttggtaactcgttcccttatacctccttgattgaataccttacagcctagacctcagtacaaaa

SEQ ID NO: 25215 - DNA, 65 bp, Mus musculus
tgagatctccaagcgcctgggccgccgctggcagctgctgcaggactcggagaagatcccgttcg

SEQ ID NO: 25216 - DNA, 65 bp, Mus musculus
cacacatgttcatcacgccactcttggcagaaggcatttgctgagtgtcactgtgagccaggcac

SEQ ID NO: 25217 - DNA, 65 bp, Mus musculus
tgtcgcctacatcctcttcccaggcatgaccaagactggcatagacccttattcgtcagcccacg

SEQ ID NO: 25218 - DNA, 65 bp, Mus musculus
ttgacaaacttttcctggacaccttacctttctaagaccttctcccaagcacgtcaaagaactgg

SEQ ID NO: 25219 - DNA, 65 bp, Mus musculus
aggttatttggaagtgctacccaatggtgcctcgtcccatgcatcctcaaatgatgcctcttcca

SEQ ID NO: 25220 - DNA, 65 bp, Mus musculus
gtcctttctgtagctatgcttgtagaagaagggacgctctcacaggacacctcaggacccattct

SEQ ID NO: 25221 - DNA, 65 bp, Mus musculus
ctatgctgcaaacaaactgcaaagtcagggagaatatgatgatgatttcagctctgtgtacagtc

SEQ ID NO: 25222 - DNA, 65 bp, Mus musculus
gccagaagattgtaactgaaccgtcaactgttctgcccttggaacatgcctactttaagcacacg

SEQ ID NO: 25223 - DNA, 65 bp, Mus musculus
tagagctacagccacaccaaagtcaggaggtgacccttgcaggagcccttcttgagtcctgggtc

SEQ ID NO: 25224 - DNA, 65 bp, Mus musculus
tttatacctcatagcgcatcgtttggtcactctgtggctaagcaccataaatcagccaaacattt

SEQ ID NO: 25225 - DNA, 65 bp, Mus musculus
catgactgaacaagcgagaagatatctgagtacttacacagctaccagcagcacatcaagagctc

SEQ ID NO: 25226 - DNA, 65 bp, Mus musculus
ttggaccatgtcctaacctgaaacaatgctgagcccgagacaaactggtgactcagacttgccac

SEQ ID NO: 25227 - DNA, 65 bp, Mus musculus
gtccgacgacgagttcgaagacgacctgctcgacctgaaccccagctcaaactttgagagcatgt

SEQ ID NO: 25228 - DNA, 65 bp, Mus musculus
ccacgctctttcagcacaagaagatccatactgggaagaaatcccataaatgtgccgattgtggg

SEQ ID NO: 25229 - DNA, 65 bp, Mus musculus
gcggcgagaagcagtacaaatgcactatctgtaacaaggccttccatcaggtctacaatctgacc

SEQ ID NO: 25230 - DNA, 65 bp, Mus musculus
tccttatgacaaggatttctccaggcaccctccttcagagtctgagatgctgggacagaaagtag

SEQ ID NO: 25231 - DNA, 65 bp, Mus musculus
aaggtgctctatcgcctcaagtgagcccattgcccatcaaccctcaagcctgaaatgctgccacc

SEQ ID NO: 25232 - DNA, 65 bp, Mus musculus
ccaagaggttcctccagcctccacagagttcccaaagtctcatgttccctgtaccaccaggagga

SEQ ID NO: 25233 - DNA, 65 bp, Mus musculus
ctgcagtgagggcattcagttcctcctaccacctcaacaggactttgtccactctactcttacct

SEQ ID NO: 25234 - DNA, 65 bp, Mus musculus
ttgtgattcctgtggggacaagttcctggatgccaatagcctagcccagcatgttcggatccaca

SEQ ID NO: 25235 - DNA, 65 bp, Mus musculus
tcagttacagctcgcaacttgctcggcaccagaaagtccatataaccgagaaatgctatgaatgc

SEQ ID NO: 25236 - DNA, 65 bp, Mus musculus
gcttgtaagactgacaatcttccctctgtctcaagactctctgaacagcaagaccccaatggcac

SEQ ID NO: 25237 - DNA, 65 bp, Mus musculus
ccatcgttcgagccttacctgttgccggaactgaccagatatgactgtgaggtgaacgtgcccgt

SEQ ID NO: 25238 - DNA, 65 bp, Mus musculus
cgccctccaatagtcaagaactcaaaggtcagtatcatcggggctatggtccaccacatggacac

SEQ ID NO: 25239 - DNA, 65 bp, Mus musculus
tttgaaggtcatctgctgctcagatcccatggtgagtaatcgtgctgaccatacacctacagcag

SEQ ID NO: 25240 - DNA, 65 bp, Mus musculus
gcagagagacacagaacatgtttgaacttctgagaaccttccaggcagtgtttacatattggtgt

SEQ ID NO: 25241 - DNA, 65 bp, Mus musculus
aaggaagatcagcctgaggaagatggaaaggaaggtcagtgtaaggaagatgggaaggaaggtca

SEQ ID NO: 25242 - DNA, 65 bp, Mus musculus
acatcaggttcagcagcctgtccactttcatcgcgcacaagaagtattactgctcttctcacgcc

SEQ ID NO: 25243 - DNA, 65 bp, Mus musculus
tcttgagtgctgaggcttcggtctgacttgcagccgctgcagagataacgcctgagtcctgaatt

SEQ ID NO: 25244 - DNA, 65 bp, Mus musculus
tggagttggccacagcaggcaagatgattctccagacatcatgcctagaggcctatcttttgggt

SEQ ID NO: 25245 - DNA, 65 bp, Mus musculus
gtggaggaaacgcagatgtcctgaaactgttgctgaacaaaggagccaaaatcagtgccagagac

SEQ ID NO: 25246 - DNA, 65 bp, Mus musculus
tacgtagacgggtaaatggcccaagtctcttttgttggatgctccagctgaatcagaaggggcct

SEQ ID NO: 25247 - DNA, 65 bp, Mus musculus
catgtaatcgactacatcagggacctgcagctggagctgaactcggagtctgaagtcgggaccac

SEQ ID NO: 25248 - DNA, 65 bp, Mus musculus
ggatcttctgtctgtggtaggacggggaagtaagagagaccaagatggggtgtgatataccaact

SEQ ID NO: 25249 - DNA, 65 bp, Mus musculus
ggtcatcagcgatgagatggtacagaacttccaggaagaagcctgctttattctggacacgatgg

SEQ ID NO: 25250 - DNA, 65 bp, Mus musculus
ctatccacttggaatgggctggtgtctggaatggttgtggcctaatcccactctccttagagtaa

SEQ ID NO: 25251 - DNA, 65 bp, Mus musculus
aacacgtccatcgcggcgccggagaaggcctctctggaagcctacttcgccatccagccaaggcc

SEQ ID NO: 25252 - DNA, 65 bp, Mus musculus; identical to SEQ ID NO: 23716

SEQ ID NO: 25253 - DNA, 65 bp, Mus musculus
agacagaaggtgccctttgactagcctagaacactaactcacacagcatcaacagccagcagcac

SEQ ID NO: 25254 - DNA, 65 bp, Mus musculus
agaacacctgccttgcctccaggctctgcctcctgccagatgacagttgggtctcgcttctcata

SEQ ID NO: 25255 - DNA, 65 bp, Mus musculus
ttttacctgatgttgcgtccacctgagccatcccttaactccaggaagatgagaagaccggagag

SEQ ID NO: 25256 - DNA, 65 bp, Mus musculus
ttcctaaacttggagcccatccctggggccttggacgctttgcgagagatgaacgacatgaaaga

SEQ ID NO: 25257 - DNA, 65 bp, Mus musculus
ggcaagtcttggcttaacgcctgtttgtatgcccagcattcagctgttttactcaaagctaggca

SEQ ID NO: 25258 - DNA, 65 bp, Mus musculus
ttacgctccaagtttctgccttcgcctaccagctagaggagttaatggcgcttctggaacagaag

SEQ ID NO: 25259 - DNA, 65 bp, Mus musculus
ggcactgaggacatcacttctccacacggcatcccgttggatctgctagacagggtgatgatcat

SEQ ID NO: 25260 - DNA, 65 bp, Mus musculus
gctgcgttcagattcatgagtgaaaggaaacattgcatttgttggctgcatgatctttgaagggc

SEQ ID NO: 25261 - DNA, 65 bp, Mus musculus
cttatggtcgagaccttaaagtacatcagagtattcacaatcttgagaaaccgtaagaatgtggg

SEQ ID NO: 25262 - DNA, 65 bp, Mus musculus
gagagacttcagacacagtaaatgacgttgggtatcaagcccctacgaagataacaaaagaagag

SEQ ID NO: 25263 - DNA, 65 bp, Mus musculus
gtgggcctcatggacttggtcttgttagtctaatgaaagccagacttcaaagagacaaggcaacc

SEQ ID NO: 25264 - DNA, 65 bp, Mus musculus
aacattcaccctactgggagtggccctacccctcctggtatgcctccaatgcccggaaacatctt

SEQ ID NO: 25265 - DNA, 65 bp, Mus musculus
tttagtctcagtctggtgaccccagtagtctcattccactctagggtgttgcagacaaacaatag

SEQ ID NO: 25266 - DNA, 65 bp, Mus musculus
catttgcttagctgctggctgtgaatgcgcttgtctgacccttgttgttcaggtgggtaggaata

SEQ ID NO: 25267 - DNA, 65 bp, Mus musculus
caacccacagcaagagaacatttcccagaatacccagcacgaagatggccacaaatccccttcgt

SEQ ID NO: 25268 - DNA, 65 bp, Mus musculus
aacacaaacgctgagtgagaggagtaaacaagggccaacaggggagcacatctgggcgaagaaga

SEQ ID NO: 25269 - DNA, 65 bp, Mus musculus
tcccacttcaaattgcggtgttctgtcacctaggcaccatctcctcctgcccttagtgtttgatt

SEQ ID NO: 25270 - DNA, 65 bp, Mus musculus
atagaaaagctcctgattgacagtgtacacgcaagagcccaccagaggctgcaggaactgaaggc

SEQ ID NO: 25271 - DNA, 65 bp, Mus musculus
cccaaactgtgaccatgctggaggacattcgtgaaaacctcagtgcctgtcaccaaatcagtcat

SEQ ID NO: 25272 - DNA, 65 bp, Mus musculus
cccagcgcttgagagaatcactcctggaggtttgaatggtttctgagcacttgggaattactcct

SEQ ID NO: 25273 - DNA, 65 bp, Mus musculus
gggaggtggatgctaagattgcattggctgtagtcagtgaacacctttgaccgctttgtggcaat

SEQ ID NO: 25274 - DNA, 65 bp, Mus musculus
cccctgcatcagcatgaacgatacctgtgtaagatgaatgaagagatcaaggcagtcctgcaacc

SEQ ID NO: 25275 - DNA, 65 bp, Mus musculus
tgggtggctattctgtcaccgccagatgttttggccacttgaccaggcagctcatgacactggct

SEQ ID NO: 25276 - DNA, 65 bp, Mus musculus
aagaagaggtgaaacttgaagctcacatcagagtgccgtcctttgctgctggcagagttattggg

SEQ ID NO: 25277 - DNA, 65 bp, Mus musculus
gactccctttgctcagagtcagttgcacaccagtaggatggcatgctacgatcagtttctgtcct

SEQ ID NO: 25278 - DNA, 65 bp, Mus musculus
gttatatccagcttgagagatcaccttcaaaaggcccagcctatcttattatagctgcatgatgt

SEQ ID NO: 25279 - DNA, 65 bp, Mus musculus
tccaaggatcaaaaccagagattccacacatgctagcaagcaagcaagctgtcactgggctgcag

SEQ ID NO: 25280 - DNA, 65 bp, Mus musculus
ttcagaacagatcgcgcttcaaatgtggctctcctcgtctctgatgtcagccctggtcctgggtc

SEQ ID NO: 25281 - DNA, 65 bp, Mus musculus
cctgcccttgcccatggcttgcactctcacgcagtttgtgtctggcagcaagtactactttgcag

SEQ ID NO: 25282 - DNA, 65 bp, Mus musculus
caccagttccctgtgggactaggcctcctgagtgtacccaaacctgtgccaggatccatgaatgt

SEQ ID NO: 25283 - DNA, 65 bp, Mus musculus
tagattgaccttagccccagagcacagttgctacctggaaaccaaggaccattcagtccctaggg

SEQ ID NO: 25284 - DNA, 65 bp, Mus musculus
atgagggctctgcagcagttcttcatgctactcttgaccacatggcaaattcctgaaatccaccc

SEQ ID NO: 25285 - DNA, 65 bp, Mus musculus
aagctgttcgctttagccagaggggagtgcatggacgacaaccctgatagcctagtgaaccaaga

SEQ ID NO: 25286 - DNA, 65 bp, Mus musculus
taagtctctctgtggcttcagggaactgaacttgagtccttggcataagcaacaagtgctccctg

SEQ ID NO: 25287 - DNA, 65 bp, Mus musculus
agttgggactgtctagtgaccggcactgaatagcaatgcaggctgaagacctccaggtttagaat

SEQ ID NO: 25288 - DNA, 65 bp, Mus musculus
ctaccaggtttaggaacaatgtgtggagatgtcacacccagaaccaagtctagctagcctctggc

SEQ ID NO: 25289 - DNA, 65 bp, Mus musculus
gggcaggacatgttgaggtggagacattaactccaggtgctggttttgctcgaaatctctgcaga

SEQ ID NO: 25290 - DNA, 65 bp, Mus musculus
cattgccaatggagactgaggaggaagatcctaaggaagagcctgtgaaggagataaaggaggag

SEQ ID NO: 25291 - DNA, 65 bp, Mus musculus
gcctcataaaccatctctgcatcaccatgaacccagactagctgtggtgccagaaacctgaactt

SEQ ID NO: 25292 - DNA, 65 bp, Mus musculus
agatggtcaactccctactcaacacagctcagcagctgaagacgctgtttgaacaagccaagcag

SEQ ID NO: 25293 - DNA, 65 bp, Mus musculus
aacatgatgtcctgatcgtgcaggccgtgatgctaacaggctggacaggttgatgggtaataaac

SEQ ID NO: 25294 - DNA, 65 bp, Mus musculus
tgtcagcccaggcaaaatcgcgacagcagagtaagacggaggaacacaaaatggcgtgtgcctct

SEQ ID NO: 25295 - DNA, 65 bp, Mus musculus
ccagtcactggtcacgttggatagatcttgtgaagagcctttgggagttctggtaaaccctaaca

SEQ ID NO: 25296 - DNA, 65 bp, Mus musculus
agccacaagtttgagcagaggatgtggggacctcccacaggacactgctccaacccaaatcaatg

SEQ ID NO: 25297 - DNA, 65 bp, Mus musculus
ctccatcctctcctttggctgggcaaccatgtggagatgaccaaaatgcttcaccttcaaagctt

SEQ ID NO: 25298 - DNA, 65 bp, Mus musculus
ttctggagcttgagaagcctgaaaacccaggaaattggtcagaggaacagacaccagagaggcga

SEQ ID NO: 25299 - DNA, 65 bp, Mus musculus
agtatgggtggctacacggacatcgtgaggttgctgcttgaccgtgacgtggacatcaacatcta

SEQ ID NO: 25300 - DNA, 65 bp, Mus musculus
gaatacaccggatctagacatgcccagttcgacaaaccagacggcagtaatggacacccttaatg

SEQ ID NO: 25301 - DNA, 65 bp, Mus musculus
agtgagagtgccagaatgcctgtcctccagcgagcctccctgttaaaccctcagagttccttgat

SEQ ID NO: 25302 - DNA, 65 bp, Mus musculus
acaagaaagctgacatctaagagtcccatccctgtgtgacacttgagtccccagcagagcactac

SEQ ID NO: 25303 - DNA, 65 bp, Mus musculus
gttaaagggtcgtgtacttcaaagttccctaacccctgagcataaagaccccaaagcaacacccc

SEQ ID NO: 25304 - DNA, 65 bp, Mus musculus
ggcctgttgctgtggcaacgggagggaaggcacgtgtaaatggtgttggcttacagggtatattt

SEQ ID NO: 25305 - DNA, 65 bp, Mus musculus
tgaacaaatcctgtaagtgccagcctgagaaccttactcgtcctatccagggtgaagaccactgg

SEQ ID NO: 25306 - DNA, 65 bp, Mus musculus
aacaaggcctctgaagacagaaagagcatcaacgacatcttcaagcacgacaaactgagccggtc

SEQ ID NO: 25307 - DNA, 65 bp, Mus musculus
ggggtcttcgtactgtagtaacacttcaggttcatgacgctttctgagtggtagatgcggctcca

SEQ ID NO: 25308 - DNA, 65 bp, Mus musculus
gccgttgatgagagcagatgaacctgcagaaacactgccgtctgagtgtatcgcacaagaagata

SEQ ID NO: 25309 - DNA, 65 bp, Mus musculus
gagcacctgaccgactccaacctcaacctgaccgtggatgagggtgtacaggtcgccaagtactt

SEQ ID NO: 25310 - DNA, 65 bp, Mus musculus
tgtcccgcacctttcgcgacatggggaagagcttccatttcgccagcgccacctgaggatttcct

SEQ ID NO: 25311 - DNA, 65 bp, Mus musculus
gagcccaaaggtgcatgtactcagctagctcttgagaagtcttcaggatactgtagcttcctctg

SEQ ID NO: 25312 - DNA, 65 bp, Mus musculus
gtatgccccgaaccacaagttttccaggcttctagatgtaacctttcattgcacagccagtgatc

SEQ ID NO: 25313 - DNA, 65 bp, Mus musculus
caataaaatagacttcaaggagctggacatagctggggatgaagacaacagaaagtggatgagag

SEQ ID NO: 25314 - DNA, 65 bp, Mus musculus
tcagaggatgaattctgaagaagatggagaccataagagaatgcttgatattgcctaacttcatt

SEQ ID NO: 25315 - DNA, 65 bp, Mus musculus
agcccgctgtttgcatacagggtcaggaaccttggactgcttccatgttagtaaccgctcctcaa

SEQ ID NO: 25316 - DNA, 65 bp, Mus musculus
ctggcgaacccctctaacgacatgtatgcagacacagtgaccaccgtgatattggaagttcagtc

SEQ ID NO: 25317 - DNA, 65 bp, Mus musculus
tgctacttacgtgcagcctagaaggaagcagagagatgagcagctcctgacaaacgtcctggaaa

SEQ ID NO: 25318 - DNA, 65 bp, Mus musculus
ctacttggagttggacatctgacactaaccagttgcactggacaagaccctctctcagagaactc

SEQ ID NO: 25319 - DNA, 65 bp, Mus musculus
ggagcctgtgacttagaaacttctagtaatgggtacctgggagtcgtttgagtatggggcagtga

SEQ ID NO: 25320 - DNA, 65 bp, Mus musculus
tcacacctaccagtctgttaaacagcagctcttcaaggcctttcagaaagccggtcttggcacct

SEQ ID NO: 25321 - DNA, 65 bp, Mus musculus
agactgcttctctgtgaatcattactctagctgctcagctgaactggcgccattagggactggca

SEQ ID NO: 25322 - DNA, 65 bp, Mus musculus
attgatggcagggtagttgagccaaaacgtgctgtagcaagagaggagtctggaaaaccaggagc

SEQ ID NO: 25323 - DNA, 65 bp, Mus musculus
tgagagtatgaacgtatttgcatagtcaaaaacaatctgtcaataacaaagtaaagcaaagccac

SEQ ID NO: 25324 - DNA, 65 bp, Mus musculus
actcgattcaaggacaacacaccatttctccgctggatctggccaagctgaaccaggtggcaaga

SEQ ID NO: 25325 - DNA, 65 bp, Mus musculus
aagaggttctacagaactcaagtaggcatctctgtttcaatgaagacatctcctactggtctact

SEQ ID NO: 25326 - DNA, 65 bp, Mus musculus
ccaccctcccgttgtcacctgtgccagtctgacctagctgcacagagagaaggtccagcccacgt

SEQ ID NO: 25327 - DNA, 65 bp, Mus musculus
ttccatccagtcaaggctgtggcagtggacctgttcccacagactccgcactgtgagatgcttat

SEQ ID NO: 25328 - DNA, 65 bp, Mus musculus
gtggtgatgcgcaggtctcattggttcgttcattctgcagttgccatacagtgcctttccattga

SEQ ID NO: 25329 - DNA, 65 bp, Mus musculus
agaaagaacgcagctaagaaatgccagtccaaaccggaaagtggggctgtgtcatatcacgctcc

SEQ ID NO: 25330 - DNA, 65 bp, Mus musculus
ggctatggcggctatgattatactgggtataactatgggaactatggatatggacagggatatgc

SEQ ID NO: 25331 - DNA, 65 bp, Mus musculus
ggaagatatgacagtcgtcctggaggatatggatatgggtatgggcggtctagagactacagtgg

SEQ ID NO: 25332 - DNA, 65 bp, Mus musculus
gccccaaaatgttgccaagacagaaccagtcagtatcctacaacctcagaccaccgttaatcctg

SEQ ID NO: 25333 - DNA, 65 bp, Mus musculus
agtgaatctatcagcattccacatcagatttaaagcaccaaatgcccgtgaaacagcaaagatgg

SEQ ID NO: 25334 - DNA, 65 bp, Mus musculus
actttcgttatggggtttacgtgccgcgcgtttaagcgctggaactgggtcgattacctgtggac

SEQ ID NO: 25335 - DNA, 65 bp, Mus musculus
tttccgttctgacccgtcagcagcctgcttctgacccaagatggcctcgtgactagacctgtttt

SEQ ID NO: 25336 - DNA, 65 bp, Mus musculus
cctctgccagttcttcctctgaaggtccttcctgattctgttcaaaactctcaccatcagacaca

SEQ ID NO: 25337 - DNA, 65 bp, Mus musculus
tagaccgcccatcatgttctctggacgtgctcatcttgagactacctactacattgcacagggca

SEQ ID NO: 25338 - DNA, 65 bp, Mus musculus
agtatctcatcaacgctaggctgacgtctgaggtcaccgggatgggtgcactctaacctacccaa

SEQ ID NO: 25339 - DNA, 65 bp, Mus musculus
gcccatgagactgctcacccagagaggctcccagggagcttcccttctcaggcaccttccatgga

SEQ ID NO: 25340 - DNA, 65 bp, Mus musculus
ttcaagttggagctagaggaaggggtggtagaggagcaaggggtgctgctccatccagaggtcgt

SEQ ID NO: 25341 - DNA, 65 bp, Mus musculus
gcagggagtacagttcttcccattcatgacttcagtagttgcttccctaactgcagaggcatctc

SEQ ID NO: 25342 - DNA, 65 bp, Mus musculus
agcagagccaagtctcctcagccacctgttgaagaagaagacgaacacttcgatgacacagtggt

SEQ ID NO: 25343 - DNA, 65 bp, Mus musculus
tacactctgaagttgtgcttctccactgcacagcacgcctcctaattggatgctgggaaggaaga

SEQ ID NO: 25344 - DNA, 65 bp, Mus musculus
ccaacaactatacaataagactaccactgtacatggaaatttatcactgcaagaaaacacaagaa

SEQ ID NO: 25345 - DNA, 65 bp, Mus musculus
aggagactccaccatggggtctcaagcgccagtaatgccagacgcatggatgcaccccctaccct

SEQ ID NO: 25346 - DNA, 65 bp, Mus musculus
ggacacaagcaataacagcgtggagtagaaggctgagagaaatggctggtctctgtggctttgtt

SEQ ID NO: 25347 - DNA, 65 bp, Mus musculus
caaacaactggtagaacagtctcaagatccaagtgggagaaccagaggaacggactcagaaagat

SEQ ID NO: 25348 - DNA, 65 bp, Mus musculus; identical to SEQ ID NO: 23716

SEQ ID NO: 25349 - DNA, 65 bp, Mus musculus
atgacctgctctctaattgtcctccggtgtgagaagtgtaacgctgtactgtaagccacatttac

SEQ ID NO: 25350 - DNA, 65 bp, Mus musculus
attcttacgaagcctacggacaagatgactggaatgggaccaggccatcactgaaggctcctcca

SEQ ID NO: 25351 - DNA, 65 bp, Mus musculus
gtgaatcccatagaaagctcaggaattgcactgagtgaaagcatccctcagattccctcacaacc

SEQ ID NO: 25352 - DNA, 65 bp, Mus musculus
ccgtttgttcatcgttgtgcctaaagcatgtcgatgtggcgtcaagtacatcgtccaaatccctg

SEQ ID NO: 25353 - DNA, 65 bp, Mus musculus
gagagctataccgtggtgcaatgactagtagcatggagcgagatttcggacgtggtgatattgga

SEQ ID NO: 25354 - DNA, 65 bp, Mus musculus
cctccgcaggatacagccgtttgcgtcctggatcagaaacccacccgactaccaccaatttaaat

SEQ ID NO: 25355 - DNA, 65 bp, Mus musculus
aacagctatggctccagcgggtcatcgtcctacaacacaggctcacatggaggctatggcacagg

SEQ ID NO: 25356 - DNA, 65 bp, Mus musculus
gaatttgccagttcagccatcagctcagacagtaactttgcccactggatattcctctgaaagtt

SEQ ID NO: 25357 - DNA, 65 bp, Mus musculus
aagttcagctctgtctcaggagatggggtgtcggtgtccctggtcgacaagaacagacgtctcct

SEQ ID NO: 25358 - DNA, 65 bp, Mus musculus
tcattcctcaggcaaaaggtgttgtgaatacagcagtatctgcggcagtccaggcagttcggggc

SEQ ID NO: 25359 - DNA, 65 bp, Mus musculus
gacatcaacaaggacccgtattttatgaagaaccacttgggatcctatgagtgcaaactctgcct

SEQ ID NO: 25360 - DNA, 65 bp, Mus musculus
ctattgcaaccggaaaagcactccagttatatggcagaggagtcctctaagaactatagagactt

SEQ ID NO: 25361 - DNA, 65 bp, Mus musculus
ttcagtgtgctaaattcctccaggtacaccaggggccaacagccaacaccttgccagcttacata

SEQ ID NO: 25362 - DNA, 65 bp, Mus musculus
ccaccatttagtacgatgagaccagcttcctcacaggttccacgagtcatgtcaacacagcgtgt

SEQ ID NO: 25363 - DNA, 65 bp, Mus musculus
tatcatacgtattctccgagacctttgtcaacgagttccaacgtggtctgattttcctagctggg

SEQ ID NO: 25364 - DNA, 65 bp, Mus musculus
aggtgattcccaaacgaaccaacagaccaggcatcagcacaacagaccggggtttcccgcgctcc

SEQ ID NO: 25365 - DNA, 65 bp, Mus musculus
gtaaacgctctggaaaaccccgtggttatgccttcatcgagtatgagcatgaacgagacatgcac

SEQ ID NO: 25366 - DNA, 65 bp, Mus musculus
aggacccctagctgagccgagacctttaatggcagaaccaagaggacccatgctagatcagaggg

SEQ ID NO: 25367 - DNA, 65 bp, Mus musculus
ggttatggagtggaaggagtgggcctgttcactttgtcactgttactctaccacgtaccctgaaa

SEQ ID NO: 25368 - DNA, 65 bp, Mus musculus
ccccaagttagacaacaggaaacttgagccttcagttgccacttttcagatgtgttggcagtgga

SEQ ID NO: 25369 - DNA, 65 bp, Mus musculus
gggctttgcacatttgcacctgtggacttgggatgctgtcagtgcggcatctgaagatgaacttt

SEQ ID NO: 25370 - DNA, 65 bp, Mus musculus
ttatttgaccaccaagacatacggggagcctgagtctgtgggcatgtccaagagcttccgccagc

SEQ ID NO: 25371 - DNA, 65 bp, Mus musculus
tggagatgcagtcccgaggctatgaagtagatgaggacatcatcagcaaggtagcggaagagatg

SEQ ID NO: 25372 - DNA, 65 bp, Mus musculus
ccggcatcgacccagacggagccatagtaagccgttctcggcgctgactgctaaatctggcggca

SEQ ID NO: 25373 - DNA, 65 bp, Mus musculus
ggggtggctttggtggcagaggcggctttggtgacagaggcggtagaggaggtggaagaggaggc

SEQ ID NO: 25374 - DNA, 65 bp, Mus musculus
atctttgggctacagaacaaggaatatgtgtggactagaggcgtgtggtccaggtctgcaggtct

SEQ ID NO: 25375 - DNA, 65 bp, Mus musculus
gtgtatagacactgaatctctctgtgttgtcgctggtgaaaaggtttggcagatccgtgtagacc

SEQ ID NO: 25376 - DNA, 65 bp, Mus musculus
agaataaggaggcccagagttctcaggccacaccacttcagactaacaagccagggtcttctgaa

SEQ ID NO: 25377 - DNA, 65 bp, Mus musculus
aagctgccaaagcgaaaaattgtgctgctcatggcctactcgggcaagggctaccacggcatgca

SEQ ID NO: 25378 - DNA, 65 bp, Mus musculus
tgtaattgtgcaagcactgagcaaatctaaggcaaaactcatggaagtcagtgcagacaaaacta

SEQ ID NO: 25379 - DNA, 65 bp, Mus musculus
acaaatggatggcttgattcctggggtagaaccacgtgagatggcagccatgtgtcttggattgg

SEQ ID NO: 25380 - DNA, 65 bp, Mus musculus
ccatagaggaacactggattattgagtgcaatgatggggtcttccagcgtctacaagactgggcc

SEQ ID NO: 25381 - DNA, 65 bp, Mus musculus
cagaacctctttgccatcatccagggtggactgaatgctgatcttcggaccacttgtctgaaaga

SEQ ID NO: 25382 - DNA, 65 bp, Mus musculus
gccctgtagttttctggctagaaagttcatcccttcagttcttgataggctggtagcagagccag

SEQ ID NO: 25383 - DNA, 65 bp, Mus musculus
catttgggtttgcttccttgatcctgtggaaattcccacggccattgggcatcctaggtgaattt

SEQ ID NO: 25384 - DNA, 65 bp, Mus musculus
taaaggacttgttggaccagatcctaatgttggacccagctaagcgaattagcatcaaccaggcc

SEQ ID NO: 25385 - DNA, 65 bp, Mus musculus
ttcaaggaggtgcgtctggtccctgggcgccatgacatcgccttcgtggagtttgacaatgaagt

SEQ ID NO: 25386 - DNA, 65 bp, Mus musculus
tgacatgagcaatttcccacagtgtgaagcaaagagacagttggaccgcattattgccaaacttc

SEQ ID NO: 25387 - DNA, 65 bp, Mus musculus
tgctctgtgctctgtgaagctgtggagaggaggtgtgtcctttccaagctcctgtgctttgaata

SEQ ID NO: 25388 - DNA, 65 bp, Mus musculus
cgtcccgattggatagatgtccgttgagctgctcgctgattggtcatagtttctgccagtctttt

SEQ ID NO: 25389 - DNA, 65 bp, Mus musculus
gtcgtaggaagggcctgagtgaagatgtgagcatcagcaagttcttcgacgatcctatgttgctg

SEQ ID NO: 25390 - DNA, 65 bp, Mus musculus
tgtaggatgttgagaagaccccttgagcgtgtttaaagatgtctgctgcaacctgcatttactca

SEQ ID NO: 25391 - DNA, 65 bp, Mus musculus
tgtacgaagaggagcttcagcgtcaccccaaggaaggcagtccccatctccaagtactaggccta

SEQ ID NO: 25392 - DNA, 65 bp, Mus musculus
gatatgaagactccgtttcgcgagaagttttctctttggctccgacaagtgtgtttgcccgctct

SEQ ID NO: 25393 - DNA, 65 bp, Mus musculus
tttgtaaaggcttgcttgcctctggttacagacaaggctcttctccacaaccctgggatttagag

SEQ ID NO: 25394 - DNA, 65 bp, Mus musculus
ttcgtggagttcacctctgtgtttgactgccagaaagccatgcagggtctaaccggtcgcaagtt

SEQ ID NO: 25395 - DNA, 65 bp, Mus musculus
aacggtggtgtggtcaaaggcttcaagttcttccagaaggaccgcaagatggcactgatccagat

SEQ ID NO: 25396 - DNA, 65 bp, Mus musculus
tgaaaataaagtcatcagctcttttagttaaaaaaaacaaagggggcgctaaagttcctgagggc

SEQ ID NO: 25397 - DNA, 65 bp, Mus musculus
gagcctgaattctgtgaacagtcgggccagaagggagaactgcgtcgctaggatgaagctcgtga

SEQ ID NO: 25398 - DNA, 65 bp, Mus musculus
gatgtttgacgggaagtttgttgtggctacattctacccgctgagtgcctacaagaggggatatc

SEQ ID NO: 25399 - DNA, 65 bp, Mus musculus
gacaggcattcttagctgagacaccaagaggtggttaaagcagtattgcaacttcaaggtggtgg

SEQ ID NO: 25400 - DNA, 65 bp, Mus musculus
gctgctgcaaacaagaagcctggtcagggaacaccaaatgcagctaatacccaaggcactgcagc

SEQ ID NO: 25401 - DNA, 65 bp, Mus musculus
gttcaggaactggtgcatgtatttttcaaagacaaagaaagtgtactgcgaaaacttgcaggaag

SEQ ID NO: 25402 - DNA, 65 bp, Mus musculus
tggaggatgtcacgctccatatcgttgagcggccgtattccggatttcccgatgcttcctcagag

SEQ ID NO: 25403 - DNA, 65 bp, Mus musculus
ctcctgattgctcctgtgtaaagatgccttgtcgtgcagaaacaaatggctgtccagtttattaa

SEQ ID NO: 25404 - DNA, 65 bp, Mus musculus
gattgctcctgtggtaaagatgccgcctgtgtcgtgcagaaagtcaaatggcgtccagtttatta

SEQ ID NO: 25405 - DNA, 65 bp, Mus musculus
cccttgaatcgatgccctttgatgtgtgccacgtagtgaaagtgcaagtcttcagtctcccacca

SEQ ID NO: 25406 - DNA, 65 bp, Mus musculus
cgtgttacagtccctttggttcgccgtgtcaaaactacgatacctgtcaagctctttgcccgctc

SEQ ID NO: 25407 - DNA, 65 bp, Mus musculus
accactgttgccattgttcttatccctgggaaagtagttggttacccagttcattctttgtaaga

SEQ ID NO: 25408 - DNA, 65 bp, Mus musculus
agaggacgatactccgaccgttttagcagtcgcagacctcgaaatgatagacgaaatgctccacc

SEQ ID NO: 25409 - DNA, 65 bp, Mus musculus
gagattggttcctaatgacggtgcagactttccagagcacagctcctatgggagaaattctctgg

SEQ ID NO: 25410 - DNA, 65 bp, Mus musculus
caagaagcccctgaaacccaggtaaaggcaaggcataaagaaggcgctaaccaaaggtctaagca

SEQ ID NO: 25411 - DNA, 65 bp, Mus musculus
aagttgcttctgagaaagtgagcaggactctgagatggagatgccttacctgtcctcaagctggc

SEQ ID NO: 25412 - DNA, 65 bp, Mus musculus
atgtatacagctcttcacgatatgacgattatgaccgatatagacgctctcgaagccggagttat

SEQ ID NO: 25413 - DNA, 65 bp, Mus musculus
actactcaaatgcgttcgagaaagtgaccccagtgacccaaacaaagacatggtagttcagctaa

SEQ ID NO: 25414 - DNA, 65 bp, Mus musculus
tcatgcagacctgcagccaaacagcctggagttccttcagccctgatcccaagtcagagctgggt

SEQ ID NO: 25415 - DNA, 65 bp, Mus musculus
gcctagatggttcctttgctttccatgaaatgccaggacattccttctctgattgtgtcagtgtg

SEQ ID NO: 25416 - DNA, 65 bp, Mus musculus
acatcgtatgacatcacggtagatgcggataccgaagtcacgcagtacaagcctccactgagcct

SEQ ID NO: 25417 - DNA, 65 bp, Mus musculus
ggacctgtccaagtgttggcacgaacctcttcattgtgcatatggaagacactggacccattttc

SEQ ID NO: 25418 - DNA, 65 bp, Mus musculus
ggaaaggaagtgttaaatcctgcttttgtgagatttcagggtctgtcccaaaatgctccagctgg

SEQ ID NO: 25419 - DNA, 65 bp, Mus musculus
gggttagccatagaagaagcctgctatgctcagaccatctcaacaaaggacagactggaaggtct

SEQ ID NO: 25420 - DNA, 65 bp, Mus musculus
tgtctctgagtgacaagtgcctacctacccagtatggatcagctagatctcaaagagagggcagg

SEQ ID NO: 25421 - DNA, 65 bp, Mus musculus
tggaggcggttttggtggcaatgacaattttggtcgaggagggaacttcagtggtcgtggtggct

SEQ ID NO: 25422 - DNA, 65 bp, Mus musculus
gaggccattgaggtggaccaccctcaggacttggacatcttctgagcacactggggacattttga

SEQ ID NO: 25423 - DNA, 65 bp, Mus musculus
cagggaagaacaaatggtttttccagaagcttcgcttttaggtatatttttgttttggtcattaa

SEQ ID NO: 25424 - DNA, 65 bp, Mus musculus
atggccgtgggcctcaacaagggccacaaggtgacgaaaaacgtcagtaagccgagacacagccg

SEQ ID NO: 25425 - DNA, 65 bp, Mus musculus
gagcgagtgatcaccatcatgcagaacccacgacagtacaagatcccagactggttcctgaacag

SEQ ID NO: 25426 - DNA, 65 bp, Mus musculus
ttacaaccccatccacgccagagttacagggcatcaatcccgtgttcttgtccagtaatcctagc

SEQ ID NO: 25427 - DNA, 65 bp, Mus musculus
gttattcttgctgttagaacacccctgagagaggatcagttgctcctaaactgacacttctgaag

SEQ ID NO: 25428 - DNA, 65 bp, Mus musculus
aggcgccatacgcttggcgatggccagagctttgtgcagcttcgtcactgaggatgaggtcgagt

SEQ ID NO: 25429 - DNA, 65 bp, Mus musculus
ggacgatgcccagatggaacactacaaaggctactttggggatatgtgggacaacattctgaaga

SEQ ID NO: 25430 - DNA, 65 bp, Mus musculus
atccctccaccctatgacaagaaaaagcggatggtggtccctgctgctctcaaggttgttcggct

SEQ ID NO: 25431 - DNA, 65 bp, Mus musculus
acattcatccgaaagccgaagaagcccaactccgccaaccgcaagtgctgccgagtccgcctcag

SEQ ID NO: 25432 - DNA, 65 bp, Mus musculus
agtaagaagcacagaacatggcagaagatacatgagccgattatgctgaaatacttggaactgtg

SEQ ID NO: 25433 - DNA, 65 bp, Mus musculus
acctgttggccagaggcattgatgtgcagcaggtctccttagtcatcaactatgaccttcccacc

SEQ ID NO: 25434 - DNA, 65 bp, Mus musculus
cccgtgggattgacgtgcaacaagtgtccttggttataaactacgatctacctaccaatcgtgaa

SEQ ID NO: 25435 - DNA, 65 bp, Mus musculus
aagtcaattcagagcaatggcccaaacaaggaatctcccctatgtcctttctggaacggggtccc

SEQ ID NO: 25436 - DNA, 65 bp, Mus musculus
cctatacctaaccaagacaacacagaggacaaacaagttacggacactagatgactagtgggccc

SEQ ID NO: 25437 - DNA, 65 bp, Mus musculus
aggaagattgagaccagcggcaaataacacattcaagtcgtcggtggtcaccacgcatatctcgg

SEQ ID NO: 25438 - DNA, 65 bp, Mus musculus
tggggtccctacctcctatctgctgattcctgcagcctcctatgtgcttccagaggtttctaagg

SEQ ID NO: 25439 - DNA, 65 bp, Mus musculus
agatgtttgaagatccagaaactacaaggcagatgcagtcaaccagggatggcaggatgttattt

SEQ ID NO: 25440 - DNA, 65 bp, Mus musculus
aaggagcgatttgctggtgtggatattcgggtccgtgtgaagggtggtggacatgtggcccaaat

SEQ ID NO: 25441 - DNA, 65 bp, Mus musculus
tcagttcagggcatgaccttcatgaccttgcagaacttcttcactttccaggttaagtaaaggcg

SEQ ID NO: 25442 - DNA, 65 bp, Mus musculus
aagagcaccatgggcaagccccagcgtctgtattaggatgctccaataaacctcactgctgccac

SEQ ID NO: 25443 - DNA, 65 bp, Mus musculus
aatgccaattcctaagtcctattgccaccctgccatgctaataaagccactgtgtccagacaaaa

SEQ ID NO: 25444 - DNA, 65 bp, Mus musculus; identical to SEQ ID NO: 23716

SEQ ID NO: 25445 - DNA, 65 bp, Mus musculus
acacagtacaagaagggcaaggattctttgtatgcccagggaaagcggcgttacgacaggaaaca

SEQ ID NO: 25446 - DNA, 65 bp, Mus musculus
cagagttccctcgacctgcttggaatgatggaggtcctgccagatcgttgtgtgcccattgccaa

SEQ ID NO: 25447 - DNA, 65 bp, Mus musculus
ttggcagtgaaggatctgaaatgaaccagccctctgcgtgtgactattaaaaaccctgaaaagtg

SEQ ID NO: 25448 - DNA, 65 bp, Mus musculus
cccattcctcccgattcatccccctcaagtagccgaggccaataaagactggttttggtccctgg

SEQ ID NO: 25449 - DNA, 65 bp, Mus musculus
aaggaatgccccataagtgctaccacggcaaaaccggaagagtctacaatgtcacccagcatgcc

SEQ ID NO: 25450 - DNA, 65 bp, Mus musculus
gaatatcggtctaggcttcaagacgcctaaagaggctattgagggtacctacatagacaagaaat

SEQ ID NO: 25451 - DNA, 65 bp, Mus musculus
cgtaactccagacatgatggaggagatgtataagaaagctcatgctgctatccgagagaatccag

SEQ ID NO: 25452 - DNA, 65 bp, Mus musculus
tcgcagttcacacgaacggatttccgagccagcatgttctcgtttcaccggcaagactgatctta

SEQ ID NO: 25453 - DNA, 65 bp, Mus musculus
aacagacgcataaaccagcagcacccaacaacgaagcgaagacgccaagcgaagatcaaagcaca

SEQ ID NO: 25454 - DNA, 65 bp, Mus musculus
agtttgagtccagtcaaaaatgagtttttaagagcaacaaataaataatgaccttgaatcttttg

SEQ ID NO: 25455 - DNA, 65 bp, Mus musculus
gaaatacgatgaaaggaaaaagaatgccaaaatcagcagccttctggaggagcagttccagcagg

SEQ ID NO: 25456 - DNA, 65 bp, Mus musculus
aaggacagtctgtgagaaaggagcaagcagttgctgcaggtgtgggagagcaaagcccttctcca

SEQ ID NO: 25457 - DNA, 65 bp, Mus musculus
ggagctggcccggctcaatccccagtaccctatgtttcggctcctccgccccctgtgtactccat

SEQ ID NO: 25458 - DNA, 65 bp, Mus musculus
tcctcggaaggggcgagatgtgttcccacattttgggaaggtcccaggtactccatacagccaaa

SEQ ID NO: 25459 - DNA, 65 bp, Mus musculus
cacagagaccatgacagactgtgctcctatcctgggttgagtcccgatgcatattcctgcttcat

SEQ ID NO: 25460 - DNA, 65 bp, Mus musculus
gaagattaagggtgttggaggtgcctgtgttttggtggcttaaaagccacaccggaggttaatta

SEQ ID NO: 25461 - DNA, 65 bp, Mus musculus
gctcgctctgggatgaagattgggcggattgaggatgtcacccccattccctctgatagcactcg

SEQ ID NO: 25462 - DNA, 65 bp, Mus musculus
ttaattttgaattcccagagtttcagttgtaaagaaaatgactgaataaagtgtcattcatagtt

SEQ ID NO: 25463 - DNA, 65 bp, Mus musculus
agctcatggagctgcatggggaaggcggcagctctggcaaagcagctggagacgagacgggtgct

SEQ ID NO: 25464 - DNA, 65 bp, Mus musculus
ttcatcgcagcggaggggatccacactggacagttcgtgtactgcggcaagaaggcccagctgaa

SEQ ID NO: 25465 - DNA, 65 bp, Mus musculus
gatgatcagacaaggcaaagcgaagttggttatccttgccaacaactgtccagctttgaggaaat

SEQ ID NO: 25466 - DNA, 65 bp, Mus musculus
ggtgtttgggcaggatgagatgattgatgtcattggcgtgacaaaaggcaaagggtacaaagggg

SEQ ID NO: 25467 - DNA, 65 bp, Mus musculus
acatgaagagatgcccaagaatgtcgtggcagccacttcagggctcaacagtttcaacctgatcc

SEQ ID NO: 25468 - DNA, 65 bp, Mus musculus
gtccggaagcaaaattcatggtggcctaactaaggggaattgtaaccgggtggacctcacgttat

SEQ ID NO: 25469 - DNA, 65 bp, Mus musculus
ttcaagcgctatgtctttgacacccagaagcgcatggtacagactccctgaatgaaccatcctgc

SEQ ID NO: 25470 - DNA, 65 bp, Mus musculus
ggatgggtcacaacagatgatgctttgcaagaacttgtggaacttatctaccaacaggccacgtc

SEQ ID NO: 25471 - DNA, 65 bp, Mus musculus
caagaaataaagcttccctcgtgtctgtacatagcggcctggctgtggcctcatgtggatcagtc

SEQ ID NO: 25472 - DNA, 65 bp, Mus musculus
caagttccttgaccactagaagacccagatctcaaagacgtggagcttcctcgtgtttaatgcag

SEQ ID NO: 25473 - DNA, 65 bp, Mus musculus
aagaagcccttcagccagcacgtgagaaggctacgctccagcatcactcccggaactgtcctgat

SEQ ID NO: 25474 - DNA, 65 bp, Mus musculus
acagagagaagtccgagcagtcaggtcagtgctcattcgccatcattttcatcaggtctatgccg

SEQ ID NO: 25475 - DNA, 65 bp, Mus musculus
ccccgttcgagagggtgacgtgctcaccctattggagtcagaaagagaagctcgaaggttgcgtt

SEQ ID NO: 25476 - DNA, 65 bp, Mus musculus
cctccagatagcaagaggtttctagggaagtcacctcacagcaggcttgcagtatgtccagctgg

SEQ ID NO: 25477 - DNA, 65 bp, Mus musculus
gaggcgtgactatcaagccaacaatagatgatgaatgagatgatacatttggatgaaaccaggaa

SEQ ID NO: 25478 - DNA, 65 bp, Mus musculus
aaaaggaagcactccgccaggatcaggtctagaggagagctggagctggtggtgtctgtgaatgg

SEQ ID NO: 25479 - DNA, 65 bp, Mus musculus
gaaaagtgtttgtacaagcctttttaggcaacatacatgctagattaaacagcatggtgaaactg

SEQ ID NO: 25480 - DNA, 65 bp, Mus musculus
tcacatgagctgctggaggcttttcataaccggggtcccgtgatcaagaggaagcacaatatgca

SEQ ID NO: 25481 - DNA, 65 bp, Mus musculus
gagcgtcttcaagctgaatgaagccaagccaagtaccattgccaccagcatgcgggattccctca

SEQ ID NO: 25482 - DNA, 65 bp, Mus musculus
tcgcttcggttttctcgtcgaggcggtgttgtgaaaccaccgctaattcaaagcaaaaatgggga

SEQ ID NO: 25483 - DNA, 65 bp, Mus musculus
ccttgaatggatttgactgactactaccaagtggaaccgatcatgctattttttgtacacaaaga

SEQ ID NO: 25484 - DNA, 65 bp, Mus musculus
agggcgtggtgcggagggcggtactgctccatctgaaagtcaaggttggtgccacctaagtgggt

SEQ ID NO: 25485 - DNA, 65 bp, Mus musculus
ttcctacctgctctgtgtcgaaagatgggggtgccctactgcatcatcaagggaaaggccaggct

SEQ ID NO: 25486 - DNA, 65 bp, Mus musculus
agtagcagtctctcttataccaacccagctgtggtgaccacttctgccaacttgtaggagcaagt

SEQ ID NO: 25487 - DNA, 65 bp, Mus musculus
caatagttttcctataccctaccaaatcgttcaataataaaatctcgcatcaagttcgcttaaaa

SEQ ID NO: 25488 - DNA, 65 bp, Mus musculus
ctcagaggggctcaaacacgcggaaatatgacacacgtgaagaaacagtgtgccaaagagagact

SEQ ID NO: 25489 - DNA, 65 bp, Mus musculus
aaactcgggcactttcttaagcaagcaggttttaaggagagtgatgtagcttttatcccgacgag

SEQ ID NO: 25490 - DNA, 65 bp, Mus musculus
caaaggctatcctcctgaagacatcttcaacctagcgggcaaaaaggtgctggtcactatcgaag

SEQ ID NO: 25491 - DNA, 65 bp, Mus musculus
cggccacctgatctacaaatgtggtggaatcgacaagcgaaccatcgaaaagtttgagaaggaag

SEQ ID NO: 25492 - DNA, 65 bp, Mus musculus
cgctttggcttccctgaaggcagcgtagagctttatgcagagaaagtggccacaagaggtctgtg

SEQ ID NO: 25493 - DNA, 65 bp, Mus musculus
aattccgaagcaaccttcctgcaaaggccattggacacagaatccgtgtgatgctgtacccatcc

SEQ ID NO: 25494 - DNA, 65 bp, Mus musculus
agattaacacctttaattggtcaacacgatttagaaacaaaagcacgtaaagcgcgtgaatttat

SEQ ID NO: 25495 - DNA, 65 bp, Mus musculus
ccctgggctttctgacccccttcaactttgagaacttccaatcccaagtgaatcaggtgatagag

SEQ ID NO: 25496 - DNA, 65 bp, Mus musculus
aagagtcgagtcaagaaagctgacctcccgttgctcaccagcactctccttggcagtcacatgtt

SEQ ID NO: 25497 - DNA, 65 bp, Mus musculus
aatgccattgcaagtctttttgcttggactggagcacaagctatgtaccaagggttctggagcga

SEQ ID NO: 25498 - DNA, 65 bp, Mus musculus
ttacagtgggggaaagttggggttgcggacctttgtggggtggcgcccagaaccggaaaaagttg

SEQ ID NO: 25499 - DNA, 65 bp, Mus musculus
ggaaatagcgatgctcacgatctcagcattctgtaccctacatctactgtgtggatcattgagag

SEQ ID NO: 25500 - DNA, 65 bp, Mus musculus
acccagcagtttaagcccaatgagtttgccagtcagatcaacctgagcgtggagaatgcctgggg

SEQ ID NO: 25501 - DNA, 65 bp, Mus musculus
tatgtcggtagtgtcatagtctgcagcagtgaatagcgtcattcttcaggtggtctagggagcgc

SEQ ID NO: 25502 - DNA, 65 bp, Mus musculus
acagaggagtgagaggagagacctgcgggccggggttgtgtcctgtaggagggtcaggtatgctc

SEQ ID NO: 25503 - DNA, 65 bp, Mus musculus
gccagcctgccgggagtgaagaaatctttgggcaagtatggccctagcagtgtagaagacaccac

SEQ ID NO: 25504 - DNA, 65 bp, Mus musculus
catcgtcggcgcgcttccctgttcacctctgaatctgaaaatccgtcgccatccgccaccatggt

SEQ ID NO: 25505 - DNA, 65 bp, Mus musculus
gttccttgtgaagacggggaccatcactacctttgagcacgctcacaacatgcgcgtgatgaagt

SEQ ID NO: 25506 - DNA, 65 bp, Mus musculus
gatggagacatggtggcagccagttacgccacacttctgaacatcctgttcacctcccgctactc

SEQ ID NO: 25507 - DNA, 65 bp, Mus musculus
atgacatcgtctttaaaccccgcgtggcaatccctgacgcaccgccgtgatgcccagggaagaca

SEQ ID NO: 25508 - DNA, 65 bp, Mus musculus
cccgctacctggccgaaaagtatgagtgggacgttgctgaagcccgcaagatctggtgctttggc

SEQ ID NO: 25509 - DNA, 65 bp, Mus musculus
ctgcccacgtttctctagtagtctgtataaagtcacaactccaaacacacaggtcagtcctgctg

SEQ ID NO: 25510 - DNA, 65 bp, Mus musculus
agtatgacagcctacttcggcagatgtgggagaggatggacgagggatgcggagagaccatatat

SEQ ID NO: 25511 - DNA, 65 bp, Mus musculus
aaagtagagcgtaaggaaggaaatgcaagcggcgtgtccctgctggaagccctggacacaatcct

SEQ ID NO: 25512 - DNA, 65 bp, Mus musculus
tactgtgaggaaaattgactgcaaaagcctacttcacaccgccttctcttactttctgcccattg

SEQ ID NO: 25513 - DNA, 65 bp, Mus musculus
aatcccacaagaataaggaagctctgaagcaggagtcatggcagccaaacctaagctctactact

SEQ ID NO: 25514 - DNA, 65 bp, Mus musculus
atgggcttcgttttttttgactaaactgcttttgttaagttggctaataaagagctgaacctgtt

SEQ ID NO: 25515 - DNA, 65 bp, Mus musculus
tatgatgatgcagaaaggagattctatgagcagatgaacgggcctgtgacctccggctcccgcca

SEQ ID NO: 25516 - DNA, 65 bp, Mus musculus
agagctggaaggaggaggtggttaccatagatacctggatgcaaggcttgctcaagcccacttgt

SEQ ID NO: 25517 - DNA, 65 bp, Mus musculus
aaatctcacttcacagacaaagagactggacaggaacacgaactgatagaaagcatgcctctctt

SEQ ID NO: 25518 - DNA, 65 bp, Mus musculus
aacccttgccccaacagcatcagtctccggatccaaagccaaagccgaatgagaggggtgtcttt

SEQ ID NO: 25519 - DNA, 65 bp, Mus musculus
cccagcttcagacacctacatagtgtttggggaagccaagattgaagatttgtctcagcaagcac

SEQ ID NO: 25520 - DNA, 65 bp, Mus musculus
ctgattccttaccagagagaaggtgaagagaaagcagatgacttcaatatcattcctatagcaaa

SEQ ID NO: 25521 - DNA, 65 bp, Mus musculus
agaatgatacttcctaccacgtgttcaccttgccagagcctagcgaacaacccaactgcagctgc

SEQ ID NO: 25522 - DNA, 65 bp, Mus musculus
gattcctccaactctggctcagaatgaaaggtacgaaaaattcctacgtcagcactatgatgcca

SEQ ID NO: 25523 - DNA, 65 bp, Mus musculus
gcagtctattgcaaggaccttctttgctgccagttaccataggctgttttaagttagaaaactga

SEQ ID NO: 25524 - DNA, 65 bp, Mus musculus
aaggtttcagccaagccaagaaccccaagatcacaggaggctatgtctgaccagaggctccttgg

SEQ ID NO: 25525 - DNA, 65 bp, Mus musculus
tattgagatccacagcaagcgcatccagatgtatggagcctacctccggatccatgcccacttca

SEQ ID NO: 25526 - DNA, 65 bp, Mus musculus
caaagctccggtatataagcgagtgatgcccaagggagacatccaaaagctggttatcacagaag

SEQ ID NO: 25527 - DNA, 65 bp, Mus musculus
tggggagctgctgtccctccgttatgaccttactgtcccttttgctcgctatctggcaatgaata

SEQ ID NO: 25528 - DNA, 65 bp, Mus musculus
actgatgccctacgctttggactctgtgcctacacatcccaaggtcgagacatcaacctggatgt

SEQ ID NO: 25529 - DNA, 65 bp, Mus musculus
tgataagatcatcaggcgggcacggcagaactacctgtttgagcagtatcgggagcagaaacccc

SEQ ID NO: 25530 - DNA, 65 bp, Mus musculus
tggtgctccatccatgggagccaaaagcctttgcattcctttcaaccctctgtgtgagctgcagc

SEQ ID NO: 25531 - DNA, 65 bp, Mus musculus
atgtgccactcatcacaggcgctgagatactccagcactagctttgcatccttcttgtacgcctt

SEQ ID NO: 25532 - DNA, 65 bp, Mus musculus
tgtgctgttccccgagtcctcattgccctcctggaaagcaatcagcaaaaggatggttcagtcct

SEQ ID NO: 25533 - DNA, 65 bp, Mus musculus
aagaagtattcccatgtggacctggtggtgatggtagatggctttgaaggcgaaaagggagccgt

SEQ ID NO: 25534 - DNA, 65 bp, Mus musculus
ccgaacggagaagatcgaagttaagcatgttgggaaaactgatcccggcactgtcttcgtgatga

SEQ ID NO: 25535 - DNA, 65 bp, Mus musculus
tgcttctgctttgacacttgactgacggggagggcaggccagagcagtgtgctggccatgcctca

SEQ ID NO: 25536 - DNA, 65 bp, Mus musculus
ggagagatgttttaggctaggaatactgctgtgacaagagttgacctccgtatgctgaccgagtc

SEQ ID NO: 25537 - DNA, 65 bp, Mus musculus
tgaagctacccagctctgtgggtcagaagaagatcaaggcgctggaacagatgctgctggaactt

SEQ ID NO: 25538 - DNA, 65 bp, Mus musculus
agagagcagcacaggctaagacagtgtattcctcccaggtctctcgcccttctcatcgtccgtct

SEQ ID NO: 25539 - DNA, 65 bp, Mus musculus
ctgctatgcatggggcttacatctcccagtacccagctgtgccttcttccagtgtttctgctgag

SEQ ID NO: 25540 - DNA, 65 bp, Mus musculus; identical to SEQ ID NO: 23716

SEQ ID NO: 25541 - DNA, 65 bp, Mus musculus
caaagctgcttggcaacctcctccgtttccttgcagagtagattgtcttcctctttggtagtctt

SEQ ID NO: 25542 - DNA, 65 bp, Mus musculus
ggactgtggctggtgtcacctggagattgccctctattgtggcttggttgggcttgtgtttgaaa

SEQ ID NO: 25543 - DNA, 65 bp, Mus musculus
ccatcccaggaagaaccttcgtggtattaggagtaccacagtcccaaacatagacggctctctta

SEQ ID NO: 25544 - DNA, 65 bp, Mus musculus
tccggagcacacccatctttccttaggctgggttacctgggaaagccacacttttacttctttcc

SEQ ID NO: 25545 - DNA, 65 bp, Mus musculus
agctcttcgactccacgactcttgaacatcagaagactttccgaacagagcgtcctgtcaactcg

SEQ ID NO: 25546 - DNA, 65 bp, Mus musculus
cctgacaaaggatgcacacaatgcacttctggatattcagtcaagtggtcgtgccaaggagcttc

SEQ ID NO: 25547 - DNA, 65 bp, Mus musculus
ttatttgggaatcatcccgcctagcacagaagcttgagtggtggggtcctctagctgtactagag

SEQ ID NO: 25548 - DNA, 65 bp, Mus musculus
aagttgcggaccagttttgtaaaggcccaagggaggtataaaaagaggcgggaaaaccggggaca

SEQ ID NO: 25549 - DNA, 65 bp, Mus musculus
cctcagagaccacgggctgagtagagactacctacctcattcggaattacgtttggacttgacaa

SEQ ID NO: 25550 - DNA, 65 bp, Mus musculus
tctgtactgctgccatggccagttaccaggacacttgatcactccttggctcaaaatgtctgtgg

SEQ ID NO: 25551 - DNA, 65 bp, Mus musculus
cgcacgatcctgtggtgtgaagagcaggtctgctttacctttcttgccaggttcaaactgtgttt

SEQ ID NO: 25552 - DNA, 65 bp, Mus musculus
ttttccaagttttacccctgcgaggaatgtgcggaagacataaggaagaggataggcaggaacca

SEQ ID NO: 25553 - DNA, 65 bp, Mus musculus
ctagctgccttttaaagcagatcccttcactgctatgttggacactacagtatctgtccctgggt

SEQ ID NO: 25554 - DNA, 65 bp, Mus musculus
tgacagcaagcaggtgggccagcccatgagcatcatcatcggcaacatgttcaagctggaggtgt

SEQ ID NO: 25555 - DNA, 65 bp, Mus musculus
tatttcagctaacctcctctggaccaggagagcaggcccagattgtactacctccatgagagcta

SEQ ID NO: 25556 - DNA, 65 bp, Mus musculus
attctacgtatcccctgaagacttggaggcacagctgcagtctgatgaaagggaggctacagaca

SEQ ID NO: 25557 - DNA, 65 bp, Mus musculus
aaggaaggattagacggcagaggtgcaagccatctcgacgatgagcgtgagtaccgcttcacatt

SEQ ID NO: 25558 - DNA, 65 bp, Mus musculus
atgcaactctgatgtttgagattgaactttatgctgtgaccaaaggaccaaggagcattgaaaca

SEQ ID NO: 25559 - DNA, 65 bp, Mus musculus
tcctgaagttactggaggtagaacatcccgcagccaaagttctgtgtgagctggctgacctgcaa

SEQ ID NO: 25560 - DNA, 65 bp, Mus musculus
ctcgcctccaactcaggactgaacagtgtttagtgtaaggtttgttacagtctctgtgattctgg

SEQ ID NO: 25561 - DNA, 65 bp, Mus musculus
gtttacacagagtcttcccttcgggctttggtgagttcccagccttcatggaagccttgtcatct

SEQ ID NO: 25562 - DNA, 65 bp, Mus musculus
tgagattacacgagaggaggattttacccgaatcctgcaaatggaagaagaatatatccagcagt

SEQ ID NO: 25563 - DNA, 65 bp, Mus musculus
caagtttctgcaggatcacggttcagattcgtttcttgcagagcataaattactgggaaacatca

SEQ ID NO: 25564 - DNA, 65 bp, Mus musculus
aggagggcatgaatatgggcgattttgatgcaaacaacatcttcaaggcattcttcggtggtcct

SEQ ID NO: 25565 - DNA, 65 bp, Mus musculus
gggggccaaccccgtggtttagggaggagacagcgttataagtagggtgagaaactgggagaggg

SEQ ID NO: 25566 - DNA, 65 bp, Mus musculus
tagactattctctgctggttgggcgagatgacactagcaatgagcttgtggttggcatcatagat

SEQ ID NO: 25567 - DNA, 65 bp, Mus musculus
ggtaccattaattgggttcatacatttggggtggcacagaatcaaaagcagccctgtcttccaag

SEQ ID NO: 25568 - DNA, 65 bp, Mus musculus
atgacagaggagtcagccagtcttcctcagcattggtacctagaccatcacctaacaagtggggt

SEQ ID NO: 25569 - DNA, 65 bp, Mus musculus
gagtggtggcattgtttttttaaggaaaaaaaacatttcatgtgggttgtctaaaaataaagtgc

SEQ ID NO: 25570 - DNA, 65 bp, Mus musculus
tttctacagtaacagagctaagaaaccgccatgcccaaggagaaaaaactacaggcattaatgtc

SEQ ID NO: 25571 - DNA, 65 bp, Mus musculus
tgcatgtgaagtcagcttcgagggctcttgagatagagaatagagctgtggaggagaagcctggt

SEQ ID NO: 25572 - DNA, 65 bp, Mus musculus
ggggctactcgctttaacagctacctgatatttcccagcatcgctatttctgactctgtacgtgt

SEQ ID NO: 25573 - DNA, 65 bp, Mus musculus
ccatggcttagacaaacccaagctaggctccaaatgccaagtgttggctttgggatttccttttg

SEQ ID NO: 25574 - DNA, 65 bp, Mus musculus
tcaaaagaactcctgggcatagacctgaacacaggggagccgatggcagcagcagaagcaggaat

SEQ ID NO: 25575 - DNA, 65 bp, Mus musculus
cagcacgggctcagctcccatcttggtcgtcatggtgatcctgctcaacattggagtcgccattt

SEQ ID NO: 25576 - DNA, 65 bp, Mus musculus
aacattgctctggagaccagtgacaagcaccgagagtttgccatggaagctgcctgtatctctga

SEQ ID NO: 25577 - DNA, 65 bp, Mus musculus
attatgttgattggtgggtggagaggggtttttataaaggtgggtggacaacaaggggtgtaaaa

SEQ ID NO: 25578 - DNA, 65 bp, Mus musculus
atcatggctgccaaagctgtagcaaacacaatgcggacgtcactgggaccaaacgggctggacaa

SEQ ID NO: 25579 - DNA, 65 bp, Mus musculus
ttcctcaagacaaccaggaagtcacctgttcctaagacgtcagccttggtccttcttcgctccca

SEQ ID NO: 25580 - DNA, 65 bp, Mus musculus
tattccacgacagctatgtgacaacgctggctttgatgccacaaacatcctcaacaagctgcggg

SEQ ID NO: 25581 - DNA, 65 bp, Mus musculus
acttgaccctcatctaccagtgccaggagttccactgaggatggcaggacctgtctttctgcagt

SEQ ID NO: 25582 - DNA, 65 bp, Mus musculus
gggccagagtttatgcgcacacactgacaccaagatttcacattgctcccaatcctaatctcagc

SEQ ID NO: 25583 - DNA, 65 bp, Mus musculus
aaagttcaagctgaacattcagaatcgggccagctcgtaggtgtggatctgagcacaggtgagcc

SEQ ID NO: 25584 - DNA, 65 bp, Mus musculus
tcaatctggccatgtgtcacctgaaactgcaggccttctcagctgccatcgaaagctgcaacaag

SEQ ID NO: 25585 - DNA, 65 bp, Mus musculus
gagcagtgggaagctttggccgactcagtgaaaacttcgatgcattgggctgtcagaagtaagaa

SEQ ID NO: 25586 - DNA, 65 bp, Mus musculus
gtgtactacactaaccgggccctgtgctatctgaagatgcagcagcctgaacaggcacttgctga

SEQ ID NO: 25587 - DNA, 65 bp, Mus musculus
ttgtgcgctatcactacaatggcactctgctggatggcactgcctttgacaacagctacagtagg

SEQ ID NO: 25588 - DNA, 65 bp, Mus musculus
gaaagggagatgtcttacacatgcactacacgggaaagctagaagatgggacggagtttgacagc

SEQ ID NO: 25589 - DNA, 65 bp, Mus musculus
ctccatttgggtcactaggtcatgggggtctcacttcattttcttcaacgtcatttggcggcagt

SEQ ID NO: 25590 - DNA, 65 bp, Mus musculus
ggagacggatgggtggaggtcgagattctgaagaaatggaaatagatggagatccctttagtgcc

SEQ ID NO: 25591 - DNA, 65 bp, Mus musculus
ctggagtgtgtatggcaaggactggcatgcagagggagcgttggacatattgcttgaatggcttt

SEQ ID NO: 25592 - DNA, 65 bp, Mus musculus
ctcccaatgccaccctcatctttgacgtggagctgctcagcttagagtgaaggcaggaaggaaat

SEQ ID NO: 25593 - DNA, 65 bp, Mus musculus
agagcggagacctggagttgttcgacttggtggaagaggtgcagttgaacttctacgagttcctc

SEQ ID NO: 25594 - DNA, 65 bp, Mus musculus
agctatcctctgaactctgcttgattgagggaaccatcgacggcctagagcctgggctgcatgga

SEQ ID NO: 25595 - DNA, 65 bp, Mus musculus
cttggagggcaacaaggagcagatacagaagatcattgagacactgtcacagcagcttcaggcaa

SEQ ID NO: 25596 - DNA, 65 bp, Mus musculus
gtgcatcgcagcttcatggatgaaaaggaccggatcattacagccatctacaatgacactcgggc

SEQ ID NO: 25597 - DNA, 65 bp, Mus musculus
ctcagaagaaaaccgacacctgagagatgaaggcctaaggctcagaaaggtagcacattcggata

SEQ ID NO: 25598 - DNA, 65 bp, Mus musculus
ccatgtgggcaccaacatcctgactgccgtatcctacctgaagggactgtggatggaatgtgtgt

SEQ ID NO: 25599 - DNA, 65 bp, Mus musculus
ctcgcgggccaactacaaacagtgcggaggctaatgccgtccaacaacccgcaaacacgacacta

SEQ ID NO: 25600 - DNA, 65 bp, Mus musculus
ctttgtccagatcttccaaggacactttgaagagctgagacccaccaatgccttcgccttctgga

SEQ ID NO: 25601 - DNA, 65 bp, Mus musculus
caggtgctgggaatgtcctttgcactgacactcaactgccagattgacaaaacaagccaggcttt

SEQ ID NO: 25602 - DNA, 65 bp, Mus musculus
gccattcgatgtagtcacgcactaaagcactctgatgtcagattgagcaggcagtgatgggttac

SEQ ID NO: 25603 - DNA, 65 bp, Mus musculus
gtctggtgaccaggaagcctatgtagagtcctgactctttgctgcaagagatgcataaccatcct

SEQ ID NO: 25604 - DNA, 65 bp, Mus musculus
ctgtgatgcctagagggagggttggcaactgaactgtgcagacaatggtggatttgttttgtttc

SEQ ID NO: 25605 - DNA, 65 bp, Mus musculus
atctcacctgcagcagtgcccattgcaaagcatcagcctctggatagaacagacaagctccttct

SEQ ID NO: 25606 - DNA, 65 bp, Mus musculus
tatggtgttccagaagggtgacagtgtggcccttgctgtgcagaatgaactcagcatcccacaaa

SEQ ID NO: 25607 - DNA, 65 bp, Mus musculus
tccgaaacaagacagaggacttggaagccacgtctgaacacttcaagacaacgtcccagaaggtg

SEQ ID NO: 25608 - DNA, 65 bp, Mus musculus
cctaccctgccttcaagggctttgtgccgccattactggttttagtcctgtggcagatgaaaatg

SEQ ID NO: 25609 - DNA, 65 bp, Mus musculus
cccagcccaaaattcgaaaggacctcaacgagggctacaacccatactacatctccccagcctct

SEQ ID NO: 25610 - DNA, 65 bp, Mus musculus
atcaacatctacttgaagcagtttcatctagctccagtgatggatgacgcagaagtggcccactg

SEQ ID NO: 25611 - DNA, 65 bp, Mus musculus
gttgattcaggagtccaaattcttgggtggtgatatggaacacacccatttggtgaaaggtttgg

SEQ ID NO: 25612 - DNA, 65 bp, Mus musculus
ttggtagcaccaccaagaactactgcctcaagttcggccaagtatgaccaagcacagttcggcag

SEQ ID NO: 25613 - DNA, 65 bp, Mus musculus
ggaccctgaaccaccaatatgactacacatttgattggacgatgttaaagcagaaagcagcccag

SEQ ID NO: 25614 - DNA, 65 bp, Mus musculus
gaggaggctcagttagactaccctctgcttacttgaggtctgacatgcccaatgagagtgtattt

SEQ ID NO: 25615 - DNA, 65 bp, Mus musculus
gctagcaacaacaaagaaaagcacagtacgaaagcagagcgctaagaagacacgaagaacaaagc

SEQ ID NO: 25616 - DNA, 65 bp, Mus musculus
atggtactgctgcaaggacctggctgaacatcatgagatgcctgaagttctggcagtctgtctcc

SEQ ID NO: 25617 - DNA, 65 bp, Mus musculus
tggatgttctgccttttgtccggtggtcctttcaccatcactttaactgaacacacagactggga

SEQ ID NO: 25618 - DNA, 65 bp, Mus musculus
gtgaatgctgccaccatgaatgaggtatctgtcatcaaagaaggctggctccacaaacgtggtga

SEQ ID NO: 25619 - DNA, 65 bp, Mus musculus
taccttgagaagaagaactaatagcacagggtccttccagactcaacgtgctgccttggctgcca

SEQ ID NO: 25620 - DNA, 65 bp, Mus musculus
agggaggcggctgccgcttcctgcgttacgactgcagaatctcctctccgaggaaaggctgggcc

SEQ ID NO: 25621 - DNA, 65 bp, Mus musculus
tgtatctttgagtgtcagctacgtctttgggatcagtggtttcgaggttgggctgagcaggagcg

SEQ ID NO: 25622 - DNA, 65 bp, Mus musculus
acagagtctgtggaacccccaaaggaatccactaaggcctgggaagtctgtcctaagggtgaaag

SEQ ID NO: 25623 - DNA, 65 bp, Mus musculus
tgtgtaataccacccaaaagacaagcgatgggtcctactatttggtcgctcccacaggaactacc

SEQ ID NO: 25624 - DNA, 65 bp, Mus musculus
tgtcaaaacacgagtgctttgcccatcattgaattgaatggaccaatgaagtggtattgatgaac

SEQ ID NO: 25625 - DNA, 65 bp, Mus musculus
ggacctctacctggagcacttactacagaagcgtaaccgacctgagacttcattgaaccagtcaa

SEQ ID NO: 25626 - DNA, 65 bp, Mus musculus
gattctgactgaaggagaaggcccacgaaggctgaggaacttgtacttcctgtacctgatagagt

SEQ ID NO: 25627 - DNA, 65 bp, Mus musculus
gtccttccgattccgtgaacagcgtctcctttcacttccgtatgcactactgtgtcctctttcta

SEQ ID NO: 25628 - DNA, 65 bp, Mus musculus
ggataccttctatgttgtctccttccgaagggaccacctgctgctcccagccatcagccacaaca

SEQ ID NO: 25629 - DNA, 65 bp, Mus musculus
gagtacatctgtgatcagttgctacgtgtggtgtcaagtgttttctggaatgagatggtttgact

SEQ ID NO: 25630 - DNA, 65 bp, Mus musculus
tgtctgtgcctattcctgctcagcctcccgttcattagcctaaagcatcccagctcaaattcagc

SEQ ID NO: 25631 - DNA, 65 bp, Mus musculus
gccgagctaaatcgctacaccccacgctacatggaggacatggagcaggcttttgagagctgcca

SEQ ID NO: 25632 - DNA, 65 bp, Mus musculus
gggctcagacttccattatgagaatgccaacatgtggttcaaaaacatggacaagctgatccgcc

SEQ ID NO: 25633 - DNA, 65 bp, Mus musculus
gctgggatcctgactcacgtgtcatagacttgtaagagcagcagtctctaatcatctcgctgtag

SEQ ID NO: 25634 - DNA, 65 bp, Mus musculus
tcagtgagctctctgaggagcaggctttccatgtcagctatctggatattgaggaactgagcctg

SEQ ID NO: 25635 - DNA, 65 bp, Mus musculus
agaacaagtttggggaggacatgccccactcacactaaatcccagaccacactgcctgtttccct

SEQ ID NO: 25636 - DNA, 65 bp, Mus musculus; identical to SEQ ID NO: 23716

SEQ ID NO: 25637 - DNA, 65 bp, Mus musculus
acccccagaagtgattactgaagatactcagcccccacaattgggtcaggagagagatccagggg

SEQ ID NO: 25638 - DNA, 65 bp, Mus musculus
tcctcatcaaccaggacctcattgccctcatccgggctgaggctgccaagatcaccccacagtga

SEQ ID NO: 25639 - DNA, 65 bp, Mus musculus
cagcaggtcagatgagcttcctggacccttgctcagaaacgtgacttgatctttggatttcctga

SEQ ID NO: 25640 - DNA, 65 bp, Mus musculus
ccctgtcaagcgagttatgggtccaaattttggctatgtgacccgaaagctctatatgtcagagc

SEQ ID NO: 25641 - DNA, 65 bp, Mus musculus
aagctaatgacctgcctctgtgtgaagcttactggaggctggacctcgacgcagattctgctgat

SEQ ID NO: 25642 - DNA, 65 bp, Mus musculus
tgcgtctttgtcgcaaggtggttagaagcagatagcgtgttggcctagcggtgctgctatttgaa

SEQ ID NO: 25643 - DNA, 65 bp, Mus musculus
gggtctcaaccgagcccctggtgtaaaaactggaagctctgcattttgtttccggtcttgggcct

SEQ ID NO: 25644 - DNA, 65 bp, Mus musculus
tggtggaggtttaaggttagggaccacctcagaggctcaatcaccccaaacagcttgagacctag

SEQ ID NO: 25645 - DNA, 65 bp, Mus musculus
ggctagatgacagtaagacactatcaaatgcaactcacaacaccacgcctgacgttaaaccaact

SEQ ID NO: 25646 - DNA, 65 bp, Mus musculus
tggagtatgctccaggaggcgagctctataaggagcttcagagacatcagaagttggaccagcag

SEQ ID NO: 25647 - DNA, 65 bp, Mus musculus
cctggctgttcgcacctttatggagaaagccctttcattttagctaccaggaaccagtgattggg

SEQ ID NO: 25648 - DNA, 65 bp, Mus musculus
aggatgctgagggggacttggttaggctgctgtcagatgaggatgtgggactcatggtgaagcaa

SEQ ID NO: 25649 - DNA, 65 bp, Mus musculus
ggaagtcatgctcactgttgcctgttgctgagagctttggttggctttggttgtgattgtagcac

SEQ ID NO: 25650 - DNA, 65 bp, Mus musculus
aggctaatagcaccagctgaggtaacagaggcatgtggaggcaagcaggcaggcagacccagctg

SEQ ID NO: 25651 - DNA, 65 bp, Mus musculus
ctccgtagatgaagctctccagcacccatacatcaacgtctggtatgatccttcagaagcagaag

SEQ ID NO: 25652 - DNA, 65 bp, Mus musculus
cccttccctagagcaactagcccaagaggtgacatatgcaaacttgcgaccatttgaaccagttg

SEQ ID NO: 25653 - DNA, 65 bp, Mus musculus
ggaactgtttgacagtgagctggcttcccaagctactgcggagtttgagaaggcaatgaaggagc

SEQ ID NO: 25654 - DNA, 65 bp, Mus musculus
gggacagtaaatccaagccttcctcccagttcgaccccaataagctggcaccttccggcaagaaa

SEQ ID NO: 25655 - DNA, 65 bp, Mus musculus
ctcttagccttacaagctccccatcatctgatgcccaggaatcgggttgtccaaatcctcttgaa

SEQ ID NO: 25656 - DNA, 65 bp, Mus musculus
taggccgtgtacatgaggtgtgggacgcactgccagcgttgccctttagtatagctcttggtaaa

SEQ ID NO: 25657 - DNA, 65 bp, Mus musculus
cgaaggacgaacgtgcagcgatccacaactacccaaccggacctacggacacttgctgtgctcca

SEQ ID NO: 25658 - DNA, 65 bp, Mus musculus
gtgaagtggcccgttcatcctagtgccccagaccttgcaggcaacaagagacagtttggttctgt

SEQ ID NO: 25659 - DNA, 65 bp, Mus musculus
ttgtgaatgatgtgagtgaaaaggagcagagatggggtgctaaaaccgtgcagggatcggggcac

SEQ ID NO: 25660 - DNA, 65 bp, Mus musculus
agtactgacagtcaacaacaaagcccacatggtaaccctggactacacagtgcaggtgccaggca

SEQ ID NO: 25661 - DNA, 65 bp, Mus musculus
actaaagaatctagaaagcttgccagtgaccaatcatggagcctcgtgagctaactgtggccgcg

SEQ ID NO: 25662 - DNA, 65 bp, Mus musculus
cccgtctgctgcacacatcgttgaagctttggaactagatggccaatgttgtggtctaagctcaa

SEQ ID NO: 25663 - DNA, 65 bp, Mus musculus
ctgggtgtcctgagagccccagactgagcagtaagaagcctgagctagcaaatgaccactttagt

SEQ ID NO: 25664 - DNA, 65 bp, Mus musculus
ggatctgcagtgcaggaactacgagcaactgttcagttacatgaactcgcagcctcatctgaaag

SEQ ID NO: 25665 - DNA, 65 bp, Mus musculus
gaacagttgttcaggtgtgagctgtccgtggagaagtccacagtgctacagtccgagcttgagtc

SEQ ID NO: 25666 - DNA, 65 bp, Mus musculus
ctatgacctagccctttaattgggacttgtcctttgcagcttgcttctggagcaaggtgtgcttc

SEQ ID NO: 25667 - DNA, 65 bp, Mus musculus
caattctccaacaaatagctcctctacccaggattctatggaggttggccacagtcaccactcca

SEQ ID NO: 25668 - DNA, 65 bp, Mus musculus
ggagattacaagcaggacagaacaggagtacggcacatcgacaacaaccaggacaccagcaaacc

SEQ ID NO: 25669 - DNA, 65 bp, Mus musculus
atgtggtggactggatccggcaggaagatgggtctgtgctcaaatccatcaaccgttccttggtc

SEQ ID NO: 25670 - DNA, 65 bp, Mus musculus
ccagaacctgaaagtggggacaaggatgacctcttgctgttgaatgagatcttcagcacttcctg

SEQ ID NO: 25671 - DNA, 65 bp, Mus musculus
acattgaagaacccaatcctctggaacgtggctgacgtggttatcaagttccctgaggaggaagc

SEQ ID NO: 25672 - DNA, 65 bp, Mus musculus
catggtgcagaagattgccatcacagaatccagtgactgaacacacactctcatgtccacacccg

SEQ ID NO: 25673 - DNA, 65 bp, Mus musculus
tctagtgttgcttctcgtgttggactgtgttcccggttctgtcctagccatttgcactacagtag

SEQ ID NO: 25674 - DNA, 65 bp, Mus musculus
agcaggacccagaaagactccctgcagctctgcctcttcatcccaaagggacctaagcaagttgt

SEQ ID NO: 25675 - DNA, 65 bp, Mus musculus
agctcccagctgaggtgcgccagacactaggccaacttcctgctggcttcattcagtacttcaca

SEQ ID NO: 25676 - DNA, 65 bp, Mus musculus
gtaaaggattctgcagggacatctcggaaacgcaatacacaaggtcttcctgtaaagcctcgctc

SEQ ID NO: 25677 - DNA, 65 bp, Mus musculus
gcatgcctagtgccaatgctcacaacacgtggaaggcaatggaaggaatcttcatcaagcctgga

SEQ ID NO: 25678 - DNA, 65 bp, Mus musculus
aagcctgagaatgtggacatcacccgtgaacccgaggaagccctggacactgtccctgcccatta

SEQ ID NO: 25679 - DNA, 65 bp, Mus musculus
tctaacctggctgtaatcactactgttgtaacgtgatgcagctgtgagctgacgcgagtcttggg

SEQ ID NO: 25680 - DNA, 65 bp, Mus musculus
gcacacctgtgaccaggtcagtgcctacggattcatcacaaacaactaccagaaatactcagacc

SEQ ID NO: 25681 - DNA, 65 bp, Mus musculus
ttctggtccccacatcaaggtaaacggaggaggatctggagttcaaggtcatccccagctgtata

SEQ ID NO: 25682 - DNA, 65 bp, Mus musculus
attcggcagaccacagggatctttccagagtttgggtcctcagtaaaccagaagcctctgaaaga

SEQ ID NO: 25683 - DNA, 65 bp, Mus musculus
ctactgagaggaaagattgtcccagagtgtggagggcgttctgaggaactggaacagtgtactaa

SEQ ID NO: 25684 - DNA, 65 bp, Mus musculus
ttccccaagagccaaacccctgtaaggatgagaaggaacagctttacgcctctgtccagttcgaa

SEQ ID NO: 25685 - DNA, 65 bp, Mus musculus
actacgaactcacctacaacctagagaagaagcgagatgagcgcagtgtaaagagcacagccgtg

SEQ ID NO: 25686 - DNA, 65 bp, Mus musculus
gaaaaggctggagcttcatgcatcctgggaggctcacacatttgcacgaaggacttcctgttaaa

SEQ ID NO: 25687 - DNA, 65 bp, Mus musculus
tttgcccaaggctgtttgtgtgaatggcacagagccccagctcagcagcaaggtgaagccagaag

SEQ ID NO: 25688 - DNA, 65 bp, Mus musculus
gctcatgcagccgtgatcaagggaatgtaactgctgaaacctagctcgtgattggcatattatgg

SEQ ID NO: 25689 - DNA, 65 bp, Mus musculus
cgtgtcaagatgaagagacgggaggatttgcagacagaccaggagatatggtggatccctttcat

SEQ ID NO: 25690 - DNA, 65 bp, Mus musculus
ttggtaccctgtcctcagagtgtgtgacagccactgtaatcagtgctctatgtatgcgtccatag

SEQ ID NO: 25691 - DNA, 65 bp, Mus musculus
atacgcagcaacgcacccctctccgctcacctgacgtcccaccactatgcccggctcgcaatacc

SEQ ID NO: 25692 - DNA, 65 bp, Mus musculus
ccttgctgagcaactagtccttggccatgcatccaggaaaccccaagaaccatgctgcttttcct

SEQ ID NO: 25693 - DNA, 65 bp, Mus musculus
ctctgggagatgactcttcaatccagggtgccatcagtaatcatgccactgttcacgagtgttgt

SEQ ID NO: 25694 - DNA, 65 bp, Mus musculus
cctcagcggaaaccgtccctggttgctagcaagctggctggctgattaaagagctgaactgcatg

SEQ ID NO: 25695 - DNA, 65 bp, Mus musculus
tttctcatggaagtcctaaccacacagcagtacatgcccatctggctggaagtacacacctcgga

SEQ ID NO: 25696 - DNA, 65 bp, Mus musculus
tcgcatctcagctatggggatggtcaggctttctacctcatagggctgatgatgggttgcattta

SEQ ID NO: 25697 - DNA, 65 bp, Mus musculus
aataagtctcgggacagcagcagagacagttcccagtcggagaatgactacctgcaagactgcct

SEQ ID NO: 25698 - DNA, 65 bp, Mus musculus
cccacagcaattctacagcatcatgctagagtgctggaatgttgagcctaagcaacggccaacat

SEQ ID NO: 25699 - DNA, 65 bp, Mus musculus
ataaaggaagtgaccagtctgcagctcagcgcagaagtcaaatggatcgcttggatcgggaagag

SEQ ID NO: 25700 - DNA, 65 bp, Mus musculus
gggtgatctggacccgttggcatctctcaaatcactgacatatctaagcatcctaagaaaccctg

SEQ ID NO: 25701 - DNA, 65 bp, Mus musculus
acatcctcaccaaccgaggcatcgcacaaatgttggaaaagtaccagcagggagactttggctac

SEQ ID NO: 25702 - DNA, 65 bp, Mus musculus
tcgcccaccatccaccccagtcagtatccagcccagtttgcccaccagacctatatcagcgcctc

SEQ ID NO: 25703 - DNA, 65 bp, Mus musculus
ccattcctgggcgagaccaagcaggagacgctgacgaacatctcagcagtgaactatgactttga

SEQ ID NO: 25704 - DNA, 65 bp, Mus musculus
tctgcccggatgaatgtgggtgtgatgttgcacacaggaagactgtgagattggttccatttggg

SEQ ID NO: 25705 - DNA, 65 bp, Mus musculus
acctgtaggactctgtcctcagtcacccccactttataccaccttactgcaaccatctttgaagg

SEQ ID NO: 25706 - DNA, 65 bp, Mus musculus
acagcaagcctgggtcacaggaccaagtggaatggagttctaaaggaagtaaccagcccagatca

SEQ ID NO: 25707 - DNA, 65 bp, Mus musculus
catgacgtgacatatcgtcagatctggtgtttttacacctagaggcatgggtgttctctgaggtc

SEQ ID NO: 25708 - DNA, 65 bp, Mus musculus
ggaagcggttgagccaagctgactcaggagacacattgccttccaactctgcactttcaagctct

SEQ ID NO: 25709 - DNA, 65 bp, Mus musculus
tctcaggcccaaccaaacgctaatgaagactacagagaaggtccttgtgcagtcaaccttgtttt

SEQ ID NO: 25710 - DNA, 65 bp, Mus musculus
ccctattcccaccttacattccactgggtcatagcaacagcaagtgtcctcatctggatttggct

SEQ ID NO: 25711 - DNA, 65 bp, Mus musculus
gaaggagaagacaggcaggcaatactgtgccttgaagattatgagtatcccagatgtcatccgcc

SEQ ID NO: 25712 - DNA, 65 bp, Mus musculus
gccaaagaggattcccaaggattcagcgcgttaccatttctttctgtacaagcattcccacgaag

SEQ ID NO: 25713 - DNA, 65 bp, Mus musculus
ttgatctgtaaccaagtctctcttgactcccctctgtgctctgtgacttgccctgcatcactgag

SEQ ID NO: 25714 - DNA, 65 bp, Mus musculus
gctggaagctaaggagagctgtgaagatctccaggtcctaaacccagggtcagaattcagacttc

SEQ ID NO: 25715 - DNA, 65 bp, Mus musculus
aagatacctaaaaagcctccagctccagacccttttgcccgatcatcccctagaacttcaatgaa

SEQ ID NO: 25716 - DNA, 65 bp, Mus musculus
gtgaacaagaagacagacacgcagaaggacatcaaacctcacctgaaacactatcacctgcccac

SEQ ID NO: 25717 - DNA, 65 bp, Mus musculus
cacataccctaccctttagcaccttaattctgcaggatcttatgccacacatagcaacccagaac

SEQ ID NO: 25718 - DNA, 65 bp, Mus musculus
tctggaggttccagtggctcctccaacgacaacagagcctaccgatacagcaaccgatattgtgg

SEQ ID NO: 25719 - DNA, 65 bp, Mus musculus
aagccctcagtgagcgtgtcagcatcctctgattccatcccctctaatctgtcaaaacactgtgg

SEQ ID NO: 25720 - DNA, 65 bp, Mus musculus
gcattttatgttgcccctgcagaagtcgctctcggtatcctgttggagactaggaatcatacaga

SEQ ID NO: 25721 - DNA, 65 bp, Mus musculus
tttccgttggatcgattgggagaggttggagagactggaaattgcacctcctttcagaccacgtc

SEQ ID NO: 25722 - DNA, 65 bp, Mus musculus
aacggctcaagatcctgccttgcgcacatgcgtaccactgtcgctgcatcgacccctggttctcg

SEQ ID NO: 25723 - DNA, 65 bp, Mus musculus
ctccaccagggttgttgactcttggcgacgaagcaaaggtcacaggcttgtcacactgatttcaa

SEQ ID NO: 25724 - DNA, 65 bp, Mus musculus
cctccagcattcctctggcttgtagttctccagaaaactggctttcatctgtctgctaacctcag

SEQ ID NO: 25725 - DNA, 65 bp, Mus musculus
ctgtgcgattcccagactggacagagtgctcagcaggctccttgcttttaaggaatgaagaacct

SEQ ID NO: 25726 - DNA, 65 bp, Mus musculus
ttgaaaacacagcttggcgactgcactgtagcaacacaggcctcaggtctccttagcagtaagac

SEQ ID NO: 25727 - DNA, 65 bp, Mus musculus
tgcgaccgcagagcaatgggaaagtgagcgtcaatttacccaacatcggtattaagcaggtgtgg

SEQ ID NO: 25728 - DNA, 65 bp, Mus musculus
tcccgatgctgtgaaagattcgaaatgcagttctgctcttgccctagacaacagctgctggttgg

SEQ ID NO: 25729 - DNA, 65 bp, Mus musculus
acctgcccctacccagtgcccacaggtaccagtaaaccttaggaacacaaagtcagcttcaataa

SEQ ID NO: 25730 - DNA, 65 bp, Mus musculus
ccgtcaagaagatgaccttcagcgagtatccctataacaacctccgcaagagatttggggctttg

SEQ ID NO: 25731 - DNA, 65 bp, Mus musculus
tctgcagctaagagggcggggaaaccctactgccaagcaagaattgactccaaataaaggtgcaa

SEQ ID NO: 25732 - DNA, 65 bp, Mus musculus; identical to SEQ ID NO: 23716

SEQ ID NO: 25733 - DNA, 65 bp, Mus musculus
cttttcctatgtgtcaccggaattgcaactgtagccttatggggagtcagaaccaaaggggaagg

SEQ ID NO: 25734 - DNA, 65 bp, Mus musculus
actggctgtggacaccgataccttcagctttggggtggtaatactggagacccttgctggtcaga

SEQ ID NO: 25735 - DNA, 65 bp, Mus musculus
aaagacagctaacactatctccaaatttgacaacaatggcaacagggaccggatgaaactgaccg

SEQ ID NO: 25736 - DNA, 65 bp, Mus musculus
acagctttcagcctggtgaccaaagatggacagcctgtttgctatgacatggaggtgccagactc

SEQ ID NO: 25737 - DNA, 65 bp, Mus musculus
tcctctgccatactcttgaatctctgaggaaatctaccagttggaaacaacctcacctggatttt

SEQ ID NO: 25738 - DNA, 65 bp, Mus musculus
ggttccctattcagtgtgtgtgtcttctgactattccatcgtgaatgccagtgttctggaggcag

SEQ ID NO: 25739 - DNA, 65 bp, Mus musculus
gaagatgccatgttaagtgccacagagaccatctagacaagaaagaggacttgatttccccgtgc

SEQ ID NO: 25740 - DNA, 65 bp, Mus musculus
agggtacctggatacacccagaaattgacaaccctgaatactcccccgatgcaaatatctatgcc

SEQ ID NO: 25741 - DNA, 65 bp, Mus musculus
ttgaatctgcacttagtaccacctgagccctggtagctctgctgtgccttttggagtggggtcta

SEQ ID NO: 25742 - DNA, 65 bp, Mus musculus
gtcctgggctagcttgctccatgactgtggtgagccacggcaccatggccatcttgcttcataaa

SEQ ID NO: 25743 - DNA, 65 bp, Mus musculus
catgcacagttgtgttccttgcattctaagtcagtggagggaagcagagctttgagtgacacacg

SEQ ID NO: 25744 - DNA, 65 bp, Mus musculus
tttccggctgacttcccgggccctgcattacacagtcccggttctgccatgtcccagaaacaaga

SEQ ID NO: 25745 - DNA, 65 bp, Mus musculus
aaaatccgataagagaggcaagtccaagtgtgagaggaacgggttggtcaaggcgcagatcgcgc

SEQ ID NO: 25746 - DNA, 65 bp, Mus musculus
gggagatgagtacgatgtgtgtgctatctgtctggaggagtatgaagacggagataagctaagga

SEQ ID NO: 25747 - DNA, 65 bp, Mus musculus
tatttgtaagcctgaactgcagcccacacagggcagcaatgtcgaagtagccattaagtggccac

SEQ ID NO: 25748 - DNA, 65 bp, Mus musculus
ctgtgcctcagttttctgcatctgtggaaggggttaaacagctctttgccccatctccagtcata

SEQ ID NO: 25749 - DNA, 65 bp, Mus musculus
tggtcctggtggacctgcagtacgaaggcgctgagtgtggagtaaatgcggatgtggagaagcat

SEQ ID NO: 25750 - DNA, 65 bp, Mus musculus
gtctaggcttgaggtgtcggacgacctggagaatgtgtgcaattgggtagtggacacttgtttac

SEQ ID NO: 25751 - DNA, 65 bp, Mus musculus
ctgtgacggacaggacttttgtcaagtttgccccaatggtacgctgtttgaagaggctttcctgt

SEQ ID NO: 25752 - DNA, 65 bp, Mus musculus
ttcaggcagacttggaagctcttcagctcacatatgagcatcgacatcacagatgacggcatctg

SEQ ID NO: 25753 - DNA, 65 bp, Mus musculus
aggaccaggatgtggatgtcaagtactttgcccaggaggctctgactgttctctctcttgcctga

SEQ ID NO: 25754 - DNA, 65 bp, Mus musculus
cctgactcccacagggatgttgcctagtggagtgttggctggaggacggcagaccttgcaaagtg

SEQ ID NO: 25755 - DNA, 65 bp, Mus musculus
atttgtaccaaacactgtgtcccctcagccaggaaaggagcactgaactaagctctcacccctca

SEQ ID NO: 25756 - DNA, 65 bp, Mus musculus
agccatcagaggttttacaattgcacacaggatccgaagttttgaagaagcccgaggtctagacc

SEQ ID NO: 25757 - DNA, 65 bp, Mus musculus
ccgggatcctccagcagagtggacacgggtgtaacgagtgctgtgccagttatagcctgccactc

SEQ ID NO: 25758 - DNA, 65 bp, Mus musculus
ggtaccacaggtagtgtgaagagaacacatgaggaagatgacgactttggaaacatgcaagtggc

SEQ ID NO: 25759 - DNA, 65 bp, Mus musculus
ttcttgactggttaagcaaaaagggtcactgactgcttcgtctcctttgcgcttacttggaaatt

SEQ ID NO: 25760 - DNA, 65 bp, Mus musculus
atccagaccttggaccagatccggacaattgaccgaaagcaagaggtaccccatgatggacccat

SEQ ID NO: 25761 - DNA, 65 bp, Mus musculus
tggctgtaccggcctgtatggactgtaacgcgcttcgtggcctgacatttactggaaatgtatgt

SEQ ID NO: 25762 - DNA, 65 bp, Mus musculus
ttacctttggggctgaggtggtagccaagttcctgcacaagcatgatttggacctcatctgcaga

SEQ ID NO: 25763 - DNA, 65 bp, Mus musculus
cttagtccctcctgcttgaaggacaggcgttcccgtcagatacggacgtcaagatgctgtgtttt

SEQ ID NO: 25764 - DNA, 65 bp, Mus musculus
taagcagagactgaggttcaaagacccacacacgcacaagaccagatgctgcgtcatgtagctca

SEQ ID NO: 25765 - DNA, 65 bp, Mus musculus
gatgggtattactgccaaagccaaattgcactctgcttcttcagcaaattccaagagcaaggcgt

SEQ ID NO: 25766 - DNA, 65 bp, Mus musculus
ttttccatgtgctttatcagaagcaagggctacacgacacgtgcctctggatctttagctagccc

SEQ ID NO: 25767 - DNA, 65 bp, Mus musculus
gaggatgttcatgatccagaccattgcgcagtacaagttcgtctaccaagtcctcgtccagttcc

SEQ ID NO: 25768 - DNA, 65 bp, Mus musculus
aaaagacccactgtaggatgacacagccattgaacacatgaaatgggacctctgggatcagtccc

SEQ ID NO: 25769 - DNA, 65 bp, Mus musculus
ccgcatacagcaccccattaaactctccaggcttgtccaagctaacagatcactctggtgaatac

SEQ ID NO: 25770 - DNA, 65 bp, Mus musculus
gttgaggtcagctagcctggtacagatggctggtaaactgtggctctggctcctgctcaagccat

SEQ ID NO: 25771 - DNA, 65 bp, Mus musculus
gctttctggatcagatcaaccagcgacaggaaagtttgcctcatgcagggcccatcattgtgcat

SEQ ID NO: 25772 - DNA, 65 bp, Mus musculus
gtctttatgaagcataatccctttggctgcatgagtccgttccttggaatcactggtccactgcc

SEQ ID NO: 25773 - DNA, 65 bp, Mus musculus
agttctaccctctggagattgactatggccaggacgaagaggcagtaaagaagctgacggtgaag

SEQ ID NO: 25774 - DNA, 65 bp, Mus musculus
aaagttcggcaggttcatcacgctcagaatgtagtccactctgaactggttctcagggttggcca

SEQ ID NO: 25775 - DNA, 65 bp, Mus musculus
atccacaccatcactctgctgttgatctgtaaaacctggggacacagctttcgcctctctacaga

SEQ ID NO: 25776 - DNA, 65 bp, Mus musculus
cagtatcttcctgctatcagagccttatgggaggacagtggtatacagaatgcctacgatcggcg

SEQ ID NO: 25777 - DNA, 65 bp, Mus musculus
gccggtgtcataaagagactgtggaaagacagtggtgtgcaagcctgcttcaacagatcccggga

SEQ ID NO: 25778 - DNA, 65 bp, Mus musculus
aaaggcacacctcagcatctgcttccccgactacgatggacctaacacttacgaggatgccggca

SEQ ID NO: 25779 - DNA, 65 bp, Mus musculus
tccaatacatacgaagaggcagctgcttacattcagtgccagtttgaagatctgaaccgaagaaa

SEQ ID NO: 25780 - DNA, 65 bp, Mus musculus
ctcagttgctgtgcttagagagcattaaagacaagccgtggcatatttgtgctagtgacgccatc

SEQ ID NO: 25781 - DNA, 65 bp, Mus musculus
agtcgcatgcccaccacaggcatcaatgagtactgcttctccgtgaagaaaaccaaactgcgcat

SEQ ID NO: 25782 - DNA, 65 bp, Mus musculus
tacaagggtcagaacacgtacgaggaagccgcggtctacatccaacgtcagttcgaggacctcaa

SEQ ID NO: 25783 - DNA, 65 bp, Mus musculus
gagaaggtgtctgcttttgagaatccatatgtagatgcaataaagagcttgtggaatgatcctgg

SEQ ID NO: 25784 - DNA, 65 bp, Mus musculus
tggtgatagagaaggcatgctcaggactgttagcagtgtggccagttcactgtaacgaaggcatg

SEQ ID NO: 25785 - DNA, 65 bp, Mus musculus
cttctgtcagaggtagctctaggtcagtgtaatgaactactggaggccaatcctaaagcacaagg

SEQ ID NO: 25786 - DNA, 65 bp, Mus musculus
cattgccaacaatctccggggctgcggcttgtactgacctcttgtcctgtatagcaacctatttg

SEQ ID NO: 25787 - DNA, 65 bp, Mus musculus
actgtccctgaagatgcaacaccagatgcgggagaagatcccaaagttacaagagcaaagttctt

SEQ ID NO: 25788 - DNA, 65 bp, Mus musculus
gtcacaacttttgagcaccagtatgtgaatgccatcaagacgctgtggagtgaccctggtgtcca

SEQ ID NO: 25789 - DNA, 65 bp, Mus musculus
cacaatcctacagctaaacctacgggagttcaacttggtgtaaatggagggcctactcctccgag

SEQ ID NO: 25790 - DNA, 65 bp, Mus musculus
ggggatctcctcacactggtaatgtctttcctgttagagaggtttatgctaccacttcgcatttc

SEQ ID NO: 25791 - DNA, 65 bp, Mus musculus
aagttgattgagcgcaaacaggcacagatccgcaaggtctaccctggactcagctgcttcaaaga

SEQ ID NO: 25792 - DNA, 65 bp, Mus musculus
ggataggttcctaaggatgaatttcagcaagggctgtccacctgtcttcaataccttgaggtctt

SEQ ID NO: 25793 - DNA, 65 bp, Mus musculus
atgtgcttttacaataaatgtcacccagtggccttgggaaatttgtgaatgtgccacaccaaaag

SEQ ID NO: 25794 - DNA, 65 bp, Mus musculus
ggttccccatggatctgaaaaccatgagtgaacgcctcaggaacaggtactatgtgtctaagaag

SEQ ID NO: 25795 - DNA, 65 bp, Mus musculus
ttacttccgggaccacaacattgagctctctaagctgctgtataagatgggccagacactgccca

SEQ ID NO: 25796 - DNA, 65 bp, Mus musculus
ggcagaacattcgactggcactgatttgccgtctcctaggctcgggacttttcctgttgttaact

SEQ ID NO: 25797 - DNA, 65 bp, Mus musculus
aagggtcttgcctggtaccgagacttgatgcccagaaccctcaagggacagatcaccatggagaa

SEQ ID NO: 25798 - DNA, 65 bp, Mus musculus
gaccgcacatggcgactccatcagtgagctgtgatgtgggtaggatttgcctactctgtactttt

SEQ ID NO: 25799 - DNA, 65 bp, Mus musculus
ggctctggaagtggaatcctcaccgcctgttttgcacggatggttggaaatagtggaaaagtcat

SEQ ID NO: 25800 - DNA, 65 bp, Mus musculus
ccactggggcattgtggagtcacattcacgaaacacgaagccttgtacttctctagaaaagtgtt

SEQ ID NO: 25801 - DNA, 65 bp, Mus musculus
gcgtgcatgttgccttccctgtaaatagccttagctatcatttcctagtggaaaacactgtgggg

SEQ ID NO: 25802 - DNA, 65 bp, Mus musculus
gaggatgaggacaccattgatgtattccagcagcagacaggaggatcagcctcccgagggagcgt

SEQ ID NO: 25803 - DNA, 65 bp, Mus musculus
cttcacaggagatgtctttgggtaccatgggtacacctttgcgaatcttggagagcatgaatttg

SEQ ID NO: 25804 - DNA, 65 bp, Mus musculus
catttgtggatcgagtttatggtgaatccaagttgggaggaaatgaaatagtctcgttcctgaaa

SEQ ID NO: 25805 - DNA, 65 bp, Mus musculus
agagggcgcaaagggcataaacacacgggcggccacgtggaagacagctggttgagaccctcggt

SEQ ID NO: 25806 - DNA, 65 bp, Mus musculus
atgaatggggagaggactgcacccttttgctcctggctccagggatttctgggtaccttgaggtg

SEQ ID NO: 25807 - DNA, 65 bp, Mus musculus
ggattgttcatcacctatgtgatgctgaagagccagaagataaccaagaaggctcagtgaaggtc

SEQ ID NO: 25808 - DNA, 65 bp, Mus musculus
cctaccctttctgcttttgtaaggaaatgtgctgacgtcatcacatgatgtcagtgtttacattc

SEQ ID NO: 25809 - DNA, 65 bp, Mus musculus
ttgaagcaggccattacccatgagactactgctggctcgctgttgcctgtggtcatcattgcagt

SEQ ID NO: 25810 - DNA, 65 bp, Mus musculus
tagctggcttccttgttcattgttccaagagatgggtgtggagagacggcttagtgtaggatcct

SEQ ID NO: 25811 - DNA, 65 bp, Mus musculus
atcctgtactacgtctacatggggctgcttgcagtgttctgtaccaatgccatcaacatcctggc

SEQ ID NO: 25812 - DNA, 65 bp, Mus musculus
gagaaggaagctctcgttccacattcctagcaactatattctcaggcacacataggcgcacagag

SEQ ID NO: 25813 - DNA, 65 bp, Mus musculus
gaattgacccaggatcaactcatcagaaactcaggatctggtacctgcctgacatcccaggacaa

SEQ ID NO: 25814 - DNA, 65 bp, Mus musculus
caggagaggctgataccttaagtgttctagaggaaatgtgaggactgagttaggatggctggagg

SEQ ID NO: 25815 - DNA, 65 bp, Mus musculus
aatgcagtccctgacatccagggtgactcggaggccgtgagtgtgcggaactcgctggagacatg

SEQ ID NO: 25816 - DNA, 65 bp, Mus musculus
agaaatgagctgatgtcgatgctatggactgcacacaagtcttgatgttccattcagtctgcagc

SEQ ID NO: 25817 - DNA, 65 bp, Mus musculus
caaattgcacccaaggaaggacacactgtttatgccccaacaaaatccactgtctatcgtgggat

SEQ ID NO: 25818 - DNA, 65 bp, Mus musculus
ggccaacaagtacgacgaggcagccagctacatccagagcaagtttgaggatctaaataagcgca

SEQ ID NO: 25819 - DNA, 65 bp, Mus musculus
atgatcaagcctgaggatgtgaaactcctcccagatgatgaaaacaccccagaaaagcgggctga

SEQ ID NO: 25820 - DNA, 65 bp, Mus musculus
ttcatggaaggtgtgcagaaggaccagatgctcctggacacgctgacccgaagcctggacttgac

SEQ ID NO: 25821 - DNA, 65 bp, Mus musculus
ccttcaagagaaatcggaaggagggtgggggtgattcctcagcctcctcgccaacagaggaagag

SEQ ID NO: 25822 - DNA, 65 bp, Mus musculus
catatgtttgtctgcggcgatgtcactatggcaaccagcgtcctgcaaaccgtgcagagaattct

SEQ ID NO: 25823 - DNA, 65 bp, Mus musculus
cttaggagttcatgtaaaccataggaacttcctgcttatctcatgttagctgtaccagtcagtga

SEQ ID NO: 25824 - DNA, 65 bp, Mus musculus
atcccagcagtgctagccagttctgaggggaatgggcttttggacatttgtgagaaacacaggct

SEQ ID NO: 25825 - DNA, 65 bp, Mus musculus
aggaggatgctggtgtgttcatcagcaggctgagggatgacaaccggtaccacgaggacatcttt

SEQ ID NO: 25826 - DNA, 65 bp, Mus musculus
aaatctttccgccaaatggacacaaacaatgacggcaagctgtcgcttggaggagttcattccgc

SEQ ID NO: 25827 - DNA, 65 bp, Mus musculus
gggtagccaactgaccctgtcaaggaaggaactgggcttggaatctcgccctgagctgctagcct

SEQ ID NO: 25828 - DNA, 65 bp, Mus musculus; identical to SEQ ID NO: 23716

SEQ ID NO: 25829 - DNA, 65 bp, Mus musculus
ttcactttgtcactgttgaaatgaccatgagtatagtgagtccacaatgtttcctgtttgtcccc

SEQ ID NO: 25830 - DNA, 65 bp, Mus musculus
tgggtgccactgtttaacgcaggaggacaacttgtgaaggaagtgttttcctcaaagcctgtggg

SEQ ID NO: 25831 - DNA, 65 bp, Mus musculus
tatcaggaagaaatgcaggagatggtccgcaagagagtgctgttccaggtgcacacaggctactc

SEQ ID NO: 25832 - DNA, 65 bp, Mus musculus
ccatacactgtcctgaggcattctcagagaacacaaatacggcgccagacttgagagagaccttt

SEQ ID NO: 25833 - DNA, 65 bp, Mus musculus
ctcccctatccctgtgacactgcccagtaataactgttcgttgttgtttacctgttgcttgtaag

SEQ ID NO: 25834 - DNA, 65 bp, Mus musculus
ggagcgacctttggctacgtggctggcctggttatctcgccactctggatctactggaatagaaa

SEQ ID NO: 25835 - DNA, 65 bp, Mus musculus
tccttggtagtggtggctggtcctatttggatcttaaatgtaccccaaatctcctatgttgaagg

SEQ ID NO: 25836 - DNA, 65 bp, Mus musculus
agtcactatgaccccaatactacagcggttctcgtcgtctttaagccacaggatttaaggtggct

SEQ ID NO: 25837 - DNA, 65 bp, Mus musculus
ttacttcaagccactgacagaatggctcgtcaccgagaacaggagacatggagagacactgggct

SEQ ID NO: 25838 - DNA, 65 bp, Mus musculus
taatgggagattccaagtccagcatggaggtggcaggtgtgacggctctagcttgtgggatgata

SEQ ID NO: 25839 - DNA, 65 bp, Mus musculus
attcgcctctctttccatggccgccaaagcctgtactgctccaatacctttgatgggcctggaaa

SEQ ID NO: 25840 - DNA, 65 bp, Mus musculus
ttcatctgtcagtacccattgcttcagcaagatgcccccatatagttctggcctgagaccctgca

SEQ ID NO: 25841 - DNA, 65 bp, Mus musculus
agctggaggaagagctggatgaggctgtggagagaagcctgcaaagtatcctgagaaagaactag

SEQ ID NO: 25842 - DNA, 65 bp, Mus musculus
ccttctttgttgtacccaccttccttcagtgctagaacagaacagcgtaacttatgttcccattg

SEQ ID NO: 25843 - DNA, 65 bp, Mus musculus
cggcggtgtttttacacgtctgtactgggaaaccatggggtatccaacttaagcgcctttaggaa

SEQ ID NO: 25844 - DNA, 65 bp, Mus musculus
ctccatgcctccaattgattcatgctgatgcctcagctgggagtgcaaccagttcctactgatta

SEQ ID NO: 25845 - DNA, 65 bp, Mus musculus
ccacaagtttctgcagtaaaagtccaaagactccagttagcagattttgaatcccattctggttt

SEQ ID NO: 25846 - DNA, 65 bp, Mus musculus
acagagacagagtggaggagaagacagaagtgctcttttcacacagactacacgacaccaggagg

SEQ ID NO: 25847 - DNA, 65 bp, Mus musculus
ccctgtggatcaaaggagaagccaggagtttacaccgatgtctgcactcatatcagatggatcca

SEQ ID NO: 25848 - DNA, 65 bp, Mus musculus
attaccagaagggtgtcatcaaggctacacccagctcctgtgaccctcggcaagtggaccactct

SEQ ID NO: 25849 - DNA, 65 bp, Mus musculus
ctcagcctagagccaatcaccatcacacagaaaggcaggaagaagcctccagttggccttcagct

SEQ ID NO: 25850 - DNA, 65 bp, Mus musculus
tgcctcattccttgcgatgtgccaatgtctccatcatcgaacacaaggagtgtgagaaggcctac

SEQ ID NO: 25851 - DNA, 65 bp, Mus musculus
cctgacagaccccaagctctatggcagccttcctctttgtatgcttttggaaagaacaggggcct

SEQ ID NO: 25852 - DNA, 65 bp, Mus musculus
gcaagaccagcttctacatgggcctgaatcaatttagtgacttgactccagaagaattcaagaca

SEQ ID NO: 25853 - DNA, 65 bp, Mus musculus
aggagctcttggattgtgacaaggtggacaaggcctgcttgggtggattgccctccaacgcctat

SEQ ID NO: 25854 - DNA, 65 bp, Mus musculus
atatacagaccttactgtcccggatggagtgtcgagggggaacccaagctcaggccagtcagcca

SEQ ID NO: 25855 - DNA, 65 bp, Mus musculus
tgggtgggtaaaggacctacactatggaatcctcattgcaaaatcacagaaaccaatcaaattac

SEQ ID NO: 25856 - DNA, 65 bp, Mus musculus
ttaaccctaaatctctttgttcctgaggcgtaggaatcaaagcctgccacctgctgagggaggga

SEQ ID NO: 25857 - DNA, 65 bp, Mus musculus
tgacaaaagagtgtcatgtggccatggaaacatttgtttttctggaaagtaaagtctcaagaagg

SEQ ID NO: 25858 - DNA, 65 bp, Mus musculus
taccacttctgtggaggttccctcatcaatgaccagtgggtggtgtctgcagctcactgctacaa

SEQ ID NO: 25859 - DNA, 65 bp, Mus musculus
agtctccgaagactgtcactttcaggtcatactctaatcggacattgcctgacactgtggactgg

SEQ ID NO: 25860 - DNA, 65 bp, Mus musculus
ttccccagtcttgaggagctctgtttggctggctccacctgcaactttgtgagcaatgaggttct

SEQ ID NO: 25861 - DNA, 65 bp, Mus musculus
agcgccagtgtctacgcttggacatttgtcctttgtacctcacttgaggtcatcaatgaaggcca

SEQ ID NO: 25862 - DNA, 65 bp, Mus musculus
taaacgtgaacagacagtccatcagagagtggttcgctagcctgccgtaggacggacagtgaaaa

SEQ ID NO: 25863 - DNA, 65 bp, Mus musculus
gaagctctactgcaagctctagtaacacatggacccattgctgttgcaattgatggttcacatgc

SEQ ID NO: 25864 - DNA, 65 bp, Mus musculus
gacgggcctttgccactatgcttggctggccttgctcttgccacaaaagctcgttggatggaaaa

SEQ ID NO: 25865 - DNA, 65 bp, Mus musculus
gtgctactctgtcgcagaagggtattactctcaccgagaaactgtgaatggctcctggtacattc

SEQ ID NO: 25866 - DNA, 65 bp, Mus musculus
atcacctaacagccaacagaggtgccaagggtgagcgagggagcaaaagccacccgaatgcccat

SEQ ID NO: 25867 - DNA, 65 bp, Mus musculus
cgggttcccatcataagcaacgaagtttgcaacagccccgacttctacgggaatcagatcaagcc

SEQ ID NO: 25868 - DNA, 65 bp, Mus musculus
gaggacagaataactttgactcctctggcgtaaattgggtgcaatctatcactaatcagagacct

SEQ ID NO: 25869 - DNA, 65 bp, Mus musculus
aggtctctgaaccctagcttctaccatgtgaaggttggagggctgacactttcccttctggagcc

SEQ ID NO: 25870 - DNA, 65 bp, Mus musculus
aagaaaccttcacggagacggagttaccagagatggggacagacaggaaactggggattaagctg

SEQ ID NO: 25871 - DNA, 65 bp, Mus musculus
cctacacactcagcagtacggactacgtgctacagtatcccaacaggagagacaagctgtgcaca

SEQ ID NO: 25872 - DNA, 65 bp, Mus musculus
gcagggcattttccagaagagcctgaacggaatggagttgctcctggtgctcaaattctatccat

SEQ ID NO: 25873 - DNA, 65 bp, Mus musculus
cctgggcctaagaagcagcacccttccagataagatgcagcaaaccccagacatcccttgtttta

SEQ ID NO: 25874 - DNA, 65 bp, Mus musculus
ccgggcaacataacataagggtatatgggacagccacggattggtcgcgggcagaaaattgggca

SEQ ID NO: 25875 - DNA, 65 bp, Mus musculus
gctatgtgcagattggcctaaggcagtttgtccaagaatgcatggtgcatgactgctctcttagc

SEQ ID NO: 25876 - DNA, 65 bp, Mus musculus
ctggatcaagcctgggatgacgatgatagaaatctgtgagaagttggaagactgttcccgaaagc

SEQ ID NO: 25877 - DNA, 65 bp, Mus musculus
caaaactaaccaggatgactccttagattccaagagttctttgcccacagatgagtcagtgaagg

SEQ ID NO: 25878 - DNA, 65 bp, Mus musculus
ggaaggcctcactgtcactgtcagtctccttggtgtctacaaaaccggaggactggacctgccct

SEQ ID NO: 25879 - DNA, 65 bp, Mus musculus
tggactgttctcacgctcaaggcaatcagggctgtaacggaggcctgatggattttgctttccag

SEQ ID NO: 25880 - DNA, 65 bp, Mus musculus
cacagggaagaatgtgagacagcatttccacagtaatgtcatccacttcaatgaccagccttccc

SEQ ID NO: 25881 - DNA, 65 bp, Mus musculus
ccagtgcctacatccgaaaggatcggtcacacaattgcaggagcaactttgaggagggcatggat

SEQ ID NO: 25882 - DNA, 65 bp, Mus musculus
acagatggtttcttgttggtgtgacatcatttggagtccagtgtgcactgcctaatcaccctggg

SEQ ID NO: 25883 - DNA, 65 bp, Mus musculus
tcgactttgacagcttcatctgctgcttcgtcaggctggaagggatgttcagagcttttaacgcg

SEQ ID NO: 25884 - DNA, 65 bp, Mus musculus
tttcttctggcaagggctatggcaaaggctaaggcgttagtgggcagtcaggctcccagtcccat

SEQ ID NO: 25885 - DNA, 65 bp, Mus musculus
aaaggcagctaaatgcagagggtacagagagattcctgtggggaacgagaaagccctgaagagag

SEQ ID NO: 25886 - DNA, 65 bp, Mus musculus
ggagatctgcaacctgaccccggacaccctcacctgtgactcctataagaagtggaaactcacca

SEQ ID NO: 25887 - DNA, 65 bp, Mus musculus
tacagtgcagaaagcaatgatgagttagatgttgaattagcggagaacacaggtgattatgagcc

SEQ ID NO: 25888 - DNA, 65 bp, Mus musculus
tgaaggactgggttcaggaaaccatggccaagaactagttcagggctcactagaaggctgcacat

SEQ ID NO: 25889 - DNA, 65 bp, Mus musculus
caggagacggaaggctccaacatagaaatgagtgcctccggtcagctaactgatgaagaactcat

SEQ ID NO: 25890 - DNA, 65 bp, Mus musculus
ggcagtgaactgagtgaaggggaattggaaaagcgcagaagaacccttttggagcaactggatga

SEQ ID NO: 25891 - DNA, 65 bp, Mus musculus
aagcaagtgaaggttcccattgtggaaaacagcctgtgtgaccggaagtaccacactggcctcta

SEQ ID NO: 25892 - DNA, 65 bp, Mus musculus
tatacactctgacttctacctatgcttcctggatccaccaccatgtggcagagctccagcctcga

SEQ ID NO: 25893 - DNA, 65 bp, Mus musculus
ccagataatgtgtcttggagacatcctgtcaggggctcacttttcattgagtcactcatcaaaca

SEQ ID NO: 25894 - DNA, 65 bp, Mus musculus
gccagtggcaaacccatagcagctgtgatgaatacctggaccaaacaaatgggattccctctcat

SEQ ID NO: 25895 - DNA, 65 bp, Mus musculus
tgtatactcatcccacgtgtcctgcccagactttcctcagtggtaactaactctgcagccctctt

SEQ ID NO: 25896 - DNA, 65 bp, Mus musculus
ctggggcactgtcaccagccctcaagagaactttccaaacaccctcaactgtgcggaagtgaaaa

SEQ ID NO: 25897 - DNA, 65 bp, Mus musculus
ggcttcagtaccttcccaggttcgccaaaatggaggaaatcccacatcacctacaggattgtgaa

SEQ ID NO: 25898 - DNA, 65 bp, Mus musculus
tccagccggaacctcgctccctctactgcaatctctggaaactggtgtctgacgcgctgctctcg

SEQ ID NO: 25899 - DNA, 65 bp, Mus musculus
gaaccaatgcaagtactagcgtgtaggacagtctgaaggcttcacatggacgacttggaccatga

SEQ ID NO: 25900 - DNA, 65 bp, Mus musculus
cccggagtctacacagacgtggccaactacctggcttggatccagaagcatattgcttcataact

SEQ ID NO: 25901 - DNA, 65 bp, Mus musculus
caccactatgtccccaaggacttctgagtcacatccaggatgacctccgttcctcccagcatgct

SEQ ID NO: 25902 - DNA, 65 bp, Mus musculus
acccctgcacaggcaggtcctggtgatcttgtctcagctggaaggcaatgctggattctctatca

SEQ ID NO: 25903 - DNA, 65 bp, Mus musculus
ttggctgcatcgctggcttgatcttcttgaccttcgtcacattctctaccaccaacggaaagctg

SEQ ID NO: 25904 - DNA, 65 bp, Mus musculus
cctccagtttgtcacaggtacttccaaggtacccctacaaggatttgctgcccttgaaggtatga

SEQ ID NO: 25905 - DNA, 65 bp, Mus musculus
aacaggctttgagtttgttccaaagaatgaggatgccctaatgaatgctgtggcaagtatagggc

SEQ ID NO: 25906 - DNA, 65 bp, Mus musculus
agctaagacacagcaagccagaataaagactgtgccagctggtcagtcgcccttttgagaccact

SEQ ID NO: 25907 - DNA, 65 bp, Mus musculus
cctcggcagaaggtgaggatcacagatgacatggatcaggtggagttgaaggagttcaatcccaa

SEQ ID NO: 25908 - DNA, 65 bp, Mus musculus
aagagccgcaaacatgaatgcagcaaagaggcccctacagaacctggtggggacacccaggaaca

SEQ ID NO: 25909 - DNA, 65 bp, Mus musculus
gcaggaagtcagggtcaaaagacaattggttggcggacagatattgacggtctgcctattgagga

SEQ ID NO: 25910 - DNA, 65 bp, Mus musculus
ggatgagcaggtacaaggaactccttcaaaggccatgctgcgactcctacaaagtgcttttagca

SEQ ID NO: 25911 - DNA, 65 bp, Mus musculus
tttgcttgaacacacgtgccagagggcttatcaccaaggaatcagtgcatttgaacccctatggt

SEQ ID NO: 25912 - DNA, 65 bp, Mus musculus
gagagtggctacttccgtatccgcagaggaactgatgaatgtgcaattgagagtatagccgtggc

SEQ ID NO: 25913 - DNA, 65 bp, Mus musculus
gagcaaagacttcatgatgttaagcagaaacccagcaactacactactgtgtgtgtatacctgtg

SEQ ID NO: 25914 - DNA, 65 bp, Mus musculus
gatgctgcctttaactggagtaagaacaagaagacatacatctttgcaggagacaagttctggag

SEQ ID NO: 25915 - DNA, 65 bp, Mus musculus
tagggctagggatggtcttcccagcataggttcactccaaccaaggtgctaaaaggaacagacag

SEQ ID NO: 25916 - DNA, 65 bp, Mus musculus
aatgagtgcgtggaggtcatgaagaatgtggtctcggagaacatgctgtgtgcaggcatcattgg

SEQ ID NO: 25917 - DNA, 65 bp, Mus musculus
ggtgcacgaggtggacgtggtcattaagcacaacaagtttcagagggacacctacgactatgata

SEQ ID NO: 25918 - DNA, 65 bp, Mus musculus
gacctctggtctcaagaacacttgtctgaggctgactccatgctgtttgtacttccagttttgtt

SEQ ID NO: 25919 - DNA, 65 bp, Mus musculus
cagtactgggtatatgatggtgagaagccagtcctaggccctgcaccactctccaagctgggcct

SEQ ID NO: 25920 - DNA, 65 bp, Mus musculus
gtcttagaatgggtggcttgtgtcaggtccaacttcctggtcttgtgctacctccatgacgtgaa

SEQ ID NO: 25921 - DNA, 65 bp, Mus musculus
tgccacttctgtctgggcagacctctctctactcaagggaataggccaggcctgtcaggagtcaa

SEQ ID NO: 25922 - DNA, 65 bp, Mus musculus
acacccacgaaatggcaaaagccaaatgaccttcagtgtgtgttcatcaagctcctgcccaatga

SEQ ID NO: 25923 - DNA, 65 bp, Mus musculus
ccacgagatgtcatttcttcagtttggcatgctggtttcaccatcgctttaatcccaaggcctcc

SEQ ID NO: 25924 - DNA, 65 bp, Mus musculus; identical to SEQ ID NO: 23716

SEQ ID NO: 25925 - DNA, 65 bp, Mus musculus
actggacagagtgtgagctttctggctacggcaagcatgaggcatcgtctccattcttctctgac

SEQ ID NO: 25926 - DNA, 65 bp, Mus musculus
cccaagggacaaagcaaaggacagatgacagtaagggcatactttgaacccaagaaaacaggccc

SEQ ID NO: 25927 - DNA, 65 bp, Mus musculus
ggacaggattcagccaggcaaggaacacaacttcaacatctacaatgacagtgtgtctgattccc

SEQ ID NO: 25928 - DNA, 65 bp, Mus musculus
tccacaccaaaggccgaaagcatggcagaaagggcaagaaacaccatcgcaagcgttcacactca

SEQ ID NO: 25929 - DNA, 65 bp, Mus musculus
tatttactgggagaatgctctgtgctgggaacctccaagaagacaaccgtgtggacagctgccag

SEQ ID NO: 25930 - DNA, 65 bp, Mus musculus
agagaaactacgctatgccatcagcatgaacacgggctttgagctctcctaacacagcctggtct

SEQ ID NO: 25931 - DNA, 65 bp, Mus musculus
ccaaagcagatgaatgttgctgctgctgtatgggctgttgtcgcttatgttgttgcagacatgga

SEQ ID NO: 25932 - DNA, 65 bp, Mus musculus
agacaaactagctatggactgactacaaggcccacatgaagcctgctgagggaacctgagactca

SEQ ID NO: 25933 - DNA, 65 bp, Mus musculus
catgtgaagaaccgatcgtcagccccagtgtctttgccagggtctcttactttgacaagtggatt

SEQ ID NO: 25934 - DNA, 65 bp, Mus musculus
gctgttgctgttgtcagtcgagtgcagttttctgcagcgatgtcataaggagtcagattccgtga

SEQ ID NO: 25935 - DNA, 65 bp, Mus musculus
gctggagaatgcaagccgggtgttccaatctctcagtgtgaagaacaaggacttcatccatctca

SEQ ID NO: 25936 - DNA, 65 bp, Mus musculus
cacattagttcctgtagaaccgagtcccttatctcctcgggaatcctggctactagggaacatgt

SEQ ID NO: 25937 - DNA, 65 bp, Mus musculus
agctctgcacctactgaaaccataagtccaacctcggaatctggacccaaccagcagttcattca

SEQ ID NO: 25938 - DNA, 65 bp, Mus musculus
gtggcattcatgcacgtgaatggatttctccagctttctgtcagtggtttgtctatcaggcaacc

SEQ ID NO: 25939 - DNA, 65 bp, Mus musculus
tccaacctacctaagggtcatgtctctcacagcaggctcaaggctgcaagagtcattgcaaatgg

SEQ ID NO: 25940 - DNA, 65 bp, Mus musculus
gagccaggctctctactgggcgttagggacagaaatgttggttcttccttcaaggattgctcaga

SEQ ID NO: 25941 - DNA, 65 bp, Mus musculus
ttcgaggatgtgtcgtatgagagcacactgaaggcactggctgacgtggaggtcacctacacagt

SEQ ID NO: 25942 - DNA, 65 bp, Mus musculus
ccactcaggtgtacatgccatccttactggatgcaccatttagtggagaccttttaaaacgttct

SEQ ID NO: 25943 - DNA, 65 bp, Mus musculus
cttcggccaactgtgatgtcagtaatgcctggttcaactgaggctgtaacaactcctggcacagt

SEQ ID NO: 25944 - DNA, 65 bp, Mus musculus
ccctggtgtttcacaagcaatccagaggtacgctacgaagtctgtgacattcctcagtgttcaga

SEQ ID NO: 25945 - DNA, 65 bp, Mus musculus
aatgtcgttcggcacttgagctaagtaccaaatggtaagagaagcgaggctgagaggaaatgggg

SEQ ID NO: 25946 - DNA, 65 bp, Mus musculus
gggtttctggtgcgagaagacttcgtcctaacagcagctcattgcttgggaagctccataaatgt

SEQ ID NO: 25947 - DNA, 65 bp, Mus musculus
tgttctttggtggcggctttccttccagtaacgttcatgtctacagcaatggccgaatgcggtac

SEQ ID NO: 25948 - DNA, 65 bp, Mus musculus
aaatgagaggcacacaagagggcgcgccacccataacgagacgaaggatatagagacagaaggca

SEQ ID NO: 25949 - DNA, 65 bp, Mus musculus
ctcagcctcagaaggtgaacagcatccttggctgcagtcagtaaagagccctgatatggcccagc

SEQ ID NO: 25950 - DNA, 65 bp, Mus musculus
agacagcagctgattacaagattctaggtggttccgtcctccacctggtgttggctcttagagga

SEQ ID NO: 25951 - DNA, 65 bp, Mus musculus
ttatcatcgtgctcatctttggcatcgtcttcctgttcctgcatcggtgttcgggcttcagcttc

SEQ ID NO: 25952 - DNA, 65 bp, Mus musculus
caaacagaccatcacccagtgtgctacaagagctcaatgtgacagtggtgactaacatgtgcccc

SEQ ID NO: 25953 - DNA, 65 bp, Mus musculus
tgtggtggcagattccttgtgacctgcttaggcagggtgtctgtttaggcccttcctatttctag

SEQ ID NO: 25954 - DNA, 65 bp, Mus musculus
ctcaggaatttccacatattctcacactcattggcagaaacccagtgggttatccattggcctgg

SEQ ID NO: 25955 - DNA, 65 bp, Mus musculus
cttattttggcgagtttcggattattaacaccattactgctttaacaaacgatggcactggtcac

SEQ ID NO: 25956 - DNA, 65 bp, Mus musculus
accaacagtggttgacttccaactcaagcgaagctcatctcaggtgtaccctgtgcagagagctc

SEQ ID NO: 25957 - DNA, 65 bp, Mus musculus
ccctcctaccaggcatcacattcaccaacaatcagctcttcttcctgagttatgctcatgtaagg

SEQ ID NO: 25958 - DNA, 65 bp, Mus musculus
ccgtagtgagaacgctagtgctaatatcacagattatgtgaacctcccaccgaatgagctttacc

SEQ ID NO: 25959 - DNA, 65 bp, Mus musculus
tggcctctcactggccttggccagcttagaccatacatctgcgtatgctagttgctaggcagggg

SEQ ID NO: 25960 - DNA, 65 bp, Mus musculus
gaggaagctccactcagccttcatcctgagacactgttctgatactaacttctcgtccatttgaa

SEQ ID NO: 25961 - DNA, 65 bp, Mus musculus
tttcttcattgcctttgcacagaactggtgcatcaagcgacggtcacagtccatctacctgcagg

SEQ ID NO: 25962 - DNA, 65 bp, Mus musculus
tgtaccccacctacagataccttaaccccagcacatttcgcctctctgctgatgacatacgtaac

SEQ ID NO: 25963 - DNA, 65 bp, Mus musculus
cctggaaggaatctgtggggtgaagcaccgaaacaaaaagccagatgttcttcatgatgacacta

SEQ ID NO: 25964 - DNA, 65 bp, Mus musculus
tctaatggtgccaggtgctccatgaacacagaagatggtgccaaactctacgatgtctgccctca

SEQ ID NO: 25965 - DNA, 65 bp, Mus musculus
gggattctgtgctgttataaaggaaaccaataggaagtatctggaggcagagtgcagtacgacgg

SEQ ID NO: 25966 - DNA, 65 bp, Mus musculus
cagcccaccagatgatgtagacattgtcatcaaactggacaacacagccagcactgtgaaagcca

SEQ ID NO: 25967 - DNA, 65 bp, Mus musculus
ctctatcttccatccctctggttccacgcctctagatttggaagcagattctaagcaccaggtca

SEQ ID NO: 25968 - DNA, 65 bp, Mus musculus
aacatctggggagacatggtttgcgctggcactcctgaaggtggcaaggatgcctgctttggtga

SEQ ID NO: 25969 - DNA, 65 bp, Mus musculus
ctgaccacactaatcagcccccttttctgctgactccagggatgctgtgttcattgttccattct

SEQ ID NO: 25970 - DNA, 65 bp, Mus musculus
ctggagactacctgttccaggttgtcattaaccccaactatgaagtgccagaatcagatttctct

SEQ ID NO: 25971 - DNA, 65 bp, Mus musculus
tacaaccttcaggaggccaaagtctctgtggtggatgtaaagacctgcagccaggcttacaatag

SEQ ID NO: 25972 - DNA, 65 bp, Mus musculus
cactgctttaactggcactctgtcacgtacgagcatgccttgcggtacttgtatgtgctggccaa

SEQ ID NO: 25973 - DNA, 65 bp, Mus musculus
agtccctaattggcctctcccaccctcaccccagcattgcttcatccataagtgggtcccttgag

SEQ ID NO: 25974 - DNA, 65 bp, Mus musculus
gccaccatgctgtgacaacccaactgacatcttcctatggaagtttgccctctccacaaaagaag

SEQ ID NO: 25975 - DNA, 65 bp, Mus musculus
agaggggatttggtgagggcgttctggtttccttaagcctgtacctgtccaggccttggtggaga

SEQ ID NO: 25976 - DNA, 65 bp, Mus musculus
atttcaggatcattgggactttgcagaactctgccgagtttgcagatgcctttcattgccgcaag

SEQ ID NO: 25977 - DNA, 65 bp, Mus musculus
ctcctgtctgcatgcattcggtctgcagtactacacagtaggtatgcacatgagcacgtaggaca

SEQ ID NO: 25978 - DNA, 65 bp, Mus musculus
tcttggctgctagttgtcgcgctctccatctcaccatgctgtctctagactttctagacgatgtg

SEQ ID NO: 25979 - DNA, 65 bp, Mus musculus
aacttttcctgacaggagagagctatgctggcatctacatccccaccttggctgtactggtcatg

SEQ ID NO: 25980 - DNA, 65 bp, Mus musculus
gcgggtctttcctgaatcacagggcagaggtggtctcctatgttacctagcatggttgaggatga

SEQ ID NO: 25981 - DNA, 65 bp, Mus musculus
gctactacttggaccactcttcagagggtggctacaaatcctgcaagagatgtgataacagctgt

SEQ ID NO: 25982 - DNA, 65 bp, Mus musculus
ctaagattgtccattaataccacccttatttccagtgtggacttccaaattgctggggatctgtt

SEQ ID NO: 25983 - DNA, 65 bp, Mus musculus
ggcttagtcagcatctgggtggcaacaggacaggggaggagctgtggggagaactcaggtattta

SEQ ID NO: 25984 - DNA, 65 bp, Mus musculus
tggttgatctgaaggacgtagaccccgatgtagcctattcctccatcccctatgagaagggcttt

SEQ ID NO: 25985 - DNA, 65 bp, Mus musculus
aggtctcctttatggcagtgatgaaagcctgacacgagaccctgtgtgccagccatggccagagt

SEQ ID NO: 25986 - DNA, 65 bp, Mus musculus
tggaggagccaggggccaagccacagacatcgccatccaggcagaggaaatcatgaagctgaaaa

SEQ ID NO: 25987 - DNA, 65 bp, Mus musculus
cggtgtggtcaccgacccacagatcgtcaccacggacctgcaccaccagtgcaccgacaagcaca

SEQ ID NO: 25988 - DNA, 65 bp, Mus musculus
ctgcatcctttaccattgctacacaacacatgaggcaccgcacaacgctgtcttttgctcggcgt

SEQ ID NO: 25989 - DNA, 65 bp, Mus musculus
cgttctgctgctagaatcactagcttttcgtttgtttcaaacagtgagaaagacttaatgcgtgc

SEQ ID NO: 25990 - DNA, 65 bp, Mus musculus
gctactccacaaagacccacgtcaatgacatcatgcttgtgaggttggatgagccagtcaagatg

SEQ ID NO: 25991 - DNA, 65 bp, Mus musculus
tgattctgggggacccctccactgcatggtgaacggtcagtatgctgtccacggagtgaccagct

SEQ ID NO: 25992 - DNA, 65 bp, Mus musculus
tgccttttctaccgtagaattggtgtaatggggaagattgtattgcacgtcattaagctgaaaag

SEQ ID NO: 25993 - DNA, 65 bp, Mus musculus
tcgatgtcaccagtacaatggtacagaagggctggaacgccacacacatgttccgggtatcagag

SEQ ID NO: 25994 - DNA, 65 bp, Mus musculus
atgtaacacgaagtaccgaggacacatacaagagagtgagatatgcacccagggactggtggtcc

SEQ ID NO: 25995 - DNA, 65 bp, Mus musculus
gcaatcctgacctcatgcgagaacttggccttagtcctgatgctgtctatgtactgtgctactct

SEQ ID NO: 25996 - DNA, 65 bp, Mus musculus
ttgctgaccacaagtgtagcagcccagaggtatatggtgctgacatcagccctaacatgctctgt

SEQ ID NO: 25997 - DNA, 65 bp, Mus musculus
gcttgccccatcacgtgcacattgagattgcacattgagattttcctggatctgccagtcacttg

SEQ ID NO: 25998 - DNA, 65 bp, Mus musculus
aggccaaataatggcatctggatcaagctgaagaggagacatgaagatgacccctaactccatcc

SEQ ID NO: 25999 - DNA, 65 bp, Mus musculus
cggcaacgcagaaggaacaacaaaggaccacctggagtggaagatgcagaagacaagtgtgaaaa

SEQ ID NO: 26000 - DNA, 65 bp, Mus musculus
aggcagtcacctcaggtacttgagacatggctgctgttgtcttcatagccttcctgtatttggga

SEQ ID NO: 26001 - DNA, 65 bp, Mus musculus
aagcattacaaggatagcctccagatctgtgtgggcagttccacaaaggtggcatcagtatacat

SEQ ID NO: 26002 - DNA, 65 bp, Mus musculus
agttgaaggagaaagccaagctaaccctaggtgtgggaaccctcccactctctgccaacttcaac

SEQ ID NO: 26003 - DNA, 65 bp, Mus musculus
gtaattagcttcctgccagaacctttgatcgatgtgatagaccttacctggccaaatctgccagg

SEQ ID NO: 26004 - DNA, 65 bp, Mus musculus
ggtattctctggccaaatcttccagttaaacttgacgctgcttatgaagctagtatgatagatca

SEQ ID NO: 26005 - DNA, 65 bp, Mus musculus
gggagggcattgaatcagctatgtcttcattatgagagtgagagaggtggcagagatatgcagct

SEQ ID NO: 26006 - DNA, 65 bp, Mus musculus
atgagaccttctgcgagatggtgaagtccaatcggctctgcgaacggaagctcttcatccagttt

SEQ ID NO: 26007 - DNA, 65 bp, Mus musculus
ccatatttcccagtctcagctcttcagacaaggagacaaatcacgatggtgaaccatcagaatgg

SEQ ID NO: 26008 - DNA, 65 bp, Mus musculus
cccgcctatgaagctgatgtggcacagctggagtataaactggtagctggagaacatgggttaat

SEQ ID NO: 26009 - DNA, 65 bp, Mus musculus
ctactgtggactttatcctgagtctgagccagaggtgaaggcagtggctgacttcttgagaagaa

SEQ ID NO: 26010 - DNA, 65 bp, Mus musculus
ccctcagcattgaggagaccaataaactccgagcaaagttggggctgaagcccttggaggtcaat

SEQ ID NO: 26011 - DNA, 65 bp, Mus musculus
cacgtggctttgtcccagacttcctttgtcttcaacaaccttctgcaagaaaaccaagggcctga

SEQ ID NO: 26012 - DNA, 65 bp, Mus musculus
ggagagtagcgggcaggaaccacacagcgaatagcggcgacaaaagcaggccggagagatcaaaa

SEQ ID NO: 26013 - DNA, 65 bp, Mus musculus
gccttcatgtcattgtcaccacgagtcgaattatgggcagaatctgctctctgcgaccaaaaggt

SEQ ID NO: 26014 - DNA, 65 bp, Mus musculus
aactcaacagtgctgtggatactattgcccttccaaagagcaaggattgggtgaaacctgggcag

SEQ ID NO: 26015 - DNA, 65 bp, Mus musculus
aaccacagcagttgaatagactccaaagaaatgcaagggacgctgccagcaatgtaagggcccca

SEQ ID NO: 26016 - DNA, 65 bp, Mus musculus
gtctgtccatgttcttgccagggaaatggattcttgtcctgttgttggagagttcccctctcaga

SEQ ID NO: 26017 - DNA, 65 bp, Mus musculus
agtctgacgtctcgtccacccgattcttgttccgtttgactacaagaggggtcctaccaaatagg

SEQ ID NO: 26018 - DNA, 65 bp, Mus musculus
cacgagaagccctgccaacatgggacaagcagatccagtcactttgtttccaagtaaacaacctc

SEQ ID NO: 26019 - DNA, 65 bp, Mus musculus
cattcctgcagtagcttctacaaatgcagtcattgcagctgtgtgtgccactgaggttttcaaga

SEQ ID NO: 26020 - DNA, 65 bp, Mus musculus; identical to SEQ ID NO: 23716

SEQ ID NO: 26021 - DNA, 65 bp, Mus musculus
ctgaagaaagcagttgatgtcctctgccagtgtcgtgccacactcatgtacacttatgtcttcgc

SEQ ID NO: 26022 - DNA, 65 bp, Mus musculus
gtgcaatttggatgaactggttaaacatggtctgcgtgccttaagagaaacactccctgcagagc

SEQ ID NO: 26023 - DNA, 65 bp, Mus musculus
ccaaacttgtgcctcaggaacagaaccaccagaaacttgggcagaaacacaggatcaatgaaatc

SEQ ID NO: 26024 - DNA, 65 bp, Mus musculus
cagctgcggttttcgccttatgccttcaacggaggtactgtattggcaattgctggagaagattt

SEQ ID NO: 26025 - DNA, 65 bp, Mus musculus
cggctcgttccggacggaagaagtccacaccgggacaaccatcatggcagtggagtttgacgggg

SEQ ID NO: 26026 - DNA, 65 bp, Mus musculus
ggcaggcataacatctgatgctaacgttctgactaacgagctaaggctcattgctcaacggtact

SEQ ID NO: 26027 - DNA, 65 bp, Mus musculus
ggcttgaccacttcaacaaagccccaaagaggagtcgctacacttacctagaaaaggcaattaaa

SEQ ID NO: 26028 - DNA, 65 bp, Mus musculus
gcgtacagtgccattttcctgaggctatatgacctgtgataccataacaggctgaaggctcaagc

SEQ ID NO: 26029 - DNA, 65 bp, Mus musculus
gaatgttggcaagcaggatcccaaacgtcatttggaagaacatgtggatgtgcttatgacttcaa

SEQ ID NO: 26030 - DNA, 65 bp, Mus musculus
ctggcactgccgcggtttaaagcgcgtaatggaaagtgattgcggtaccatttaaggcttggaga

SEQ ID NO: 26031 - DNA, 65 bp, Mus musculus
ggcctgccggggtaaaaatggcaaagcgcggttacagcttctcgctgactacattcagcccatct

SEQ ID NO: 26032 - DNA, 65 bp, Mus musculus
tccctactacacagagcctgtcattgctggcctggacccgaagaccttcaagcccttcatttgct

SEQ ID NO: 26033 - DNA, 65 bp, Mus musculus
tggcctggaatgctgaccagttgtcatctggtagccgtgaccgcatgatcctacagcgggatatc

SEQ ID NO: 26034 - DNA, 65 bp, Mus musculus
cctgctggactctggcctagttaaagctgactaatggcaaaggactgcctgaagagtaaacttcg

SEQ ID NO: 26035 - DNA, 65 bp, Mus musculus
cggcccgtaggaggctcatgcgggatttcaagcgattgcaagaggacccacctgtgggggtcagt

SEQ ID NO: 26036 - DNA, 65 bp, Mus musculus
ggcctatctcttggtttacacgaagactggatcctgacagatatactcacacctccagagaggga

SEQ ID NO: 26037 - DNA, 65 bp, Mus musculus
atggcagttgcaggtttgctggcagatgctcgttcattagcagacatagcgagagaagaagcatc

SEQ ID NO: 26038 - DNA, 65 bp, Mus musculus
ctatccagatttcaggtgttatctacccacttcctctgcagtgaagagatagagatgggagtcag

SEQ ID NO: 26039 - DNA, 65 bp, Mus musculus
cgtggtctttcctttagagctccgtctgttcaacacgtcaggagatgcgaccaaccctgacagaa

SEQ ID NO: 26040 - DNA, 65 bp, Mus musculus
aagctggaatttgaggatggatccgtcctgaaacagtttctgtctgaaacggagaagctgtcccc

SEQ ID NO: 26041 - DNA, 65 bp, Mus musculus
gcccatgttcaccaactcacttctgctactaggggtctaatcctgtggagaagattgcctcaaga

SEQ ID NO: 26042 - DNA, 65 bp, Mus musculus
tgtgctccttccctgagctgtctggctgtagatgtaccatccccacatcctccttggcttcagag

SEQ ID NO: 26043 - DNA, 65 bp, Mus musculus
ttaaatgtggagcacacccaacctcagacaaggacacgtcggtagctttgaacctgatcaccagc

SEQ ID NO: 26044 - DNA, 65 bp, Mus musculus
tcttcactctggaattggaggggcttgtgctcacacagctggtggcacctggatgggctgggttg

SEQ ID NO: 26045 - DNA, 65 bp, Mus musculus
tatgggcattaggaaagactttcccgcaaggcgtacccatctgttactcgtctagtgacttcctg

SEQ ID NO: 26046 - DNA, 65 bp, Mus musculus
aacacactggaactcttgaggtttggagttttcgctcaggcaaacaagttgcttttcaactgccc

SEQ ID NO: 26047 - DNA, 65 bp, Mus musculus
gagccagaaaaggtgaaagaaatgactccacaagcctactgaagcaccacacaggcctacctaga

SEQ ID NO: 26048 - DNA, 65 bp, Mus musculus
taacggaaagcattggctgtgtgatgacaggaatgacagctgacagcagatcccaggtacagagg

SEQ ID NO: 26049 - DNA, 65 bp, Mus musculus
cggacgtcttccagattgggcttaatggctggctacgaatcgatgaccaaacggtcaaggttatt

SEQ ID NO: 26050 - DNA, 65 bp, Mus musculus
tcccggcaagaggcggatggacacggacgtagtcaagctcattgaaagcaaacatgaggttacaa

SEQ ID NO: 26051 - DNA, 65 bp, Mus musculus
ttctacaagatcgccaagcagattgtccagaagtctctggggctctgaggctacccctgtgcaca

SEQ ID NO: 26052 - DNA, 65 bp, Mus musculus
agctgtgaacacccttcctgaggtagaaaacgaccgactggagaactcaccacaccagtgcagca

SEQ ID NO: 26053 - DNA, 65 bp, Mus musculus
ggcaggtgcttttgggagaccaaatccccaagttcaccattgccacgttgccacctccctgaggc

SEQ ID NO: 26054 - DNA, 65 bp, Mus musculus
ggtggaagccattgtcttgcctatgaaccacaaagagaagtttgagaacttgggtatccagcccc

SEQ ID NO: 26055 - DNA, 65 bp, Mus musculus
tgaacaaagtgatcgagattaacccttacctgcttggcaccatgtctggttgtgcagccgactgc

SEQ ID NO: 26056 - DNA, 65 bp, Mus musculus
gcagaaaccgtaaaagccttgatagatcaagaagtgaagaatggcattccttctaacaggattat

SEQ ID NO: 26057 - DNA, 65 bp, Mus musculus
ttgttgcagcggattcccgggccacagcaggtgcttatattgcttcccagacggtgaagaaagta

SEQ ID NO: 26058 - DNA, 65 bp, Mus musculus
ggagcctagcagcattgagaagattgtagagatcgatgctcatataggttgtgccatgagtgggc

SEQ ID NO: 26059 - DNA, 65 bp, Mus musculus
aacatgacgctggaggctgcgcaagagctgttggtggaagccatcacagcagggatcctgagtga

SEQ ID NO: 26060 - DNA, 65 bp, Mus musculus
gcaacattgatctgtgtgttatcagcaagagcaagctggactttcttcgtccattctcagtgccc

SEQ ID NO: 26061 - DNA, 65 bp, Mus musculus
tctcaccgctgatgcaaggatagtcatcaacagagcccgggtagagtgccagagccaccggctga

SEQ ID NO: 26062 - DNA, 65 bp, Mus musculus
caaaatcatgggatgtagagactgcaacagaactgcttctgagtaactgaggcacaggagctgcg

SEQ ID NO: 26063 - DNA, 65 bp, Mus musculus
ctgctctggacacgatccagtattcgaagcaccctccaccattgtgatagtgctgtggccaagcc

SEQ ID NO: 26064 - DNA, 65 bp, Mus musculus
agcccttccacttgaagcaggggacagaccatctggcatgagggacggctgagggatggacttca

SEQ ID NO: 26065 - DNA, 65 bp, Mus musculus
aagcttttctccagcaacatccggcggccttctaaacgcgatgggtcacagtccgaagaaacaaa

SEQ ID NO: 26066 - DNA, 65 bp, Mus musculus
gtatgcagtgtgaaggagcagaaggcctcttcccactgtgctgcggatctttatagcctttacaa

SEQ ID NO: 26067 - DNA, 65 bp, Mus musculus
cttgctacagtagacaaactggtaatagcgacttttagagctgaaactttgcaagattagctgac

SEQ ID NO: 26068 - DNA, 65 bp, Mus musculus
ttgaatactgatgaacctccaatggtgttcaaagcccagctttttgcattgactggagtccagcc

SEQ ID NO: 26069 - DNA, 65 bp, Mus musculus
actgtcttcggagtcggaccccatatcatgtgaacctcctcctggctggctatgacgagcatgaa

SEQ ID NO: 26070 - DNA, 65 bp, Mus musculus
ttccagacctaagcagcatgactgaggaagagcagatcgcctacgccatgcagatgtccctgcag

SEQ ID NO: 26071 - DNA, 65 bp, Mus musculus
tcttagactttcagaacccatgacagagcagccctgcttagggggctgggcaagtcagctactca

SEQ ID NO: 26072 - DNA, 65 bp, Mus musculus
taaaggtttccacgagccaccaaagttaccttcctactctgcgcacgaactctgtgagcgattcg

SEQ ID NO: 26073 - DNA, 65 bp, Mus musculus
tgattcacggaagggagtgtatcttgcaaacttttcccattcaaatcctgagttaatgctgcatg

SEQ ID NO: 26074 - DNA, 65 bp, Mus musculus
gctgagatcgaaaacctttcatggaaagttgagcgtgcagacagctacgacagaggggacttaga

SEQ ID NO: 26075 - DNA, 65 bp, Mus musculus
taaatataagagggataatttgatggtaatagtatcccagtacaaaaaggctgtaagatagtgaa

SEQ ID NO: 26076 - DNA, 65 bp, Mus musculus
tgtgctgcaacagtgacagtggagacgacatagaggttccttatgtacgatacatcatccgctga

SEQ ID NO: 26077 - DNA, 65 bp, Mus musculus
atgcaggctatactatctgcggaatggggaacgcatctccgtgtctgcagcctccaagctacttt

SEQ ID NO: 26078 - DNA, 65 bp, Mus musculus
gctgattgacaccctgtacgctttcaatagcggtgctgtggataggttccagacactgaagtgtg

SEQ ID NO: 26079 - DNA, 65 bp, Mus musculus
tggataatggcaagatgtgaggggtagtaggtacacagtgtgtgcttggatgggaggaaaagctc

SEQ ID NO: 26080 - DNA, 65 bp, Mus musculus
tccgatcccatggtacctttcgtcacagctatctgcacctggctgaaaaccacttcatccgctca

SEQ ID NO: 26081 - DNA, 65 bp, Mus musculus
ttggggacaacaaaataacagcttcctggcacaagcaggaactttgcatcaagactccactttgg

SEQ ID NO: 26082 - DNA, 65 bp, Mus musculus
caaaaggtaccagtgaaatccatgaactgccacctcctgagaagcctctcaaggagactgtagac

SEQ ID NO: 26083 - DNA, 65 bp, Mus musculus
tgtgaccccgggaccaaataaagtccccttccatccgaccaaataaagtccccttccatccaaaa

SEQ ID NO: 26084 - DNA, 65 bp, Mus musculus
catgggaagagtagggacaacgaattcagggtgtgctttccttcttagttgagaccagcctggtt

SEQ ID NO: 26085 - DNA, 65 bp, Mus musculus
aataagtaccccaatgggctactccagctataagctttctgggcagagaaaactgggaattgata

SEQ ID NO: 26086 - DNA, 65 bp, Mus musculus
ggccctctccaaagaataccgattgcagtacttggcctccgaaactgtgctcaacttggcttatg

SEQ ID NO: 26087 - DNA, 65 bp, Mus musculus
acctacaaagagttcgagcgtgcctacattcccgagggacagcgctattccattcagaatgccca

SEQ ID NO: 26088 - DNA, 65 bp, Mus musculus
ctgcgaaaggtaacatcacaactggttctaagtcaaaccatcaagtcaacagcagggtgcctgag

SEQ ID NO: 26089 - DNA, 65 bp, Mus musculus
tcagaggtgggatgcagatctttgtgaagaccctgacaggcaagaccatcaccctggacgtcgag

SEQ ID NO: 26090 - DNA, 65 bp, Mus musculus
cctgttatcctcacctgattccagggagctctgtggagtcacaagttctccatcagttacatttc

SEQ ID NO: 26091 - DNA, 65 bp, Mus musculus
tacctctgtaaccacgccaactcttagtcccagccagcagtcgctcccgacagaactgaatgtaa

SEQ ID NO: 26092 - DNA, 65 bp, Mus musculus
cctagtccttgggaatgtagagcaccgtatcttgcatagacccttgaatcatgcatgtcatcaga

SEQ ID NO: 26093 - DNA, 65 bp, Mus musculus
ttataatgctggtttgtgacttaagagctgtgactcagttgcttcattaaacattctgcattggg

SEQ ID NO: 26094 - DNA, 65 bp, Mus musculus
cgctgttgatgtcacaaagaagcctagcaaacctaagtataaggatagggctgcaacggtgccac

SEQ ID NO: 26095 - DNA, 65 bp, Mus musculus
ggaacgattggactaatccatgccattgcgaacaacaaagacaagatgcacttcgaatcagggtc

SEQ ID NO: 26096 - DNA, 65 bp, Mus musculus
acctcaggctctcgtcctagaggtccccttcgagcagatcatggggttcccctgcctggctcacc

SEQ ID NO: 26097 - DNA, 65 bp, Mus musculus
tgcgcctccagcctgaattgaagtttgagcaaagtacagtgtttgcaactccaactggaagtttt

SEQ ID NO: 26098 - DNA, 65 bp, Mus musculus
gaggaacccatggatacagatcaaggtagtaccgtgttaagtgctattcagtcagaagttgccag

SEQ ID NO: 26099 - DNA, 65 bp, Mus musculus
tgtgaggttgtgttgtcgggcatcgaagagcaggtcagccgtgccaaccagcacaaggagcagca

SEQ ID NO: 26100 - DNA, 65 bp, Mus musculus
atgtaccacagtatccacaatggtgcaagtgtctctagccaggtagccacatgtcccctctcctg

SEQ ID NO: 26101 - DNA, 65 bp, Mus musculus
gctcagtgtgtatctagttggcagttcaccatcctgtgcaacaggtttcttttgctggctgtaca

SEQ ID NO: 26102 - DNA, 65 bp, Mus musculus
agcctgcctgtgaatgtgagatgttctaagacagacaacgcagagtggtcgattcaaggcatgac

SEQ ID NO: 26103 - DNA, 65 bp, Mus musculus
tctgtttcttctctcagcctgcgtttggaatgaacgggtctcacggaatcgtccgctcaacattc

SEQ ID NO: 26104 - DNA, 65 bp, Mus musculus
gctccgttggcttgtgtttctaggtgaggagtttcctaccagttcactccagtgccattgtcttt

SEQ ID NO: 26105 - DNA, 65 bp, Mus musculus
gtgtgccatcagtgatttacacacaccccgaggttgcttgggttggcaaatcggaagaacagttg

SEQ ID NO: 26106 - DNA, 65 bp, Mus musculus
ttgaggtttgactgtgtgggaactttctaaggagaaacggacccatctgcgtacagcctgcagat

SEQ ID NO: 26107 - DNA, 65 bp, Mus musculus
ggagctaacccagcgtgtggttacagtcaatgcagtctgtcctatccacaaagtccgttttaacc

SEQ ID NO: 26108 - DNA, 65 bp, Mus musculus
aaagatggaagtcctttctatgtctcttttgagacctgcctccctctggagactctggtcccacc

SEQ ID NO: 26109 - DNA, 65 bp, Mus musculus
ggaccgatcactgaagcctatgaagacgcgtgtcgtcagtaaagttcagaagtcttgctctcact

SEQ ID NO: 26110 - DNA, 65 bp, Mus musculus
taaccgcttcccaaagatcctggagaacctaagactgcaaaagcgtggaactggaggagtggaca

SEQ ID NO: 26111 - DNA, 65 bp, Mus musculus
catggaagagattgcagatttagtgggtgtcaggcccaatatcctgcctctggtcttcactgacc

SEQ ID NO: 26112 - DNA, 65 bp, Mus musculus
ccacgcccatttgaacctccactacctccagattctgaacatcaaaaagcagagcgtctgcgtgg

SEQ ID NO: 26113 - DNA, 65 bp, Mus musculus
ttcaagctgaactacaagcctcaggaggagtacccagacctcagcaagcacaacaatcacatggc

SEQ ID NO: 26114 - DNA, 65 bp, Mus musculus
aaacccttaaagacccggactctccagtcctctgatagtgccccagtgtctttcctgctcaagat

SEQ ID NO: 26115 - DNA, 65 bp, Mus musculus
tatggtgtacaagtctattccctatggctgcctggaggaggtgattccctacctgatccgaagag

SEQ ID NO: 26116 - DNA, 65 bp, Mus musculus; identical to SEQ ID NO: 23716

SEQ ID NO: 26117 - DNA, 65 bp, Mus musculus
ccagtgggaccgaacagtgaaagtcaccaaaactcgaaccatacaagaatccccatcttcctttg

SEQ ID NO: 26118 - DNA, 65 bp, Mus musculus
cttaggagctgctaccccggaaaacccagaaatagagctgcttcgcctagaattggcagaaatga

SEQ ID NO: 26119 - DNA, 65 bp, Mus musculus
ttgactaaatcagttgaagaacggacatttcagtaccaggactctcttccgtcattgcctgttcc

SEQ ID NO: 26120 - DNA, 65 bp, Mus musculus
cagagttcgcagcagtcaccacatgcttgtgtctccatgttctgttctagagtacccgagcatta

SEQ ID NO: 26121 - DNA, 65 bp, Mus musculus
atccagtcactctcccagatggacggactctgtttcctggccaaggcaacaattcctacgtgttc

SEQ ID NO: 26122 - DNA, 65 bp, Mus musculus
tgcgacaaggcatctgtgcccttctctggccaaaagtagagccagctgagacactcagtgagact

SEQ ID NO: 26123 - DNA, 65 bp, Mus musculus
ttcttcagcttctacagatcgaccaagaatgggttccctactccacctctgccagcctctacatc

SEQ ID NO: 26124 - DNA, 65 bp, Mus musculus
ttacaagctcaggacagccatgtcacataggacttctccctgtcaccttctgacaaaggccacag

SEQ ID NO: 26125 - DNA, 65 bp, Mus musculus
ggagagcttgctggtttgtcatcactcctattctgttgtctgcaattctagtctggtcactggtg

SEQ ID NO: 26126 - DNA, 65 bp, Mus musculus
gggcccaaactatagaccttgatctcacaacttcctgtgttcacagcatttgacctaaccatacc

SEQ ID NO: 26127 - DNA, 65 bp, Mus musculus
agaaggaactgaaggctattcagtacggagccagtgcccacgattggatgtttcgggtgtgacgg

SEQ ID NO: 26128 - DNA, 65 bp, Mus musculus
ccagcctcgtgcagactgccttcatttcaggacaaattcagtggaagtcagtggtacacatgcaa

SEQ ID NO: 26129 - DNA, 65 bp, Mus musculus
tatgcagcgtctgacctgaggaaggctggaaaggcttcaggatactaagtcagctctgcccagag

SEQ ID NO: 26130 - DNA, 65 bp, Mus musculus
tgtgaagttatgggcgcacatcctagacatctgcagtctgtctccggcctggggacacatggtac

SEQ ID NO: 26131 - DNA, 65 bp, Mus musculus
ggactgactaccttaaaccacctaagtgactgtgaatgcgccacatgaaaaccatctggggcatc

SEQ ID NO: 26132 - DNA, 65 bp, Mus musculus
gccacttctgaggaagaggccaaggcaacagccagactagcagtggatgtgattgcttcaagttt

SEQ ID NO: 26133 - DNA, 65 bp, Mus musculus
gccttcagagcaaggtcactgccaaatagaccctgacaaagaggagcgggcctccccactctgca

SEQ ID NO: 26134 - DNA, 65 bp, Mus musculus
gtcatggtatccctgctgacagactactcacctgtgctccagaagccaaagttttgatgcctgtc

SEQ ID NO: 26135 - DNA, 65 bp, Mus musculus
ttccttggtattagtgggagtaatatgccctattcgtgcccttcttcactactctcggactgtgg

SEQ ID NO: 26136 - DNA, 65 bp, Mus musculus
ggacttcgctgtctcaacggtaccggtctcaggctcctcgcacctacgcggcctctgtggcatgg

SEQ ID NO: 26137 - DNA, 65 bp, Mus musculus
gaccttcacaacaccacttctaacatgggttgcactcttattcttgaggattccaggaatgactt

SEQ ID NO: 26138 - DNA, 65 bp, Mus musculus
ttcaagtgcagaggtcatccacaactatggtcatggaggttacgggctcacaatccactggggtt

SEQ ID NO: 26139 - DNA, 65 bp, Mus musculus
tcggatcaacatgtgcggcttgaccaccaagaacctagattacgtcgctacctccatccatgaag

SEQ ID NO: 26140 - DNA, 65 bp, Mus musculus
ttaagttcagccgagatgtctttctgcccaaaccatcctggggaaatcacacgcccatcttcagg

SEQ ID NO: 26141 - DNA, 65 bp, Mus musculus
catcgtgaagagcaggggaatcatcaagtctaaaggctacattctgcaagccaaaaggaggggct

SEQ ID NO: 26142 - DNA, 65 bp, Mus musculus
tgaggaagtctctcgaggccaaggtactgggaaaccaagggagaagctggtggatcgaagagaga

SEQ ID NO: 26143 - DNA, 65 bp, Mus musculus
ggccttcagagactggaatacagaggatatgattctgctggtgtgggacttgacggaggcaatga

SEQ ID NO: 26144 - DNA, 65 bp, Mus musculus
ggagctgcagggttccattaggagatacgatgtaagctgctgaaaaggcaaagcaagtgagagga

SEQ ID NO: 26145 - DNA, 65 bp, Mus musculus
ctttgcagtttttgtgcttctgtgatgggaaacaggactctggatggaacctgatggtggctgct

SEQ ID NO: 26146 - DNA, 65 bp, Mus musculus
gaggttgtatgggaaggactgggcatccaatgcttcctcagacttcatagcacactcgctgataa

SEQ ID NO: 26147 - DNA, 65 bp, Mus musculus
ttcctcacatccatccagtggggaggaccctctgacttaagggaccaccttgggaagcttctgta

SEQ ID NO: 26148 - DNA, 65 bp, Mus musculus
ttttagtttctgaagctcggaagaacagtcaccactttgagaacgtggttaaggagacggcatcc

SEQ ID NO: 26149 - DNA, 65 bp, Mus musculus
cctgagagtaactcaaacgattcccaaggcataagaaaatggaccccattcttctggagtcttcg

SEQ ID NO: 26150 - DNA, 65 bp, Mus musculus
gctgcctctctgctgaagcaactcaaggaggcccaagttcagtatcctctccagacatttgctat

SEQ ID NO: 26151 - DNA, 65 bp, Mus musculus
caatattctcagatggactcaaattccttagctctctgacttctgcttaatcagattatggtttt

SEQ ID NO: 26152 - DNA, 65 bp, Mus musculus
aagtccactttcatccaggagcacctagtgtcagctggctacgtccatgtgaacagggacacgct

SEQ ID NO: 26153 - DNA, 65 bp, Mus musculus
tgggcaacacctcagcttccagacaagcttcgagaggcagacattgtggtcttaggctcacctaa

SEQ ID NO: 26154 - DNA, 65 bp, Mus musculus
ctgagcttagcacagcactggtgtgttgatggagagagagtctcaggaactgcctgtaatgtgta

SEQ ID NO: 26155 - DNA, 65 bp, Mus musculus
tgggcctagctgtccccctgtggcgggtcgtcagggaagggttagagtctccccacttgctgtta

SEQ ID NO: 26156 - DNA, 65 bp, Mus musculus
ggcatcgagtacgctgactccttcacctttaacccttccaagtggatgatggtacactttgactg

SEQ ID NO: 26157 - DNA, 65 bp, Mus musculus
gctgtctcagcatttccaaacagtctctccagaagtaaagaacgtctgcattgtactcagtgggg

SEQ ID NO: 26158 - DNA, 65 bp, Mus musculus
accgtgcttacggtattcttctagcacgacggtactcctcgctctcattgtcatagtgcggcagg

SEQ ID NO: 26159 - DNA, 65 bp, Mus musculus
ttcagtgaccaccacctccctatgcagaagggatgtcaatgtcaacagcagggactgagaccttt

SEQ ID NO: 26160 - DNA, 65 bp, Mus musculus
ttgtggactcctctgtggcaggacttggaggctgtccctatgcaaaaggggcatcagggaacttg

SEQ ID NO: 26161 - DNA, 65 bp, Mus musculus
attcttctagcacgacggttctcctcgctctcattgtcatagtgcggcaggcgattctcttcacg

SEQ ID NO: 26162 - DNA, 65 bp, Mus musculus
ccattgtggacgcgttctccaagcacttggtctcaaaactctcctatggccctgaagaaaaggat

SEQ ID NO: 26163 - DNA, 65 bp, Mus musculus
catcatagacttggacagttatgggcctggtcaaggaggaaaatgagacgatgcttccctctgtg

SEQ ID NO: 26164 - DNA, 65 bp, Mus musculus
gatcatccaatacatccatgacaactatttcctggtcaacctggtggacaacgagttcccgctgg

SEQ ID NO: 26165 - DNA, 65 bp, Mus musculus
cgcgtgcattggttttggtctgtctttcagttctgtttcaaactagtgtaacaccacgctggctc

SEQ ID NO: 26166 - DNA, 65 bp, Mus musculus
tgcagctgtgaagttcgatgaacagaagcttgtgacaggctcctttgacaacactgtggcctgct

SEQ ID NO: 26167 - DNA, 65 bp, Mus musculus
atacctgacacagttccctcaccaaaagcacatccagccagtggcctgaactttgaaaccagcag

SEQ ID NO: 26168 - DNA, 65 bp, Mus musculus
ccctgcagcattgtcctaagaacaagttgtgagcatcctctcaccagactatgccctcctggagg

SEQ ID NO: 26169 - DNA, 65 bp, Mus musculus
ggggcattgtagacatgaaagagtgcttagagagaagtccagacacggggttggatttgccacag

SEQ ID NO: 26170 - DNA, 65 bp, Mus musculus
gcagctttctcattcagatccgtaccctggtgctgacctgtgtactgtggtgtaatggtgaactt

SEQ ID NO: 26171 - DNA, 65 bp, Mus musculus
cagcagaagggaaatggcagagttaaagtacatttctggatttgggaatgagtgtgcttcagagg

SEQ ID NO: 26172 - DNA, 65 bp, Mus musculus
ctcaggtaagctctgatggaatacatattgcttagtgtaaaatgtgagactgtcatcgggaacaa

SEQ ID NO: 26173 - DNA, 65 bp, Mus musculus
gaacttgagctctttcctcaggaagcagcagattcatggagtccaggctatttcttccaggtccc

SEQ ID NO: 26174 - DNA, 65 bp, Mus musculus
atttcatcagtggacagctcctgaggaacagtgcccaagatggtcgtctggtcacagaggctgcc

SEQ ID NO: 26175 - DNA, 65 bp, Mus musculus
ccgaatgcaatcctttggaatgaagactgtaggctatgaccccatcatctctcctgaagtcgccg

SEQ ID NO: 26176 - DNA, 65 bp, Mus musculus
aaggcttccaagtccagtgagagctctgactcagagtgacagcaccacccacaggccaaaggaca

SEQ ID NO: 26177 - DNA, 65 bp, Mus musculus
gtgacgctctgcaggccaaagttcgggaatcctatcagaagtgaagattgaagatccagccgatg

SEQ ID NO: 26178 - DNA, 65 bp, Mus musculus
tgagaagatccagagtgctgtggcaactctccgggaagaagtggagaactttgcttccaacttct

SEQ ID NO: 26179 - DNA, 65 bp, Mus musculus
tctggctgctgcagtgaagggctatcgctgcattatcgtgatgccggagaagatgagtatggaga

SEQ ID NO: 26180 - DNA, 65 bp, Mus musculus
aggcgtcgctctcttggtgtgcttgttcttgacccggtcaatgatttcaggtactttgttgatgg

SEQ ID NO: 26181 - DNA, 65 bp, Mus musculus
gcccttcctctaagagtcctcaagattcattcacctttagaatggattatgtggcaactgagcct

SEQ ID NO: 26182 - DNA, 65 bp, Mus musculus
actacaaactgcttcgggagaatctcaagtcagccaagatccaggtgaaagagagcatggacgtc

SEQ ID NO: 26183 - DNA, 65 bp, Mus musculus
ggctcctggtatgaccatgtaaagggatggtgggatgtgaaagacaaacaccgtattctgtacct

SEQ ID NO: 26184 - DNA, 65 bp, Mus musculus
caagaagatagccagctttctagacaagaccttggatgaagaggccttggacaggatcgtccatc

SEQ ID NO: 26185 - DNA, 65 bp, Mus musculus
aagtctttggccttccctctgaccaggaacccactcttctgtgcatgtatgtgagctgtgcagaa

SEQ ID NO: 26186 - DNA, 65 bp, Mus musculus
aaaggcagccactcctcatggacaaagacgactaccacagcttgctgtatcagagccatctgtga

SEQ ID NO: 26187 - DNA, 65 bp, Mus musculus
gctctcattttgctttcagcgtattatttggcctcaggtgcaaggccaccacaaagtcacagtcc

SEQ ID NO: 26188 - DNA, 65 bp, Mus musculus
acagcgccagcttcttcaagttcctcaccgaggagctgtccctggaccaggaccggatcgttatc

SEQ ID NO: 26189 - DNA, 65 bp, Mus musculus
cagctggttctacaccaagtgctgaaaggtggctcagggacatattgcctcaatgtgtctttggc

SEQ ID NO: 26190 - DNA, 65 bp, Mus musculus
tcttcaatacagaaggcttcgcaaaggctatgcgcccttaatggagacaggtctcagcagcaaga

SEQ ID NO: 26191 - DNA, 65 bp, Mus musculus
agctcatacccagctatgcttgcagacatgctgtgtggtgctattggctgcattggtttctcctg

SEQ ID NO: 26192 - DNA, 65 bp, Mus musculus
aggctgtgagcccagatcttactagcttccagcgggctttgcatcacatcaccacactgctgagg

SEQ ID NO: 26193 - DNA, 65 bp, Mus musculus
gtcacagtcacaagggaaaacccaaggttctctattttcagcaccaacatccatcccctttgctc

SEQ ID NO: 26194 - DNA, 65 bp, Mus musculus
tacatgattggggagcagaagttttccagccttcccctgggatgggagactgttcgagatgctgt

SEQ ID NO: 26195 - DNA, 65 bp, Mus musculus
gtatctgagagctttgaagatgcaaaggagaagatgagagaatttgccaagaccgtgaagcgccc

SEQ ID NO: 26196 - DNA, 65 bp, Mus musculus
gtggatgtctgtggaggcaaaccagccattggtggttctagctccttattgccaaagtgtcaatc

SEQ ID NO: 26197 - DNA, 65 bp, Mus musculus
cgtgactcctgaagatgacgtcaaaagctcaatccatgtgtccaattttgccacttatagaccca

SEQ ID NO: 26198 - DNA, 65 bp, Mus musculus
acaggcattaacgcttccttagatctgaagtcgcaggttaagcttgtctggtctacattccagtg

SEQ ID NO: 26199 - DNA, 65 bp, Mus musculus
atggaaaacctcacatcgtccacttccagtatgaggtcaccgaggtgaaggtctcttcctgggat

SEQ ID NO: 26200 - DNA, 65 bp, Mus musculus
tgtggaggagaaaaccaatgtggactctgtgtttgtgaacttccaaatcgatcggaaggacagag

SEQ ID NO: 26201 - DNA, 65 bp, Mus musculus
taacgacaagaccagggtcctgagcatccagtccacgctcacggaggccaagcaggtcacctgga

SEQ ID NO: 26202 - DNA, 65 bp, Mus musculus
ccacagaacgagtgcgaacagaaaagaacgatacgatgactgggagcgcacactcgagataacat

SEQ ID NO: 26203 - DNA, 65 bp, Mus musculus
tcagtcaacatgcccttcatggacttcctgacgaaagatggcttcgagaagagcccagaggagct

SEQ ID NO: 26204 - DNA, 65 bp, Mus musculus
agtgacaggcgtggctgctaccaaccagctgcacaagtgcatttttcctctgtttgctgctttca

SEQ ID NO: 26205 - DNA, 65 bp, Mus musculus
ttgccggaagtaagacacaaggatacacaggtggccatgggaccctttgacccctcttgtctgct

SEQ ID NO: 26206 - DNA, 65 bp, Mus musculus
tactgtgaacagagaggagctactgaaacaagctgagtctgtgatgcaggaccttggcagctctc

SEQ ID NO: 26207 - DNA, 65 bp, Mus musculus
agagcaggagctgtccagcgctgagaaacacgaaaggtgaccatggctaaggagtggggctacgc

SEQ ID NO: 26208 - DNA, 65 bp, Mus musculus
tgtcagcacgcttcagtggcaacctgctggttagcctgctgggcacctggtcggatacatcatct

SEQ ID NO: 26209 - DNA, 65 bp, Mus musculus
gcatgtgttcttcacagactcgtgtccagatgccctatttaacgagctggtaaaatcccgagcag

SEQ ID NO: 26210 - DNA, 65 bp, Mus musculus
tcagcgagtctctgattaacccagagggagttctcctccgagagaagaagtggagctacgttagc

SEQ ID NO: 26211 - DNA, 65 bp, Mus musculus
ctgttcatcgctgctgtgtttatgctgaacattaggggcaagtacgagggatatcggccgtttca

SEQ ID NO: 26212 - DNA, 65 bp, Mus musculus; identical to SEQ ID NO: 23716

SEQ ID NO: 26213 - DNA, 65 bp, Mus musculus
agctggtgggagttggcttcactgtgttgggcgctgggcccctagtttctggagctgggaagttg

SEQ ID NO: 26214 - DNA, 65 bp, Mus musculus
gcaatttatttgctgagtcccacggagaagtcggttcaggccctgattgcggacttccagggaac

SEQ ID NO: 26215 - DNA, 65 bp, Mus musculus
tgcccagcagtgtggaatggctctggagctgtgagtgctcgccagaaacccagaactaactactt

SEQ ID NO: 26216 - DNA, 65 bp, Mus musculus
ggttcactggaacaccaaatatggggactttggaaaagctgtgcagcaaccggatggattggctg

SEQ ID NO: 26217 - DNA, 65 bp, Mus musculus
tgcccagtatctccaaaccccattcaacctctacagtgagggagagcagtttgcaggacatgctt

SEQ ID NO: 26218 - DNA, 65 bp, Mus musculus
gttcccagaatccttcggcttcatcacctatcagggatctctcagcactcctccgtgctctgaga

SEQ ID NO: 26219 - DNA, 65 bp, Mus musculus
acatggatcaggtaatgcagtttgtggagcccagccggcagtttgtaaaggactcaattcggctg

SEQ ID NO: 26220 - DNA, 65 bp, Mus musculus
tttcatccaagcaggaccactgtataccacaggagagatgctgggtctaggtgtgggaatcttgg

SEQ ID NO: 26221 - DNA, 65 bp, Mus musculus
tgatgaaggttggtccagccaacccaagcctgcagaaagtacttgatgctctaaactcagttaaa

SEQ ID NO: 26222 - DNA, 65 bp, Mus musculus
tttcagtagccagagagaccgggaacaaacccatctgcatcagtgaagaagacagtggtcccacg

SEQ ID NO: 26223 - DNA, 65 bp, Mus musculus
gctacggtgaactgctgcaaggagtcactcaatactgctgaaaaagcgatgtatgtcgccctagg

SEQ ID NO: 26224 - DNA, 65 bp, Mus musculus
gaggcagatggagaaattccggagcctgcttttcacctcagaggatgatgagaggatccatatgg

SEQ ID NO: 26225 - DNA, 65 bp, Mus musculus
agtactagcagacttccttggggccattggctctggtactggaattctgcttgcagtcactatta

SEQ ID NO: 26226 - DNA, 65 bp, Mus musculus
attaagaagcagccagttgaggttgaccgtgaccagcttgagcagtttcggaccctgcttttcac

SEQ ID NO: 26227 - DNA, 65 bp, Mus musculus
tcactgggctgctgttgtgagcatcctagccagatccttaggcttatagccgtcatgaatgcatt

SEQ ID NO: 26228 - DNA, 65 bp, Mus musculus
tgtgatgataaaaagatcgaccaatgggagctttcctatgacctttcaattggctctgaagttcc

SEQ ID NO: 26229 - DNA, 65 bp, Mus musculus
tcaaacatcactgctggcaacagggctcaaatacaggctgtcatagatgcaaacatcttccctgt

SEQ ID NO: 26230 - DNA, 65 bp, Mus musculus
tctatatcacccctggcatctgcccaagccttgcaactatgaaggcaattgtagagtgtgcaggg

SEQ ID NO: 26231 - DNA, 65 bp, Mus musculus
tcccagtgaagagttctgccctcctccaccaaaccctgaagacatcatctttgaagctgagggtt

SEQ ID NO: 26232 - DNA, 65 bp, Mus musculus
ggttggtctctcggtcagctgggtgaataggtgactgatgatgtcagtattgcagatggctcttc

SEQ ID NO: 26233 - DNA, 65 bp, Mus musculus
ggtaacactaatgctgaacaggagcatctctgagttaacgctatatgtatacgttagtctatgaa

SEQ ID NO: 26234 - DNA, 65 bp, Mus musculus
gagtcagttcaaggtggaacatttggtttcaattcatcgaccaatgtaccaacagaggggttcca

SEQ ID NO: 26235 - DNA, 65 bp, Mus musculus
cggggcggaagaaaacctgggaaatctcaggcaagccggagctgcactggagctgccacggttct

SEQ ID NO: 26236 - DNA, 65 bp, Mus musculus
actgcacacacgtacatgcacaccgcacacagacatgatctgggacatgttggaatcaagtgctc

SEQ ID NO: 26237 - DNA, 65 bp, Mus musculus
ctggtgccgtgcaatccaagcgaagaaaatccaagtaagcgagctggaagatgacttgatacttg

SEQ ID NO: 26238 - DNA, 65 bp, Mus musculus
gaaccagaaaaggaagttgagcctgcattggagctgttggaacccattgaccagaagtttgtggc

SEQ ID NO: 26239 - DNA, 65 bp, Mus musculus
gccagctttgtgtgtgctcatctaccatacggacataaatattcttgtagacactgtttgggcgc

SEQ ID NO: 26240 - DNA, 65 bp, Mus musculus
ccaagctggacagaggtgctgcttcgagatttgtcaagaacgcactctgggaacccaaagcaaaa

SEQ ID NO: 26241 - DNA, 65 bp, Mus musculus
ttgtggatgtggcttcagaactcctgcgcatctgcagcctgatcctgccggacaaccggatccct

SEQ ID NO: 26242 - DNA, 65 bp, Mus musculus
taaaccacagcaggagctctacagggggagaatagacactgggaattgggagaaatctgggggac

SEQ ID NO: 26243 - DNA, 65 bp, Mus musculus
gccctgctgaagcaacacaggtttccaacctcttgaacttgtcacaaactcttacagaggacaga

SEQ ID NO: 26244 - DNA, 65 bp, Mus musculus
aggcaacaaacagcgggacttcaaccagaacttcatcttgactgctcaggcgtcacccagtaaca

SEQ ID NO: 26245 - DNA, 65 bp, Mus musculus
tcacctcactgcttcaggtcccttcccctgagtaggcccagacctcccagggtatctttcccctt

SEQ ID NO: 26246 - DNA, 65 bp, Mus musculus
gaccccacgaattacgctgggaataaaattcgggctgtggacaccattgtgggaattgtcgattt

SEQ ID NO: 26247 - DNA, 65 bp, Mus musculus
gagagcgcatctcttcatgcaataggagacgccagccttctcatttctctcttagtagctttggc

SEQ ID NO: 26248 - DNA, 65 bp, Mus musculus
gagtggtcaactcacaggtcccagacaggggctggatggcactgaaactagtggccctcatctac

SEQ ID NO: 26249 - DNA, 65 bp, Mus musculus
tgtcagcagtggttccgaggtcacacaatgctgccagactgacctatgcaacgagaggctggtca

SEQ ID NO: 26250 - DNA, 65 bp, Mus musculus
ggtgcatagagagtagacagtttggagatggaaaggttagcagtgacttagccatatgttctgtg

SEQ ID NO: 26251 - DNA, 65 bp, Mus musculus
accttcagctcctcctgggtgtgtctagttccccctccacactctctcaacgtcagggctaagta

SEQ ID NO: 26252 - DNA, 65 bp, Mus musculus
gctcctgaacttccacttgcttgttaatgatgccgtgttgcaggctcacctcaatgggcagaaat

SEQ ID NO: 26253 - DNA, 65 bp, Mus musculus
cccttccctctggaacactgggccccatagtcacggccagtcctcaagcccaaccctccctgggg

SEQ ID NO: 26254 - DNA, 65 bp, Mus musculus
caatgcctgctgcacacgttccacaagttgggaagcccaccttgaggagcccttgctctttaact

SEQ ID NO: 26255 - DNA, 65 bp, Mus musculus
tcttgttccttgtgctgagcgcccttccagagaatccaggtctccagcaacttacccgatgttga

SEQ ID NO: 26256 - DNA, 65 bp, Mus musculus
aaagcctgcaatgccgctatcctacagagcactgtattgaagtggtgaccctccagagcacagaa

SEQ ID NO: 26257 - DNA, 65 bp, Mus musculus
tgcagactgatggccatgatagactcagtgggacccatgacagtgaaggagacctgtagttacca

SEQ ID NO: 26258 - DNA, 65 bp, Mus musculus
cagctgttagcctcacatgctaccactgtttccaaccggtggtttcttcatgcaatatgaacagc

SEQ ID NO: 26259 - DNA, 65 bp, Mus musculus
aggctatgtcggtacaggggaaagacccaacgtcaccgccgctgaaagcagtggctcatcgtacc

SEQ ID NO: 26260 - DNA, 65 bp, Mus musculus
tgctgctgctgcaatctcagtgagggtgtacgcttgccctggcttatggattggaatgggactaa

SEQ ID NO: 26261 - DNA, 65 bp, Mus musculus
agcctgcctggtgaaccaaaaccttcgcctggactgccgccatgagaataacaccaaggataact

SEQ ID NO: 26262 - DNA, 65 bp, Mus musculus
acaacaggctggataggaaccctagcccagatgagctgccccaagtggggaacctgtcacttaaa

SEQ ID NO: 26263 - DNA, 65 bp, Mus musculus
ctcgtgttctgcgtggctagcagtgtaggtacagaactgtagttagttgtgcattggtgatcttg

SEQ ID NO: 26264 - DNA, 65 bp, Mus musculus
tctttctgccctgctggtgtgccaatcagggatcctaacatcagggagaggacttcctgttgcag

SEQ ID NO: 26265 - DNA, 65 bp, Mus musculus
ttaacatccagaactccatgtcacccaaacttgagggtggcaaaggtgaccaggatgacttgggg

SEQ ID NO: 26266 - DNA, 65 bp, Mus musculus
agctctctgattgagtctgtaatcccctccaaggagtgacagtgacttcatctgggaatacggag

SEQ ID NO: 26267 - DNA, 65 bp, Mus musculus
aaggggctcagaagcaacactggtggaaagctgaaactgtcagggagaagcctctactacagtgt

SEQ ID NO: 26268 - DNA, 65 bp, Mus musculus
agctgtgtatccctgttccttgtggttctcctcggtcttctggtccagcagcttactcttgctga

SEQ ID NO: 26269 - DNA, 65 bp, Mus musculus
acaaacaggatccttgggacaagccactacggccgcttctggtactaacaaaaacagcacctcca

SEQ ID NO: 26270 - DNA, 65 bp, Mus musculus
ctggataccttagttgtcagtgttgtactggtcaggatgtgggacactcttccactgtgctactc

SEQ ID NO: 26271 - DNA, 65 bp, Mus musculus
aagggaacaagccacagggatgaggtgaagccatctctgtccttcctggaataccggagatccag

SEQ ID NO: 26272 - DNA, 65 bp, Mus musculus
tcccacagttgaaagcacctttgtactttgttgcttccttgtgaagcagagacagtgtcaagagc

SEQ ID NO: 26273 - DNA, 65 bp, Mus musculus
ttttgtgtggcttgctaatcttggccctggaggctcgtggctagcaagagggtagaggcagaatt

SEQ ID NO: 26274 - DNA, 65 bp, Mus musculus
tacatgtccaccttgctgtgcctgttggcagggaaaatgttgatgctgatggcggcggctgaacc

SEQ ID NO: 26275 - DNA, 65 bp, Mus musculus
tcctgttaacctgacaagaactcttctcacccaagaaggcaacttggaagcacagagtcttgcct

SEQ ID NO: 26276 - DNA, 65 bp, Mus musculus
tctacatgcctggatctatgagcagagctcactgagcctcaggtcactcactgtccaccaagctt

SEQ ID NO: 26277 - DNA, 65 bp, Mus musculus
ccttgctcttacttgtggatcaggagaggttttcttagcccttctaagtgttcccaacccgtgcg

SEQ ID NO: 26278 - DNA, 65 bp, Mus musculus
agggttgagggaaccccacagtgtggtgggaacttcctaggacatgcaaggtaaagactggatgg

SEQ ID NO: 26279 - DNA, 65 bp, Mus musculus
gacaccaaggatacccagccgccttttggcaatcctactgttcctcctggcgatgcttttgacat

SEQ ID NO: 26280 - DNA, 65 bp, Mus musculus
aggtacgtgctgtacatggtgaacctgagcggctaccagccctgcaacgcgagccaaggctccaa

SEQ ID NO: 26281 - DNA, 65 bp, Mus musculus
catttcctacctgtaccggttcaactggaaccactgcggaactatgacatcggaatgcaaacggc

SEQ ID NO: 26282 - DNA, 65 bp, Mus musculus
acaagtgcccaaacacagcaccctgtcacacgtttgagtactacttcccgacaccagccagcctt

SEQ ID NO: 26283 - DNA, 65 bp, Mus musculus
ttaccaactgccagccagagtcaaggtctgtcagcaactgtcttaaggagaactacgcagactgc

SEQ ID NO: 26284 - DNA, 65 bp, Mus musculus
cacaaaggctgggaagttccaagtgaggacatgagaagaggccaaacttgctcaagatcagtttg

SEQ ID NO: 26285 - DNA, 65 bp, Mus musculus
ttgaatctactttgccctgtgtttgggatttctaggcccgtcaggagggaccttgagggaaacgg

SEQ ID NO: 26286 - DNA, 65 bp, Mus musculus
tttggacttcctgttgttcttgctcgtgtggatgtgatcaagtggggagcctgtggtcttgtgct

SEQ ID NO: 26287 - DNA, 65 bp, Mus musculus
tctctgaggacccacctgaagacagcctaaagatcatagagagcaccctagacagcctggacctg

SEQ ID NO: 26288 - DNA, 65 bp, Mus musculus
tagcagttgcgactccaccactttctgtcccactcaaatgcacaaaatccactttagagaagtgg

SEQ ID NO: 26289 - DNA, 65 bp, Mus musculus
tcctcgccgtttggagactaccgacagtatcagtaggacttggttcccaggattcctggaaccgg

SEQ ID NO: 26290 - DNA, 65 bp, Mus musculus
ttggccgatcttctgcttgtcagtggggtggcgactgccacaaccctggcttggcaccgagtgag

SEQ ID NO: 26291 - DNA, 65 bp, Mus musculus
cgggttactcgaacgctgatttggccggcgtcccgctgactggtatgaaccccctgtctccttat

SEQ ID NO: 26292 - DNA, 65 bp, Mus musculus
atccgacccatcttgaaagctcacttccggagagacgagtttctgggacggatcaatgagatcgt

SEQ ID NO: 26293 - DNA, 65 bp, Mus musculus
cctcattgagggtgttggcatccttctcacccgctatactgcccagcagttccgaaatgcacccc

SEQ ID NO: 26294 - DNA, 65 bp, Mus musculus
tctaagatcccagatgaagaggccaccaagcctgaaggctggctagacgacgaacctgagtatat

SEQ ID NO: 26295 - DNA, 65 bp, Mus musculus
ttgagacactgcacctaacccagaatgtggcaaagacagagacaacttggagttgagtgaacccc

SEQ ID NO: 26296 - DNA, 65 bp, Mus musculus
ataagtacttgaagccccttagaggctctgtgtgcctgcagtgaggcttgtcataagctctggcg

SEQ ID NO: 26297 - DNA, 65 bp, Mus musculus
tctgaatgagcccatcttgtggattgtgtcctatgccctgatgagtgtgtgtggagccattctcc

SEQ ID NO: 26298 - DNA, 65 bp, Mus musculus
ctgaaagtggagacagacaagtacatcctttgctcctgaccaaacgagagcatggacccaaggat

SEQ ID NO: 26299 - DNA, 65 bp, Mus musculus
gatggaatgctgtgacgtgccagctgagacgctctacgatgtcctgcatgacatagaatacagaa

SEQ ID NO: 26300 - DNA, 65 bp, Mus musculus
tgcagtggccattaagacataccaccaaaagaagaacaagatccatactttggaggacttccagc

SEQ ID NO: 26301 - DNA, 65 bp, Mus musculus
gctgtggtttctatgacagtcagcgcctctgatgctgcgacagttgctgacaagatcctgtggga

SEQ ID NO: 26302 - DNA, 65 bp, Mus musculus
tggcctggtagaggagatgtatgccgcttatgggaagcctgtcttcctcattgggcatagccttg

SEQ ID NO: 26303 - DNA, 65 bp, Mus musculus
caggaccccatagcagcaaactgtgattcagccttctgcattttgccatgtatggtggcatctaa

SEQ ID NO: 26304 - DNA, 65 bp, Mus musculus
ataaagatggtaaaccgtgggtaatgcgcgtgcgttcgcaaggggagatggattcactcgtgcgt

SEQ ID NO: 26305 - DNA, 65 bp, Mus musculus
acaagacagggaccttcaagttccagaagacagagttgcggaaggagggctttgacccatctgtt

SEQ ID NO: 26306 - DNA, 65 bp, Mus musculus
ccccatttgctgttgacctgaccatggaactctaccagcaccaagaatctaaggagtggtttgtg

SEQ ID NO: 26307 - DNA, 65 bp, Mus musculus
caacttatcccagtgtcattgactccaggacacaaggtagacattcagcgtggtgtatttgaatc

SEQ ID NO: 26308 - DNA, 65 bp, Mus musculus; identical to SEQ ID NO: 23716

SEQ ID NO: 26309 - DNA, 65 bp, Mus musculus
tgagcactggctttgtccaacatcagggaacacaaggctctgaagtggccctgtgtggaaggttg

SEQ ID NO: 26310 - DNA, 65 bp, Mus musculus
gtacagaatgttgttgtttctggattattgtccccggatgggctggcatgtgattggcttggaga

SEQ ID NO: 26311 - DNA, 65 bp, Mus musculus
aggatgcactgttaaacttcaccagcaaccaaactgcctcagtattgcttacagggactacctgc

SEQ ID NO: 26312 - DNA, 65 bp, Mus musculus
aaaactccagctcagtttgatgcagatgaactccgtggtgccatgaagggacttggaacagatga

SEQ ID NO: 26313 - DNA, 65 bp, Mus musculus
gtattgtgtgcagtacctggaggatgtaggttcttttgcatacactcgacacactcttagagagc

SEQ ID NO: 26314 - DNA, 65 bp, Mus musculus
cctcatgaaaagcggtgtaagactgaatgtcatttgcccaggctttgtggacacacccatccttg

SEQ ID NO: 26315 - DNA, 65 bp, Mus musculus
agatttcatctggagccctattgctctttaccaaacagaggagcatgacattgtggagttgtcat

SEQ ID NO: 26316 - DNA, 65 bp, Mus musculus
cagaagggccagctgacgagttccccatcatcctgaggatccaaccccacctcaagtttctcctg

SEQ ID NO: 26317 - DNA, 65 bp, Mus musculus
gctgccaggaagtctacgtcatggtgctagagaatgctaaccacaacttctacagctacatcctg

SEQ ID NO: 26318 - DNA, 65 bp, Mus musculus
tctttcaacatgatgtccccaacgggtgataactcagagcttctggctgagataaaggcgggcaa

SEQ ID NO: 26319 - DNA, 65 bp, Mus musculus
ttgccaaagggcttcgagaagtgattgacaagaaccgtcctgcagacgttgcggcctcccatgtc

SEQ ID NO: 26320 - DNA, 65 bp, Mus musculus
tttgtgttggatgttctcgtgaccacagggtagcccagagttgctcctctggtttcctgtcgtac

SEQ ID NO: 26321 - DNA, 65 bp, Mus musculus
cacgcatgcacacatgcacactgtgagctaggatgcctgactccacaaggtagtaacagtcatat

SEQ ID NO: 26322 - DNA, 65 bp, Mus musculus
agccctggtgagtggtcttagaacagtcctgcctgatacttctgtaagccctacccacaaaagta

SEQ ID NO: 26323 - DNA, 65 bp, Mus musculus
tgaacgtacgcatgtgtggctcatgtaagtgccggtgtccatcactacagaggcatcagtgtgct

SEQ ID NO: 26324 - DNA, 65 bp, Mus musculus
cggcgttgtctacactgcagacttatttgctacgcaggaccctcagattgaaaagactttcgaag

SEQ ID NO: 26325 - DNA, 65 bp, Mus musculus
gcccaaagctatggatgagtcagtggcaagaaaactgtgggatatcagtgaagtgatggttggca

SEQ ID NO: 26326 - DNA, 65 bp, Mus musculus
aacagcccttcaagagtgaggtactgggatgatagtctgagacaggagcatcgagagttcgagta

SEQ ID NO: 26327 - DNA, 65 bp, Mus musculus
ctcacttgttgcaaactagcactcccggcactgtgacatagtgcctaataaaggtgtgctgagaa

SEQ ID NO: 26328 - DNA, 65 bp, Mus musculus
ctcacagagacaccaaatgtgatgtctgaccaagtgtctgggacctttgtgacgggtcaaagtga

SEQ ID NO: 26329 - DNA, 65 bp, Mus musculus
ggaattctacctcttcaaaacaggaactcagaaccctgcgtttgatcctcgatgttagtaggaaa

SEQ ID NO: 26330 - DNA, 65 bp, Mus musculus
tcgccagctcttttgttggattgacaagtggattgacctgacaatggaagacattaggcgaatgg

SEQ ID NO: 26331 - DNA, 65 bp, Mus musculus
tggccataacttcagtgtctcctaactgggtgtgctttatagctccagcttcctgggaggagcag

SEQ ID NO: 26332 - DNA, 65 bp, Mus musculus
tctccagcctaagggcacacagccatcttattgctccccaaatacggttgggcatcctacacact

SEQ ID NO: 26333 - DNA, 65 bp, Mus musculus
tgtggtgagcctcctacctgctcccctgatcagtttgcatgtaccactggtgagatcgactgcat

SEQ ID NO: 26334 - DNA, 65 bp, Mus musculus
ttgttttaggaccattgagcatatttgtgtgtacctgtatggtacatgtgtgggagagccttcag

SEQ ID NO: 26335 - DNA, 65 bp, Mus musculus
aaaacatggccgatctccagctcagatcttgcttagatggcaggttcagcggaaagtgatctgca

SEQ ID NO: 26336 - DNA, 65 bp, Mus musculus
ctctactgggccgtattctctgaatatgtgaagaccatgctgcggtgtggttatgctcctgttga

SEQ ID NO: 26337 - DNA, 65 bp, Mus musculus
gatcaactgtgtcgctcctgggaccatttactcccagactgctgttgacaactatggcgaaatgg

SEQ ID NO: 26338 - DNA, 65 bp, Mus musculus
ttgtggtagctggaggcatggagaatatgagcaaggctcctcacttgactcacctgagaacagga

SEQ ID NO: 26339 - DNA, 65 bp, Mus musculus
atctgcatgtttgacccaaaacagtatcccaatcatctgggtgctggaggtggctttggtcccgt

SEQ ID NO: 26340 - DNA, 65 bp, Mus musculus
tcatagtcatcatggactcctacggcagtgatctggtggaacgaggcaagaagtgtggggtggaa

SEQ ID NO: 26341 - DNA, 65 bp, Mus musculus
tggcagccttcctgacccttttggagaggaaatgaggggaattgcagatgttactgggattcctc

SEQ ID NO: 26342 - DNA, 65 bp, Mus musculus
ttgaaaaatgaggtagatgccgacgtcatcaacgcaggcaagcagacagtgacggtggttcccgg

SEQ ID NO: 26343 - DNA, 65 bp, Mus musculus
gctcggatggctattctgcagtatgtgactgagtccatggcttacatgctgagtgccaacatgga

SEQ ID NO: 26344 - DNA, 65 bp, Mus musculus
cttttatggtggaaagtgagacactgatttgagattcaggacatttctttctggaagacattcag

SEQ ID NO: 26345 - DNA, 65 bp, Mus musculus
ataggctgcaatgtctcctcctactcaggacgcaatgcccgagagtttctccactgtgtccagaa

SEQ ID NO: 26346 - DNA, 65 bp, Mus musculus
ctggccaatctcttgtcatctccacagccaggccaaaatctgtcttcattggtaaatgcccaagg

SEQ ID NO: 26347 - DNA, 65 bp, Mus musculus
tgtggctgagactctacacgtccaacatgatcttagtgtctgccatcaatggagcctctccagct

SEQ ID NO: 26348 - DNA, 65 bp, Mus musculus
tgtatgaacacctttaaggggaggacatagaggcaggaggaagacacacctgaggagctatggag

SEQ ID NO: 26349 - DNA, 65 bp, Mus musculus
ttccaagataaggacgccatgctgaatgcagcctttgccctggcggctgatatttccagcaagag

SEQ ID NO: 26350 - DNA, 65 bp, Mus musculus
cgtggattacttgacaaagagacactgtgcagagggtgaccacagactgtaactccccacttcta

SEQ ID NO: 26351 - DNA, 65 bp, Mus musculus
ctgccggtcagttgctgagatcagtccagacctgattcagttctccagattataaggacctactg

SEQ ID NO: 26352 - DNA, 65 bp, Mus musculus
accaatggtgacaaaatcggctgttttgccctcagtgagccaggcaatggcagtgatgctggagc

SEQ ID NO: 26353 - DNA, 65 bp, Mus musculus
ttctacgagatgccaaactgtatgagatcggagctgggaccagtgaagtgaggcggttggtcatt

SEQ ID NO: 26354 - DNA, 65 bp, Mus musculus
ctacagtgggacattccaggagaatgccaggaggtcatagagacatccctaagcagtgccagttt

SEQ ID NO: 26355 - DNA, 65 bp, Mus musculus
gaagaagtgattcctcaccacacagaatgggagaaagctggagaagtgagtagagaggtctggga

SEQ ID NO: 26356 - DNA, 65 bp, Mus musculus
gtgttcatctaaatctaccctgcatagtctctttctacctgattaatcctcacacgagtttctcc

SEQ ID NO: 26357 - DNA, 65 bp, Mus musculus
acctcatctgtgtgtaaagggactccctaggccacgcccccgaggtctgcagactttgacccgca

SEQ ID NO: 26358 - DNA, 65 bp, Mus musculus
aattctcacgatcacaactccagcccaccagattgtgaaggcaactacaggttgtctcttggtgg

SEQ ID NO: 26359 - DNA, 65 bp, Mus musculus
gggaaagtagaagctgcactgaagaattgtccactgatcgacaacatctgtgcttttgccaaaag

SEQ ID NO: 26360 - DNA, 65 bp, Mus musculus
acatcaaagcttccgagcagatcctcagcctggtagcccagttccagaacaacagcaaactctag

SEQ ID NO: 26361 - DNA, 65 bp, Mus musculus
gacagtaagaagcagagttttgtgggcatgctgaccatcaccgacttcatcaacattttgcaccg

SEQ ID NO: 26362 - DNA, 65 bp, Mus musculus
caagaccagtatggtggaccactaaatgttaccaatctggtttctacttcttgatcattgaacat

SEQ ID NO: 26363 - DNA, 65 bp, Mus musculus
tccacctgagacagaccctactgaacacacagaacacaaatgaatgggaggctctgccagtctca

SEQ ID NO: 26364 - DNA, 65 bp, Mus musculus
atccgggtaaactccgtaaaccccactgtggtgctgactgacatgggcaagaaagtctctgcaga

SEQ ID NO: 26365 - DNA, 65 bp, Mus musculus
tgcaagctctacactgccctcttcgggattttctactacatgaccagcgctctgggcatcacagc

SEQ ID NO: 26366 - DNA, 65 bp, Mus musculus
tgaactatgcagaaagcgggacggctgttaggtggttggactcaagcgtggatgtcggtgaggat

SEQ ID NO: 26367 - DNA, 65 bp, Mus musculus
ccgacctgacctaatcagctcttactggacccagctgtcaacactgttgcattggggatttaagt

SEQ ID NO: 26368 - DNA, 65 bp, Mus musculus
tcatctcccctcacatcaagtgggaccacagtcagacttgggatgtcccggttgctgaggacttc

SEQ ID NO: 26369 - DNA, 65 bp, Mus musculus
gcccatgacccagaaaatgccagagaaagtgaaggacaaggtaactgcaatgattccgttgggac

SEQ ID NO: 26370 - DNA, 65 bp, Mus musculus
aaggaagactggggtttccagaagtgtaagccatgtgcggactgtgcgctggtgaaccgctttca

SEQ ID NO: 26371 - DNA, 65 bp, Mus musculus
ttagaccactgatgcaaagctggaaacccaagctgtgaaaagccaaaggattcaggaccaagcag

SEQ ID NO: 26372 - DNA, 65 bp, Mus musculus
acaacctgcacaagattgccccactggtgaagtctctctgcgccaagcatggcattgaataccag

SEQ ID NO: 26373 - DNA, 65 bp, Mus musculus
ccctggtggtttagctcatgacatttccagaaagaaactcgatagacctcgcagagccacttcat

SEQ ID NO: 26374 - DNA, 65 bp, Mus musculus
aggctctgaacctggtgcagctctacagccatgtttctgagaacttgccaccgtatgcccgacct

(The sequence listing continues in the following parts.)
